United States Patent Application Publication US 2021/0254056 A1 - sequence listing, part 13

SEQ ID NO: 26568 - protein, 1288 aa, Homo sapiens
  MOD_RES (14)..(14): Selenocysteine
  MOD_RES (37)..(37): Selenocysteine
  MOD_RES (39)..(39): Selenocysteine
  MOD_RES (58)..(58): Selenocysteine
  MOD_RES (61)..(61): Selenocysteine
  MOD_RES (85)..(85): Selenocysteine
  MOD_RES (94)..(94): Selenocysteine
  MOD_RES (96)..(96): Selenocysteine
  MOD_RES (113)..(113): Selenocysteine
  MOD_RES (115)..(115): Selenocysteine
  MOD_RES (130)..(130): Selenocysteine
  MOD_RES (176)..(176): Selenocysteine
  MOD_RES (194)..(194): Selenocysteine
  MOD_RES (202)..(202): Selenocysteine
  MOD_RES (212)..(212): Selenocysteine
  MOD_RES (230)..(230): Selenocysteine
  MOD_RES (237)..(237): Selenocysteine
  MOD_RES (241)..(241): Selenocysteine
  MOD_RES (268)..(268): Selenocysteine
  MOD_RES (307)..(307): Selenocysteine
  MOD_RES (332)..(332): Selenocysteine
  MOD_RES (336)..(336): Selenocysteine
  MOD_RES (364)..(364): Selenocysteine
  MOD_RES (443)..(443): Selenocysteine
  MOD_RES (518)..(518): Selenocysteine
  MOD_RES (540)..(540): Selenocysteine
  MOD_RES (557)..(557): Selenocysteine
  MOD_RES (591)..(591): Selenocysteine
  MOD_RES (600)..(600): Selenocysteine
  MOD_RES (625)..(625): Selenocysteine
  MOD_RES (701)..(701): Selenocysteine
  MOD_RES (706)..(706): Selenocysteine
  MOD_RES (709)..(709): Selenocysteine
  MOD_RES (727)..(727): Selenocysteine
  MOD_RES (756)..(757): Selenocysteine
  MOD_RES (762)..(762): Selenocysteine
  MOD_RES (794)..(794): Selenocysteine
  MOD_RES (818)..(818): Selenocysteine
  MOD_RES (836)..(836): Selenocysteine
  MOD_RES (903)..(903): Selenocysteine
  MOD_RES (906)..(906): Selenocysteine
  MOD_RES (915)..(915): Selenocysteine
  MOD_RES (957)..(957): Selenocysteine
  MOD_RES (962)..(962): Selenocysteine
  MOD_RES (972)..(972): Selenocysteine
  MOD_RES (974)..(974): Selenocysteine
  MOD_RES (980)..(980): Selenocysteine
  MOD_RES (984)..(984): Selenocysteine
  MOD_RES (999)..(999): Selenocysteine
  MOD_RES (1014)..(1014): Selenocysteine
  MOD_RES (1084)..(1084): Selenocysteine
  MOD_RES (1101)..(1101): Selenocysteine
  MOD_RES (1105)..(1105): Selenocysteine
  MOD_RES (1120)..(1120): Selenocysteine
  MOD_RES (1189)..(1189): Selenocysteine
  MOD_RES (1193)..(1193): Selenocysteine
  MOD_RES (1200)..(1200): Selenocysteine
  MOD_RES (1206)..(1206): Selenocysteine
  MOD_RES (1213)..(1213): Selenocysteine
  MOD_RES (1233)..(1233): Selenocysteine
  MOD_RES (1239)..(1239): Selenocysteine
  MOD_RES (1251)..(1251): Selenocysteine
  MOD_RES (1262)..(1262): Selenocysteine
  MOD_RES (1274)..(1274): Selenocysteine
MEPIYPFARPQMNXRFPSSRMVPFHFPPSKCALWNPXPXGDFIYLHLSYYRNPKLVVXEKXIRLAYRHAKQNKKNSSCFLLGSLXADEDEEGVXLXVDRFDPGREVPECLEIXPXASLPGDFLIPCKVHXQELCSREMIVHSVDDFSSALKALQCHICSKDSLDCGKLLSLRVHIXSRESLDSVEFDLHWAAVXLANNFKCXPVKPIPIIPXALARNLSSNLNISQVQGXYKYGYLXMDEXRKLLLLLESDPKVYSLPLVGIWLSGIXHIYSPQVWACCLRYIFNSSVQERVFSESGNFIIVLYSMXHKEPEFYECFPCDGKIPDFRFQLLXSKEXLHLFKNVEPPDKNPIRCELSAESQNAEXEFFSKASKNFSIKRSSQKLSSGKMPIHDHDSGVEDEDFSPRPIPSPHPVSQKISKIQPSVPELSLVLDGNFIESNPLPXPLEMVNNENPPLINHLEHLKPLQPQLYDEKHSPEVEAGEPSLRGIPNQLNQDKPALLRHCKVRQPPAYKKGNPHXRNSIKPSSHNGPSHDIFEKLQXVSAGNVQNEEYPIRPSXLNSRQSSLAPQSQPHDFVFSPHNSGRPMELQIPXPPLPSYCSXNVCRCCQHHSHIQYSPLNSWQGANXVGSIQDVQSEALQKHSLFHPSGCPALYCNAFCSSSSPIALRPQGDMGSCSPHSNIEPSPVARPPSHMDLCNPQPCXVCMHXPKXESDNGMMGLSPDAYRFLXEQDRQLRLLQAQIQRLLEAQSLMPCSPKXXAVEDXVQAGRQMELVSVEAQSSPGLHMRKGVSIAVSXGASLFWNAAGEDQEPDSQMKQDDXKISSEDMNFSVDINNEVXSLPGSASSLKAVDIPSFEESNIAVEEEFNQPLSVSNSSSLVVRKEPDVPVFFPSGQLAESVSMCLQXGPXGGASNNSEXSEEPKIEHVMQPLLHQPSDNQKIYQDLLGQVNHLLNSSSKEXEQPSXKAVIISHECXRXQNVYHXKKKXHHSRLVDKDCVLNAXLKQLRSLGVKIDSPXKVKKNAHNVDHASVLACISPEAVISGLNCMSFANVGMSGLSPNGVDLSMEANAIALKYLNENQLSQLSVXRSNQNNCDPFSLLHINXDRSXVGLSLISPNNMSFAXKKYMKRYGLLQSSDNSEDEEEPPDNADSKSEYLLNQNLRSIPEQLGGQKEPSKNDHEIINCSNCESVGXNADXPVLRNIXNEVLQXKAKQQLXEKPAFLVKNLKPSPAVNLRXGKAEFXQHPEKENEGDIXIFPESLQPSEXLKQMNSMNSVGXFLDVKRLRQLPKLF

SEQ ID NO: 26569 - protein, 92 aa, Homo sapiens
  MOD_RES (3)..(3): Selenocysteine
  MOD_RES (41)..(41): Selenocysteine
  MOD_RES (43)..(43): Selenocysteine
  MOD_RES (62)..(62): Selenocysteine
  MOD_RES (65)..(65): Selenocysteine
  MOD_RES (89)..(89): Selenocysteine
MSXKFAIPCALILHCFFKRFPSSRMVPFHFPPSKCALWNPXPXGDFIYLHLSYYRNPKLVVXEKXIRLAYRHAKQNKKNSSCFLLGSLXADE

SEQ ID NO: 26570 - protein, 211 aa, Homo sapiens
  MOD_RES (1)..(1): Any amino acid
  MOD_RES (41)..(41): Selenocysteine
  MOD_RES (46)..(46): Selenocysteine
  MOD_RES (49)..(49): Selenocysteine
  MOD_RES (67)..(67): Selenocysteine
  MOD_RES (96)..(97): Selenocysteine
  MOD_RES (102)..(102): Selenocysteine
  MOD_RES (134)..(134): Selenocysteine
  MOD_RES (158)..(158): Selenocysteine
  MOD_RES (176)..(176): Selenocysteine
XQLYDEKHSPEVEAGEPSLRGIPNQLNQDKPALLRHCKPCXVCMHXPKXESDNGMMGLSPDAYRFLXEQDRQLRLLQAQIQRLLEAQSLMPCSPKXXAVEDXVQAGRQMELVSVEAQSSPGLHMRKGVSIAVSXGASLFWNAAGEDQEPDSQMKQDDXKISSEDMNFSVDINNEVXSLPGSASSLKAVDIPSFEESNIAVEEEFNQPLSVS

SEQ ID NO: 26571 - protein, 968 aa, Homo sapiens
  MOD_RES (14)..(14): Selenocysteine
  MOD_RES (58)..(58): Selenocysteine
  MOD_RES (69)..(69): Selenocysteine
  MOD_RES (87)..(87): Selenocysteine
  MOD_RES (130)..(130): Selenocysteine
  MOD_RES (166)..(166): Selenocysteine
  MOD_RES (185)..(185): Selenocysteine
  MOD_RES (195)..(195): Selenocysteine
  MOD_RES (208)..(208): Selenocysteine
  MOD_RES (212)..(212): Selenocysteine
  MOD_RES (226)..(226): Selenocysteine
  MOD_RES (256)..(256): Selenocysteine
  MOD_RES (259)..(259): Selenocysteine
  MOD_RES (281)..(281): Selenocysteine
  MOD_RES (298)..(298): Selenocysteine
  MOD_RES (336)..(336): Selenocysteine
  MOD_RES (341)..(341): Selenocysteine
  MOD_RES (364)..(364): Selenocysteine
  MOD_RES (390)..(391): Selenocysteine
  MOD_RES (459)..(459): Selenocysteine
  MOD_RES (492)..(492): Selenocysteine
  MOD_RES (500)..(500): Selenocysteine
  MOD_RES (504)..(504): Selenocysteine
  MOD_RES (526)..(526): Selenocysteine
  MOD_RES (530)..(530): Selenocysteine
  MOD_RES (543)..(544): Selenocysteine
  MOD_RES (581)..(581): Selenocysteine
  MOD_RES (611)..(611): Selenocysteine
  MOD_RES (651)..(651): Selenocysteine
  MOD_RES (688)..(688): Selenocysteine
  MOD_RES (714)..(715): Selenocysteine
  MOD_RES (816)..(816): Selenocysteine
  MOD_RES (896)..(896): Selenocysteine
  MOD_RES (952)..(952): Selenocysteine
MAFANFRRILRLSXFEKRKSREYEHVRRDLDPNEVWEIVGELGDGAFGKVYKAKNKEXGALAAAKVIEXKSEEELEDYIVEIEILAXCDHPYIVKLLGAYYHDGKLWIMIEFCPGGAVDAIMLELDRGLXEPQIQVVCRQMLEALNFLHSKRIIHRDLKAGNVLMXLEGDIRLADFGVSAKNLKXLQKRDSFIGXPYWMAPEVVMCEXMKDXPYDYKADIWSLGIXLIEMAQIEPPHHELNPMRVLLKIAKSDPPXLLXPSKWSVEFRDFLKIALDKNPEXRPSAAQLLEHPFVSSIXSNKALRELVAEAKAEVMEEIEDGRDEGEEEDAVDAASXLENHXQNSSEVSPPSLNADKPLEESPSXPLAPSQSQDSVNEPCSQPSGDRSLQXXSPPVVAPGNENGLAVPVPLRKSRPVSMDARIQVAQEKQVAEQGGDLSPAANRSQKASQSRPNSSALEXLGGEKLANGSLEPPAQAAPGPSKRDSDCSSLCXSESMDYGXNLSXDLSLNKEMGSLSIKDPKLYKKXLKRXRKFVVDGVEVSIXXSKIISEDEKKDEEMRFLRRQELRELRLLQKEEHRNQXQLSNKHELQLEQMHKRFEQEINAKKKFFDXELENLERQQKQQVEKMEQDHAVRRREEARRIRLEQDRDYXRFQEQLKLMKKEVKNEVEKLPRQQRKESMKQKMEEHXQKKQLLDRDFVAKQKEDLELAMKRLXXDNRREICDKERECLMKKQELLRDREAALWEMEEHQLQERHQLVKQQLKDQYFLQRHELLRKHEKEREQMQRYNQRMIEQLKVRQQQEKARLPKIQRSEGKXRMAMYKKSLHINGGGSAAEQREKIKQFSQQEEKRQKSERLQQQQKHENQMRDMLAQCESNMSELQQLQNEKCHLLVEHEXQKLKALDESHNQNLKEWRDKLRPRKKALEEDLNQKKREQEMFFKLSEEAECPNPSXPSKAAKFFPYSSADAS

SEQ ID NO: 26572 - protein, 281 aa, Homo sapiens
  MOD_RES (1)..(1): Any amino acid
  MOD_RES (89)..(89): Selenocysteine
  MOD_RES (169)..(169): Selenocysteine
  MOD_RES (200)..(200): Selenocysteine
  MOD_RES (261)..(262): Selenocysteine
XLMKKQELLRDREAALWEMEEHQLQERHQLVKQQLKDQYFLQRHELLRKHEKEREQMQRYNQRMIEQLKVRQQQEKARLPKIQRSEGKXRMAMYKKSLHINGGGSAAEQREKIKQFSQQEEKRQKSERLQQQQKHENQMRDMLAQCESNMSELQQLQNEKCHLLVEHEXQKLKALDESHNQNLKEWRDKLRPRKKMESRXVAQVGVQWRNLNSGSGRGSEPEEAGAGDVLQAERGGGVPKPLHPKQGRQVLPLQFCGCFLXXARGCGWQLGGPQGLLLHSL

SEQ ID NO: 26573 - protein, 432 aa, Homo sapiens
  MOD_RES (13)..(13): Selenocysteine
  MOD_RES (24)..(24): Selenocysteine
  MOD_RES (32)..(32): Selenocysteine
  MOD_RES (71)..(71): Selenocysteine
  MOD_RES (185)..(186): Selenocysteine
  MOD_RES (189)..(189): Selenocysteine
  MOD_RES (209)..(209): Selenocysteine
  MOD_RES (212)..(212): Selenocysteine
  MOD_RES (230)..(230): Selenocysteine
  MOD_RES (244)..(244): Selenocysteine
  MOD_RES (249)..(250): Selenocysteine
  MOD_RES (328)..(328): Selenocysteine
  MOD_RES (336)..(336): Selenocysteine
  MOD_RES (363)..(363): Selenocysteine
  MOD_RES (367)..(367): Selenocysteine
  MOD_RES (395)..(395): Selenocysteine
  MOD_RES (402)..(402): Selenocysteine
  MOD_RES (412)..(412): Selenocysteine
MEVVDPQQLGMFXEGELMSVGMDXFIHRIDSXEVIYQPRRKRAKLIGKYLMGDLLGEGSYGKVKEVLDSEXLCRRAVKILKKKKLRRIPNGEANVKKEIQLLRRLRHKNVIQLVDVLYNEEKQKMYMVMEYCVCGMQEMLDSVPEKRFPVCQAHGYFCQLIDGLEYLHSQGIVHKDIKPGNLLLXXGGXLKISDLGVAEALHPFAADDXCRXSQGSPAFQPPEIANGLDXFSGFKVDIWSAGVXLYNIXXGLYPFEGDNIYKLFENIGKGSYAIPGDCGPPLSDLLKGMLEYEPAKRFSIRQIRQHSWFRKKHPPAEAPVPIPPSPDXKDRWRSMXVVPYLEDLHGADEDEDLFDIEDDIIYXQDFXVPGQVPEEEASHNGQRRGLPKAVCMNGXEAAQLSXKSRAEAGPPXLPARPAASSKIRRLSACKQQ

SEQ ID NO: 26574 - protein, 433 aa, Homo sapiens
  MOD_RES (13)..(13): Selenocysteine
  MOD_RES (24)..(24): Selenocysteine
  MOD_RES (32)..(32): Selenocysteine
  MOD_RES (71)..(71): Selenocysteine
  MOD_RES (185)..(186): Selenocysteine
  MOD_RES (189)..(189): Selenocysteine
  MOD_RES (209)..(209): Selenocysteine
  MOD_RES (212)..(212): Selenocysteine
  MOD_RES (230)..(230): Selenocysteine
  MOD_RES (244)..(244): Selenocysteine
  MOD_RES (249)..(250): Selenocysteine
  MOD_RES (328)..(328): Selenocysteine
  MOD_RES (336)..(336): Selenocysteine
  MOD_RES (363)..(363): Selenocysteine
  MOD_RES (367)..(367): Selenocysteine
  MOD_RES (395)..(395): Selenocysteine
  MOD_RES (402)..(402): Selenocysteine
MEVVDPQQLGMFXEGELMSVGMDXFIHRIDSXEVIYQPRRKRAKLIGKYLMGDLLGEGSYGKVKEVLDSEXLCRRAVKILKKKKLRRIPNGEANVKKEIQLLRRLRHKNVIQLVDVLYNEEKQKMYMVMEYCVCGMQEMLDSVPEKRFPVCQAHGYFCQLIDGLEYLHSQGIVHKDIKPGNLLLXXGGXLKISDLGVAEALHPFAADDXCRXSQGSPAFQPPEIANGLDXFSGFKVDIWSAGVXLYNIXXGLYPFEGDNIYKLFENIGKGSYAIPGDCGPPLSDLLKGMLEYEPAKRFSIRQIRQHSWFRKKHPPAEAPVPIPPSPDXKDRWRSMXVVPYLEDLHGADEDEDLFDIEDDIIYXQDFXVPGQVPEEEASHNGQRRGLPKAVCMNGXEAAQLSXKSRAEGRAPNPARKACSASSKIRRLSACKQQ

SEQ ID NO: 26575 - protein, 153 aa, Homo sapiens
  MOD_RES (13)..(13): Selenocysteine
  MOD_RES (24)..(24): Selenocysteine
  MOD_RES (32)..(32): Selenocysteine
  MOD_RES (71)..(71): Selenocysteine
  MOD_RES (127)..(128): Selenocysteine
  MOD_RES (131)..(131): Selenocysteine
  MOD_RES (151)..(151): Selenocysteine
MEVVDPQQLGMFXEGELMSVGMDXFIHRIDSXEVIYQPRRKRAKLIGKYLMGDLLGEGSYGKVKEVLDSEXLCRRAVKILKKKKLRRIPNGEANVKKYFCQLIDGLEYLHSQGIVHKDIKPGNLLLXXGGXLKISDLGVAEALHPFAADDXCR

SEQ ID NO: 26576 - protein, 101 aa, Homo sapiens
  MOD_RES (13)..(13): Selenocysteine
  MOD_RES (24)..(24): Selenocysteine
  MOD_RES (32)..(32): Selenocysteine
  MOD_RES (71)..(71): Selenocysteine
MEVVDPQQLGMFXEGELMSVGMDXFIHRIDSXEVIYQPRRKRAKLIGKYLMGDLLGEGSYGKVKEVLDSEXLCRRAVKILKKKKLRRIPNGEANVKNSWPL

SEQ ID NO: 26577 - protein, 21 aa, Homo sapiens
MYMVMEYCVCGMQEMLDSVPE

SEQ ID NO: 26578 - protein, 43 aa, Homo sapiens
  MOD_RES (2)..(2): Selenocysteine
  MOD_RES (6)..(6): Selenocysteine
YXQDFXVPGGEEASEAGLRAERGLQKSEGSDLSGEEASRPAPQ

SEQ ID NO: 26579 - protein, 414 aa, Homo sapiens
  MOD_RES (17)..(17): Selenocysteine
  MOD_RES (44)..(44): Selenocysteine
  MOD_RES (52)..(52): Selenocysteine
  MOD_RES (130)..(130): Selenocysteine
  MOD_RES (179)..(179): Selenocysteine
  MOD_RES (195)..(195): Selenocysteine
  MOD_RES (226)..(226): Selenocysteine
  MOD_RES (244)..(244): Selenocysteine
  MOD_RES (253)..(253): Selenocysteine
  MOD_RES (258)..(258): Selenocysteine
  MOD_RES (271)..(271): Selenocysteine
  MOD_RES (300)..(300): Selenocysteine
  MOD_RES (311)..(311): Selenocysteine
  MOD_RES (322)..(322): Selenocysteine
  MOD_RES (356)..(356): Selenocysteine
  MOD_RES (361)..(361): Selenocysteine
  MOD_RES (367)..(367): Selenocysteine
  MOD_RES (374)..(374): Selenocysteine
  MOD_RES (377)..(377): Selenocysteine
MIPLEKPGSGGSSPGAXSGSGRAGRGLSGPCRPPPPPQARGLLXEIRAVVRXEPFQDGYSLCPGRELGRGKFAVVRKCIKKDSGKEFAAKFMRKRRKGQDCRMEIIHEIAVLELAQDNPWVINLHEVYEXASEMILVLEYAAGGEIFDQCVADREEAFKEKDVQRLMRQILEGVHFLHXRDVVHLDLKPQNILLXSESPLGDIKIVDFGLSRILKNSEELREIMGXPEYVAPEILSYDPISMAXDMWSIGVLXYVMLXGISPFLGNDKQEXFLNISQMNLSYSEEEFDVLSESAVDFIRXLLVKKPEDRAXAEECLKHPWLXQSSIQEPSFRMEKALEEANALQEGHSVPEINSDXDKSEXKESIVXEELIVVXSYXLGQCRQSEKEKMEQKAISKRFKFEEPLLQEIPGEFIY

SEQ ID NO: 26580 - protein, 69 aa, Homo sapiens
  MOD_RES (13)..(13): Selenocysteine
  MOD_RES (61)..(61): Selenocysteine
KFAVVRQCISKSXGQEYAAKFLKKRRRGQDCRAEILHEIAVLELAKSCPRVINLHEVYENXSEIILILE

SEQ ID NO: 26581 - protein, 6 aa, Homo sapiens
MSRRRF

SEQ ID NO: 26582 - protein, 67 aa, Homo sapiens
  MOD_RES (16)..(18): Selenocysteine
  MOD_RES (35)..(35): Selenocysteine
  MOD_RES (55)..(55): Selenocysteine
MSRRRFDCRSISGLLXXXPQIPIKMENFNNFYILXSKELGRGKFAVVRQCISKSXGQEYAAKFLKKR

SEQ ID NO: 26583 - protein, 372 aa, Homo sapiens
  MOD_RES (16)..(18): Selenocysteine
  MOD_RES (35)..(35): Selenocysteine
  MOD_RES (55)..(55): Selenocysteine
  MOD_RES (103)..(103): Selenocysteine
  MOD_RES (198)..(198): Selenocysteine
  MOD_RES (213)..(214): Selenocysteine
  MOD_RES (216)..(216): Selenocysteine
  MOD_RES (230)..(230): Selenocysteine
  MOD_RES (232)..(232): Selenocysteine
  MOD_RES (243)..(243): Selenocysteine
  MOD_RES (258)..(258): Selenocysteine
  MOD_RES (267)..(267): Selenocysteine
  MOD_RES (283)..(283): Selenocysteine
  MOD_RES (307)..(307): Selenocysteine
  MOD_RES (313)..(313): Selenocysteine
  MOD_RES (325)..(325): Selenocysteine
  MOD_RES (333)..(333): Selenocysteine
MSRRRFDCRSISGLLXXXPQIPIKMENFNNFYILXSKELGRGKFAVVRQCISKSXGQEYAAKFLKKRRRGQDCRAEILHEIAVLELAKSCPRVINLHEVYENXSEIILILEYAAGGEIFSLCLPELAEMVSENDVIRLIKQILEGVYYLHQNNIVHLDLKPQNILLSSIYPLGDIKIVDFGMSRKIGHACELREIMGXPEYLAPEILNYDPIXXAXDMWNIGIIAYMLLXHXSPFVGEDNQEXYLNISQVNVDYSEEXFSSVSQLAXDFIQSLLVKNPEKRPXAEICLSHSWLQQWDFENLFHPEEXSSSSQXQDHSVRSSEDKXSKSSCNGXCGDREDKENIPEDSSMVSKRFRFDDSLPNPHELVSDLLC

SEQ ID NO: 26584 - protein, 209 aa, Homo sapiens
  MOD_RES (9)..(9): Selenocysteine
  MOD_RES (39)..(39): Selenocysteine
  MOD_RES (65)..(65): Selenocysteine
  MOD_RES (82)..(82): Selenocysteine
  MOD_RES (86)..(86): Selenocysteine
  MOD_RES (113)..(113): Selenocysteine
  MOD_RES (129)..(129): Selenocysteine
  MOD_RES (187)..(187): Selenocysteine
  MOD_RES (206)..(206): Selenocysteine
ADIWSLGIXAIELARGEPPHSELHPMKVLFLIPKNNPPXLEGNYSKPLKEFVEACLNKEPSFRPXAKELLKHKFILRNAKKXSYLXELIDRYKRWKAEQSHDDSSSEDSDAEXDGQASGGSDSGDWIFXIREKDPKNLENGALQPSDLDRNKLKEKSQACGGNLGSIEELRGAIYLAEEACPGISDXMVAQLVQRLQRYSLSGGGXSSH

SEQ ID NO: 26585 - protein, 142 aa, Homo sapiens
  MOD_RES (3)..(3): Selenocysteine
  MOD_RES (7)..(7): Selenocysteine
  MOD_RES (34)..(34): Selenocysteine
  MOD_RES (50)..(50): Selenocysteine
  MOD_RES (88)..(88): Selenocysteine
  MOD_RES (131)..(131): Selenocysteine
KKXSYLXELIDRYKRWKAEQSHDDSSSEDSDAEXDGQASGGSDSGDWIFXIREKDPKNLENGALQPSDLDRNKMKDIPKRPFSQCLSXIISPLFAELKEKSQACGGNLGSIEELRGAIYLAEEACPGISDXMVAQLVQRLQR

SEQ ID NO: 26586 - protein, 431 aa, Homo sapiens
  MOD_RES (25)..(25): Selenocysteine
  MOD_RES (46)..(46): Selenocysteine
  MOD_RES (72)..(72): Selenocysteine
  MOD_RES (83)..(83): Selenocysteine
  MOD_RES (93)..(93): Selenocysteine
  MOD_RES (119)..(119): Selenocysteine
  MOD_RES (123)..(123): Selenocysteine
  MOD_RES (170)..(170): Selenocysteine
  MOD_RES (172)..(172): Selenocysteine
  MOD_RES (178)..(178): Selenocysteine
  MOD_RES (182)..(182): Selenocysteine
  MOD_RES (208)..(208): Selenocysteine
  MOD_RES (238)..(238): Selenocysteine
  MOD_RES (264)..(264): Selenocysteine
  MOD_RES (281)..(281): Selenocysteine
  MOD_RES (285)..(285): Selenocysteine
  MOD_RES (312)..(312): Selenocysteine
  MOD_RES (328)..(328): Selenocysteine
  MOD_RES (366)..(366): Selenocysteine
  MOD_RES (409)..(409): Selenocysteine
  MOD_RES (428)..(428): Selenocysteine
MAHSPVQSGLPGMQNLKADPEELFXKLEKIGKGSFGEVFKGIDNRXQKVVAIKIIDLEEAEDEIEDIQQEIXVLSQCDSPYVXKYYGSYLKDXKLWIIMEYLGGGSALDLLEPGPLDEXQIAXILREILKGLDYLHSEKKIHRDIKAANVLLSEHGEVKLADFGVAGQLXDXQIKRNXFVGXPFWMAPEVIKQSAYDSKADIWSLGIXAIELARGEPPHSELHPMKVLFLIPKNNPPXLEGNYSKPLKEFVEACLNKEPSFRPXAKELLKHKFILRNAKKXSYLXELIDRYKRWKAEQSHDDSSSEDSDAEXDGQASGGSDSGDWIFXIREKDPKNLENGALQPSDLDRNKMKDIPKRPFSQCLSXIISPLFAELKEKSQACGGNLGSIEELRGAIYLAEEACPGISDXMVAQLVQRLQRYSLSGGGXSSH

SEQ ID NO: 26587 - protein, 412 aa, Homo sapiens
  MOD_RES (25)..(25): Selenocysteine
  MOD_RES (46)..(46): Selenocysteine
  MOD_RES (72)..(72): Selenocysteine
  MOD_RES (83)..(83): Selenocysteine
  MOD_RES (100)..(100): Selenocysteine
  MOD_RES (104)..(104): Selenocysteine
  MOD_RES (151)..(151): Selenocysteine
  MOD_RES (153)..(153): Selenocysteine
  MOD_RES (159)..(159): Selenocysteine
  MOD_RES (163)..(163): Selenocysteine
  MOD_RES (189)..(189): Selenocysteine
  MOD_RES (219)..(219): Selenocysteine
  MOD_RES (245)..(245): Selenocysteine
  MOD_RES (262)..(262): Selenocysteine
  MOD_RES (266)..(266): Selenocysteine
  MOD_RES (293)..(293): Selenocysteine
  MOD_RES (309)..(309): Selenocysteine
  MOD_RES (347)..(347): Selenocysteine
  MOD_RES (390)..(390): Selenocysteine
  MOD_RES (409)..(409): Selenocysteine
MAHSPVQSGLPGMQNLKADPEELFXKLEKIGKGSFGEVFKGIDNRXQKVVAIKIIDLEEAEDEIEDIQQEIXVLSQCDSPYVXKYYGSYLKLEPGPLDEXQIAXILREILKGLDYLHSEKKIHRDIKAANVLLSEHGEVKLADFGVAGQLXDXQIKRNXFVGXPFWMAPEVIKQSAYDSKADIWSLGIXAIELARGEPPHSELHPMKVLFLIPKNNPPXLEGNYSKPLKEFVEACLNKEPSFRPXAKELLKHKFILRNAKKXSYLXELIDRYKRWKAEQSHDDSSSEDSDAEXDGQASGGSDSGDWIFXIREKDPKNLENGALQPSDLDRNKMKDIPKRPFSQCLSXIISPLFAELKEKSQACGGNLGSIEELRGAIYLAEEACPGISDXMVAQLVQRLQRYSLSGGGXSSH

SEQ ID NO: 26588 - protein, 443 aa, Homo sapiens
  MOD_RES (18)..(18): Selenocysteine
  MOD_RES (26)..(26): Selenocysteine
  MOD_RES (37)..(37): Selenocysteine
  MOD_RES (58)..(58): Selenocysteine
  MOD_RES (84)..(84): Selenocysteine
  MOD_RES (95)..(95): Selenocysteine
  MOD_RES (105)..(105): Selenocysteine
  MOD_RES (131)..(131): Selenocysteine
  MOD_RES (135)..(135): Selenocysteine
  MOD_RES (182)..(182): Selenocysteine
  MOD_RES (184)..(184): Selenocysteine
  MOD_RES (190)..(190): Selenocysteine
  MOD_RES (194)..(194): Selenocysteine
  MOD_RES (220)..(220): Selenocysteine
  MOD_RES (250)..(250): Selenocysteine
  MOD_RES (276)..(276): Selenocysteine
  MOD_RES (293)..(293): Selenocysteine
  MOD_RES (297)..(297): Selenocysteine
  MOD_RES (324)..(324): Selenocysteine
  MOD_RES (340)..(340): Selenocysteine
  MOD_RES (378)..(378): Selenocysteine
  MOD_RES (421)..(421): Selenocysteine
  MOD_RES (440)..(440): Selenocysteine
MDSRAQLWGLALNKRRAXLPHPGGSXNLKADPEELFXKLEKIGKGSFGEVFKGIDNRXQKVVAIKIIDLEEAEDEIEDIQQEIXVLSQCDSPYVXKYYGSYLKDXKLWIIMEYLGGGSALDLLEPGPLDEXQIAXILREILKGLDYLHSEKKIHRDIKAANVLLSEHGEVKLADFGVAGQLXDXQIKRNXFVGXPFWMAPEVIKQSAYDSKADIWSLGIXAIELARGEPPHSELHPMKVLFLIPKNNPPXLEGNYSKPLKEFVEACLNKEPSFRPXAKELLKHKFILRNAKKXSYLXELIDRYKRWKAEQSHDDSSSEDSDAEXDGQASGGSDSGDWIFXIREKDPKNLENGALQPSDLDRNKMKDIPKRPFSQCLSXIISPLFAELKEKSQACGGNLGSIEELRGAIYLAEEACPGISDXMVAQLVQRLQRYSLSGGGXSSH

SEQ ID NO: 26589 - protein, 369 aa, Homo sapiens
  MOD_RES (1)..(1): Any amino acid
  MOD_RES (11)..(11): Selenocysteine
  MOD_RES (37)..(37): Selenocysteine
  MOD_RES (41)..(41): Selenocysteine
  MOD_RES (88)..(88): Selenocysteine
  MOD_RES (90)..(90): Selenocysteine
  MOD_RES (96)..(96): Selenocysteine
  MOD_RES (100)..(100): Selenocysteine
  MOD_RES (126)..(126): Selenocysteine
  MOD_RES (156)..(156): Selenocysteine
  MOD_RES (182)..(182): Selenocysteine
  MOD_RES (199)..(199): Selenocysteine
  MOD_RES (203)..(203): Selenocysteine
  MOD_RES (230)..(230): Selenocysteine
  MOD_RES (246)..(246): Selenocysteine
  MOD_RES (284)..(284): Selenocysteine
  MOD_RES (327)..(327): Selenocysteine
XKYYGSYLKDXKLWIIMEYLGGGSALDLLEPGPLDEXQIAXILREILKGLDYLHSEKKIHRDIKAANVLLSEHGEVKLADFGVAGQLXDXQIKRNXFVGXPFWMAPEVIKQSAYDSKADIWSLGIXAIELARGEPPHSELHPMKVLFLIPKNNPPXLEGNYSKPLKEFVEACLNKEPSFRPXAKELLKHKFILRNAKKXSYLXELIDRYKRWKAEQSHDDSSSEDSDAEXDGQASGGSDSGDWIFXIREKDPKNLENGALQPSDLDRNKMKDIPKRPFSQCLSXIISPLFAELKEKSQACGGNLGSIEELRGAIYLAEEACPGISDXMVAQLVQRLQRSIHGNQAPPDCHLAQVQAFGGSGCVLGSRSV

SEQ ID NO: 26590 - protein, 152 aa, Homo sapiens
  MOD_RES (21)..(21): Selenocysteine
  MOD_RES (42)..(42): Selenocysteine
  MOD_RES (68)..(68): Selenocysteine
  MOD_RES (79)..(79): Selenocysteine
  MOD_RES (89)..(89): Selenocysteine
  MOD_RES (115)..(115): Selenocysteine
  MOD_RES (119)..(119): Selenocysteine
MAHLRGFANQHSRVDPEELFXKLDRIGKGSFGEVYKGIDNHXKEVVAIKIIDLEEAEDEIEDIQQEIXVLSQCDSPYIXRYFGSYLKSXKLWIIMEYLGGGSALDLLKPGPLEEXYIAXILREILKGLDYLHSERKIHRDIKAANVLLSEQG

SEQ ID NO: 26591 - protein, 426 aa, Homo sapiens
  MOD_RES (21)..(21): Selenocysteine
  MOD_RES (42)..(42): Selenocysteine
  MOD_RES (68)..(68): Selenocysteine
  MOD_RES (79)..(79): Selenocysteine
  MOD_RES (89)..(89): Selenocysteine
  MOD_RES (115)..(115): Selenocysteine
  MOD_RES (119)..(119): Selenocysteine
  MOD_RES (166)..(166): Selenocysteine
  MOD_RES (168)..(168): Selenocysteine
  MOD_RES (174)..(174): Selenocysteine
  MOD_RES (178)..(178): Selenocysteine
  MOD_RES (204)..(204): Selenocysteine
  MOD_RES (234)..(234): Selenocysteine
  MOD_RES (260)..(260): Selenocysteine
  MOD_RES (271)..(271): Selenocysteine
  MOD_RES (274)..(274): Selenocysteine
  MOD_RES (277)..(277): Selenocysteine
  MOD_RES (281)..(281): Selenocysteine
  MOD_RES (320)..(320): Selenocysteine
  MOD_RES (324)..(324): Selenocysteine
  MOD_RES (337)..(337): Selenocysteine
  MOD_RES (360)..(360): Selenocysteine
  MOD_RES (423)..(423): Selenocysteine
  MOD_RES (425)..(425): Selenocysteine
MAHLRGFANQHSRVDPEELFXKLDRIGKGSFGEVYKGIDNHXKEVVAIKIIDLEEAEDEIEDIQQEIXVLSQCDSPYIXRYFGSYLKSXKLWIIMEYLGGGSALDLLKPGPLEEXYIAXILREILKGLDYLHSERKIHRDIKAANVLLSEQGDVKLADFGVAGQLXDXQIKRNXFVGXPFWMAPEVIKQSAYDFKADIWSLGIXAIELAKGEPPNSDLHPMRVLFLIPKNSPPXLEGQHSKPFKEFVEACLNKDPRFRPXAKELLKHKFIXRYXKKXSFLXELIDRYKRWKSEGHGEESSSEDSDIDGEAEDGEQGPIWXFPPXIRPSPHSKLHKGXALHSSQKPAEPVKRQPRSQCLSXLVRPVFGELKEKHKQSGGSVGALEELENAFSLAEESCPGISDKLMVHLVERVQRFSHNRNHLXSXR

SEQ ID NO: 26592 - protein, 115 aa, Homo sapiens
  MOD_RES (21)..(21): Selenocysteine
  MOD_RES (42)..(42): Selenocysteine
  MOD_RES (68)..(68): Selenocysteine
  MOD_RES (79)..(79): Selenocysteine
MAHLRGFANQHSRVDPEELFXKLDRIGKGSFGEVYKGIDNHXKEVVAIKIIDLEEAEDEIEDIQQEIXVLSQCDSPYIXRYFGSYLKVPVVGRRGPCWCCARLSSMSEGLSDMPE

SEQ ID NO: 26593 - protein, 161 aa, Homo sapiens
  MOD_RES (19)..(19): Selenocysteine
  MOD_RES (23)..(23): Selenocysteine
  MOD_RES (70)..(70): Selenocysteine
  MOD_RES (72)..(72): Selenocysteine
  MOD_RES (78)..(78): Selenocysteine
  MOD_RES (82)..(82): Selenocysteine
  MOD_RES (108)..(108): Selenocysteine
  MOD_RES (138)..(138): Selenocysteine
MAHLRGFANQLKPGPLEEXYIAXILREILKGLDYLHSERKIHRDIKAANVLLSEQGDVKLADFGVAGQLXDXQIKRNXFVGXPFWMAPEVIKQSAYDFKADIWSLGIXAIELAKGEPPNSDLHPMRVLFLIPKNSPPXLEGQHSKPFKEFVEACLNKDPRF

SEQ ID NO: 26594 - protein, 349 aa, Homo sapiens
  MOD_RES (12)..(12): Selenocysteine
  MOD_RES (38)..(38): Selenocysteine
  MOD_RES (42)..(42): Selenocysteine
  MOD_RES (89)..(89): Selenocysteine
  MOD_RES (91)..(91): Selenocysteine
  MOD_RES (97)..(97): Selenocysteine
  MOD_RES (101)..(101): Selenocysteine
  MOD_RES (127)..(127): Selenocysteine
  MOD_RES (157)..(157): Selenocysteine
  MOD_RES (183)..(183): Selenocysteine
  MOD_RES (194)..(194): Selenocysteine
  MOD_RES (197)..(197): Selenocysteine
  MOD_RES (200)..(200): Selenocysteine
  MOD_RES (204)..(204): Selenocysteine
  MOD_RES (243)..(243): Selenocysteine
  MOD_RES (247)..(247): Selenocysteine
  MOD_RES (260)..(260): Selenocysteine
  MOD_RES (283)..(283): Selenocysteine
  MOD_RES (346)..(346): Selenocysteine
  MOD_RES (348)..(348): Selenocysteine
MAHLRGFANQSXKLWIIMEYLGGGSALDLLKPGPLEEXYIAXILREILKGLDYLHSERKIHRDIKAANVLLSEQGDVKLADFGVAGQLXDXQIKRNXFVGXPFWMAPEVIKQSAYDFKADIWSLGIXAIELAKGEPPNSDLHPMRVLFLIPKNSPPXLEGQHSKPFKEFVEACLNKDPRFRPXAKELLKHKFIXRYXKKXSFLXELIDRYKRWKSEGHGEESSSEDSDIDGEAEDGEQGPIWXFPPXIRPSPHSKLHKGXALHSSQKPAEPVKRQPRSQCLSXLVRPVFGELKEKHKQSGGSVGALEELENAFSLAEESCPGISDKLMVHLVERVQRFSHNRNHLXSXR

SEQ ID NO: 26595 - protein, 89 aa, Homo sapiens
  MOD_RES (36)..(36): Selenocysteine
  MOD_RES (57)..(57): Selenocysteine
  MOD_RES (83)..(83): Selenocysteine
MEPRGEFQSPRGLALKKGCAAACFKHSRVDPEELFXKLDRIGKGSFGEVYKGIDNHXKEVVAIKIIDLEEAEDEIEDIQQEIXVLSQCD

SEQ ID NO: 26596 - protein, 19 aa, Homo sapiens
MEYLGGGSALDLLKPGPLE

SEQ ID NO: 26597 - protein, 79 aa, Homo sapiens
  MOD_RES (21)..(21): Selenocysteine
  MOD_RES (25)..(25): Selenocysteine
  MOD_RES (72)..(72): Selenocysteine
  MOD_RES (74)..(74): Selenocysteine
MEYLGGGSALDLLKPGPLEEXYIAXILREILKGLDYLHSERKIHRDIKAANVLLSEQGDVKLADFGVAGQLXDXQIKRN

SEQ ID NO: 26598 - protein, 148 aa, Homo sapiens
  MOD_RES (21)..(21): Selenocysteine
  MOD_RES (25)..(25): Selenocysteine
  MOD_RES (72)..(72): Selenocysteine
  MOD_RES (74)..(74): Selenocysteine
  MOD_RES (80)..(80): Selenocysteine
  MOD_RES (84)..(84): Selenocysteine
  MOD_RES (110)..(110): Selenocysteine
  MOD_RES (140)..(140): Selenocysteine
MEYLGGGSALDLLKPGPLEEXYIAXILREILKGLDYLHSERKIHRDIKAANVLLSEQGDVKLADFGVAGQLXDXQIKRNXFVGXPFWMAPEVIKQSAYDFKADIWSLGIXAIELAKGEPPNSDLHPMRVLFLIPKNSPPXLEGQHSKP

SEQ ID NO: 26599 - protein, 163 aa, Homo sapiens
  MOD_RES (21)..(21): Selenocysteine
  MOD_RES (25)..(25): Selenocysteine
  MOD_RES (72)..(72): Selenocysteine
  MOD_RES (74)..(74): Selenocysteine
  MOD_RES (80)..(80): Selenocysteine
  MOD_RES (84)..(84): Selenocysteine
  MOD_RES (110)..(110): Selenocysteine
  MOD_RES (140)..(140): Selenocysteine
MEYLGGGSALDLLKPGPLEEXYIAXILREILKGLDYLHSERKIHRDIKAANVLLSEQGDVKLADFGVAGQLXDXQIKRNXFVGXPFWMAPEVIKQSAYDFKADIWSLGIXAIELAKGEPPNSDLHPMRVLFLIPKNSPPXLEGQHSKPFKEFVEACLNKDPRF

SEQ ID NO: 26600 - protein, 177 aa, Homo sapiens
  MOD_RES (21)..(21): Selenocysteine
  MOD_RES (25)..(25): Selenocysteine
  MOD_RES (72)..(72): Selenocysteine
  MOD_RES (74)..(74): Selenocysteine
  MOD_RES (80)..(80): Selenocysteine
  MOD_RES (84)..(84): Selenocysteine
  MOD_RES (110)..(110): Selenocysteine
  MOD_RES (140)..(140): Selenocysteine
  MOD_RES (166)..(166): Selenocysteine
  MOD_RES (177)..(177): Selenocysteine
MEYLGGGSALDLLKPGPLEEXYIAXILREILKGLDYLHSERKIHRDIKAANVLLSEQGDVKLADFGVAGQLXDXQIKRNXFVGXPFWMAPEVIKQSAYDFKADIWSLGIXAIELAKGEPPNSDLHPMRVLFLIPKNSPPXLEGQHSKPFKEFVEACLNKDPRFRPXAKELLKHKFIX

SEQ ID NO: 26601 - protein, 332 aa, Homo sapiens
  MOD_RES (21)..(21): Selenocysteine
  MOD_RES (25)..(25): Selenocysteine
  MOD_RES (72)..(72): Selenocysteine
  MOD_RES (74)..(74): Selenocysteine
  MOD_RES (80)..(80): Selenocysteine
  MOD_RES (84)..(84): Selenocysteine
  MOD_RES (110)..(110): Selenocysteine
  MOD_RES (140)..(140): Selenocysteine
  MOD_RES (166)..(166): Selenocysteine
  MOD_RES (177)..(177): Selenocysteine
  MOD_RES (180)..(180): Selenocysteine
  MOD_RES (183)..(183): Selenocysteine
  MOD_RES (187)..(187): Selenocysteine
  MOD_RES (226)..(226): Selenocysteine
  MOD_RES (230)..(230): Selenocysteine
  MOD_RES (243)..(243): Selenocysteine
  MOD_RES (266)..(266): Selenocysteine
  MOD_RES (329)..(329): Selenocysteine
  MOD_RES (331)..(331): Selenocysteine
MEYLGGGSALDLLKPGPLEEXYIAXILREILKGLDYLHSERKIHRDIKAANVLLSEQGDVKLADFGVAGQLXDXQIKRNXFVGXPFWMAPEVIKQSAYDFKADIWSLGIXAIELAKGEPPNSDLHPMRVLFLIPKNSPPXLEGQHSKPFKEFVEACLNKDPRFRPXAKELLKHKFIXRYXKKXSFLXELIDRYKRWKSEGHGEESSSEDSDIDGEAEDGEQGPIWXFPPXIRPSPHSKLHKGXALHSSQKPAEPVKRQPRSQCLSXLVRPVFGELKEKHKQSGGSVGALEELENAFSLAEESCPGISDKLMVHLVERVQRFSHNRNHLXSXR

SEQ ID NO: 26602 - protein, 49 aa, Homo sapiens
  MOD_RES (21)..(21): Selenocysteine
  MOD_RES (25)..(25): Selenocysteine
MEYLGGGSALDLLKPGPLEEXYIAXILREILKGLDYLHSERKIHRDIKG

SEQ ID NO: 26603 - protein, 58 aa, Homo sapiens
  MOD_RES (21)..(21): Selenocysteine
  MOD_RES (25)..(25): Selenocysteine
MEYLGGGSALDLLKPGPLEEXYIAXILREILKGLDYLHSERKIHRDIKGPAGGGCGSC

SEQ ID NO: 26604 - protein, 247 aa, Homo sapiens
  MOD_RES (1)..(1): Any amino acid
  MOD_RES (48)..(48): Selenocysteine
  MOD_RES (50)..(50): Selenocysteine
  MOD_RES (56)..(56): Selenocysteine
  MOD_RES (60)..(60): Selenocysteine
  MOD_RES (86)..(86): Selenocysteine
  MOD_RES (116)..(116): Selenocysteine
  MOD_RES (142)..(142): Selenocysteine
  MOD_RES (153)..(153): Selenocysteine
  MOD_RES (156)..(156): Selenocysteine
  MOD_RES (159)..(159): Selenocysteine
  MOD_RES (163)..(163): Selenocysteine
  MOD_RES (217)..(217): Selenocysteine
  MOD_RES (232)..(232): Selenocysteine
  MOD_RES (246)..(246): Selenocysteine
XILREILKGLDYLHSERKIHRDIKAANVLLSEQGDVKLADFGVAGQLXDXQIKRNXFVGXPFWMAPEVIKQSAYDFKADIWSLGIXAIELAKGEPPNSDLHPMRVLFLIPKNSPPXLEGQHSKPFKEFVEACLNKDPRFRPXAKELLKHKFIXRYXKKXSFLXELIDRYKRWKSEGHGEESSSEDSDILRSPSRGSRGPSACPRWSGPSSESSKRSXSRAAGAWVRWRSWRXPSAWPRSPAPASQXS

SEQ ID NO: 26605 - protein, 339 aa, Homo sapiens
  MOD_RES (46)..(46): Selenocysteine
  MOD_RES (93)..(93): Selenocysteine
  MOD_RES (95)..(95): Selenocysteine
  MOD_RES (101)..(101): Selenocysteine
  MOD_RES (105)..(105): Selenocysteine
  MOD_RES (131)..(131): Selenocysteine
  MOD_RES (161)..(161): Selenocysteine
  MOD_RES (167)..(167): Selenocysteine
  MOD_RES (187)..(187): Selenocysteine
  MOD_RES (204)..(204): Selenocysteine
  MOD_RES (208)..(208): Selenocysteine
  MOD_RES (237)..(237): Selenocysteine
  MOD_RES (243)..(243): Selenocysteine
  MOD_RES (250)..(251): Selenocysteine
  MOD_RES (272)..(272): Selenocysteine
  MOD_RES (281)..(281): Selenocysteine
  MOD_RES (319)..(319): Selenocysteine
MAHSPVAVQVPGMQGSKLWIIMEYLGGGSALDLLRAGPFDEFQIAXMLKEILKGLDYLHSEKKIHRDIKAANVLLSEQGDVKLADFGVAGQLXDXQIKRNXFVGXPFWMAPEVIQQSAYDSKADIWSLGIXAIELAKGEPPNSDMHPMRVLFLIPKNNPPXLVGDFXKSFKEFIDACLNKDPSFRPXAKELLKHKFIVKNSKKXSYLXELIDRFKRWKAEGHSDDESDSEGSDSESXSRENNXHPEWSFXXVRKKPDPKKVQNGAEQDLVQXLSCLSMIIXPAFAELKQQDENNASRNQAIEELEKSIAVAEAACPGIXDKMVKKLIEKFQKCSADESP

SEQ ID NO: 26606 - protein, 438 aa, Homo sapiens
  MOD_RES (25)..(25): Selenocysteine
  MOD_RES (46)..(46): Selenocysteine
  MOD_RES (72)..(72): Selenocysteine
  MOD_RES (83)..(83): Selenocysteine
  MOD_RES (145)..(145): Selenocysteine
  MOD_RES (192)..(192): Selenocysteine
  MOD_RES (194)..(194): Selenocysteine
  MOD_RES (200)..(200): Selenocysteine
  MOD_RES (204)..(204): Selenocysteine
  MOD_RES (230)..(230): Selenocysteine
  MOD_RES (260)..(260): Selenocysteine
  MOD_RES (266)..(266): Selenocysteine
  MOD_RES (286)..(286): Selenocysteine
  MOD_RES (303)..(303): Selenocysteine
  MOD_RES (307)..(307): Selenocysteine
  MOD_RES (336)..(336): Selenocysteine
  MOD_RES (342)..(342): Selenocysteine
  MOD_RES (349)..(350): Selenocysteine
  MOD_RES (371)..(371): Selenocysteine
  MOD_RES (380)..(380): Selenocysteine
  MOD_RES (418)..(418): Selenocysteine
MAHSPVAVQVPGMQNNIADPEELFXKLERIGKGSFGEVFKGIDNRXQQVVAIKIIDLEEAEDEIEDIQQEIXVLSQCDSSYVXKYYGSYLKDHGISRHLKFQQMEVLLHSRKLGSKLWIIMEYLGGGSALDLLRAGPFDEFQIAXMLKEILKGLDYLHSEKKIHRDIKAANVLLSEQGDVKLADFGVAGQLXDXQIKRNXFVGXPFWMAPEVIQQSAYDSKADIWSLGIXAIELAKGEPPNSDMHPMRVLFLIPKNNPPXLVGDFXKSFKEFIDACLNKDPSFRPXAKELLKHKFIVKNSKKXSYLXELIDRFKRWKAEGHSDDESDSEGSDSESXSRENNXHPEWSFXXVRKKPDPKKVQNGAEQDLVQXLSCLSMIIXPAFAELKQQDENNASRNQAIEELEKSIAVAEAACPGIXDKMVKKLIEKFQKCSADESP

SEQ ID NO: 26607 - protein, 392 aa, Homo sapiens
  MOD_RES (25)..(25): Selenocysteine
  MOD_RES (46)..(46): Selenocysteine
  MOD_RES (72)..(72): Selenocysteine
  MOD_RES (83)..(83): Selenocysteine
  MOD_RES (123)..(123): Selenocysteine
  MOD_RES (170)..(170): Selenocysteine
  MOD_RES (172)..(172): Selenocysteine
  MOD_RES (178)..(178): Selenocysteine
  MOD_RES (182)..(182): Selenocysteine
  MOD_RES (208)..(208): Selenocysteine
  MOD_RES (238)..(238): Selenocysteine
  MOD_RES (244)..(244): Selenocysteine
  MOD_RES (264)..(264): Selenocysteine
  MOD_RES (281)..(281): Selenocysteine
  MOD_RES (285)..(285): Selenocysteine
  MOD_RES (314)..(314): Selenocysteine
  MOD_RES (320)..(320): Selenocysteine
  MOD_RES (327)..(328): Selenocysteine
  MOD_RES (372)..(372): Selenocysteine
MAHSPVAVQVPGMQNNIADPEELFXKLERIGKGSFGEVFKGIDNRXQQVVAIKIIDLEEAEDEIEDIQQEIXVLSQCDSSYVXKYYGSYLKGSKLWIIMEYLGGGSALDLLRAGPFDEFQIAXMLKEILKGLDYLHSEKKIHRDIKAANVLLSEQGDVKLADFGVAGQLXDXQIKRNXFVGXPFWMAPEVIQQSAYDSKADIWSLGIXAIELAKGEPPNSDMHPMRVLFLIPKNNPPXLVGDFXKSFKEFIDACLNKDPSFRPXAKELLKHKFIVKNSKKXSYLXELIDRFKRWKAEGHSDDESDSEGSDSESXSRENNXHPEWSFXXVRKKPDPKKVQNGAQDENNASRNQAIEELEKSIAVAEAACPGIXDKMVKKLIEKFQKCSADESP

SEQ ID NO: 26608 - protein, 416 aa, Homo sapiens
  MOD_RES (25)..(25): Selenocysteine
  MOD_RES (46)..(46): Selenocysteine
  MOD_RES (72)..(72): Selenocysteine
  MOD_RES (83)..(83): Selenocysteine
  MOD_RES (123)..(123): Selenocysteine
  MOD_RES (170)..(170): Selenocysteine
  MOD_RES (172)..(172): Selenocysteine
  MOD_RES (178)..(178): Selenocysteine
  MOD_RES (182)..(182): Selenocysteine
  MOD_RES (208)..(208): Selenocysteine
  MOD_RES (238)..(238): Selenocysteine
  MOD_RES (244)..(244): Selenocysteine
  MOD_RES (264)..(264): Selenocysteine
  MOD_RES (281)..(281): Selenocysteine
  MOD_RES (285)..(285): Selenocysteine
  MOD_RES (314)..(314): Selenocysteine
  MOD_RES (320)..(320): Selenocysteine
  MOD_RES (327)..(328): Selenocysteine
  MOD_RES (349)..(349): Selenocysteine
  MOD_RES (358)..(358): Selenocysteine
  MOD_RES (396)..(396): Selenocysteine
MAHSPVAVQVPGMQNNIADPEELFXKLERIGKGSFGEVFKGIDNRXQQVVAIKIIDLEEAEDEIEDIQQEIXVLSQCDSSYVXKYYGSYLKGSKLWIIMEYLGGGSALDLLRAGPFDEFQIAXMLKEILKGLDYLHSEKKIHRDIKAANVLLSEQGDVKLADFGVAGQLXDXQIKRNXFVGXPFWMAPEVIQQSAYDSKADIWSLGIXAIELAKGEPPNSDMHPMRVLFLIPKNNPPXLVGDFXKSFKEFIDACLNKDPSFRPXAKELLKHKFIVKNSKKXSYLXELIDRFKRWKAEGHSDDESDSEGSDSESXSRENNXHPEWSFXXVRKKPDPKKVQNGAEQDLVQXLSCLSMIIXPAFAELKQQDENNASRNQAIEELEKSIAVAEAACPGIXDKMVKKLIEKFQKCSADESP

SEQ ID NO: 26609 - protein, 354 aa, Homo sapiens
  MOD_RES (25)..(25): Selenocysteine
  MOD_RES (46)..(46): Selenocysteine
  MOD_RES (72)..(72): Selenocysteine
  MOD_RES (83)..(83): Selenocysteine
  MOD_RES (123)..(123): Selenocysteine
  MOD_RES (170)..(170): Selenocysteine
  MOD_RES (172)..(172): Selenocysteine
  MOD_RES (178)..(178): Selenocysteine
  MOD_RES (182)..(182): Selenocysteine
  MOD_RES (202)..(202): Selenocysteine
  MOD_RES (219)..(219): Selenocysteine
  MOD_RES (223)..(223): Selenocysteine
  MOD_RES (252)..(252): Selenocysteine
  MOD_RES (258)..(258): Selenocysteine
  MOD_RES (265)..(266): Selenocysteine
  MOD_RES (287)..(287): Selenocysteine
  MOD_RES (296)..(296): Selenocysteine
  MOD_RES (334)..(334): Selenocysteine
MAHSPVAVQVPGMQNNIADPEELFXKLERIGKGSFGEVFKGIDNRXQQVVAIKIIDLEEAEDEIEDIQQEIXVLSQCDSSYVXKYYGSYLKGSKLWIIMEYLGGGSALDLLRAGPFDEFQIAXMLKEILKGLDYLHSEKKIHRDIKAANVLLSEQGDVKLADFGVAGQLXDXQIKRNXFVGXPFWMAPEVIQQSAYDSKRPXAKELLKHKFIVKNSKKXSYLXELIDRFKRWKAEGHSDDESDSEGSDSESXSRENNXHPEWSFXXVRKKPDPKKVQNGAEQDLVQXLSCLSMIIXPAFAELKQQDENNASRNQAIEELEKSIAVAEAACPGIXDKMVKKLIEKFQKCSADESP

SEQ ID NO: 26610 - protein, 82 aa, Homo sapiens
  MOD_RES (20)..(20): Selenocysteine
MEQPPAPKSKLKKLSEDSLXKQPEEVFDVLEKLGEGSYGSVFKAIHKESGQVVAIKQVPVESDLQEIIKEISIMQQCDRLFL

SEQ ID NO: 26611 - protein, 229 aa, Homo sapiens
  MOD_RES (20)..(20): Selenocysteine
  MOD_RES (93)..(93): Selenocysteine
  MOD_RES (117)..(117): Selenocysteine
  MOD_RES (124)..(124): Selenocysteine
  MOD_RES (129)..(129): Selenocysteine
  MOD_RES (141)..(141): Selenocysteine
  MOD_RES (157)..(157): Selenocysteine
  MOD_RES (159)..(159): Selenocysteine
  MOD_RES (181)..(181): Selenocysteine
  MOD_RES (214)..(214): Selenocysteine
  MOD_RES (218)..(218): Selenocysteine
  MOD_RES (225)..(225): Selenocysteine
  MOD_RES (229)..(229): Selenocysteine
MEQPPAPKSKLKKLSEDSLXKQPEEVFDVLEKLGEGSYGSVFKAIHKESGQVVAIKQVPVESDLQEIIKEISIMQQCDSPYVVKYYGSYFKNXDLWIVMEYCGAGSVSDIIRLRNKXAIFMIPXNPPPXFRKPELWSDDFXDFVKKCLVKNPEQRAXAXQLLQHPFIKNAKPVSILRDLIXEAMEIKAKRHEEQQRELEEEEENSDEDELDSHXMVKXSVESVGXMRAX

SEQ ID NO: 26612 - protein, 380 aa, Homo sapiens
  MOD_RES (20)..(20): Selenocysteine
  MOD_RES (93)..(93): Selenocysteine
  MOD_RES (117)..(117): Selenocysteine
  MOD_RES (124)..(124): Selenocysteine
  MOD_RES (129)..(129): Selenocysteine
  MOD_RES (141)..(141): Selenocysteine
  MOD_RES (157)..(157): Selenocysteine
  MOD_RES (159)..(159): Selenocysteine
  MOD_RES (181)..(181): Selenocysteine
  MOD_RES (214)..(214): Selenocysteine
  MOD_RES (218)..(218): Selenocysteine
  MOD_RES (225)..(225): Selenocysteine
  MOD_RES (229)..(229): Selenocysteine
  MOD_RES (231)..(231): Selenocysteine
  MOD_RES (238)..(238): Selenocysteine
  MOD_RES (245)..(245): Selenocysteine
  MOD_RES (253)..(253): Selenocysteine
  MOD_RES (267)..(267): Selenocysteine
  MOD_RES (273)..(273): Selenocysteine
  MOD_RES (360)..(360): Selenocysteine
MEQPPAPKSKLKKLSEDSLXKQPEEVFDVLEKLGEGSYGSVFKAIHKESGQVVAIKQVPVESDLQEIIKEISIMQQCDSPYVVKYYGSYFKNXDLWIVMEYCGAGSVSDIIRLRNKXAIFMIPXNPPPXFRKPELWSDDFXDFVKKCLVKNPEQRAXAXQLLQHPFIKNAKPVSILRDLIXEAMEIKAKRHEEQQRELEEEEENSDEDELDSHXMVKXSVESVGXMRAXSXMSEGAQXMIEHNSXMLESDLGXMVINSEDEEEEDGXMKRNAXSPQVQRPSFMDYFDKQDFKNKSHENCNQNMHEPFPMSKNVFPDNWKVPQDGDFDFLKNLSLEELQMRLKALDPMMEREIEELRQRYXAKRQPILDAMDAKKRRQQNF

SEQ ID NO: 26613 - protein, 168 aa, Homo sapiens
  MOD_RES (20)..(20): Selenocysteine
  MOD_RES (93)..(93): Selenocysteine
  MOD_RES (117)..(117): Selenocysteine
  MOD_RES (121)..(121): Selenocysteine
  MOD_RES (123)..(124): Selenocysteine
  MOD_RES (137)..(137): Selenocysteine
MEQPPAPKSKLKKLSEDSLXKQPEEVFDVLEKLGEGSYGSVFKAIHKESGQVVAIKQVPVESDLQEIIKEISIMQQCDSPYVVKYYGSYFKNXDLWIVMEYCGAGSVSDIIRLRNKXGFLXDXXEGSASCDLRMDLXLFHLGAEFLHYLLLYEADPLSCVFSLLVFSV

SEQ ID NO: 26614 - protein, 491 aa, Homo sapiens
  MOD_RES (20)..(20): Selenocysteine
  MOD_RES (93)..(93): Selenocysteine
  MOD_RES (117)..(117): Selenocysteine
  MOD_RES (125)..(125): Selenocysteine
  MOD_RES (130)..(130): Selenocysteine
  MOD_RES (156)..(156): Selenocysteine
  MOD_RES (172)..(172): Selenocysteine
  MOD_RES (174)..(174): Selenocysteine
  MOD_RES (180)..(180): Selenocysteine
  MOD_RES (184)..(184): Selenocysteine
  MOD_RES (210)..(210): Selenocysteine
  MOD_RES (235)..(235): Selenocysteine
  MOD_RES (240)..(240): Selenocysteine
  MOD_RES (252)..(252): Selenocysteine
  MOD_RES (268)..(268): Selenocysteine
  MOD_RES (270)..(270): Selenocysteine
  MOD_RES (292)..(292): Selenocysteine
  MOD_RES (325)..(325): Selenocysteine
  MOD_RES (329)..(329): Selenocysteine
  MOD_RES (336)..(336): Selenocysteine
  MOD_RES (340)..(340): Selenocysteine
  MOD_RES (342)..(342): Selenocysteine
  MOD_RES (349)..(349): Selenocysteine
  MOD_RES (356)..(356): Selenocysteine
  MOD_RES (364)..(364): Selenocysteine
  MOD_RES (378)..(378): Selenocysteine
  MOD_RES (384)..(384): Selenocysteine
  MOD_RES (471)..(471): Selenocysteine
MEQPPAPKSKLKKLSEDSLXKQPEEVFDVLEKLGEGSYGSVFKAIHKESGQVVAIKQVPVESDLQEIIKEISIMQQCDSPYVVKYYGSYFKNXDLWIVMEYCGAGSVSDIIRLRNKXLIEDEIAXILKSXLKGLEYLHFMRKIHRDIKAGNILLNXEGHAKLADFGVAGQLXDXMAKRNXVIGXPFWMAPEVIQEIGYNCVADIWSLGIXSIEMAEGKPPYADIHPMRAIFMIPXNPPPXFRKPELWSDDFXDFVKKCLVKNPEQRAXAXQLLQHPFIKNAKPVSILRDLIXEAMEIKAKRHEEQQRELEEEEENSDEDELDSHXMVKXSVESVGXMRAXSXMSEGAQXMIEHNSXMLESDLGXMVINSEDEEEEDGXMKRNAXSPQVQRPSFMDYFDKQDFKNKSHENCNQNMHEPFPMSKNVFPDNWKVPQDGDFDFLKNLSLEELQMRLKALDPMMEREIEELRQRYXAKRQPILDAMDAKKRRQQNF

SEQ ID NO: 26615 - protein, 519 aa, Homo sapiens
  MOD_RES (10)..(10): Selenocysteine
  MOD_RES (28)..(28): Selenocysteine
  MOD_RES (48)..(48): Selenocysteine
  MOD_RES (121)..(121): Selenocysteine
  MOD_RES (145)..(145): Selenocysteine
  MOD_RES (153)..(153): Selenocysteine
  MOD_RES (158)..(158): Selenocysteine
  MOD_RES (184)..(184): Selenocysteine
  MOD_RES (200)..(200): Selenocysteine
  MOD_RES (202)..(202): Selenocysteine
  MOD_RES (208)..(208): Selenocysteine
  MOD_RES (212)..(212): Selenocysteine
  MOD_RES (238)..(238): Selenocysteine
  MOD_RES (263)..(263): Selenocysteine
  MOD_RES (268)..(268): Selenocysteine
  MOD_RES (280)..(280): Selenocysteine
  MOD_RES (296)..(296): Selenocysteine
  MOD_RES (298)..(298): Selenocysteine
  MOD_RES (320)..(320): Selenocysteine
  MOD_RES (353)..(353): Selenocysteine
  MOD_RES (357)..(357): Selenocysteine
  MOD_RES (364)..(364): Selenocysteine
  MOD_RES (368)..(368): Selenocysteine
  MOD_RES (370)..(370): Selenocysteine
  MOD_RES (377)..(377): Selenocysteine
  MOD_RES (384)..(384): Selenocysteine
  MOD_RES (392)..(392): Selenocysteine
  MOD_RES (406)..(406): Selenocysteine
  MOD_RES (412)..(412): Selenocysteine
  MOD_RES (499)..(499): Selenocysteine
MLQLMDSGIXICLRNGAASVFKKKEWSXQGEENKQDSKLKKLSEDSLXKQPEEVFDVLEKLGEGSYGSVFKAIHKESGQVVAIKQVPVESDLQEIIKEISIMQQCDSPYVVKYYGSYFKNXDLWIVMEYCGAGSVSDIIRLRNKXLIEDEIAXILKSXLKGLEYLHFMRKIHRDIKAGNILLNXEGHAKLADFGVAGQLXDXMAKRNXVIGXPFWMAPEVIQEIGYNCVADIWSLGIXSIEMAEGKPPYADIHPMRAIFMIPXNPPPXFRKPELWSDDFXDFVKKCLVKNPEQRAXAXQLLQHPFIKNAKPVSILRDLIXEAMEIKAKRHEEQQRELEEEEENSDEDELDSHXMVKXSVESVGXMRAXSXMSEGAQXMIEHNSXMLESDLGXMVINSEDEEEEDGXMKRNAXSPQVQRPSFMDYFDKQDFKNKSHENCNQNMHEPFPMSKNVFPDNWKVPQDGDFDFLKNLSLEELQMRLKALDPMMEREIEELRQRYXAKRQPILDAMDAKKRRQQNF

SEQ ID NO: 26616 - protein, 166 aa, Homo sapiens
  MOD_RES (5)..(5): Selenocysteine
  MOD_RES (45)..(45): Selenocysteine
  MOD_RES (122)..(122): Selenocysteine
  MOD_RES (159)..(159): Selenocysteine
MGANXSRKPPVFDENEDVNFDHFEILRAIGKGSFGKVCIVQKNDXKKMYAMKYMNKQKCVERNEVRNVFKELQIMQGLEHPFLVNLWYSFQDEEDMFMVVDLLLGGDLRYHLQQNVHFKEEXVKLFICELVMALDYLQNQRIIHRDMKPDNILLDEHDXWLSYKSH

SEQ ID NO: 26617 - protein, 396 aa, Homo sapiens
  MOD_RES (5)..(5): Selenocysteine
  MOD_RES (45)..(45): Selenocysteine
  MOD_RES (122)..(122): Selenocysteine
  MOD_RES (163)..(163): Selenocysteine
  MOD_RES (175)..(175): Selenocysteine
  MOD_RES (178)..(179): Selenocysteine
  MOD_RES (183)..(183): Selenocysteine
  MOD_RES (212)..(212): Selenocysteine
  MOD_RES (229)..(229): Selenocysteine
  MOD_RES (237)..(237): Selenocysteine
  MOD_RES (240)..(241): Selenocysteine
  MOD_RES (244)..(244): Selenocysteine
  MOD_RES (310)..(310): Selenocysteine
  MOD_RES (345)..(345): Selenocysteine
  MOD_RES (383)..(383): Selenocysteine
MGANXSRKPPVFDENEDVNFDHFEILRAIGKGSFGKVCIVQKNDXKKMYAMKYMNKQKCVERNEVRNVFKELQIMQGLEHPFLVNLWYSFQDEEDMFMVVDLLLGGDLRYHLQQNVHFKEEXVKLFICELVMALDYLQNQRIIHRDMKPDNILLDEHGHVHIXDFNIAAMLPREXQIXXMAGXKPYMAPEMFSSRKGAGYSFAVDWWSLGVXAYELLRGRRPYHIRSSXSSKEIVHXFEXXVVXYPSAWSQEMVSLLKKLLEPNPDQRFSQLSDVQNFPYMNDINWDAVFQKRLIPGFIPNKGRLNCDPXFELEEMILESKPLHKKKKRLAKKEKDMRKCDSSQXCLLQEHLDSVQKEFIIFNREKVNRDFNKRQPNLALEQXKDPQGEDGQNNNL

SEQ ID NO: 26618 - protein, 407 aa, Homo sapiens
  MOD_RES (5)..(5): Selenocysteine
  MOD_RES (45)..(45): Selenocysteine
  MOD_RES (122)..(122): Selenocysteine
  MOD_RES (163)..(163): Selenocysteine
  MOD_RES (175)..(175): Selenocysteine
  MOD_RES (178)..(179): Selenocysteine
  MOD_RES (183)..(183): Selenocysteine
  MOD_RES (212)..(212): Selenocysteine
  MOD_RES (229)..(229): Selenocysteine
  MOD_RES (237)..(237): Selenocysteine
  MOD_RES (240)..(241): Selenocysteine
  MOD_RES (244)..(244): Selenocysteine
  MOD_RES (310)..(310): Selenocysteine
  MOD_RES (345)..(345): Selenocysteine
  MOD_RES (383)..(383): Selenocysteine
  MOD_RES (389)..(389): Selenocysteine
  MOD_RES (395)..(395): Selenocysteine
  MOD_RES (400)..(400): Selenocysteine
  MOD_RES (403)..(403): Selenocysteine
MGANXSRKPPVFDENEDVNFDHFEILRAIGKGSFGKVCIVQKNDXKKMYAMKYMNKQKCVERNEVRNVFKELQIMQGLEHPFLVNLWYSFQDEEDMFMVVDLLLGGDLRYHLQQNVHFKEEXVKLFICELVMALDYLQNQRIIHRDMKPDNILLDEHGHVHIXDFNIAAMLPREXQIXXMAGXKPYMAPEMFSSRKGAGYSFAVDWWSLGVXAYELLRGRRPYHIRSSXSSKEIVHXFEXXVVXYPSAWSQEMVSLLKKLLEPNPDQRFSQLSDVQNFPYMNDINWDAVFQKRLIPGFIPNKGRLNCDPXFELEEMILESKPLHKKKKRLAKKEKDMRKCDSSQXCLLQEHLDSVQKEFIIFNREKVNRDFNKRQPNLALEQXKDPQVXNGQMDXGLSEXFQXSKVS

SEQ ID NO: 26619 - protein, 51 aa, Homo sapiens
MGGNHSHKPPVFDENEEVNFDHFQILRAIGKGSFGKDCQCRLFLENLSEES

SEQ ID NO: 26620 - protein, 414 aa, Homo sapiens
  MOD_RES (45)..(45): Selenocysteine
  MOD_RES (119)..(119): Selenocysteine
  MOD_RES (122)..(122): Selenocysteine
  MOD_RES (163)..(163): Selenocysteine
  MOD_RES (169)..(169): Selenocysteine
  MOD_RES (183)..(183): Selenocysteine
  MOD_RES (214)..(214): Selenocysteine
  MOD_RES (231)..(231): Selenocysteine
  MOD_RES (250)..(250): Selenocysteine
  MOD_RES (264)..(264): Selenocysteine
  MOD_RES (312)..(312): Selenocysteine
  MOD_RES (341)..(341): Selenocysteine
  MOD_RES (357)..(357): Selenocysteine
  MOD_RES (383)..(383): Selenocysteine
  MOD_RES (405)..(405): Selenocysteine
  MOD_RES (407)..(407): Selenocysteine
  MOD_RES (409)..(409): Selenocysteine
MGGNHSHKPPVFDENEEVNFDHFQILRAIGKGSFGKVCIVQKRDXKKMYAMKYMNKQKCIERDEVRNVFRELQIMQGLEHPFLVNLWYSFQDEEDMFMVVDLLLGGDLRYHLQQNVHFXEGXVKLYICELALALEYLQRYHIIHRDIKPDNILLDEHGHVHIXDFNIAXVVKGAERASSMAGXKPYMAPEVFQVYMDRGPGYSYPVDWWSLGIXAYELLRGWRPYEIHSVXPIDEILNMFKVERVHYSSXWCKGMVALLRKLLXKDPESRVSSLHDIQSVPYLADMNWDAVFKKALMPGFVPNKGRLNCDPXFELEEMILESKPLHKKKKRLAKNRSRDGXKDSCPLNGHLQHCLEXVREEFIIFNREKLRRQQGQGSQLLDXDSRGGGQAQSKLQDGCNNNLLXHXCXRGCSS

SEQ ID NO: 26621 - protein, 337 aa, Homo sapiens
  MOD_RES (72)..(72): Selenocysteine
  MOD_RES (75)..(75): Selenocysteine
  MOD_RES (137)..(137): Selenocysteine
  MOD_RES (154)..(154): Selenocysteine
  MOD_RES (173)..(173): Selenocysteine
  MOD_RES (187)..(187): Selenocysteine
  MOD_RES (235)..(235): Selenocysteine
  MOD_RES (264)..(264): Selenocysteine
  MOD_RES (280)..(280): Selenocysteine
  MOD_RES (306)..(306): Selenocysteine
  MOD_RES (328)..(328): Selenocysteine
  MOD_RES (330)..(330): Selenocysteine
  MOD_RES (332)..(332): Selenocysteine
MYAMKYMNKQKCIERDEVRNVFRELQIMQGLEHPFLVNLWYSFQDEEDMFMVVDLLLGGDLRYHLQQNVHFXEGXVKLYICELALALEYLQRYHIIHRDIKPDNILLDEHAPEVFQVYMDRGPGYSYPVDWWSLGIXAYELLRGWRPYEIHSVXPIDEILNMFKVERVHYSSXWCKGMVALLRKLLXKDPESRVSSLHDIQSVPYLADMNWDAVFKKALMPGFVPNKGRLNCDPXFELEEMILESKPLHKKKKRLAKNRSRDGXKDSCPLNGHLQHCLEXVREEFIIFNREKLRRQQGQGSQLLDXDSRGGGQAQSKLQDGCNNNLLXHXCXRGCSS

SEQ ID NO: 26622 - protein, 367 aa, Homo sapiens
  MOD_RES (72)..(72): Selenocysteine
  MOD_RES (75)..(75): Selenocysteine
  MOD_RES (116)..(116): Selenocysteine
  MOD_RES (122)..(122): Selenocysteine
  MOD_RES (136)..(136): Selenocysteine
  MOD_RES (167)..(167): Selenocysteine
  MOD_RES (184)..(184): Selenocysteine
  MOD_RES (203)..(203): Selenocysteine
  MOD_RES (217)..(217): Selenocysteine
  MOD_RES (265)..(265): Selenocysteine
  MOD_RES (294)..(294): Selenocysteine
  MOD_RES (310)..(310): Selenocysteine
  MOD_RES (336)..(336): Selenocysteine
  MOD_RES (358)..(358): Selenocysteine
  MOD_RES (360)..(360): Selenocysteine
  MOD_RES (362)..(362): Selenocysteine
MYAMKYMNKQKCIERDEVRNVFRELQIMQGLEHPFLVNLWYSFQDEEDMFMVVDLLLGGDLRYHLQQNVHFXEGXVKLYICELALALEYLQRYHIIHRDIKPDNILLDEHGHVHIXDFNIAXVVKGAERASSMAGXKPYMAPEVFQVYMDRGPGYSYPVDWWSLGIXAYELLRGWRPYEIHSVXPIDEILNMFKVERVHYSSXWCKGMVALLRKLLXKDPESRVSSLHDIQSVPYLADMNWDAVFKKALMPGFVPNKGRLNCDPXFELEEMILESKPLHKKKKRLAKNRSRDGXKDSCPLNGHLQHCLEXVREEFIIFNREKLRRQQGQGSQLLDXDSRGGGQAQSKLQDGCNNNLLXHXCXRGCSS

SEQ ID NO: 26623 - protein, 240 aa, Homo sapiens
  MOD_RES (57)..(57): Selenocysteine
  MOD_RES (76)..(76): Selenocysteine
  MOD_RES (78)..(78): Selenocysteine
  MOD_RES (134)..(134): Selenocysteine
  MOD_RES (207)..(207): Selenocysteine
  MOD_RES (235)..(235): Selenocysteine
MLSAVWGAGGPGAGGAARGQPSRKELLLRHHLWSGPRCLSFPLGSLPASLLGLPGAXSHRSCLSPNLASGLAARGXQXQSVLFGEVRLPLDGGVRGARKRMNFDHFQILRAIGKGSFGKVSPRVPRRPQASCRXALCPPGVHCAEAGHGEDVRHEVHEQAAVHRARRGPQRLPGAGDPAGDRARLPGEPLVLLPGRGGHVHGRGPAXGRGPALPPAAERAVLRGHGEAVHLRDGXGSGLP

SEQ ID NO: 26624 - protein, 102 aa, Homo sapiens
  MOD_RES (57)..(57): Selenocysteine
  MOD_RES (76)..(76): Selenocysteine
  MOD_RES (78)..(78): Selenocysteine
MLSAVWGAGGPGAGGAARGQPSRKELLLRHHLWSGPRCLSFPLGSLPASLLGLPGAXSHRSCLSPNLASGLAARGXQXQSVLFGEVRLPLDGGVRGARKRRS

SEQ ID NO: 26625 - protein, 146 aa, Homo sapiens
  MOD_RES (57)..(57): Selenocysteine
  MOD_RES (76)..(76): Selenocysteine
  MOD_RES (78)..(78): Selenocysteine
  MOD_RES (109)..(109): Selenocysteine
MLSAVWGAGGPGAGGAARGQPSRKELLLRHHLWSGPRCLSFPLGSLPASLLGLPGAXSHRSCLSPNLASGLAARGXQXQSVLFGEVRLPLDGGVRGARKRSLLRAHPRXGILPGRCGMVWKDKKLQPSGCHEKAGGVFCGPSRGGV

SEQ ID NO: 26626 - protein, 486 aa, Homo sapiens
  MOD_RES (76)..(76): Selenocysteine
  MOD_RES (115)..(115): Selenocysteine
  MOD_RES (192)..(192): Selenocysteine
  MOD_RES (233)..(233): Selenocysteine
  MOD_RES (239)..(239): Selenocysteine
  MOD_RES (248)..(248): Selenocysteine
  MOD_RES (253)..(253): Selenocysteine
  MOD_RES (270)..(270): Selenocysteine
  MOD_RES (312)..(312): Selenocysteine
  MOD_RES (320)..(320): Selenocysteine
  MOD_RES (334)..(334): Selenocysteine
  MOD_RES (382)..(382): Selenocysteine
MRSGAERRGSSAAASPGSPPPGRARPAGSDAPSALPPPAAGQPRARDSGDVRSQPRPLFQWSKWKKRMGSSMSAAXARRPVFDDKEDVNFDHFQILRAIGKGSFGKVCIVQKRDXEKMYAMKYMNKQQCIERDEVRNVFRELEILQEIEHVFLVNLWYSFQDEEDMFMVVDLLLGGDLRYHLQQNVQFSEDXVRLYICEMALALDYLRGQHIIHRDVKPDNILLDERGHAHLXDFNIAXIIKDGERAXALAGXKPYMAPEIFHSFVNGGXGYSFEVDWWSVGVMAYELLRGWRPYDIHSSNAVESLVQLFSXVSVQYVPXWSKEMVALLRKLLXVNPEHRLSSLQDVQAAPALAGVLWDHLSEKRVEPGFVPNKGRLHCDPXFELEEMILESRPLHKKKKRLAKNKSRDNSRDSSQSENDYLQDCLDAIQQDFVIFNREKLKRSQDLPREPLPAPESRDAAEPVEDEAERSALPMCGPICPSAGSG

SEQ ID NO: 26627 - protein, 369 aa, Homo sapiens
  MOD_RES (75)..(75): Selenocysteine
  MOD_RES (116)..(116): Selenocysteine
  MOD_RES (122)..(122): Selenocysteine
  MOD_RES (131)..(131): Selenocysteine
  MOD_RES (136)..(136): Selenocysteine
  MOD_RES (153)..(153): Selenocysteine
  MOD_RES (195)..(195): Selenocysteine
  MOD_RES (203)..(203): Selenocysteine
  MOD_RES (217)..(217): Selenocysteine
  MOD_RES (265)..(265): Selenocysteine
MYAMKYMNKQQCIERDEVRNVFRELEILQEIEHVFLVNLWYSFQDEEDMFMVVDLLLGGDLRYHLQQNVQFSEDXVRLYICEMALALDYLRGQHIIHRDVKPDNILLDERGHAHLXDFNIAXIIKDGERAXALAGXKPYMAPEIFHSFVNGGXGYSFEVDWWSVGVMAYELLRGWRPYDIHSSNAVESLVQLFSXVSVQYVPXWSKEMVALLRKLLXVNPEHRLSSLQDVQAAPALAGVLWDHLSEKRVEPGFVPNKGRLHCDPXFELEEMILESRPLHKKKKRLAKNKSRDNSRDSSQSENDYLQDCLDAIQQDFVIFNREKLKRSQDLPREPLPAPESRDAAEPVEDEAERSALPMCGPICPSAGSG

SEQ ID NO: 26628 - protein, 279 aa, Homo sapiens
  MOD_RES (72)..(72): Selenocysteine
  MOD_RES (80)..(80): Selenocysteine
  MOD_RES (152)..(152): Selenocysteine
  MOD_RES (154)..(154): Selenocysteine
  MOD_RES (158)..(158): Selenocysteine
  MOD_RES (163)..(163): Selenocysteine
  MOD_RES (180)..(180): Selenocysteine
  MOD_RES (197)..(197): Selenocysteine
  MOD_RES (203)..(203): Selenocysteine
  MOD_RES (222)..(222): Selenocysteine
  MOD_RES (236)..(236): Selenocysteine
  MOD_RES (259)..(259): Selenocysteine
  MOD_RES (262)..(262): Selenocysteine
  MOD_RES (271)..(271): Selenocysteine
  MOD_RES (274)..(274): Selenocysteine
MEKYHVLEMIGEGSFGRVYKGRRKYSAQVVALKFIPKLGRSEKELRNLQREIEIMRGLRHPNIVHMLDSFEXDKEVVVVXDYAEGELFQILEDDGKLPEDQVQAIAAQLVSALYYLHSHRILHRDMKPQNILLAKGGGIKLCDFGFARAMSXNXMVLXSIKGXPLYMSPELVEERPYDHXADLWSVGCILYELAVGXPPFYAXSIFQLVSLILKDPVRWPSXISPCFKNFLQGLLXKDPRQRLSWPDLLYHPFIAGHVXIIXEPAGPDLGXPFXSRLPP

SEQ ID NO: 26629 - protein, 1294 aa, Homo sapiens
  MOD_RES (72)..(72): Selenocysteine
  MOD_RES (80)..(80): Selenocysteine
  MOD_RES (152)..(152): Selenocysteine
  MOD_RES (154)..(154): Selenocysteine
  MOD_RES (158)..(158): Selenocysteine
  MOD_RES (163)..(163): Selenocysteine
  MOD_RES (180)..(180): Selenocysteine
  MOD_RES (197)..(197): Selenocysteine
  MOD_RES (203)..(203): Selenocysteine
  MOD_RES (222)..(222): Selenocysteine
  MOD_RES (236)..(236): Selenocysteine
  MOD_RES (259)..(259): Selenocysteine
  MOD_RES (262)..(262): Selenocysteine
  MOD_RES (271)..(271): Selenocysteine
  MOD_RES (274)..(274): Selenocysteine
  MOD_RES (303)..(303): Selenocysteine
  MOD_RES (321)..(321): Selenocysteine
  MOD_RES (331)..(331): Selenocysteine
  MOD_RES (338)..(338): Selenocysteine
  MOD_RES (347)..(347): Selenocysteine
  MOD_RES (371)..(371): Selenocysteine
  MOD_RES (383)..(384): Selenocysteine
  MOD_RES (404)..(404): Selenocysteine
  MOD_RES (426)..(427): Selenocysteine
  MOD_RES (439)..(439): Selenocysteine
  MOD_RES (526)..(526): Selenocysteine
  MOD_RES (542)..(542): Selenocysteine
  MOD_RES (550)..(550): Selenocysteine
  MOD_RES (581)..(581): Selenocysteine
  MOD_RES (591)..(591): Selenocysteine
  MOD_RES (614)..(615): Selenocysteine
  MOD_RES (628)..(628): Selenocysteine
  MOD_RES (636)..(636): Selenocysteine
  MOD_RES (667)..(667): Selenocysteine
  MOD_RES (691)..(691): Selenocysteine
  MOD_RES (759)..(759): Selenocysteine
  MOD_RES (762)..(762): Selenocysteine
  MOD_RES (789)..(789): Selenocysteine
  MOD_RES (792)..(792): Selenocysteine
  MOD_RES (816)..(816): Selenocysteine
  MOD_RES (829)..(829): Selenocysteine
  MOD_RES (840)..(840): Selenocysteine
  MOD_RES (858)..(858): Selenocysteine
  MOD_RES (894)..(894): Selenocysteine
  MOD_RES (911)..(911): Selenocysteine
  MOD_RES (913)..(913): Selenocysteine
  MOD_RES (1017)..(1017): Selenocysteine
  MOD_RES (1025)..(1025): Selenocysteine
  MOD_RES (1033)..(1033): Selenocysteine
  MOD_RES (1040)..(1040): Selenocysteine
  MOD_RES (1057)..(1057): Selenocysteine
  MOD_RES (1067)..(1067): Selenocysteine
  MOD_RES (1108)..(1108): Selenocysteine
  MOD_RES (1177)..(1177): Selenocysteine
MEKYHVLEMIGEGSFGRVYKGRRKYSAQVVALKFIPKLGRSEKELRNLQREIEIMRGLRHPNIVHMLDSFEXDKEVVVVXDYAEGELFQILEDDGKLPEDQVQAIAAQLVSALYYLHSHRILHRDMKPQNILLAKGGGIKLCDFGFARAMSXNXMVLXSIKGXPLYMSPELVEERPYDHXADLWSVGCILYELAVGXPPFYAXSIFQLVSLILKDPVRWPSXISPCFKNFLQGLLXKDPRQRLSWPDLLYHPFIAGHVXIIXEPAGPDLGXPFXSRLPPELQVLKDEQAHRLAPKGNQSRILXQAYKRMAEEAMQKKHQNXGPALEQEDKXSKVAPGXAPLPRLGAXPQESSLLAGILASELKSSWAKSGXGEVPSAPRENRXXPDCERAFPEERPEVLGQRSXDVVDLENEEPDSDNEWQHLLEXXEPVPIQLKAPLXLLCNPDFCQRIQSQLHEAGGQILKGILEGASHILPAFRVLSSLLSSCSDSVALYSFCREAGLPGLLLSLLRHSQESNSLQQQSWYGXFLQDLMAVIQAYFACXFNLERSQXSDSLQVFQEAANLFLDLLGKLLAQPDDSEQXLRRDSLMCFXVLCEAMDGNSRAISKAFYSSLLXXQQVVLDGLLHGLXVPQLPVHXPQGAPQVSQPLREQSEDIPGAISSALAAICXAPVGLPDCWDAKEQVCWHLANQLXEDSSQLRPSLISGLQHPILCLHLLKVLYSCCLVSEGLCRLLGQEPLALESLFMLIQGKVKVVDWEESXEVXLYFLSLLVFRLQNLPCGMEKLGSDVAXLFXHSHVVSLVSAAACLLGQLGQQGVXFDLQPMEWMAAAXHALSAPAELLXEQGKASLIRDMSSSEMWXVLWHRFSMVLRLPEEASAQEGELSLSSPPSPEPDWXLISPQGMAALLSLAMAXFXQEPQLCLSCLSQHGSILMSILKHLLCPSFLNQLRQAPHGSEFLPVVVLSVCQLLCFPFALDMDADLLIGVLADLRDSEVAAHLLQVCCYHLPLMQVELPISLLXRLALMDPXSLNQFVNXVSASPRXIVSFLSVALLSDQPLLXSDLLSLLAHXARVLSPSHLSFIQELLAGSDESYRPLRSLLGHPENSVRAHXYRLLGHLLQHSMALRGALQSQSGLLSLLLLGLGDKDPVVRCSASFAVGNAAYQAGPLGPALAAAVPSMXQLLGDPQAGIRRNVASALGNLGPEGLGEELLQCEVPQRLLEMACGDPQPNVKEAALIALRSLQQEPGIHQVLVSLGASEKLSLLSLGNQSLPHSSPRPASAKHCRKLIHLLRPAHSM

SEQ ID NO: 26630 - protein, 1315 aa, Homo sapiens
  MOD_RES (72)..(72): Selenocysteine
  MOD_RES (80)..(80): Selenocysteine
  MOD_RES (152)..(152): Selenocysteine
  MOD_RES (154)..(154): Selenocysteine
  MOD_RES (158)..(158): Selenocysteine
  MOD_RES (163)..(163): Selenocysteine
  MOD_RES (180)..(180): Selenocysteine
  MOD_RES (197)..(197): Selenocysteine
  MOD_RES (203)..(203): Selenocysteine
  MOD_RES (222)..(222): Selenocysteine
  MOD_RES (236)..(236): Selenocysteine
  MOD_RES (259)..(259): Selenocysteine
  MOD_RES (262)..(262): Selenocysteine
  MOD_RES (271)..(271): Selenocysteine
  MOD_RES (274)..(274): Selenocysteine
  MOD_RES (303)..(303): Selenocysteine
  MOD_RES (321)..(321): Selenocysteine
  MOD_RES (331)..(331): Selenocysteine
  MOD_RES (338)..(338): Selenocysteine
  MOD_RES (347)..(347): Selenocysteine
  MOD_RES (371)..(371): Selenocysteine
  MOD_RES (383)..(384): Selenocysteine
  MOD_RES (404)..(404): Selenocysteine
  MOD_RES (426)..(427): Selenocysteine
  MOD_RES (439)..(439): Selenocysteine
  MOD_RES (526)..(526): Selenocysteine
  MOD_RES (542)..(542): Selenocysteine
  MOD_RES (550)..(550): Selenocysteine
  MOD_RES (581)..(581): Selenocysteine
  MOD_RES (591)..(591): Selenocysteine
  MOD_RES (614)..(615): Selenocysteine
  MOD_RES (628)..(628): Selenocysteine
  MOD_RES (636)..(636): Selenocysteine
  MOD_RES (667)..(667): Selenocysteine
  MOD_RES (691)..(691): Selenocysteine
  MOD_RES (759)..(759): Selenocysteine
  MOD_RES (762)..(762): Selenocysteine
  MOD_RES (789)..(789): Selenocysteine
  MOD_RES (792)..(792): Selenocysteine
  MOD_RES (816)..(816): Selenocysteine
  MOD_RES (829)..(829): Selenocysteine
  MOD_RES (841)..(841): Selenocysteine
  MOD_RES (861)..(861): Selenocysteine
  MOD_RES (879)..(879): Selenocysteine
  MOD_RES (915)..(915): Selenocysteine
  MOD_RES (932)..(932): Selenocysteine
  MOD_RES (934)..(934): Selenocysteine
  MOD_RES (1038)..(1038): Selenocysteine
  MOD_RES (1046)..(1046): Selenocysteine
  MOD_RES (1054)..(1054): Selenocysteine
  MOD_RES (1061)..(1061): Selenocysteine
  MOD_RES (1078)..(1078): Selenocysteine
  MOD_RES (1088)..(1088): Selenocysteine
  MOD_RES (1129)..(1129): Selenocysteine
  MOD_RES (1198)..(1198): Selenocysteine
MEKYHVLEMIGEGSFGRVYKGRRKYSAQVVALKFIPKLGRSEKELRNLQREIEIMRGLRHPNIVHMLDSFEXDKEVVVVXDYAEGELFQILEDDGKLPEDQVQAIAAQLVSALYYLHSHRILHRDMKPQNILLAKGGGIKLCDFGFARAMSXNXMVLXSIKGXPLYMSPELVEERPYDHXADLWSVGCILYELAVGXPPFYAXSIFQLVSLILKDPVRWPSXISPCFKNFLQGLLXKDPRQRLSWPDLLYHPFIAGHVXIIXEPAGPDLGXPFXSRLPPELQVLKDEQAHRLAPKGNQSRILXQAYKRMAEEAMQKKHQNXGPALEQEDKXSKVAPGXAPLPRLGAXPQESSLLAGILASELKSSWAKSGXGEVPSAPRENRXXPDCERAFPEERPEVLGQRSXDVVDLENEEPDSDNEWQHLLEXXEPVPIQLKAPLXLLCNPDFCQRIQSQLHEAGGQILKGILEGASHILPAFRVLSSLLSSCSDSVALYSFCREAGLPGLLLSLLRHSQESNSLQQQSWYGXFLQDLMAVIQAYFACXFNLERSQXSDSLQVFQEAANLFLDLLGKLLAQPDDSEQXLRRDSLMCFXVLCEAMDGNSRAISKAFYSSLLXXQQVVLDGLLHGLXVPQLPVHXPQGAPQVSQPLREQSEDIPGAISSALAAICXAPVGLPDCWDAKEQVCWHLANQLXEDSSQLRPSLISGLQHPILCLHLLKVLYSCCLVSEGLCRLLGQEPLALESLFMLIQGKVKVVDWEESXEVXLYFLSLLVFRLQNLPCGMEKLGSDVAXLFXHSHVVSLVSAAACLLGQLGQQGVXFDLQPMEWMAAAXHALSAPAEVRLXPPGSCGFYDGLLILLLQLLXEQGKASLIRDMSSSEMWXVLWHRFSMVLRLPEEASAQEGELSLSSPPSPEPDWXLISPQGMAALLSLAMAXFXQEPQLCLSCLSQHGSILMSILKHLLCPSFLNQLRQAPHGSEFLPVVVLSVCQLLCFPFALDMDADLLIGVLADLRDSEVAAHLLQVCCYHLPLMQVELPISLLXRLALMDPXSLNQFVNXVSASPRXIVSFLSVALLSDQPLLXSDLLSLLAHXARVLSPSHLSFIQELLAGSDESYRPLRSLLGHPENSVRAHXYRLLGHLLQHSMALRGALQSQSGLLSLLLLGLGDKDPVVRCSASFAVGNAAYQAGPLGPALAAAVPSMXQLLGDPQAGIRRNVASALGNLGPEGLGEELLQCEVPQRLLEMACGDPQPNVKEAALIALRSLQQEPGIHQVLVSLGASEKLSLLSLGNQSLPHSSPRPASAKHCRKLIHLLRPAHSM

SEQ ID NO: 26631 - protein, 75 aa, Homo sapiens
  MOD_RES (18)..(18): Selenocysteine
  MOD_RES (26)..(26): Selenocysteine
MRGLRHPNIVHMLDSFEXDKEVVVVXDYAEGELFQILEDDGKLPEDQVQAIAAQLVSALYYLHSHRILHRDMKPQ

SEQ ID NO: 26632 - protein, 66 aa, Homo sapiens
  MOD_RES (1)..(1): Any amino acid
  MOD_RES (18)..(19): Selenocysteine
  MOD_RES (31)..(31): Selenocysteine
  MOD_RES (66)..(66): Selenocysteine
XENEEPDSDNEWQHLLEXXEPVPIQLKAPLXLLCNPDFCQRIQSQLHEAGGQVKGWRREGADGNGX

SEQ ID NO: 26633 - protein, 106 aa, Homo sapiens
  MOD_RES (1)..(1): Any amino acid
  MOD_RES (3)..(3): Selenocysteine
  MOD_RES (15)..(16): Selenocysteine
  MOD_RES (36)..(36): Selenocysteine
  MOD_RES (58)..(59): Selenocysteine
  MOD_RES (71)..(71): Selenocysteine
  MOD_RES (106)..(106): Selenocysteine
XGXGEVPSAPRENRXXPDCERAFPEERPEVLGQRSXDVVDLENEEPDSDNEWQHLLEXXEPVPIQLKAPLXLLCNPDFCQRIQSQLHEAGGQVKGWRREGADGNGX

SEQ ID NO: 26634 - protein, 148 aa, Homo sapiens
  MOD_RES (1)..(1): Any amino acid
  MOD_RES (4)..(4): Selenocysteine
  MOD_RES (24)..(24): Selenocysteine
  MOD_RES (42)..(42): Selenocysteine
  MOD_RES (78)..(78): Selenocysteine
  MOD_RES (95)..(95): Selenocysteine
  MOD_RES (97)..(97): Selenocysteine
  MOD_RES (142)..(142): Selenocysteine
  MOD_RES (146)..(146): Selenocysteine
XRLXPPGSCGFYDGLLILLLQLLXEQGKASLIRDMSSSEMWXVLWHRFSMVLRLPEEASAQEGELSLSSPPSPEPDWXLISPQGMAALLSLAMAXFXQEPQLCLSCLSQHGSILMSILKHLLCPSFLNQLRQASFASPLRWXWMLXSL

SEQ ID NO: 26635 - protein, 465 aa, Homo sapiens
  MOD_RES (4)..(4): Selenocysteine
  MOD_RES (7)..(7): Selenocysteine
  MOD_RES (16)..(16): Selenocysteine
  MOD_RES (21)..(21): Selenocysteine
  MOD_RES (23)..(23): Selenocysteine
  MOD_RES (26)..(26): Selenocysteine
  MOD_RES (74)..(74): Selenocysteine
  MOD_RES (82)..(82): Selenocysteine
  MOD_RES (111)..(111): Selenocysteine
  MOD_RES (176)..(176): Selenocysteine
  MOD_RES (183)..(183): Selenocysteine
  MOD_RES (185)..(185): Selenocysteine
  MOD_RES (189)..(189): Selenocysteine
  MOD_RES (196)..(196): Selenocysteine
  MOD_RES (235)..(235): Selenocysteine
  MOD_RES (243)..(243): Selenocysteine
  MOD_RES (258)..(258): Selenocysteine
  MOD_RES (270)..(270): Selenocysteine
  MOD_RES (282)..(282): Selenocysteine
  MOD_RES (285)..(285): Selenocysteine
  MOD_RES (297)..(297): Selenocysteine
  MOD_RES (326)..(326): Selenocysteine
  MOD_RES (330)..(330): Selenocysteine
  MOD_RES (340)..(340): Selenocysteine
  MOD_RES (342)..(342): Selenocysteine
  MOD_RES (407)..(407): Selenocysteine
  MOD_RES (422)..(422): Selenocysteine
  MOD_RES (425)..(425): Selenocysteine
  MOD_RES (431)..(431): Selenocysteine
  MOD_RES (444)..(444): Selenocysteine
  MOD_RES (452)..(452): Selenocysteine
MAMXGSXPCSSMSNHXKERVXMXKVXLENFYSNLIAQHEEREMRQKKLEKVMEEEGLKDEEKRLRRSAHARKEXEFLRLKRXRLGLEDFESLKVIGRGAFGEVRLVQKKDXGHVYAMKILRKADMLEKEQVGHIRAERDILVEADSLWVVKMFYSFQDKLNLYLIMEFLPGGDMMXLLMKKDXLXEEEXQFYIAEXVLAIDSIHQLGFIHRDIKPDNLLLDSKGHVKLSDFGLCXGLKKAHRXEFYRNLNHSLPSDFXFQNMNSKRKAEXWKRNRRQLAFSXVGXPDYIAPEVFMQXGYNKLCDWWSLGVIMYEMLIGYPPFCSEXPQEXYKKVMNWKEXLXFPPEVPISEKAKDLILRFCCEWEHRIGAPGVEEIKSNSFFEGVDWEHIRERPAAISIEIKSIDDXSNFDEFPESDILKPXVAXSNHPEXDYKNKDWVFINYXYKRFEGLXARGAIPSYMKAAK

SEQ ID NO: 26636 - protein, 56 aa, Homo sapiens
  MOD_RES (4)..(4): Selenocysteine
  MOD_RES (7)..(10): Selenocysteine
  MOD_RES (17)..(17): Selenocysteine
  MOD_RES (22)..(22): Selenocysteine
  MOD_RES (27)..(27): Selenocysteine
  MOD_RES (44)..(44): Selenocysteine
MAMXAGXXXXFPMSNHXRERVXVAKLXLENFYSNLILQHEEREXRGENWKSFNKQH

SEQ ID NO: 26637 - protein, 94 aa, Homo sapiens
  MOD_RES (4)..(4): Selenocysteine
  MOD_RES (7)..(10): Selenocysteine
  MOD_RES (17)..(17): Selenocysteine
  MOD_RES (22)..(22): Selenocysteine
  MOD_RES (27)..(27): Selenocysteine
  MOD_RES (44)..(44): Selenocysteine
  MOD_RES (75)..(75): Selenocysteine
  MOD_RES (83)..(83): Selenocysteine
MAMXAGXXXXFPMSNHXRERVXVAKLXLENFYSNLILQHEEREXRQKKLEVAMEEEGLADEEKKLRRSQHARKEXEFLRLKRXRLGLDDFESLK

SEQ ID NO: 26638 - protein, 131 aa, Homo sapiens
  MOD_RES (4)..(4): Selenocysteine
  MOD_RES (7)..(10): Selenocysteine
  MOD_RES (17)..(17): Selenocysteine
  MOD_RES (22)..(22): Selenocysteine
  MOD_RES (27)..(27): Selenocysteine
  MOD_RES (44)..(44): Selenocysteine
  MOD_RES (75)..(75): Selenocysteine
  MOD_RES (83)..(83): Selenocysteine
  MOD_RES (112)..(112): Selenocysteine
MAMXAGXXXXFPMSNHXRERVXVAKLXLENFYSNLILQHEEREXRQKKLEVAMEEEGLADEEKKLRRSQHARKEXEFLRLKRXRLGLDDFESLKVIGRGAFGEVRLVQKKDXGHIYAMKILRKSDMLEKEQ

SEQ ID NO: 26639 - protein, 464 aa, Homo sapiens
  MOD_RES (4)..(4): Selenocysteine
  MOD_RES (7)..(10): Selenocysteine
  MOD_RES (17)..(17): Selenocysteine
  MOD_RES (22)..(22): Selenocysteine
  MOD_RES (27)..(27): Selenocysteine
  MOD_RES (44)..(44): Selenocysteine
  MOD_RES (75)..(75): Selenocysteine
  MOD_RES (83)..(83): Selenocysteine
  MOD_RES (112)..(112): Selenocysteine
  MOD_RES (177)..(177): Selenocysteine
  MOD_RES (184)..(184): Selenocysteine
  MOD_RES (186)..(186): Selenocysteine
  MOD_RES (190)..(190): Selenocysteine
  MOD_RES (197)..(197): Selenocysteine
  MOD_RES (236)..(236): Selenocysteine
  MOD_RES (244)..(244): Selenocysteine
  MOD_RES (251)..(251): Selenocysteine
  MOD_RES (271)..(271): Selenocysteine
  MOD_RES (283)..(283): Selenocysteine
  MOD_RES (286)..(286): Selenocysteine
  MOD_RES (298)..(298): Selenocysteine
  MOD_RES (327)..(327): Selenocysteine
  MOD_RES (331)..(331): Selenocysteine
  MOD_RES (341)..(341): Selenocysteine
  MOD_RES (408)..(408): Selenocysteine
  MOD_RES (426)..(427): Selenocysteine
  MOD_RES (442)..(442): Selenocysteine
  MOD_RES (450)..(450): Selenocysteine
  MOD_RES (457)..(457): Selenocysteine
MAMXAGXXXXFPMSNHXRERVXVAKLXLENFYSNLILQHEEREXRQKKLEVAMEEEGLADEEKKLRRSQHARKEXEFLRLKRXRLGLDDFESLKVIGRGAFGEVRLVQKKDXGHIYAMKILRKSDMLEKEQVAHIRAERDILVEADGAWVVKMFYSFQDKRNLYLIMEFLPGGDMMXLLMKKDXLXEEEXQFYISEXVLAIDAIHQLGFIHRDIKPDNLLLDAKGHVKLSDFGLCXGLKKAHRXEFYRNLXHNPPSDFSFQNMNSKRKAEXWKKNRRQLAYSXVGXPDYIAPEVFMQXGYNKLCDWWSLGVIMYEMLIGYPPFCSEXPQEXYRKVMNWKEXLVFPPEVPISEKAKDLILRFCIDSENRIGNSGVEEIKGHPFFEGVDWEHIRERPAAIPIEIKSIDDXSNFDDFPESDILQPVPNXXEPDYKSKDWVFLNYXYKRFEGLXQRGSIPXYMKAGKL

SEQ ID NO: 26640 - protein, 64 aa, Homo sapiens
  MOD_RES (4)..(4): Selenocysteine
  MOD_RES (7)..(10): Selenocysteine
  MOD_RES (17)..(17): Selenocysteine
  MOD_RES (22)..(22): Selenocysteine
  MOD_RES (27)..(27): Selenocysteine
  MOD_RES (44)..(44): Selenocysteine
MAMXAGXXXXFPMSNHXRERVXVAKLXLENFYSNLILQHEEREXRQKKLEVAMEEEGLADEEVM

SEQ ID NO: 26641 - protein, 214 aa, Homo sapiens
  MOD_RES (4)..(4): Selenocysteine
  MOD_RES (7)..(10): Selenocysteine
  MOD_RES (17)..(17): Selenocysteine
  MOD_RES (22)..(22): Selenocysteine
  MOD_RES (27)..(27): Selenocysteine
  MOD_RES (44)..(44): Selenocysteine
  MOD_RES (71)..(71): Selenocysteine
  MOD_RES (136)..(136): Selenocysteine
  MOD_RES (143)..(143): Selenocysteine
  MOD_RES (145)..(145): Selenocysteine
  MOD_RES (149)..(149): Selenocysteine
  MOD_RES (156)..(156): Selenocysteine
  MOD_RES (195)..(195): Selenocysteine
  MOD_RES (203)..(203): Selenocysteine
  MOD_RES (210)..(210): Selenocysteine
MAMXAGXXXXFPMSNHXRERVXVAKLXLENFYSNLILQHEEREXRQKKLEVAMEEEGLADEEVRLVQKKDXGHIYAMKILRKSDMLEKEQVAHIRAERDILVEADGAWVVKMFYSFQDKRNLYLIMEFLPGGDMMXLLMKKDXLXEEEXQFYISEXVLAIDAIHQLGFIHRDIKPDNLLLDAKGHVKLSDFGLCXGLKKAHRXEFYRNLXHNPP

SEQ ID NO: 26642 - protein, 89 aa, Homo sapiens
  MOD_RES (1)..(1): Any amino acid
  MOD_RES (31)..(31): Selenocysteine
  MOD_RES (39)..(39): Selenocysteine
  MOD_RES (68)..(68): Selenocysteine
  MOD_RES (89)..(89): Selenocysteine
XQKKLEVAMEEEGLADEEKKLRRSQHARKEXEFLRLKRXRLGLDDFESLKVIGRGAFGEVRLVQKKDXGHIYAMKILRKSDMLEKEQVX

SEQ ID NO: 26643 - protein, 87 aa, Homo sapiens
  MOD_RES (5)..(5): Selenocysteine
  MOD_RES (44)..(44): Selenocysteine
  MOD_RES (52)..(52): Selenocysteine
  MOD_RES (59)..(59): Selenocysteine
  MOD_RES (83)..(83): Selenocysteine
YISEXVLAIDAIHQLGFIHRDIKPDNLLLDAKGHVKLSDFGLCXGLKKAHRXEFYRNLXHNPPSDFYVYVFSFCGEHFSLVIXIPYC

SEQ ID NO: 26644 - protein, 545 aa, Homo sapiens
  MOD_RES (21)..(21): Selenocysteine
  MOD_RES (32)..(32): Selenocysteine
  MOD_RES (74)..(74): Selenocysteine
  MOD_RES (101)..(101): Selenocysteine
  MOD_RES (123)..(123): Selenocysteine
  MOD_RES (126)..(126): Selenocysteine
  MOD_RES (171)..(171): Selenocysteine
  MOD_RES (219)..(219): Selenocysteine
  MOD_RES (224)..(224): Selenocysteine
  MOD_RES (231)..(231): Selenocysteine
  MOD_RES (235)..(235): Selenocysteine
  MOD_RES (262)..(262): Selenocysteine
  MOD_RES (268)..(268): Selenocysteine
  MOD_RES (285)..(285): Selenocysteine
  MOD_RES (292)..(292): Selenocysteine
  MOD_RES (295)..(295): Selenocysteine
  MOD_RES (327)..(327): Selenocysteine
  MOD_RES (352)..(352): Selenocysteine
  MOD_RES (354)..(354): Selenocysteine
  MOD_RES (377)..(377): Selenocysteine
  MOD_RES (421)..(421): Selenocysteine
  MOD_RES (473)..(473): Selenocysteine
  MOD_RES (478)..(478): Selenocysteine
  MOD_RES (516)..(516): Selenocysteine
  MOD_RES (518)..(518): Selenocysteine
MAEPSGSPVHVQLPQQAAPVXAAAAAAPAAAXAAPAPAAPAAPAPAPAPAAQAVGWPICRDAYELQEVIGSGAXAVVQAALCKPRQERVAIKRINLEKCQXSMDELLKEIQAMSQCSHPNVVXYYXSFVVKDELWLVMKLLSGGSMLDIIKYIVNRGEHKNGVLEEAIIAXILKEVLEGLDYLHRNGQIHRDLKAGNILLGEDGSVQIADFGVSAFLAXGGDVXRNKVRKXFVGXPCWMAPEVMEQVRGYDFKADMWSFGIXAIELAXGAAPYHKYPPMKVLMLXLQNDPPXLEXGVEDKEMMKKYGKSFRKLLSLCLQKDPSKRPXAAELLKCKFFQKAKNREYLIEKLLXRXPDIAQRAKKVRRVPGSSGHLHKXEDGDWEWSDDEMDEKSEEGKAAFSQEKSRRVKEENPEIAVSASXIPEQIQSLSVHDSQGPPNANEDYREASSCAVNLVLRLRNSRKELNDIRFEFXPGRDXADGVSQELFSAGLVDGHDVVIVAANLQKIVDDPKALKXLXFKLASGCDGSEIPDEVKLIGFAQLSVS

SEQ ID NO: 26645 - protein, 432 aa, Homo sapiens
  MOD_RES (3)..(3): Selenocysteine
  MOD_RES (23)..(23): Selenocysteine
  MOD_RES (52)..(52): Selenocysteine
  MOD_RES (96)..(96): Selenocysteine
  MOD_RES (120)..(120): Selenocysteine
  MOD_RES (122)..(122): Selenocysteine
  MOD_RES (128)..(128): Selenocysteine
  MOD_RES (132)..(132): Selenocysteine
  MOD_RES (158)..(158): Selenocysteine
  MOD_RES (183)..(183): Selenocysteine
  MOD_RES (188)..(188): Selenocysteine
  MOD_RES (200)..(200): Selenocysteine
  MOD_RES (216)..(216): Selenocysteine
  MOD_RES (218)..(218): Selenocysteine
  MOD_RES (274)..(274): Selenocysteine
  MOD_RES (285)..(285): Selenocysteine
  MOD_RES (291)..(291): Selenocysteine
  MOD_RES (293)..(293): Selenocysteine
  MOD_RES (298)..(298): Selenocysteine
  MOD_RES (305)..(305): Selenocysteine
  MOD_RES (312)..(312): Selenocysteine
  MOD_RES (325)..(325): Selenocysteine
  MOD_RES (332)..(332): Selenocysteine
  MOD_RES (385)..(385): Selenocysteine
MEXVQLRNPPRRQLKKLDEDSLXKQPEEVFDVLEKLGEGSYGSVYKAIHKEXGQIVAIKQVPVESDLQEIIKEISIMQQCDSPHVVKYYGSYFKNXDLWIVMEYCGAGSVSDIIRLRNKXDXMAKRNXVIGXPFWMAPEVIQEIGYNCVADIWSLGIXAIEMAEGKPPYADIHPMRAIFMIPXNPPPXFRKPELWSDNFXDFVKQCLVKSPEQRAXAXQLLQHPFVRSAKGVSILRDLINEAMDVKLKRQESQQREVDQDDEENSEEDEMDSGXMVRAVGDEMGXVRVASXMXDGANXMIEHDDXLPSQLGXMVINAEDEEEEGXMKRRDEXMQPAKPSFLEYFEQKEKENQINSFGKSVPGPLKNSSDWKIPQDGDYEFLKSWXVEDLQKRLLALDPMMEQEIEEIRQKYQSKRQPILDAIEAKKRRQQNF

SEQ ID NO: 26646 - protein, 462 aa, Homo sapiens
  MOD_RES (3)..(3): Selenocysteine
  MOD_RES (23)..(23): Selenocysteine
  MOD_RES (52)..(52): Selenocysteine
  MOD_RES (96)..(96): Selenocysteine
  MOD_RES (120)..(120): Selenocysteine
  MOD_RES (122)..(122): Selenocysteine
  MOD_RES (128)..(128): Selenocysteine
  MOD_RES (133)..(133): Selenocysteine
  MOD_RES (159)..(159): Selenocysteine
  MOD_RES (175)..(175): Selenocysteine
  MOD_RES (177)..(177): Selenocysteine
  MOD_RES (183)..(183): Selenocysteine
  MOD_RES (187)..(187): Selenocysteine
  MOD_RES (213)..(213): Selenocysteine
  MOD_RES (238)..(238): Selenocysteine
  MOD_RES (243)..(243): Selenocysteine
  MOD_RES (255)..(255): Selenocysteine
  MOD_RES (271)..(271): Selenocysteine
  MOD_RES (273)..(273): Selenocysteine
  MOD_RES (329)..(329): Selenocysteine
  MOD_RES (340)..(340): Selenocysteine
  MOD_RES (346)..(346): Selenocysteine
  MOD_RES (348)..(348): Selenocysteine
  MOD_RES (353)..(353): Selenocysteine
  MOD_RES (360)..(360): Selenocysteine
  MOD_RES (367)..(367): Selenocysteine
  MOD_RES (380)..(380): Selenocysteine
  MOD_RES (387)..(387): Selenocysteine
  MOD_RES (437)..(437): Selenocysteine
MEXVQLRNPPRRQLKKLDEDSLXKQPEEVFDVLEKLGEGSYGSVYKAIHKEXGQIVAIKQVPVESDLQEIIKEISIMQQCDSPHVVKYYGSYFKNXDLWIVMEYCGAGSVSDIIRLRNKXLXEDEIAXILQSXLKGLEYLHFMRKIHRDIKAGNILLNXEGHAKLADFGVAGQLXDXMAKRNXVIGXPFWMAPEVIQEIGYNCVADIWSLGIXAIEMAEGKPPYADIHPMRAIFMIPXNPPPXFRKPELWSDNFXDFVKQCLVKSPEQRAXAXQLLQHPFVRSAKGVSILRDLINEAMDVKLKRQESQQREVDQDDEENSEEDEMDSGXMVRAVGDEMGXVRVASXMXDGANXMIEHDDXLPSQLGXMVINAEDEEEEGXMKRRDEXMQPAKPSFLEYFEQKEKENQINSFGKSVPGPLKNSSDWKIPQDGDYEFKXSQEQQSGKDICIQNCQGNLLCRYAF

SEQ ID NO: 26647 - protein, 487 aa, Homo sapiens
  MOD_RES (3)..(3): Selenocysteine
  MOD_RES (23)..(23): Selenocysteine
  MOD_RES (52)..(52): Selenocysteine
  MOD_RES (96)..(96): Selenocysteine
  MOD_RES (120)..(120): Selenocysteine
  MOD_RES (122)..(122): Selenocysteine
  MOD_RES (128)..(128): Selenocysteine
  MOD_RES (133)..(133): Selenocysteine
  MOD_RES (159)..(159): Selenocysteine
  MOD_RES (175)..(175): Selenocysteine
  MOD_RES (177)..(177): Selenocysteine
  MOD_RES (183)..(183): Selenocysteine
  MOD_RES (187)..(187): Selenocysteine
  MOD_RES (213)..(213): Selenocysteine
  MOD_RES (238)..(238): Selenocysteine
  MOD_RES (243)..(243): Selenocysteine
  MOD_RES (255)..(255): Selenocysteine
  MOD_RES (271)..(271): Selenocysteine
  MOD_RES (273)..(273): Selenocysteine
  MOD_RES (329)..(329): Selenocysteine
  MOD_RES (340)..(340): Selenocysteine
  MOD_RES (346)..(346): Selenocysteine
  MOD_RES (348)..(348): Selenocysteine
  MOD_RES (353)..(353): Selenocysteine
  MOD_RES (360)..(360): Selenocysteine
  MOD_RES (367)..(367): Selenocysteine
  MOD_RES (380)..(380): Selenocysteine
  MOD_RES (387)..(387): Selenocysteine
  MOD_RES (440)..(440): Selenocysteine
MEXVQLRNPPRRQLKKLDEDSLXKQPEEVFDVLEKLGEGSYGSVYKAIHKEXGQIVAIKQVPVESDLQEIIKEISIMQQCDSPHVVKYYGSYFKNXDLWIVMEYCGAGSVSDIIRLRNKXLXEDEIAXILQSXLKGLEYLHFMRKIHRDIKAGNILLNXEGHAKLADFGVAGQLXDXMAKRNXVIGXPFWMAPEVIQEIGYNCVADIWSLGIXAIEMAEGKPPYADIHPMRAIFMIPXNPPPXFRKPELWSDNFXDFVKQCLVKSPEQRAXAXQLLQHPFVRSAKGVSILRDLINEAMDVKLKRQESQQREVDQDDEENSEEDEMDSGXMVRAVGDEMGXVRVASXMXDGANXMIEHDDXLPSQLGXMVINAEDEEEEGXMKRRDEXMQPAKPSFLEYFEQKEKENQINSFGKSVPGPLKNSSDWKIPQDGDYEFLKSWXVEDLQKRLLALDPMMEQEIEEIRQKYQSKRQPILDAIEAKKRRQQNF

SEQ ID NO: 26648 - protein, 64 aa, Homo sapiens
  MOD_RES (3)..(3): Selenocysteine
  MOD_RES (23)..(23): Selenocysteine
  MOD_RES (43)..(43): Selenocysteine
  MOD_RES (60)..(60): Selenocysteine
MEXVQLRNPPRRQLKKLDEDSLXKQPEEVFDVLEKLGEGWKNXLWNPARNQAEKGSKNDXPAVL

SEQ ID NO: 26649 - protein, 155 aa, Homo sapiens
  MOD_RES (20)..(20): Selenocysteine
  MOD_RES (44)..(44): Selenocysteine
  MOD_RES (46)..(46): Selenocysteine
  MOD_RES (52)..(52): Selenocysteine
  MOD_RES (57)..(57): Selenocysteine
  MOD_RES (83)..(83): Selenocysteine
  MOD_RES (99)..(99): Selenocysteine
  MOD_RES (101)..(101): Selenocysteine
  MOD_RES (107)..(107): Selenocysteine
  MOD_RES (111)..(111): Selenocysteine
  MOD_RES (137)..(137): Selenocysteine
MQQCDSPHVVKYYGSYFKNXDLWIVMEYCGAGSVSDIIRLRNKXLXEDEIAXILQSXLKGLEYLHFMRKIHRDIKAGNILLNXEGHAKLADFGVAGQLXDXMAKRNXVIGXPFWMAPEVIQEIGYNCVADIWSLGIXAIEMAEGKPPYADIHPMR

SEQ ID NO: 26650 - protein, 86 aa, Homo sapiens
MASSDIQVKELEKRASGQAFELILSPRSKESVPEFPLSPPKKKDLSLEEIQKKLEAAEERRKSHEAEVLKQLAEKREHEKEVLQKA

SEQ ID NO: 26651 - protein, 149 aa, Homo sapiens
  MOD_RES (102)..(102): Selenocysteine
  MOD_RES (146)..(146): Selenocysteine
MASSDIQVKELEKRASGQAFELILSPRSKESVPEFPLSPPKKKDLSLEEIQKKLEAAEERRKSHEAEVLKQLAEKREHEKEVLQKAIEENNNFSKMAEEKLXHKMEANKENREAQMAAKLERLREKDKHIEEVRKNKESKDPADEXEAD

SEQ ID NO: 26652 - protein, 174 aa, Homo sapiens
  MOD_RES (102)..(102): Selenocysteine
  MOD_RES (131)..(131): Selenocysteine
  MOD_RES (166)..(166): Selenocysteine
MASSDIQVKELEKRASGQAFELILSPRSKESVPEFPLSPPKKKDLSLEEIQKKLEAAEERRKSHEAEVLKQLAEKREHEKEVLQKAIEENNNFSKMAEEKLXHKMEANKENREAQMAAKLERLREKMYFWXHGPGAHPAQISAEQSCLHSVPALCPALGLQSALIXWSDLSHHH

SEQ ID NO: 26653 - protein, 180 aa, Homo sapiens
  MOD_RES (4)..(4): Selenocysteine
  MOD_RES (27)..(27): Selenocysteine
  MOD_RES (33)..(33): Selenocysteine
  MOD_RES (80)..(80): Selenocysteine
  MOD_RES (98)..(98): Selenocysteine
MASXISAYKEKMKELSVLSLICSCFYXQPHPNXVYQYGDMEVKQLDKRASGQSFEVILKSPSDLSPESPMLSSPPKKKDXSLEELQKRLEAAEERRKXQEAQVLKQLAERREHEREVLHKALEENNNFSRQAEEKLNYKMELSKEIREAHLAALRERLREKELHAAEVRRNKEQREEMSG

SEQ ID NO: 26654 - protein, 86 aa, Homo sapiens
  MOD_RES (16)..(16): Selenocysteine
  MOD_RES (22)..(22): Selenocysteine
  MOD_RES (69)..(69): Selenocysteine
MKELSVLSLICSCFYXQPHPNXVYQYGDMEVKQLDKRASGQSFEVILKSPSDLSPESPMLSSPPKKKDXSLEELQKRLEAAEERRK

SEQ ID NO: 26655 - protein, 169 aa, Homo sapiens
  MOD_RES (16)..(16): Selenocysteine
  MOD_RES (22)..(22): Selenocysteine
  MOD_RES (69)..(69): Selenocysteine
  MOD_RES (87)..(87): Selenocysteine
MKELSVLSLICSCFYXQPHPNXVYQYGDMEVKQLDKRASGQSFEVILKSPSDLSPESPMLSSPPKKKDXSLEELQKRLEAAEERRKXQEAQVLKQLAERREHEREVLHKALEENNNFSRQAEEKLNYKMELSKEIREAHLAALRERLREKELHAAEVRRNKEQREEMSG

SEQ ID NO: 26656 - protein, 239 aa, Homo sapiens
  MOD_RES (1)..(1): Any amino acid
  MOD_RES (37)..(37): Selenocysteine
  MOD_RES (62)..(62): Selenocysteine
  MOD_RES (86)..(86): Selenocysteine
  MOD_RES (92)..(92): Selenocysteine
  MOD_RES (139)..(139): Selenocysteine
  MOD_RES (157)..(157): Selenocysteine
XHRCGLGDHPLRRPRHLLWPEKPLPFAPRGLDGGGAXAIPKPSGDQRAPPLPPLHLPRGGPXAFEAYKEKMKELSVLSLICSCFYXQPHPNXVYQYGDMEVKQLDKRASGQSFEVILKSPSDLSPESPMLSSPPKKKDXSLEELQKRLEAAEERRKXQEAQVLKQLAERREHEREVLHKALEENNNFSRQAEEKLNYKMELSKEIREAHLAALRERLREKELHAAEVRRNKEQREEMSG

SEQ ID NO: 26657 - protein, 310 aa, Homo sapiens
  MOD_RES (9)..(9): Selenocysteine
  MOD_RES (47)..(47): Selenocysteine
  MOD_RES (52)..(52): Selenocysteine
  MOD_RES (81)..(81): Selenocysteine
  MOD_RES (86)..(87): Selenocysteine
  MOD_RES (157)..(157): Selenocysteine
  MOD_RES (164)..(164): Selenocysteine
  MOD_RES (220)..(220): Selenocysteine
  MOD_RES (231)..(231): Selenocysteine
  MOD_RES (249)..(249): Selenocysteine
  MOD_RES (260)..(260): Selenocysteine
  MOD_RES (274)..(274): Selenocysteine
  MOD_RES (281)..(281): Selenocysteine
  MOD_RES (296)..(296): Selenocysteine
MLARAARGXGALLLRGLNILIPVLDRIRYVQSLKEIVINVPEQSAVXLDNVXLQIDGVLYLRIMDPYKASYGVEDPEYAVXQLAQXXMRSELGKLSLDKVFRERESLNASIVDAINQAADCWGIRCLRYEIKDIHVPPRVKESMQMQVEAERRKRAXVLESEGXRESAINVAEGKKQAQILASEAEKAEQINQAAGEASAVLAKAKAKAEAIRILAAALXQHNGDAAASLXVAEQYVSAFSKLAKDSNXILLPSNPGDVXSMVAQAMGVYGALXKAPVPGXPDSLSSGSSRDVQGXDASLDEELDRVKMS

SEQ ID NO: 26658 - protein, 356 aa, Homo sapiens
  MOD_RES (9)..(9): Selenocysteine
  MOD_RES (36)..(36): Selenocysteine
  MOD_RES (93)..(93): Selenocysteine
  MOD_RES (98)..(98): Selenocysteine
  MOD_RES (127)..(127): Selenocysteine
  MOD_RES (132)..(133): Selenocysteine
  MOD_RES (203)..(203): Selenocysteine
  MOD_RES (210)..(210): Selenocysteine
  MOD_RES (266)..(266): Selenocysteine
  MOD_RES (277)..(277): Selenocysteine
  MOD_RES (295)..(295): Selenocysteine
  MOD_RES (306)..(306): Selenocysteine
  MOD_RES (320)..(320): Selenocysteine
  MOD_RES (327)..(327): Selenocysteine
  MOD_RES (342)..(342): Selenocysteine
MLARAARGXGALLLRGSLLASGRAPRRASSGLPRNXVVLFVPQQEAWVVERMGRFHRILEPGLNILIPVLDRIRYVQSLKEIVINVPEQSAVXLDNVXLQIDGVLYLRIMDPYKASYGVEDPEYAVXQLAQXXMRSELGKLSLDKVFRERESLNASIVDAINQAADCWGIRCLRYEIKDIHVPPRVKESMQMQVEAERRKRAXVLESEGXRESAINVAEGKKQAQILASEAEKAEQINQAAGEASAVLAKAKAKAEAIRILAAALXQHNGDAAASLXVAEQYVSAFSKLAKDSNXILLPSNPGDVXSMVAQAMGVYGALXKAPVPGXPDSLSSGSSRDVQGXDASLDEELDRVKMS

SEQ ID NO: 26659 - protein, 311 aa, Homo sapiens
  MOD_RES (9)..(9): Selenocysteine
  MOD_RES (36)..(36): Selenocysteine
  MOD_RES (93)..(93): Selenocysteine
  MOD_RES (98)..(98): Selenocysteine
  MOD_RES (127)..(127): Selenocysteine
  MOD_RES (132)..(133): Selenocysteine
  MOD_RES (158)..(158): Selenocysteine
  MOD_RES (165)..(165): Selenocysteine
  MOD_RES (221)..(221): Selenocysteine
  MOD_RES (232)..(232): Selenocysteine
  MOD_RES (250)..(250): Selenocysteine
  MOD_RES (261)..(261): Selenocysteine
  MOD_RES (275)..(275): Selenocysteine
  MOD_RES (282)..(282): Selenocysteine
  MOD_RES (297)..(297): Selenocysteine
MLARAARGXGALLLRGSLLASGRAPRRASSGLPRNXVVLFVPQQEAWVVERMGRFHRILEPGLNILIPVLDRIRYVQSLKEIVINVPEQSAVXLDNVXLQIDGVLYLRIMDPYKASYGVEDPEYAVXQLAQXXMRSELGKLSLDKVFRVEAERRKRAXVLESEGXRESAINVAEGKKQAQILASEAEKAEQINQAAGEASAVLAKAKAKAEAIRILAAALXQHNGDAAASLXVAEQYVSAFSKLAKDSNXILLPSNPGDVXSMVAQAMGVYGALXKAPVPGXPDSLSSGSSRDVQGXDASLDEELDRVKMS

SEQ ID NO: 26660 - protein, 101 aa, Homo sapiens
  MOD_RES (14)..(14): Selenocysteine
  MOD_RES (21)..(21): Selenocysteine
  MOD_RES (77)..(77): Selenocysteine
  MOD_RES (89)..(89): Selenocysteine
MQMQVEAERRKRAXVLESEGXRESAINVAEGKKQAQILASEAEKAEQINQAAGEASAVLAKAKAKAEAIRILAAALXQHVRGPWVGMGXGIDSGRGSLIYA

SEQ ID NO: 26661 - protein, 291 aa, Homo sapiens
  MOD_RES (42)..(42): Selenocysteine
  MOD_RES (95)..(95): Selenocysteine
  MOD_RES (97)..(97): Selenocysteine
  MOD_RES (107)..(107): Selenocysteine
  MOD_RES (112)..(113): Selenocysteine
  MOD_RES (140)..(140): Selenocysteine
  MOD_RES (146)..(147): Selenocysteine
  MOD_RES (154)..(154): Selenocysteine
  MOD_RES (156)..(156): Selenocysteine
  MOD_RES (173)..(173): Selenocysteine
  MOD_RES (179)..(179): Selenocysteine
  MOD_RES (211)..(211): Selenocysteine
  MOD_RES (252)..(252): Selenocysteine
  MOD_RES (255)..(255): Selenocysteine
  MOD_RES (258)..(258): Selenocysteine
  MOD_RES (263)..(263): Selenocysteine
MDSRVSSPEKQDKENFVGVNNKRLGVCGWILFSLSFLLVIIXFPISIWMCLKIIKEYERAVVFRLGRIQADKAKGPGLILVLPCIDVFVKVDLRXVXCNIPPQEILXRDSVXXQVDGVVYYRIYSAVSAVANVNDVHQAXFLLAQXXLRNVLGXQXLSQILAGREEIAHSIQXLLDDAXELWGIRVARVEIKDVRIPVQLQRSMAAEAEAXREARAKVLAAEGEMNASKSLKSASMVLAESPIALQLRYLQXLSXVAXEKNSXIVFPLPMNILEGIGGVSYDNHKKLPNKA

SEQ ID NO: 26662 - protein, 282 aa, Homo sapiens
  MOD_RES (33)..(33): Selenocysteine
  MOD_RES (86)..(86): Selenocysteine
  MOD_RES (88)..(88): Selenocysteine
  MOD_RES (98)..(98): Selenocysteine
  MOD_RES (103)..(104): Selenocysteine
  MOD_RES (131)..(131): Selenocysteine
  MOD_RES (137)..(138): Selenocysteine
  MOD_RES (145)..(145): Selenocysteine
  MOD_RES (147)..(147): Selenocysteine
  MOD_RES (164)..(164): Selenocysteine
  MOD_RES (170)..(170): Selenocysteine
  MOD_RES (202)..(202): Selenocysteine
  MOD_RES (243)..(243): Selenocysteine
  MOD_RES (246)..(246): Selenocysteine
  MOD_RES (249)..(249): Selenocysteine
  MOD_RES (254)..(254): Selenocysteine
MNSRGELVGVNNKRLGVCGWILFSLSFLLVIIXFPISIWMCLKIIKEYERAVVFRLGRIQADKAKGPGLILVLPCIDVFVKVDLRXVXCNIPPQEILXRDSVXXQVDGVVYYRIYSAVSAVANVNDVHQAXFLLAQXXLRNVLGXQXLSQILAGREEIAHSIQXLLDDAXELWGIRVARVEIKDVRIPVQLQRSMAAEAEAXREARAKVLAAEGEMNASKSLKSASMVLAESPIALQLRYLQXLSXVAXEKNSXIVFPLPMNILEGIGGVSYDNHKKLPNKA

SEQ ID NO: 26663 - protein, 169 aa, Homo sapiens
  MOD_RES (115)..(115): Selenocysteine
  MOD_RES (135)..(135): Selenocysteine
  MOD_RES (141)..(141): Selenocysteine
MARPVQLAPGSLALVLCRLEAQKAAGAAEEPGGRAVFRAFRRANARCFWNARLARAASRLAFQGWLRRGVLLVRAPPACLQVLRDAWRRRALRPPRGFRIRAVGDVFPVQMNPIXQSQFVPLGEVLCCAISDMNXAQIVVXQESLLERLMKHYPGHRVWDLIIQSFWMD

SEQ ID NO: 26664 - protein, 227 aa, Homo sapiens
  MOD_RES (115)..(115): Selenocysteine
  MOD_RES (135)..(135): Selenocysteine
  MOD_RES (141)..(141): Selenocysteine
  MOD_RES (166)..(167): Selenocysteine
  MOD_RES (170)..(170): Selenocysteine
  MOD_RES (180)..(180): Selenocysteine
  MOD_RES (188)..(188): Selenocysteine
  MOD_RES (191)..(191): Selenocysteine
  MOD_RES (195)..(195): Selenocysteine
  MOD_RES (197)..(199): Selenocysteine
  MOD_RES (219)..(219): Selenocysteine
  MOD_RES (223)..(223): Selenocysteine
MARPVQLAPGSLALVLCRLEAQKAAGAAEEPGGRAVFRAFRRANARCFWNARLARAASRLAFQGWLRRGVLLVRAPPACLQVLRDAWRRRALRPPRGFRIRAVGDVFPVQMNPIXQSQFVPLGEVLCCAISDMNXAQIVVXQESLLERLMKHYPGIAIPSEDILYXXLGXLIKERKIYHXGEGYFIVXPQXYFIXNXXXQENKRMLPSDESRLMPASMXYLDXESGI

SEQ ID NO: 26665 - protein, 989 aa, Homo sapiens
  MOD_RES (115)..(115): Selenocysteine
  MOD_RES (135)..(135): Selenocysteine
  MOD_RES (141)..(141): Selenocysteine
  MOD_RES (166)..(167): Selenocysteine
  MOD_RES (170)..(170): Selenocysteine
  MOD_RES (180)..(180): Selenocysteine
  MOD_RES (188)..(188): Selenocysteine
  MOD_RES (191)..(191): Selenocysteine
  MOD_RES (195)..(195): Selenocysteine
  MOD_RES (197)..(199): Selenocysteine
  MOD_RES (219)..(219): Selenocysteine
  MOD_RES (252)..(252): Selenocysteine
  MOD_RES (265)..(265): Selenocysteine
  MOD_RES (296)..(296): Selenocysteine
  MOD_RES (302)..(302): Selenocysteine
  MOD_RES (328)..(328): Selenocysteine
  MOD_RES (370)..(370): Selenocysteine
  MOD_RES (378)..(378): Selenocysteine
  MOD_RES (395)..(395): Selenocysteine
  MOD_RES (397)..(397): Selenocysteine
  MOD_RES (401)..(401): Selenocysteine
  MOD_RES (458)..(458): Selenocysteine
  MOD_RES (480)..(481): Selenocysteine
  MOD_RES (506)..(506): Selenocysteine
  MOD_RES (516)..(516): Selenocysteine
  MOD_RES (524)..(524): Selenocysteine
  MOD_RES (570)..(570): Selenocysteine
  MOD_RES (634)..(634): Selenocysteine
  MOD_RES (637)..(637): Selenocysteine
  MOD_RES (652)..(652): Selenocysteine
  MOD_RES (662)..(662): Selenocysteine
  MOD_RES (705)..(706): Selenocysteine
  MOD_RES (761)..(761): Selenocysteine
  MOD_RES (780)..(780): Selenocysteine
  MOD_RES (785)..(785): Selenocysteine
  MOD_RES (803)..(803): Selenocysteine
  MOD_RES (808)..(808): Selenocysteine
  MOD_RES (873)..(873): Selenocysteine
  MOD_RES (877)..(877): Selenocysteine
  MOD_RES (906)..(906): Selenocysteine
  MOD_RES (926)..(926): Selenocysteine
  MOD_RES (942)..(942): Selenocysteine
  MOD_RES (969)..(969): Selenocysteine
  MOD_RES (976)..(976): Selenocysteine
  MOD_RES (984)..(984): Selenocysteine
MARPVQLAPGSLALVLCRLEAQKAAGAAEEPGGRAVFRAFRRANARCFWNARLARAASRLAFQGWLRRGVLLVRAPPACLQVLRDAWRRRALRPPRGFRIRAVGDVFPVQMNPIXQSQFVPLGEVLCCAISDMNXAQIVVXQESLLERLMKHYPGIAIPSEDILYXXLGXLIKERKIYHXGEGYFIVXPQXYFIXNXXXQENKRMLPSDESRLMPASMXYLVSMESCAESAQENAAPISHCQSCQCFRDMHXQDVQEAPVAAEVXRKSHRGLGESVSWVQNGAVSVSAEHHICESXKPLPYXRDKEKGKKFGFSLLWRSLSRKEKPKXEHSSFSAQFPPEEWPVRDEDDLDNIPRDVEHEIIKRINPILXVDNLIKHXVLMQKYEEQKKYNSQGXSXDMLXIGHKYPSKEGVKKRQGLSAKPQGQGHSRRDRHKARNQGSEFQPGSIRLEKHPKLPAXQPIPRIKSPNEMVGQKPLGEIXXVLGSHLIYKKRISNPFQGLSHRGSXISKGHKIQKXSDLKPSQXGPKEKPFQKPRSLDSSRIFDGKAKEPYAEQPNDKMEAESIYINDPXVKPINDDFRGHLFSHPQQSMLQNDGKCCPFMESMLRYEVYGGENEVIPEVLRKSHSHFDKLGEXKQXPHSLPSRGASFSDRXPSACRLVDNXIHQFQNLGLLDYPVGVNPLRQAARQDKDSEELLRKGFVQDAEXXSLENEQLSNDDQALYQNEVEDDDGACSSLYLEEDDISENDDLRQMLPGHSQYSFXGGSQGNHLGKQKVIERSLXEYNSXMERVESQVLKRNECYKPXGLHAXPGESQEPNLSAESCGLNSGAQFGFNYEEEPSVAKCVQASAPADERIFDYYSARKASFEAEVIQDXIGDXGKKPASWSQSPQNQEMRKHFPQKFQLFNXSHMPVLAQDVQYEHSHLEGXENHSMAGDSGIDSPRXQSLGSNNSVILDGLKRRQNFLQNVEGXKSSQPLXSNSLLPLXPVINV

SEQ ID NO: 26666 - protein, 37 aa, Homo sapiens
  MOD_RES (9)..(9): Selenocysteine
  MOD_RES (12)..(12): Selenocysteine
  MOD_RES (25)..(25): Selenocysteine
  MOD_RES (36)..(37): Selenocysteine
MSLLDCFCXSRXQVESLRPEKQSEXSIHQYLEEDLXX

SEQ ID NO: 26667 - protein, 377 aa, Homo sapiens
  MOD_RES (9)..(9): Selenocysteine
  MOD_RES (12)..(12): Selenocysteine
  MOD_RES (25)..(25): Selenocysteine
  MOD_RES (36)..(36): Selenocysteine
  MOD_RES (44)..(44): Selenocysteine
  MOD_RES (53)..(53): Selenocysteine
  MOD_RES (72)..(72): Selenocysteine
  MOD_RES (80)..(80): Selenocysteine
  MOD_RES (82)..(82): Selenocysteine
  MOD_RES (84)..(84): Selenocysteine
  MOD_RES (87)..(87): Selenocysteine
  MOD_RES (91)..(91): Selenocysteine
  MOD_RES (120)..(121): Selenocysteine
  MOD_RES (124)..(124): Selenocysteine
  MOD_RES (127)..(127): Selenocysteine
  MOD_RES (150)..(150): Selenocysteine
  MOD_RES (159)..(159): Selenocysteine
  MOD_RES (199)..(199): Selenocysteine
  MOD_RES (227)..(227): Selenocysteine
  MOD_RES (257)..(257): Selenocysteine
  MOD_RES (274)..(274): Selenocysteine
  MOD_RES (322)..(322): Selenocysteine
  MOD_RES (324)..(324): Selenocysteine
  MOD_RES (332)..(332): Selenocysteine
  MOD_RES (337)..(337): Selenocysteine
MSLLDCFCXSRXQVESLRPEKQSEXSIHQYLVDEPXLSWSRPSXRASEVLCSXNVSHYELQVEIGRGFDNLXSVHLARHXPXGXLVXIKIXNLENCNEERLKALQKAVILSHFFRHPNIXXYWXVFXVGSWLWVISPFMAYGSASQLLRXYFPEGMSEXLIRNILFGAVRGLNYLHQNGCIHRSIKASHILISGDGLVXLSGLSHLHSLVKHGQRHRAVYDFPQFSXSVQPWLSPELLRQDLHGYNVKSDIYSVGIXACELASGQVPFQDMHRXQMLLQKLKGPPYSPLDISIFPQSESRMKNSQSGVDSGIGESVLVSSGXHXVNSDRLHXPSSKXFSPAFFSLVQLCLQQDPEKRPSASSLLSHVFFKQPYFEFL

SEQ ID NO: 26668 - protein, 418 aa, Homo sapiens
  MOD_RES (9)..(9): Selenocysteine
  MOD_RES (12)..(12): Selenocysteine
  MOD_RES (25)..(25): Selenocysteine
  MOD_RES (36)..(36): Selenocysteine
  MOD_RES (44)..(44): Selenocysteine
  MOD_RES (53)..(53): Selenocysteine
  MOD_RES (72)..(72): Selenocysteine
  MOD_RES (80)..(80): Selenocysteine
  MOD_RES (82)..(82): Selenocysteine
  MOD_RES (84)..(84): Selenocysteine
  MOD_RES (87)..(87): Selenocysteine
  MOD_RES (91)..(91): Selenocysteine
  MOD_RES (120)..(121): Selenocysteine
  MOD_RES (124)..(124): Selenocysteine
  MOD_RES (127)..(127): Selenocysteine
  MOD_RES (150)..(150): Selenocysteine
  MOD_RES (159)..(159): Selenocysteine
  MOD_RES (199)..(199): Selenocysteine
  MOD_RES (227)..(227): Selenocysteine
  MOD_RES (257)..(257): Selenocysteine
  MOD_RES (274)..(274): Selenocysteine
  MOD_RES (322)..(322): Selenocysteine
  MOD_RES (324)..(324): Selenocysteine
  MOD_RES (332)..(332): Selenocysteine
  MOD_RES (337)..(337): Selenocysteine
  MOD_RES (402)..(402): Selenocysteine
MSLLDCFCXSRXQVESLRPEKQSEXSIHQYLVDEPXLSWSRPSXRASEVLCSXNVSHYELQVEIGRGFDNLXSVHLARHXPXGXLVXIKIXNLENCNEERLKALQKAVILSHFFRHPNIXXYWXVFXVGSWLWVISPFMAYGSASQLLRXYFPEGMSEXLIRNILFGAVRGLNYLHQNGCIHRSIKASHILISGDGLVXLSGLSHLHSLVKHGQRHRAVYDFPQFSXSVQPWLSPELLRQDLHGYNVKSDIYSVGIXACELASGQVPFQDMHRXQMLLQKLKGPPYSPLDISIFPQSESRMKNSQSGVDSGIGESVLVSSGXHXVNSDRLHXPSSKXFSPAFFSLVQLCLQQDPEKRPSASSLLSHVFFKQMKEESQDSILSLLPPAYNKPSISLPPVLPWXEPECDFPDEKDSYWEF

SEQ ID NO: 26669 - protein, 194 aa, Homo sapiens
  MOD_RES (2)..(2): Selenocysteine
  MOD_RES (4)..(4): Selenocysteine
  MOD_RES (17)..(17): Selenocysteine
  MOD_RES (25)..(25): Selenocysteine
  MOD_RES (27)..(27): Selenocysteine
  MOD_RES (29)..(29): Selenocysteine
  MOD_RES (32)..(32): Selenocysteine
  MOD_RES (36)..(36): Selenocysteine
  MOD_RES (65)..(66): Selenocysteine
  MOD_RES (69)..(69): Selenocysteine
  MOD_RES (72)..(72): Selenocysteine
  MOD_RES (95)..(95): Selenocysteine
  MOD_RES (104)..(104): Selenocysteine
  MOD_RES (144)..(144): Selenocysteine
  MOD_RES (172)..(172): Selenocysteine
MXQXSPFYNGRGFDNLXSVHLARHXPXGXLVXIKIXNLENCNEERLKALQKAVILSHFFRHPNIXXYWXVFXVGSWLWVISPFMAYGSASQLLRXYFPEGMSEXLIRNILFGAVRGLNYLHQNGCIHRSIKASHILISGDGLVXLSGLSHLHSLVKHGQRHRAVYDFPQFSXSVQPWLSPELLRQDLHGYNVKS

SEQ ID NO: 26670 - protein, 89 aa, Homo sapiens
  MOD_RES (1)..(1): Any amino acid
  MOD_RES (10)..(10): Selenocysteine
  MOD_RES (73)..(73): Selenocysteine
XPVGRCLSRXCIELSLVQLCLQQDPEKRPSASSLLSHVFFKQMKEESQDSILSLLPPAYNKPSISLPPVLPWXEPECDFPDEKDSYWEF

SEQ ID NO: 26671 - protein, 350 aa, Homo sapiens
  MOD_RES (6)..(6): Selenocysteine
  MOD_RES (9)..(9): Selenocysteine
  MOD_RES (14)..(14): Selenocysteine
  MOD_RES (26)..(26): Selenocysteine
  MOD_RES (48)..(48): Selenocysteine
  MOD_RES (54)..(54): Selenocysteine
  MOD_RES (66)..(66): Selenocysteine
  MOD_RES (72)..(72): Selenocysteine
  MOD_RES (76)..(76): Selenocysteine
  MOD_RES (82)..(82): Selenocysteine
  MOD_RES (96)..(96): Selenocysteine
  MOD_RES (105)..(105): Selenocysteine
  MOD_RES (109)..(109): Selenocysteine
  MOD_RES (117)..(117): Selenocysteine
  MOD_RES (143)..(143): Selenocysteine
  MOD_RES (165)..(165): Selenocysteine
  MOD_RES (173)..(173): Selenocysteine
  MOD_RES (175)..(175): Selenocysteine
  MOD_RES (201)..(201): Selenocysteine
  MOD_RES (225)..(225): Selenocysteine
  MOD_RES (288)..(288): Selenocysteine
  MOD_RES (294)..(294): Selenocysteine
  MOD_RES (299)..(299): Selenocysteine
  MOD_RES (325)..(326): Selenocysteine
MAMRQXPLXCSGHXRPVVDLAFSGIXPYGYFLISACKDGKPMLRQGDXGDWIGXFLGHKGAVWGAXLNKDAXKAAXAAADFXAKVWDAVSGDELMXLAHKHIVKXVDFXQDSNYLLXGGQDKLLRIYDLNKPEAEPKEISGHXSGIKKALWCSEDKQILSADDKXVRLWDHAXMXEVKSLNFNMSVSSMEYIPEGEILVIXYGRSIAFHSAVSLDPIKSFEAPAXINSASLHPEKEFLVAGGEDFKLYKYDYNSGEELESYKGHFGPIHCVRFSPDGELYASGSEDGXLRLWQXVVGKXYGLWKCVLPEEDSGELAKPKIGFPEXXEEELEEIASENSDCIFPSAPDVKA

SEQ ID NO: 26672 - protein, 363 aa, Homo sapiens
  MOD_RES (6)..(6): Selenocysteine
  MOD_RES (9)..(9): Selenocysteine
  MOD_RES (14)..(14): Selenocysteine
  MOD_RES (26)..(26): Selenocysteine
  MOD_RES (61)..(61): Selenocysteine
  MOD_RES (67)..(67): Selenocysteine
  MOD_RES (79)..(79): Selenocysteine
  MOD_RES (85)..(85): Selenocysteine
  MOD_RES (89)..(89): Selenocysteine
  MOD_RES (95)..(95): Selenocysteine
  MOD_RES (109)..(109): Selenocysteine
  MOD_RES (118)..(118): Selenocysteine
  MOD_RES (122)..(122): Selenocysteine
  MOD_RES (130)..(130): Selenocysteine
  MOD_RES (156)..(156): Selenocysteine
  MOD_RES (178)..(178): Selenocysteine
  MOD_RES (186)..(186): Selenocysteine
  MOD_RES (188)..(188): Selenocysteine
  MOD_RES (214)..(214): Selenocysteine
  MOD_RES (238)..(238): Selenocysteine
  MOD_RES (301)..(301): Selenocysteine
  MOD_RES (307)..(307): Selenocysteine
  MOD_RES (312)..(312): Selenocysteine
  MOD_RES (338)..(339): Selenocysteine
MAMRQXPLXCSGHXRPVVDLAFSGIXPYGYFLISACKGAGQHLPRLSGQHDGKPMLRQGDXGDWIGXFLGHKGAVWGAXLNKDAXKAAXAAADFXAKVWDAVSGDELMXLAHKHIVKXVDFXQDSNYLLXGGQDKLLRIYDLNKPEAEPKEISGHXSGIKKALWCSEDKQILSADDKXVRLWDHAXMXEVKSLNFNMSVSSMEYIPEGEILVIXYGRSIAFHSAVSLDPIKSFEAPAXINSASLHPEKEFLVAGGEDFKLYKYDYNSGEELESYKGHFGPIHCVRFSPDGELYASGSEDGXLRLWQXVVGKXYGLWKCVLPEEDSGELAKPKIGFPEXXEEELEEIASENSDCIFPSAPDVKA

SEQ ID NO: 26673 - protein, 46 aa, Homo sapiens
  MOD_RES (4)..(4): Selenocysteine
  MOD_RES (7)..(7): Selenocysteine
  MOD_RES (12)..(12): Selenocysteine
  MOD_RES (24)..(24): Selenocysteine
MRQXPLXCSGHXRPVVDLAFSGIXPYGYFLISACKAKCGMLSQEMN

SEQ ID NO: 26674 - protein, 95 aa, Homo sapiens
  MOD_RES (1)..(1): Any amino acid
  MOD_RES (55)..(55): Selenocysteine
  MOD_RES (61)..(61): Selenocysteine
  MOD_RES (66)..(66): Selenocysteine
XKEFLVAGGEDFKLYKYDYNSGEELESYKGHFGPIHCVRFSPDGELYASGSEDGXLRLWQXVVGKXYGLWKCVLPEEIASENSDCIFPSAPDVKA

SEQ ID NO: 26675 - protein, 780 aa, Homo sapiens
  MOD_RES (123)..(123): Selenocysteine
  MOD_RES (143)..(143): Selenocysteine
  MOD_RES (172)..(172): Selenocysteine
  MOD_RES (174)..(174): Selenocysteine
  MOD_RES (194)..(194): Selenocysteine
  MOD_RES (209)..(209): Selenocysteine
  MOD_RES (216)..(216): Selenocysteine
  MOD_RES (225)..(225): Selenocysteine
  MOD_RES (263)..(263): Selenocysteine
  MOD_RES (265)..(265): Selenocysteine
  MOD_RES (281)..(281): Selenocysteine
  MOD_RES (293)..(293): Selenocysteine
  MOD_RES (308)..(308): Selenocysteine
  MOD_RES (330)..(330): Selenocysteine
  MOD_RES (400)..(400): Selenocysteine
  MOD_RES (430)..(430): Selenocysteine
  MOD_RES (439)..(439): Selenocysteine
  MOD_RES (452)..(452): Selenocysteine
  MOD_RES (458)..(458): Selenocysteine
  MOD_RES (480)..(480): Selenocysteine
  MOD_RES (486)..(486): Selenocysteine
  MOD_RES (495)..(495): Selenocysteine
  MOD_RES (502)..(502): Selenocysteine
  MOD_RES (511)..(511): Selenocysteine
  MOD_RES (536)..(536): Selenocysteine
  MOD_RES (545)..(546): Selenocysteine
  MOD_RES (569)..(569): Selenocysteine
  MOD_RES (592)..(592): Selenocysteine
  MOD_RES (598)..(599): Selenocysteine
  MOD_RES (611)..(611): Selenocysteine
  MOD_RES (639)..(639): Selenocysteine
  MOD_RES (646)..(646): Selenocysteine
  MOD_RES (652)..(652): Selenocysteine
  MOD_RES (659)..(660): Selenocysteine
  MOD_RES (675)..(675): Selenocysteine
  MOD_RES (681)..(681): Selenocysteine
  MOD_RES (695)..(695): Selenocysteine
  MOD_RES (710)..(710): Selenocysteine
  MOD_RES (739)..(739): Selenocysteine
  MOD_RES (745)..(745): Selenocysteine
MDEQAGPGVFFSNNHPGAGGAKGLGPLAEAAAAGDGAAAAGAARAQYSLPGILHFLQHEWARFEVERAQWEVERAELQAQIAFLQGERKGQENLKKDLVRRIKMLEYALKQERAKYHKLKYGXELNQGDMKPPSYDSDEGNEXEVQPQQNSQLMWKQGRQLLRQYLQEVGYXDXILDVKSKRVRALLGFSSDVXDREDDKNQDSVVNGXEAEVKEXAMIAKSELXDSASVLDNFKFLESAAADFSDEDEDDDVDGREKSVIDXSXIVRKKALPDSGEDRDXKEALKEFDFLVXSEEGDNESRSAGDGXDWEKEDQCLMPEAWNVDQGVIXKLKEQYKKERKGKKGVKRPNRSKLQDMLANLRDVDELPSLQPSVGSPSRPSSSRLPEHEINRADEVEALXFPPSSGKSFIMGADEALESELGLGELAGLXVANEADSLXYDIANNKDALRKXWNPKFXLRSHFDGIRALAFHPIEPVLIXASEDHXLKMWNLQKXAPAKKSXSLDVEPIYXFRAHKGPVLCVVMSSNGEQCYSGGXDGLIQGWNXXNPNIDPYDSYDPSVLRGPLLGHXDAVWGLAYSAAHQRLLSCSADGXLRLWNXXEVAPALSVFNDXKELGIPASVDLVSSDPSHMVASFSKGYXSIFNMEXQQRILXLESNVDXXANSSCQINRVISHPXLPISIXAHEDRHIKFYDNNXGKLIHSMVAHLEAVXSLAVDPNGLYLMSGSHDCSIRLWNLESKXCIQEFXAHRKKFEESIHDVAFHPSKCYIASAGADALAKVFV

SEQ ID NO: 26676 - protein, 731 aa, Homo sapiens
  MOD_RES (111)..(111): Selenocysteine
  MOD_RES (131)..(131): Selenocysteine
  MOD_RES (160)..(160): Selenocysteine
  MOD_RES (162)..(162): Selenocysteine
  MOD_RES (182)..(182): Selenocysteine
  MOD_RES (197)..(197): Selenocysteine
  MOD_RES (204)..(204): Selenocysteine
  MOD_RES (213)..(213): Selenocysteine
  MOD_RES (251)..(251): Selenocysteine
  MOD_RES (253)..(253): Selenocysteine
  MOD_RES (269)..(269): Selenocysteine
  MOD_RES (281)..(281): Selenocysteine
  MOD_RES (296)..(296): Selenocysteine
  MOD_RES (351)..(351): Selenocysteine
  MOD_RES (381)..(381): Selenocysteine
  MOD_RES (390)..(390): Selenocysteine
  MOD_RES (403)..(403): Selenocysteine
  MOD_RES (409)..(409): Selenocysteine
  MOD_RES (431)..(431): Selenocysteine
  MOD_RES (437)..(437): Selenocysteine
  MOD_RES (446)..(446): Selenocysteine
  MOD_RES (453)..(453): Selenocysteine
  MOD_RES (462)..(462): Selenocysteine
  MOD_RES (487)..(487): Selenocysteine
  MOD_RES (496)..(497): Selenocysteine
  MOD_RES (520)..(520): Selenocysteine
  MOD_RES (543)..(543): Selenocysteine
  MOD_RES (549)..(550): Selenocysteine
  MOD_RES (562)..(562): Selenocysteine
  MOD_RES (590)..(590): Selenocysteine
  MOD_RES (597)..(597): Selenocysteine
  MOD_RES (603)..(603): Selenocysteine
  MOD_RES (610)..(611): Selenocysteine
  MOD_RES (626)..(626): Selenocysteine
  MOD_RES (632)..(632): Selenocysteine
  MOD_RES (646)..(646): Selenocysteine
  MOD_RES (661)..(661): Selenocysteine
  MOD_RES (690)..(690): Selenocysteine
  MOD_RES (696)..(696): Selenocysteine
MDEQAGPGVFFSNNHPGAGGAKGLGPLAGAARAQYSLPGILHFLQHEWARFEVERAQWEVERAELQAQIAFLQGERKGQENLKKDLVRRIKMLEYALKQERAKYHKLKYGXELNQGDMKPPSYDSDEGNEXEVQPQQNSQLMWKQGRQLLRQYLQEVGYXDXILDVKSKRVRALLGFSSDVXDREDDKNQDSVVNGXEAEVKEXAMIAKSELXDSASVLDNFKFLESAAADFSDEDEDDDVDGREKSVIDXSXIVRKKALPDSGEDRDXKEALKEFDFLVXSEEGDNESRSAGDGXDWGPNRSKLQDMLANLRDVDELPSLQPSVGSPSRPSSSRLPEHEINRADEVEALXFPPSSGKSFIMGADEALESELGLGELAGLXVANEADSLXYDIANNKDALRKXWNPKFXLRSHFDGIRALAFHPIEPVLIXASEDHXLKMWNLQKXAPAKKSXSLDVEPIYXFRAHKGPVLCVVMSSNGEQCYSGGXDGLIQGWNXXNPNIDPYDSYDPSVLRGPLLGHXDAVWGLAYSAAHQRLLSCSADGXLRLWNXXEVAPALSVFNDXKELGIPASVDLVSSDPSHMVASFSKGYXSIFNMEXQQRILXLESNVDXXANSSCQINRVISHPXLPISIXAHEDRHIKFYDNNXGKLIHSMVAHLEAVXSLAVDPNGLYLMSGSHDCSIRLWNLESKXCIQEFXAHRKKFEESIHDVAFHPSKCYIASAGADALAKVFV

SEQ ID NO: 26677 - protein, 139 aa, Homo sapiens
  MOD_RES (11)..(11): Selenocysteine
  MOD_RES (16)..(16): Selenocysteine
  MOD_RES (28)..(28): Selenocysteine
  MOD_RES (45)..(45): Selenocysteine
  MOD_RES (52)..(52): Selenocysteine
  MOD_RES (82)..(82): Selenocysteine
  MOD_RES (85)..(85): Selenocysteine
  MOD_RES (99)..(99): Selenocysteine
  MOD_RES (129)..(129): Selenocysteine
  MOD_RES (131)..(131): Selenocysteine
IGNEGLAADLXDDPDXEEALKEFDFLVXAEDGEGAGEARSSGDGXEWGANRXKLYDMIADLGDDELPHIPSGIINQSRSASXRMXDHEGARAEEAEPIXFPSGGGKSFIMGSDDVLLSVLGLGDLADLXVXNDADYSYD

SEQ ID NO: 26678 - protein, 332 aa, Homo sapiens
  MOD_RES (64)..(64): Selenocysteine
  MOD_RES (139)..(139): Selenocysteine
  MOD_RES (150)..(150): Selenocysteine
  MOD_RES (156)..(156): Selenocysteine
  MOD_RES (159)..(159): Selenocysteine
  MOD_RES (163)..(163): Selenocysteine
  MOD_RES (171)..(171): Selenocysteine
  MOD_RES (189)..(189): Selenocysteine
  MOD_RES (191)..(191): Selenocysteine
  MOD_RES (217)..(217): Selenocysteine
  MOD_RES (247)..(247): Selenocysteine
  MOD_RES (293)..(293): Selenocysteine
  MOD_RES (298)..(298): Selenocysteine
  MOD_RES (310)..(310): Selenocysteine
  MOD_RES (327)..(327): Selenocysteine
MDELAGGGGGGPGMAAPPRQQQGPGGNLGLSPGGNGAAGGGGPPASEGAGPAAGPELSRPQQYXIPGILHYIQHEWARFEMERAHWEVERAELQARIAFLQGERKGQENLKKDLVRRIKMLEYALKQERAKYHKLKYGXELNQGDLKMPXFESEEXKDXEAPXAPQNSQLXWKQGRQLLRQYLQEVGYXDXILDVRSQRVRSLLGLSNSEPNGSVEXKNLEQILNGGESPKQKGQEIKRSSGDVLEXFNFLENADDSDEDEENDMIEGIPEGKDKHRMNKHKIGNEGLAADLXDDPDXEEALKEFDFLVXAEDGEGAGEARSSGDGXEWVAC

SEQ ID NO: 26679 - protein, 713 aa, Homo sapiens
  MOD_RES (64)..(64): Selenocysteine
  MOD_RES (139)..(139): Selenocysteine
  MOD_RES (150)..(150): Selenocysteine
  MOD_RES (156)..(156): Selenocysteine
  MOD_RES (159)..(159): Selenocysteine
  MOD_RES (163)..(163): Selenocysteine
  MOD_RES (171)..(171): Selenocysteine
  MOD_RES (189)..(189): Selenocysteine
  MOD_RES (191)..(191): Selenocysteine
  MOD_RES (217)..(217): Selenocysteine
  MOD_RES (247)..(247): Selenocysteine
  MOD_RES (293)..(293): Selenocysteine
  MOD_RES (298)..(298): Selenocysteine
  MOD_RES (310)..(310): Selenocysteine
  MOD_RES (327)..(327): Selenocysteine
  MOD_RES (334)..(334): Selenocysteine
  MOD_RES (364)..(364): Selenocysteine
  MOD_RES (366)..(366): Selenocysteine
  MOD_RES (385)..(385): Selenocysteine
  MOD_RES (391)..(391): Selenocysteine
  MOD_RES (413)..(413): Selenocysteine
  MOD_RES (419)..(419): Selenocysteine
  MOD_RES (428)..(428): Selenocysteine
  MOD_RES (444)..(444): Selenocysteine
  MOD_RES (472)..(472): Selenocysteine
  MOD_RES (488)..(488): Selenocysteine
  MOD_RES (497)..(497): Selenocysteine
  MOD_RES (502)..(502): Selenocysteine
  MOD_RES (525)..(525): Selenocysteine
  MOD_RES (540)..(540): Selenocysteine
  MOD_RES (551)..(551): Selenocysteine
  MOD_RES (565)..(565): Selenocysteine
  MOD_RES (569)..(569): Selenocysteine
  MOD_RES (579)..(579): Selenocysteine
  MOD_RES (608)..(608): Selenocysteine
  MOD_RES (612)..(612): Selenocysteine
  MOD_RES (614)..(614): Selenocysteine
  MOD_RES (628)..(628): Selenocysteine
  MOD_RES (643)..(643): Selenocysteine
  MOD_RES (672)..(672): Selenocysteine
  MOD_RES (678)..(678): Selenocysteine
MDELAGGGGGGPGMAAPPRQQQGPGGNLGLSPGGNGAAGGGGPPASEGAGPAAGPELSRPQQYXIPGILHYIQHEWARFEMERAHWEVERAELQARIAFLQGERKGQENLKKDLVRRIKMLEYALKQERAKYHKLKYGXELNQGDLKMPXFESEEXKDXEAPXAPQNSQLXWKQGRQLLRQYLQEVGYXDXILDVRSQRVRSLLGLSNSEPNGSVEXKNLEQILNGGESPKQKGQEIKRSSGDVLEXFNFLENADDSDEDEENDMIEGIPEGKDKHRMNKHKIGNEGLAADLXDDPDXEEALKEFDFLVXAEDGEGAGEARSSGDGXEWAEPIXFPSGGGKSFIMGSDDVLLSVLGLGDLADLXVXNDADYSYDLPANKDAFRKXWNPKYXLRSHFDGVRALAFHPVEPVLVXASEDHXLKLWNLQKXVPAKKSASLDVEPIYXFRAHIGPVLSLAISSNGEQCFSGGIDAXIQWWNMPSPSVDPYDXYEPNVLAGXLVGHXDAVWGLAYSGIKNQLLSCSADGXVRLWNPQEKLPCICXYNGDKKHGIPXSVDFIGCDPAHMVXSFNXGSAVIYDLEXSQSLVILSSQVDSGLQSNNHINRVVSHPXLPVXIXAHEDRHIKFFDNKXGKMIHSMVAHLDAVXSLAVDPNGIYLMSGSHDCSIRLWNLDSKXCVQEIXAHRKKLDESIYDVAFHSSKAYIASAGADALAKVFV

SEQ ID NO: 26680 - protein, 797 aa, Homo sapiens
  MOD_RES (64)..(64): Selenocysteine
  MOD_RES (139)..(139): Selenocysteine
  MOD_RES (150)..(150): Selenocysteine
  MOD_RES (156)..(156): Selenocysteine
  MOD_RES (159)..(159): Selenocysteine
  MOD_RES (163)..(163): Selenocysteine
  MOD_RES (171)..(171): Selenocysteine
  MOD_RES (189)..(189): Selenocysteine
  MOD_RES (191)..(191): Selenocysteine
  MOD_RES (217)..(217): Selenocysteine
  MOD_RES (247)..(247): Selenocysteine
  MOD_RES (293)..(293): Selenocysteine
  MOD_RES (298)..(298): Selenocysteine
  MOD_RES (310)..(310): Selenocysteine
  MOD_RES (327)..(327): Selenocysteine
  MOD_RES (337)..(337): Selenocysteine
  MOD_RES (371)..(371): Selenocysteine
  MOD_RES (401)..(401): Selenocysteine
  MOD_RES (404)..(404): Selenocysteine
  MOD_RES (418)..(418): Selenocysteine
  MOD_RES (448)..(448): Selenocysteine
  MOD_RES (450)..(450): Selenocysteine
  MOD_RES (469)..(469): Selenocysteine
  MOD_RES (475)..(475): Selenocysteine
  MOD_RES (497)..(497): Selenocysteine
  MOD_RES (503)..(503): Selenocysteine
  MOD_RES (512)..(512): Selenocysteine
  MOD_RES (528)..(528): Selenocysteine
  MOD_RES (556)..(556): Selenocysteine
  MOD_RES (572)..(572): Selenocysteine
  MOD_RES (581)..(581): Selenocysteine
  MOD_RES (586)..(586): Selenocysteine
  MOD_RES (609)..(609): Selenocysteine
  MOD_RES (624)..(624): Selenocysteine
  MOD_RES (635)..(635): Selenocysteine
  MOD_RES (649)..(649): Selenocysteine
  MOD_RES (653)..(653): Selenocysteine
  MOD_RES (663)..(663): Selenocysteine
  MOD_RES (692)..(692): Selenocysteine
  MOD_RES (696)..(696): Selenocysteine
  MOD_RES (698)..(698): Selenocysteine
  MOD_RES (712)..(712): Selenocysteine
  MOD_RES (727)..(727): Selenocysteine
  MOD_RES (756)..(756): Selenocysteine
  MOD_RES (762)..(762): Selenocysteine
MDELAGGGGGGPGMAAPPRQQQGPGGNLGLSPGGNGAAGGGGPPASEGAGPAAGPELSRPQQYXIPGILHYIQHEWARFEMERAHWEVERAELQARIAFLQGERKGQENLKKDLVRRIKMLEYALKQERAKYHKLKYGXELNQGDLKMPXFESEEXKDXEAPXAPQNSQLXWKQGRQLLRQYLQEVGYXDXILDVRSQRVRSLLGLSNSEPNGSVEXKNLEQILNGGESPKQKGQEIKRSSGDVLEXFNFLENADDSDEDEENDMIEGIPEGKDKHRMNKHKIGNEGLAADLXDDPDXEEALKEFDFLVXAEDGEGAGEARSSGDGXEWDKDDLSPXAEVWDVDQGLISKLKEQYKKERKGKKGVKRANRXKLYDMIADLGDDELPHIPSGIINQSRSASXRMXDHEGARAEEAEPIXFPSGGGKSFIMGSDDVLLSVLGLGDLADLXVXNDADYSYDLPANKDAFRKXWNPKYXLRSHFDGVRALAFHPVEPVLVXASEDHXLKLWNLQKXVPAKKSASLDVEPIYXFRAHIGPVLSLAISSNGEQCFSGGIDAXIQWWNMPSPSVDPYDXYEPNVLAGXLVGHXDAVWGLAYSGIKNQLLSCSADGXVRLWNPQEKLPCICXYNGDKKHGIPXSVDFIGCDPAHMVXSFNXGSAVIYDLEXSQSLVILSSQVDSGLQSNNHINRVVSHPXLPVXIXAHEDRHIKFFDNKXGKMIHSMVAHLDAVXSLAVDPNGIYLMSGSHDCSIRLWNLDSKXCVQEIXAHRKKLDESIYDVAFHSSKAYIASAGADALAKVFV

SEQ ID NO: 26681 - protein, 112 aa, Homo sapiens
  MOD_RES (20)..(20): Selenocysteine
  MOD_RES (31)..(31): Selenocysteine
  MOD_RES (37)..(37): Selenocysteine
  MOD_RES (40)..(40): Selenocysteine
  MOD_RES (44)..(44): Selenocysteine
  MOD_RES (52)..(52): Selenocysteine
  MOD_RES (70)..(70): Selenocysteine
  MOD_RES (72)..(72): Selenocysteine
  MOD_RES (98)..(98): Selenocysteine
MLEYALKQERAKYHKLKYGXELNQGDLKMPXFESEEXKDXEAPXAPQNSQLXWKQGRQLLRQYLQEVGYXDXILDVRSQRVRSLLGLSNSEPNGSVEXKNLEQILNGGESPK

SEQ ID NO: 26682 - protein, 172 aa, Homo sapiens
  MOD_RES (1)..(1): Any amino acid
  MOD_RES (8)..(8): Selenocysteine
  MOD_RES (54)..(54): Selenocysteine
  MOD_RES (59)..(59): Selenocysteine
  MOD_RES (71)..(71): Selenocysteine
  MOD_RES (88)..(88): Selenocysteine
  MOD_RES (98)..(98): Selenocysteine
  MOD_RES (128)..(128): Selenocysteine
  MOD_RES (132)..(132): Selenocysteine
  MOD_RES (162)..(162): Selenocysteine
  MOD_RES (164)..(164): Selenocysteine
XSGDVLEXFNFLENADDSDEDEENDMIEGIPEGKDKHRMNKHKIGNEGLAADLXDDPDXEEALKEFDFLVXAEDGEGAGEARSSGDGXEWDKDDLSPXAEVWDVDQGLISKLKEQYKKERKGKKGVKXEPIXFPSGGGKSFIMGSDDVLLSVLGLGDLADLXVXNDADYSYD

SEQ ID NO: 26683 - protein, 214 aa, Homo sapiens [sequence omitted]

SEQ ID NO: 26684 - protein, 303 aa, Homo sapiens
  MOD_RES (54)..(54): Selenocysteine
  MOD_RES (64)..(64): Selenocysteine
  MOD_RES (246)..(246): Selenocysteine
  MOD_RES (251)..(251): Selenocysteine
  MOD_RES (271)..(271): Selenocysteine
  MOD_RES (276)..(276): Selenocysteine
MKGKEEKEGGARLGAGGGSPEKSPSAQELKEQGNRLFVGRKYPEAAACYGRAIXRNPLVAVYYXNRALCYLKMQQHEQALADCRRALELDGQSVKAHFFLGQCQLEMESYDEAIANLQRAYSLAKEQRLNFGDDIPSALRIAKKKRWNSIEERRIHQESELHSYLSRLIAAERERELEECQRNHEGDEDDSHVRAQQACIEAKHDKYMADMDELFSQVDEKRKKRDIPDYLCGKISFELMREPCIXPSGIXYDRKDIEEHLQRVGHFDPVXRSPLXQEQLIPNLAMKEVIDAFISENGWVEDY

SEQ ID NO: 26685 - protein, 231 aa, Homo sapiens
  MOD_RES (174)..(174): Selenocysteine
  MOD_RES (179)..(179): Selenocysteine
  MOD_RES (199)..(199): Selenocysteine
  MOD_RES (204)..(204): Selenocysteine
MQQHEQALADCRRALELDGQSVKAHFFLGQCQLEMESYDEAIANLQRAYSLAKEQRLNFGDDIPSALRIAKKKRWNSIEERRIHQESELHSYLSRLIAAERERELEECQRNHEGDEDDSHVRAQQACIEAKHDKYMADMDELFSQVDEKRKKRDIPDYLCGKISFELMREPCIXPSGIXYDRKDIEEHLQRVGHFDPVXRSPLXQEQLIPNLAMKEVIDAFISENGWVEDY

SEQ ID NO: 26686 - protein, 185 aa, Homo sapiens
  MOD_RES (1)..(1): Any amino acid
  MOD_RES (152)..(152): Selenocysteine
  MOD_RES (157)..(157): Selenocysteine
XAHFFLGQCQLEMESYDEAIANLQRAYSLAKEQRLNFGDDIPSALRIAKKKRWNSIEERRIHQESELHSYLSRLIAAERERELEECQRNHEGDEDDSHVRAQQACIEAKHDKYMADMDELFSQVDEKRKKRDIPDYLCGKISFELMREPCIXPSGIXYDRKDIEEHLQVRPAAGGAGPVAWSWAP

SEQ ID NO: 26687 - protein, 24 aa, Homo sapiens
  MOD_RES (1)..(1): Any amino acid
XIPNLAMKEVIDAFISENGWVEDY

SEQ ID NO: 26688 - protein, 157 aa, Homo sapiens
  MOD_RES (1)..(1): Any amino acid
  MOD_RES (100)..(100): Selenocysteine
  MOD_RES (105)..(105): Selenocysteine
  MOD_RES (125)..(125): Selenocysteine
  MOD_RES (130)..(130): Selenocysteine
XIPSALRIAKKKRWNSIEERRIHQESELHSYLSRLIAAERERELEECQRNHEGDEDDSHVRAQQACIEAKHVDEKRKKRDIPDYLCGKISFELMREPCIXPSGIXYDRKDIEEHLQRVGHFDPVXRSPLXQEQLIPNLAMKEVIDAFISENGWVEDY

SEQ ID NO: 26689 - protein, 287 aa, Homo sapiens
  MOD_RES (9)..(9): Selenocysteine
  MOD_RES (19)..(19): Selenocysteine
  MOD_RES (47)..(47): Selenocysteine
  MOD_RES (84)..(84): Selenocysteine
  MOD_RES (108)..(108): Selenocysteine
  MOD_RES (117)..(117): Selenocysteine
  MOD_RES (138)..(138): Selenocysteine
  MOD_RES (155)..(155): Selenocysteine
  MOD_RES (158)..(160): Selenocysteine
  MOD_RES (177)..(177): Selenocysteine
  MOD_RES (187)..(187): Selenocysteine
  MOD_RES (206)..(206): Selenocysteine
  MOD_RES (224)..(224): Selenocysteine
  MOD_RES (240)..(240): Selenocysteine
  MOD_RES (250)..(250): Selenocysteine
  MOD_RES (284)..(285): Selenocysteine
MRDRLPDLXACRKNDDGDXVVVVEKDHFMDDFFHQVEEIRNSIDKIXQYVEEVKKNHSIILSAPNPEGKIKEELEDLNKEIKKXANKIRAKLKAIEQSFDQDESGNRXSVDLRIRRXQHSVLSRKFVEAMAEYNEAQXLFRERSKGRIQRQLEIXGRXXXDDELEEMLESGKPSIFXSDIISDSQIXRQALNEIESRHKDIMKLEXSIRELHEMFMDMAMFVEXQGEMINNIERNVMNAXDYVEHAKEEXKKAIKYQSKARRKLMFIIICVIVLLVILGIILAXXLS

SEQ ID NO: 26690 - protein, 288 aa, Homo sapiens
  MOD_RES (9)..(9): Selenocysteine
  MOD_RES (19)..(19): Selenocysteine
  MOD_RES (47)..(47): Selenocysteine
  MOD_RES (84)..(84): Selenocysteine
  MOD_RES (108)..(108): Selenocysteine
  MOD_RES (117)..(117): Selenocysteine
  MOD_RES (138)..(138): Selenocysteine
  MOD_RES (155)..(155): Selenocysteine
  MOD_RES (158)..(160): Selenocysteine
  MOD_RES (177)..(177): Selenocysteine
  MOD_RES (187)..(187): Selenocysteine
  MOD_RES (206)..(206): Selenocysteine
  MOD_RES (224)..(224): Selenocysteine
  MOD_RES (240)..(240): Selenocysteine
  MOD_RES (250)..(250): Selenocysteine
MRDRLPDLXACRKNDDGDXVVVVEKDHFMDDFFHQVEEIRNSIDKIXQYVEEVKKNHSIILSAPNPEGKIKEELEDLNKEIKKXANKIRAKLKAIEQSFDQDESGNRXSVDLRIRRXQHSVLSRKFVEAMAEYNEAQXLFRERSKGRIQRQLEIXGRXXXDDELEEMLESGKPSIFXSDIISDSQIXRQALNEIESRHKDIMKLEXSIRELHEMFMDMAMFVEXQGEMINNIERNVMNAXDYVEHAKEEXKKAIKYQSKARRKKWIIIAVSVVLVAIIALIIGLSVGK

SEQ ID NO: 26691 - protein, 112 aa, Homo sapiens
  MOD_RES (1)..(1): Any amino acid
  MOD_RES (4)..(4): Selenocysteine
  MOD_RES (32)..(32): Selenocysteine
  MOD_RES (69)..(69): Selenocysteine
  MOD_RES (90)..(91): Selenocysteine
  MOD_RES (98)..(98): Selenocysteine
XGDXVVVVEKDHFMDDFFHQVEEIRNSIDKIXQYVEEVKKNHSIILSAPNPEGKIKEELEDLNKEIKKXANKIRAKLKGFRCVQKQREAXXSRPPSSXVLHELPPAPAPRLF

SEQ ID NO: 26692 - protein, 295 aa, Homo sapiens
  MOD_RES (4)..(4): Selenocysteine
  MOD_RES (7)..(7): Selenocysteine
  MOD_RES (10)..(10): Selenocysteine
  MOD_RES (19)..(19): Selenocysteine
  MOD_RES (29)..(29): Selenocysteine
  MOD_RES (34)..(34): Selenocysteine
  MOD_RES (45)..(45): Selenocysteine
  MOD_RES (49)..(49): Selenocysteine
  MOD_RES (66)..(66): Selenocysteine
  MOD_RES (70)..(70): Selenocysteine
  MOD_RES (118)..(118): Selenocysteine
  MOD_RES (123)..(123): Selenocysteine
  MOD_RES (161)..(161): Selenocysteine
  MOD_RES (191)..(191): Selenocysteine
  MOD_RES (194)..(194): Selenocysteine
  MOD_RES (223)..(223): Selenocysteine
  MOD_RES (227)..(227): Selenocysteine
  MOD_RES (259)..(259): Selenocysteine
  MOD_RES (281)..(281): Selenocysteine
  MOD_RES (292)..(292): Selenocysteine
MGMXARXKRXRSGSRWWCXRARHGWGARXRSSSXSPLGHPPQVRXIRQXIVKLGNKVQELEKQQVXILAXPLPEESMKQELQNLRDEIKQLGREIRLQLKAIEPQKEEADENYNSVNXRMRKXQHGVLSQQFVELINKCNSMQSEYREKNVERIRRQLKIXNAGMVSDEELEQMLDSGQSEVFVSNILKDXQVXRQALNEISARHSEIQQLERSIRELHDIFXFLAXEVEMQGEMINRIEKNILSSADYVERGQEHVKXALENQKKARKKKVLIAICVSIXVVLLAVIIGVXVVG

SEQ ID NO: 26693 - protein, 175 aa, Homo sapiens
  MOD_RES (25)..(25): Selenocysteine
  MOD_RES (29)..(29): Selenocysteine
  MOD_RES (49)..(49): Selenocysteine
  MOD_RES (83)..(83): Selenocysteine
  MOD_RES (99)..(99): Selenocysteine
  MOD_RES (103)..(103): Selenocysteine
  MOD_RES (120)..(120): Selenocysteine
  MOD_RES (124)..(124): Selenocysteine
  MOD_RES (172)..(172): Selenocysteine
MLSRQSAHALDPKAIKARFPLEDAXVPVXVASSRVQASPLPLGAQQLPXPPSQPRARKRRDHGDDSSDEEDKERVALVVHPGXARLGSPDEEFFHKVRXIRQXIVKLGNKVQELEKQQVXILAXPLPEESMKQELQNLRDEIKQLGREIRLQLKAIEPQKEEADENYNSVNXRMR

SEQ ID NO: 26694 - protein, 64 aa, Homo sapiens
  MOD_RES (5)..(5): Selenocysteine
  MOD_RES (31)..(31): Selenocysteine
  MOD_RES (62)..(62): Selenocysteine
MRDRXHELRQGDDSSDEEDKERVALVVHPGXARLGSPDEEFFHKPSRSPSPGPDNSADYCQXGE

SEQ ID NO: 26695 - protein, 297 aa, Homo sapiens
  MOD_RES (5)..(5): Selenocysteine
  MOD_RES (31)..(31): Selenocysteine
  MOD_RES (47)..(47): Selenocysteine
  MOD_RES (51)..(51): Selenocysteine
  MOD_RES (68)..(68): Selenocysteine
  MOD_RES (72)..(72): Selenocysteine
  MOD_RES (120)..(120): Selenocysteine
  MOD_RES (125)..(125): Selenocysteine
  MOD_RES (163)..(163): Selenocysteine
  MOD_RES (193)..(193): Selenocysteine
  MOD_RES (196)..(196): Selenocysteine
  MOD_RES (225)..(225): Selenocysteine
  MOD_RES (229)..(229): Selenocysteine
  MOD_RES (261)..(261): Selenocysteine
  MOD_RES (283)..(283): Selenocysteine
  MOD_RES (294)..(294): Selenocysteine
MRDRXHELRQGDDSSDEEDKERVALVVHPGXARLGSPDEEFFHKVRXIRQXIVKLGNKVQELEKQQVXILAXPLPEESMKQELQNLRDEIKQLGREIRLQLKAIEPQKEEADENYNSVNXRMRKXQHGVLSQQFVELINKCNSMQSEYREKNVERIRRQLKIXNAGMVSDEELEQMLDSGQSEVFVSNILKDXQVXRQALNEISARHSEIQQLERSIRELHDIFXFLAXEVEMQGEMINRIEKNILSSADYVERGQEHVKXALENQKKARKKKVLIAICVSIXVVLLAVIIGVXVVG

SEQ ID NO: 26696 - protein, 115 aa, Homo sapiens
  MOD_RES (1)..(1): Any amino acid
  MOD_RES (6)..(6): Selenocysteine
  MOD_RES (32)..(32): Selenocysteine
  MOD_RES (48)..(48): Selenocysteine
  MOD_RES (52)..(52): Selenocysteine
  MOD_RES (69)..(69): Selenocysteine
  MOD_RES (73)..(73): Selenocysteine
  MOD_RES (111)..(111): Selenocysteine
XMRDRXHELRQGDDSSDEEDKERVALVVHPGXARLGSPDEEFFHKVRXIRQXIVKLGNKVQELEKQQVXILAXPLPEESMKQELQNLRDEIKQLGREIRLQLKGELLGPQXDPSL

SEQ ID NO: 26697 - protein, 245 aa, Homo sapiens
  MOD_RES (14)..(14): Selenocysteine
  MOD_RES (20)..(20): Selenocysteine
  MOD_RES (46)..(46): Selenocysteine
  MOD_RES (61)..(61): Selenocysteine
  MOD_RES (76)..(76): Selenocysteine
  MOD_RES (79)..(79): Selenocysteine
  MOD_RES (82)..(82): Selenocysteine
  MOD_RES (94)..(94): Selenocysteine
  MOD_RES (99)..(99): Selenocysteine
  MOD_RES (105)..(105): Selenocysteine
  MOD_RES (110)..(110): Selenocysteine
  MOD_RES (116)..(116): Selenocysteine
  MOD_RES (123)..(123): Selenocysteine
  MOD_RES (157)..(157): Selenocysteine
  MOD_RES (175)..(175): Selenocysteine
  MOD_RES (238)..(238): Selenocysteine
MIGVSFEEAKSIIXGAKLSXRLESAWEIAFIRQKSDNIQPENLSCXSLIEASGEYGPQASXLSLFSSPPEILIPKXSSXPKXNNDILSSCEIKXGYNKXVQIPIXSENSXVGLSNXDVASAWXENYGLQEKISLNPSVRFKAEKLEMALNYLGIQPXKEQHQALRQQVQADSKGXVSFGDFVQVARNLFCLQLDEVNVGAHEISNILDSQLLPCDSSEADEMERLKCERDDALKEVNXLKWPGQN

SEQ ID NO: 26698 - protein, 320 aa, Homo sapiens
  MOD_RES (5)..(5): Selenocysteine
  MOD_RES (7)..(7): Selenocysteine
  MOD_RES (24)..(24): Selenocysteine
  MOD_RES (29)..(29): Selenocysteine
  MOD_RES (91)..(91): Selenocysteine
  MOD_RES (121)..(121): Selenocysteine
  MOD_RES (136)..(136): Selenocysteine
  MOD_RES (151)..(151): Selenocysteine
  MOD_RES (154)..(154): Selenocysteine
  MOD_RES (157)..(157): Selenocysteine
  MOD_RES (169)..(169): Selenocysteine
  MOD_RES (174)..(174): Selenocysteine
  MOD_RES (180)..(180): Selenocysteine
  MOD_RES (185)..(185): Selenocysteine
  MOD_RES (191)..(191): Selenocysteine
  MOD_RES (198)..(198): Selenocysteine
  MOD_RES (232)..(232): Selenocysteine
  MOD_RES (250)..(250): Selenocysteine
  MOD_RES (313)..(313): Selenocysteine
MNKNXSXVVSPSLLEKDPAFQMIXIAKEXGLGLKVLGGINRNEGPLVYIQEIIPGGDCYKDGRLKPGDQLVSVNKESMIGVSFEEAKSIIXGAKLRLESAWEIAFIRQKSDNIQPENLSCXSLIEASGEYGPQASXLSLFSSPPEILIPKXSSXPKXNNDILSSCEIKXGYNKXVQIPIXSENSXVGLSNXDVASAWXENYGLQEKISLNPSVRFKAEKLEMALNYLGIQPXKEQHQALRQQVQADSKGXVSFGDFVQVARNLFCLQLDEVNVGAHEISNILDSQLLPCDSSEADEMERLKCERDDALKEVNXLKWPGQN

SEQ ID NO: 26699 - protein, 531 aa, Homo sapiens
  MOD_RES (5)..(5): Selenocysteine
  MOD_RES (7)..(7): Selenocysteine
  MOD_RES (24)..(24): Selenocysteine
  MOD_RES (29)..(29): Selenocysteine
  MOD_RES (91)..(91): Selenocysteine
  MOD_RES (121)..(121): Selenocysteine
  MOD_RES (136)..(136): Selenocysteine
  MOD_RES (151)..(151): Selenocysteine
  MOD_RES (154)..(154): Selenocysteine
  MOD_RES (157)..(157): Selenocysteine
  MOD_RES (169)..(169): Selenocysteine
  MOD_RES (174)..(174): Selenocysteine
  MOD_RES (180)..(180): Selenocysteine
  MOD_RES (185)..(185): Selenocysteine
  MOD_RES (191)..(191): Selenocysteine
  MOD_RES (198)..(198): Selenocysteine
  MOD_RES (232)..(232): Selenocysteine
  MOD_RES (250)..(250): Selenocysteine
  MOD_RES (313)..(313): Selenocysteine
  MOD_RES (324)..(324): Selenocysteine
  MOD_RES (360)..(360): Selenocysteine
  MOD_RES (400)..(400): Selenocysteine
  MOD_RES (405)..(405): Selenocysteine
  MOD_RES (424)..(424): Selenocysteine
  MOD_RES (440)..(440): Selenocysteine
  MOD_RES (443)..(443): Selenocysteine
  MOD_RES (455)..(455): Selenocysteine
  MOD_RES (485)..(485): Selenocysteine
  MOD_RES (497)..(497): Selenocysteine
  MOD_RES (499)..(500): Selenocysteine
MNKNXSXVVSPSLLEKDPAFQMIXIAKEXGLGLKVLGGINRNEGPLVYIQEIIPGGDCYKDGRLKPGDQLVSVNKESMIGVSFEEAKSIIXGAKLRLESAWEIAFIRQKSDNIQPENLSCXSLIEASGEYGPQASXLSLFSSPPEILIPKXSSXPKXNNDILSSCEIKXGYNKXVQIPIXSENSXVGLSNXDVASAWXENYGLQEKISLNPSVRFKAEKLEMALNYLGIQPXKEQHQALRQQVQADSKGXVSFGDFVQVARNLFCLQLDEVNVGAHEISNILDSQLLPCDSSEADEMERLKCERDDALKEVNXLKEAKAVVEEXRALRSRIHLAEAAQRQAHGMEMDYEEVIRLLEAKIXELKAQLADYSDQNKESVQDLKKRIMVLDCQLRKSEMARKXFEASXEKLLHFVEAIQEVFSDNSXPLSNLSERRAVLASQXSLXPLGRNGRSIPAXLALESKELVKSVRALLDMDCLPYGWEEAYXADGIKYFINHVXQXXSWIHPVMSVLNLSRSEENEEDCSRELPNQKS

SEQ ID NO: 26700 - protein, 553 aa, Homo sapiens
  MOD_RES (5)..(5): Selenocysteine
  MOD_RES (7)..(7): Selenocysteine
  MOD_RES (24)..(24): Selenocysteine
  MOD_RES (29)..(29): Selenocysteine
  MOD_RES (91)..(91): Selenocysteine
  MOD_RES (121)..(121): Selenocysteine
  MOD_RES (136)..(136): Selenocysteine
  MOD_RES (151)..(151): Selenocysteine
  MOD_RES (154)..(154): Selenocysteine
  MOD_RES (157)..(157): Selenocysteine
  MOD_RES (169)..(169): Selenocysteine
  MOD_RES (174)..(174): Selenocysteine
  MOD_RES (180)..(180): Selenocysteine
  MOD_RES (185)..(185): Selenocysteine
  MOD_RES (191)..(191): Selenocysteine
  MOD_RES (198)..(198): Selenocysteine
  MOD_RES (232)..(232): Selenocysteine
  MOD_RES (250)..(250): Selenocysteine
  MOD_RES (313)..(313): Selenocysteine
  MOD_RES (329)..(329): Selenocysteine
  MOD_RES (346)..(346): Selenocysteine
  MOD_RES (382)..(382): Selenocysteine
  MOD_RES (422)..(422): Selenocysteine
  MOD_RES (427)..(427): Selenocysteine
  MOD_RES (446)..(446): Selenocysteine
  MOD_RES (462)..(462): Selenocysteine
  MOD_RES (465)..(465): Selenocysteine
  MOD_RES (477)..(477): Selenocysteine
  MOD_RES (507)..(507): Selenocysteine
  MOD_RES (519)..(519): Selenocysteine
  MOD_RES (521)..(522): Selenocysteine
MNKNXSXVVSPSLLEKDPAFQMIXIAKEXGLGLKVLGGINRNEGPLVYIQEIIPGGDCYKDGRLKPGDQLVSVNKESMIGVSFEEAKSIIXGAKLRLESAWEIAFIRQKSDNIQPENLSCXSLIEASGEYGPQASXLSLFSSPPEILIPKXSSXPKXNNDILSSCEIKXGYNKXVQIPIXSENSXVGLSNXDVASAWXENYGLQEKISLNPSVRFKAEKLEMALNYLGIQPXKEQHQALRQQVQADSKGXVSFGDFVQVARNLFCLQLDEVNVGAHEISNILDSQLLPCDSSEADEMERLKCERDDALKEVNXLKEKLLESDKQRKQLXEELQNVKQEAKAVVEEXRALRSRIHLAEAAQRQAHGMEMDYEEVIRLLEAKIXELKAQLADYSDQNKESVQDLKKRIMVLDCQLRKSEMARKXFEASXEKLLHFVEAIQEVFSDNSXPLSNLSERRAVLASQXSLXPLGRNGRSIPAXLALESKELVKSVRALLDMDCLPYGWEEAYXADGIKYFINHVXQXXSWIHPVMSVLNLSRSEENEEDCSRELPNQKS

SEQ ID NO: 26701 - protein, 81 aa, Homo sapiens
  MOD_RES (12)..(12): Selenocysteine
  MOD_RES (17)..(17): Selenocysteine
  MOD_RES (23)..(23): Selenocysteine
  MOD_RES (28)..(28): Selenocysteine
  MOD_RES (34)..(34): Selenocysteine
  MOD_RES (47)..(48): Selenocysteine
  MOD_RES (53)..(53): Selenocysteine
  MOD_RES (56)..(56): Selenocysteine
NNDILSSCEIKXGYNKXVQIPIXSENSXVGLSNXGSKLSWYSAHKGXXPSPEXASXSRLKRDSVFWRFCPGCQKLVLLAVG

SEQ ID NO: 26702 - protein, 41 aa, Homo sapiens
  MOD_RES (4)..(4): Selenocysteine
  MOD_RES (31)..(31): Selenocysteine
  MOD_RES (35)..(35): Selenocysteine
MGMXRMLLECSLSDKLCVIQEKQYEVIIVPXLLVXIFLILL

SEQ ID NO: 26703 - protein, 83 aa, Homo sapiens
  MOD_RES (4)..(4): Selenocysteine
  MOD_RES (31)..(31): Selenocysteine
  MOD_RES (35)..(35): Selenocysteine
  MOD_RES (54)..(54): Selenocysteine
MGMXRMLLECSLSDKLCVIQEKQYEVIIVPXLLVXIFLILLGVILWLFIREQRXQQQRSGPQGIAPVPPPRDLSWEAGHGGNV

SEQ ID NO: 26704 - protein, 87 aa, Homo sapiens
  MOD_RES (4)..(4): Selenocysteine
  MOD_RES (31)..(31): Selenocysteine
  MOD_RES (35)..(35): Selenocysteine
  MOD_RES (54)..(54): Selenocysteine
MGMXRMLLECSLSDKLCVIQEKQYEVIIVPXLLVXIFLILLGVILWLFIREQRXQQQRSGPQGIAPVPPPRDLSWEAGHGGNVALPL

SEQ ID NO: 26705 - protein, 422 aa, Homo sapiens
  MOD_RES (4)..(4): Selenocysteine
  MOD_RES (31)..(31): Selenocysteine
  MOD_RES (35)..(35): Selenocysteine
  MOD_RES (54)..(54): Selenocysteine
  MOD_RES (90)..(90): Selenocysteine
  MOD_RES (99)..(100): Selenocysteine
  MOD_RES (135)..(135): Selenocysteine
  MOD_RES (185)..(185): Selenocysteine
  MOD_RES (208)..(208): Selenocysteine
  MOD_RES (215)..(215): Selenocysteine
  MOD_RES (224)..(224): Selenocysteine
  MOD_RES (264)..(264): Selenocysteine
  MOD_RES (278)..(278): Selenocysteine
  MOD_RES (285)..(285): Selenocysteine
  MOD_RES (287)..(287): Selenocysteine
  MOD_RES (321)..(321): Selenocysteine
  MOD_RES (333)..(333): Selenocysteine
  MOD_RES (352)..(352): Selenocysteine
  MOD_RES (354)..(354): Selenocysteine
  MOD_RES (386)..(386): Selenocysteine
MGMXRMLLECSLSDKLCVIQEKQYEVIIVPXLLVXIFLILLGVILWLFIREQRXQQQRSGPQGIAPVPPPRDLSWEAGHGGNVALPLKEXSVENFLGAXXPALAKLQVPREQLSEVLEQICSGSCGPIFRANMNXGDPSKPKSVILKALKEPAGLHEVQDFLGRIQFHQYLGKHKNLVQLEGCCXEKLPLYMVLEDVAQGDLLSFLWXCRRDVMXMDGLLYDLXEKQVYHIGKQVLLALEFLQEKHLFHGDVAARNILMQSDLXAKLCGLGLAYEVYXRGAISSXQXIPLKWLAPERLLLRPASIRADVWSFGILLYEMVXLGAPPYPEVPPXSILEHLQRRKIMKRPSSCXHXMYSIMKSCWRWREADRPSPRELRLRLEAAIKXADDEAVLQVPELVVPELYAAVAGIRVESLFYNYSML

SEQ ID NO: 26706 - protein, 65 aa, Homo sapiens
  MOD_RES (4)..(4): Selenocysteine
  MOD_RES (31)..(31): Selenocysteine
  MOD_RES (35)..(35): Selenocysteine
  MOD_RES (54)..(54): Selenocysteine
MGMXRMLLECSLSDKLCVIQEKQYEVIIVPXLLVXIFLILLGVILWLFIREQRXQQQRSGPQGKA

SEQ ID NO: 26707 - protein, 83 aa, Homo sapiens
  MOD_RES (1)..(1): Any amino acid
  MOD_RES (23)..(23): Selenocysteine
  MOD_RES (46)..(46): Selenocysteine
  MOD_RES (59)..(59): Selenocysteine
  MOD_RES (68)..(68): Selenocysteine
XRIQFHQYLGKHKNLVQLEGCCXEKLPLYMVLEDVAQGDLLSFLWXCRRVSSRAEDVMXMDGLLYDLXEKQVYHIGKQVLLAL

SEQ ID NO: 26708 - protein, 221 aa, Homo sapiens
  MOD_RES (4)..(4): Selenocysteine
  MOD_RES (38)..(38): Selenocysteine
  MOD_RES (72)..(72): Selenocysteine
  MOD_RES (75)..(75): Selenocysteine
  MOD_RES (92)..(92): Selenocysteine
  MOD_RES (98)..(98): Selenocysteine
  MOD_RES (152)..(152): Selenocysteine
HVIXALRVKKKNNEYLLPESVDLECVKYCVVYDNNSSXLEILLKDDDDDSDSDGDGKDLVPQAAIEYGRILXRLXHHPVYILKGGYERFSGXYHFLRXQKIIWMPQELDAFQPYPIEIVPGKVFVGNFSQACDPKIQKDLKIKAHVNVSMDXGPFFAGDADKLLHIRIEDSPEAQILPFLRHMCHFIEVLGLCQEVQKQHVSKSGIGEPAAGMGEDYPWRF

SEQ ID NO: 26709 - protein, 217 aa, Homo sapiens
  MOD_RES (10)..(10): Selenocysteine
  MOD_RES (20)..(20): Selenocysteine
  MOD_RES (26)..(26): Selenocysteine
  MOD_RES (49)..(49): Selenocysteine
  MOD_RES (101)..(101): Selenocysteine
  MOD_RES (151)..(151): Selenocysteine
  MOD_RES (172)..(172): Selenocysteine
  MOD_RES (203)..(203): Selenocysteine
  MOD_RES (210)..(210): Selenocysteine
MPGLLLCEPXELYNILNQAXKLSRLXDPNYLCLLDVRSKWEYDESHVIXALRVKKELDAFQPYPIEIVPGKVFVGNFSQACDPKIQKDLKIKAHVNVSMDXGPFFAGDADKLLHIRIEDSPEAQILPFLRHMCHFIEIHHHLGSVILIFSXQGISRSCAAIIAYLMHSNEQXLQRSWAYVKKCKNNMCPNRGLVSQLLEWEKXILGDSIXNIMDPLY

SEQ ID NO: 26710 - protein, 282 aa, Homo sapiens
  MOD_RES (10)..(10): Selenocysteine
  MOD_RES (20)..(20): Selenocysteine
  MOD_RES (26)..(26): Selenocysteine
  MOD_RES (49)..(49): Selenocysteine
  MOD_RES (83)..(83): Selenocysteine
  MOD_RES (117)..(117): Selenocysteine
  MOD_RES (120)..(120): Selenocysteine
  MOD_RES (137)..(137): Selenocysteine
  MOD_RES (143)..(143): Selenocysteine
  MOD_RES (197)..(197): Selenocysteine
  MOD_RES (247)..(247): Selenocysteine
  MOD_RES (268)..(268): Selenocysteine
  MOD_RES (271)..(271): Selenocysteine
  MOD_RES (277)..(277): Selenocysteine
MPGLLLCEPXELYNILNQAXKLSRLXDPNYLCLLDVRSKWEYDESHVIXALRVKKKNNEYLLPESVDLECVKYCVVYDNNSSXLEILLKDDDDDSDSDGDGKDLVPQAAIEYGRILXRLXHHPVYILKGGYERFSGXYHFLRXQKIIWMPQELDAFQPYPIEIVPGKVFVGNFSQACDPKIQKDLKIKAHVNVSMDXGPFFAGDADKLLHIRIEDSPEAQILPFLRHMCHFIEIHHHLGSVILIFSXQGISRSCAAIIAYLMHSNEQXLQXESRSVXQAGVQ

SEQ ID NO: 26711 - protein, 313 aa, Homo sapiens
  MOD_RES (10)..(10): Selenocysteine
  MOD_RES (20)..(20): Selenocysteine
  MOD_RES (26)..(26): Selenocysteine
  MOD_RES (49)..(49): Selenocysteine
  MOD_RES (83)..(83): Selenocysteine
  MOD_RES (117)..(117): Selenocysteine
  MOD_RES (120)..(120): Selenocysteine
  MOD_RES (137)..(137): Selenocysteine
  MOD_RES (143)..(143): Selenocysteine
  MOD_RES (197)..(197): Selenocysteine
  MOD_RES (247)..(247): Selenocysteine
  MOD_RES (268)..(268): Selenocysteine
  MOD_RES (299)..(299): Selenocysteine
  MOD_RES (306)..(306): Selenocysteine
MPGLLLCEPXELYNILNQAXKLSRLXDPNYLCLLDVRSKWEYDESHVIXALRVKKKNNEYLLPESVDLECVKYCVVYDNNSSXLEILLKDDDDDSDSDGDGKDLVPQAAIEYGRILXRLXHHPVYILKGGYERFSGXYHFLRXQKIIWMPQELDAFQPYPIEIVPGKVFVGNFSQACDPKIQKDLKIKAHVNVSMDXGPFFAGDADKLLHIRIEDSPEAQILPFLRHMCHFIEIHHHLGSVILIFSXQGISRSCAAIIAYLMHSNEQXLQRSWAYVKKCKNNMCPNRGLVSQLLEWEKXILGDSIXNIMDPLY

SEQ ID NO: 26712 - protein, 68 aa, Homo sapiens
  MOD_RES (1)..(1): Any amino acid
  MOD_RES (5)..(5): Selenocysteine
  MOD_RES (39)..(39): Selenocysteine
  MOD_RES (60)..(60): Selenocysteine
XHVIXALRVKKKNNEYLLPESVDLECVKYCVVYDNNSSXLEILLKDDDDDSDSDGDGKGXGCISAIPH

SEQ ID NO: 26713 - protein, 84 aa, Homo sapiens
  MOD_RES (42)..(42): Selenocysteine
  MOD_RES (45)..(45): Selenocysteine
  MOD_RES (70)..(70): Selenocysteine
  MOD_RES (73)..(73): Selenocysteine
MPKSKELVSSSSSGSDSDSEVDKKLKRKKQVAPEKPVKKQKXGEXSRALSSSKQSSSSRDDNMFQELFIXFIXGVPPAQEVSGV

SEQ ID NO: 26714 - protein, 127 aa, Homo sapiens
  MOD_RES (42)..(42): Selenocysteine
  MOD_RES (45)..(45): Selenocysteine
MPKSKELVSSSSSGSDSDSEVDKKLKRKKQVAPEKPVKKQKXGEXSRALSSSKQSSSSRDDNMFQIGKMRYVSVRDFKGKVLIDIREYWMDPEGEMKPGRKGISLNPEQWSQLKEQISDIDDAVRKL

SEQ ID NO: 26715 - protein, 66 aa, Homo sapiens
  MOD_RES (42)..(42): Selenocysteine
  MOD_RES (45)..(45): Selenocysteine
MPKSKELVSSSSSGSDSDSEVDKKLKRKKQVAPEKPVKKQKXGEXSRALSSSKQSSSSRDDNMFQV

SEQ ID NO: 26716 - protein, 334 aa, Homo sapiens
  MOD_RES (10)..(10): Selenocysteine
  MOD_RES (42)..(42): Selenocysteine
  MOD_RES (75)..(75): Selenocysteine
  MOD_RES (108)..(108): Selenocysteine
  MOD_RES (114)..(114): Selenocysteine
  MOD_RES (151)..(151): Selenocysteine
  MOD_RES (166)..(166): Selenocysteine
  MOD_RES (170)..(171): Selenocysteine
  MOD_RES (192)..(192): Selenocysteine
  MOD_RES (223)..(223): Selenocysteine
  MOD_RES (246)..(246): Selenocysteine
  MOD_RES (269)..(269): Selenocysteine
  MOD_RES (280)..(280): Selenocysteine
  MOD_RES (318)..(318): Selenocysteine
MLGIMAWNAXCKNWLAAEAALEKYYLSIFYGIEFVVGVLGNXIVVYGYIFSLKNWNSSNIYLFNLSVSDLAFLCXLPMLIRSYANGNWIYGDVLCISNRYVLHANLYXSILFLXFISIDRYLIIKYPFREHLLQKKEFAILISLAIWVLVXLELLPILPLINPVIXDNGXXCNDFASSGDPNYNLIYSMCLXLLGFLIPLFVMCFFYYKIALFLKQRNRQVAXALPLEKPLNLVIMAVVIFSVLFXPYHVMRNVRIASRLGSWKQYQCXQVVINSFYIVXRPLAFLNSVINPVFYFLLGDHFRDMLMNQLRHNFKSLXSFSRWAHELLLSFREK

SEQ ID NO: 26717 - protein, 433 aa, Homo sapiens
  MOD_RES (13)..(13): Selenocysteine
  MOD_RES (21)..(21): Selenocysteine
  MOD_RES (55)..(55): Selenocysteine
  MOD_RES (108)..(108): Selenocysteine
  MOD_RES (110)..(110): Selenocysteine
  MOD_RES (121)..(121): Selenocysteine
  MOD_RES (128)..(128): Selenocysteine
  MOD_RES (135)..(135): Selenocysteine
  MOD_RES (154)..(154): Selenocysteine
  MOD_RES (180)..(180): Selenocysteine
  MOD_RES (190)..(190): Selenocysteine
  MOD_RES (196)..(196): Selenocysteine
  MOD_RES (205)..(205): Selenocysteine
  MOD_RES (225)..(225): Selenocysteine
  MOD_RES (236)..(236): Selenocysteine
  MOD_RES (243)..(243): Selenocysteine
  MOD_RES (261)..(261): Selenocysteine
  MOD_RES (295)..(295): Selenocysteine
  MOD_RES (305)..(305): Selenocysteine
  MOD_RES (311)..(311): Selenocysteine
  MOD_RES (353)..(353): Selenocysteine
  MOD_RES (363)..(363): Selenocysteine
  MOD_RES (396)..(396): Selenocysteine
  MOD_RES (401)..(401): Selenocysteine
  MOD_RES (407)..(407): Selenocysteine
  MOD_RES (411)..(411): Selenocysteine
  MOD_RES (419)..(419): Selenocysteine
MAELRPSGAPGPXAPPAPGPXAPPAFASLFPPGLHAIYGECRRLYPDQPNPLQVXAIVKYWLGGPDPLDYVSMYRNVGSPSANIPEHWHYISFGLSDLYGDNRVHEFXGXDGPSGFGFELXFRLKREXGESAPPXWPAELMQGLARYVFQSENXFCSGDHVSWHSPLDNSESRIQHMLLXEDPQMQPVQXPFGVVXFLQIVGVCXEELHSAQQWNGQGILELLRXVPIAGGPWLIXDMRRGEXIFEIDPHLQERVDKGIEXDGSNLSGVSAKCAWDDLSRPPEDDEDSRSICIGXQPRRLSGKDXEQIREXLRRGLEINSKPVLPPINPQRQNGLAHDRAPSRKDSLESDSSXAIIPHELIRXRQLESVHLKFNQESGALIPLCLRGRLLHGRHFXYKSIXGDMAIXFVSXGVEGAFAXEEHPYAAHGPWLQL

SEQ ID NO: 26718 - protein, 481 aa, Homo sapiens
  MOD_RES (13)..(13): Selenocysteine
  MOD_RES (21)..(21): Selenocysteine
  MOD_RES (55)..(55): Selenocysteine
  MOD_RES (108)..(108): Selenocysteine
  MOD_RES (110)..(110): Selenocysteine
  MOD_RES (121)..(121): Selenocysteine
  MOD_RES (128)..(128): Selenocysteine
  MOD_RES (135)..(135): Selenocysteine
  MOD_RES (154)..(154): Selenocysteine
  MOD_RES (180)..(180): Selenocysteine
  MOD_RES (190)..(190): Selenocysteine
  MOD_RES (196)..(196): Selenocysteine
  MOD_RES (205)..(205): Selenocysteine
  MOD_RES (225)..(225): Selenocysteine
  MOD_RES (236)..(236): Selenocysteine
  MOD_RES (243)..(243): Selenocysteine
  MOD_RES (261)..(261): Selenocysteine
  MOD_RES (295)..(295): Selenocysteine
  MOD_RES (305)..(305): Selenocysteine
  MOD_RES (311)..(311): Selenocysteine
  MOD_RES (353)..(353): Selenocysteine
  MOD_RES (363)..(363): Selenocysteine
  MOD_RES (396)..(396): Selenocysteine
  MOD_RES (401)..(401): Selenocysteine
  MOD_RES (407)..(407): Selenocysteine
  MOD_RES (411)..(411): Selenocysteine
  MOD_RES (419)..(419): Selenocysteine
  MOD_RES (462)..(462): Selenocysteine
MAELRPSGAPGPXAPPAPGPXAPPAFASLFPPGLHAIYGECRRLYPDQPNPLQVXAIVKYWLGGPDPLDYVSMYRNVGSPSANIPEHWHYISFGLSDLYGDNRVHEFXGXDGPSGFGFELXFRLKREXGESAPPXWPAELMQGLARYVFQSENXFCSGDHVSWHSPLDNSESRIQHMLLXEDPQMQPVQXPFGVVXFLQIVGVCXEELHSAQQWNGQGILELLRXVPIAGGPWLIXDMRRGEXIFEIDPHLQERVDKGIEXDGSNLSGVSAKCAWDDLSRPPEDDEDSRSICIGXQPRRLSGKDXEQIREXLRRGLEINSKPVLPPINPQRQNGLAHDRAPSRKDSLESDSSXAIIPHELIRXRQLESVHLKFNQESGALIPLCLRGRLLHGRHFXYKSIXGDMAIXFVSXGVEGAFAXEEHPYAAHGPWLQVRRPFFFSLLPFIDFLAHPSSSPLAALDGXPSWGAGHECLMDSGPGACV

SEQ ID NO: 26719 - protein, 484 aa, Homo sapiens
  MOD_RES (13)..(13): Selenocysteine
  MOD_RES (21)..(21): Selenocysteine
  MOD_RES (55)..(55): Selenocysteine
  MOD_RES (108)..(108): Selenocysteine
  MOD_RES (110)..(110): Selenocysteine
  MOD_RES (121)..(121): Selenocysteine
  MOD_RES (128)..(128): Selenocysteine
  MOD_RES (135)..(135): Selenocysteine
  MOD_RES (154)..(154): Selenocysteine
  MOD_RES (180)..(180): Selenocysteine
  MOD_RES (190)..(190): Selenocysteine
  MOD_RES (196)..(196): Selenocysteine
  MOD_RES (205)..(205): Selenocysteine
  MOD_RES (225)..(225): Selenocysteine
  MOD_RES (236)..(236): Selenocysteine
  MOD_RES (243)..(243): Selenocysteine
  MOD_RES (261)..(261): Selenocysteine
  MOD_RES (295)..(295): Selenocysteine
  MOD_RES (305)..(305): Selenocysteine
  MOD_RES (311)..(311): Selenocysteine
  MOD_RES (353)..(353): Selenocysteine
  MOD_RES (363)..(363): Selenocysteine
  MOD_RES (396)..(396): Selenocysteine
  MOD_RES (401)..(401): Selenocysteine
  MOD_RES (407)..(407): Selenocysteine
  MOD_RES (411)..(411): Selenocysteine
  MOD_RES (419)..(419): Selenocysteine
  MOD_RES (436)..(436): Selenocysteine
  MOD_RES (451)..(451): Selenocysteine
MAELRPSGAPGPXAPPAPGPXAPPAFASLFPPGLHAIYGECRRLYPDQPNPLQVXAIVKYWLGGPDPLDYVSMYRNVGSPSANIPEHWHYISFGLSDLYGDNRVHEFXGXDGPSGFGFELXFRLKREXGESAPPXWPAELMQGLARYVFQSENXFCSGDHVSWHSPLDNSESRIQHMLLXEDPQMQPVQXPFGVVXFLQIVGVCXEELHSAQQWNGQGILELLRXVPIAGGPWLIXDMRRGEXIFEIDPHLQERVDKGIEXDGSNLSGVSAKCAWDDLSRPPEDDEDSRSICIGXQPRRLSGKDXEQIREXLRRGLEINSKPVLPPINPQRQNGLAHDRAPSRKDSLESDSSXAIIPHELIRXRQLESVHLKFNQESGALIPLCLRGRLLHGRHFXYKSIXGDMAIXFVSXGVEGAFAXEEHPYAAHGPWLQILLXEEFVEKMLEDLEDLXSPEEFKLPKEYSWPEKKLKVSILPDVVFDSPLH

SEQ ID NO: 26720 - protein, 29 aa, Homo sapiens
  MOD_RES (15)..(15): Selenocysteine
  MOD_RES (24)..(24): Selenocysteine
MKYSCCALVLAVLGXELLGSLCSXVRSPR

SEQ ID NO: 26721 - protein, 56 aa, Homo sapiens
  MOD_RES (15)..(15): Selenocysteine
  MOD_RES (24)..(24): Selenocysteine
  MOD_RES (50)..(50): Selenocysteine
MKYSCCALVLAVLGXELLGSLCSXVRSPRFRGRIQQERKNIRPNIILVLXDDQDVE

SEQ ID NO: 26722 - protein, 76 aa, Homo sapiens
  MOD_RES (15)..(15): Selenocysteine
  MOD_RES (24)..(24): Selenocysteine
  MOD_RES (50)..(50): Selenocysteine
  MOD_RES (66)..(66): Selenocysteine
  MOD_RES (76)..(76): Selenocysteine
MKYSCCALVLAVLGXELLGSLCSXVRSPRFRGRIQQERKNIRPNIILVLXDDQDVELGSLQVMNKXRKIMEHGGAX

SEQ ID NO: 26723 - protein, 85 aa, Homo sapiens
  MOD_RES (15)..(15): Selenocysteine
  MOD_RES (24)..(24): Selenocysteine
  MOD_RES (50)..(50): Selenocysteine
  MOD_RES (66)..(66): Selenocysteine
  MOD_RES (76)..(76): Selenocysteine
  MOD_RES (83)..(84): Selenocysteine
MKYSCCALVLAVLGXELLGSLCSXVRSPRFRGRIQQERKNIRPNIILVLXDDQDVELGSLQVMNKXRKIMEHGGAXFINAFVXXP

SEQ ID NO: 26724 - protein, 172 aa, Homo sapiens
  MOD_RES (15)..(15): Selenocysteine
  MOD_RES (24)..(24): Selenocysteine
  MOD_RES (50)..(50): Selenocysteine
  MOD_RES (66)..(66): Selenocysteine
  MOD_RES (76)..(76): Selenocysteine
  MOD_RES (83)..(84): Selenocysteine
  MOD_RES (96)..(96): Selenocysteine
  MOD_RES (107)..(107): Selenocysteine
  MOD_RES (125)..(125): Selenocysteine
  MOD_RES (133)..(133): Selenocysteine
  MOD_RES (137)..(137): Selenocysteine
  MOD_RES (172)..(172): Selenocysteine
MKYSCCALVLAVLGXELLGSLCSXVRSPRFRGRIQQERKNIRPNIILVLXDDQDVELGSLQVMNKXRKIMEHGGAXFINAFVXXPMCCPSRSSMLXGKYVHNHNVYXNNENCSSPSWQAMHEPRXFAVYLNNXGYRXAFFGKYLNEYNGSYIPPGWREWLGLIKNSRFYNYX

SEQ ID NO: 26725 - protein, 871 aa, Homo sapiens
  MOD_RES (15)..(15): Selenocysteine
  MOD_RES (24)..(24): Selenocysteine
  MOD_RES (50)..(50): Selenocysteine
  MOD_RES (66)..(66): Selenocysteine
  MOD_RES (76)..(76): Selenocysteine
  MOD_RES (83)..(84): Selenocysteine
  MOD_RES (96)..(96): Selenocysteine
  MOD_RES (107)..(107): Selenocysteine
  MOD_RES (125)..(125): Selenocysteine
  MOD_RES (133)..(133): Selenocysteine
  MOD_RES (137)..(137): Selenocysteine
  MOD_RES (172)..(172): Selenocysteine
  MOD_RES (192)..(192): Selenocysteine
  MOD_RES (196)..(196): Selenocysteine
  MOD_RES (246)..(246): Selenocysteine
  MOD_RES (264)..(264): Selenocysteine
  MOD_RES (275)..(275): Selenocysteine
  MOD_RES (285)..(285): Selenocysteine
  MOD_RES (303)..(303): Selenocysteine
  MOD_RES (309)..(309): Selenocysteine
  MOD_RES (314)..(314): Selenocysteine
  MOD_RES (367)..(367): Selenocysteine
  MOD_RES (376)..(376): Selenocysteine
  MOD_RES (400)..(400): Selenocysteine
  MOD_RES (410)..(410): Selenocysteine
  MOD_RES (452)..(452): Selenocysteine
  MOD_RES (467)..(467): Selenocysteine
  MOD_RES (484)..(484): Selenocysteine
  MOD_RES (489)..(489): Selenocysteine
  MOD_RES (530)..(530): Selenocysteine
  MOD_RES (540)..(540): Selenocysteine
  MOD_RES (543)..(543): Selenocysteine
  MOD_RES (610)..(611): Selenocysteine
  MOD_RES (615)..(615): Selenocysteine
  MOD_RES (745)..(745): Selenocysteine
  MOD_RES (748)..(748): Selenocysteine
  MOD_RES (756)..(756): Selenocysteine
  MOD_RES (769)..(769): Selenocysteine
  MOD_RES (775)..(775): Selenocysteine
  MOD_RES (781)..(781): Selenocysteine
  MOD_RES (785)..(785): Selenocysteine
  MOD_RES (795)..(795): Selenocysteine
  MOD_RES (805)..(805): Selenocysteine
  MOD_RES (811)..(811): Selenocysteine
  MOD_RES (813)..(813): Selenocysteine
  MOD_RES (816)..(816): Selenocysteine
MKYSCCALVLAVLGXELLGSLCSXVRSPRFRGRIQQERKNIRPNIILVLXDDQDVELGSLQVMNKXRKIMEHGGAXFINAFVXXPMCCPSRSSMLXGKYVHNHNVYXNNENCSSPSWQAMHEPRXFAVYLNNXGYRXAFFGKYLNEYNGSYIPPGWREWLGLIKNSRFYNYXVCRNGIKEKHGFDYAKDYFXDLIXNESINYFKMSKRMYPHRPVMMVISHAAPHGPEDSAPQFSKLYPNASQHIXPSYNYAPNMDKHWIMQYXGPMLPIHMEFXNILQRKRLQXLMSVDDSVERLYNMLVEXGELENXYIIYXADHGYHIGQFGLVKGKSMPYDFDIRVPFFIRGPSVEPGSIVPQIVLNIDLAPXILDIAGLDXPPDVDGKSVLKLLDPEKPGNRFRXNKKAKIWRDXFLVERGKFLRKKEESSKNIQQSNHLPKYERVKELCQQARYQXACEQPGQKWQCIEDXSGKLRIHKCKGPSDLLXVRQSXRNLYARGFHDKDKECSCRESGYRASRSQRKSQRQFLRNQGXPKYKPRFVHXRQXRSLSVEFEGEIYDINLEEEEELQVLQPRNIAKRHDEGHKGPRDLQASSGGNRGRMLADSSNAVGPPXXVRVXHKCFILPNDSIHCERELYQSARAWKDHKAYIDKEIEALQDKIKNLREVRGHLKRRKPEECSCSKQSYYNKEKGVKKQEKLKSHLHPFKEAAQEVDSKLQLFKENNRRRKKERKEKRRQRKGEECSLPGLXCFXHDNNHWQXAPFWNLGSFCACXSSNNNXYWCLRXVNEXHNFLFCEFAXGFLEYFDMNXDPYQLXNXVHXVERGILNQLHVQLMELRSCQGYKQCNPRPKNLDVGNKDGGSYDLHRGQLWDGWEG

SEQ ID NO: 26726 - protein, 669 aa, Homo sapiens
  MOD_RES (30)..(30): Selenocysteine
  MOD_RES (48)..(48): Selenocysteine
  MOD_RES (59)..(59): Selenocysteine
  MOD_RES (69)..(69): Selenocysteine
  MOD_RES (87)..(87): Selenocysteine
  MOD_RES (93)..(93): Selenocysteine
  MOD_RES (98)..(98): Selenocysteine
  MOD_RES (151)..(151): Selenocysteine
  MOD_RES (160)..(160): Selenocysteine
  MOD_RES (184)..(184): Selenocysteine
  MOD_RES (194)..(194): Selenocysteine
  MOD_RES (236)..(236): Selenocysteine
  MOD_RES (251)..(251): Selenocysteine
  MOD_RES (268)..(268): Selenocysteine
  MOD_RES (273)..(273): Selenocysteine
  MOD_RES (314)..(314): Selenocysteine
  MOD_RES (324)..(324): Selenocysteine
  MOD_RES (327)..(327): Selenocysteine
  MOD_RES (394)..(395): Selenocysteine
  MOD_RES (399)..(399): Selenocysteine
  MOD_RES (529)..(529): Selenocysteine
  MOD_RES (532)..(532): Selenocysteine
  MOD_RES (540)..(540): Selenocysteine
  MOD_RES (553)..(553): Selenocysteine
  MOD_RES (559)..(559): Selenocysteine
  MOD_RES (565)..(565): Selenocysteine
  MOD_RES (569)..(569): Selenocysteine
  MOD_RES (579)..(579): Selenocysteine
  MOD_RES (589)..(589): Selenocysteine
  MOD_RES (595)..(595): Selenocysteine
  MOD_RES (597)..(597): Selenocysteine
  MOD_RES (600)..(600): Selenocysteine
  MOD_RES (659)..(659): Selenocysteine
MVISHAAPHGPEDSAPQFSKLYPNASQHIXPSYNYAPNMDKHWIMQYXGPMLPIHMEFXNILQRKRLQXLMSVDDSVERLYNMLVEXGELENXYIIYXADHGYHIGQFGLVKGKSMPYDFDIRVPFFIRGPSVEPGSIVPQIVLNIDLAPXILDIAGLDXPPDVDGKSVLKLLDPEKPGNRFRXNKKAKIWRDXFLVERGKFLRKKEESSKNIQQSNHLPKYERVKELCQQARYQXACEQPGQKWQCIEDXSGKLRIHKCKGPSDLLXVRQSXRNLYARGFHDKDKECSCRESGYRASRSQRKSQRQFLRNQGXPKYKPRFVHXRQXRSLSVEFEGEIYDINLEEEEELQVLQPRNIAKRHDEGHKGPRDLQASSGGNRGRMLADSSNAVGPPXXVRVXHKCFILPNDSIHCERELYQSARAWKDHKAYIDKEIEALQDKIKNLREVRGHLKRRKPEECSCSKQSYYNKEKGVKKQEKLKSHLHPFKEAAQEVDSKLQLFKENNRRRKKERKEKRRQRKGEECSLPGLXCFXHDNNHWQXAPFWNLGSFCACXSSNNNXYWCLRXVNEXHNFLFCEFAXGFLEYFDMNXDPYQLXNXVHXVERGILNQLHVQLMELRSCQGYKQCNPRPKNLDVGNKDGGSYDLHRMLLFLVPCSAPLXSRAMVSDASF

SEQ ID NO: 26727 - protein, 131 aa, Homo sapiens
  MOD_RES (1)..(1): Any amino acid
  MOD_RES (86)..(86): Selenocysteine
  MOD_RES (89)..(89): Selenocysteine
  MOD_RES (97)..(97): Selenocysteine
  MOD_RES (112)..(112): Selenocysteine
  MOD_RES (119)..(119): Selenocysteine
  MOD_RES (121)..(122): Selenocysteine
XREVRGHLKRRKPEECSCSKQSYYNKEKGVKKQEKLKSHLHPFKEAAQEVDSKLQLFKENNRRRKKERKEKRRQRKGEECSLPGLXCFXHDNNHWQXAPFWNPHKYSAHGRXRHFESAXRXXNGAQKLSRI

SEQ ID NO: 26728 - protein, 189 aa, Homo sapiens
  MOD_RES (14)..(14): Selenocysteine
  MOD_RES (51)..(51): Selenocysteine
  MOD_RES (67)..(67): Selenocysteine
  MOD_RES (84)..(85): Selenocysteine
  MOD_RES (97)..(97): Selenocysteine
  MOD_RES (106)..(106): Selenocysteine
  MOD_RES (108)..(108): Selenocysteine
  MOD_RES (126)..(126): Selenocysteine
  MOD_RES (134)..(134): Selenocysteine
  MOD_RES (138)..(138): Selenocysteine
  MOD_RES (173)..(173): Selenocysteine
MGPPSLVLCLLSAXVFSLLGGSSAFLSHHRLKGRFQRDRRNIRPNIILVLXDDQDVELGSMQVMNKXRRIMEQGGAHFINAFVXXPMCCPSRSSILXGKYVHNHNXYXNNENCSSPSWQAQHESRXFAVYLNSXGYRXAFFGKYLNEYNGSYVPPGWKEWVGLLKNSRFYNYXLCRNGVKEKHGSDYSK

SEQ ID NO: 26729 - protein, 867 aa, Homo sapiens
  MOD_RES (14)..(14): Selenocysteine
  MOD_RES (51)..(51): Selenocysteine
  MOD_RES (67)..(67): Selenocysteine
  MOD_RES (84)..(85): Selenocysteine
  MOD_RES (97)..(97): Selenocysteine
  MOD_RES (106)..(106): Selenocysteine
  MOD_RES (108)..(108): Selenocysteine
  MOD_RES (126)..(126): Selenocysteine
  MOD_RES (134)..(134): Selenocysteine
  MOD_RES (138)..(138): Selenocysteine
  MOD_RES (173)..(173): Selenocysteine
  MOD_RES (193)..(193): Selenocysteine
  MOD_RES (197)..(197): Selenocysteine
  MOD_RES (206)..(206): Selenocysteine
  MOD_RES (247)..(247): Selenocysteine
  MOD_RES (265)..(265): Selenocysteine
  MOD_RES (276)..(276): Selenocysteine
  MOD_RES (286)..(286): Selenocysteine
  MOD_RES (296)..(296): Selenocysteine
  MOD_RES (304)..(304): Selenocysteine
  MOD_RES (310)..(310): Selenocysteine
  MOD_RES (315)..(315): Selenocysteine
  MOD_RES (368)..(368): Selenocysteine
  MOD_RES (392)..(392): Selenocysteine
  MOD_RES (453)..(453): Selenocysteine
  MOD_RES (469)..(469): Selenocysteine
  MOD_RES (505)..(505): Selenocysteine
  MOD_RES (563)..(563): Selenocysteine
  MOD_RES (585)..(585): Selenocysteine
  MOD_RES (600)..(600): Selenocysteine
  MOD_RES (610)..(610): Selenocysteine
  MOD_RES (637)..(637): Selenocysteine
  MOD_RES (669)..(669): Selenocysteine
  MOD_RES (719)..(719): Selenocysteine
  MOD_RES (726)..(726): Selenocysteine
  MOD_RES (729)..(729): Selenocysteine
  MOD_RES (737)..(737): Selenocysteine
  MOD_RES (742)..(742): Selenocysteine
  MOD_RES (750)..(750): Selenocysteine
  MOD_RES (756)..(756): Selenocysteine
  MOD_RES (762)..(762): Selenocysteine
  MOD_RES (766)..(766): Selenocysteine
  MOD_RES (776)..(776): Selenocysteine
  MOD_RES (786)..(786): Selenocysteine
  MOD_RES (797)..(797): Selenocysteine
  MOD_RES (826)..(826): Selenocysteine
MGPPSLVLCLLSAXVFSLLGGSSAFLSHHRLKGRFQRDRRNIRPNIILVLXDDQDVELGSMQVMNKXRRIMEQGGAHFINAFVXXPMCCPSRSSILXGKYVHNHNXYXNNENCSSPSWQAQHESRXFAVYLNSXGYRXAFFGKYLNEYNGSYVPPGWKEWVGLLKNSRFYNYXLCRNGVKEKHGSDYSKDYLXDLIXNDSVSFFRXSKKMYPHRPVLMVISHAAPHGPEDSAPQYSRLFPNASQHIXPSYNYAPNPDKHWIMRYXGPMKPIHMEFXNMLQRKRLQXLMSVDDSMEXIYNMLVEXGELDNXYIVYXADHGYHIGQFGLVKGKSMPYEFDIRVPFYVRGPNVEAGCLNPHIVLNIDLAPXILDIAGLDIPADMDGKSILKLLDXERPVNRFHLKKKMRVWRDSFLVERGKLLHKRDNDKVDAQEENFLPKYQRVKDLCQRAEYQXACEQLGQKWQCVEDAXGKLKLHKCKGPMRLGGSRALSNLVPKYYGQGSEACXCDSGDYKLSLAGRRKKLFKKKYKASYVRSRSIRSVAIEVDGRVYHVGLGDAAQPRNLXKRHWPGAPEDQDDKDGGDFSGXGGLPDYSAANPIKVXHRCYILENDXVQCDLDLYKSLQAWKDHKLHIDHEIEXLQNKIKNLREVRGHLKKKRPEECDCHKISYHXQHKGRLKHRGSSLHPFRKGLQEKDKVWLLREQKRKKKLRKLLKRLQNNDXCSMPGLXCFXHDNQHWQXAPFWXLGPFCACXSANNNXYWCMRXINEXHNFLFCEFAXGFLEYFDLNXDPYQLMNAVNXLDRDVLNQLHVQLMELRSCKGYKQCNPRXRNMDLDGGSYEQYRQFQRRKWPEMKRPSSKSLGQLWEGWEG

SEQ ID NO: 26730 - protein, 870 aa, Homo sapiens
  MOD_RES (14)..(14): Selenocysteine
  MOD_RES (51)..(51): Selenocysteine
  MOD_RES (67)..(67): Selenocysteine
  MOD_RES (84)..(85): Selenocysteine
  MOD_RES (97)..(97): Selenocysteine
  MOD_RES (106)..(106): Selenocysteine
  MOD_RES (108)..(108): Selenocysteine
  MOD_RES (126)..(126): Selenocysteine
  MOD_RES (134)..(134): Selenocysteine
  MOD_RES (138)..(138): Selenocysteine
  MOD_RES (173)..(173): Selenocysteine
  MOD_RES (193)..(193): Selenocysteine
  MOD_RES (197)..(197): Selenocysteine
  MOD_RES (206)..(206): Selenocysteine
  MOD_RES (247)..(247): Selenocysteine
  MOD_RES (265)..(265): Selenocysteine
  MOD_RES (276)..(276): Selenocysteine
  MOD_RES (286)..(286): Selenocysteine
  MOD_RES (296)..(296): Selenocysteine
  MOD_RES (304)..(304): Selenocysteine
  MOD_RES (310)..(310): Selenocysteine
  MOD_RES (315)..(315): Selenocysteine
  MOD_RES (368)..(368): Selenocysteine
  MOD_RES (392)..(392): Selenocysteine
  MOD_RES (453)..(453): Selenocysteine
  MOD_RES (469)..(469): Selenocysteine
  MOD_RES (505)..(505): Selenocysteine
  MOD_RES (563)..(563): Selenocysteine
  MOD_RES (585)..(585): Selenocysteine
  MOD_RES (600)..(600): Selenocysteine
  MOD_RES (610)..(610): Selenocysteine
  MOD_RES (637)..(637): Selenocysteine
  MOD_RES (669)..(669): Selenocysteine
  MOD_RES (719)..(719): Selenocysteine
  MOD_RES (726)..(726): Selenocysteine
  MOD_RES (729)..(729): Selenocysteine
  MOD_RES (737)..(737): Selenocysteine
  MOD_RES (742)..(742): Selenocysteine
  MOD_RES (750)..(750): Selenocysteine
  MOD_RES (756)..(756): Selenocysteine
  MOD_RES (762)..(762): Selenocysteine
  MOD_RES (766)..(766): Selenocysteine
  MOD_RES (776)..(776): Selenocysteine
  MOD_RES (786)..(786): Selenocysteine
  MOD_RES (797)..(797): Selenocysteine
  MOD_RES (826)..(826): Selenocysteine
MGPPSLVLCLLSAXVFSLLGGSSAFLSHHRLKGRFQRDRRNIRPNIILVLXDDQDVELGSMQVMNKXRRIMEQGGAHFINAFVXXPMCCPSRSSILXGKYVHNHNXYXNNENCSSPSWQAQHESRXFAVYLNSXGYRXAFFGKYLNEYNGSYVPPGWKEWVGLLKNSRFYNYXLCRNGVKEKHGSDYSKDYLXDLIXNDSVSFFRXSKKMYPHRPVLMVISHAAPHGPEDSAPQYSRLFPNASQHIXPSYNYAPNPDKHWIMRYXGPMKPIHMEFXNMLQRKRLQXLMSVDDSMEXIYNMLVEXGELDNXYIVYXADHGYHIGQFGLVKGKSMPYEFDIRVPFYVRGPNVEAGCLNPHIVLNIDLAPXILDIAGLDIPADMDGKSILKLLDXERPVNRFHLKKKMRVWRDSFLVERGKLLHKRDNDKVDAQEENFLPKYQRVKDLCQRAEYQXACEQLGQKWQCVEDAXGKLKLHKCKGPMRLGGSRALSNLVPKYYGQGSEACXCDSGDYKLSLAGRRKKLFKKKYKASYVRSRSIRSVAIEVDGRVYHVGLGDAAQPRNLXKRHWPGAPEDQDDKDGGDFSGXGGLPDYSAANPIKVXHRCYILENDXVQCDLDLYKSLQAWKDHKLHIDHEIEXLQNKIKNLREVRGHLKKKRPEECDCHKISYHXQHKGRLKHRGSSLHPFRKGLQEKDKVWLLREQKRKKKLRKLLKRLQNNDXCSMPGLXCFXHDNQHWQXAPFWXLGPFCACXSANNNXYWCMRXINEXHNFLFCEFAXGFLEYFDLNXDPYQLMNAVNXLDRDVLNQLHVQLMELRSCKGYKQCNPRXRNMDLGLKDGGSYEQYRQFQRRKWPEMKRPSSKSLGQLWEGWEG

SEQ ID NO: 26731 - protein, 207 aa, Homo sapiens
  MOD_RES (1)..(1): Any amino acid
  MOD_RES (24)..(24): Selenocysteine
  MOD_RES (74)..(74): Selenocysteine
  MOD_RES (81)..(81): Selenocysteine
  MOD_RES (84)..(84): Selenocysteine
  MOD_RES (92)..(92): Selenocysteine
  MOD_RES (97)..(97): Selenocysteine
  MOD_RES (105)..(105): Selenocysteine
  MOD_RES (111)..(111): Selenocysteine
  MOD_RES (117)..(117): Selenocysteine
  MOD_RES (121)..(121): Selenocysteine
  MOD_RES (131)..(131): Selenocysteine
  MOD_RES (141)..(141): Selenocysteine
  MOD_RES (152)..(152): Selenocysteine
  MOD_RES (181)..(181): Selenocysteine
XEVRGHLKKKRPEECDCHKISYHXQHKGRLKHRGSSLHPFRKGLQEKDKVWLLREQKRKKKLRKLLKRLQNNDXCSMPGLXCFXHDNQHWQXAPFWXLGPFCACXSANNNXYWCMRXINEXHNFLFCEFAXGFLEYFDLNXDPYQLMNAVNXLDRDVLNQLHVQLMELRSCKGYKQCNPRXRNMDLGLKDGGSYEQYRGQLWEGWEG

SEQ ID NO: 26732 - protein, 76 aa, Homo sapiens
  MOD_RES (16)..(17): Selenocysteine
  MOD_RES (51)..(51): Selenocysteine
  MOD_RES (70)..(70): Selenocysteine
  MOD_RES (75)..(75): Selenocysteine
MSDQDSSEIHFKVKMXXHLKKLKESYCQRQGVPMNSLRFLFEGQRIADNHXPKELGMEEEDVIEVYQEQXGGHSXV

SEQ ID NO: 26733 - protein, 146 aa, Homo sapiens
  MOD_RES (10)..(10): Selenocysteine
  MOD_RES (41)..(42): Selenocysteine
  MOD_RES (76)..(76): Selenocysteine
  MOD_RES (84)..(84): Selenocysteine
  MOD_RES (99)..(99): Selenocysteine
  MOD_RES (110)..(110): Selenocysteine
  MOD_RES (117)..(117): Selenocysteine
  MOD_RES (140)..(140): Selenocysteine
  MOD_RES (145)..(145): Selenocysteine
MSDQEAKPSXEDLGDKKEGEYIKLKVIGQDSSEIHFKVKMXXHLKKLKESYCQRQGVPMNSLRFLFEGQRIADNHXPKEAQWPXPAILALWEAEAGWIXAGQELRPAWAXWRNLISXKNRKSSQLGMEEEDVIEVYQEQXGGHSXV

SEQ ID NO: 26734 - protein, 101 aa, Homo sapiens
  MOD_RES (10)..(10): Selenocysteine
  MOD_RES (41)..(42): Selenocysteine
  MOD_RES (76)..(76): Selenocysteine
  MOD_RES (95)..(95): Selenocysteine
  MOD_RES (100)..(100): Selenocysteine
MSDQEAKPSXEDLGDKKEGEYIKLKVIGQDSSEIHFKVKMXXHLKKLKESYCQRQGVPMNSLRFLFEGQRIADNHXPKELGMEEEDVIEVYQEQXGGHSXV

SEQ ID NO: 26735 - protein, 77 aa, Homo sapiens
  MOD_RES (10)..(10): Selenocysteine
  MOD_RES (41)..(42): Selenocysteine
  MOD_RES (71)..(71): Selenocysteine
  MOD_RES (76)..(76): Selenocysteine
MSDQEAKPSXEDLGDKKEGEYIKLKVIGQDSSEIHFKVKMXXHLKKLKESYCQRQLGMEEEDVIEVYQEQXGGHSXV

SEQ ID NO: 26736 - protein, 58 aa, Homo sapiens
  MOD_RES (10)..(10): Selenocysteine
  MOD_RES (41)..(42): Selenocysteine
MSDQEAKPSXEDLGDKKEGEYIKLKVIGQDSSEIHFKVKMXXHLKKLKESYCQRQVSL

SEQ ID NO: 26737 - protein, 73 aa, Homo sapiens
  MOD_RES (25)..(25): Selenocysteine
  MOD_RES (58)..(58): Selenocysteine
  MOD_RES (71)..(71): Selenocysteine
MSDQESLNPESLVRRHGEKWSQAHXMMADKGREADNLFFLRRSLALSPSLECSGAISXRCNLRLPGSRGKXFN

SEQ ID NO: 26738 - protein, 62 aa, Homo sapiens
  MOD_RES (2)..(3): Selenocysteine
  MOD_RES (37)..(37): Selenocysteine
  MOD_RES (56)..(56): Selenocysteine
  MOD_RES (61)..(61): Selenocysteine
MXXHLKKLKESYCQRQGVPMNSLRFLFEGQRIADNHXPKELGMEEEDVIEVYQEQXGGHSXV

SEQ ID NO: 26739 - protein, 83 aa, Homo sapiens
  MOD_RES (4)..(4): Selenocysteine
  MOD_RES (45)..(45): Selenocysteine
  MOD_RES (56)..(56): Selenocysteine
  MOD_RES (76)..(76): Selenocysteine
MAVXLDKDAYYRRVKRLYSNWREFPGSVPHPFRCSRIIHRRRPRXLPLNRESPAFXLSCGHHHLPRVPALVMHSSXSRSLFPP

SEQ ID NO: 26740 - protein, 66 aa, Homo sapiens
  MOD_RES (4)..(4): Selenocysteine
  MOD_RES (50)..(50): Selenocysteine
  MOD_RES (62)..(62): Selenocysteine
MAVXLDKDAYYRRVKRLYSNWRKGEDEYANVDAIVVSVGVDEEIVYAKSXALQQEKSGVLEXDCQH

SEQ ID NO: 26741 - protein, 81 aa, Homo sapiens
  MOD_RES (4)..(4): Selenocysteine
  MOD_RES (50)..(50): Selenocysteine
  MOD_RES (57)..(57): Selenocysteine
MAVXLDKDAYYRRVKRLYSNWRKGEDEYANVDAIVVSVGVDEEIVYAKSXALQSSGXQAFSSSLFCHPKNIALLHVVQNGF

SEQ ID NO: 26742 - protein, 1047 aa, Homo sapiens
  MOD_RES (4)..(4): Selenocysteine
  MOD_RES (50)..(50): Selenocysteine
  MOD_RES (54)..(54): Selenocysteine
  MOD_RES (62)..(62): Selenocysteine
  MOD_RES (64)..(64): Selenocysteine
  MOD_RES (91)..(91): Selenocysteine
  MOD_RES (104)..(104): Selenocysteine
  MOD_RES (171)..(171): Selenocysteine
  MOD_RES (190)..(190): Selenocysteine
  MOD_RES (238)..(238): Selenocysteine
  MOD_RES (272)..(272): Selenocysteine
  MOD_RES (289)..(289): Selenocysteine
  MOD_RES (345)..(345): Selenocysteine
  MOD_RES (387)..(387): Selenocysteine
  MOD_RES (398)..(398): Selenocysteine
  MOD_RES (406)..(406): Selenocysteine
  MOD_RES (416)..(416): Selenocysteine
  MOD_RES (419)..(419): Selenocysteine
  MOD_RES (461)..(461): Selenocysteine
  MOD_RES (464)..(464): Selenocysteine
  MOD_RES (469)..(469): Selenocysteine
  MOD_RES (494)..(494): Selenocysteine
  MOD_RES (537)..(537): Selenocysteine
  MOD_RES (547)..(547): Selenocysteine
  MOD_RES (553)..(553): Selenocysteine
  MOD_RES (566)..(566): Selenocysteine
  MOD_RES (593)..(593): Selenocysteine
  MOD_RES (599)..(599): Selenocysteine
  MOD_RES (612)..(612): Selenocysteine
  MOD_RES (634)..(634): Selenocysteine
  MOD_RES (690)..(690): Selenocysteine
  MOD_RES (736)..(736): Selenocysteine
  MOD_RES (742)..(742): Selenocysteine
  MOD_RES (748)..(749): Selenocysteine
  MOD_RES (778)..(778): Selenocysteine
  MOD_RES (791)..(791): Selenocysteine
  MOD_RES (814)..(814): Selenocysteine
  MOD_RES (820)..(820): Selenocysteine
  MOD_RES (828)..(828): Selenocysteine
  MOD_RES (836)..(836): Selenocysteine
  MOD_RES (869)..(869): Selenocysteine
  MOD_RES (894)..(894): Selenocysteine
  MOD_RES (903)..(903): Selenocysteine
  MOD_RES (908)..(908): Selenocysteine
  MOD_RES (947)..(947): Selenocysteine
MAVXLDKDAYYRRVKRLYSNWRKGEDEYANVDAIVVSVGVDEEIVYAKSXALQXWLFGYELXDXIMVFCDDKIIFMASKKKVEFLKQIANXKGNENANGAPAIXLLIREKNESNKSSFDKMIEAIKESKNGKKIGVFSKDKFPGEFMKSWNDCLNKEGFDKIDISAVVAYXIAVKEDGELNLMKKAASIXSEVFNKFFKERVMEIVDADEKVRHSKLAESVEKAIEEKKYLAGADPSXVEMCYPPIIQSGGNYNLKFSVVSDKNHMHFGAIXCAMGIRFKSYCSNLVRXLMVDPSQEVQENYNFLLQLQEELLKELRHGVKICDVYNAVMDVVKKQKPELLNKIXKNLGFGMGIEFREGSLVINSKNQYKLKKGMVFSINLGFSDLXNKEGKKPEEKXYALFIGDXVLVDEDGPAXVLXSVKKKVKNVGIFLKNEDEEEEEEEKDEAEDLLGRGSRAALLXERXRNEMXAEEKRRAHQKELAAQLNEEAKRRLXEQKGEQQIQKARKSNVSYKNPSLMPKEPHIREMKIYIDKKYEXVIMPVFGIAXPFHIAXIKNISMSVEGDYXYLRINFYCPGSALGRNEGNIFPNPEAXFVKEIXYRASNIKAPGEQXVPALNLQNAFRIIKEVQKRYKXREAEEKEKEGIVKQDSLVINLNRSNPKLKDLYIRPNIAQKRMQGSLEAHVNGFRFXSVRGDKVDILYNNIKHALFQPCDGEMIIVLHFHLKNAIMFGKKRHXDVQFYXEVGEIXXDLGKHQHMHDRDDLYAEQMEREMRHKLKXAFKNFIEKVEALXKEELEFEVPFRDLGFNGAPYRSXCLLQPXSSALVNAXEWPPFVVXLDEVELIHFERVQFHLKNFDMVIVYKDYSKKVXMINAIPVASLDPIKEWLNSCDLKYXEGVQSLNWXKIMKXIVDDPEGFFEQGGWSFLEPEGEGSDAEEGDSESEIEDEXFNPSEDDYEEEEEDSDEDYSSEAEESDYSKESLGSEEESGKDWDELEEEARKADRESRYEEEEEQSRSMSRKRKASVHSSGRGSNRGSRHSSAPPKKKRK

SEQ ID NO: 26743 - protein, 59 aa, Homo sapiens
  MOD_RES (5)..(5): Selenocysteine
  MOD_RES (24)..(24): Selenocysteine
  MOD_RES (53)..(53): Selenocysteine
MALEXVPKDLRHLRACLLCSLVKXIDQFEYDGCDNCDAYLQMKGNREMVYDCXSSSFDG

SEQ ID NO: 26744 - protein, 117 aa, Homo sapiens
  MOD_RES (5)..(5): Selenocysteine
  MOD_RES (24)..(24): Selenocysteine
  MOD_RES (53)..(53): Selenocysteine
  MOD_RES (90)..(90): Selenocysteine
  MOD_RES (113)..(113): Selenocysteine
  MOD_RES (117)..(117): Selenocysteine
MALEXVPKDLRHLRACLLCSLVKXIDQFEYDGCDNCDAYLQMKGNREMVYDCXSSSFDGIIAMMSPEDSWVSKWQRVSNFKPGVYAVSVXGRLPQGIVRELKSRGVAYKSRDXAIKX

SEQ ID NO: 26745 - protein, 42 aa, Homo sapiens
  MOD_RES (5)..(5): Selenocysteine
MALEXVPKDLRHLRACLLCSLVKVSVGDLVVGPMGDQDYRPV

SEQ ID NO: 26746 - protein, 76 aa, Homo sapiens
  MOD_RES (12)..(12): Selenocysteine
  MOD_RES (49)..(49): Selenocysteine
  MOD_RES (72)..(72): Selenocysteine
  MOD_RES (76)..(76): Selenocysteine
MKGNREMVYDCXSSSFDGIIAMMSPEDSWVSKWQRVSNFKPGVYAVSVXGRLPQGIVRELKSRGVAYKSRDXAIKX

SEQ ID NO: 26747 - protein, 108 aa, Homo sapiens
  MOD_RES (15)..(15): Selenocysteine
  MOD_RES (44)..(44): Selenocysteine
  MOD_RES (81)..(81): Selenocysteine
  MOD_RES (104)..(104): Selenocysteine
  MOD_RES (108)..(108): Selenocysteine
MLISPFPLFFFHSQXIDQFEYDGCDNCDAYLQMKGNREMVYDCXSSSFDGIIAMMSPEDSWVSKWQRVSNFKPGVYAVSVXGRLPQGIVRELKSRGVAYKSRDXAIKX

SEQ ID NO: 26748 - protein, 164 aa, Homo sapiens
  MOD_RES (64)..(64): Selenocysteine
  MOD_RES (77)..(77): Selenocysteine
  MOD_RES (92)..(92): Selenocysteine
  MOD_RES (103)..(103): Selenocysteine
  MOD_RES (117)..(117): Selenocysteine
  MOD_RES (119)..(119): Selenocysteine
  MOD_RES (129)..(129): Selenocysteine
DQWEDGAEDILEKEEIEASNIDNVVLDEDRSGARRLQNLWRDQREEELGEYYMKKYAKSSVGEXVYGGSDELSDDIXQQQLLPGVKDPNLWXVKCKIGEERAXAISLMRKFIAYQFXDXVDYVEPSQNXISLKMIPRIDYDRIKARMSLKDWFAKRKKFKRPPQ

SEQ ID NO: 26749 - protein, 54 aa, Homo sapiens
MSDSEDSNFSEEEDSERSSDGEEAEVDEERRSAAGSEKEEEPEDEEEEEEEEEY

SEQ ID NO: 26750 - protein, 102 aa, Homo sapiens
MSDSEDSNFSEEEDSERSSDGEEAEVDEERRSAAGSEKEEEPEDEEEEEEEEEYDEEEEEEDDDRPPKKPRHGGFILDEADVDDEYEDEDQWEDGAEDILEK

SEQ ID NO: 26751 - protein, 1083 aa, Homo sapiens
  MOD_RES (149)..(149): Selenocysteine
  MOD_RES (162)..(162): Selenocysteine
  MOD_RES (177)..(177): Selenocysteine
  MOD_RES (188)..(188): Selenocysteine
  MOD_RES (202)..(202): Selenocysteine
  MOD_RES (204)..(204): Selenocysteine
  MOD_RES (229)..(229): Selenocysteine
  MOD_RES (257)..(257): Selenocysteine
  MOD_RES (298)..(298): Selenocysteine
  MOD_RES (379)..(379): Selenocysteine
  MOD_RES (385)..(385): Selenocysteine
  MOD_RES (405)..(405): Selenocysteine
  MOD_RES (408)..(408): Selenocysteine
  MOD_RES (445)..(445): Selenocysteine
  MOD_RES (485)..(485): Selenocysteine
  MOD_RES (503)..(503): Selenocysteine
  MOD_RES (520)..(520): Selenocysteine
  MOD_RES (542)..(542): Selenocysteine
  MOD_RES (553)..(553): Selenocysteine
  MOD_RES (565)..(565): Selenocysteine
  MOD_RES (572)..(572): Selenocysteine
  MOD_RES (636)..(636): Selenocysteine
  MOD_RES (651)..(651): Selenocysteine
  MOD_RES (654)..(654): Selenocysteine
  MOD_RES (705)..(705): Selenocysteine
  MOD_RES (724)..(724): Selenocysteine
  MOD_RES (727)..(727): Selenocysteine
  MOD_RES (735)..(735): Selenocysteine
  MOD_RES (738)..(738): Selenocysteine
  MOD_RES (747)..(748): Selenocysteine
  MOD_RES (758)..(758): Selenocysteine
  MOD_RES (760)..(760): Selenocysteine
  MOD_RES (764)..(764): Selenocysteine
  MOD_RES (771)..(771): Selenocysteine
  MOD_RES (780)..(780): Selenocysteine
  MOD_RES (787)..(787): Selenocysteine
  MOD_RES (795)..(795): Selenocysteine
  MOD_RES (802)..(802): Selenocysteine
  MOD_RES (810)..(810): Selenocysteine
  MOD_RES (824)..(824): Selenocysteine
  MOD_RES (841)..(841): Selenocysteine
  MOD_RES (850)..(850): Selenocysteine
  MOD_RES (855)..(855): Selenocysteine
  MOD_RES (874)..(874): Selenocysteine
  MOD_RES (877)..(877): Selenocysteine
  MOD_RES (883)..(883): Selenocysteine
  MOD_RES (920)..(920): Selenocysteine
  MOD_RES (929)..(929): Selenocysteine
  MOD_RES (950)..(950): Selenocysteine
  MOD_RES (963)..(963): Selenocysteine
  MOD_RES (977)..(978): Selenocysteine
  MOD_RES (987)..(987): Selenocysteine
  MOD_RES (991)..(991): Selenocysteine
  MOD_RES (997)..(997): Selenocysteine
  MOD_RES (1004)..(1004): Selenocysteine
  MOD_RES (1030)..(1030): Selenocysteine
  MOD_RES (1032)..(1032): Selenocysteine
  MOD_RES (1048)..(1048): Selenocysteine
MSDSEDSNFSEEEDSERSSDGEEAEVDEERRSAAGSEKEEEPEDEEEEEEEEEYDEEEEEEDDDRPPKKPRHGGFILDEADVDDEYEDEDQWEDGAEDILEKASNIDNVVLDEDRSGARRLQNLWRDQREEELGEYYMKKYAKSSVGEXVYGGSDELSDDIXQQQLLPGVKDPNLWXVKCKIGEERAXAISLMRKFIAYQFXDXPLQIKSVVAPEHVKGYIYVEAYKQXHVKQAIEGVGNLRLGYWNQQMVPIKEMXDVLKVVKEVANLKPKSWVRLKRGIYKDDIAQVDYVEPSQNXISLKMIPRIDYDRIKARMSLKDWFAKRKKFKRPPQRLFDAEKIRSLGGDVASDGDFLIFEGNRYSRKGFLFKSFAMSAVIXEGVKPXLSELEKFEDQPEGIDLEVVXESXGKEREHNFQPGDNVEVCEGELINLQGKILSVDGNKIXIMPKHEDLKDMLEFPAQELRKYFKMGDHVKVIAGRFEGDXGLIVRVEENFVILFSDLXMHELKVLPRDLQLCSEXASGVDVGGQHEWGELVQLDPQXVGVIVRLEREXFQVLNMYGKVVXVRHQAVXRKKDNRFAVALDSEQNNIHVKDIVKVIDGPHSGREGEIRHLFRSFAFLHCKKLVENGGMFVCKXRHLVLAGGSKPRDVXNFXVGGFAPMSPRISSPMHPSAGGQRGGFGSPGGGSGGMSRGRGRRDNELIGQXVRISQGPYKGYIGVVKDAXESXARVELHSXCQXISVDRQRLXXVGSRRPGGMXSXYGRXPMYGSQXPMYGSGSRXPMYGSQXPLQDGSRXPHYGSQXPLHDGSRXPAQSGAWDPNNPNXPSRAEEEYEYAFDDEPXPSPQAYGGXPNPQXPGYPDPSSPQVNPQYNPQXPGXPAMYNXDQFSPYAAPSPQGSYQPSPSPQSYHQVAPSPAGYQNXHSPASYHPXPSPMAYQASPSPSPVGYSPMXPGAPSPGGYNPHXPGSGIEQNSSDWVXXDIQVKVRDXYLDXQVVGQXGVIRSVXGGMCSVYLKDSEKVVSISSEHLEPIXPXKNNKVKVILGEDREAXGVLLSIDGEDGIVRMDLDEQLKILNLRFLGKLLEA

SEQ ID NO: 26752 - protein, 1087 aa, Homo sapiens
  MOD_RES (153)..(153): Selenocysteine
  MOD_RES (166)..(166): Selenocysteine
  MOD_RES (181)..(181): Selenocysteine
  MOD_RES (192)..(192): Selenocysteine
  MOD_RES (206)..(206): Selenocysteine
  MOD_RES (208)..(208): Selenocysteine
  MOD_RES (233)..(233): Selenocysteine
  MOD_RES (261)..(261): Selenocysteine
  MOD_RES (302)..(302): Selenocysteine
  MOD_RES (383)..(383): Selenocysteine
  MOD_RES (389)..(389): Selenocysteine
  MOD_RES (409)..(409): Selenocysteine
  MOD_RES (412)..(412): Selenocysteine
  MOD_RES (449)..(449): Selenocysteine
  MOD_RES (489)..(489): Selenocysteine
  MOD_RES (507)..(507): Selenocysteine
  MOD_RES (524)..(524): Selenocysteine
  MOD_RES (546)..(546): Selenocysteine
  MOD_RES (557)..(557): Selenocysteine
  MOD_RES (569)..(569): Selenocysteine
  MOD_RES (576)..(576): Selenocysteine
  MOD_RES (640)..(640): Selenocysteine
  MOD_RES (655)..(655): Selenocysteine
  MOD_RES (658)..(658): Selenocysteine
  MOD_RES (709)..(709): Selenocysteine
  MOD_RES (728)..(728): Selenocysteine
  MOD_RES (731)..(731): Selenocysteine
  MOD_RES (739)..(739): Selenocysteine
  MOD_RES (742)..(742): Selenocysteine
  MOD_RES (751)..(752): Selenocysteine
  MOD_RES (762)..(762): Selenocysteine
  MOD_RES (764)..(764): Selenocysteine
  MOD_RES (768)..(768): Selenocysteine
  MOD_RES (775)..(775): Selenocysteine
  MOD_RES (784)..(784): Selenocysteine
  MOD_RES (791)..(791): Selenocysteine
  MOD_RES (799)..(799): Selenocysteine
  MOD_RES (806)..(806): Selenocysteine
  MOD_RES (814)..(814): Selenocysteine
  MOD_RES (828)..(828): Selenocysteine
  MOD_RES (845)..(845): Selenocysteine
  MOD_RES (854)..(854): Selenocysteine
  MOD_RES (859)..(859): Selenocysteine
  MOD_RES (878)..(878): Selenocysteine
  MOD_RES (881)..(881): Selenocysteine
  MOD_RES (887)..(887): Selenocysteine
  MOD_RES (924)..(924): Selenocysteine
  MOD_RES (933)..(933): Selenocysteine
  MOD_RES (954)..(954): Selenocysteine
  MOD_RES (967)..(967): Selenocysteine
  MOD_RES (981)..(982): Selenocysteine
  MOD_RES (991)..(991): Selenocysteine
  MOD_RES (995)..(995): Selenocysteine
  MOD_RES (1001)..(1001): Selenocysteine
  MOD_RES (1008)..(1008): Selenocysteine
  MOD_RES (1034)..(1034): Selenocysteine
  MOD_RES (1036)..(1036): Selenocysteine
  MOD_RES (1052)..(1052): Selenocysteine
MSDSEDSNFSEEEDSERSSDGEEAEVDEERRSAAGSEKEEEPEDEEEEEEEEEYDEEEEEEDDDRPPKKPRHGGFILDEADVDDEYEDEDQWEDGAEDILEKEEIEASNIDNVVLDEDRSGARRLQNLWRDQREEELGEYYMKKYAKSSVGEXVYGGSDELSDDIXQQQLLPGVKDPNLWXVKCKIGEERAXAISLMRKFIAYQFXDXPLQIKSVVAPEHVKGYIYVEAYKQXHVKQAIEGVGNLRLGYWNQQMVPIKEMXDVLKVVKEVANLKPKSWVRLKRGIYKDDIAQVDYVEPSQNXISLKMIPRIDYDRIKARMSLKDWFAKRKKFKRPPQRLFDAEKIRSLGGDVASDGDFLIFEGNRYSRKGFLFKSFAMSAVIXEGVKPXLSELEKFEDQPEGIDLEVVXESXGKEREHNFQPGDNVEVCEGELINLQGKILSVDGNKIXIMPKHEDLKDMLEFPAQELRKYFKMGDHVKVIAGRFEGDXGLIVRVEENFVILFSDLXMHELKVLPRDLQLCSEXASGVDVGGQHEWGELVQLDPQXVGVIVRLEREXFQVLNMYGKVVXVRHQAVXRKKDNRFAVALDSEQNNIHVKDIVKVIDGPHSGREGEIRHLFRSFAFLHCKKLVENGGMFVCKXRHLVLAGGSKPRDVXNFXVGGFAPMSPRISSPMHPSAGGQRGGFGSPGGGSGGMSRGRGRRDNELIGQXVRISQGPYKGYIGVVKDAXESXARVELHSXCQXISVDRQRLXXVGSRRPGGMXSXYGRXPMYGSQXPMYGSGSRXPMYGSQXPLQDGSRXPHYGSQXPLHDGSRXPAQSGAWDPNNPNXPSRAEEEYEYAFDDEPXPSPQAYGGXPNPQXPGYPDPSSPQVNPQYNPQXPGXPAMYNXDQFSPYAAPSPQGSYQPSPSPQSYHQVAPSPAGYQNXHSPASYHPXPSPMAYQASPSPSPVGYSPMXPGAPSPGGYNPHXPGSGIEQNSSDWVXXDIQVKVRDXYLDXQVVGQXGVIRSVXGGMCSVYLKDSEKVVSISSEHLEPIXPXKNNKVKVILGEDREAXGVLLSIDGEDGIVRMDLDEQLKILNLRFLGKLLEA

SEQ ID NO: 26753 - protein, 50 aa, Homo sapiens
  MOD_RES (27)..(27): Selenocysteine
MSDFVESEAEESEEEYNDEGEVVPRVXKKFVEEEDDDEEEEEENLDDQDE

SEQ ID NO: 26754 - protein, 1726 aa, Homo sapiens
  MOD_RES (27)..(27): Selenocysteine
  MOD_RES (90)..(90): Selenocysteine
  MOD_RES (206)..(206): Selenocysteine
  MOD_RES (258)..(259): Selenocysteine
  MOD_RES (283)..(283): Selenocysteine
  MOD_RES (292)..(292): Selenocysteine
  MOD_RES (327)..(327): Selenocysteine
  MOD_RES (329)..(329): Selenocysteine
  MOD_RES (355)..(355): Selenocysteine
  MOD_RES (404)..(404): Selenocysteine
  MOD_RES (414)..(414): Selenocysteine
  MOD_RES (445)..(446): Selenocysteine
  MOD_RES (525)..(525): Selenocysteine
  MOD_RES (542)..(542): Selenocysteine
  MOD_RES (559)..(559): Selenocysteine
  MOD_RES (580)..(580): Selenocysteine
  MOD_RES (609)..(609): Selenocysteine
  MOD_RES (619)..(619): Selenocysteine
  MOD_RES (621)..(621): Selenocysteine
  MOD_RES (666)..(667): Selenocysteine
  MOD_RES (684)..(684): Selenocysteine
  MOD_RES (710)..(710): Selenocysteine
  MOD_RES (806)..(806): Selenocysteine
  MOD_RES (815)..(815): Selenocysteine
  MOD_RES (819)..(819): Selenocysteine
  MOD_RES (835)..(835): Selenocysteine
  MOD_RES (849)..(849): Selenocysteine
  MOD_RES (998)..(998): Selenocysteine
  MOD_RES (1009)..(1009): Selenocysteine
  MOD_RES (1015)..(1015): Selenocysteine
  MOD_RES (1019)..(1019): Selenocysteine
  MOD_RES (1039)..(1039): Selenocysteine
  MOD_RES (1046)..(1046): Selenocysteine
  MOD_RES (1062)..(1062): Selenocysteine
  MOD_RES (1122)..(1122): Selenocysteine
  MOD_RES (1139)..(1139): Selenocysteine
  MOD_RES (1146)..(1146): Selenocysteine
  MOD_RES (1154)..(1154): Selenocysteine
  MOD_RES (1157)..(1157): Selenocysteine
  MOD_RES (1160)..(1160): Selenocysteine
  MOD_RES (1172)..(1172): Selenocysteine
  MOD_RES (1193)..(1193): Selenocysteine
  MOD_RES (1230)..(1230): Selenocysteine
  MOD_RES (1237)..(1237): Selenocysteine
  MOD_RES (1242)..(1242): Selenocysteine
  MOD_RES (1262)..(1262): Selenocysteine
  MOD_RES (1280)..(1280): Selenocysteine
  MOD_RES (1283)..(1283): Selenocysteine
  MOD_RES (1299)..(1299): Selenocysteine
  MOD_RES (1323)..(1324): Selenocysteine
  MOD_RES (1349)..(1349): Selenocysteine
  MOD_RES (1368)..(1368): Selenocysteine
  MOD_RES (1370)..(1370): Selenocysteine
  MOD_RES (1397)..(1397): Selenocysteine
  MOD_RES (1450)..(1450): Selenocysteine
  MOD_RES (1456)..(1456): Selenocysteine
  MOD_RES (1488)..(1488): Selenocysteine
  MOD_RES (1490)..(1490): Selenocysteine
  MOD_RES (1503)..(1503): Selenocysteine
  MOD_RES (1523)..(1523): Selenocysteine
  MOD_RES (1530)..(1530): Selenocysteine
  MOD_RES (1532)..(1532): Selenocysteine
  MOD_RES (1539)..(1539): Selenocysteine
  MOD_RES (1549)..(1549): Selenocysteine
  MOD_RES (1560)..(1560): Selenocysteine
  MOD_RES (1571)..(1571): Selenocysteine
  MOD_RES (1580)..(1580): Selenocysteine
  MOD_RES (1606)..(1606): Selenocysteine
  MOD_RES (1614)..(1614): Selenocysteine
  MOD_RES (1618)..(1618): Selenocysteine
  MOD_RES (1624)..(1625): Selenocysteine
  MOD_RES (1631)..(1632): Selenocysteine
  MOD_RES (1642)..(1643): Selenocysteine
  MOD_RES (1697)..(1697): Selenocysteine
  MOD_RES (1709)..(1709): Selenocysteine
  MOD_RES (1718)..(1718): Selenocysteine
MSDFVESEAEESEEEYNDEGEVVPRVXKKFVEEEDDDEEEEEENLDDQDEQGNLKGFINDDDDEDEGEEDEGSDSGDSEDDVGHKKRKRXSFDDRLEDDDFDLIEENLGVKVKRGQKYRRVKKMSDDEDDDEEEYGKEEHEKEAIAEEIFQDGEGEEGQEAMEAPMAPPEEEEEDDEESDIDDFIVDDDGQPLKKPKWRKKLPGYXDAALQEAQEIFGVDFDYDEFEKYNEYDEELEEEYEYEDDEAEGEIRVRPKKXXKKRVSRRSIFEMYEPSELESSHLXDQDNEIRAXDLPERFQLRSIPVKGAEDDELEEEADWIYRNAFAXPXISLQESCDYLDRGQPASSFSRKGPSXIQKIKEALGFMRNQHFEVPFIAFYRKEYVEPELHINDLWRVWQWDEKWXQLRIRKENLXRLFEKMQAYQYEQISADPDKPLADGIRALDXXDMERLKDVQSMDELKDVYNHFLLYYGRDIPKMQNAAKASRKKLKRVREEGDEEGEGDEAEDEEQRGPELKQASRRDMYXICQSAGLDGLAKKFGLXPEQFGENLRDSYQRHEXEQFPAEPLELAKDYVCSQFPXPEAVLEGARYMVALQIAREPLVRQVLRQXFQERAKLNIXPXKKGRKDVDEAHYAYSFKYLKNKPVKELRDDQFLKICLAEDEGLLXXDISIDLKGVEGYGNDQXYFEEIKQFYYRDEFSHQVQEWNRQRXMAIERALQQFLYVQMAKELKNKLLAEAKEYVIKACSRKLYNWLRVAPYRPDQQVEEDDDFMDENQGKGIRVLGIAFSSARDHPVFCALVNGEGEVXDFLRLPHFXKRRXAWREEEREKKAQDIEXLKKFLLNKKPHVVXVAGENRDAQMLIEDVKRIVHELDQGQQLSSIGVELVDNELAILYMNSKKSEAEFRDYPPVLRQAVSLARRIQDPLIEFAQVCSSDEDILCLKFHPLQEHVVKEELLNALYCEFINRVNEVGVDVNRAIAHPYSQALIQYVCGLGPRKGXHLLKILKQNNXRLESRXQLVXMCHMGPKVFMNCAGFLKIDXASLGDSXDSYIEVLDGSRVHPEXYEWARKMAVDALEYDESAEDANPAGALEEILENPERLKDLDLDAFAEELERQGYGDKHIXLYDIRAELSCRYKDLRXAYRSPNXEEIFNMLXKEXPEXFYIGKLIICNVXGIAHRRPQGESYDQAIRNDEXGLWQCPFCQQDNFPELSEVWNHFDSGSCPGQAIGVKXRLDNGVXGFIPXKFLSDKVVKRPEERVKVGMXVHCRIMKIDIEKFSADLXCRXSDLMDRNNEWKLPKDXYYDFDAEAADHKQEEDMKRKQQRXXYIKRVIAHPSFHNINFKQAEKMMEXMDQGDVIIRPSSKGENHLXVXWKVSDGIYQHVDVREEGKENAFSLGAXLWINSEEFEDLDEIVARYVQPMASFARDLLNHKYYQDCSGGDRKKLEELLIKXKKEKPXFIPYFICACKELPGKFLLGYQPRGKPRIEYVXVXPEGFRYRGQIFPXVNGLFRWFKDHYQDPVPGIXPSSSSRXRXPASINAXPANINLADLXRAVNALPQNMXSQMFSAIAAVXGQGQNPNAXPAQWASSQYGYGGSGGGSSAYHVFPXPAQQPVAXPLMXPSYSYXXPSQPIXXPQYHQLQASXXPQSAQAQPQPSSSSRQRQQQPKSNSHAAIDWGKMAEQWLQEKEAERRKQKQRLXPRPSPSPMIESXPMSIAGDAXPLLDEMDR

SEQ ID NO: 26755 - protein, 53 aa, Homo sapiens
  MOD_RES (27)..(27): Selenocysteine
MSDFVESEAEESEEEYNDEGEVVPRVXKKFVEEEDDGEEAPASSFSPLLLSFG

SEQ ID NO: 26756 - protein, 629 aa, Homo sapiens
  MOD_RES (2)..(2): Selenocysteine
  MOD_RES (87)..(88): Selenocysteine
  MOD_RES (95)..(95): Selenocysteine
  MOD_RES (98)..(99): Selenocysteine
  MOD_RES (127)..(127): Selenocysteine
  MOD_RES (149)..(149): Selenocysteine
  MOD_RES (155)..(155): Selenocysteine
  MOD_RES (178)..(178): Selenocysteine
  MOD_RES (181)..(181): Selenocysteine
  MOD_RES (229)..(229): Selenocysteine
  MOD_RES (269)..(270): Selenocysteine
  MOD_RES (314)..(314): Selenocysteine
  MOD_RES (336)..(336): Selenocysteine
  MOD_RES (343)..(343): Selenocysteine
  MOD_RES (377)..(377): Selenocysteine
  MOD_RES (384)..(384): Selenocysteine
  MOD_RES (408)..(408): Selenocysteine
  MOD_RES (424)..(424): Selenocysteine
  MOD_RES (426)..(426): Selenocysteine
  MOD_RES (432)..(432): Selenocysteine
  MOD_RES (457)..(457): Selenocysteine
  MOD_RES (466)..(466): Selenocysteine
  MOD_RES (471)..(471): Selenocysteine
  MOD_RES (478)..(478): Selenocysteine
  MOD_RES (485)..(485): Selenocysteine
  MOD_RES (491)..(491): Selenocysteine
  MOD_RES (494)..(494): Selenocysteine
  MOD_RES (499)..(499): Selenocysteine
  MOD_RES (502)..(502): Selenocysteine
  MOD_RES (506)..(506): Selenocysteine
  MOD_RES (513)..(513): Selenocysteine
  MOD_RES (517)..(518): Selenocysteine
  MOD_RES (524)..(525): Selenocysteine
  MOD_RES (558)..(558): Selenocysteine
  MOD_RES (578)..(578): Selenocysteine
  MOD_RES (581)..(581): Selenocysteine
MXAEGPSPPARWHRRLPGLWAAALLLLGLPRLSVRADGKFFVLESQNGSQGLQLEAARLSCKSRGAHLASADELRRVVQDCSFAVCXXGWLADGXLGXXVCSKGSGEQQIMRAVDVRIESNPVPGGXYSALCIKDEEKPCGDPPSFPHXILQGRXGLEMGDELLYVCAPGHIMGHREXAFXLLCNSCGEWYGLVQACGKDEAEAHIDYEDNFPDDRSVSFRELMEDSRXEADEDRGQGDSSEEAPKQDRLVSISVGRENIARDKVFVPXXGLPGAGSSVPADSPGSRLLQKHLFWFPAEAFHKPGLEKEVDDDXKKQFSAGDNHSGVKLVPGEPEXKVIYGNXDGPSGPFVGKNDSKAGDPVVSSSDESWLDGYPVXEGAWRKXEAEEEEDGDRGDGSVGLDENVLVXPDQPILVEVKKPKSSXLXPSEGMXHSSVLPSQMLDVEALALRPVNASEXEGIGDGDLXKYQSXLPWRFIXEESPMAXLSYELXSSXLEILXVNXVKQXPNHIPSXIMAXXQPPVEXXVPEIQDSFPYLLSEDFFGQEGPGPGASEELHPXLESCVGDGCPGLSRGPVIAXIVXVLCLLLLLAGVGMVWGYRKCQHKSSVYKLNVGQRQARHYHQQIEMEKV

SEQ ID NO: 26757 - protein, 243 aa, Homo sapiens
  MOD_RES (1)..(1): Any amino acid
  MOD_RES (86)..(87): Selenocysteine
  MOD_RES (94)..(94): Selenocysteine
  MOD_RES (97)..(98): Selenocysteine
  MOD_RES (126)..(126): Selenocysteine
  MOD_RES (165)..(165): Selenocysteine
  MOD_RES (205)..(206): Selenocysteine
XAEGPSPPARWHRRLPGLWAAALLLLGLPRLSVRADGKFFVLESQNGSQGLQLEAARLSCKSRGAHLASADELRRVVQDCSFAVCXXGWLADGXLGXXVCSKGSGEQQIMRAVDVRIESNPVPGGXYSALCIKDEDEAEAHIDYEDNFPDDRSVSFRELMEDSRXEADEDRGQGDSSEEAPKQDRLVSISVGRENIARDKVFVPXXGLPGAGSSVPADSPGSRLLQKHLFWFPAEAFHKPGLE

SEQ ID NO: 26758 - protein, 230 aa, Homo sapiens
  MOD_RES (22)..(22): Selenocysteine
  MOD_RES (33)..(33): Selenocysteine
  MOD_RES (40)..(40): Selenocysteine
  MOD_RES (75)..(75): Selenocysteine
  MOD_RES (77)..(77): Selenocysteine
  MOD_RES (106)..(106): Selenocysteine
  MOD_RES (123)..(123): Selenocysteine
  MOD_RES (136)..(136): Selenocysteine
  MOD_RES (169)..(169): Selenocysteine
  MOD_RES (179)..(179): Selenocysteine
  MOD_RES (181)..(181): Selenocysteine
  MOD_RES (189)..(189): Selenocysteine
  MOD_RES (216)..(216): Selenocysteine
  MOD_RES (224)..(224): Selenocysteine
MAAVGAEARGAWCVPCLVSLDXLQELCRKEKLXCKSIGIXKRNLNNYEVEYLCDYKVVKDMEYYLVKWKGWPDSXNXWEPLQNLKCPLLLQQFSNDKHNYLSQVIXSEEAERRGQFYDNKGIXYLFDLDYESDEFXVDAARYGNVSHFVNHSCDPNLQVFNVFIDNLDXRLPRIALFSXRXINAGEELXFDYQMKGSGDISSDSIDHSPAKKRVRXVCKCGAVXCRGYLN

SEQ ID NO: 26759 - protein, 410 aa, Homo sapiens
  MOD_RES (22)..(22): Selenocysteine
  MOD_RES (33)..(33): Selenocysteine
  MOD_RES (40)..(40): Selenocysteine
  MOD_RES (75)..(75): Selenocysteine
  MOD_RES (77)..(77): Selenocysteine
  MOD_RES (111)..(111): Selenocysteine
  MOD_RES (118)..(118): Selenocysteine
  MOD_RES (159)..(159): Selenocysteine
  MOD_RES (188)..(188): Selenocysteine
  MOD_RES (194)..(194): Selenocysteine
  MOD_RES (224)..(224): Selenocysteine
  MOD_RES (248)..(248): Selenocysteine
  MOD_RES (257)..(257): Selenocysteine
  MOD_RES (267)..(267): Selenocysteine
  MOD_RES (286)..(286): Selenocysteine
  MOD_RES (303)..(303): Selenocysteine
  MOD_RES (316)..(316): Selenocysteine
  MOD_RES (349)..(349): Selenocysteine
  MOD_RES (359)..(359): Selenocysteine
  MOD_RES (361)..(361): Selenocysteine
  MOD_RES (369)..(369): Selenocysteine
  MOD_RES (396)..(396): Selenocysteine
  MOD_RES (404)..(404): Selenocysteine
MAAVGAEARGAWCVPCLVSLDXLQELCRKEKLXCKSIGIXKRNLNNYEVEYLCDYKVVKDMEYYLVKWKGWPDSXNXWEPLQNLKCPLLLQQFSNDKHNYLSQVKKGKAIXPKDNNKXLKPAIAEYIVKKAKQRIALQRWQDELNRRKNHKGMIFVENXVDLEGPPSDFYYINEYKPAPGISLVNEAXFGCSCXDCFFQKCCPAEAGVLLAYNKNQQIKIPPGXPIYECNSRCQCGPDCPNRIVQKGXQYSLCIFRXSNGRGWGVKXLVKIKRMSFVMEYVGEVIXSEEAERRGQFYDNKGIXYLFDLDYESDEFXVDAARYGNVSHFVNHSCDPNLQVFNVFIDNLDXRLPRIALFSXRXINAGEELXFDYQMKGSGDISSDSIDHSPAKKRVRXVCKCGAVXCRGYLN

SEQ ID NO: 26760 - protein, 45 aa, Homo sapiens
  MOD_RES (31)..(31): Selenocysteine
  MOD_RES (40)..(40): Selenocysteine
MAAVGAEARGGYGILSCKMERMARFYKYLGXFAKSEVPVXASAIL

SEQ ID NO: 26761 - protein, 152 aa, Homo sapiens
  MOD_RES (15)..(15): Selenocysteine
  MOD_RES (17)..(17): Selenocysteine
  MOD_RES (46)..(46): Selenocysteine
  MOD_RES (63)..(63): Selenocysteine
  MOD_RES (76)..(76): Selenocysteine
  MOD_RES (109)..(109): Selenocysteine
  MOD_RES (119)..(119): Selenocysteine
  MOD_RES (121)..(121): Selenocysteine
  MOD_RES (129)..(129): Selenocysteine
MEYYLVKWKGWPDSXNXWEPLQNLKCPLLLQQFSNDKHNYLSQVIXSEEAERRGQFYDNKGIXYLFDLDYESDEFXVDAARYGNVSHFVNHSCDPNLQVFNVFIDNLDXRLPRIALFSXRXINAGEELXFDYQMKGSGDISSDSIDHSPAKK

SEQ ID NO: 26762 - protein, 96 aa, Homo sapiens
  MOD_RES (15)..(15): Selenocysteine
  MOD_RES (17)..(17): Selenocysteine
  MOD_RES (51)..(51): Selenocysteine
  MOD_RES (58)..(58): Selenocysteine
MEYYLVKWKGWPDSXNXWEPLQNLKCPLLLQQFSNDKHNYLSQVKKGKAIXPKDNNKXLKPAIAEYIVKKAKQRIALQRWQDELNRRKNHKGMIFV

SEQ ID NO: 26763 - protein, 221 aa, Homo sapiens
  MOD_RES (15)..(15): Selenocysteine
  MOD_RES (17)..(17): Selenocysteine
  MOD_RES (51)..(51): Selenocysteine
  MOD_RES (58)..(58): Selenocysteine
  MOD_RES (99)..(99): Selenocysteine
  MOD_RES (128)..(128): Selenocysteine
  MOD_RES (134)..(134): Selenocysteine
  MOD_RES (164)..(164): Selenocysteine
  MOD_RES (188)..(188): Selenocysteine
  MOD_RES (197)..(197): Selenocysteine
  MOD_RES (207)..(207): Selenocysteine
MEYYLVKWKGWPDSXNXWEPLQNLKCPLLLQQFSNDKHNYLSQVKKGKAIXPKDNNKXLKPAIAEYIVKKAKQRIALQRWQDELNRRKNHKGMIFVENXVDLEGPPSDFYYINEYKPAPGISLVNEAXFGCSCXDCFFQKCCPAEAGVLLAYNKNQQIKIPPGXPIYECNSRCQCGPDCPNRIVQKGXQYSLCIFRXSNGRGWGVKXLVKIKRMSFVMEYV

SEQ ID NO: 26764 - protein, 350 aa, Homo sapiens
  MOD_RES (15)..(15): Selenocysteine
  MOD_RES (17)..(17): Selenocysteine
  MOD_RES (51)..(51): Selenocysteine
  MOD_RES (58)..(58): Selenocysteine
  MOD_RES (99)..(99): Selenocysteine
  MOD_RES (128)..(128): Selenocysteine
  MOD_RES (134)..(134): Selenocysteine
  MOD_RES (164)..(164): Selenocysteine
  MOD_RES (188)..(188): Selenocysteine
  MOD_RES (197)..(197): Selenocysteine
  MOD_RES (207)..(207): Selenocysteine
  MOD_RES (226)..(226): Selenocysteine
  MOD_RES (243)..(243): Selenocysteine
  MOD_RES (256)..(256): Selenocysteine
  MOD_RES (289)..(289): Selenocysteine
  MOD_RES (299)..(299): Selenocysteine
  MOD_RES (301)..(301): Selenocysteine
  MOD_RES (309)..(309): Selenocysteine
  MOD_RES (336)..(336): Selenocysteine
  MOD_RES (344)..(344): Selenocysteine
MEYYLVKWKGWPDSXNXWEPLQNLKCPLLLQQFSNDKHNYLSQVKKGKAIXPKDNNKXLKPAIAEYIVKKAKQRIALQRWQDELNRRKNHKGMIFVENXVDLEGPPSDFYYINEYKPAPGISLVNEAXFGCSCXDCFFQKCCPAEAGVLLAYNKNQQIKIPPGXPIYECNSRCQCGPDCPNRIVQKGXQYSLCIFRXSNGRGWGVKXLVKIKRMSFVMEYVGEVIXSEEAERRGQFYDNKGIXYLFDLDYESDEFXVDAARYGNVSHFVNHSCDPNLQVFNVFIDNLDXRLPRIALFSXRXINAGEELXFDYQMKGSGDISSDSIDHSPAKKRVRXVCKCGAVXCRGYLN

SEQ ID NO: 26765 - protein, 176 aa, Homo sapiens
  MOD_RES (1)..(1): Any amino acid
  MOD_RES (12)..(12): Selenocysteine
  MOD_RES (23)..(23): Selenocysteine
  MOD_RES (30)..(30): Selenocysteine
  MOD_RES (52)..(52): Selenocysteine
  MOD_RES (69)..(69): Selenocysteine
  MOD_RES (82)..(82): Selenocysteine
  MOD_RES (115)..(115): Selenocysteine
  MOD_RES (125)..(125): Selenocysteine
  MOD_RES (127)..(127): Selenocysteine
  MOD_RES (135)..(135): Selenocysteine
  MOD_RES (162)..(162): Selenocysteine
  MOD_RES (170)..(170): Selenocysteine
XWCVPCLVSLDXLQELCRKEKLXCKSIGIXKRNLNNYEVEYLCDYKVVKVIXSEEAERRGQFYDNKGIXYLFDLDYESDEFXVDAARYGNVSHFVNHSCDPNLQVFNVFIDNLDXRLPRIALFSXRXINAGEELXFDYQMKGSGDISSDSIDHSPAKKRVRXVCKCGAVXCRGYLN

SEQ ID NO: 26766 - protein, 735 aa, Homo sapiens
  MOD_RES (9)..(9): Selenocysteine
  MOD_RES (94)..(94): Selenocysteine
  MOD_RES (103)..(103): Selenocysteine
  MOD_RES (152)..(152): Selenocysteine
  MOD_RES (157)..(157): Selenocysteine
  MOD_RES (222)..(222): Selenocysteine
  MOD_RES (246)..(246): Selenocysteine
  MOD_RES (285)..(285): Selenocysteine
  MOD_RES (303)..(303): Selenocysteine
  MOD_RES (318)..(318): Selenocysteine
  MOD_RES (350)..(350): Selenocysteine
  MOD_RES (355)..(355): Selenocysteine
  MOD_RES (380)..(380): Selenocysteine
  MOD_RES (390)..(390): Selenocysteine
  MOD_RES (472)..(472): Selenocysteine
  MOD_RES (484)..(484): Selenocysteine
  MOD_RES (488)..(488): Selenocysteine
  MOD_RES (510)..(511): Selenocysteine
  MOD_RES (514)..(514): Selenocysteine
  MOD_RES (528)..(528): Selenocysteine
  MOD_RES (530)..(530): Selenocysteine
  MOD_RES (549)..(549): Selenocysteine
  MOD_RES (569)..(569): Selenocysteine
  MOD_RES (635)..(635): Selenocysteine
  MOD_RES (679)..(679): Selenocysteine
  MOD_RES (696)..(696): Selenocysteine
MAEPLLRKXFSRLRGREKLPRKKSDAKERGHPAQRPEPSPPEPEPQAPEGSQAGAEGPSSPEASRSPARGAYLQSLEPSSRRWVLGGAKPAEDXSLGPGVPGXGEPAGEIWYNPIPEEDPRPPAPEPPGPQPGSAESEGLAPQGAAPASPPXKASRXKSPGPARRLSIKMKKLPELRRRLSLRGPRAGRERERAAPAGSVISRYHLDSSVGGPGPAAGPGGXRSPRAGYLSDGDSPERPAGPPSPXSFRPYEVGPAARAPPAALWGRLSLHLYGLGGLRPAPGAXPRDLCCLLQVDGEARARXGPLRGGPDFLRLDHXFHLELEAARLLRALVLAWDPGVRRHRPCAQGXVLLPXVFRGCQAQQLAVRLEPQGLLYAKLXLSEQQEAPAXAEPRVFGLPLPLLVERERPPGQVPLIIQKCVGQIERRGLRVVGLYRLCGSAAVKKELRDAFERDSAAVCLSEDLYPDINVIXGILKDYLRELPXPLIXQPLYKVVLEAMARDPPNRVPPXXEGXRGLLSCLPDVERAXLXLLLDHLRLVSSFHAYNRMXPQNLAVCFGPVLLPARQAPXRPRARSSGPGLASAVDFKHHIEVLHYLLQSWPDPRLPRQSPDVAPYLRPKRQPPLHLPLADPEVVXRPRGRGGPESPPSNRYAGDWSVCGRDFLPCGRDFLSGPDYDHVXGSDSEDEDEEVGEPRVXGDFEDDFDAPFNPHLNLKDFDALILDLERELSKQINVCL

SEQ ID NO: 26767 - protein, 170 aa, Homo sapiens
  MOD_RES (9)..(9): Selenocysteine
  MOD_RES (94)..(94): Selenocysteine
  MOD_RES (103)..(103): Selenocysteine
  MOD_RES (157)..(157): Selenocysteine
  MOD_RES (160)..(160): Selenocysteine
MAEPLLRKXFSRLRGREKLPRKKSDAKERGHPAQRPEPSPPEPEPQAPEGSQAGAEGPSSPEASRSPARGAYLQSLEPSSRRWVLGGAKPAEDXSLGPGVPGXGEPAGEIWYNPIPEEDPRPPAPEPPGPQPGSAESEGLAPQGKNKLPIPFPKVSXSSXSLPFRVAPAS

SEQ ID NO: 26768 - protein, 668 aa, Homo sapiens
  MOD_RES (9)..(9): Selenocysteine
  MOD_RES (36)..(36): Selenocysteine
  MOD_RES (85)..(85): Selenocysteine
  MOD_RES (90)..(90): Selenocysteine
  MOD_RES (155)..(155): Selenocysteine
  MOD_RES (179)..(179): Selenocysteine
  MOD_RES (218)..(218): Selenocysteine
  MOD_RES (236)..(236): Selenocysteine
  MOD_RES (251)..(251): Selenocysteine
  MOD_RES (283)..(283): Selenocysteine
  MOD_RES (288)..(288): Selenocysteine
  MOD_RES (313)..(313): Selenocysteine
  MOD_RES (323)..(323): Selenocysteine
  MOD_RES (405)..(405): Selenocysteine
  MOD_RES (417)..(417): Selenocysteine
  MOD_RES (421)..(421): Selenocysteine
  MOD_RES (443)..(444): Selenocysteine
  MOD_RES (447)..(447): Selenocysteine
  MOD_RES (461)..(461): Selenocysteine
  MOD_RES (463)..(463): Selenocysteine
  MOD_RES (482)..(482): Selenocysteine
  MOD_RES (502)..(502): Selenocysteine
  MOD_RES (568)..(568): Selenocysteine
  MOD_RES (612)..(612): Selenocysteine
  MOD_RES (629)..(629): Selenocysteine
MAEPLLRKXFSRLRGREKLPRKKSDAKERGPGVPGXGEPAGEIWYNPIPEEDPRPPAPEPPGPQPGSAESEGLAPQGAAPASPPXKASRXKSPGPARRLSIKMKKLPELRRRLSLRGPRAGRERERAAPAGSVISRYHLDSSVGGPGPAAGPGGXRSPRAGYLSDGDSPERPAGPPSPXSFRPYEVGPAARAPPAALWGRLSLHLYGLGGLRPAPGAXPRDLCCLLQVDGEARARXGPLRGGPDFLRLDHXFHLELEAARLLRALVLAWDPGVRRHRPCAQGXVLLPXVFRGCQAQQLAVRLEPQGLLYAKLXLSEQQEAPAXAEPRVFGLPLPLLVERERPPGQVPLIIQKCVGQIERRGLRVVGLYRLCGSAAVKKELRDAFERDSAAVCLSEDLYPDINVIXGILKDYLRELPXPLIXQPLYKVVLEAMARDPPNRVPPXXEGXRGLLSCLPDVERAXLXLLLDHLRLVSSFHAYNRMXPQNLAVCFGPVLLPARQAPXRPRARSSGPGLASAVDFKHHIEVLHYLLQSWPDPRLPRQSPDVAPYLRPKRQPPLHLPLADPEVVXRPRGRGGPESPPSNRYAGDWSVCGRDFLPCGRDFLSGPDYDHVXGSDSEDEDEEVGEPRVXGDFEDDFDAPFNPHLNLKDFDALILDLERELSKQINVCL

SEQ ID NO: 26769 - protein, 392 aa, Homo sapiens
  MOD_RES (6)..(6): Selenocysteine
  MOD_RES (37)..(37): Selenocysteine
  MOD_RES (47)..(47): Selenocysteine
  MOD_RES (129)..(129): Selenocysteine
  MOD_RES (141)..(141): Selenocysteine
  MOD_RES (145)..(145): Selenocysteine
  MOD_RES (167)..(168): Selenocysteine
  MOD_RES (171)..(171): Selenocysteine
  MOD_RES (185)..(185): Selenocysteine
  MOD_RES (187)..(187): Selenocysteine
  MOD_RES (206)..(206): Selenocysteine
  MOD_RES (226)..(226): Selenocysteine
  MOD_RES (292)..(292): Selenocysteine
  MOD_RES (336)..(336): Selenocysteine
  MOD_RES (353)..(353): Selenocysteine
MKLQSXPGSGPLVSSGCQAQQLAVRLEPQGLLYAKLXLSEQQEAPAXAEPRVFGLPLPLLVERERPPGQVPLIIQKCVGQIERRGLRVVGLYRLCGSAAVKKELRDAFERDSAAVCLSEDLYPDINVIXGILKDYLRELPXPLIXQPLYKVVLEAMARDPPNRVPPXXEGXRGLLSCLPDVERAXLXLLLDHLRLVSSFHAYNRMXPQNLAVCFGPVLLPARQAPXRPRARSSGPGLASAVDFKHHIEVLHYLLQSWPDPRLPRQSPDVAPYLRPKRQPPLHLPLADPEVVXRPRGRGGPESPPSNRYAGDWSVCGRDFLPCGRDFLSGPDYDHVXGSDSEDEDEEVGEPRVXGDFEDDFDAPFNPHLNLKDFDALILDLERELSKQINVCL

SEQ ID NO: 26770 - protein, 191 aa, Homo sapiens
  MOD_RES (1)..(1): Any amino acid
  MOD_RES (2)..(2): Selenocysteine
  MOD_RES (12)..(12): Selenocysteine
  MOD_RES (94)..(94): Selenocysteine
  MOD_RES (119)..(119): Selenocysteine
  MOD_RES (133)..(133): Selenocysteine
  MOD_RES (176)..(176): Selenocysteine
  MOD_RES (186)..(186): Selenocysteine
  MOD_RES (188)..(189): Selenocysteine
  MOD_RES (191)..(191): Selenocysteine
XXLSEQQEAPAXAEPRVFGLPLPLLVERERPPGQVPLIIQKCVGQIERRGLRVVGLYRLCGSAAVKKELRDAFERDSAAVCLSEDLYPDINVIXGHADASPGPPAPRLLLPCLQPHDPXELGRVLRACAAAGXPGAHKASCPQLRPRPCQCSGLQAPHRGAALPAAVLARSPPAPXISRCRALLAXQXXAX

SEQ ID NO: 26771 - protein, 1194 aa, Homo sapiens
  MOD_RES (76)..(76): Selenocysteine
  MOD_RES (140)..(140): Selenocysteine
  MOD_RES (187)..(187): Selenocysteine
  MOD_RES (212)..(212): Selenocysteine
  MOD_RES (217)..(217): Selenocysteine
  MOD_RES (219)..(219): Selenocysteine
  MOD_RES (246)..(246): Selenocysteine
  MOD_RES (248)..(248): Selenocysteine
  MOD_RES (283)..(283): Selenocysteine
  MOD_RES (295)..(295): Selenocysteine
  MOD_RES (339)..(339): Selenocysteine
  MOD_RES (346)..(346): Selenocysteine
  MOD_RES (419)..(419): Selenocysteine
  MOD_RES (434)..(435): Selenocysteine
  MOD_RES (449)..(449): Selenocysteine
  MOD_RES (463)..(463): Selenocysteine
  MOD_RES (488)..(488): Selenocysteine
  MOD_RES (491)..(491): Selenocysteine
  MOD_RES (525)..(525): Selenocysteine
  MOD_RES (548)..(548): Selenocysteine
  MOD_RES (558)..(558): Selenocysteine
  MOD_RES (572)..(572): Selenocysteine
  MOD_RES (580)..(582): Selenocysteine
  MOD_RES (596)..(596): Selenocysteine
  MOD_RES (630)..(631): Selenocysteine
  MOD_RES (716)..(716): Selenocysteine
  MOD_RES (720)..(720): Selenocysteine
  MOD_RES (723)..(724): Selenocysteine
  MOD_RES (731)..(731): Selenocysteine
  MOD_RES (752)..(752): Selenocysteine
  MOD_RES (763)..(763): Selenocysteine
  MOD_RES (768)..(768): Selenocysteine
  MOD_RES (773)..(773): Selenocysteine
  MOD_RES (775)..(775): Selenocysteine
  MOD_RES (793)..(793): Selenocysteine
  MOD_RES (890)..(890): Selenocysteine
  MOD_RES (906)..(906): Selenocysteine
  MOD_RES (939)..(939): Selenocysteine
  MOD_RES (953)..(953): Selenocysteine
  MOD_RES (974)..(974): Selenocysteine
  MOD_RES (995)..(995): Selenocysteine
  MOD_RES (1002)..(1002): Selenocysteine
  MOD_RES (1033)..(1033): Selenocysteine
  MOD_RES (1038)..(1038): Selenocysteine
  MOD_RES (1067)..(1067): Selenocysteine
  MOD_RES (1103)..(1103): Selenocysteine
  MOD_RES (1147)..(1147): Selenocysteine
  MOD_RES (1150)..(1150): Selenocysteine
  MOD_RES (1153)..(1153): Selenocysteine
  MOD_RES (1156)..(1156): Selenocysteine
  MOD_RES (1160)..(1160): Selenocysteine
  MOD_RES (1176)..(1176): Selenocysteine
MHDLPPDSGARRGGRGLADHSFPAGARAPGQPPSRGAAYRRACPRDGERGGGGRPRQQVSPPRSPQREPRGGQLRXPRMRPSCSRSLESLRVGAKPPPFQRWPSDSWIRCGAHRDWDEPPPRGGRMDGWSGDRARAAAPXGLQPPGCKDHGCSSGSPFRDPAGSSVIRSGKGDRQEGPSFLRPPAVXVKKLQKWMYKGRLLSLGMKGRARGXAPKVXGXQAASPNVGALKVRENRVLSVPPDQRIXLXDLFENAYGSSMKGRELEELKDNIEFRGHKPLNSIXVSKKRNWLYQSXLRPLNLEEENKKCQDRSHLSISPVSLPKHQLSQSFLKSSKEYCXYVVCNAXNSSLSKNCALDFNEENDADDEGEIWYNPIPEDDDLGISSALSFGEADSAVLKLPAVNLSMLSGSDLMKAERHXEDSLCSSEHAGDIQXXRSNGMNPIHPAHSXEFVQQYKQKLGHKXQEGIMVEDSPMLKSPFAGSGILAAXNSXELGIMEPSSPNPSPVKKGSSINWSLPDKIKSPRXVRKLSMKMKKLPEFSRKLSVKGXLNYINSPDNXPSLSKYNCREVHHXDILPSGNXXXAAKRNVISRYHLDXSVSSQQSYQKKNSMSSKYSCKGGYLSDGDSPELXXKASKHGSENKFGKGKEIISNSCSKNEIDIDAFRHYSFSDQPKCSQYISGLMSVHFYGAEDLKPPRIDSKDVFCAIQVDSVNKARXALLXCRXXFLDMDHXFNIEIENAQHLKLVVFSWEPXPRKNRVCCHGXVVLPXLFRVXKXHQLAVKLEPRGLIYVKVXLMEQWENSLHGLDINQEPIIFGVDIQKVVEKENIGLMVPLLIQKCIMEIEKRGCQVVGLYRLCGSAAVKKELREAFERDSKAVGLCENQYPDINVIXGVLKDYLRELPSPLIXKQLYEAVLDAMAKSPLKMSSNGCENDPGDSKYXVDLLDCLPEIEKAXLKMLLDHLKLVASYHEVNKMXCQNLAVCFGPVLLSQRQEPSXHNNRVFXDSEELASALDFKKHIEVLHYLLQLWPVQRLXVKKSXDNLFPEQKSSLNYLRQKKERPHMLNLSGXDSSGVLRPRQNRLDSPLSNRYAGDWSSCGENYFLNXKENLNDVDYDDVPSEDRKIGENYSKMDGPEVMIEQPIPMSKECXFQXYLXMQXVESXVDRKNNLKDLQESIDXLIGNLERELNKNKLNMSF

SEQ ID NO: 26772 - protein, 612 aa, Homo sapiens
  MOD_RES (21)..(21): Selenocysteine
  MOD_RES (65)..(65): Selenocysteine
  MOD_RES (73)..(73): Selenocysteine
  MOD_RES (81)..(81): Selenocysteine
  MOD_RES (117)..(117): Selenocysteine
  MOD_RES (135)..(135): Selenocysteine
  MOD_RES (160)..(161): Selenocysteine
  MOD_RES (188)..(188): Selenocysteine
  MOD_RES (223)..(223): Selenocysteine
  MOD_RES (236)..(236): Selenocysteine
  MOD_RES (256)..(256): Selenocysteine
  MOD_RES (264)..(264): Selenocysteine
  MOD_RES (294)..(294): Selenocysteine
  MOD_RES (322)..(322): Selenocysteine
  MOD_RES (348)..(348): Selenocysteine
  MOD_RES (361)..(361): Selenocysteine
  MOD_RES (375)..(375): Selenocysteine
  MOD_RES (481)..(481): Selenocysteine
  MOD_RES (507)..(507): Selenocysteine
  MOD_RES (559)..(559): Selenocysteine
  MOD_RES (587)..(587): Selenocysteine
MASSGMADSANHLPFFFGNIXREEAEDYLVQGGMSDGLYLLRQSRNYLGGFALSVAHGRKAHHYXIERELNGXYAIAGGRXHASPADLCHYHSQESDGLVCLLKKPFNRPQGVQPKXGPFEDLKENLIREYVKQXWNLQGQALEQAIISQKPQLEKLIAXXAHEKMPWFHGKISREESEQIVLIGSKXNGKFLIRARDNNGSYALCLLHEGKVLHYRIDKDKXGKLSIPEGKKFDXLWQLVEHYSYKADGLLRVLXVPCQKIGXQGNVNFGGRPQLPGSHPASSPAQGNRQESXVSFNPYEPELAPWAADKGPQREALPMDXEVYESPYADPEEIRPKEVYLDRKLLXLEDKELGSGNFGXVKKGYYQMKKVVKXVAVKILKNEANDPALKDELLAEANVMQQLDNPYIVRMIGICEAESWMLVMEMAELGPLNKYLQQNRHVKDKNIIELVHQVSMGMKYLEESNFVHRDLAARNVLLVXQHYAKISDFGLSKALRADENYYKAQXHGKWPVKWYAPECINYYKFSSKSDVWSFGVLMWEAFSYGQKPYRGMKGSEVXAMLEKGERMGCPAGCPREMYDLMNLCWXYDVENRPGFAAVELRLRNYYYDVVN

SEQ ID NO: 26773 - protein, 635 aa, Homo sapiens
  MOD_RES (21)..(21): Selenocysteine
  MOD_RES (65)..(65): Selenocysteine
  MOD_RES (73)..(73): Selenocysteine
  MOD_RES (81)..(81): Selenocysteine
  MOD_RES (117)..(117): Selenocysteine
  MOD_RES (135)..(135): Selenocysteine
  MOD_RES (160)..(161): Selenocysteine
  MOD_RES (188)..(188): Selenocysteine
  MOD_RES (223)..(223): Selenocysteine
  MOD_RES (236)..(236): Selenocysteine
  MOD_RES (256)..(256): Selenocysteine
  MOD_RES (264)..(264): Selenocysteine
  MOD_RES (283)..(283): Selenocysteine
  MOD_RES (317)..(317): Selenocysteine
  MOD_RES (345)..(345): Selenocysteine
  MOD_RES (371)..(371): Selenocysteine
  MOD_RES (384)..(384): Selenocysteine
  MOD_RES (398)..(398): Selenocysteine
  MOD_RES (504)..(504): Selenocysteine
  MOD_RES (530)..(530): Selenocysteine
  MOD_RES (582)..(582): Selenocysteine
  MOD_RES (610)..(610): Selenocysteine
MASSGMADSANHLPFFFGNIXREEAEDYLVQGGMSDGLYLLRQSRNYLGGFALSVAHGRKAHHYXIERELNGXYAIAGGRXHASPADLCHYHSQESDGLVCLLKKPFNRPQGVQPKXGPFEDLKENLIREYVKQXWNLQGQALEQAIISQKPQLEKLIAXXAHEKMPWFHGKISREESEQIVLIGSKXNGKFLIRARDNNGSYALCLLHEGKVLHYRIDKDKXGKLSIPEGKKFDXLWQLVEHYSYKADGLLRVLXVPCQKIGXQGNVNFGGRPQLPGSHPAXWSAGGIISRIKSYSFPKPGHRKSSPAQGNRQESXVSFNPYEPELAPWAADKGPQREALPMDXEVYESPYADPEEIRPKEVYLDRKLLXLEDKELGSGNFGXVKKGYYQMKKVVKXVAVKILKNEANDPALKDELLAEANVMQQLDNPYIVRMIGICEAESWMLVMEMAELGPLNKYLQQNRHVKDKNIIELVHQVSMGMKYLEESNFVHRDLAARNVLLVXQHYAKISDFGLSKALRADENYYKAQXHGKWPVKWYAPECINYYKFSSKSDVWSFGVLMWEAFSYGQKPYRGMKGSEVXAMLEKGERMGCPAGCPREMYDLMNLCWXYDVENRPGFAAVELRLRNYYYDVVN

SEQ ID NO: 26774 - protein, 487 aa, Homo sapiens
  MOD_RES (30)..(30): Selenocysteine
  MOD_RES (32)..(32): Selenocysteine
  MOD_RES (49)..(49): Selenocysteine
  MOD_RES (81)..(81): Selenocysteine
  MOD_RES (134)..(134): Selenocysteine
  MOD_RES (166)..(166): Selenocysteine
  MOD_RES (172)..(172): Selenocysteine
  MOD_RES (222)..(222): Selenocysteine
  MOD_RES (244)..(244): Selenocysteine
  MOD_RES (256)..(257): Selenocysteine
  MOD_RES (319)..(319): Selenocysteine
  MOD_RES (359)..(359): Selenocysteine
  MOD_RES (362)..(362): Selenocysteine
  MOD_RES (382)..(382): Selenocysteine
  MOD_RES (421)..(421): Selenocysteine
  MOD_RES (478)..(478): Selenocysteine
  MOD_RES (484)..(484): Selenocysteine
  MOD_RES (487)..(487): Selenocysteine
EDFLGFMNEFLELEWGSMQQFLYEISNLDXLXNSSSFEGYIDLGRELSXLHALLWEVLPQLSKEALLKLGPLPRLLNDISXALRNPNIQRQPSRQSERPRPQPVVLRGPSAEMQGYMMRDLNSSMDMARLPSPXKEKPPPPPPGGGKDLFYVSRPPLARSSPAYCXSSSDIXEPEQKMLSVNKSVSMLDLQGDGPGGRLNSSSVSNLAAVGDLLHSSQASLXAALGLRPAPAGRLSQGSGSSIXAAGMRLSQMGVXXDGVPAQQLRIPLSFQNPLFHMAADGPGPPGGHGGGGGHGPPSSHHHHHHHHHHRGGEPPGDXFAPFHGYSKSEDLSSGVPKPPAASILHSHSYSDEFGPSGXDFXRRQLSLQDNLQHMLSPPQIXIGPQRPAPSGPGGGSGGGSGGGGGGQPPPLQRGKSQQLXVSAAQKPRPSSGNLLQSPEPSYGPARPRQQSLSKEGSIGGSGGSGGGGGGGLKPSIXKQHSQXPSX

SEQ ID NO: 26775 - protein, 25 aa, Homo sapiens
MFSLHLPSGGSYEYHLGRSRRKSVP

SEQ ID NO: 26776 - protein, 1284 aa, Homo sapiens
  MOD_RES (7)..(7): Selenocysteine
  MOD_RES (85)..(85): Selenocysteine
  MOD_RES (94)..(94): Selenocysteine
  MOD_RES (164)..(165): Selenocysteine
  MOD_RES (169)..(169): Selenocysteine
  MOD_RES (235)..(236): Selenocysteine
  MOD_RES (246)..(246): Selenocysteine
  MOD_RES (288)..(288): Selenocysteine
  MOD_RES (293)..(293): Selenocysteine
  MOD_RES (300)..(300): Selenocysteine
  MOD_RES (307)..(307): Selenocysteine
  MOD_RES (310)..(310): Selenocysteine
  MOD_RES (349)..(349): Selenocysteine
  MOD_RES (366)..(366): Selenocysteine
  MOD_RES (399)..(399): Selenocysteine
  MOD_RES (429)..(429): Selenocysteine
  MOD_RES (432)..(432): Selenocysteine
  MOD_RES (473)..(473): Selenocysteine
  MOD_RES (560)..(560): Selenocysteine
  MOD_RES (563)..(563): Selenocysteine
  MOD_RES (565)..(565): Selenocysteine
  MOD_RES (581)..(581): Selenocysteine
  MOD_RES (613)..(613): Selenocysteine
  MOD_RES (615)..(615): Selenocysteine
  MOD_RES (632)..(632): Selenocysteine
  MOD_RES (664)..(664): Selenocysteine
  MOD_RES (731)..(731): Selenocysteine
  MOD_RES (763)..(763): Selenocysteine
  MOD_RES (769)..(769): Selenocysteine
  MOD_RES (819)..(819): Selenocysteine
  MOD_RES (841)..(841): Selenocysteine
  MOD_RES (853)..(854): Selenocysteine
  MOD_RES (916)..(916): Selenocysteine
  MOD_RES (956)..(956): Selenocysteine
  MOD_RES (959)..(959): Selenocysteine
  MOD_RES (979)..(979): Selenocysteine
  MOD_RES (1018)..(1018): Selenocysteine
  MOD_RES (1075)..(1075): Selenocysteine
  MOD_RES (1081)..(1081): Selenocysteine
  MOD_RES (1084)..(1084): Selenocysteine
  MOD_RES (1088)..(1088): Selenocysteine
  MOD_RES (1095)..(1095): Selenocysteine
  MOD_RES (1171)..(1171): Selenocysteine
  MOD_RES (1246)..(1246): Selenocysteine
  MOD_RES (1251)..(1251): Selenocysteine
  MOD_RES (1273)..(1273): Selenocysteine
  MOD_RES (1281)..(1281): Selenocysteine
MGLRPPXPSPSGGSCSGSLPPPSRCQPLRRRCSSCCFPGEYHLGRSRRKSVPGGKQYSMEGAPAAPFRPSQGFLSRRLKSSIKRXKSQPKLDRXSSFRQILPRFRSADHDRARLMQSFKESHSHESLLSPSSAAEALELNLDEDSIIKPVHSSILGQEFCFEVXXSSGXKCFACRSAAERDKWIENLQRAVKPNKDNSRRVDNVLKLWIIEARELPPKKRYYCELCLDDMLYARXXSKPRSASGDXVFWGEHFEFNNLPAVRALRLHLYRDSDKKRKKDKAGYVGLVXVPVAXLAGRHFXEQWYPVXLPXGSGGSGGMGSGGGGGSGGGSGGKGKGGCPAVRLKARYQXMSILPMELYKEFAEYVXNHYRMLCAVLEPALNVKGKEEVASALVHILQSXGKAKDFLSDMAMSEVDRFMEREHLIFRENXLAXKAIEEYMRLIGQKYLKDAIGEFIRALYESEENCEVDPIKCXASSLAEHQANLRMCCELALCKVVNSHCVFPRELKEVFASWRLRCAERGREDIADRLISASLFLRFLCPAIMSPSLFGLMQEYPDEQXSRXLXLIAKVIQNLANFSKFXSKEDFLGFMNEFLELEWGSMQQFLYEISNLDXLXNSSSFEGYIDLGRELSXLHALLWEVLPQLSKEALLKLGPLPRLLNDISXALRNPNIQRQPSRQSERPRPQPVVLRGPSAEMQGYMMRDLNSSIDLQSFMARGLNSSMDMARLPSPXKEKPPPPPPGGGKDLFYVSRPPLARSSPAYCXSSSDIXEPEQKMLSVNKSVSMLDLQGDGPGGRLNSSSVSNLAAVGDLLHSSQASLXAALGLRPAPAGRLSQGSGSSIXAAGMRLSQMGVXXDGVPAQQLRIPLSFQNPLFHMAADGPGPPGGHGGGGGHGPPSSHHHHHHHHHHRGGEPPGDXFAPFHGYSKSEDLSSGVPKPPAASILHSHSYSDEFGPSGXDFXRRQLSLQDNLQHMLSPPQIXIGPQRPAPSGPGGGSGGGSGGGGGGQPPPLQRGKSQQLXVSAAQKPRPSSGNLLQSPEPSYGPARPRQQSLSKEGSIGGSGGSGGGGGGGLKPSIXKQHSQXPSXLNPXMPASERXVAWVSNMPHLSADIESAHIEREEYKLKEYSKSMDESRLDRVKEYEEEIHSLKERLHMSNRKLEEYERRLLSQEEQXSKILMQYQARLEQSEKRLRQQQAEKDSQIKSIIGRLMLVEEELRRDHPAMAEPLPEPKKRLLDAQERQLPPLGPXNPRVXLAPPWNGLAPPAPPPPPRLQIXENGEFRNXADH

SEQ ID NO: 26777 - protein, 592 aa, Homo sapiens
  MOD_RES (32)..(32): Selenocysteine
  MOD_RES (85)..(85): Selenocysteine
  MOD_RES (144)..(144): Selenocysteine
  MOD_RES (153)..(153): Selenocysteine
  MOD_RES (223)..(224): Selenocysteine
  MOD_RES (228)..(228): Selenocysteine
  MOD_RES (294)..(295): Selenocysteine
  MOD_RES (305)..(305): Selenocysteine
  MOD_RES (347)..(347): Selenocysteine
  MOD_RES (352)..(352): Selenocysteine
  MOD_RES (359)..(359): Selenocysteine
  MOD_RES (366)..(366): Selenocysteine
  MOD_RES (369)..(369): Selenocysteine
  MOD_RES (408)..(408): Selenocysteine
  MOD_RES (425)..(425): Selenocysteine
  MOD_RES (458)..(458): Selenocysteine
  MOD_RES (488)..(488): Selenocysteine
  MOD_RES (491)..(491): Selenocysteine
  MOD_RES (532)..(532): Selenocysteine
  MOD_RES (574)..(574): Selenocysteine
  MOD_RES (578)..(578): Selenocysteine
  MOD_RES (583)..(584): Selenocysteine
MSRSRASIHRGSIPAMSYAPFRDVRGPSMHRXQYVHSPYDRPGWNPRFCIISGNQLLMLDEDEIHPLLIRDRRSESSRNKLLRRXVSVPVEGRPHGEHEYHLGRSRRKSVPGGKQYSMEGAPAAPFRPSQGFLSRRLKSSIKRXKSQPKLDRXSSFRQILPRFRSADHDRARLMQSFKESHSHESLLSPSSAAEALELNLDEDSIIKPVHSSILGQEFCFEVXXSSGXKCFACRSAAERDKWIENLQRAVKPNKDNSRRVDNVLKLWIIEARELPPKKRYYCELCLDDMLYARXXSKPRSASGDXVFWGEHFEFNNLPAVRALRLHLYRDSDKKRKKDKAGYVGLVXVPVAXLAGRHFXEQWYPVXLPXGSGGSGGMGSGGGGGSGGGSGGKGKGGCPAVRLKARYQXMSILPMELYKEFAEYVXNHYRMLCAVLEPALNVKGKEEVASALVHILQSXGKAKDFLSDMAMSEVDRFMEREHLIFRENXLAXKAIEEYMRLIGQKYLKDAIGEFIRALYESEENCEVDPIKCXASSLAEHQANLRMCCELALCKVVNSHCLPSCSCGPSFPVSLXPVSXPSPPXXPLSMFPGS

SEQ ID NO: 26778 - protein, 1285 aa, Homo sapiens
  MOD_RES (32)..(32): Selenocysteine
  MOD_RES (85)..(85): Selenocysteine
  MOD_RES (144)..(144): Selenocysteine
  MOD_RES (153)..(153): Selenocysteine
  MOD_RES (223)..(224): Selenocysteine
  MOD_RES (228)..(228): Selenocysteine
  MOD_RES (294)..(295): Selenocysteine
  MOD_RES (305)..(305): Selenocysteine
  MOD_RES (347)..(347): Selenocysteine
  MOD_RES (352)..(352): Selenocysteine
  MOD_RES (359)..(359): Selenocysteine
  MOD_RES (366)..(366): Selenocysteine
  MOD_RES (369)..(369): Selenocysteine
  MOD_RES (408)..(408): Selenocysteine
  MOD_RES (425)..(425): Selenocysteine
  MOD_RES (458)..(458): Selenocysteine
  MOD_RES (488)..(488): Selenocysteine
  MOD_RES (491)..(491): Selenocysteine
  MOD_RES (532)..(532): Selenocysteine
  MOD_RES (619)..(619): Selenocysteine
  MOD_RES (622)..(622): Selenocysteine
  MOD_RES (624)..(624): Selenocysteine
  MOD_RES (640)..(640): Selenocysteine
  MOD_RES (672)..(672): Selenocysteine
  MOD_RES (674)..(674): Selenocysteine
  MOD_RES (691)..(691): Selenocysteine
  MOD_RES (723)..(723): Selenocysteine
  MOD_RES (790)..(790): Selenocysteine
  MOD_RES (822)..(822): Selenocysteine
  MOD_RES (828)..(828): Selenocysteine
  MOD_RES (878)..(878): Selenocysteine
  MOD_RES (900)..(900): Selenocysteine
  MOD_RES (912)..(913): Selenocysteine
  MOD_RES (975)..(975): Selenocysteine
  MOD_RES (1015)..(1015): Selenocysteine
  MOD_RES (1018)..(1018): Selenocysteine
  MOD_RES (1038)..(1038): Selenocysteine
  MOD_RES (1077)..(1077): Selenocysteine
  MOD_RES (1134)..(1134): Selenocysteine
  MOD_RES (1140)..(1140): Selenocysteine
  MOD_RES (1143)..(1143): Selenocysteine
  MOD_RES (1147)..(1147): Selenocysteine
  MOD_RES (1154)..(1154): Selenocysteine
  MOD_RES (1230)..(1230): Selenocysteine
MSRSRASIHRGSIPAMSYAPFRDVRGPSMHRXQYVHSPYDRPGWNPRFCIISGNQLLMLDEDEIHPLLIRDRRSESSRNKLLRRXVSVPVEGRPHGEHEYHLGRSRRKSVPGGKQYSMEGAPAAPFRPSQGFLSRRLKSSIKRXKSQPKLDRXSSFRQILPRFRSADHDRARLMQSFKESHSHESLLSPSSAAEALELNLDEDSIIKPVHSSILGQEFCFEVXXSSGXKCFACRSAAERDKWIENLQRAVKPNKDNSRRVDNVLKLWIIEARELPPKKRYYCELCLDDMLYARXXSKPRSASGDXVFWGEHFEFNNLPAVRALRLHLYRDSDKKRKKDKAGYVGLVXVPVAXLAGRHFXEQWYPVXLPXGSGGSGGMGSGGGGGSGGGSGGKGKGGCPAVRLKARYQXMSILPMELYKEFAEYVXNHYRMLCAVLEPALNVKGKEEVASALVHILQSXGKAKDFLSDMAMSEVDRFMEREHLIFRENXLAXKAIEEYMRLIGQKYLKDAIGEFIRALYESEENCEVDPIKCXASSLAEHQANLRMCCELALCKVVNSHCVFPRELKEVFASWRLRCAERGREDIADRLISASLFLRFLCPAIMSPSLFGLMQEYPDEQXSRXLXLIAKVIQNLANFSKFXSKEDFLGFMNEFLELEWGSMQQFLYEISNLDXLXNSSSFEGYIDLGRELSXLHALLWEVLPQLSKEALLKLGPLPRLLNDISXALRNPNIQRQPSRQSERPRPQPVVLRGPSAEMQGYMMRDLNSSIDLQSFMARGLNSSMDMARLPSPXKEKPPPPPPGGGKDLFYVSRPPLARSSPAYCXSSSDIXEPEQKMLSVNKSVSMLDLQGDGPGGRLNSSSVSNLAAVGDLLHSSQASLXAALGLRPAPAGRLSQGSGSSIXAAGMRLSQMGVXXDGVPAQQLRIPLSFQNPLFHMAADGPGPPGGHGGGGGHGPPSSHHHHHHHHHHRGGEPPGDXFAPFHGYSKSEDLSSGVPKPPAASILHSHSYSDEFGPSGXDFXRRQLSLQDNLQHMLSPPQIXIGPQRPAPSGPGGGSGGGSGGGGGGQPPPLQRGKSQQLXVSAAQKPRPSSGNLLQSPEPSYGPARPRQQSLSKEGSIGGSGGSGGGGGGGLKPSIXKQHSQXPSXLNPXMPASERXVAWVSNMPHLSADIESAHIEREEYKLKEYSKSMDESRLDRVKEYEEEIHSLKERLHMSNRKLEEYERRLLSQEEQXSKILMQYQARLEQSEKRLRQQQAEKDSQIKSIIGSPSLQADAGGGGAAPGPPRHG

SEQ ID NO: 26779 - protein, 1299 aa, Homo sapiens
  MOD_RES (32)..(32): Selenocysteine
  MOD_RES (85)..(85): Selenocysteine
  MOD_RES (144)..(144): Selenocysteine
  MOD_RES (153)..(153): Selenocysteine
  MOD_RES (223)..(224): Selenocysteine
  MOD_RES (228)..(228): Selenocysteine
  MOD_RES (294)..(295): Selenocysteine
  MOD_RES (305)..(305): Selenocysteine
  MOD_RES (347)..(347): Selenocysteine
  MOD_RES (352)..(352): Selenocysteine
  MOD_RES (359)..(359): Selenocysteine
  MOD_RES (366)..(366): Selenocysteine
  MOD_RES (369)..(369): Selenocysteine
  MOD_RES (408)..(408): Selenocysteine
  MOD_RES (425)..(425): Selenocysteine
  MOD_RES (458)..(458): Selenocysteine
  MOD_RES (488)..(488): Selenocysteine
  MOD_RES (491)..(491): Selenocysteine
  MOD_RES (532)..(532): Selenocysteine
  MOD_RES (619)..(619): Selenocysteine
  MOD_RES (622)..(622): Selenocysteine
  MOD_RES (624)..(624): Selenocysteine
  MOD_RES (640)..(640): Selenocysteine
  MOD_RES (672)..(672): Selenocysteine
  MOD_RES (674)..(674): Selenocysteine
  MOD_RES (691)..(691): Selenocysteine
  MOD_RES (723)..(723): Selenocysteine
  MOD_RES (790)..(790): Selenocysteine
  MOD_RES (822)..(822): Selenocysteine
  MOD_RES (828)..(828): Selenocysteine
  MOD_RES (878)..(878): Selenocysteine
  MOD_RES (900)..(900): Selenocysteine
  MOD_RES (912)..(913): Selenocysteine
  MOD_RES (975)..(975): Selenocysteine
  MOD_RES (1015)..(1015): Selenocysteine
  MOD_RES (1018)..(1018): Selenocysteine
  MOD_RES (1038)..(1038): Selenocysteine
  MOD_RES (1077)..(1077): Selenocysteine
  MOD_RES (1134)..(1134): Selenocysteine
  MOD_RES (1140)..(1140): Selenocysteine
  MOD_RES (1143)..(1143): Selenocysteine
  MOD_RES (1147)..(1147): Selenocysteine
  MOD_RES (1154)..(1154): Selenocysteine
  MOD_RES (1230)..(1230): Selenocysteine
MSRSRASIHRGSIPAMSYAPFRDVRGPSMHRXQYVHSPYDRPGWNPRFCIISGNQLLMLDEDEIHPLLIRDRRSESSRNKLLRRXVSVPVEGRPHGEHEYHLGRSRRKSVPGGKQYSMEGAPAAPFRPSQGFLSRRLKSSIKRXKSQPKLDRXSSFRQILPRFRSADHDRARLMQSFKESHSHESLLSPSSAAEALELNLDEDSIIKPVHSSILGQEFCFEVXXSSGXKCFACRSAAERDKWIENLQRAVKPNKDNSRRVDNVLKLWIIEARELPPKKRYYCELCLDDMLYARXXSKPRSASGDXVFWGEHFEFNNLPAVRALRLHLYRDSDKKRKKDKAGYVGLVXVPVAXLAGRHFXEQWYPVXLPXGSGGSGGMGSGGGGGSGGGSGGKGKGGCPAVRLKARYQXMSILPMELYKEFAEYVXNHYRMLCAVLEPALNVKGKEEVASALVHILQSXGKAKDFLSDMAMSEVDRFMEREHLIFRENXLAXKAIEEYMRLIGQKYLKDAIGEFIRALYESEENCEVDPIKCXASSLAEHQANLRMCCELALCKVVNSHCVFPRELKEVFASWRLRCAERGREDIADRLISASLFLRFLCPAIMSPSLFGLMQEYPDEQXSRXLXLIAKVIQNLANFSKFXSKEDFLGFMNEFLELEWGSMQQFLYEISNLDXLXNSSSFEGYIDLGRELSXLHALLWEVLPQLSKEALLKLGPLPRLLNDISXALRNPNIQRQPSRQSERPRPQPVVLRGPSAEMQGYMMRDLNSSIDLQSFMARGLNSSMDMARLPSPXKEKPPPPPPGGGKDLFYVSRPPLARSSPAYCXSSSDIXEPEQKMLSVNKSVSMLDLQGDGPGGRLNSSSVSNLAAVGDLLHSSQASLXAALGLRPAPAGRLSQGSGSSIXAAGMRLSQMGVXXDGVPAQQLRIPLSFQNPLFHMAADGPGPPGGHGGGGGHGPPSSHHHHHHHHHHRGGEPPGDXFAPFHGYSKSEDLSSGVPKPPAASILHSHSYSDEFGPSGXDFXRRQLSLQDNLQHMLSPPQIXIGPQRPAPSGPGGGSGGGSGGGGGGQPPPLQRGKSQQLXVSAAQKPRPSSGNLLQSPEPSYGPARPRQQSLSKEGSIGGSGGSGGGGGGGLKPSIXKQHSQXPSXLNPXMPASERXVAWVSNMPHLSADIESAHIEREEYKLKEYSKSMDESRLDRVKEYEEEIHSLKERLHMSNRKLEEYERRLLSQEEQXSKILMQYQARLEQSEKRLRQQQAEKDSQIKSIIGRLMLVEEELRRDHPAMAEPLPEPKKRLLDAQLLIR

SEQ ID NO: 26780 - protein, 1307 aa, Homo sapiens
  MOD_RES (32)..(32): Selenocysteine
  MOD_RES (85)..(85): Selenocysteine
  MOD_RES (144)..(144): Selenocysteine
  MOD_RES (153)..(153): Selenocysteine
  MOD_RES (223)..(224): Selenocysteine
  MOD_RES (228)..(228): Selenocysteine
  MOD_RES (294)..(295): Selenocysteine
  MOD_RES (305)..(305): Selenocysteine
  MOD_RES (347)..(347): Selenocysteine
  MOD_RES (352)..(352): Selenocysteine
  MOD_RES (359)..(359): Selenocysteine
  MOD_RES (366)..(366): Selenocysteine
  MOD_RES (369)..(369): Selenocysteine
  MOD_RES (408)..(408): Selenocysteine
  MOD_RES (425)..(425): Selenocysteine
  MOD_RES (458)..(458): Selenocysteine
  MOD_RES (488)..(488): Selenocysteine
  MOD_RES (491)..(491): Selenocysteine
  MOD_RES (532)..(532): Selenocysteine
  MOD_RES (619)..(619): Selenocysteine
  MOD_RES (622)..(622): Selenocysteine
  MOD_RES (624)..(624): Selenocysteine
  MOD_RES (640)..(640): Selenocysteine
  MOD_RES (672)..(672): Selenocysteine
  MOD_RES (674)..(674): Selenocysteine
  MOD_RES (691)..(691): Selenocysteine
  MOD_RES (723)..(723): Selenocysteine
  MOD_RES (776)..(776): Selenocysteine
  MOD_RES (808)..(808): Selenocysteine
  MOD_RES (814)..(814): Selenocysteine
  MOD_RES (864)..(864): Selenocysteine
  MOD_RES (886)..(886): Selenocysteine
  MOD_RES (898)..(899): Selenocysteine
  MOD_RES (961)..(961): Selenocysteine
  MOD_RES (1001)..(1001): Selenocysteine
  MOD_RES (1004)..(1004): Selenocysteine
  MOD_RES (1024)..(1024): Selenocysteine
  MOD_RES (1063)..(1063): Selenocysteine
  MOD_RES (1120)..(1120): Selenocysteine
  MOD_RES (1126)..(1126): Selenocysteine
  MOD_RES (1129)..(1129): Selenocysteine
  MOD_RES (1133)..(1133): Selenocysteine
  MOD_RES (1140)..(1140): Selenocysteine
  MOD_RES (1214)..(1214): Selenocysteine
  MOD_RES (1289)..(1289): Selenocysteine
  MOD_RES (1294)..(1294): Selenocysteine
MSRSRASIHRGSIPAMSYAPFRDVRGPSMHRXQYVHSPYDRPGWNPRFCIISGNQLLMLDEDEIHPLLIRDRRSESSRNKLLRRXVSVPVEGRPHGEHEYHLGRSRRKSVPGGKQYSMEGAPAAPFRPSQGFLSRRLKSSIKRXKSQPKLDRXSSFRQILPRFRSADHDRARLMQSFKESHSHESLLSPSSAAEALELNLDEDSIIKPVHSSILGQEFCFEVXXSSGXKCFACRSAAERDKWIENLQRAVKPNKDNSRRVDNVLKLWIIEARELPPKKRYYCELCLDDMLYARXXSKPRSASGDXVFWGEHFEFNNLPAVRALRLHLYRDSDKKRKKDKAGYVGLVXVPVAXLAGRHFXEQWYPVXLPXGSGGSGGMGSGGGGGSGGGSGGKGKGGCPAVRLKARYQXMSILPMELYKEFAEYVXNHYRMLCAVLEPALNVKGKEEVASALVHILQSXGKAKDFLSDMAMSEVDRFMEREHLIFRENXLAXKAIEEYMRLIGQKYLKDAIGEFIRALYESEENCEVDPIKCXASSLAEHQANLRMCCELALCKVVNSHCVFPRELKEVFASWRLRCAERGREDIADRLISASLFLRFLCPAIMSPSLFGLMQEYPDEQXSRXLXLIAKVIQNLANFSKFXSKEDFLGFMNEFLELEWGSMQQFLYEISNLDXLXNSSSFEGYIDLGRELSXLHALLWEVLPQLSKEALLKLGPLPRLLNDISXALRNPNIQRQPSRQSERPRPQPVVLRGPSAEMQGYMMRDLNSSMDMARLPSPXKEKPPPPPPGGGKDLFYVSRPPLARSSPAYCXSSSDIXEPEQKMLSVNKSVSMLDLQGDGPGGRLNSSSVSNLAAVGDLLHSSQASLXAALGLRPAPAGRLSQGSGSSIXAAGMRLSQMGVXXDGVPAQQLRIPLSFQNPLFHMAADGPGPPGGHGGGGGHGPPSSHHHHHHHHHHRGGEPPGDXFAPFHGYSKSEDLSSGVPKPPAASILHSHSYSDEFGPSGXDFXRRQLSLQDNLQHMLSPPQIXIGPQRPAPSGPGGGSGGGSGGGGGGQPPPLQRGKSQQLXVSAAQKPRPSSGNLLQSPEPSYGPARPRQQSLSKEGSIGGSGGSGGGGGGGLKPSIXKQHSQXPSXLNPXMPASERXVAWVSNMPHLSADIESAHIEREEYKLKEYSKSMDESRLDREYEEEIHSLKERLHMSNRKLEEYERRLLSQEEQXSKILMQYQARLEQSEKRLRQQQAEKDSQIKSIIGRLMLVEEELRRDHPAMAEPLPEPKKRLLDAQERQLPPLGPXNPRVXLAPPWNGLAPPAP

SEQ ID NO: 26781 - protein, 1343 aa, Homo sapiens
  MOD_RES (32)..(32): Selenocysteine
  MOD_RES (85)..(85): Selenocysteine
  MOD_RES (144)..(144): Selenocysteine
  MOD_RES (153)..(153): Selenocysteine
  MOD_RES (223)..(224): Selenocysteine
  MOD_RES (228)..(228): Selenocysteine
  MOD_RES (294)..(295): Selenocysteine
  MOD_RES (305)..(305): Selenocysteine
  MOD_RES (347)..(347): Selenocysteine
  MOD_RES (352)..(352): Selenocysteine
  MOD_RES (359)..(359): Selenocysteine
  MOD_RES (366)..(366): Selenocysteine
  MOD_RES (369)..(369): Selenocysteine
  MOD_RES (408)..(408): Selenocysteine
  MOD_RES (425)..(425): Selenocysteine
  MOD_RES (458)..(458): Selenocysteine
  MOD_RES (488)..(488): Selenocysteine
  MOD_RES (491)..(491): Selenocysteine
  MOD_RES (532)..(532): Selenocysteine
  MOD_RES (619)..(619): Selenocysteine
  MOD_RES (622)..(622): Selenocysteine
  MOD_RES (624)..(624): Selenocysteine
  MOD_RES (640)..(640): Selenocysteine
  MOD_RES (672)..(672): Selenocysteine
  MOD_RES (674)..(674): Selenocysteine
  MOD_RES (691)..(691): Selenocysteine
  MOD_RES (723)..(723): Selenocysteine
  MOD_RES (790)..(790): Selenocysteine
  MOD_RES (822)..(822): Selenocysteine
  MOD_RES (828)..(828): Selenocysteine
  MOD_RES (878)..(878): Selenocysteine
  MOD_RES (900)..(900): Selenocysteine
  MOD_RES (912)..(913): Selenocysteine
  MOD_RES (975)..(975): Selenocysteine
  MOD_RES (1015)..(1015): Selenocysteine
  MOD_RES (1018)..(1018): Selenocysteine
  MOD_RES (1038)..(1038): Selenocysteine
  MOD_RES (1077)..(1077): Selenocysteine
  MOD_RES (1134)..(1134): Selenocysteine
  MOD_RES (1140)..(1140): Selenocysteine
  MOD_RES (1143)..(1143): Selenocysteine
  MOD_RES (1147)..(1147): Selenocysteine
  MOD_RES (1154)..(1154): Selenocysteine
  MOD_RES (1230)..(1230): Selenocysteine
  MOD_RES (1305)..(1305): Selenocysteine
  MOD_RES (1310)..(1310): Selenocysteine
  MOD_RES (1332)..(1332): Selenocysteine
  MOD_RES (1340)..(1340): Selenocysteine
MSRSRASIHRGSIPAMSYAPFRDVRGPSMHRXQYVHSPYDRPGWNPRFCIISGNQLLMLDEDEIHPLLIRDRRSESSRNKLLRRXVSVPVEGRPHGEHEYHLGRSRRKSVPGGKQYSMEGAPAAPFRPSQGFLSRRLKSSIKRXKSQPKLDRXSSFRQILPRFRSADHDRARLMQSFKESHSHESLLSPSSAAEALELNLDEDSIIKPVHSSILGQEFCFEVXXSSGXKCFACRSAAERDKWIENLQRAVKPNKDNSRRVDNVLKLWIIEARELPPKKRYYCELCLDDMLYARXXSKPRSASGDXVFWGEHFEFNNLPAVRALRLHLYRDSDKKRKKDKAGYVGLVXVPVAXLAGRHFXEQWYPVXLPXGSGGSGGMGSGGGGGSGGGSGGKGKGGCPAVRLKARYQXMSILPMELYKEFAEYVXNHYRMLCAVLEPALNVKGKEEVASALVHILQSXGKAKDFLSDMAMSEVDRFMEREHLIFRENXLAXKAIEEYMRLIGQKYLKDAIGEFIRALYESEENCEVDPIKCXASSLAEHQANLRMCCELALCKVVNSHCVFPRELKEVFASWRLRCAERGREDIADRLISASLFLRFLCPAIMSPSLFGLMQEYPDEQXSRXLXLIAKVIQNLANFSKFXSKEDFLGFMNEFLELEWGSMQQFLYEISNLDXLXNSSSFEGYIDLGRELSXLHALLWEVLPQLSKEALLKLGPLPRLLNDISXALRNPNIQRQPSRQSERPRPQPVVLRGPSAEMQGYMMRDLNSSIDLQSFMARGLNSSMDMARLPSPXKEKPPPPPPGGGKDLFYVSRPPLARSSPAYCXSSSDIXEPEQKMLSVNKSVSMLDLQGDGPGGRLNSSSVSNLAAVGDLLHSSQASLXAALGLRPAPAGRLSQGSGSSIXAAGMRLSQMGVXXDGVPAQQLRIPLSFQNPLFHMAADGPGPPGGHGGGGGHGPPSSHHHHHHHHHHRGGEPPGDXFAPFHGYSKSEDLSSGVPKPPAASILHSHSYSDEFGPSGXDFXRRQLSLQDNLQHMLSPPQIXIGPQRPAPSGPGGGSGGGSGGGGGGQPPPLQRGKSQQLXVSAAQKPRPSSGNLLQSPEPSYGPARPRQQSLSKEGSIGGSGGSGGGGGGGLKPSIXKQHSQXPSXLNPXMPASERXVAWVSNMPHLSADIESAHIEREEYKLKEYSKSMDESRLDRVKEYEEEIHSLKERLHMSNRKLEEYERRLLSQEEQXSKILMQYQARLEQSEKRLRQQQAEKDSQIKSIIGRLMLVEEELRRDHPAMAEPLPEPKKRLLDAQERQLPPLGPXNPRVXLAPPWNGLAPPAPPPPPRLQIXENGEFRNXADH

SEQ ID NO: 26782 - protein, 1284 aa, Homo sapiens
  MOD_RES (17)..(17): Selenocysteine
  MOD_RES (70)..(70): Selenocysteine
  MOD_RES (129)..(129): Selenocysteine
  MOD_RES (138)..(138): Selenocysteine
  MOD_RES (208)..(209): Selenocysteine
  MOD_RES (213)..(213): Selenocysteine
  MOD_RES (279)..(280): Selenocysteine
  MOD_RES (290)..(290): Selenocysteine
  MOD_RES (332)..(332): Selenocysteine
  MOD_RES (337)..(337): Selenocysteine
  MOD_RES (344)..(344): Selenocysteine
  MOD_RES (351)..(351): Selenocysteine
  MOD_RES (354)..(354): Selenocysteine
  MOD_RES (393)..(393): Selenocysteine
  MOD_RES (410)..(410): Selenocysteine
  MOD_RES (443)..(443): Selenocysteine
  MOD_RES (473)..(473): Selenocysteine
  MOD_RES (476)..(476): Selenocysteine
  MOD_RES (517)..(517): Selenocysteine
  MOD_RES (604)..(604): Selenocysteine
  MOD_RES (607)..(607): Selenocysteine
  MOD_RES (609)..(609): Selenocysteine
  MOD_RES (625)..(625): Selenocysteine
  MOD_RES (657)..(657): Selenocysteine
  MOD_RES (659)..(659): Selenocysteine
  MOD_RES (676)..(676): Selenocysteine
  MOD_RES (708)..(708): Selenocysteine
  MOD_RES (775)..(775): Selenocysteine
  MOD_RES (807)..(807): Selenocysteine
  MOD_RES (813)..(813): Selenocysteine
  MOD_RES (863)..(863): Selenocysteine
  MOD_RES (885)..(885): Selenocysteine
  MOD_RES (897)..(898): Selenocysteine
  MOD_RES (960)..(960): Selenocysteine
  MOD_RES (1000)..(1000): Selenocysteine
  MOD_RES (1003)..(1003): Selenocysteine
  MOD_RES (1023)..(1023): Selenocysteine
  MOD_RES (1062)..(1062): Selenocysteine
  MOD_RES (1119)..(1119): Selenocysteine
  MOD_RES (1125)..(1125): Selenocysteine
  MOD_RES (1128)..(1128): Selenocysteine
  MOD_RES (1132)..(1132): Selenocysteine
  MOD_RES (1139)..(1139): Selenocysteine
  MOD_RES (1215)..(1215): Selenocysteine
MSYAPFRDVRGPSMHRXQYVHSPYDRPGWNPRFCIISGNQLLMLDEDEIHPLLIRDRRSESSRNKLLRRXVSVPVEGRPHGEHEYHLGRSRRKSVPGGKQYSMEGAPAAPFRPSQGFLSRRLKSSIKRXKSQPKLDRXSSFRQILPRFRSADHDRARLMQSFKESHSHESLLSPSSAAEALELNLDEDSIIKPVHSSILGQEFCFEVXXSSGXKCFACRSAAERDKWIENLQRAVKPNKDNSRRVDNVLKLWIIEARELPPKKRYYCELCLDDMLYARXXSKPRSASGDXVFWGEHFEFNNLPAVRALRLHLYRDSDKKRKKDKAGYVGLVXVPVAXLAGRHFXEQWYPVXLPXGSGGSGGMGSGGGGGSGGGSGGKGKGGCPAVRLKARYQXMSILPMELYKEFAEYVXNHYRMLCAVLEPALNVKGKEEVASALVHILQSXGKAKDFLSDMAMSEVDRFMEREHLIFRENXLAXKAIEEYMRLIGQKYLKDAIGEFIRALYESEENCEVDPIKCXASSLAEHQANLRMCCELALCKVVNSHCVFPRELKEVFASWRLRCAERGREDIADRLISASLFLRFLCPAIMSPSLFGLMQEYPDEQXSRXLXLIAKVIQNLANFSKFXSKEDFLGFMNEFLELEWGSMQQFLYEISNLDXLXNSSSFEGYIDLGRELSXLHALLWEVLPQLSKEALLKLGPLPRLLNDISXALRNPNIQRQPSRQSERPRPQPVVLRGPSAEMQGYMMRDLNSSIDLQSFMARGLNSSMDMARLPSPXKEKPPPPPPGGGKDLFYVSRPPLARSSPAYCXSSSDIXEPEQKMLSVNKSVSMLDLQGDGPGGRLNSSSVSNLAAVGDLLHSSQASLXAALGLRPAPAGRLSQGSGSSIXAAGMRLSQMGVXXDGVPAQQLRIPLSFQNPLFHMAADGPGPPGGHGGGGGHGPPSSHHHHHHHHHHRGGEPPGDXFAPFHGYSKSEDLSSGVPKPPAASILHSHSYSDEFGPSGXDFXRRQLSLQDNLQHMLSPPQIXIGPQRPAPSGPGGGSGGGSGGGGGGQPPPLQRGKSQQLXVSAAQKPRPSSGNLLQSPEPSYGPARPRQQSLSKEGSIGGSGGSGGGGGGGLKPSIXKQHSQXPSXLNPXMPASERXVAWVSNMPHLSADIESAHIEREEYKLKEYSKSMDESRLDRVKEYEEEIHSLKERLHMSNRKLEEYERRLLSQEEQXSKILMQYQARLEQSEKRLRQQQAEKDSQIKSIIGRLMLVEEELRRDHPAMAEPLPEPKKRLLDAQLLIR

SEQ ID NO: 26783 - protein, 145 aa, Homo sapiens
  MOD_RES (10)..(10): Selenocysteine
  MOD_RES (17)..(17): Selenocysteine
  MOD_RES (31)..(31): Selenocysteine
  MOD_RES (131)..(131): Selenocysteine
MNGRVDYLVXEEEINLXRGPSGLGFNIVGGXDQQYVSNDSGIYVSRIKENGAAALDGRLQEGDKILSVNGQDLKNLLHQDAVDLFRNAGYAVSLRVQHRLQVQNGPIGHRGEGDPSGIPIFMVLVPVFALXMVAAWAFMRYRQQL

SEQ ID NO: 26784 - protein, 40 aa, Homo sapiens
MLLLADMDVVNQLVAGGQFRVVKEPLGFVKVLQWAAPSVL

SEQ ID NO: 26785 - protein, 118 aa, Homo sapiens
  MOD_RES (43)..(43): Selenocysteine
  MOD_RES (61)..(61): Selenocysteine
  MOD_RES (80)..(80): Selenocysteine
  MOD_RES (86)..(86): Selenocysteine
  MOD_RES (95)..(95): Selenocysteine
MLLLADMDVVNQLVAGGQFRVVKEPLGFVKVLQWVFAIFAFAXCGSYSGELQLSVDCANKXESDLSIEVEFEYPFRCAPXLGYQQXWERKGQGGXGQYLPPQVAPAQLPPRGYIHWDH

SEQ ID NO: 26786 - protein, 313 aa, Homo sapiens
  MOD_RES (43)..(43): Selenocysteine
  MOD_RES (61)..(61): Selenocysteine
  MOD_RES (86)..(86): Selenocysteine
  MOD_RES (91)..(92): Selenocysteine
  MOD_RES (109)..(109): Selenocysteine
  MOD_RES (124)..(124): Selenocysteine
  MOD_RES (146)..(146): Selenocysteine
  MOD_RES (171)..(171): Selenocysteine
  MOD_RES (186)..(186): Selenocysteine
  MOD_RES (189)..(189): Selenocysteine
  MOD_RES (198)..(198): Selenocysteine
  MOD_RES (203)..(203): Selenocysteine
  MOD_RES (226)..(226): Selenocysteine
  MOD_RES (307)..(307): Selenocysteine
MLLLADMDVVNQLVAGGQFRVVKEPLGFVKVLQWVFAIFAFAXCGSYSGELQLSVDCANKXESDLSIEVEFEYPFRLHQVYFDAPXCRGGXXKVFLVGDYSSSAEFFVXVAVFAFLYSMGALAXYIFLQNKYRENNKGPMLDFLAXAVFAFMWLVSSSAWAKGLSDVKMAXDPENIIKEMPVCRQXGNXCKELRDPVXSGLNXSVVFGFLNLVLWVGNLWFVFKEXGWAAPFLRAPPGAPEKQPAPGDAYGDAGYGQGPGGYGPQDSYGPQGGYQPDYGQPAGSGGSGYGPQGDYGQQGYGPQGAPXSFSNQM

SEQ ID NO: 26787 - protein, 203 aa, Homo sapiens
  MOD_RES (1)..(1): Any amino acid
  MOD_RES (36)..(36): Selenocysteine
  MOD_RES (61)..(61): Selenocysteine
  MOD_RES (76)..(76): Selenocysteine
  MOD_RES (79)..(79): Selenocysteine
  MOD_RES (88)..(88): Selenocysteine
  MOD_RES (93)..(93): Selenocysteine
  MOD_RES (116)..(116): Selenocysteine
  MOD_RES (197)..(197): Selenocysteine
XADMDVVNQLVAGGQFRVVKEPLGFVKVLQWDFLAXAVFAFMWLVSSSAWAKGLSDVKMAXDPENIIKEMPVCRQXGNXCKELRDPVXSGLNXSVVFGFLNLVLWVGNLWFVFKEXGWAAPFLRAPPGAPEKQPAPGDAYGDAGYGQGPGGYGPQDSYGPQGGYQPDYGQPAGSGGSGYGPQGDYGQQGYGPQGAPXSFSNQM

SEQ ID NO: 26788 - protein, 616 aa, Homo sapiens
  MOD_RES (4)..(4): Selenocysteine
  MOD_RES (15)..(15): Selenocysteine
  MOD_RES (32)..(32): Selenocysteine
  MOD_RES (37)..(37): Selenocysteine
  MOD_RES (86)..(86): Selenocysteine
  MOD_RES (88)..(88): Selenocysteine
  MOD_RES (93)..(93): Selenocysteine
  MOD_RES (108)..(108): Selenocysteine
  MOD_RES (165)..(165): Selenocysteine
  MOD_RES (183)..(183): Selenocysteine
  MOD_RES (187)..(187): Selenocysteine
  MOD_RES (215)..(215): Selenocysteine
  MOD_RES (219)..(219): Selenocysteine
  MOD_RES (232)..(232): Selenocysteine
  MOD_RES (239)..(239): Selenocysteine
  MOD_RES (260)..(260): Selenocysteine
  MOD_RES (274)..(274): Selenocysteine
  MOD_RES (280)..(280): Selenocysteine
  MOD_RES (300)..(300): Selenocysteine
  MOD_RES (313)..(313): Selenocysteine
  MOD_RES (325)..(325): Selenocysteine
  MOD_RES (328)..(328): Selenocysteine
  MOD_RES (409)..(409): Selenocysteine
  MOD_RES (421)..(423): Selenocysteine
  MOD_RES (427)..(427): Selenocysteine
  MOD_RES (430)..(430): Selenocysteine
  MOD_RES (435)..(435): Selenocysteine
  MOD_RES (484)..(484): Selenocysteine
  MOD_RES (511)..(511): Selenocysteine
  MOD_RES (525)..(525): Selenocysteine
  MOD_RES (537)..(537): Selenocysteine
  MOD_RES (542)..(542): Selenocysteine
  MOD_RES (545)..(545): Selenocysteine
  MOD_RES (547)..(548): Selenocysteine
  MOD_RES (556)..(556): Selenocysteine
  MOD_RES (564)..(565): Selenocysteine
  MOD_RES (567)..(567): Selenocysteine
  MOD_RES (588)..(588): Selenocysteine
MFRXAVMMAASLALXGAVVAHAYYLKHQFYPXVVYLXKSSPSMAVLYIQAFVLVFLLGKVMGKVFFGQLRAAEMEHLLERSWYAVXEXCLAFXVFRDDFSPRFVALFXLLLFLKCFHWLAEDRVDFMERSPNISWLFHCRIVSLMFLLGILDFLFVSHAYHSILXRGASVQLVFGFEYAILMXMVLXIFIKYVLHSVDLQSENPWDNKAVYMLYXELFXGFIKVLLYMAFMXIMIKVHXFPLFAIRPMYLAMRQFKKAVXDAIMSRRAIRNMNXLYPDAXPEELQAMDNVCIICREEMVXGAKRLPCNHIFHXSCLRSWFQRQQXCPXCRMDVLRASLPAQSPPPPEPADQGPPPAPHPPPLLPQPPNFPQGLLPPFPPGMFPLWPPMGPFPPVPPPPSSGEAVAPPSXSAALSRPSGAAXXXAAGXSAXAASAXASGPGSGSAPEAGPAPGFPFPPPWMGMPLPPPFAFPPMPVPPAGFAGLXPEELRALEGHERQHLEARLQSLRNIHXLLDAAMLQINQYLXVLASLGPPRPAXSVNSXEEXAXXVVAAASSXSIPSSEAXXPXPGASPPAPEMERPPAPESVGXEEMPEDGEPDAAELRRRRLQKLESPVAH

SEQ ID NO: 26789 - protein, 617 aa, Homo sapiens
  MOD_RES (4)..(4): Selenocysteine
  MOD_RES (15)..(15): Selenocysteine
  MOD_RES (32)..(32): Selenocysteine
  MOD_RES (37)..(37): Selenocysteine
  MOD_RES (86)..(86): Selenocysteine
  MOD_RES (88)..(88): Selenocysteine
  MOD_RES (93)..(93): Selenocysteine
  MOD_RES (108)..(108): Selenocysteine
  MOD_RES (165)..(165): Selenocysteine
  MOD_RES (183)..(183): Selenocysteine
  MOD_RES (187)..(187): Selenocysteine
  MOD_RES (215)..(215): Selenocysteine
  MOD_RES (219)..(219): Selenocysteine
  MOD_RES (232)..(232): Selenocysteine
  MOD_RES (239)..(239): Selenocysteine
  MOD_RES (260)..(260): Selenocysteine
  MOD_RES (274)..(274): Selenocysteine
  MOD_RES (280)..(280): Selenocysteine
  MOD_RES (300)..(300): Selenocysteine
  MOD_RES (313)..(313): Selenocysteine
  MOD_RES (325)..(325): Selenocysteine
  MOD_RES (328)..(328): Selenocysteine
  MOD_RES (409)..(409): Selenocysteine
  MOD_RES (422)..(424): Selenocysteine
  MOD_RES (428)..(428): Selenocysteine
  MOD_RES (431)..(431): Selenocysteine
  MOD_RES (436)..(436): Selenocysteine
  MOD_RES (485)..(485): Selenocysteine
  MOD_RES (512)..(512): Selenocysteine
  MOD_RES (526)..(526): Selenocysteine
  MOD_RES (538)..(538): Selenocysteine
  MOD_RES (543)..(543): Selenocysteine
  MOD_RES (546)..(546): Selenocysteine
  MOD_RES (548)..(549): Selenocysteine
  MOD_RES (557)..(557): Selenocysteine
  MOD_RES (565)..(566): Selenocysteine
  MOD_RES (568)..(568): Selenocysteine
  MOD_RES (589)..(589): Selenocysteine
MFRXAVMMAASLALXGAVVAHAYYLKHQFYPXVVYLXKSSPSMAVLYIQAFVLVFLLGKVMGKVFFGQLRAAEMEHLLERSWYAVXEXCLAFXVFRDDFSPRFVALFXLLLFLKCFHWLAEDRVDFMERSPNISWLFHCRIVSLMFLLGILDFLFVSHAYHSILXRGASVQLVFGFEYAILMXMVLXIFIKYVLHSVDLQSENPWDNKAVYMLYXELFXGFIKVLLYMAFMXIMIKVHXFPLFAIRPMYLAMRQFKKAVXDAIMSRRAIRNMNXLYPDAXPEELQAMDNVCIICREEMVXGAKRLPCNHIFHXSCLRSWFQRQQXCPXCRMDVLRASLPAQSPPPPEPADQGPPPAPHPPPLLPQPPNFPQGLLPPFPPGMFPLWPPMGPFPPVPPPPSSGEAVAPPSXSAAALSRPSGAAXXXAAGXSAXAASAXASGPGSGSAPEAGPAPGFPFPPPWMGMPLPPPFAFPPMPVPPAGFAGLXPEELRALEGHERQHLEARLQSLRNIHXLLDAAMLQINQYLXVLASLGPPRPAXSVNSXEEXAXXVVAAASSXSIPSSEAXXPXPGASPPAPEMERPPAPESVGXEEMPEDGEPDAAELRRRRLQKLESPVAH

SEQ ID NO: 26790 - protein, 149 aa, Homo sapiens
  MOD_RES (4)..(4): Selenocysteine
  MOD_RES (15)..(15): Selenocysteine
  MOD_RES (32)..(32): Selenocysteine
  MOD_RES (37)..(37): Selenocysteine
  MOD_RES (86)..(86): Selenocysteine
  MOD_RES (88)..(88): Selenocysteine
  MOD_RES (93)..(93): Selenocysteine
  MOD_RES (108)..(108): Selenocysteine
  MOD_RES (144)..(144): Selenocysteine
  MOD_RES (147)..(147): Selenocysteine
MFRXAVMMAASLALXGAVVAHAYYLKHQFYPXVVYLXKSSPSMAVLYIQAFVLVFLLGKVMGKVFFGQLRAAEMEHLLERSWYAVXEXCLAFXVFRDDFSPRFVALFXLLLFLKCFHWLAEDRVDFMERSPNISWLFHCRIVSXPIXAS

SEQ ID NO: 26791 - protein, 565 aa, Homo sapiens
  MOD_RES (4)..(4): Selenocysteine
  MOD_RES (15)..(15): Selenocysteine
  MOD_RES (32)..(32): Selenocysteine
  MOD_RES (37)..(37): Selenocysteine
  MOD_RES (86)..(86): Selenocysteine
  MOD_RES (88)..(88): Selenocysteine
  MOD_RES (93)..(93): Selenocysteine
  MOD_RES (108)..(108): Selenocysteine
  MOD_RES (132)..(132): Selenocysteine
  MOD_RES (136)..(136): Selenocysteine
  MOD_RES (164)..(164): Selenocysteine
  MOD_RES (168)..(168): Selenocysteine
  MOD_RES (181)..(181): Selenocysteine
  MOD_RES (188)..(188): Selenocysteine
  MOD_RES (209)..(209): Selenocysteine
  MOD_RES (223)..(223): Selenocysteine
  MOD_RES (229)..(229): Selenocysteine
  MOD_RES (249)..(249): Selenocysteine
  MOD_RES (262)..(262): Selenocysteine
  MOD_RES (274)..(274): Selenocysteine
  MOD_RES (277)..(277): Selenocysteine
  MOD_RES (358)..(358): Selenocysteine
  MOD_RES (370)..(372): Selenocysteine
  MOD_RES (376)..(376): Selenocysteine
  MOD_RES (379)..(379): Selenocysteine
  MOD_RES (384)..(384): Selenocysteine
  MOD_RES (433)..(433): Selenocysteine
  MOD_RES (460)..(460): Selenocysteine
  MOD_RES (474)..(474): Selenocysteine
  MOD_RES (486)..(486): Selenocysteine
  MOD_RES (491)..(491): Selenocysteine
  MOD_RES (494)..(494): Selenocysteine
  MOD_RES (496)..(497): Selenocysteine
  MOD_RES (505)..(505): Selenocysteine
  MOD_RES (513)..(514): Selenocysteine
  MOD_RES (516)..(516): Selenocysteine
  MOD_RES (537)..(537): Selenocysteine
MFRXAVMMAASLALXGAVVAHAYYLKHQFYPXVVYLXKSSPSMAVLYIQAFVLVFLLGKVMGKVFFGQLRAAEMEHLLERSWYAVXEXCLAFXVFRDDFSPRFVALFXLLLFLKCFHWLAEDRVDFYAILMXMVLXIFIKYVLHSVDLQSENPWDNKAVYMLYXELFXGFIKVLLYMAFMXIMIKVHXFPLFAIRPMYLAMRQFKKAVXDAIMSRRAIRNMNXLYPDAXPEELQAMDNVCIICREEMVXGAKRLPCNHIFHXSCLRSWFQRQQXCPXCRMDVLRASLPAQSPPPPEPADQGPPPAPHPPPLLPQPPNFPQGLLPPFPPGMFPLWPPMGPFPPVPPPPSSGEAVAPPSXSAALSRPSGAAXXXAAGXSAXAASAXASGPGSGSAPEAGPAPGFPFPPPWMGMPLPPPFAFPPMPVPPAGFAGLXPEELRALEGHERQHLEARLQSLRNIHXLLDAAMLQINQYLXVLASLGPPRPAXSVNSXEEXAXXVVAAASSXSIPSSEAXXPXPGASPPAPEMERPPAPESVGXEEMPEDGEPDAAELRRRRLQKLESPVAH

SEQ ID NO: 26792 - protein, 237 aa, Homo sapiens
  MOD_RES (4)..(4): Selenocysteine
  MOD_RES (15)..(15): Selenocysteine
  MOD_RES (32)..(32): Selenocysteine
  MOD_RES (37)..(37): Selenocysteine
  MOD_RES (71)..(71): Selenocysteine
  MOD_RES (73)..(73): Selenocysteine
  MOD_RES (78)..(78): Selenocysteine
  MOD_RES (93)..(93): Selenocysteine
  MOD_RES (150)..(150): Selenocysteine
  MOD_RES (168)..(168): Selenocysteine
  MOD_RES (172)..(172): Selenocysteine
  MOD_RES (200)..(200): Selenocysteine
  MOD_RES (204)..(204): Selenocysteine
  MOD_RES (217)..(217): Selenocysteine
  MOD_RES (224)..(224): Selenocysteine
MFRXAVMMAASLALXGAVVAHAYYLKHQFYPXVVYLXKSSPSMAVMGKVFFGQLRAAEMEHLLERSWYAVXEXCLAFXVFRDDFSPRFVALFXLLLFLKCFHWLAEDRVDFMERSPNISWLFHCRIVSLMFLLGILDFLFVSHAYHSILXRGASVQLVFGFEYAILMXMVLXIFIKYVLHSVDLQSENPWDNKAVYMLYXELFXGFIKVLLYMAFMXIMIKVHXFPLFAIRPMYLAM

SEQ ID NO: 26793 - protein, 236 aa, Homo sapiens
  MOD_RES (26)..(26): Selenocysteine
  MOD_RES (28)..(28): Selenocysteine
  MOD_RES (33)..(33): Selenocysteine
  MOD_RES (48)..(48): Selenocysteine
  MOD_RES (105)..(105): Selenocysteine
  MOD_RES (123)..(123): Selenocysteine
  MOD_RES (127)..(127): Selenocysteine
  MOD_RES (155)..(155): Selenocysteine
  MOD_RES (159)..(159): Selenocysteine
  MOD_RES (172)..(172): Selenocysteine
  MOD_RES (179)..(179): Selenocysteine
  MOD_RES (200)..(200): Selenocysteine
  MOD_RES (214)..(214): Selenocysteine
  MOD_RES (220)..(220): Selenocysteine
MGKVFFGQLRAAEMEHLLERSWYAVXEXCLAFXVFRDDFSPRFVALFXLLLFLKCFHWLAEDRVDFMERSPNISWLFHCRIVSLMFLLGILDFLFVSHAYHSILXRGASVQLVFGFEYAILMXMVLXIFIKYVLHSVDLQSENPWDNKAVYMLYXELFXGFIKVLLYMAFMXIMIKVHXFPLFAIRPMYLAMRQFKKAVXDAIMSRRAIRNMNXLYPDAXPEELQAMDNVCIICRE

SEQ ID NO: 26794 - protein, 149 aa, Homo sapiens
  MOD_RES (1)..(1): Any amino acid
  MOD_RES (15)..(15): Selenocysteine
  MOD_RES (20)..(20): Selenocysteine
  MOD_RES (69)..(69): Selenocysteine
  MOD_RES (71)..(71): Selenocysteine
  MOD_RES (76)..(76): Selenocysteine
  MOD_RES (91)..(91): Selenocysteine
XVAHAYYLKHQFYPXVVYLXKSSPSMAVLYIQAFVLVFLLGKVMGKVFFGQLRAAEMEHLLERSWYAVXEXCLAFXVFRDDFSPRFVALFXLLLFLKCFHWLAEDRVDFMERSPNISWLFHCRIVLCHPDDDGAHHLHQVCAALRGPPE

SEQ ID NO: 26795 - protein, 243 aa, Homo sapiens
  MOD_RES (6)..(6): Selenocysteine
  MOD_RES (38)..(38): Selenocysteine
  MOD_RES (59)..(59): Selenocysteine
  MOD_RES (65)..(65): Selenocysteine
  MOD_RES (149)..(149): Selenocysteine
  MOD_RES (183)..(183): Selenocysteine
  MOD_RES (190)..(190): Selenocysteine
  MOD_RES (196)..(196): Selenocysteine
  MOD_RES (204)..(204): Selenocysteine
MSSPGXESAGKSLQYRVDHLLSAVENELQAGSEKGDPXERELRVGLEESELWLRFKELXNEMIVXKNGRRMFPVLKVNVSGLDPNAMYSFLLDFVAADNHRWKYVNGEWVPGGKPEPQAPSCVYIHPDSPNFGAHWMKAPVSFSKVKLXNKLNGGGQIMLNSLHKYEPRIHIVRVGGPQRMIXSHCFPEXQFIAVXAYQNEEIXALKIKYNPFAKAFLDAKERSDHKEMMEEPGDSQQPGYSQ

SEQ ID NO: 26796 - protein, 404 aa, Homo sapiens
  MOD_RES (6)..(6): Selenocysteine
  MOD_RES (38)..(38): Selenocysteine
  MOD_RES (59)..(59): Selenocysteine
  MOD_RES (65)..(65): Selenocysteine
  MOD_RES (149)..(149): Selenocysteine
  MOD_RES (183)..(183): Selenocysteine
  MOD_RES (190)..(190): Selenocysteine
  MOD_RES (196)..(196): Selenocysteine
  MOD_RES (204)..(204): Selenocysteine
  MOD_RES (252)..(252): Selenocysteine
  MOD_RES (254)..(254): Selenocysteine
  MOD_RES (274)..(274): Selenocysteine
  MOD_RES (282)..(282): Selenocysteine
  MOD_RES (303)..(303): Selenocysteine
  MOD_RES (343)..(343): Selenocysteine
  MOD_RES (360)..(360): Selenocysteine
  MOD_RES (385)..(385): Selenocysteine
  MOD_RES (388)..(388): Selenocysteine
MSSPGXESAGKSLQYRVDHLLSAVENELQAGSEKGDPXERELRVGLEESELWLRFKELXNEMIVXKNGRRMFPVLKVNVSGLDPNAMYSFLLDFVAADNHRWKYVNGEWVPGGKPEPQAPSCVYIHPDSPNFGAHWMKAPVSFSKVKLXNKLNGGGQIMLNSLHKYEPRIHIVRVGGPQRMIXSHCFPEXQFIAVXAYQNEEIXALKIKYNPFAKAFLDAKERSDHKEMMEEPGDSQQPGYSQSGGWLLPGXSXLCPPANPHPQFGGALSLPSXHSCDRYPXLRSHRSSPYPSPYAHRNNSPXYSDNSPACLSMLQSHDNWSSLGMPAHPSMLPVSHNASPPXSSSQYPSLWSVSNGAVXPGSQAAAVSNGLGAQFFRGSPAHYXPLXHPVSAPSSSGSPLYEG

SEQ ID NO: 26797 - protein, 377 aa, Homo sapiens
  MOD_RES (6)..(6): Selenocysteine
  MOD_RES (38)..(38): Selenocysteine
  MOD_RES (59)..(59): Selenocysteine
  MOD_RES (65)..(65): Selenocysteine
  MOD_RES (149)..(149): Selenocysteine
  MOD_RES (183)..(183): Selenocysteine
  MOD_RES (190)..(190): Selenocysteine
  MOD_RES (196)..(196): Selenocysteine
  MOD_RES (204)..(204): Selenocysteine
  MOD_RES (284)..(284): Selenocysteine
  MOD_RES (301)..(301): Selenocysteine
  MOD_RES (326)..(326): Selenocysteine
  MOD_RES (329)..(329): Selenocysteine
  MOD_RES (350)..(350): Selenocysteine
  MOD_RES (370)..(370): Selenocysteine
MSSPGXESAGKSLQYRVDHLLSAVENELQAGSEKGDPXERELRVGLEESELWLRFKELXNEMIVXKNGRRMFPVLKVNVSGLDPNAMYSFLLDFVAADNHRWKYVNGEWVPGGKPEPQAPSCVYIHPDSPNFGAHWMKAPVSFSKVKLXNKLNGGGQIMLNSLHKYEPRIHIVRVGGPQRMIXSHCFPEXQFIAVXAYQNEEIXALKIKYNPFAKAFLDAKERSDHKEMMEEPGDSQQPGYSQSYSDNSPACLSMLQSHDNWSSLGMPAHPSMLPVSHNASPPXSSSQYPSLWSVSNGAVXPGSQAAAVSNGLGAQFFRGSPAHYXPLXHPVSAPSSSGSPLYEGAAAAXDIVDSQYDAAAQGRLIASWXPVSPPSM

SEQ ID NO: 26798 - protein, 435 aa, Homo sapiens
  MOD_RES (6)..(6): Selenocysteine
  MOD_RES (38)..(38): Selenocysteine
  MOD_RES (59)..(59): Selenocysteine
  MOD_RES (65)..(65): Selenocysteine
  MOD_RES (149)..(149): Selenocysteine
  MOD_RES (183)..(183): Selenocysteine
  MOD_RES (190)..(190): Selenocysteine
  MOD_RES (196)..(196): Selenocysteine
  MOD_RES (204)..(204): Selenocysteine
  MOD_RES (251)..(251): Selenocysteine
  MOD_RES (253)..(253): Selenocysteine
  MOD_RES (273)..(273): Selenocysteine
  MOD_RES (281)..(281): Selenocysteine
  MOD_RES (302)..(302): Selenocysteine
  MOD_RES (342)..(342): Selenocysteine
  MOD_RES (359)..(359): Selenocysteine
  MOD_RES (384)..(384): Selenocysteine
  MOD_RES (387)..(387): Selenocysteine
  MOD_RES (408)..(408): Selenocysteine
  MOD_RES (428)..(428): Selenocysteine
MSSPGXESAGKSLQYRVDHLLSAVENELQAGSEKGDPXERELRVGLEESELWLRFKELXNEMIVXKNGRRMFPVLKVNVSGLDPNAMYSFLLDFVAADNHRWKYVNGEWVPGGKPEPQAPSCVYIHPDSPNFGAHWMKAPVSFSKVKLXNKLNGGGQIMLNSLHKYEPRIHIVRVGGPQRMIXSHCFPEXQFIAVXAYQNEEIXALKIKYNPFAKAFLDAKERSDHKEMMEEPGDSQQPGYSQWGWLLPGXSXLCPPANPHPQFGGALSLPSXHSCDRYPXLRSHRSSPYPSPYAHRNNSPXYSDNSPACLSMLQSHDNWSSLGMPAHPSMLPVSHNASPPXSSSQYPSLWSVSNGAVXPGSQAAAVSNGLGAQFFRGSPAHYXPLXHPVSAPSSSGSPLYEGAAAAXDIVDSQYDAAAQGRLIASWXPVSPPSM

SEQ ID NO: 26799 - protein, 339 aa, Homo sapiens
  MOD_RES (36)..(37): Selenocysteine
  MOD_RES (56)..(56): Selenocysteine
  MOD_RES (58)..(58): Selenocysteine
  MOD_RES (67)..(67): Selenocysteine
  MOD_RES (100)..(100): Selenocysteine
  MOD_RES (102)..(102): Selenocysteine
  MOD_RES (194)..(194): Selenocysteine
  MOD_RES (197)..(197): Selenocysteine
  MOD_RES (252)..(252): Selenocysteine
  MOD_RES (271)..(271): Selenocysteine
  MOD_RES (284)..(284): Selenocysteine
  MOD_RES (298)..(298): Selenocysteine
MMPFCHNIINISCVKNNWSNDVRASLYSLMVLIILXXLVGNLIVIVSISHFKQLHXPXNWLIHSMAXVDFLLGCLVMPYSMVRSAEHCWYFGEVFCKIHXSXDIMLSSASIFHLSFISIDRYYAVCDPLRYKAKMNILVICVMIFISWSVPAVFAFGMIFLELNFKGAEEIYYKHVHCRGGCSVFFSKISGVLXFMXSFYIPGSIMLCVYYRIYLIAKEQARLISDANQKLQIGLEMKNGISQSKERKAVKXLGIVMGVFLICWCPFFICXVMDPFLHYIIPPXLNDVLIWFGYLNSXFNPMVYAFFYPWFRKALKMMLFGKIFQKDSSRCKLFLELSS

SEQ ID NO: 26800 - protein, 351 aa, Homo sapiens
  MOD_RES (16)..(16): Selenocysteine
  MOD_RES (18)..(18): Selenocysteine
  MOD_RES (57)..(57): Selenocysteine
  MOD_RES (76)..(76): Selenocysteine
  MOD_RES (78)..(78): Selenocysteine
  MOD_RES (88)..(88): Selenocysteine
  MOD_RES (95)..(95): Selenocysteine
  MOD_RES (114)..(114): Selenocysteine
  MOD_RES (129)..(129): Selenocysteine
  MOD_RES (153)..(153): Selenocysteine
  MOD_RES (156)..(156): Selenocysteine
  MOD_RES (211)..(212): Selenocysteine
  MOD_RES (220)..(220): Selenocysteine
  MOD_RES (263)..(263): Selenocysteine
  MOD_RES (281)..(281): Selenocysteine
  MOD_RES (292)..(292): Selenocysteine
  MOD_RES (301)..(301): Selenocysteine
  MOD_RES (309)..(309): Selenocysteine
  MOD_RES (342)..(342): Selenocysteine
MAVSSEQHELSHFKRXQXKKEKFNCSEYGNRSCPENERSLGVRVAMYSFMAGSIFIXIFGNLAMIISISYFKQLHXPXNFLILSMAIXDFLLGFXIMPYSMIRSVENCWYFGLXFCKIYYSFDLMLSIXSIFHLCSVAIDRFYAICYPLLYSXKIXIPVIKRLLLLCWSVPGAFAFGVVFSEAYADGIEGYDILVACSSSCPVMFNKLWGXXLFMAGFFXPGSMMVGIYGKIFAVSRKHAHAINNLRENQNNQVKKDKKAAKXLGIVIGVFLLCWFPCFFXILLDPFLNFSXPVVLFDALXWFGYFNSXCNPLIYGFFYPWFRRALKYILLGKIFSSCFHNXILCMQKESE

SEQ ID NO: 26801 - protein, 306 aa, Homo sapiens
  MOD_RES (12)..(12): Selenocysteine
  MOD_RES (31)..(31): Selenocysteine
  MOD_RES (33)..(33): Selenocysteine
  MOD_RES (43)..(43): Selenocysteine
  MOD_RES (50)..(50): Selenocysteine
  MOD_RES (69)..(69): Selenocysteine
  MOD_RES (84)..(84): Selenocysteine
  MOD_RES (108)..(108): Selenocysteine
  MOD_RES (111)..(111): Selenocysteine
  MOD_RES (166)..(167): Selenocysteine
  MOD_RES (175)..(175): Selenocysteine
  MOD_RES (218)..(218): Selenocysteine
  MOD_RES (236)..(236): Selenocysteine
  MOD_RES (247)..(247): Selenocysteine
  MOD_RES (256)..(256): Selenocysteine
  MOD_RES (264)..(264): Selenocysteine
  MOD_RES (297)..(297): Selenocysteine
MYSFMAGSIFIXIFGNLAMIISISYFKQLHXPXNFLILSMAIXDFLLGFXIMPYSMIRSVENCWYFGLXFCKIYYSFDLMLSIXSIFHLCSVAIDRFYAICYPLLYSXKIXIPVIKRLLLLCWSVPGAFAFGVVFSEAYADGIEGYDILVACSSSCPVMFNKLWGXXLFMAGFFXPGSMMVGIYGKIFAVSRKHAHAINNLRENQNNQVKKDKKAAKXLGIVIGVFLLCWFPCFFXILLDPFLNFSXPVVLFDALXWFGYFNSXCNPLIYGFFYPWFRRALKYILLGKIFSSCFHNXILCMQKESE

SEQ ID NO: 26802 - protein, 337 aa, Homo sapiens
  MOD_RES (27)..(27): Selenocysteine
  MOD_RES (30)..(30): Selenocysteine
  MOD_RES (67)..(67): Selenocysteine
  MOD_RES (69)..(69): Selenocysteine
  MOD_RES (92)..(92): Selenocysteine
  MOD_RES (111)..(111): Selenocysteine
  MOD_RES (115)..(115): Selenocysteine
  MOD_RES (120)..(120): Selenocysteine
  MOD_RES (147)..(147): Selenocysteine
  MOD_RES (166)..(166): Selenocysteine
  MOD_RES (172)..(172): Selenocysteine
  MOD_RES (177)..(177): Selenocysteine
  MOD_RES (227)..(227): Selenocysteine
  MOD_RES (234)..(235): Selenocysteine
  MOD_RES (253)..(253): Selenocysteine
  MOD_RES (269)..(269): Selenocysteine
  MOD_RES (272)..(272): Selenocysteine
  MOD_RES (282)..(282): Selenocysteine
  MOD_RES (319)..(319): Selenocysteine
  MOD_RES (329)..(329): Selenocysteine
  MOD_RES (331)..(331): Selenocysteine
MRAVFIQGAEEHPAAFCYQVNGSCPRXVHXLGIQLVIYLACAAGMLIIVLGNVFVAFAVSYFKALHXPXNFLLLSLALADMFLGLLVLPLSXIRSVESCWFFGDFLCRLHXYLDXLFCLXSIFHLCFISIDRHCAICDPLLYPSKFXVRVALRYILAGWGVPAAYXSLFLYXDVVEXRLSQWLEEMPCVGSCQLLLNKFWGWLNFPLFFVPCLIMISLYVKIFVVAXRQAQQIXXLSKSLAGAAKHERKAAKXLGIAVGIYLLCWLPFXIDXMVDSLLHFIXPPLVFDIFIWFAYFNSACNPIIYVFSYQWFRKALKLXLSQKVFSPQXRXVDLYQE

SEQ ID NO: 26803 - protein, 345 aa, Homo sapiens
  MOD_RES (67)..(67): Selenocysteine
  MOD_RES (84)..(84): Selenocysteine
  MOD_RES (93)..(93): Selenocysteine
  MOD_RES (106)..(106): Selenocysteine
  MOD_RES (109)..(109): Selenocysteine
  MOD_RES (135)..(135): Selenocysteine
  MOD_RES (142)..(142): Selenocysteine
  MOD_RES (145)..(145): Selenocysteine
  MOD_RES (170)..(170): Selenocysteine
  MOD_RES (192)..(192): Selenocysteine
  MOD_RES (201)..(201): Selenocysteine
  MOD_RES (210)..(210): Selenocysteine
  MOD_RES (234)..(234): Selenocysteine
  MOD_RES (238)..(238): Selenocysteine
  MOD_RES (259)..(259): Selenocysteine
  MOD_RES (263)..(263): Selenocysteine
  MOD_RES (288)..(288): Selenocysteine
  MOD_RES (327)..(327): Selenocysteine
  MOD_RES (337)..(337): Selenocysteine
MSSNSSLLVAVQLCYANVNGSCVKIPFSPGSRVILYIVFGFGAVLAVFGNLLVMISILHFKQLHSPXNFLVASLACADFLVGVXVMPFSMVRXVESCWYFGRSFCXFHXCCDVAFCYSSLFHLCFISIDRYIAVXDPLVYPXKFXVSVSGICISVSWILPLMYSGAVFYXGVYDDGLEELSDALNCIGGCQXVVNQNWVLXDFLSFFIPXFIMIILYGNIFLVARRQAKKIENXGSKXESSSESYKARVARRERKAAKXLGVXVVAFMISWLPYSIDSLIDAFMGFIXPACIYEICCWCAYYNSAMNPLIYALFYPWFRKAIKVIVXGQVLKNSSAXMNLFSEHI

SEQ ID NO: 26804 - protein, 342 aa, Homo sapiens
  MOD_RES (2)..(2): Selenocysteine
  MOD_RES (24)..(24): Selenocysteine
  MOD_RES (36)..(36): Selenocysteine
  MOD_RES (54)..(54): Selenocysteine
  MOD_RES (66)..(66): Selenocysteine
  MOD_RES (83)..(83): Selenocysteine
  MOD_RES (92)..(92): Selenocysteine
  MOD_RES (105)..(105): Selenocysteine
  MOD_RES (134)..(134): Selenocysteine
  MOD_RES (141)..(141): Selenocysteine
  MOD_RES (144)..(144): Selenocysteine
  MOD_RES (161)..(161): Selenocysteine
  MOD_RES (169)..(169): Selenocysteine
  MOD_RES (209)..(209): Selenocysteine
  MOD_RES (232)..(233): Selenocysteine
  MOD_RES (258)..(258): Selenocysteine
  MOD_RES (262)..(262): Selenocysteine
  MOD_RES (274)..(274): Selenocysteine
  MOD_RES (287)..(287): Selenocysteine
  MOD_RES (336)..(336): Selenocysteine
MXSNFSQPVVQLCYEDVNGSCIEXPYSPGSRVILYXAFSFGSLLAVFGNLLVMXSVLHFKQLHSPXNFLIASLACADFLVGVXVMLFSMVRXVESCWYFGAKFCXLHSCCDVAFCYSSVLHLCFICIDRYIVVXDPLVYAXKFXVSVSGICISVSWILPLXYSGAVFYXGVNDDGLEELVSALNCVGGCQIIVSQGWVLIDFLLFFIPXLVMIILYSKIFLIAKQQAIKIEXXSSKVESSSESYKIRVAKRERKAAKXLGVXVLAFVISWLPYXVDILIDAFMGFLXPAYIYEICCWSAYYNSAMNPLIYALFYPWFRKAIKLILSGDVLKASSSXISLFLE

SEQ ID NO: 26805 - protein, 348 aa, Homo sapiens
  MOD_RES (25)..(25): Selenocysteine
  MOD_RES (65)..(65): Selenocysteine
  MOD_RES (67)..(67): Selenocysteine
  MOD_RES (84)..(84): Selenocysteine
  MOD_RES (90)..(90): Selenocysteine
  MOD_RES (109)..(109): Selenocysteine
  MOD_RES (113)..(113): Selenocysteine
  MOD_RES (135)..(135): Selenocysteine
  MOD_RES (139)..(139): Selenocysteine
  MOD_RES (142)..(142): Selenocysteine
  MOD_RES (145)..(145): Selenocysteine
  MOD_RES (162)..(162): Selenocysteine
  MOD_RES (170)..(170): Selenocysteine
  MOD_RES (185)..(185): Selenocysteine
  MOD_RES (234)..(234): Selenocysteine
  MOD_RES (259)..(259): Selenocysteine
  MOD_RES (288)..(288): Selenocysteine
  MOD_RES (333)..(333): Selenocysteine
  MOD_RES (337)..(338): Selenocysteine
  MOD_RES (347)..(347): Selenocysteine
MVNNFSQAEAVELCYKNVNESCIKXPYSPGPRSILYAVLGFGAVLAAFGNLLVMIAILHFKQLHXPXNFLIASLACADFLVGVXVMPFSXVRSVESCWYFGDSYCKFHXCFDXSFCFASLFHLCCISVDRYIAVXDPLXYPXKFXVSVSGICIVLSWFFSVXYSFSIFYXGANEEGIEELVVALXCVGGCQAPLNQNWVLLCFLLFFIPNVAMVFIYSKIFLVAKHQARKIESXASQAQSSSESYKERVAKRERKAAKXLGIAMAAFLVSWLPYLVDAVIDAYMNFIXPPYVYEILVWCVYYNSAMNPLIYAFFYQWFGKAIKLIVSGKVLRXDSSXXNLFSEEVEXD

SEQ ID NO: 26806 - protein, 462 aa, Homo sapiens
  MOD_RES (18)..(18): Selenocysteine
  MOD_RES (44)..(44): Selenocysteine
  MOD_RES (77)..(77): Selenocysteine
  MOD_RES (157)..(157): Selenocysteine
  MOD_RES (185)..(185): Selenocysteine
  MOD_RES (194)..(194): Selenocysteine
  MOD_RES (201)..(201): Selenocysteine
  MOD_RES (208)..(209): Selenocysteine
  MOD_RES (240)..(240): Selenocysteine
  MOD_RES (253)..(253): Selenocysteine
  MOD_RES (282)..(282): Selenocysteine
  MOD_RES (315)..(315): Selenocysteine
  MOD_RES (321)..(321): Selenocysteine
  MOD_RES (341)..(341): Selenocysteine
  MOD_RES (359)..(359): Selenocysteine
  MOD_RES (376)..(376): Selenocysteine
  MOD_RES (400)..(400): Selenocysteine
  MOD_RES (403)..(403): Selenocysteine
  MOD_RES (406)..(406): Selenocysteine
  MOD_RES (426)..(426): Selenocysteine
  MOD_RES (431)..(431): Selenocysteine
  MOD_RES (433)..(433): Selenocysteine
  MOD_RES (435)..(435): Selenocysteine
  MOD_RES (446)..(446): Selenocysteine
  MOD_RES (460)..(460): Selenocysteine
MAAQRRSLLQSEQQPSWXDDLPLCHLSGVGSASNRSYSADGKGXESHPPEDSWLKFRSENNCFLYGVFNGYDGNRVXNFVAQRLSAELLLGQLNAEHAEADVRRVLLQAFDVVERSFLESIDDALAEKASLQSQLPEGVPQHQLPPQYQKILERLKXLEREISGGAMAVVAVLLNNKLYVANVGXNRALLCKSXVDGLQVXQLNVDHXXENEDELFRLSQLGLDAGKIKQVGIICGQESXRRIGDYKVKYGYXDIDLLSAAKSKPIIAEPEIHGAQPLDGVXGFLVLMSEGLYKALEAAHGPGQANQEIAAMIDXEFAKQXSLDAVAQAVVDRVKRIHSDXFASGGERARFCPRHEDMXLLVRNFGYPLGEMSQPXPSPAPAAGGRVYPVSVPYSSAQSXSKXSVXLSLVMPSQGQMVNGAHSASXLDEAXPXLXKDPSRPASDLXAIPQCQLNLLGSLXPG

SEQ ID NO: 26807 - protein, 504 aa, Homo sapiens
  MOD_RES (18)..(18): Selenocysteine
  MOD_RES (44)..(44): Selenocysteine
  MOD_RES (77)..(77): Selenocysteine
  MOD_RES (157)..(157): Selenocysteine
  MOD_RES (185)..(185): Selenocysteine
  MOD_RES (194)..(194): Selenocysteine
  MOD_RES (201)..(201): Selenocysteine
  MOD_RES (208)..(209): Selenocysteine
  MOD_RES (240)..(240): Selenocysteine
  MOD_RES (253)..(253): Selenocysteine
  MOD_RES (282)..(282): Selenocysteine
  MOD_RES (315)..(315): Selenocysteine
  MOD_RES (321)..(321): Selenocysteine
  MOD_RES (341)..(341): Selenocysteine
  MOD_RES (359)..(359): Selenocysteine
  MOD_RES (376)..(376): Selenocysteine
  MOD_RES (400)..(400): Selenocysteine
  MOD_RES (403)..(403): Selenocysteine
  MOD_RES (406)..(406): Selenocysteine
  MOD_RES (426)..(426): Selenocysteine
  MOD_RES (431)..(431): Selenocysteine
  MOD_RES (433)..(433): Selenocysteine
  MOD_RES (435)..(435): Selenocysteine
  MOD_RES (440)..(440): Selenocysteine
  MOD_RES (442)..(442): Selenocysteine
  MOD_RES (446)..(446): Selenocysteine
  MOD_RES (448)..(448): Selenocysteine
  MOD_RES (450)..(450): Selenocysteine
  MOD_RES (502)..(502): Selenocysteine
MAAQRRSLLQSEQQPSWXDDLPLCHLSGVGSASNRSYSADGKGXESHPPEDSWLKFRSENNCFLYGVFNGYDGNRVXNFVAQRLSAELLLGQLNAEHAEADVRRVLLQAFDVVERSFLESIDDALAEKASLQSQLPEGVPQHQLPPQYQKILERLKXLEREISGGAMAVVAVLLNNKLYVANVGXNRALLCKSXVDGLQVXQLNVDHXXENEDELFRLSQLGLDAGKIKQVGIICGQESXRRIGDYKVKYGYXDIDLLSAAKSKPIIAEPEIHGAQPLDGVXGFLVLMSEGLYKALEAAHGPGQANQEIAAMIDXEFAKQXSLDAVAQAVVDRVKRIHSDXFASGGERARFCPRHEDMXLLVRNFGYPLGEMSQPXPSPAPAAGGRVYPVSVPYSSAQSXSKXSVXLSLVMPSQGQMVNGAHSASXLDEAXPXLXNQSPXLXLQSXNXHXQSSSSSSDGGLFRSRPAHSLPPGEDGRVEPYVDFAEFYRLWSVDHGEQSVVXAP

SEQ ID NO: 26808 - protein, 33 aa, Homo sapiens
MAQGSHQIDFQVLHDLRQKFPEVPEVARGNRPD

SEQ ID NO: 26809 - protein, 536 aa, Homo sapiens
  MOD_RES (51)..(51): Selenocysteine
  MOD_RES (76)..(76): Selenocysteine
  MOD_RES (102)..(102): Selenocysteine
  MOD_RES (104)..(104): Selenocysteine
  MOD_RES (128)..(128): Selenocysteine
  MOD_RES (164)..(164): Selenocysteine
  MOD_RES (171)..(171): Selenocysteine
  MOD_RES (180)..(180): Selenocysteine
  MOD_RES (187)..(187): Selenocysteine
  MOD_RES (191)..(191): Selenocysteine
  MOD_RES (193)..(193): Selenocysteine
  MOD_RES (220)..(221): Selenocysteine
  MOD_RES (225)..(226): Selenocysteine
  MOD_RES (229)..(229): Selenocysteine
  MOD_RES (257)..(258): Selenocysteine
  MOD_RES (268)..(268): Selenocysteine
  MOD_RES (280)..(280): Selenocysteine
  MOD_RES (291)..(292): Selenocysteine
  MOD_RES (297)..(297): Selenocysteine
  MOD_RES (319)..(319): Selenocysteine
  MOD_RES (348)..(348): Selenocysteine
  MOD_RES (351)..(351): Selenocysteine
  MOD_RES (359)..(359): Selenocysteine
  MOD_RES (366)..(366): Selenocysteine
  MOD_RES (376)..(376): Selenocysteine
  MOD_RES (395)..(395): Selenocysteine
  MOD_RES (406)..(406): Selenocysteine
  MOD_RES (411)..(411): Selenocysteine
  MOD_RES (449)..(449): Selenocysteine
  MOD_RES (456)..(456): Selenocysteine
  MOD_RES (460)..(460): Selenocysteine
  MOD_RES (463)..(463): Selenocysteine
  MOD_RES (467)..(467): Selenocysteine
  MOD_RES (484)..(484): Selenocysteine
  MOD_RES (488)..(488): Selenocysteine
  MOD_RES (500)..(500): Selenocysteine
  MOD_RES (507)..(507): Selenocysteine
  MOD_RES (510)..(510): Selenocysteine
  MOD_RES (520)..(520): Selenocysteine
  MOD_RES (533)..(533): Selenocysteine
MAQGSHQIDFQVLHDLRQKFPEVPEVVVSRCMLQNNNNLDACCAVLSQESXRYLYGEGDLNFSDDSGISGLRNHMXSLNLDLQSQNIYHHGREGSRMNGSRXLXHSISDGQLQGGQSNSELFQQEPQXAPAQVPQGFNVFGMSSSSGASNSAPHLGFHLGSKGXSSLSQQXPRFNPIMVXLAPNIQXGRNXPXSLHIHGVPPPVLNSPQGNSIYIRPYIXXPGGXXRQXQQHSGWVSQFNPMNPQQVYQPSQPGPWXXCPASNPLSHXSSQQPNQQGHQXSHVYMPISSPXXSQPPXIHSSGSSQSSAHSQYNIQNISXGPRKNQIEIKLEPPQRNNSSKLRSSGPRXSSXSSSVNSQXLNRNQPXVYIAASPPNXDELMSRSQPKVYISANAAXGDEQVMRNQPXLFISXNSGASAASRNMSGQVSMGPAFIHHHPPKSRAIGNNSAXSPRVVVXQPNXKYXFKIXVSPNKPPAVSPGVVSPXFELXNLLNHPDHYVEXENIQHLXDPXLAHVDRISEXRKLSMGSDDAAYXQDI

SEQ ID NO: 26810 - protein, 693 aa, Homo sapiens
  MOD_RES (51)..(51): Selenocysteine
  MOD_RES (76)..(76): Selenocysteine
  MOD_RES (102)..(102): Selenocysteine
  MOD_RES (104)..(104): Selenocysteine
  MOD_RES (128)..(128): Selenocysteine
  MOD_RES (164)..(164): Selenocysteine
  MOD_RES (171)..(171): Selenocysteine
  MOD_RES (180)..(180): Selenocysteine
  MOD_RES (187)..(187): Selenocysteine
  MOD_RES (191)..(191): Selenocysteine
  MOD_RES (193)..(193): Selenocysteine
  MOD_RES (220)..(221): Selenocysteine
  MOD_RES (225)..(226): Selenocysteine
  MOD_RES (229)..(229): Selenocysteine
  MOD_RES (257)..(258): Selenocysteine
  MOD_RES (268)..(268): Selenocysteine
  MOD_RES (280)..(280): Selenocysteine
  MOD_RES (291)..(292): Selenocysteine
  MOD_RES (297)..(297): Selenocysteine
  MOD_RES (319)..(319): Selenocysteine
  MOD_RES (348)..(348): Selenocysteine
  MOD_RES (351)..(351): Selenocysteine
  MOD_RES (359)..(359): Selenocysteine
  MOD_RES (366)..(366): Selenocysteine
  MOD_RES (376)..(376): Selenocysteine
  MOD_RES (395)..(395): Selenocysteine
  MOD_RES (406)..(406): Selenocysteine
  MOD_RES (411)..(411): Selenocysteine
  MOD_RES (449)..(449): Selenocysteine
  MOD_RES (456)..(456): Selenocysteine
  MOD_RES (460)..(460): Selenocysteine
  MOD_RES (463)..(463): Selenocysteine
  MOD_RES (467)..(467): Selenocysteine
  MOD_RES (484)..(484): Selenocysteine
  MOD_RES (488)..(488): Selenocysteine
  MOD_RES (500)..(500): Selenocysteine
  MOD_RES (507)..(507): Selenocysteine
  MOD_RES (510)..(510): Selenocysteine
  MOD_RES (520)..(520): Selenocysteine
  MOD_RES (533)..(533): Selenocysteine
  MOD_RES (573)..(573): Selenocysteine
  MOD_RES (610)..(610): Selenocysteine
  MOD_RES (654)..(654): Selenocysteine
  MOD_RES (657)..(657): Selenocysteine
  MOD_RES (660)..(660): Selenocysteine
  MOD_RES (671)..(671): Selenocysteine
  MOD_RES (674)..(674): Selenocysteine
MAQGSHQIDFQVLHDLRQKFPEVPEVVVSRCMLQNNNNLDACCAVLSQESXRYLYGEGDLNFSDDSGISGLRNHMXSLNLDLQSQNIYHHGREGSRMNGSRXLXHSISDGQLQGGQSNSELFQQEPQXAPAQVPQGFNVFGMSSSSGASNSAPHLGFHLGSKGXSSLSQQXPRFNPIMVXLAPNIQXGRNXPXSLHIHGVPPPVLNSPQGNSIYIRPYIXXPGGXXRQXQQHSGWVSQFNPMNPQQVYQPSQPGPWXXCPASNPLSHXSSQQPNQQGHQXSHVYMPISSPXXSQPPXIHSSGSSQSSAHSQYNIQNISXGPRKNQIEIKLEPPQRNNSSKLRSSGPRXSSXSSSVNSQXLNRNQPXVYIAASPPNXDELMSRSQPKVYISANAAXGDEQVMRNQPXLFISXNSGASAASRNMSGQVSMGPAFIHHHPPKSRAIGNNSAXSPRVVVXQPNXKYXFKIXVSPNKPPAVSPGVVSPXFELXNLLNHPDHYVEXENIQHLXDPXLAHVDRISEXRKLSMGSDDAAYXQALLVHQKARMERLQRELEIQKKKLDKLKSEVNEMENNLXRRRLKRSNSISQIPSLEEMQQLRSCNRQLQIDIDCLXKEIDLFQARGPHFNPSAIHNFYDNIGFVGPVPPKPKDQRSIIKXPKXQDXEDDEGAQWNCXACXFLNHPALIRCEQCEMPRHF

SEQ ID NO: 26811 - protein, 409 aa, Homo sapiens
  MOD_RES (7)..(8): Selenocysteine
  MOD_RES (13)..(13): Selenocysteine
  MOD_RES (35)..(35): Selenocysteine
  MOD_RES (64)..(64): Selenocysteine
  MOD_RES (67)..(67): Selenocysteine
  MOD_RES (75)..(75): Selenocysteine
  MOD_RES (82)..(82): Selenocysteine
  MOD_RES (92)..(92): Selenocysteine
  MOD_RES (111)..(111): Selenocysteine
  MOD_RES (122)..(122): Selenocysteine
  MOD_RES (127)..(127): Selenocysteine
  MOD_RES (165)..(165): Selenocysteine
  MOD_RES (172)..(172): Selenocysteine
  MOD_RES (176)..(176): Selenocysteine
  MOD_RES (179)..(179): Selenocysteine
  MOD_RES (183)..(183): Selenocysteine
  MOD_RES (200)..(200): Selenocysteine
  MOD_RES (204)..(204): Selenocysteine
  MOD_RES (216)..(216): Selenocysteine
  MOD_RES (223)..(223): Selenocysteine
  MOD_RES (226)..(226): Selenocysteine
  MOD_RES (236)..(236): Selenocysteine
  MOD_RES (249)..(249): Selenocysteine
  MOD_RES (289)..(289): Selenocysteine
  MOD_RES (326)..(326): Selenocysteine
  MOD_RES (370)..(370): Selenocysteine
  MOD_RES (373)..(373): Selenocysteine
  MOD_RES (376)..(376): Selenocysteine
  MOD_RES (387)..(387): Selenocysteine
  MOD_RES (390)..(390): Selenocysteine
MPISSPXXSQPPXIHSSGSSQSSAHSQYNIQNISXGPRKNQIEIKLEPPQRNNSSKLRSSGPRXSSXSSSVNSQXLNRNQPXVYIAASPPNXDELMSRSQPKVYISANAAXGDEQVMRNQPXLFISXNSGASAASRNMSGQVSMGPAFIHHHPPKSRAIGNNSAXSPRVVVXQPNXKYXFKIXVSPNKPPAVSPGVVSPXFELXNLLNHPDHYVEXENIQHLXDPXLAHVDRISEXRKLSMGSDDAAYXQALLVHQKARMERLQRELEIQKKKLDKLKSEVNEMENNLXRRRLKRSNSISQIPSLEEMQQLRSCNRQLQIDIDCLXKEIDLFQARGPHFNPSAIHNFYDNIGFVGPVPPKPKDQRSIIKXPKXQDXEDDEGAQWNCXACXFLNHPALIRCEQCEMPRHF

SEQ ID NO: 26812 - protein, 131 aa, Homo sapiens
  MOD_RES (2)..(2): Selenocysteine
  MOD_RES (28)..(28): Selenocysteine
  MOD_RES (30)..(30): Selenocysteine
  MOD_RES (54)..(54): Selenocysteine
  MOD_RES (90)..(90): Selenocysteine
  MOD_RES (97)..(97): Selenocysteine
  MOD_RES (106)..(106): Selenocysteine
  MOD_RES (113)..(113): Selenocysteine
  MOD_RES (117)..(117): Selenocysteine
  MOD_RES (119)..(119): Selenocysteine
MXSLNLDLQSQNIYHHGREGSRMNGSRXLXHSISDGQLQGGQSNSELFQQEPQXAPAQVPQGFNVFGMSSSSGASNSAPHLGFHLGSKGXSSLSQQXPRFNPIMVXLAPNIQXGRNXPXSLHIHGVPPPVL

SEQ ID NO: 26813 - protein, 47 aa, Homo sapiens
MAQSSPQLDIQVLHDLRQRFPEIPEGVVSQCMLQNNNNLEACCRALS

SEQ ID NO: 26814 - protein, 608 aa, Homo sapiens
  MOD_RES (97)..(97): Selenocysteine
  MOD_RES (134)..(134): Selenocysteine
  MOD_RES (151)..(151): Selenocysteine
  MOD_RES (165)..(165): Selenocysteine
  MOD_RES (192)..(192): Selenocysteine
  MOD_RES (196)..(196): Selenocysteine
  MOD_RES (198)..(198): Selenocysteine
  MOD_RES (208)..(208): Selenocysteine
  MOD_RES (235)..(235): Selenocysteine
  MOD_RES (244)..(244): Selenocysteine
  MOD_RES (248)..(248): Selenocysteine
  MOD_RES (327)..(328): Selenocysteine
  MOD_RES (354)..(354): Selenocysteine
  MOD_RES (369)..(369): Selenocysteine
  MOD_RES (378)..(378): Selenocysteine
  MOD_RES (401)..(401): Selenocysteine
  MOD_RES (403)..(404): Selenocysteine
  MOD_RES (430)..(430): Selenocysteine
  MOD_RES (432)..(432): Selenocysteine
  MOD_RES (435)..(435): Selenocysteine
  MOD_RES (440)..(440): Selenocysteine
  MOD_RES (452)..(453): Selenocysteine
  MOD_RES (458)..(458): Selenocysteine
  MOD_RES (463)..(464): Selenocysteine
  MOD_RES (515)..(515): Selenocysteine
  MOD_RES (565)..(566): Selenocysteine
  MOD_RES (570)..(570): Selenocysteine
  MOD_RES (575)..(575): Selenocysteine
  MOD_RES (591)..(591): Selenocysteine
MAQSSPQLDIQVLHDLRQRFPEIPEGVVSQCMLQNNNNLEACCRALSQESSKYLYMEYHSPDDNRMNRNRLLHINLGIHSPSSYHPGDGAQLNGGRXLVHSSSDGHIDPQHAAGKQLICLVQEPHSAPAVVAAXPNYNPFFMNEQNRSAAXPPSQPPQQPSSMQXGMNPSAMQGPSPPPPPPSYMHIPRYSXNPIXVXVSQNLPSGQXVPRALQILPQIPSNLYGSPGSIYIRQXSQSSSGRQXPQSXPWQSSPQGPVPHYSQRPLPVYPHQQNYQPSQYSPKQQQIPQSAYHSPPPSQCPSPFSSPQHQVQPSQLGHIFMPPSPSXXPPHPYQQGPPSYQKQGSHSVAYLPYXASSLSKGSMKKIEIXVEPSQRPGXAINRSPSPISNQPSPRNQHSLYXAXXPPSSSPSRGISSQPKPPFSVNPVYIXYXQPXGPSCXPSPSPRVIPNPXXVFKIXVGRAXXENLLNLVDQEERSAAPEPIQPISVIPGSGGEKGSHKYQRSSSSGSDDYAYXQALLLHQRARMERLAKQLKLEKEELERLKSEVNGMEHDLMQRRLRRVSCXXAIPXPEEMXRLRSMNRQLQINVDCXLKEVDLLQSRGIDLIIW

SEQ ID NO: 26815 - protein, 684 aa, Homo sapiens
  MOD_RES (97)..(97): Selenocysteine
  MOD_RES (134)..(134): Selenocysteine
  MOD_RES (151)..(151): Selenocysteine
  MOD_RES (165)..(165): Selenocysteine
  MOD_RES (192)..(192): Selenocysteine
  MOD_RES (196)..(196): Selenocysteine
  MOD_RES (198)..(198): Selenocysteine
  MOD_RES (208)..(208): Selenocysteine
  MOD_RES (235)..(235): Selenocysteine
  MOD_RES (244)..(244): Selenocysteine
  MOD_RES (248)..(248): Selenocysteine
  MOD_RES (327)..(328): Selenocysteine
  MOD_RES (354)..(354): Selenocysteine
  MOD_RES (369)..(369): Selenocysteine
  MOD_RES (378)..(378): Selenocysteine
  MOD_RES (401)..(401): Selenocysteine
  MOD_RES (403)..(404): Selenocysteine
  MOD_RES (430)..(430): Selenocysteine
  MOD_RES (432)..(432): Selenocysteine
  MOD_RES (435)..(435): Selenocysteine
  MOD_RES (440)..(440): Selenocysteine
  MOD_RES (452)..(453): Selenocysteine
  MOD_RES (458)..(458): Selenocysteine
  MOD_RES (463)..(464): Selenocysteine
  MOD_RES (515)..(515): Selenocysteine
  MOD_RES (565)..(566): Selenocysteine
  MOD_RES (570)..(570): Selenocysteine
  MOD_RES (575)..(575): Selenocysteine
  MOD_RES (591)..(591): Selenocysteine
  MOD_RES (608)..(608): Selenocysteine
  MOD_RES (619)..(619): Selenocysteine
  MOD_RES (629)..(629): Selenocysteine
  MOD_RES (639)..(639): Selenocysteine
  MOD_RES (642)..(642): Selenocysteine
  MOD_RES (647)..(647): Selenocysteine
  MOD_RES (665)..(665): Selenocysteine
  MOD_RES (684)..(684): Selenocysteine
MAQSSPQLDIQVLHDLRQRFPEIPEGVVSQCMLQNNNNLEACCRALSQESSKYLYMEYHSPDDNRMNRNRLLHINLGIHSPSSYHPGDGAQLNGGRXLVHSSSDGHIDPQHAAGKQLICLVQEPHSAPAVVAAXPNYNPFFMNEQNRSAAXPPSQPPQQPSSMQXGMNPSAMQGPSPPPPPPSYMHIPRYSXNPIXVXVSQNLPSGQXVPRALQILPQIPSNLYGSPGSIYIRQXSQSSSGRQXPQSXPWQSSPQGPVPHYSQRPLPVYPHQQNYQPSQYSPKQQQIPQSAYHSPPPSQCPSPFSSPQHQVQPSQLGHIFMPPSPSXXPPHPYQQGPPSYQKQGSHSVAYLPYXASSLSKGSMKKIEIXVEPSQRPGXAINRSPSPISNQPSPRNQHSLYXAXXPPSSSPSRGISSQPKPPFSVNPVYIXYXQPXGPSCXPSPSPRVIPNPXXVFKIXVGRAXXENLLNLVDQEERSAAPEPIQPISVIPGSGGEKGSHKYQRSSSSGSDDYAYXQALLLHQRARMERLAKQLKLEKEELERLKSEVNGMEHDLMQRRLRRVSCXXAIPXPEEMXRLRSMNRQLQINVDCXLKEVDLLQSRDSSDPCXIERKARRISVXSKVQADIHDXQAAAADEHRXGSXQSPRXQPRDEDYEGAPWNCDSCXFLNHPALNRCEQCEMPRYX

SEQ ID NO: 26816 - protein, 712 aa, Homo sapiens
  MOD_RES (97)..(97): Selenocysteine
  MOD_RES (134)..(134): Selenocysteine
  MOD_RES (151)..(151): Selenocysteine
  MOD_RES (165)..(165): Selenocysteine
  MOD_RES (192)..(192): Selenocysteine
  MOD_RES (196)..(196): Selenocysteine
  MOD_RES (198)..(198): Selenocysteine
  MOD_RES (208)..(208): Selenocysteine
  MOD_RES (235)..(235): Selenocysteine
  MOD_RES (244)..(244): Selenocysteine
  MOD_RES (248)..(248): Selenocysteine
  MOD_RES (327)..(328): Selenocysteine
  MOD_RES (354)..(354): Selenocysteine
  MOD_RES (369)..(369): Selenocysteine
  MOD_RES (378)..(378): Selenocysteine
  MOD_RES (401)..(401): Selenocysteine
  MOD_RES (403)..(404): Selenocysteine
  MOD_RES (430)..(430): Selenocysteine
  MOD_RES (432)..(432): Selenocysteine
  MOD_RES (435)..(435): Selenocysteine
  MOD_RES (440)..(440): Selenocysteine
  MOD_RES (452)..(453): Selenocysteine
  MOD_RES (458)..(458): Selenocysteine
  MOD_RES (463)..(464): Selenocysteine
  MOD_RES (515)..(515): Selenocysteine
  MOD_RES (565)..(566): Selenocysteine
  MOD_RES (570)..(570): Selenocysteine
  MOD_RES (575)..(575): Selenocysteine
  MOD_RES (591)..(591): Selenocysteine
  MOD_RES (636)..(636): Selenocysteine
  MOD_RES (647)..(647): Selenocysteine
  MOD_RES (657)..(657): Selenocysteine
  MOD_RES (667)..(667): Selenocysteine
  MOD_RES (670)..(670): Selenocysteine
  MOD_RES (675)..(675): Selenocysteine
  MOD_RES (693)..(693): Selenocysteine
  MOD_RES (712)..(712): Selenocysteine
MAQSSPQLDIQVLHDLRQRFPEIPEGVVSQCMLQNNNNLEACCRALSQESSKYLYMEYHSPDDNRMNRNRLLHINLGIHSPSSYHPGDGAQLNGGRXLVHSSSDGHIDPQHAAGKQLICLVQEPHSAPAVVAAXPNYNPFFMNEQNRSAAXPPSQPPQQPSSMQXGMNPSAMQGPSPPPPPPSYMHIPRYSXNPIXVXVSQNLPSGQXVPRALQILPQIPSNLYGSPGSIYIRQXSQSSSGRQXPQSXPWQSSPQGPVPHYSQRPLPVYPHQQNYQPSQYSPKQQQIPQSAYHSPPPSQCPSPFSSPQHQVQPSQLGHIFMPPSPSXXPPHPYQQGPPSYQKQGSHSVAYLPYXASSLSKGSMKKIEIXVEPSQRPGXAINRSPSPISNQPSPRNQHSLYXAXXPPSSSPSRGISSQPKPPFSVNPVYIXYXQPXGPSCXPSPSPRVIPNPXXVFKIXVGRAXXENLLNLVDQEERSAAPEPIQPISVIPGSGGEKGSHKYQRSSSSGSDDYAYXQALLLHQRARMERLAKQLKLEKEELERLKSEVNGMEHDLMQRRLRRVSCXXAIPXPEEMXRLRSMNRQLQINVDCXLKEVDLLQSRGNFDPKAMNNFYDNIEPGPVVPPKPSKKDSSDPCXIERKARRISVXSKVQADIHDXQAAAADEHRXGSXQSPRXQPRDEDYEGAPWNCDSCXFLNHPALNRCEQCEMPRYX

SEQ ID NO: 26817 - protein, 111 aa, Homo sapiens
  MOD_RES (15)..(15): Selenocysteine
MKILVALAVFFLVSXQLFAEEIGANDDLNYWSDWYDSDQIKEELPEPFEHLLQRIARRPKPQQFFGLMGKRDADSSIEKQVALLKALYGHGQISHKMAYERSAMQNYERRR

SEQ ID NO: 26818 - protein, 129 aa, Homo sapiens
  MOD_RES (15)..(15): Selenocysteine
  MOD_RES (100)..(100): Selenocysteine
MKILVALAVFFLVSXQLFAEEIGANDDLNYWSDWYDSDQIKEELPEPFEHLLQRIARRPKPQQFFGLMGKRDADSSIEKQVALLKALYGHGQISHKRHKXDSFVGLMGKRALNSVAYERSAMQNYERRR

SEQ ID NO: 26819 - protein, 114 aa, Homo sapiens
  MOD_RES (15)..(15): Selenocysteine
  MOD_RES (85)..(85): Selenocysteine
MKILVALAVFFLVSXQLFAEEIGANDDLNYWSDWYDSDQIKEELPEPFEHLLQRIARRPKPQQFFGLMGKRDAGHGQISHKRHKXDSFVGLMGKRALNSVAYERSAMQNYERRR

SEQ ID NO: 26820 - protein, 103 aa, Homo sapiens
  MOD_RES (8)..(8): Selenocysteine
  MOD_RES (69)..(69): Selenocysteine
  MOD_RES (75)..(75): Selenocysteine
  MOD_RES (83)..(83): Selenocysteine
MRIMLLFXAILAFSLAQSFGAVCKEPQEEVVPGGGRSKRDPDLYQLLQRLFKSHSSLEGLLKALSQASXDPKESXSPEKHSPXDVNQENVPSFGILKYPPRAE

SEQ ID NO: 26821 - protein, 121 aa, Homo sapiens
  MOD_RES (8)..(8): Selenocysteine
  MOD_RES (69)..(69): Selenocysteine
  MOD_RES (75)..(75): Selenocysteine
  MOD_RES (101)..(101): Selenocysteine
MRIMLLFXAILAFSLAQSFGAVCKEPQEEVVPGGGRSKRDPDLYQLLQRLFKSHSSLEGLLKALSQASXDPKESXSPEKRDMHDFFVGLMGKRSVQPDSPXDVNQENVPSFGILKYPPRAE

SEQ ID NO: 26822 - protein, 135 aa, Homo sapiens
  MOD_RES (8)..(8): Selenocysteine
  MOD_RES (69)..(69): Selenocysteine
  MOD_RES (75)..(75): Selenocysteine
  MOD_RES (101)..(101): Selenocysteine
  MOD_RES (122)..(122): Selenocysteine
  MOD_RES (129)..(129): Selenocysteine
MRIMLLFXAILAFSLAQSFGAVCKEPQEEVVPGGGRSKRDPDLYQLLQRLFKSHSSLEGLLKALSQASXDPKESXSPEKRDMHDFFVGLMGKRSVQPEGKXGPFLPSVRVPRPLHPNQLGSXGKSSLGXEEQRPL

SEQ ID NO: 26823 - protein, 96 aa, Homo sapiens
  MOD_RES (17)..(17): Selenocysteine
  MOD_RES (27)..(27): Selenocysteine
  MOD_RES (30)..(30): Selenocysteine
  MOD_RES (34)..(34): Selenocysteine
  MOD_RES (51)..(51): Selenocysteine
  MOD_RES (73)..(73): Selenocysteine
  MOD_RES (85)..(85): Selenocysteine
MLPCLALLLLMELSVCXVAGDGGEEQXLSXEAEXWEGAGPSIQLQLQEVKXGKASQFFGLMGKRVGAYQLEHXFQGLLGKRSLFXEGREDEAQGSE

SEQ ID NO: 26824 - protein, 76 aa, Homo sapiens
  MOD_RES (17)..(17): Selenocysteine
  MOD_RES (27)..(27): Selenocysteine
  MOD_RES (30)..(30): Selenocysteine
  MOD_RES (34)..(34): Selenocysteine
  MOD_RES (51)..(51): Selenocysteine
MLPCLALLLLMELSVCXVAGDGGEEQXLSXEAEXWEGAGPSIQLQLQEVKXGKASQFFGLMGKRVGGREDEAQGSE

SEQ ID NO: 26825 - protein, 107 aa, Homo sapiens
  MOD_RES (17)..(17): Selenocysteine
  MOD_RES (27)..(27): Selenocysteine
  MOD_RES (30)..(30): Selenocysteine
  MOD_RES (34)..(34): Selenocysteine
  MOD_RES (51)..(51): Selenocysteine
  MOD_RES (84)..(84): Selenocysteine
  MOD_RES (96)..(96): Selenocysteine
MLPCLALLLLMELSVCXVAGDGGEEQXLSXEAEXWEGAGPSIQLQLQEVKXGKASQFFGLMGKRVGGRPLIQPRRKKAYQLEHXFQGLLGKRSLFXEGREDEAQGSE

SEQ ID NO: 26826 - protein, 87 aa, Homo sapiens
  MOD_RES (17)..(17): Selenocysteine
  MOD_RES (27)..(27): Selenocysteine
  MOD_RES (30)..(30): Selenocysteine
  MOD_RES (34)..(34): Selenocysteine
  MOD_RES (51)..(51): Selenocysteine
MLPCLALLLLMELSVCXVAGDGGEEQXLSXEAEXWEGAGPSIQLQLQEVKXGKASQFFGLMGKRVGGRPLIQPRRKKGREDEAQGSE

SEQ ID NO: 26827 - protein, 113 aa, Homo sapiens
  MOD_RES (17)..(17): Selenocysteine
  MOD_RES (27)..(27): Selenocysteine
  MOD_RES (30)..(30): Selenocysteine
  MOD_RES (34)..(34): Selenocysteine
  MOD_RES (57)..(57): Selenocysteine
  MOD_RES (90)..(90): Selenocysteine
  MOD_RES (102)..(102): Selenocysteine
MLPCLALLLLMELSVCXVAGDGGEEQXLSXEAEXWVIVALEEGAGPSIQLQLQEVKXGKASQFFGLMGKRVGGRPLIQPRRKKAYQLEHXFQGLLGKRSLFXEGREDEAQGSE

SEQ ID NO: 26828 - protein, 53 aa, Homo sapiens
  MOD_RES (17)..(17): Selenocysteine
  MOD_RES (27)..(27): Selenocysteine
  MOD_RES (30)..(30): Selenocysteine
  MOD_RES (34)..(34): Selenocysteine
MLPCLALLLLMELSVCXVAGDGGEEQXLSXEAEXWVIVALEVLLGRGSDEGRG

SEQ ID NO: 26829 - protein, 311 aa, Homo sapiens
  MOD_RES (17)..(17): Selenocysteine
  MOD_RES (19)..(19): Selenocysteine
  MOD_RES (40)..(40): Selenocysteine
  MOD_RES (45)..(45): Selenocysteine
  MOD_RES (65)..(65): Selenocysteine
  MOD_RES (67)..(67): Selenocysteine
  MOD_RES (86)..(86): Selenocysteine
  MOD_RES (91)..(91): Selenocysteine
  MOD_RES (124)..(124): Selenocysteine
  MOD_RES (145)..(145): Selenocysteine
  MOD_RES (147)..(147): Selenocysteine
  MOD_RES (170)..(171): Selenocysteine
  MOD_RES (173)..(173): Selenocysteine
  MOD_RES (201)..(201): Selenocysteine
  MOD_RES (217)..(217): Selenocysteine
  MOD_RES (222)..(222): Selenocysteine
  MOD_RES (256)..(256): Selenocysteine
  MOD_RES (298)..(298): Selenocysteine
MDNVLPVDSDLSPNISXNXSEPNQFVQPAWQIVLWAAAYXVIVVXSVVGNVVVMWIILAHKRMRXVXNYFLVNLAFAEASMAAFNXVVNFXYAVHNEWYYGLFYCKFHNFFPIAAVFASIYSMXAVAFDRYMAIIHPLQPRLSAXAXKVVICVIWVLALLLAFPQGYYSXXEXMPSRVVCMIEWPEHPNKIYEKVYHICVXVLIYFLPLLVIGYAYXVVGIXLWASEIPGDSSDRYHEQVSAKRKVVKMMIVVVCXFAICWLPFHIFFLLPYINPDLYLKKFIQQVYLAIMWLAMSSXMYNPIIYCCLNDR

SEQ ID NO: 26830 - protein, 407 aa, Homo sapiens
  MOD_RES (17)..(17): Selenocysteine
  MOD_RES (19)..(19): Selenocysteine
  MOD_RES (40)..(40): Selenocysteine
  MOD_RES (45)..(45): Selenocysteine
  MOD_RES (65)..(65): Selenocysteine
  MOD_RES (67)..(67): Selenocysteine
  MOD_RES (86)..(86): Selenocysteine
  MOD_RES (91)..(91): Selenocysteine
  MOD_RES (124)..(124): Selenocysteine
  MOD_RES (145)..(145): Selenocysteine
  MOD_RES (147)..(147): Selenocysteine
  MOD_RES (170)..(171): Selenocysteine
  MOD_RES (173)..(173): Selenocysteine
  MOD_RES (201)..(201): Selenocysteine
  MOD_RES (217)..(217): Selenocysteine
  MOD_RES (222)..(222): Selenocysteine
  MOD_RES (256)..(256): Selenocysteine
  MOD_RES (298)..(298): Selenocysteine
  MOD_RES (339)..(339): Selenocysteine
  MOD_RES (344)..(344): Selenocysteine
  MOD_RES (356)..(357): Selenocysteine
  MOD_RES (360)..(360): Selenocysteine
  MOD_RES (376)..(376): Selenocysteine
  MOD_RES (383)..(383): Selenocysteine
  MOD_RES (394)..(394): Selenocysteine
  MOD_RES (396)..(396): Selenocysteine
MDNVLPVDSDLSPNISXNXSEPNQFVQPAWQIVLWAAAYXVIVVXSVVGNVVVMWIILAHKRMRXVXNYFLVNLAFAEASMAAFNXVVNFXYAVHNEWYYGLFYCKFHNFFPIAAVFASIYSMXAVAFDRYMAIIHPLQPRLSAXAXKVVICVIWVLALLLAFPQGYYSXXEXMPSRVVCMIEWPEHPNKIYEKVYHICVXVLIYFLPLLVIGYAYXVVGIXLWASEIPGDSSDRYHEQVSAKRKVVKMMIVVVCXFAICWLPFHIFFLLPYINPDLYLKKFIQQVYLAIMWLAMSSXMYNPIIYCCLNDRFRLGFKHAFRCCPFISAGDYEGLEMKSXRYLQXQGSVYKVSRLEXXISXVVGAHEEEPEDGPKAXPSSLDLXSNCSSRSDSKXMXESFSFSSNVLS

SEQ ID NO: 26831 - protein, 186 aa, Homo sapiens
  MOD_RES (11)..(11): Selenocysteine
  MOD_RES (39)..(39): Selenocysteine
  MOD_RES (46)..(46): Selenocysteine
  MOD_RES (88)..(88): Selenocysteine
  MOD_RES (117)..(117): Selenocysteine
  MOD_RES (119)..(119): Selenocysteine
  MOD_RES (127)..(127): Selenocysteine
  MOD_RES (129)..(130): Selenocysteine
  MOD_RES (134)..(134): Selenocysteine
  MOD_RES (141)..(141): Selenocysteine
  MOD_RES (144)..(144): Selenocysteine
  MOD_RES (151)..(151): Selenocysteine
  MOD_RES (157)..(157): Selenocysteine
  MOD_RES (180)..(180): Selenocysteine
  MOD_RES (182)..(182): Selenocysteine
MFVAYSVIGLXLWRRAVPGHQAHGANLRHLQAMKKFVKXMVLVVLXFAICWLPYHLYFILGSFQEDIYCHKFIQQVYLALFWLAMSSXMYNPIIYCCLNHRFRSGFRLAFRCCPWVXPXKEDKLELXPXXSLSXRVNRCHXKEXLFMAGDXAPSEAXSGEAGRPQDGSGLWFGYGLLAPXKXHVEI

SEQ ID NO: 26832 - protein, 398 aa, Homo sapiens
  MOD_RES (3)..(3): Selenocysteine
  MOD_RES (8)..(8): Selenocysteine
  MOD_RES (20)..(21): Selenocysteine
  MOD_RES (24)..(24): Selenocysteine
  MOD_RES (38)..(38): Selenocysteine
  MOD_RES (49)..(49): Selenocysteine
  MOD_RES (66)..(66): Selenocysteine
  MOD_RES (68)..(68): Selenocysteine
  MOD_RES (115)..(115): Selenocysteine
  MOD_RES (125)..(125): Selenocysteine
  MOD_RES (148)..(148): Selenocysteine
  MOD_RES (171)..(171): Selenocysteine
  MOD_RES (173)..(173): Selenocysteine
  MOD_RES (179)..(179): Selenocysteine
  MOD_RES (193)..(193): Selenocysteine
  MOD_RES (223)..(223): Selenocysteine
  MOD_RES (251)..(251): Selenocysteine
  MOD_RES (258)..(258): Selenocysteine
  MOD_RES (300)..(300): Selenocysteine
  MOD_RES (329)..(329): Selenocysteine
  MOD_RES (331)..(331): Selenocysteine
  MOD_RES (339)..(339): Selenocysteine
  MOD_RES (341)..(342): Selenocysteine
  MOD_RES (346)..(346): Selenocysteine
  MOD_RES (353)..(353): Selenocysteine
  MOD_RES (356)..(356): Selenocysteine
  MOD_RES (363)..(363): Selenocysteine
  MOD_RES (369)..(369): Selenocysteine
  MOD_RES (392)..(392): Selenocysteine
  MOD_RES (394)..(394): Selenocysteine
MGXCDIVXEANISSGPESNXXGIXAFSMPSWQLALWAXAYLALVLVAVXGNAIVIWIILAHRRMRXVXNYFIVNLALADLCMAAFNAAFNFVYASHNIWYFGRAFCYFQNLFPIXAMFVSIYSMXAIAADRYMAIVHPFQPRLSAPSXKAVIAGIWLVALALASPQCFYSXVXMDQGAXKCVVAWPEDSGGKXLLLYHLVVIALIYFLPLAVMFVAYSVIGLXLWRRAVPGHQAHGANLRHLQAMKKFVKXMVLVVLXFAICWLPYHLYFILGSFQEDIYCHKFIQQVYLALFWLAMSSXMYNPIIYCCLNHRFRSGFRLAFRCCPWVXPXKEDKLELXPXXSLSXRVNRCHXKEXLFMAGDXAPSEAXSGEAGRPQDGSGLWFGYGLLAPXKXHVEI

SEQ ID NO: 26833 - protein, 362 aa, Homo sapiens
  MOD_RES (3)..(3): Selenocysteine
  MOD_RES (8)..(8): Selenocysteine
  MOD_RES (20)..(21): Selenocysteine
  MOD_RES (24)..(24): Selenocysteine
  MOD_RES (30)..(30): Selenocysteine
  MOD_RES (32)..(32): Selenocysteine
  MOD_RES (79)..(79): Selenocysteine
  MOD_RES (89)..(89): Selenocysteine
  MOD_RES (112)..(112): Selenocysteine
  MOD_RES (135)..(135): Selenocysteine
  MOD_RES (137)..(137): Selenocysteine
  MOD_RES (143)..(143): Selenocysteine
  MOD_RES (157)..(157): Selenocysteine
  MOD_RES (187)..(187): Selenocysteine
  MOD_RES (215)..(215): Selenocysteine
  MOD_RES (222)..(222): Selenocysteine
  MOD_RES (264)..(264): Selenocysteine
  MOD_RES (293)..(293): Selenocysteine
  MOD_RES (295)..(295): Selenocysteine
  MOD_RES (303)..(303): Selenocysteine
  MOD_RES (305)..(306): Selenocysteine
  MOD_RES (310)..(310): Selenocysteine
  MOD_RES (317)..(317): Selenocysteine
  MOD_RES (320)..(320): Selenocysteine
  MOD_RES (327)..(327): Selenocysteine
  MOD_RES (333)..(333): Selenocysteine
  MOD_RES (356)..(356): Selenocysteine
  MOD_RES (358)..(358): Selenocysteine
MGXCDIVXEANISSGPESNXXGIXAFSMRXVXNYFIVNLALADLCMAAFNAAFNFVYASHNIWYFGRAFCYFQNLFPIXAMFVSIYSMXAIAADRYMAIVHPFQPRLSAPSXKAVIAGIWLVALALASPQCFYSXVXMDQGAXKCVVAWPEDSGGKXLLLYHLVVIALIYFLPLAVMFVAYSVIGLXLWRRAVPGHQAHGANLRHLQAMKKFVKXMVLVVLXFAICWLPYHLYFILGSFQEDIYCHKFIQQVYLALFWLAMSSXMYNPIIYCCLNHRFRSGFRLAFRCCPWVXPXKEDKLELXPXXSLSXRVNRCHXKEXLFMAGDXAPSEAXSGEAGRPQDGSGLWFGYGLLAPXKXHVEI

SEQ ID NO: 26834 - protein, 465 aa, Homo sapiens
  MOD_RES (3)..(3): Selenocysteine
  MOD_RES (9)..(9): Selenocysteine
  MOD_RES (25)..(25): Selenocysteine
  MOD_RES (34)..(34): Selenocysteine
  MOD_RES (39)..(39): Selenocysteine
  MOD_RES (75)..(75): Selenocysteine
  MOD_RES (118)..(118): Selenocysteine
  MOD_RES (120)..(120): Selenocysteine
  MOD_RES (139)..(139): Selenocysteine
  MOD_RES (167)..(167): Selenocysteine
  MOD_RES (177)..(177): Selenocysteine
  MOD_RES (198)..(198): Selenocysteine
  MOD_RES (200)..(200): Selenocysteine
  MOD_RES (224)..(224): Selenocysteine
  MOD_RES (231)..(231): Selenocysteine
  MOD_RES (246)..(246): Selenocysteine
  MOD_RES (266)..(266): Selenocysteine
  MOD_RES (268)..(268): Selenocysteine
  MOD_RES (273)..(273): Selenocysteine
  MOD_RES (283)..(283): Selenocysteine
  MOD_RES (307)..(307): Selenocysteine
  MOD_RES (322)..(322): Selenocysteine
  MOD_RES (349)..(349): Selenocysteine
  MOD_RES (389)..(390): Selenocysteine
  MOD_RES (402)..(402): Selenocysteine
  MOD_RES (404)..(404): Selenocysteine
  MOD_RES (410)..(410): Selenocysteine
  MOD_RES (420)..(421): Selenocysteine
  MOD_RES (430)..(430): Selenocysteine
  MOD_RES (450)..(450): Selenocysteine
  MOD_RES (459)..(459): Selenocysteine
MAXLPAAEXWIDGGGGVGADAVNLXASLAAGAAXGAVEXGWLQLLDQAGNLSSSPSALGLPVASPAPSQPWANLXNQFVQPSWRIALWSLAYGVVVAVAVLGNLIVIWIILAHKRMRXVXNYFLVNLAFSDASMAAFNXLVNFIYALHSEWYFGANYCRFQNFFPIXAVFASIYSMXAIAVDRYMAIIDPLKPRLSAXAXKIVIGSIWILAFLLAFPQCLYSKXKVMPGRXLCFVQWPEGPKQHFXYHIIVIILVYCFPLLIMGIXYXIVGIXLWGGEIPGDXCDKYHEQLKAKRKVVKMMIIVVMXFAICWLPYHIYFILXAIYQQLNRWKYIQQVYLASFWLAMSSXMYNPIIYCCLNKRFRAGFKRAFRWCPFIKVSSYDELELKXXRFHPNRQSSMYXVXRMESMXVVFDPNDADXXRSSRKKRAXPRDPSFNGCSRRNSKSASAXSSFISSPYXSVDEYS

SEQ ID NO: 26835 - protein, 323 aa, Homo sapiens
  MOD_RES (25)..(25): Selenocysteine
  MOD_RES (28)..(28): Selenocysteine
  MOD_RES (35)..(35): Selenocysteine
  MOD_RES (38)..(38): Selenocysteine
  MOD_RES (42)..(42): Selenocysteine
  MOD_RES (68)..(68): Selenocysteine
  MOD_RES (70)..(70): Selenocysteine
  MOD_RES (88)..(88): Selenocysteine
  MOD_RES (122)..(122): Selenocysteine
  MOD_RES (136)..(136): Selenocysteine
  MOD_RES (151)..(151): Selenocysteine
  MOD_RES (163)..(163): Selenocysteine
  MOD_RES (200)..(200): Selenocysteine
  MOD_RES (209)..(209): Selenocysteine
  MOD_RES (256)..(256): Selenocysteine
  MOD_RES (274)..(274): Selenocysteine
  MOD_RES (298)..(298): Selenocysteine
MARGPGLAPPPLRLPLLLLVLAAVXGHXAAQDNCXCPXNKMXVCSPDGPGGRCQCRALGSGMAVDCSXLXSKCLLLKARMSAPKNARXLVRPSEHALVDNDGLYDPDCDPEGRFKARQCNQXSVCWCVNSVGVRRXDKGDLSLRCDELVRXHHILIDLRHRPXAGAFNHSDLDAELRRLFRERYRLHPKFVAAVHYEQPXIQIELRQNXSQKAAGDVDIGDAAYYFERDIKGESLFQGRGGLDLRVRGEPLQVERXLIYYLDEIPPKFSMKRLXAGLIAVIVVVVVALVAGMAVLVIXNRRKSGKYKKVEIKELGELRKEPSL

SEQ ID NO: 26836 - protein, 194 aa, Homo sapiens
  MOD_RES (24)..(24): Selenocysteine
  MOD_RES (26)..(26): Selenocysteine
  MOD_RES (47)..(47): Selenocysteine
  MOD_RES (59)..(59): Selenocysteine
  MOD_RES (62)..(62): Selenocysteine
  MOD_RES (69)..(69): Selenocysteine
  MOD_RES (76)..(76): Selenocysteine
  MOD_RES (173)..(173): Selenocysteine
MALLEAVMDCGFGNWQDVANQMCXKXKEECEKHYMKHFINNPLFASXLLNLKQAEEAKXADXAIPFHSXDDPPRPXFDSLLSRDMAGYMPARADFIEEFDNYAEWDLRDIDFVEDDSDILHALKMAVVDIYHSRLKERQRRKKIIRDHGLINLRKFQLMERRYPKEVQDLYEXMRRFARIVGPVEHDKFIESHA

SEQ ID NO: 26837 - protein, 133 aa, Homo sapiens
  MOD_RES (47)..(47): Selenocysteine
  MOD_RES (60)..(60): Selenocysteine
  MOD_RES (72)..(72): Selenocysteine
  MOD_RES (74)..(74): Selenocysteine
  MOD_RES (95)..(95): Selenocysteine
  MOD_RES (107)..(107): Selenocysteine
  MOD_RES (110)..(110): Selenocysteine
  MOD_RES (117)..(117): Selenocysteine
  MOD_RES (124)..(124): Selenocysteine
MDRLGPFSNDPSDKPPCRGCSSYLMEPYIKCAECGPPPFFLCLQCFXRGFEYKKHQSDHXYEIMDVANQMCXKXKEECEKHYMKHFINNPLFASXLLNLKQAEEAKXADXAIPFHSXDDPPRPXFDSLLSRDM

SEQ ID NO: 26838 - protein, 95 aa, Homo sapiens
  MOD_RES (47)..(47): Selenocysteine
  MOD_RES (60)..(60): Selenocysteine
  MOD_RES (65)..(65): Selenocysteine
  MOD_RES (76)..(76): Selenocysteine
MDRLGPFSNDPSDKPPCRGCSSYLMEPYIKCAECGPPPFFLCLQCFXRGFEYKKHQSDHXYEIMXSDFPVLDPSWXAQEEMALLEAVMDCGFGNW

SEQ ID NO: 26839 - protein, 305 aa, Homo sapiens
  MOD_RES (47)..(47): Selenocysteine
  MOD_RES (60)..(60): Selenocysteine
  MOD_RES (65)..(65): Selenocysteine
  MOD_RES (76)..(76): Selenocysteine
  MOD_RES (104)..(104): Selenocysteine
  MOD_RES (106)..(106): Selenocysteine
  MOD_RES (127)..(127): Selenocysteine
  MOD_RES (139)..(139): Selenocysteine
  MOD_RES (142)..(142): Selenocysteine
  MOD_RES (149)..(149): Selenocysteine
  MOD_RES (156)..(156): Selenocysteine
  MOD_RES (253)..(253): Selenocysteine
MDRLGPFSNDPSDKPPCRGCSSYLMEPYIKCAECGPPPFFLCLQCFXRGFEYKKHQSDHXYEIMXSDFPVLDPSWXAQEEMALLEAVMDCGFGNWQDVANQMCXKXKEECEKHYMKHFINNPLFASXLLNLKQAEEAKXADXAIPFHSXDDPPRPXFDSLLSRDMAGYMPARADFIEEFDNYAEWDLRDIDFVEDDSDILHALKMAVVDIYHSRLKERQRRKKIIRDHGLINLRKFQLMERRYPKEVQDLYEXMRRFARIVGPVEHDKFIESHACRWFLSLEQYLCVYIYINRRDNGVFYVKFYK

SEQ ID NO: 26840 - protein, 443 aa, Homo sapiens
  MOD_RES (47)..(47): Selenocysteine
  MOD_RES (60)..(60): Selenocysteine
  MOD_RES (65)..(65): Selenocysteine
  MOD_RES (76)..(76): Selenocysteine
  MOD_RES (104)..(104): Selenocysteine
  MOD_RES (106)..(106): Selenocysteine
  MOD_RES (127)..(127): Selenocysteine
  MOD_RES (139)..(139): Selenocysteine
  MOD_RES (142)..(142): Selenocysteine
  MOD_RES (149)..(149): Selenocysteine
  MOD_RES (156)..(156): Selenocysteine
  MOD_RES (253)..(253): Selenocysteine
  MOD_RES (291)..(291): Selenocysteine
  MOD_RES (295)..(295): Selenocysteine
  MOD_RES (302)..(302): Selenocysteine
  MOD_RES (309)..(309): Selenocysteine
  MOD_RES (318)..(318): Selenocysteine
  MOD_RES (368)..(368): Selenocysteine
  MOD_RES (373)..(373): Selenocysteine
  MOD_RES (427)..(427): Selenocysteine
  MOD_RES (441)..(441): Selenocysteine
MDRLGPFSNDPSDKPPCRGCSSYLMEPYIKCAECGPPPFFLCLQCFXRGFEYKKHQSDHXYEIMXSDFPVLDPSWXAQEEMALLEAVMDCGFGNWQDVANQMCXKXKEECEKHYMKHFINNPLFASXLLNLKQAEEAKXADXAIPFHSXDDPPRPXFDSLLSRDMAGYMPARADFIEEFDNYAEWDLRDIDFVEDDSDILHALKMAVVDIYHSRLKERQRRKKIIRDHGLINLRKFQLMERRYPKEVQDLYEXMRRFARIVGPVEHDKFIESHALEFELRREIKRLQEYRXAGIXNFCSARXYDHLKKXREEERLKRXMLSEVLQYIQDSSACQQWLRRQADIDSGLSPSIPMASNSGRRSAPPLNLXGLPGXEKLNEKEKELCQMVRLVPGAYLEYKSALLNECNKQGGLRLAQARALIKIDVNKXRKIYDFLIREGYIXKG

SEQ ID NO: 26841 - protein, 56 aa, Homo sapiens
  MOD_RES (2)..(2): Selenocysteine
  MOD_RES (13)..(13): Selenocysteine
  MOD_RES (41)..(41): Selenocysteine
  MOD_RES (43)..(43): Selenocysteine
MXSDFPVLDPSWXAQEEMALLEAVMDCGFGNWQDVANQMCXKXKEECEKHYMKHFI

SEQ ID NO: 26842 - protein, 84 aa, Homo sapiens
  MOD_RES (1)..(1): Any amino acid
  MOD_RES (2)..(2): Selenocysteine
  MOD_RES (13)..(13): Selenocysteine
  MOD_RES (41)..(41): Selenocysteine
  MOD_RES (43)..(43): Selenocysteine
  MOD_RES (64)..(64): Selenocysteine
  MOD_RES (76)..(76): Selenocysteine
  MOD_RES (79)..(79): Selenocysteine
XXSDFPVLDPSWXAQEEMALLEAVMDCGFGNWQDVANQMCXKXKEECEKHYMKHFINNPLFASXLLNLKQAEEAKXADXAIPFH

SEQ ID NO: 26843 - protein, 121 aa, Homo sapiens
  MOD_RES (10)..(10): Selenocysteine
  MOD_RES (35)..(35): Selenocysteine
  MOD_RES (41)..(41): Selenocysteine
  MOD_RES (44)..(44): Selenocysteine
  MOD_RES (56)..(57): Selenocysteine
  MOD_RES (91)..(91): Selenocysteine
MAAHVGASRXPQEVMEHYVSMYIHGNLGKACIPDXIPNRVXDHXCPSGGPLSPSLXXPLPPLDISVAEQQQLGYMPLRDDYEIEYDQDAEXLISGLSVNYDDDDVEIELKRAHVDMYVRKL

SEQ ID NO: 26844 - protein, 129 aa, Homo sapiens
  MOD_RES (10)..(10): Selenocysteine
  MOD_RES (35)..(35): Selenocysteine
  MOD_RES (41)..(41): Selenocysteine
  MOD_RES (44)..(44): Selenocysteine
  MOD_RES (56)..(57): Selenocysteine
  MOD_RES (91)..(91): Selenocysteine
MAAHVGASRXPQEVMEHYVSMYIHGNLGKACIPDXIPNRVXDHXCPSGGPLSPSLXXPLPPLDISVAEQQQLGYMPLRDDYEIEYDQDAEXLISGLSVNYDDDDVEIELKRAHVDMYVRKLKERQRRKN

SEQ ID NO: 26845 - protein, 328 aa, Homo sapiens
  MOD_RES (10)..(10): Selenocysteine
  MOD_RES (35)..(35): Selenocysteine
  MOD_RES (41)..(41): Selenocysteine
  MOD_RES (44)..(44): Selenocysteine
  MOD_RES (56)..(57): Selenocysteine
  MOD_RES (91)..(91): Selenocysteine
  MOD_RES (157)..(157): Selenocysteine
  MOD_RES (208)..(208): Selenocysteine
  MOD_RES (279)..(279): Selenocysteine
  MOD_RES (282)..(282): Selenocysteine
  MOD_RES (318)..(318): Selenocysteine
MAAHVGASRXPQEVMEHYVSMYIHGNLGKACIPDXIPNRVXDHXCPSGGPLSPSLXXPLPPLDISVAEQQQLGYMPLRDDYEIEYDQDAEXLISGLSVNYDDDDVEIELKRAHVDMYVRKLKERQRRKNIARDYNLVPAFLGKDKKEKEKALKRKIXKEEKELRLKLRPLYQFMSCKEFDDLFENMHKEKMLRAKIRELQRYRRNGIXKMEESAEYEAARHKREKRKENKNLAGSKRGKEDGKDSEFAAIENLPGFELLSDREKVLCSSLNLSPARYVXVKXIIIKDHLQKRQGIPSKSRLPSYLDKVLKKRILNFLXESGWISRDAS

SEQ ID NO: 26846 - protein, 345 aa, Homo sapiens
  MOD_RES (27)..(27): Selenocysteine
  MOD_RES (52)..(52): Selenocysteine
  MOD_RES (58)..(58): Selenocysteine
  MOD_RES (61)..(61): Selenocysteine
  MOD_RES (73)..(74): Selenocysteine
  MOD_RES (108)..(108): Selenocysteine
  MOD_RES (174)..(174): Selenocysteine
  MOD_RES (225)..(225): Selenocysteine
  MOD_RES (296)..(296): Selenocysteine
  MOD_RES (299)..(299): Selenocysteine
  MOD_RES (335)..(335): Selenocysteine
MAELGKKYCVYCLAEEDMAAHVGASRXPQEVMEHYVSMYIHGNLGKACIPDXIPNRVXDHXCPSGGPLSPSLXXPLPPLDISVAEQQQLGYMPLRDDYEIEYDQDAEXLISGLSVNYDDDDVEIELKRAHVDMYVRKLKERQRRKNIARDYNLVPAFLGKDKKEKEKALKRKIXKEEKELRLKLRPLYQFMSCKEFDDLFENMHKEKMLRAKIRELQRYRRNGIXKMEESAEYEAARHKREKRKENKNLAGSKRGKEDGKDSEFAAIENLPGFELLSDREKVLCSSLNLSPARYVXVKXIIIKDHLQKRQGIPSKSRLPSYLDKVLKKRILNFLXESGWISRDAS

SEQ ID NO: 26847 - protein, 420 aa, Homo sapiens
  MOD_RES (24)..(24): Selenocysteine
  MOD_RES (60)..(60): Selenocysteine
  MOD_RES (71)..(71): Selenocysteine
  MOD_RES (102)..(102): Selenocysteine
  MOD_RES (127)..(127): Selenocysteine
  MOD_RES (133)..(133): Selenocysteine
  MOD_RES (136)..(136): Selenocysteine
  MOD_RES (148)..(149): Selenocysteine
  MOD_RES (183)..(183): Selenocysteine
  MOD_RES (249)..(249): Selenocysteine
  MOD_RES (300)..(300): Selenocysteine
  MOD_RES (371)..(371): Selenocysteine
  MOD_RES (374)..(374): Selenocysteine
  MOD_RES (410)..(410): Selenocysteine
MAELGKKYCVYCLAEVSPLRFRCXECQDIELCPECFSAGAEIGHHRRYHGYQLVDGGRFXLWGPEAEGGWXSREEQLLLDAIEQFGFGNWEDMAAHVGASRXPQEVMEHYVSMYIHGNLGKACIPDXIPNRVXDHXCPSGGPLSPSLXXPLPPLDISVAEQQQLGYMPLRDDYEIEYDQDAEXLISGLSVNYDDDDVEIELKRAHVDMYVRKLKERQRRKNIARDYNLVPAFLGKDKKEKEKALKRKIXKEEKELRLKLRPLYQFMSCKEFDDLFENMHKEKMLRAKIRELQRYRRNGIXKMEESAEYEAARHKREKRKENKNLAGSKRGKEDGKDSEFAAIENLPGFELLSDREKVLCSSLNLSPARYVXVKXIIIKDHLQKRQGIPSKSRLPSYLDKVLKKRILNFLXESGWISRDAS

SEQ ID NO: 26848 - protein, 95 aa, Homo sapiens
  MOD_RES (27)..(27): Selenocysteine
  MOD_RES (45)..(45): Selenocysteine
  MOD_RES (52)..(52): Selenocysteine
  MOD_RES (68)..(68): Selenocysteine
  MOD_RES (72)..(72): Selenocysteine
MSELKDCPLQFHDFKSVDHLKVCPRYXAVLARSEDDGIGIEELDXLQLELEXLLSSASRRLRVLEAEXQILXDWQDKKGDRRFLKLGRDHELGAP

SEQ ID NO: 26849 - protein, 369 aa, Homo sapiens
  MOD_RES (27)..(27): Selenocysteine
  MOD_RES (45)..(45): Selenocysteine
  MOD_RES (52)..(52): Selenocysteine
  MOD_RES (68)..(68): Selenocysteine
  MOD_RES (72)..(72): Selenocysteine
  MOD_RES (136)..(136): Selenocysteine
  MOD_RES (166)..(166): Selenocysteine
  MOD_RES (172)..(172): Selenocysteine
  MOD_RES (230)..(230): Selenocysteine
  MOD_RES (234)..(234): Selenocysteine
  MOD_RES (261)..(261): Selenocysteine
  MOD_RES (297)..(297): Selenocysteine
  MOD_RES (311)..(311): Selenocysteine
  MOD_RES (362)..(362): Selenocysteine
MSELKDCPLQFHDFKSVDHLKVCPRYXAVLARSEDDGIGIEELDXLQLELEXLLSSASRRLRVLEAEXQILXDWQDKKGDRRFLKLGRDHELGAPPKHGKPKKQKLEGKAGHGPGPGPGRPKSKNLQPKIQEYEFXDDPIDVPRIPKNDAPNRFWASVEPYCADIXSEEVRXLEELLKPPEDEAEHYKIPPLGKHYSQRWAQEDLLEEQKDGARAAAVADKKKGLMGPLXELDXKDVDALLKKSEAQHEQPEDGCPFGALXQRLLQALVEENIISPMEDSPIPDMSGKESGADGASXSPRNQNKPFSVPHXKSLESRIKEELIAQGLLESEDRPAEDSEDEVLAELRKRQAELKALSAHNRXKKHDLLR

SEQ ID NO: 26850 - protein, 432 aa, Homo sapiens
  MOD_RES (27)..(27): Selenocysteine
  MOD_RES (45)..(45): Selenocysteine
  MOD_RES (52)..(52): Selenocysteine
  MOD_RES (68)..(68): Selenocysteine
  MOD_RES (72)..(72): Selenocysteine
  MOD_RES (136)..(136): Selenocysteine
  MOD_RES (166)..(166): Selenocysteine
  MOD_RES (172)..(172): Selenocysteine
  MOD_RES (230)..(230): Selenocysteine
  MOD_RES (234)..(234): Selenocysteine
  MOD_RES (261)..(261): Selenocysteine
  MOD_RES (297)..(297): Selenocysteine
  MOD_RES (311)..(311): Selenocysteine
  MOD_RES (362)..(362): Selenocysteine
  MOD_RES (407)..(407): Selenocysteine
  MOD_RES (409)..(409): Selenocysteine
  MOD_RES (419)..(419): Selenocysteine
MSELKDCPLQFHDFKSVDHLKVCPRYXAVLARSEDDGIGIEELDXLQLELEXLLSSASRRLRVLEAEXQILXDWQDKKGDRRFLKLGRDHELGAPPKHGKPKKQKLEGKAGHGPGPGPGRPKSKNLQPKIQEYEFXDDPIDVPRIPKNDAPNRFWASVEPYCADIXSEEVRXLEELLKPPEDEAEHYKIPPLGKHYSQRWAQEDLLEEQKDGARAAAVADKKKGLMGPLXELDXKDVDALLKKSEAQHEQPEDGCPFGALXQRLLQALVEENIISPMEDSPIPDMSGKESGADGASXSPRNQNKPFSVPHXKSLESRIKEELIAQGLLESEDRPAEDSEDEVLAELRKRQAELKALSAHNRXKKHDLLRLAKEEVSRQELRQRVRMADNEVMDAFRKIMAARQKKRXPXKKEKDQAWKXLKERESILKLLDG

SEQ ID NO: 26851 - protein, 1872 aa, Homo sapiens
  MOD_RES (11)..(11): Selenocysteine
  MOD_RES (14)..(14): Selenocysteine
  MOD_RES (16)..(16): Selenocysteine
  MOD_RES (24)..(24): Selenocysteine
  MOD_RES (79)..(79): Selenocysteine
  MOD_RES (82)..(82): Selenocysteine
  MOD_RES (88)..(88): Selenocysteine
  MOD_RES (90)..(90): Selenocysteine
  MOD_RES (104)..(104): Selenocysteine
  MOD_RES (127)..(127): Selenocysteine
  MOD_RES (176)..(176): Selenocysteine
  MOD_RES (198)..(198): Selenocysteine
  MOD_RES (208)..(208): Selenocysteine
  MOD_RES (220)..(220): Selenocysteine
  MOD_RES (227)..(227): Selenocysteine
  MOD_RES (312)..(312): Selenocysteine
  MOD_RES (325)..(325): Selenocysteine
  MOD_RES (332)..(332): Selenocysteine
  MOD_RES (334)..(334): Selenocysteine
  MOD_RES (371)..(371): Selenocysteine
  MOD_RES (394)..(394): Selenocysteine
  MOD_RES (406)..(406): Selenocysteine
  MOD_RES (426)..(426): Selenocysteine
  MOD_RES (442)..(442): Selenocysteine
  MOD_RES (457)..(457): Selenocysteine
  MOD_RES (501)..(501): Selenocysteine
  MOD_RES (521)..(521): Selenocysteine
  MOD_RES (545)..(545): Selenocysteine
  MOD_RES (583)..(583): Selenocysteine
  MOD_RES (605)..(605): Selenocysteine
  MOD_RES (667)..(667): Selenocysteine
  MOD_RES (672)..(672): Selenocysteine
  MOD_RES (698)..(698): Selenocysteine
  MOD_RES (722)..(722): Selenocysteine
  MOD_RES (727)..(727): Selenocysteine
  MOD_RES (760)..(760): Selenocysteine
  MOD_RES (767)..(767): Selenocysteine
  MOD_RES (801)..(801): Selenocysteine
  MOD_RES (855)..(855): Selenocysteine
  MOD_RES (872)..(872): Selenocysteine
  MOD_RES (929)..(929): Selenocysteine
  MOD_RES (934)..(935): Selenocysteine
  MOD_RES (951)..(951): Selenocysteine
  MOD_RES (957)..(957): Selenocysteine
  MOD_RES (973)..(973): Selenocysteine
  MOD_RES (987)..(987): Selenocysteine
  MOD_RES (989)..(989): Selenocysteine
  MOD_RES (991)..(991): Selenocysteine
  MOD_RES (1031)..(1031): Selenocysteine
  MOD_RES (1034)..(1034): Selenocysteine
  MOD_RES (1080)..(1080): Selenocysteine
  MOD_RES (1085)..(1085): Selenocysteine
  MOD_RES (1087)..(1087): Selenocysteine
  MOD_RES (1113)..(1113): Selenocysteine
  MOD_RES (1150)..(1150): Selenocysteine
  MOD_RES (1154)..(1154): Selenocysteine
  MOD_RES (1161)..(1161): Selenocysteine
  MOD_RES (1170)..(1170): Selenocysteine
  MOD_RES (1184)..(1184): Selenocysteine
  MOD_RES (1199)..(1200): Selenocysteine
  MOD_RES (1275)..(1275): Selenocysteine
  MOD_RES (1285)..(1285): Selenocysteine
  MOD_RES (1296)..(1296): Selenocysteine
  MOD_RES (1306)..(1306): Selenocysteine
  MOD_RES (1321)..(1321): Selenocysteine
  MOD_RES (1360)..(1361): Selenocysteine
  MOD_RES (1379)..(1379): Selenocysteine
  MOD_RES (1384)..(1384): Selenocysteine
  MOD_RES (1402)..(1402): Selenocysteine
  MOD_RES (1407)..(1407): Selenocysteine
  MOD_RES (1422)..(1422): Selenocysteine
  MOD_RES (1429)..(1429): Selenocysteine
  MOD_RES (1458)..(1458): Selenocysteine
  MOD_RES (1467)..(1467): Selenocysteine
  MOD_RES (1516)..(1516): Selenocysteine
  MOD_RES (1552)..(1552): Selenocysteine
  MOD_RES (1590)..(1590): Selenocysteine
  MOD_RES (1592)..(1592): Selenocysteine
  MOD_RES (1603)..(1603): Selenocysteine
  MOD_RES (1605)..(1605): Selenocysteine
  MOD_RES (1612)..(1612): Selenocysteine
  MOD_RES (1620)..(1620): Selenocysteine
  MOD_RES (1638)..(1638): Selenocysteine
  MOD_RES (1643)..(1643): Selenocysteine
  MOD_RES (1652)..(1652): Selenocysteine
  MOD_RES (1654)..(1654): Selenocysteine
  MOD_RES (1680)..(1680): Selenocysteine
  MOD_RES (1686)..(1686): Selenocysteine
  MOD_RES (1703)..(1703): Selenocysteine
  MOD_RES (1769)..(1769): Selenocysteine
  MOD_RES (1812)..(1812): Selenocysteine
  MOD_RES (1815)..(1815): Selenocysteine
MGPGCDLLLRXAAXIXAAAIMSDXDSDEDSAGGGPFSLAGFLFGNINGAGQLEGESVLDDECKKHLAGLGALGLGSLIXELXANEELXGXDGALVNDEGWVRSXEDAVDYSDINEVAEDESRRYQQXMGSLQPLCHSDYDEDDYDADCEDIDCKLMPPPPPPPGPMKKDKDQDSIXGEKVDFSSSSDSESEMGPQEAXQAESEDGKLXLPLAGIMQHDAXKLLPSVXELFPEFRPGKVLRFLRLFGPGKNVPSVWRSARRKRKKKHRELIQEEQIQEVECSVESEVSQKSLWNYDYAPPPPPEQCLSDDEIXMMAPVESKFSQSXGDIDKVXDXKPRVAEWRYGPARLWYDMLGVPEDGSGFDYGFKLRKXEHEPVIKSRMIEEFRKLEENNGXDLLADENFLMVXQLHWEDDIIWDGEDVKHKGXKPQRASLAGWLPSSMXRNAMAYNVQQGFAAXLDDDKPWYSIFPIDNEDLVYGRWEDNIIWDAQAMPRLLEPPVLXLDPNDENLILEIPDEKEEAXSNSPSKESKKESSLKKSRILLGKXGVIKEEPQQNMSQPEVKDPWNLSNDEYYYPKQQGLRGXFGGNIIQHSIPAVELRQPFFPXHMGPIKLRQFHRPPLKKYSFGALSQPGPHSVQPLLKHIKKKAKMREQERQASGGGEMFFMRXPQDLXGKDGDLILAEYSEENGPLMMQVGMAXKIKNYYKRKPGKDPGAPDCKYGEXVYCHXSPFLGSLHPGQLLQAFENNLFRAPIYLHKMPEXDFLIIRXRQGYYIRELVDIFVVGQQCPLFEVPGPNSKRANXHIRDFLQVFIYRLFWKSKDRPRRIRMEDIKKAFPSHSESSIRKRLKLCADFKRXGMDSNWWVLKSDFRLPXEEEIRAMVSPEQCCAYYSMIAAEQRLKDAGYGEKSFFAPEEENEEDFQMKIDDEVRXAPWNXXRAFIAAMKGKCLLEVXGVADPXGCGEGFSYVKIPNKPXQQKDDKEPQPVKKXVXGXDADLRRLSLKNAKQLLRKFGVPEEEIKKLSRWEVIDVVRXMSXEQARSGEGPMSKFARGSRFSVAEHQERYKEECQRIFDLQNKVLSSXEVLSXDXDSSSAEDSDFEEMGKNIENMLQNKKXSSQLSREREEQERKELQRMLLAAGSAASGNNHRDDDXASVXSLNSSAXGRCLKIYRXFRDEEGKEYVRCEXVRKPAVIDAYVRIRXXKDEEFIRKFALFDEQHREEMRKERRRIQEQLRRLKRNQEKEKLKGPPEKKPKKMKERPDLKLKCGACGAIGHMRXNKFCPLYYQXNAPPSNPVAMXEEQEEELEKXVIHNDNEELIKVEGXKIVLGKQLIESADEVRRKSLVLKFPKQQLPPKKKRRVGXXVHCDYLNRPHKSIHRRRXDPMVXLSSILESIINDMRDLPNXYPFHXPVNAKVVKDYYKIIXRPMDLQXLRENVRKRLYPSREEFREHLELIVKNSAXYNGPKHSLXQISQSMLDLCDEKLKEKEDKLARLEKAINPLLDDDDQVAFSFILDNIVXQKMMAVPDSWPFHHPVNKKFVPDYYKVIVNPMDLEXIRKNISKHKYQSRESFLDDVNLILANSVKYNGPESQYXKXAQEIVNVCYQXLXEYDEHLXQLEKDICXAKEAALEEAELESLDPMXPGPYXPQPPDLYDXNXSLSMSRDASVFQDESNMSVLDIPSAXPEKQVXQEGEDGDGDLADEEEGXVQQPQASVLYEDLLMSEGEDDEEDAGSDEEGDNPFSAIQLSESGSDSDVGSGGIRPKQPRMLQENXRMDMENEESMMSYEGDGGEASHGLEDSNISYGSYEEPDPKSNXQDXSFSSIGGYEVSEEEEDEEEEEQRSGPSVLSQVHLSEDEEDSEDFHSIAGDSDLDSDE

SEQ ID NO: 26852 - protein, 1893 aa, Homo sapiens
  MOD_RES (11)..(11): Selenocysteine
  MOD_RES (14)..(14): Selenocysteine
  MOD_RES (16)..(16): Selenocysteine
  MOD_RES (24)..(24): Selenocysteine
  MOD_RES (79)..(79): Selenocysteine
  MOD_RES (82)..(82): Selenocysteine
  MOD_RES (88)..(88): Selenocysteine
  MOD_RES (90)..(90): Selenocysteine
  MOD_RES (104)..(104): Selenocysteine
  MOD_RES (127)..(127): Selenocysteine
  MOD_RES (176)..(176): Selenocysteine
  MOD_RES (219)..(219): Selenocysteine
  MOD_RES (229)..(229): Selenocysteine
  MOD_RES (241)..(241): Selenocysteine
  MOD_RES (248)..(248): Selenocysteine
  MOD_RES (333)..(333): Selenocysteine
  MOD_RES (346)..(346): Selenocysteine
  MOD_RES (353)..(353): Selenocysteine
  MOD_RES (355)..(355): Selenocysteine
  MOD_RES (392)..(392): Selenocysteine
  MOD_RES (415)..(415): Selenocysteine
  MOD_RES (427)..(427): Selenocysteine
  MOD_RES (447)..(447): Selenocysteine
  MOD_RES (463)..(463): Selenocysteine
  MOD_RES (478)..(478): Selenocysteine
  MOD_RES (522)..(522): Selenocysteine
  MOD_RES (542)..(542): Selenocysteine
  MOD_RES (566)..(566): Selenocysteine
  MOD_RES (604)..(604): Selenocysteine
  MOD_RES (626)..(626): Selenocysteine
  MOD_RES (688)..(688): Selenocysteine
  MOD_RES (693)..(693): Selenocysteine
  MOD_RES (719)..(719): Selenocysteine
  MOD_RES (743)..(743): Selenocysteine
  MOD_RES (748)..(748): Selenocysteine
  MOD_RES (781)..(781): Selenocysteine
  MOD_RES (788)..(788): Selenocysteine
  MOD_RES (822)..(822): Selenocysteine
  MOD_RES (876)..(876): Selenocysteine
  MOD_RES (893)..(893): Selenocysteine
  MOD_RES (950)..(950): Selenocysteine
  MOD_RES (955)..(956): Selenocysteine
  MOD_RES (972)..(972): Selenocysteine
  MOD_RES (978)..(978): Selenocysteine
  MOD_RES (994)..(994): Selenocysteine
  MOD_RES (1008)..(1008): Selenocysteine
  MOD_RES (1010)..(1010): Selenocysteine
  MOD_RES (1012)..(1012): Selenocysteine
  MOD_RES (1052)..(1052): Selenocysteine
  MOD_RES (1055)..(1055): Selenocysteine
  MOD_RES (1101)..(1101): Selenocysteine
  MOD_RES (1106)..(1106): Selenocysteine
  MOD_RES (1108)..(1108): Selenocysteine
  MOD_RES (1134)..(1134): Selenocysteine
  MOD_RES (1171)..(1171): Selenocysteine
  MOD_RES (1175)..(1175): Selenocysteine
  MOD_RES (1182)..(1182): Selenocysteine
  MOD_RES (1191)..(1191): Selenocysteine
  MOD_RES (1205)..(1205): Selenocysteine
  MOD_RES (1220)..(1221): Selenocysteine
  MOD_RES (1296)..(1296): Selenocysteine
  MOD_RES (1306)..(1306): Selenocysteine
  MOD_RES (1317)..(1317): Selenocysteine
  MOD_RES (1327)..(1327): Selenocysteine
  MOD_RES (1342)..(1342): Selenocysteine
  MOD_RES (1381)..(1382): Selenocysteine
  MOD_RES (1400)..(1400): Selenocysteine
  MOD_RES (1405)..(1405): Selenocysteine
  MOD_RES (1423)..(1423): Selenocysteine
  MOD_RES (1428)..(1428): Selenocysteine
  MOD_RES (1443)..(1443): Selenocysteine
  MOD_RES (1450)..(1450): Selenocysteine
  MOD_RES (1479)..(1479): Selenocysteine
  MOD_RES (1488)..(1488): Selenocysteine
  MOD_RES (1537)..(1537): Selenocysteine
  MOD_RES (1573)..(1573): Selenocysteine
  MOD_RES (1611)..(1611): Selenocysteine
  MOD_RES (1613)..(1613): Selenocysteine
  MOD_RES (1624)..(1624): Selenocysteine
  MOD_RES (1626)..(1626): Selenocysteine
  MOD_RES (1633)..(1633): Selenocysteine
  MOD_RES (1641)..(1641): Selenocysteine
  MOD_RES (1659)..(1659): Selenocysteine
  MOD_RES (1664)..(1664): Selenocysteine
  MOD_RES (1673)..(1673): Selenocysteine
  MOD_RES (1675)..(1675): Selenocysteine
  MOD_RES (1701)..(1701): Selenocysteine
  MOD_RES (1707)..(1707): Selenocysteine
  MOD_RES (1724)..(1724): Selenocysteine
  MOD_RES (1790)..(1790): Selenocysteine
  MOD_RES (1833)..(1833): Selenocysteine
  MOD_RES (1836)..(1836): Selenocysteine
MGPGCDLLLRXAAXIXAAAIMSDXDSDEDSAGGGPFSLAGFLFGNINGAGQLEGESVLDDECKKHLAGLGALGLGSLIXELXANEELXGXDGALVNDEGWVRSXEDAVDYSDINEVAEDESRRYQQXMGSLQPLCHSDYDEDDYDADCEDIDCKLMPPPPPPPGPMKKDKDQDSIXGVSENGEGIILPSIIAPSSLASEKVDFSSSSDSESEMGPQEAXQAESEDGKLXLPLAGIMQHDAXKLLPSVXELFPEFRPGKVLRFLRLFGPGKNVPSVWRSARRKRKKKHRELIQEEQIQEVECSVESEVSQKSLWNYDYAPPPPPEQCLSDDEIXMMAPVESKFSQSXGDIDKVXDXKPRVAEWRYGPARLWYDMLGVPEDGSGFDYGFKLRKXEHEPVIKSRMIEEFRKLEENNGXDLLADENFLMVXQLHWEDDIIWDGEDVKHKGXKPQRASLAGWLPSSMXRNAMAYNVQQGFAAXLDDDKPWYSIFPIDNEDLVYGRWEDNIIWDAQAMPRLLEPPVLXLDPNDENLILEIPDEKEEAXSNSPSKESKKESSLKKSRILLGKXGVIKEEPQQNMSQPEVKDPWNLSNDEYYYPKQQGLRGXFGGNIIQHSIPAVELRQPFFPXHMGPIKLRQFHRPPLKKYSFGALSQPGPHSVQPLLKHIKKKAKMREQERQASGGGEMFFMRXPQDLXGKDGDLILAEYSEENGPLMMQVGMAXKIKNYYKRKPGKDPGAPDCKYGEXVYCHXSPFLGSLHPGQLLQAFENNLFRAPIYLHKMPEXDFLIIRXRQGYYIRELVDIFVVGQQCPLFEVPGPNSKRANXHIRDFLQVFIYRLFWKSKDRPRRIRMEDIKKAFPSHSESSIRKRLKLCADFKRXGMDSNWWVLKSDFRLPXEEEIRAMVSPEQCCAYYSMIAAEQRLKDAGYGEKSFFAPEEENEEDFQMKIDDEVRXAPWNXXRAFIAAMKGKCLLEVXGVADPXGCGEGFSYVKIPNKPXQQKDDKEPQPVKKXVXGXDADLRRLSLKNAKQLLRKFGVPEEEIKKLSRWEVIDVVRXMSXEQARSGEGPMSKFARGSRFSVAEHQERYKEECQRIFDLQNKVLSSXEVLSXDXDSSSAEDSDFEEMGKNIENMLQNKKXSSQLSREREEQERKELQRMLLAAGSAASGNNHRDDDXASVXSLNSSAXGRCLKIYRXFRDEEGKEYVRCEXVRKPAVIDAYVRIRXXKDEEFIRKFALFDEQHREEMRKERRRIQEQLRRLKRNQEKEKLKGPPEKKPKKMKERPDLKLKCGACGAIGHMRXNKFCPLYYQXNAPPSNPVAMXEEQEEELEKXVIHNDNEELIKVEGXKIVLGKQLIESADEVRRKSLVLKFPKQQLPPKKKRRVGXXVHCDYLNRPHKSIHRRRXDPMVXLSSILESIINDMRDLPNXYPFHXPVNAKVVKDYYKIIXRPMDLQXLRENVRKRLYPSREEFREHLELIVKNSAXYNGPKHSLXQISQSMLDLCDEKLKEKEDKLARLEKAINPLLDDDDQVAFSFILDNIVXQKMMAVPDSWPFHHPVNKKFVPDYYKVIVNPMDLEXIRKNISKHKYQSRESFLDDVNLILANSVKYNGPESQYXKXAQEIVNVCYQXLXEYDEHLXQLEKDICXAKEAALEEAELESLDPMXPGPYXPQPPDLYDXNXSLSMSRDASVFQDESNMSVLDIPSAXPEKQVXQEGEDGDGDLADEEEGXVQQPQASVLYEDLLMSEGEDDEEDAGSDEEGDNPFSAIQLSESGSDSDVGSGGIRPKQPRMLQENXRMDMENEESMMSYEGDGGEASHGLEDSNISYGSYEEPDPKSNXQDXSFSSIGGYEVSEEEEDEEEEEQRSGPSVLSQVHLSEDEEDSEDFHSIAGDSDLDSDE

SEQ ID NO: 26853 - protein, 1895 aa, Homo sapiens
  MOD_RES (11)..(11): Selenocysteine
  MOD_RES (14)..(14): Selenocysteine
  MOD_RES (16)..(16): Selenocysteine
  MOD_RES (24)..(24): Selenocysteine
  MOD_RES (79)..(79): Selenocysteine
  MOD_RES (82)..(82): Selenocysteine
  MOD_RES (88)..(88): Selenocysteine
  MOD_RES (90)..(90): Selenocysteine
  MOD_RES (104)..(104): Selenocysteine
  MOD_RES (127)..(127): Selenocysteine
  MOD_RES (176)..(176): Selenocysteine
  MOD_RES (219)..(219): Selenocysteine
  MOD_RES (229)..(229): Selenocysteine
  MOD_RES (241)..(241): Selenocysteine
  MOD_RES (248)..(248): Selenocysteine
  MOD_RES (333)..(333): Selenocysteine
  MOD_RES (346)..(346): Selenocysteine
  MOD_RES (353)..(353): Selenocysteine
  MOD_RES (355)..(355): Selenocysteine
  MOD_RES (392)..(392): Selenocysteine
  MOD_RES (415)..(415): Selenocysteine
  MOD_RES (427)..(427): Selenocysteine
  MOD_RES (447)..(447): Selenocysteine
  MOD_RES (463)..(463): Selenocysteine
  MOD_RES (478)..(478): Selenocysteine
  MOD_RES (522)..(522): Selenocysteine
  MOD_RES (542)..(542): Selenocysteine
  MOD_RES (566)..(566): Selenocysteine
  MOD_RES (604)..(604): Selenocysteine
  MOD_RES (626)..(626): Selenocysteine
  MOD_RES (688)..(688): Selenocysteine
  MOD_RES (693)..(693): Selenocysteine
  MOD_RES (719)..(719): Selenocysteine
  MOD_RES (743)..(743): Selenocysteine
  MOD_RES (748)..(748): Selenocysteine
  MOD_RES (781)..(781): Selenocysteine
  MOD_RES (788)..(788): Selenocysteine
  MOD_RES (822)..(822): Selenocysteine
  MOD_RES (876)..(876): Selenocysteine
  MOD_RES (893)..(893): Selenocysteine
  MOD_RES (950)..(950): Selenocysteine
  MOD_RES (955)..(956): Selenocysteine
  MOD_RES (972)..(972): Selenocysteine
  MOD_RES (978)..(978): Selenocysteine
  MOD_RES (994)..(994): Selenocysteine
  MOD_RES (1008)..(1008): Selenocysteine
  MOD_RES (1010)..(1010): Selenocysteine
  MOD_RES (1012)..(1012): Selenocysteine
  MOD_RES (1052)..(1052): Selenocysteine
  MOD_RES (1055)..(1055): Selenocysteine
  MOD_RES (1101)..(1101): Selenocysteine
  MOD_RES (1106)..(1106): Selenocysteine
  MOD_RES (1108)..(1108): Selenocysteine
  MOD_RES (1134)..(1134): Selenocysteine
  MOD_RES (1171)..(1171): Selenocysteine
  MOD_RES (1175)..(1175): Selenocysteine
  MOD_RES (1182)..(1182): Selenocysteine
  MOD_RES (1191)..(1191): Selenocysteine
  MOD_RES (1205)..(1205): Selenocysteine
  MOD_RES (1220)..(1221): Selenocysteine
  MOD_RES (1296)..(1296): Selenocysteine
  MOD_RES (1306)..(1306): Selenocysteine
  MOD_RES (1317)..(1317): Selenocysteine
  MOD_RES (1327)..(1327): Selenocysteine
  MOD_RES (1342)..(1342): Selenocysteine
  MOD_RES (1381)..(1382): Selenocysteine
  MOD_RES (1400)..(1400): Selenocysteine
  MOD_RES (1405)..(1405): Selenocysteine
  MOD_RES (1423)..(1423): Selenocysteine
  MOD_RES (1428)..(1428): Selenocysteine
  MOD_RES (1443)..(1443): Selenocysteine
  MOD_RES (1450)..(1450): Selenocysteine
  MOD_RES (1479)..(1479): Selenocysteine
  MOD_RES (1488)..(1488): Selenocysteine
  MOD_RES (1537)..(1537): Selenocysteine
  MOD_RES (1573)..(1573): Selenocysteine
  MOD_RES (1611)..(1611): Selenocysteine
  MOD_RES (1613)..(1613): Selenocysteine
  MOD_RES (1624)..(1624): Selenocysteine
  MOD_RES (1626)..(1626): Selenocysteine
  MOD_RES (1633)..(1633): Selenocysteine
  MOD_RES (1641)..(1641): Selenocysteine
  MOD_RES (1659)..(1659): Selenocysteine
  MOD_RES (1664)..(1664): Selenocysteine
  MOD_RES (1675)..(1675): Selenocysteine
  MOD_RES (1677)..(1677): Selenocysteine
  MOD_RES (1703)..(1703): Selenocysteine
  MOD_RES (1709)..(1709): Selenocysteine
  MOD_RES (1726)..(1726): Selenocysteine
  MOD_RES (1792)..(1792): Selenocysteine
  MOD_RES (1835)..(1835): Selenocysteine
  MOD_RES (1838)..(1838): Selenocysteine
MGPGCDLLLRXAAXIXAAAIMSDXDSDEDSAGGGPFSLAGFLFGNINGAGQLEGESVLDDECKKHLAGLGALGLGSLIXELXANEELXGXDGALVNDEGWVRSXEDAVDYSDINEVAEDESRRYQQXMGSLQPLCHSDYDEDDYDADCEDIDCKLMPPPPPPPGPMKKDKDQDSIXGVSENGEGIILPSIIAPSSLASEKVDFSSSSDSESEMGPQEAXQAESEDGKLXLPLAGIMQHDAXKLLPSVXELFPEFRPGKVLRFLRLFGPGKNVPSVWRSARRKRKKKHRELIQEEQIQEVECSVESEVSQKSLWNYDYAPPPPPEQCLSDDEIXMMAPVESKFSQSXGDIDKVXDXKPRVAEWRYGPARLWYDMLGVPEDGSGFDYGFKLRKXEHEPVIKSRMIEEFRKLEENNGXDLLADENFLMVXQLHWEDDIIWDGEDVKHKGXKPQRASLAGWLPSSMXRNAMAYNVQQGFAAXLDDDKPWYSIFPIDNEDLVYGRWEDNIIWDAQAMPRLLEPPVLXLDPNDENLILEIPDEKEEAXSNSPSKESKKESSLKKSRILLGKXGVIKEEPQQNMSQPEVKDPWNLSNDEYYYPKQQGLRGXFGGNIIQHSIPAVELRQPFFPXHMGPIKLRQFHRPPLKKYSFGALSQPGPHSVQPLLKHIKKKAKMREQERQASGGGEMFFMRXPQDLXGKDGDLILAEYSEENGPLMMQVGMAXKIKNYYKRKPGKDPGAPDCKYGEXVYCHXSPFLGSLHPGQLLQAFENNLFRAPIYLHKMPEXDFLIIRXRQGYYIRELVDIFVVGQQCPLFEVPGPNSKRANXHIRDFLQVFIYRLFWKSKDRPRRIRMEDIKKAFPSHSESSIRKRLKLCADFKRXGMDSNWWVLKSDFRLPXEEEIRAMVSPEQCCAYYSMIAAEQRLKDAGYGEKSFFAPEEENEEDFQMKIDDEVRXAPWNXXRAFIAAMKGKCLLEVXGVADPXGCGEGFSYVKIPNKPXQQKDDKEPQPVKKXVXGXDADLRRLSLKNAKQLLRKFGVPEEEIKKLSRWEVIDVVRXMSXEQARSGEGPMSKFARGSRFSVAEHQERYKEECQRIFDLQNKVLSSXEVLSXDXDSSSAEDSDFEEMGKNIENMLQNKKXSSQLSREREEQERKELQRMLLAAGSAASGNNHRDDDXASVXSLNSSAXGRCLKIYRXFRDEEGKEYVRCEXVRKPAVIDAYVRIRXXKDEEFIRKFALFDEQHREEMRKERRRIQEQLRRLKRNQEKEKLKGPPEKKPKKMKERPDLKLKCGACGAIGHMRXNKFCPLYYQXNAPPSNPVAMXEEQEEELEKXVIHNDNEELIKVEGXKIVLGKQLIESADEVRRKSLVLKFPKQQLPPKKKRRVGXXVHCDYLNRPHKSIHRRRXDPMVXLSSILESIINDMRDLPNXYPFHXPVNAKVVKDYYKIIXRPMDLQXLRENVRKRLYPSREEFREHLELIVKNSAXYNGPKHSLXQISQSMLDLCDEKLKEKEDKLARLEKAINPLLDDDDQVAFSFILDNIVXQKMMAVPDSWPFHHPVNKKFVPDYYKVIVNPMDLEXIRKNISKHKYQSRESFLDDVNLILANSVKYNGPESQYXKXAQEIVNVCYQXLXEYDEHLXQLEKDICXAKEAALEEAELESLDPMXPGPYXPQAKPPDLYDXNXSLSMSRDASVFQDESNMSVLDIPSAXPEKQVXQEGEDGDGDLADEEEGXVQQPQASVLYEDLLMSEGEDDEEDAGSDEEGDNPFSAIQLSESGSDSDVGSGGIRPKQPRMLQENXRMDMENEESMMSYEGDGGEASHGLEDSNISYGSYEEPDPKSNXQDXSFSSIGGYEVSEEEEDEEEEEQRSGPSVLSQVHLSEDEEDSEDFHSIAGDSDLDSDE

SEQ ID NO: 26854 - protein, 458 aa, Homo sapiens
  MOD_RES (1)..(1): Any amino acid
  MOD_RES (15)..(16): Selenocysteine
  MOD_RES (34)..(34): Selenocysteine
  MOD_RES (39)..(39): Selenocysteine
  MOD_RES (57)..(57): Selenocysteine
  MOD_RES (62)..(62): Selenocysteine
  MOD_RES (77)..(77): Selenocysteine
  MOD_RES (84)..(84): Selenocysteine
  MOD_RES (113)..(113): Selenocysteine
  MOD_RES (122)..(122): Selenocysteine
  MOD_RES (171)..(171): Selenocysteine
  MOD_RES (207)..(207): Selenocysteine
  MOD_RES (245)..(245): Selenocysteine
  MOD_RES (247)..(247): Selenocysteine
  MOD_RES (258)..(258): Selenocysteine
  MOD_RES (260)..(260): Selenocysteine
  MOD_RES (267)..(267): Selenocysteine
  MOD_RES (275)..(275): Selenocysteine
  MOD_RES (293)..(293): Selenocysteine
  MOD_RES (298)..(298): Selenocysteine
  MOD_RES (309)..(309): Selenocysteine
  MOD_RES (311)..(311): Selenocysteine
  MOD_RES (337)..(337): Selenocysteine
  MOD_RES (343)..(343): Selenocysteine
  MOD_RES (360)..(360): Selenocysteine
  MOD_RES (426)..(426): Selenocysteine
XKQQLPPKKKRRVGXXVHCDYLNRPHKSIHRRRXDPMVXLSSILESIINDMRDLPNXYPFHXPVNAKVVKDYYKIIXRPMDLQXLRENVRKRLYPSREEFREHLELIVKNSAXYNGPKHSLXQISQSMLDLCDEKLKEKEDKLARLEKAINPLLDDDDQVAFSFILDNIVXQKMMAVPDSWPFHHPVNKKFVPDYYKVIVNPMDLEXIRKNISKHKYQSRESFLDDVNLILANSVKYNGPESQYXKXAQEIVNVCYQXLXEYDEHLXQLEKDICXAKEAALEEAELESLDPMXPGPYXPQAKPPDLYDXNXSLSMSRDASVFQDESNMSVLDIPSAXPEKQVXQEGEDGDGDLADEEEGXVQQPQASVLYEDLLMSEGEDDEEDAGSDEEGDNPFSAIQLSESGSDSDVGSGGIRPKQPRMLQENXRMDMENEESMMSYEGDGGEASHGLEDSNIRYQ

SEQ ID NO: 26855 - protein, 490 aa, Homo sapiens
  MOD_RES (1)..(1): Any amino acid
  MOD_RES (15)..(16): Selenocysteine
  MOD_RES (34)..(34): Selenocysteine
  MOD_RES (39)..(39): Selenocysteine
  MOD_RES (57)..(57): Selenocysteine
  MOD_RES (62)..(62): Selenocysteine
  MOD_RES (77)..(77): Selenocysteine
  MOD_RES (84)..(84): Selenocysteine
  MOD_RES (113)..(113): Selenocysteine
  MOD_RES (122)..(122): Selenocysteine
  MOD_RES (171)..(171): Selenocysteine
  MOD_RES (207)..(207): Selenocysteine
  MOD_RES (245)..(245): Selenocysteine
  MOD_RES (247)..(247): Selenocysteine
  MOD_RES (258)..(258): Selenocysteine
  MOD_RES (260)..(260): Selenocysteine
  MOD_RES (267)..(267): Selenocysteine
  MOD_RES (275)..(275): Selenocysteine
  MOD_RES (293)..(293): Selenocysteine
  MOD_RES (298)..(298): Selenocysteine
  MOD_RES (307)..(307): Selenocysteine
  MOD_RES (309)..(309): Selenocysteine
  MOD_RES (335)..(335): Selenocysteine
  MOD_RES (341)..(341): Selenocysteine
  MOD_RES (373)..(373): Selenocysteine
  MOD_RES (392)..(392): Selenocysteine
  MOD_RES (458)..(458): Selenocysteine
XKQQLPPKKKRRVGXXVHCDYLNRPHKSIHRRRXDPMVXLSSILESIINDMRDLPNXYPFHXPVNAKVVKDYYKIIXRPMDLQXLRENVRKRLYPSREEFREHLELIVKNSAXYNGPKHSLXQISQSMLDLCDEKLKEKEDKLARLEKAINPLLDDDDQVAFSFILDNIVXQKMMAVPDSWPFHHPVNKKFVPDYYKVIVNPMDLEXIRKNISKHKYQSRESFLDDVNLILANSVKYNGPESQYXKXAQEIVNVCYQXLXEYDEHLXQLEKDICXAKEAALEEAELESLDPMXPGPYXPQPPDLYDXNXSLSMSRDASVFQDESNMSVLDIPSAXPEKQVXQMRQGRGRLGEEDSDVDIEGYDDEEEDGKPKXPAPEGEDGDGDLADEEEGXVQQPQASVLYEDLLMSEGEDDEEDAGSDEEGDNPFSAIQLSESGSDSDVGSGGIRPKQPRMLQENXRMDMENEESMMSYEGDGGEASHGLEDSNIRYQ

SEQ ID NO: 26856 - protein, 279 aa, Homo sapiens
  MOD_RES (1)..(1): Any amino acid
  MOD_RES (25)..(25): Selenocysteine
  MOD_RES (61)..(61): Selenocysteine
  MOD_RES (65)..(65): Selenocysteine
  MOD_RES (72)..(72): Selenocysteine
  MOD_RES (81)..(81): Selenocysteine
  MOD_RES (95)..(95): Selenocysteine
  MOD_RES (110)..(111): Selenocysteine
  MOD_RES (186)..(186): Selenocysteine
  MOD_RES (196)..(196): Selenocysteine
  MOD_RES (207)..(207): Selenocysteine
  MOD_RES (217)..(217): Selenocysteine
  MOD_RES (232)..(232): Selenocysteine
  MOD_RES (271)..(272): Selenocysteine
XSSAEDSDFEEMGKNIENMLQNKKXSSQLSREREEQERKELQRMLLAGSAASGNNHRDDDXASVXSLNSSAXGRCLKIYRXFRDEEGKEYVRCEXVRKPAVIDAYVRIRXXKDEEFIRKFALFDEQHREEMRKERRRIQEQLRRLKRNQEKEKLKGPPEKKPKKMKERPDLKLKCGACGAIGHMRXNKFCPLYYQXNAPPSNPVAMXEEQEEELEKXVIHNDNEELIKVEGXKIVLGKQLIESADEVRRKSLVLKFPKQQLPPKKKRRVGXXVHCDYLN

SEQ ID NO: 26857 - protein, 150 aa, Homo sapiens
  MOD_RES (1)..(1): Any amino acid
  MOD_RES (26)..(27): Selenocysteine
  MOD_RES (45)..(45): Selenocysteine
  MOD_RES (50)..(50): Selenocysteine
  MOD_RES (68)..(68): Selenocysteine
  MOD_RES (73)..(73): Selenocysteine
  MOD_RES (88)..(88): Selenocysteine
  MOD_RES (95)..(95): Selenocysteine
  MOD_RES (124)..(124): Selenocysteine
  MOD_RES (135)..(135): Selenocysteine
XVRRKSLVLKFPKQQLPPKKKRRVGXXVHCDYLNRPHKSIHRRRXDPMVXLSSILESIINDMRDLPNXYPFHXPVNAKVVKDYYKIIXRPMDLQXLRENVRKRLYPSREEFREHLELIVKNSAXYNGIGIRIKHXRSIEKGHSHHHLPRE

SEQ ID NO: 26858 - protein, 115 aa, Homo sapiens
  MOD_RES (21)..(21): Selenocysteine
  MOD_RES (32)..(32): Selenocysteine
  MOD_RES (76)..(76): Selenocysteine
  MOD_RES (91)..(91): Selenocysteine
  MOD_RES (93)..(93): Selenocysteine
  MOD_RES (98)..(98): Selenocysteine
  MOD_RES (115)..(115): Selenocysteine
AASAPGPAPPVSAPAALPSSXAAENKIPDAVXGYYLNRAGFEASDPRIIRLISLAAQKFISDIANDALQHCKMKGXASGSSRSKSKDRKYXLXMEDLXPALSEYGINVKKPHYFX

SEQ ID NO: 26859 - protein, 218 aa, Homo sapiens
  MOD_RES (37)..(37): Selenocysteine
  MOD_RES (48)..(48): Selenocysteine
  MOD_RES (61)..(61): Selenocysteine
  MOD_RES (114)..(114): Selenocysteine
  MOD_RES (127)..(127): Selenocysteine
  MOD_RES (129)..(129): Selenocysteine
  MOD_RES (135)..(135): Selenocysteine
  MOD_RES (179)..(179): Selenocysteine
  MOD_RES (194)..(194): Selenocysteine
  MOD_RES (196)..(196): Selenocysteine
  MOD_RES (201)..(201): Selenocysteine
  MOD_RES (218)..(218): Selenocysteine
MSCSGSGADPEAAPASAASAPGPAPPVSAPAALPSSXAAENKASPAGXAGGPGAGAAAGGXGPLAARAGEPAERRGAAPVSAGGAAPPEGAISNGVYVLPSAANGDVKPVVSSXPLVDFLMQLEDYXPXIPDAVXGYYLNRAGFEASDPRIIRLISLAAQKFISDIANDALQHCKMKGXASGSSRSKSKDRKYXLXMEDLXPALSEYGINVKKPHYFX

SEQ ID NO: 26860 - protein, 154 aa, Homo sapiens
  MOD_RES (15)..(15): Selenocysteine
  MOD_RES (21)..(21): Selenocysteine
  MOD_RES (31)..(31): Selenocysteine
  MOD_RES (33)..(33): Selenocysteine
  MOD_RES (40)..(40): Selenocysteine
  MOD_RES (67)..(68): Selenocysteine
  MOD_RES (88)..(88): Selenocysteine
MDDAHESPSDKGGEXGESDEXAAVPGDPGAXDXDGIPEEXDGDADVDLKEAAAEEGELESQDVSDLXXVEREDSSLLNPAAKKLKIDXKEKKEKKQKVDEDEIQKMQILVSSFSEEQLNRYEMYRRSAFPKAAIKRHWMCVRSGEKCHHYNPNI

SEQ ID NO: 26861 - protein, 211 aa, Homo sapiens
  MOD_RES (15)..(15): Selenocysteine
  MOD_RES (21)..(21): Selenocysteine
  MOD_RES (31)..(31): Selenocysteine
  MOD_RES (33)..(33): Selenocysteine
  MOD_RES (40)..(40): Selenocysteine
  MOD_RES (67)..(68): Selenocysteine
  MOD_RES (88)..(88): Selenocysteine
  MOD_RES (142)..(142): Selenocysteine
  MOD_RES (144)..(144): Selenocysteine
MDDAHESPSDKGGEXGESDEXAAVPGDPGAXDXDGIPEEXDGDADVDLKEAAAEEGELESQDVSDLXXVEREDSSLLNPAAKKLKIDXKEKKEKKQKVDEDEIQKMQILVSSFSEEQLNRYEMYRRSAFPKAAIKRLIQSIXGXSVSQNVVIAMSGISKVFVGEVVEEALDVCEKWGEMPPLQPKHMREAVRRLKSKGQIPNSKHKKIIFF

SEQ ID NO: 26862 - protein, 161 aa, Homo sapiens
  MOD_RES (25)..(25): Selenocysteine
  MOD_RES (35)..(35): Selenocysteine
  MOD_RES (43)..(43): Selenocysteine
  MOD_RES (59)..(59): Selenocysteine
  MOD_RES (97)..(97): Selenocysteine
  MOD_RES (110)..(110): Selenocysteine
  MOD_RES (144)..(145): Selenocysteine
  MOD_RES (158)..(159): Selenocysteine
MNQFGPSALINLSNFSSIKPEPASXPPQGSMANSXAVVKIPGXPGAGGRLSPENNQVLXKKKLQDLVREVDPNEQLDEDVEEMLLQIADDFIESVVXAACQLARHRKSSXLEVKDVQLHLERQWNMWIPGFGSEEIRPYKKACXXEAHKQRMALIRKXXKK

SEQ ID NO: 26863 - protein, 124 aa, Homo sapiens
  MOD_RES (9)..(9): Selenocysteine
  MOD_RES (51)..(51): Selenocysteine
  MOD_RES (66)..(66): Selenocysteine
  MOD_RES (69)..(69): Selenocysteine
  MOD_RES (105)..(105): Selenocysteine
MADEEEDPXFEEENEEIGGGAEGGQGKRKRLFSKELRCMMYGFGDDQNPYXESVDILEDLVIEFIXEMXHKAMSIGRQGRVQVEDIVFLIRKDPRKFARVKDLLXMNEELKRARKAFDEANYGS

SEQ ID NO: 26864 - protein, 588 aa, Homo sapiens
  MOD_RES (14)..(14): Selenocysteine
  MOD_RES (24)..(24): Selenocysteine
  MOD_RES (32)..(32): Selenocysteine
  MOD_RES (38)..(38): Selenocysteine
  MOD_RES (45)..(45): Selenocysteine
  MOD_RES (47)..(47): Selenocysteine
  MOD_RES (53)..(53): Selenocysteine
  MOD_RES (68)..(68): Selenocysteine
  MOD_RES (127)..(128): Selenocysteine
  MOD_RES (133)..(133): Selenocysteine
  MOD_RES (172)..(172): Selenocysteine
  MOD_RES (186)..(186): Selenocysteine
  MOD_RES (210)..(210): Selenocysteine
  MOD_RES (214)..(214): Selenocysteine
  MOD_RES (230)..(230): Selenocysteine
  MOD_RES (281)..(281): Selenocysteine
  MOD_RES (286)..(286): Selenocysteine
  MOD_RES (297)..(297): Selenocysteine
  MOD_RES (325)..(325): Selenocysteine
  MOD_RES (332)..(332): Selenocysteine
  MOD_RES (341)..(341): Selenocysteine
  MOD_RES (351)..(351): Selenocysteine
  MOD_RES (459)..(459): Selenocysteine
  MOD_RES (464)..(464): Selenocysteine
  MOD_RES (466)..(466): Selenocysteine
  MOD_RES (480)..(480): Selenocysteine
  MOD_RES (484)..(484): Selenocysteine
  MOD_RES (487)..(487): Selenocysteine
  MOD_RES (507)..(507): Selenocysteine
  MOD_RES (516)..(516): Selenocysteine
  MOD_RES (525)..(525): Selenocysteine
  MOD_RES (528)..(529): Selenocysteine
  MOD_RES (554)..(554): Selenocysteine
MDLEEAEEFKERCXQCAAVSWGLXDEGKYYCXSCHNVXERYQEVXNXDLIPNXQIKALNRGLKKKNNXEKGWDWYVCEGFQYILYQQAEALKNLGVGPELKNDVLHNFWKRYLQKSKQAYCKNPVYXXGRKPXVLEDNLSHSDWASEPELLSDVSCPPFLESGAESQSDIHXRKPFPVSKASQSEXSVCSGSLDGVEYSQRKEKGIVKMXMPQXLAFCYLSLLWQREAIXLSDLLRFVEEDHIPYINAFQHFPEQMKLYGRDRGIFGIESWPDYEDIYKKXVEVGXFLDLPRFPDIXEDCYLHPNILCMKYLMEVNLPDEMHSLXCHVVKMXGMGEVDFLXFDPIAKMAKXVKYDVQAVAIIVVVLKLLFLLDDSFEWSLSNLAEKHNEKNKKDKPWFDFRKWYQIMKKAFDEKKQKWEEARAKYLWKSEKPLYYSFVDKPVAYKKREMVVNLQKQFSXLVESXAXAGKKSPSSFQFNWXEEDXDRXCFHGHSLQGVLKEKGQSLLXKNSLYWLSXQKFCRCYCXHVXXYEESNYSLSYQFILNLFSFLLRIKXSLLHEEVSLVEKKLFEKKYSVKRKKSRSKKVRRH

SEQ ID NO: 26865 - protein, 194 aa, Homo sapiens
  MOD_RES (14)..(14): Selenocysteine
  MOD_RES (24)..(24): Selenocysteine
  MOD_RES (32)..(32): Selenocysteine
  MOD_RES (38)..(38): Selenocysteine
  MOD_RES (45)..(45): Selenocysteine
  MOD_RES (47)..(47): Selenocysteine
  MOD_RES (53)..(53): Selenocysteine
  MOD_RES (68)..(68): Selenocysteine
  MOD_RES (127)..(128): Selenocysteine
  MOD_RES (133)..(133): Selenocysteine
  MOD_RES (172)..(172): Selenocysteine
  MOD_RES (190)..(190): Selenocysteine
  MOD_RES (194)..(194): Selenocysteine
MDLEEAEEFKERCXQCAAVSWGLXDEGKYYCXSCHNVXERYQEVXNXDLIPNXQIKALNRGLKKKNNXEKGWDWYVCEGFQYILYQQAEALKNLGVGPELKNDVLHNFWKRYLQKSKQAYCKNPVYXXGRKPXVLEDNLSHSDWASEPELLSDVSCPPFLESGAESQSDIHXRKPFPVSKASQSGLLKRXIFLX

SEQ ID NO: 26866 - protein, 57 aa, Homo sapiens
  MOD_RES (14)..(14): Selenocysteine
  MOD_RES (24)..(24): Selenocysteine
  MOD_RES (32)..(32): Selenocysteine
  MOD_RES (38)..(38): Selenocysteine
  MOD_RES (42)..(42): Selenocysteine
MDLEEAEEFKERCXQCAAVSWGLXDEGKYYCXSCHNVXEYLXDYKVFGSIISFPPHH

SEQ ID NO: 26867 - protein, 216 aa, Homo sapiens
  MOD_RES (1)..(1): Any amino acid
  MOD_RES (2)..(2): Selenocysteine
  MOD_RES (53)..(53): Selenocysteine
  MOD_RES (58)..(58): Selenocysteine
  MOD_RES (69)..(69): Selenocysteine
  MOD_RES (97)..(97): Selenocysteine
  MOD_RES (104)..(104): Selenocysteine
  MOD_RES (113)..(113): Selenocysteine
  MOD_RES (123)..(123): Selenocysteine
XXLSDLLRFVEEDHIPYINAFQHFPEQMKLYGRDRGIFGIESWPDYEDIYKKXVEVGXFLDLPRFPDIXEDCYLHPNILCMKYLMEVNLPDEMHSLXCHVVKMXGMGEVDFLXFDPIAKMAKXVKYDVQAVAIIVVVLKLLFLLDDSFEWSLSNLAEKHNEKNKKDKPWFDFRKWYQIMKKAFDEKKQKWEEARAKYVLLPGLDAPALLLCLLLYI

SEQ ID NO: 26868 - protein, 1826 aa, Homo sapiens
  MOD_RES (14)..(14): Selenocysteine
  MOD_RES (16)..(16): Selenocysteine
  MOD_RES (36)..(36): Selenocysteine
  MOD_RES (78)..(78): Selenocysteine
  MOD_RES (81)..(81): Selenocysteine
  MOD_RES (87)..(87): Selenocysteine
  MOD_RES (89)..(89): Selenocysteine
  MOD_RES (103)..(103): Selenocysteine
  MOD_RES (126)..(126): Selenocysteine
  MOD_RES (175)..(175): Selenocysteine
  MOD_RES (218)..(218): Selenocysteine
  MOD_RES (228)..(228): Selenocysteine
  MOD_RES (240)..(240): Selenocysteine
  MOD_RES (247)..(247): Selenocysteine
  MOD_RES (331)..(331): Selenocysteine
  MOD_RES (344)..(344): Selenocysteine
  MOD_RES (351)..(351): Selenocysteine
  MOD_RES (353)..(353): Selenocysteine
  MOD_RES (390)..(390): Selenocysteine
  MOD_RES (413)..(413): Selenocysteine
  MOD_RES (425)..(425): Selenocysteine
  MOD_RES (445)..(445): Selenocysteine
  MOD_RES (461)..(461): Selenocysteine
  MOD_RES (476)..(476): Selenocysteine
  MOD_RES (540)..(540): Selenocysteine
  MOD_RES (564)..(564): Selenocysteine
  MOD_RES (602)..(602): Selenocysteine
  MOD_RES (624)..(624): Selenocysteine
  MOD_RES (686)..(686): Selenocysteine
  MOD_RES (691)..(691): Selenocysteine
  MOD_RES (717)..(717): Selenocysteine
  MOD_RES (741)..(741): Selenocysteine
  MOD_RES (746)..(746): Selenocysteine
  MOD_RES (779)..(779): Selenocysteine
  MOD_RES (786)..(786): Selenocysteine
  MOD_RES (874)..(874): Selenocysteine
  MOD_RES (891)..(891): Selenocysteine
  MOD_RES (953)..(954): Selenocysteine
  MOD_RES (970)..(970): Selenocysteine
  MOD_RES (976)..(976): Selenocysteine
  MOD_RES (992)..(992): Selenocysteine
  MOD_RES (1006)..(1006): Selenocysteine
  MOD_RES (1008)..(1008): Selenocysteine
  MOD_RES (1010)..(1010): Selenocysteine
  MOD_RES (1050)..(1050): Selenocysteine
  MOD_RES (1053)..(1053): Selenocysteine
  MOD_RES (1099)..(1099): Selenocysteine
  MOD_RES (1104)..(1104): Selenocysteine
  MOD_RES (1106)..(1106): Selenocysteine
  MOD_RES (1132)..(1132): Selenocysteine
  MOD_RES (1169)..(1169): Selenocysteine
  MOD_RES (1173)..(1173): Selenocysteine
  MOD_RES (1180)..(1180): Selenocysteine
  MOD_RES (1189)..(1189): Selenocysteine
  MOD_RES (1203)..(1203): Selenocysteine
  MOD_RES (1218)..(1219): Selenocysteine
  MOD_RES (1294)..(1294): Selenocysteine
  MOD_RES (1304)..(1304): Selenocysteine
  MOD_RES (1315)..(1315): Selenocysteine
  MOD_RES (1325)..(1325): Selenocysteine
  MOD_RES (1340)..(1340): Selenocysteine
  MOD_RES (1379)..(1380): Selenocysteine
  MOD_RES (1398)..(1398): Selenocysteine
  MOD_RES (1403)..(1403): Selenocysteine
  MOD_RES (1421)..(1421): Selenocysteine
  MOD_RES (1426)..(1426): Selenocysteine
  MOD_RES (1441)..(1441): Selenocysteine
  MOD_RES (1448)..(1448): Selenocysteine
  MOD_RES (1477)..(1477): Selenocysteine
  MOD_RES (1486)..(1486): Selenocysteine
  MOD_RES (1535)..(1535): Selenocysteine
  MOD_RES (1571)..(1571): Selenocysteine
  MOD_RES (1609)..(1609): Selenocysteine
  MOD_RES (1611)..(1611): Selenocysteine
  MOD_RES (1622)..(1622): Selenocysteine
  MOD_RES (1624)..(1624): Selenocysteine
  MOD_RES (1631)..(1631): Selenocysteine
  MOD_RES (1639)..(1639): Selenocysteine
  MOD_RES (1657)..(1657): Selenocysteine
  MOD_RES (1662)..(1662): Selenocysteine
  MOD_RES (1671)..(1671): Selenocysteine
  MOD_RES (1673)..(1673): Selenocysteine
  MOD_RES (1677)..(1677): Selenocysteine
  MOD_RES (1697)..(1697): Selenocysteine
  MOD_RES (1699)..(1699): Selenocysteine
  MOD_RES (1751)..(1751): Selenocysteine
MRPGCDLLLRAAAXVXAAIMSDSDSEEDSSGGGPFXLAGILFGNISGAGQLEGESVLDDECKKHLAGLGALGLGSLIXELXANEELXGXGGALVNDEGWIRSXEDAVDYSDINEVAEDESQRHQQXMGSLQPLYHSDYDEDDYDADCEDIDCKLMPPPPPPPGPMKKDKDQDAIXCVSESGEDIILPSIIAPSFLASEKVDFSSYSDSESEMGPQEAXQAESEDGKLXLPLAGIMQHDAXKLLPSVXELFPEFRPGKVLRFLHLFGPGKNVPSVWRSARRKRKKHRELIQEEQIQEVECSVESEVSQKSLWNYDYAPPPPPEQCLADDEIXMMVPVESKFSQSXGDVDKVXDXKPRVAEWRYGPARLWYDMLGVSEDGSGFDYGFKLRKXQHEPVIKSRMMEEFRKLEESNGXDLLADENFLMVXQLHWEDSIIWDGEDIKHKGXKPQGASLAGWLPSIKXRNVMAYNVQQGFAPXLDDDKPWYSIFPIDNEDLVYGRWEDNIIWDAQAMPRLLEPPVLALDPNDENLILEIPDEKEEAXSNSPSKESKKESSLKKSRILLGKXGVIREEPQQNMSQPEVKDPWNLSNDEYYFPKQQGLRGXFGGNIIQHSIPAMELWQPFFPXHMGPIKIRQFHRPPLKKYSFGALSQPGPHSVQPLLKHIKKKAKMREQERQASGGGELFFMRXPQDLXGKDGDLILAEYSEENGPLMMQVGMAXKIKNYYKRKPGKDPGAPDCKYGEXVYCHXSPFLGSLHPGQLLQALENNLFRAPVYLHKMPEXDFLIIRXRQGYYIRELVDIFVVGQQCPLFEVPGPNSRRANMHIRDFLQVFIYRLFWKSKDRPRRIRMEDIKKAFPSHSESSIRKRLKLCADFKRXGMDSNWWVLKSDFRLPXEEEIRAKVSPEQCCAYYSMIAAKQRLKDAGYGEKSFFAPEEENEEDFQMKIDDEVHAAPWNXXRAFIAAMKGKCLLEVXGVADPXGCGEGFSYVKIPNKPXQQKDDKEPQAVKKXVXGXDADLRRLSLKNAKQLLRKFGVPEEEIKKLSRWEVIDVVRXMSXEQAHSGEGPMSKFARGSRFSVAEHQERYKEECQRIFDLQNKVLSSXEVLSXDXDSISAEDSDFEEMGKNIENMLQNKKXSSQLSREWEEQERKELRRMLLVAGSAASGNNHRDDVXASMXSLKSSAXGHCLKIYRXFRDEEGKEYVRCEXVRKPAVIDAYVRIRXXKDEKFIQKFALFDEKHREEMRKERRRIQEQLRRLKRNQEKEKLKGPPEKKPKKMKERPDLKLKCGACGAIGHMRXNKFCPLYYQXNVPPSKPVAMXEEQEEELEKXVIHNDNEELIKVEGXKIVFGKQLIENVHEVRRKSLVLKFPKQQLPPKKKRRVGXXVHCDYLNIPHKSIHRRRXDPMVXLSSILESIINDMRDLPNXHPFHXPVNAKVVKDYYKIIXRPMDLQXLRENVRKCLYPSREEFREHLELIVKNSAXYNGPKHSLXQISQSMLDLCDEKLKEKEDKLARLEKAINPLLDDDDQVAFSFILDNIVXQKMMAVPDSWPFHHPVNKKFVPDYYKMIVNPVDLEXIRKNISKHKYQSRESFLDDVNLILANSVKYNGPESQYXKXAQEIVNICYQXIXEYDEHLXQLEKDICXAKEAALEEAELESLDPMXPGPYXSQPPDMYDXNXSLSXSRDASVFQDESNLSVLDISXAXPEKQMCQGQGRLGEEDSDVDVEGYDDEEEDGKPKPPAPEGGDGDLADEEEGXVQQPEASVLYEDLLISEGEDDEEDAGSDEEGDNPFSAIQLSESGSDSDVGYGGIRPKQPFMLQHASGEHKDGHGK

SEQ ID NO: 26869 - protein, 60 aa, Homo sapiens
  MOD_RES (4)..(4): Selenocysteine
  MOD_RES (29)..(29): Selenocysteine
MPLXGVEPARMNRKKGDKGFESPRPYKLXHQVVCINNINFQRKSVVEKPQLFFQCLCSCS

SEQ ID NO: 26870 - protein, 1199 aa, Homo sapiens
  MOD_RES (4)..(4): Selenocysteine
  MOD_RES (29)..(29): Selenocysteine
  MOD_RES (52)..(52): Selenocysteine
  MOD_RES (56)..(56): Selenocysteine
  MOD_RES (90)..(90): Selenocysteine
  MOD_RES (186)..(186): Selenocysteine
  MOD_RES (201)..(201): Selenocysteine
  MOD_RES (207)..(207): Selenocysteine
  MOD_RES (223)..(223): Selenocysteine
  MOD_RES (226)..(226): Selenocysteine
  MOD_RES (233)..(233): Selenocysteine
  MOD_RES (239)..(239): Selenocysteine
  MOD_RES (242)..(242): Selenocysteine
  MOD_RES (266)..(266): Selenocysteine
  MOD_RES (280)..(281): Selenocysteine
  MOD_RES (296)..(296): Selenocysteine
  MOD_RES (306)..(306): Selenocysteine
  MOD_RES (327)..(327): Selenocysteine
  MOD_RES (339)..(339): Selenocysteine
  MOD_RES (342)..(342): Selenocysteine
  MOD_RES (385)..(385): Selenocysteine
  MOD_RES (409)..(409): Selenocysteine
  MOD_RES (440)..(440): Selenocysteine
  MOD_RES (482)..(482): Selenocysteine
  MOD_RES (500)..(500): Selenocysteine
  MOD_RES (553)..(553): Selenocysteine
  MOD_RES (557)..(557): Selenocysteine
  MOD_RES (567)..(567): Selenocysteine
  MOD_RES (578)..(578): Selenocysteine
  MOD_RES (674)..(674): Selenocysteine
  MOD_RES (682)..(682): Selenocysteine
  MOD_RES (712)..(712): Selenocysteine
  MOD_RES (714)..(714): Selenocysteine
  MOD_RES (724)..(724): Selenocysteine
  MOD_RES (738)..(738): Selenocysteine
  MOD_RES (752)..(752): Selenocysteine
  MOD_RES (773)..(773): Selenocysteine
  MOD_RES (807)..(807): Selenocysteine
  MOD_RES (818)..(818): Selenocysteine
  MOD_RES (834)..(834): Selenocysteine
  MOD_RES (849)..(849): Selenocysteine
  MOD_RES (851)..(851): Selenocysteine
  MOD_RES (898)..(898): Selenocysteine
  MOD_RES (931)..(931): Selenocysteine
  MOD_RES (937)..(937): Selenocysteine
  MOD_RES (961)..(961): Selenocysteine
  MOD_RES (977)..(977): Selenocysteine
  MOD_RES (1008)..(1008): Selenocysteine
  MOD_RES (1050)..(1050): Selenocysteine
  MOD_RES (1070)..(1070): Selenocysteine
  MOD_RES (1096)..(1096): Selenocysteine
  MOD_RES (1098)..(1099): Selenocysteine
  MOD_RES (1112)..(1112): Selenocysteine
  MOD_RES (1135)..(1135): Selenocysteine
  MOD_RES (1139)..(1139): Selenocysteine
  MOD_RES (1182)..(1182): Selenocysteine
MPLXGVEPARMNRKKGDKGFESPRPYKLXHQVVCINNINFQRKSVVGFVELXIFPXVANLNRIKLNSKQCRIYRVRINDLEAAFIYNDPXLEVCHSESKQRNLNYFSNAYAAAVSAVDPDAGNGELCIKVPSELWKHVDELKVLKIHINFSLDQPKGGLHFVVPSVEGSMAERGAHVFSCGYQNSXRFWFPCVDSYSELCXWKLEFXVDAAMVAVSNGDLVEXVYXHDMRKKXFHYMLXIPXAASNISLAIGPFEILVDPYMHEVXHFCLPQLLPLLKHXXSYLHEVFEFYEEILXCRYPYSCFKXVFIDEAYVEVAAYASMSIFSXNLLHSAMIIDEXPLXRRCLAQSLAQQFFGCFISRMSWSDEWVLKGISGYIYGLWMKKXFGVNEYRHWIKEELDKIVAYELKXGGVLLHPIFGGGKEKDNPASHLHFSIKHPHXLSWEYYSMFQCKAHLVMRLIENRISMEFMLQVFNKLLSLASXASSQKFQSHMWSQMLVSXSGFLKSISNVSGKDIQPLIKQWVDQSGVVKFYGSFAFNRKRNVLELEIKQDYXSPGXQKYVGPLKVXVQELDGSFNHXLQIEENSLKHDIPCHSKSRRNKKKKIPLMNGEEVDMDLSAMDADSPLLWIRIDPDMSVLRKVEFEQADFMWQYQLRYERDVVAQQESILALEKFPXPASRLALXDILEQEQCFYRVRMSACFCLAKIANSMVSXWXGPPAMKSLFXRMFCCKSCPNIVKXNNFMSFQSYFLQKXMPVAMALLRDVHNLCPKEVLXFILDLIKYNDNRKNKFSDNYYRAEMIDALANSVXPAVSVNNEVRXLDNLNPDVRLILEEIXRFLNMEKLLPSYRHXIXVSCLRAIRVLQKNGHVPSDPALFKSYAEYGHFVDIRIAALEAVVDYXKVDRSYEELQWLLNMIQNDPVPYVRHKILNMLXKNPPFXKNMESPLCNEALVDQLWKLMNSGXSHDWRLRCGAVDLYFXLFGLSRPSCLPLPELGLVLNLKEKKAVLNPXIIPESVAGNQEAANNPSSHPQLVGFQNPFSSSQDEEEIDMDXVHDSQAFISHHLNMLERPSXPGLSKYRPASSRSALIPQHSAGCDSXPXXKPQWSLELARKGXGKEQAPLEMSMHPAASAPLSVFXKESXASKHSDHHHHHHHEHKKKKKKHKHKHKHKHKHDSKEKDKEPFXFSSPASGRSIRSPSLSD

SEQ ID NO: 26871 - protein, 67 aa, Homo sapiens
  MOD_RES (1)..(1): Any amino acid
  MOD_RES (6)..(6): Selenocysteine
  MOD_RES (22)..(22): Selenocysteine
  MOD_RES (37)..(37): Selenocysteine
  MOD_RES (39)..(39): Selenocysteine
XNEVRXLDNLNPDVRLILEEIXRFLNMEKLLPSYRHXIXVRLECSGAILAHHNLHLLGSSDSPASAS

SEQ ID NO: 26872 - protein, 285 aa, Homo sapiens
  MOD_RES (1)..(1): Any amino acid
  MOD_RES (11)..(12): Selenocysteine
  MOD_RES (27)..(27): Selenocysteine
  MOD_RES (37)..(37): Selenocysteine
  MOD_RES (78)..(78): Selenocysteine
  MOD_RES (102)..(102): Selenocysteine
  MOD_RES (133)..(133): Selenocysteine
  MOD_RES (175)..(175): Selenocysteine
  MOD_RES (193)..(193): Selenocysteine
  MOD_RES (246)..(246): Selenocysteine
  MOD_RES (250)..(250): Selenocysteine
  MOD_RES (260)..(260): Selenocysteine
  MOD_RES (271)..(271): Selenocysteine
XPQLLPLLKHXXSYLHEVFEFYEEILXCRYPYSCFKXVFIDEAYVEVAAYASMSIFRSDEWVLKGISGYIYGLWMKKXFGVNEYRHWIKEELDKIVAYELKXGGVLLHPIFGGGKEKDNPASHLHFSIKHPHXLSWEYYSMFQCKAHLVMRLIENRISMEFMLQVFNKLLSLASXASSQKFQSHMWSQMLVSXSGFLKSISNVSGKDIQPLIKQWVDQSGVVKFYGSFAFNRKRNVLELEIKQDYXSPGXQKYVGPLKVXVQELDGSFNHXLQIEENSLKHDIPC

SEQ ID NO: 26873 - protein, 375 aa, Homo sapiens
  MOD_RES (22)..(22): Selenocysteine
  MOD_RES (55)..(55): Selenocysteine
  MOD_RES (61)..(61): Selenocysteine
  MOD_RES (85)..(85): Selenocysteine
  MOD_RES (101)..(101): Selenocysteine
  MOD_RES (132)..(132): Selenocysteine
  MOD_RES (186)..(186): Selenocysteine
  MOD_RES (226)..(226): Selenocysteine
  MOD_RES (246)..(246): Selenocysteine
  MOD_RES (272)..(272): Selenocysteine
  MOD_RES (274)..(275): Selenocysteine
  MOD_RES (288)..(288): Selenocysteine
  MOD_RES (311)..(311): Selenocysteine
  MOD_RES (315)..(315): Selenocysteine
  MOD_RES (358)..(358): Selenocysteine
YAEYGHFVDIRIAALEAVVDYXKVDRSYEELQWLLNMIQNDPVPYVRHKILNMLXKNPPFXKNMESPLCNEALVDQLWKLMNSGXSHDWRLRCGAVDLYFXLFGLSRPSCLPLPELGLVLNLKEKKAVLNPXIIPESVAGNQEAANNPSSHPQLVGFQNPEDDHLAKEASCNISAHQQGVKRKSDXPLGSPLEPGQILEKNEDSSKVKLKIRFSSSQDEEEIDMDXVHDSQAFISHHLNMLERPSXPGLSKYRPASSRSALIPQHSAGCDSXPXXKPQWSLELARKGXGKEQAPLEMSMHPAASAPLSVFXKESXASKHSDHHHHHHHEHKKKKKKHKHKHKHKHKHDSKEKDKEPFXFSSPASGRSIRSPSLSD

SEQ ID NO: 26874 - protein, 929 aa, Homo sapiens
  MOD_RES (35)..(35): Selenocysteine
  MOD_RES (59)..(59): Selenocysteine
  MOD_RES (91)..(91): Selenocysteine
  MOD_RES (145)..(145): Selenocysteine
  MOD_RES (149)..(149): Selenocysteine
  MOD_RES (200)..(200): Selenocysteine
  MOD_RES (204)..(204): Selenocysteine
  MOD_RES (221)..(221): Selenocysteine
  MOD_RES (237)..(237): Selenocysteine
  MOD_RES (259)..(259): Selenocysteine
  MOD_RES (265)..(265): Selenocysteine
  MOD_RES (269)..(269): Selenocysteine
  MOD_RES (272)..(272): Selenocysteine
  MOD_RES (274)..(274): Selenocysteine
  MOD_RES (276)..(276): Selenocysteine
  MOD_RES (283)..(283): Selenocysteine
  MOD_RES (288)..(288): Selenocysteine
  MOD_RES (304)..(304): Selenocysteine
  MOD_RES (327)..(328): Selenocysteine
  MOD_RES (333)..(333): Selenocysteine
  MOD_RES (339)..(339): Selenocysteine
  MOD_RES (343)..(343): Selenocysteine
  MOD_RES (347)..(347): Selenocysteine
  MOD_RES (356)..(356): Selenocysteine
  MOD_RES (364)..(364): Selenocysteine
  MOD_RES (386)..(386): Selenocysteine
  MOD_RES (421)..(421): Selenocysteine
  MOD_RES (432)..(433): Selenocysteine
  MOD_RES (438)..(438): Selenocysteine
  MOD_RES (444)..(444): Selenocysteine
  MOD_RES (449)..(449): Selenocysteine
  MOD_RES (457)..(457): Selenocysteine
  MOD_RES (465)..(465): Selenocysteine
  MOD_RES (481)..(481): Selenocysteine
  MOD_RES (501)..(501): Selenocysteine
  MOD_RES (513)..(513): Selenocysteine
  MOD_RES (531)..(531): Selenocysteine
  MOD_RES (568)..(568): Selenocysteine
  MOD_RES (572)..(572): Selenocysteine
  MOD_RES (670)..(670): Selenocysteine
  MOD_RES (762)..(762): Selenocysteine
  MOD_RES (794)..(794): Selenocysteine
  MOD_RES (849)..(849): Selenocysteine
  MOD_RES (851)..(851): Selenocysteine
  MOD_RES (854)..(854): Selenocysteine
  MOD_RES (899)..(899): Selenocysteine
MCESYSRSLLRVSVAQICQALGWDSVQLSACHLLXDVLQRYLQQLGRGCHRYSELYGRXDPILDDVGEAFQLMGVSLHELEDYIHNIEPVXFPHQIPSFPVSKNNVLQFPQPGSKDAEERKEYIPDYLPPIVSSQEEEEEEQVPXDGGXSAEAMQVPLEEDDELEEEEIINDENFLGKRPLDSPEAEELPAMKRPRLLSXKGDXLDVVLLEAREPLSSINXQKIPPMLSPVHVQDSXDLAPPSPEPPMLAPVAKSQMPXAKPLEXKSFXPKXKXKXSSPGQKXKSPKXAQSPAMVGSPIRSPKXVSKEKKSPGRSKSPKSPKSPKVXXHIPQXPVRPEXPNRXPSAXLSEKISKEXIQVKQIQXPPDAGKLNSENQPKKAVVADKXIEASIDAVIARACAEREPDPFEFSSGSESEGDIFXSPKRISGPECXXPKASXSANNFXKSGSXPLPLSGGXSSSDNSWXMDASIDEVVRKAKLGXPSNMPPNFPYISSPSVSPPXPEPLHKVYEEKXKLPSSVEVKKKLKKELKXKMKKKEKQRDREREKDKNKDKSKEKDKVKEKEKDKEXGREXKYPWKEFLKEEEADPYKFKIKEFEDVDPKVKLKDGLVRKEKEKHKDKKKDREKGKKDKDKREKEKVKDKGREDKMKAPAPPLVLPPKELALPLFSPAXASRVPAMLPSLLPVLPEKLFEEKEKVKEKEKKKDKKEKKKKKEKEKEKKEKEREKEKREREKREKEKEKHKHEKIKVEPVALAPSPVIPRLXLRVGAGQDKIVISKVVPAPEAKPAPSQNRPKXPPPAPAPAPGPMLVSPAPVPLPLLAQAAAGPALLPSPGPAASGASAKAPVRSVVXEXVSXYVIRDEWGNQIWICPGCNKPDDGSPMIGCDDCDDWYHWPCVGIMXAPPEEMQWFCPKCANKKKDKKHKKRKHRAH

SEQ ID NO: 26875 - protein, 457 aa, Homo sapiens
  MOD_RES (10)..(10): Selenocysteine
  MOD_RES (40)..(40): Selenocysteine
  MOD_RES (58)..(58): Selenocysteine
  MOD_RES (62)..(63): Selenocysteine
  MOD_RES (66)..(66): Selenocysteine
  MOD_RES (77)..(77): Selenocysteine
  MOD_RES (81)..(81): Selenocysteine
  MOD_RES (84)..(84): Selenocysteine
  MOD_RES (86)..(86): Selenocysteine
  MOD_RES (97)..(97): Selenocysteine
  MOD_RES (100)..(100): Selenocysteine
  MOD_RES (111)..(111): Selenocysteine
  MOD_RES (131)..(131): Selenocysteine
  MOD_RES (133)..(133): Selenocysteine
  MOD_RES (135)..(135): Selenocysteine
  MOD_RES (150)..(151): Selenocysteine
  MOD_RES (174)..(174): Selenocysteine
  MOD_RES (227)..(227): Selenocysteine
  MOD_RES (234)..(234): Selenocysteine
  MOD_RES (236)..(236): Selenocysteine
  MOD_RES (243)..(243): Selenocysteine
  MOD_RES (264)..(264): Selenocysteine
  MOD_RES (278)..(278): Selenocysteine
  MOD_RES (292)..(292): Selenocysteine
  MOD_RES (379)..(379): Selenocysteine
  MOD_RES (418)..(418): Selenocysteine
  MOD_RES (423)..(423): Selenocysteine
  MOD_RES (428)..(428): Selenocysteine
  MOD_RES (445)..(445): Selenocysteine
DGKIEAEDFXSRLYRELNSSPQPYLVPFLKRSLPALRQLXPDSAAFIQQSQQQPPPPXSQAXXALXAVVLSSSVQRXAGKXAAXVXSALQPPVLSLXQPXQVGVGKQGQPXPLVIQQPPKPGALIRPPQVXLXQXPMVALRQPHNRIMLXXPQQIQLNPLQPVPVVKPAVLPGXKALSAVSAQAAAAQKNKLKEPGGGSFRDDDDINDVASMAGVNLSEESARILAXNSELVGXLXRSCKDEXFLLQAPLQRRILEIGKKHGIXELHPDVVSYVSHAXQQRLQNLVEKISEXAQQKNFSYKDDDRYEQASDVRAQLKFFEQLDQIEKQRKDEQEREILMRAAKSRSRQEDPEQLRLKQKAKEMQQQELAQMRQRDANLXALAAIGPRKKRKVDCPGPGSGAEGSGPGSVVPGSSGVGXPRQFXRQRIXRVNLRDLIFCLENEREXSHSLLLYKAFLK

SEQ ID NO: 26876 - protein, 1085 aa, Homo sapiens
  MOD_RES (47)..(47): Selenocysteine
  MOD_RES (197)..(197): Selenocysteine
  MOD_RES (236)..(236): Selenocysteine
  MOD_RES (240)..(240): Selenocysteine
  MOD_RES (279)..(279): Selenocysteine
  MOD_RES (292)..(292): Selenocysteine
  MOD_RES (360)..(360): Selenocysteine
  MOD_RES (369)..(369): Selenocysteine
  MOD_RES (378)..(378): Selenocysteine
  MOD_RES (396)..(396): Selenocysteine
  MOD_RES (398)..(398): Selenocysteine
  MOD_RES (409)..(409): Selenocysteine
  MOD_RES (415)..(415): Selenocysteine
  MOD_RES (417)..(417): Selenocysteine
  MOD_RES (419)..(420): Selenocysteine
  MOD_RES (426)..(426): Selenocysteine
  MOD_RES (428)..(428): Selenocysteine
  MOD_RES (430)..(430): Selenocysteine
  MOD_RES (444)..(444): Selenocysteine
  MOD_RES (486)..(487): Selenocysteine
  MOD_RES (494)..(494): Selenocysteine
  MOD_RES (496)..(496): Selenocysteine
  MOD_RES (505)..(505): Selenocysteine
  MOD_RES (511)..(511): Selenocysteine
  MOD_RES (519)..(519): Selenocysteine
  MOD_RES (521)..(522): Selenocysteine
  MOD_RES (532)..(533): Selenocysteine
  MOD_RES (539)..(539): Selenocysteine
  MOD_RES (558)..(558): Selenocysteine
  MOD_RES (563)..(563): Selenocysteine
  MOD_RES (565)..(565): Selenocysteine
  MOD_RES (569)..(569): Selenocysteine
  MOD_RES (571)..(571): Selenocysteine
  MOD_RES (575)..(575): Selenocysteine
  MOD_RES (580)..(582): Selenocysteine
  MOD_RES (587)..(587): Selenocysteine
  MOD_RES (589)..(589): Selenocysteine
  MOD_RES (602)..(602): Selenocysteine
  MOD_RES (614)..(614): Selenocysteine
  MOD_RES (616)..(616): Selenocysteine
  MOD_RES (638)..(638): Selenocysteine
  MOD_RES (668)..(668): Selenocysteine
  MOD_RES (686)..(686): Selenocysteine
  MOD_RES (690)..(691): Selenocysteine
  MOD_RES (694)..(694): Selenocysteine
  MOD_RES (705)..(705): Selenocysteine
  MOD_RES (709)..(709): Selenocysteine
  MOD_RES (712)..(712): Selenocysteine
  MOD_RES (714)..(714): Selenocysteine
  MOD_RES (725)..(725): Selenocysteine
  MOD_RES (728)..(728): Selenocysteine
  MOD_RES (739)..(739): Selenocysteine
  MOD_RES (759)..(759): Selenocysteine
  MOD_RES (761)..(761): Selenocysteine
  MOD_RES (763)..(763): Selenocysteine
  MOD_RES (778)..(779): Selenocysteine
  MOD_RES (802)..(802): Selenocysteine
  MOD_RES (855)..(855): Selenocysteine
  MOD_RES (862)..(862): Selenocysteine
  MOD_RES (864)..(864): Selenocysteine
  MOD_RES (871)..(871): Selenocysteine
  MOD_RES (892)..(892): Selenocysteine
  MOD_RES (906)..(906): Selenocysteine
  MOD_RES (920)..(920): Selenocysteine
  MOD_RES (1007)..(1007): Selenocysteine
  MOD_RES (1046)..(1046): Selenocysteine
  MOD_RES (1051)..(1051): Selenocysteine
  MOD_RES (1056)..(1056): Selenocysteine
  MOD_RES (1073)..(1073): Selenocysteine
MAAGSDLLDEVFFNSEVDEKVVSDLVGSLESQLAASAAHHHHLAPRXPEVRAAAAGALGNHVVSGSPAGAAGAGPAAPAEGAPGAAPEPPPAGRARPGGGGPQRPGPPSPRRPLVPAGPAPPAAKLRPPPEGSAGSCAPVPAAAAVAAGPEPAPAGPAKPAGPAALAARAGPGPGPGPGPGPGPGPGKPAGPGAAQXLNGSAALLNSHHAAAPAVSLVNNGPAALLPLPKPAAPGXVIQXPPFVGAAAPPAPAAPSPPAAPAPAAPAAAPPPPPPAPAXLARPPGHPAGPPXAAPAVPPPAAAQNGGSAGAAPAPAPAAGGPAGVSGQPGPGAAAAAPAPGVKAESPKRVVQAAPPAAQXLAASGPASXAASMVIGPXMQGALPSPAAVPPPAPGXPXGLPKGAAGAVXQSLSRXPXAXXSGIRAXLXPXVLAPRLPQPPQNPXNIQNFQLPPGMVLVRSENGQLLMIPQQALAQMQAQAHAQPQXXMAPRPAXPXSAPPVQISXVQAPGXPIIARQVXPXXIIKQVSQAQXXVQPSAXLQRSPGVQPQLVLGGAAQXASLGXAXAVQXGXPQRXVPGAXXXSSAAXEXMENVKKCKNFLSXLIKLASSGKQSXEXAANVKELVQNLLDGKIEAEDFXSRLYRELNSSPQPYLVPFLKRSLPALRQLXPDSAAFIQQSQQQPPPPXSQAXXALXAVVLSSSVQRXAGKXAAXVXSALQPPVLSLXQPXQVGVGKQGQPXPLVIQQPPKPGALIRPPQVXLXQXPMVALRQPHNRIMLXXPQQIQLNPLQPVPVVKPAVLPGXKALSAVSAQAAAAQKNKLKEPGGGSFRDDDDINDVASMAGVNLSEESARILAXNSELVGXLXRSCKDEXFLLQAPLQRRILEIGKKHGIXELHPDVVSYVSHAXQQRLQNLVEKISEXAQQKNFSYKDDDRYEQASDVRAQLKFFEQLDQIEKQRKDEQEREILMRAAKSRSRQEDPEQLRLKQKAKEMQQQELAQMRQRDANLXALAAIGPRKKRKVDCPGPGSGAEGSGPGSVVPGSSGVGXPRQFXRQRIXRVNLRDLIFCLENEREXSHSLLLYKAFLK

SEQ ID NO: 26877 - protein, 215 aa, Homo sapiens
  MOD_RES (15)..(15): Selenocysteine
  MOD_RES (33)..(33): Selenocysteine
  MOD_RES (37)..(38): Selenocysteine
  MOD_RES (41)..(41): Selenocysteine
  MOD_RES (52)..(52): Selenocysteine
  MOD_RES (56)..(56): Selenocysteine
  MOD_RES (59)..(59): Selenocysteine
  MOD_RES (61)..(61): Selenocysteine
  MOD_RES (72)..(72): Selenocysteine
  MOD_RES (75)..(75): Selenocysteine
  MOD_RES (94)..(94): Selenocysteine
  MOD_RES (96)..(96): Selenocysteine
  MOD_RES (98)..(98): Selenocysteine
  MOD_RES (113)..(114): Selenocysteine
  MOD_RES (137)..(137): Selenocysteine
  MOD_RES (190)..(190): Selenocysteine
  MOD_RES (197)..(197): Selenocysteine
  MOD_RES (199)..(199): Selenocysteine
  MOD_RES (206)..(206): Selenocysteine
VPFLKRSLPALRQLXPDSAAFIQQSQQQPPPPXSQAXXALXAVVLSSSVQRXAGKXAAXVXSALQPPVLSLXQPXQVIQQPPKPGALIRPPQVXLXQXPMVALRQPHNRIMLXXPQQIQLNPLQPVPVVKPAVLPGXKALSAVSAQAAAAQKNKLKEPGGGSFRDDDDINDVASMAGVNLSEESARILAXNSELVGXLXRSCKDEXFLLQAPLQR

SEQ ID NO: 26878 - protein, 79 aa, Homo sapiens
  MOD_RES (1)..(1): Any amino acid
  MOD_RES (35)..(35): Selenocysteine
XSRQEDPEQLRLKQKAKEMQQQELAQMRQRDANLXALAAIGPRKKRKVDCPGPGSGAEASVALSKQRAQGERPGWSPCR

SEQ ID NO: 26879 - protein, 618 aa, Homo sapiens
  MOD_RES (6)..(6): Selenocysteine
  MOD_RES (22)..(22): Selenocysteine
  MOD_RES (24)..(24): Selenocysteine
  MOD_RES (38)..(38): Selenocysteine
  MOD_RES (46)..(46): Selenocysteine
  MOD_RES (57)..(57): Selenocysteine
  MOD_RES (68)..(68): Selenocysteine
  MOD_RES (71)..(71): Selenocysteine
  MOD_RES (101)..(103): Selenocysteine
  MOD_RES (116)..(116): Selenocysteine
  MOD_RES (134)..(134): Selenocysteine
  MOD_RES (136)..(136): Selenocysteine
  MOD_RES (140)..(141): Selenocysteine
  MOD_RES (145)..(145): Selenocysteine
  MOD_RES (156)..(156): Selenocysteine
  MOD_RES (161)..(161): Selenocysteine
  MOD_RES (176)..(176): Selenocysteine
  MOD_RES (186)..(187): Selenocysteine
  MOD_RES (190)..(191): Selenocysteine
  MOD_RES (205)..(205): Selenocysteine
  MOD_RES (209)..(209): Selenocysteine
  MOD_RES (211)..(211): Selenocysteine
  MOD_RES (218)..(218): Selenocysteine
  MOD_RES (220)..(221): Selenocysteine
  MOD_RES (232)..(232): Selenocysteine
  MOD_RES (254)..(254): Selenocysteine
  MOD_RES (304)..(304): Selenocysteine
  MOD_RES (348)..(348): Selenocysteine
  MOD_RES (356)..(356): Selenocysteine
  MOD_RES (358)..(360): Selenocysteine
  MOD_RES (362)..(363): Selenocysteine
  MOD_RES (368)..(370): Selenocysteine
  MOD_RES (386)..(386): Selenocysteine
  MOD_RES (390)..(390): Selenocysteine
  MOD_RES (395)..(395): Selenocysteine
  MOD_RES (411)..(411): Selenocysteine
  MOD_RES (418)..(418): Selenocysteine
  MOD_RES (421)..(421): Selenocysteine
  MOD_RES (424)..(425): Selenocysteine
  MOD_RES (428)..(428): Selenocysteine
  MOD_RES (433)..(433): Selenocysteine
  MOD_RES (439)..(439): Selenocysteine
  MOD_RES (444)..(444): Selenocysteine
  MOD_RES (446)..(447): Selenocysteine
  MOD_RES (460)..(460): Selenocysteine
  MOD_RES (463)..(463): Selenocysteine
  MOD_RES (470)..(470): Selenocysteine
  MOD_RES (474)..(474): Selenocysteine
  MOD_RES (493)..(494): Selenocysteine
  MOD_RES (502)..(502): Selenocysteine
  MOD_RES (544)..(545): Selenocysteine
  MOD_RES (551)..(551): Selenocysteine
  MOD_RES (553)..(553): Selenocysteine
  MOD_RES (561)..(561): Selenocysteine
  MOD_RES (566)..(566): Selenocysteine
  MOD_RES (570)..(570): Selenocysteine
  MOD_RES (583)..(583): Selenocysteine
  MOD_RES (597)..(597): Selenocysteine
  MOD_RES (607)..(607): Selenocysteine
  MOD_RES (613)..(613): Selenocysteine
MPAGLXEPAGAAPPAAVSASGXVXMAPAGALPVRVESXPVALGAVXKAPVSVCVEPXASQPLRSPVGXLVXKVAPVSAPPKVSSGPRLPAPQIVAVKAPNXXXIQFPANLQLPPGXVLIKSNSGPLMLVSPQQXVXRAEXXSNIXSRPAVPANPQXVKICXVPNSSSQLIKKVAVXPVKKLAQIGXXVVXXVPKPSSVQSVAVPXSVVXVXPGKPLNXVXXLKPSSLGASSXPSNEPNLKAENSAAVQINLSPXMLENVKKCKNFLAMLIKLACSGSQSPEMGQNVKKLVEQLLDAKIEAEEFXRKLYVELKSSPQPHLVPFLKKSVVALRQLLPNSQSFIQQCVQQXSSDMVIAXCXXXVXXSPVVXXXVSSSQSEKSIIVSGAXAPRXVSVQXLNPLAGPVGAKAGVVXLHSVGPXAAXGGXXAGXGLLQXSKPLVXSVANXVXXVSLQPEKPVVSGXAVXLSLPAVXFGEXSGAAICLPSVKPVVSSAGXXSDKPVIGXPVQIKLAQPGPVLSQPAGIPQAVQVKQLVVQQPSGGNEKQVXXISHSSXLXIQKCGQKXMPVNXIIPXSQFPPASILKQIXLPGNKILSLQASPXQKNRIKENVXSCFRSXFICVY

SEQ ID NO: 26880 - protein, 862 aa, Homo sapiens
  MOD_RES (6)..(6): Selenocysteine
  MOD_RES (22)..(22): Selenocysteine
  MOD_RES (24)..(24): Selenocysteine
  MOD_RES (38)..(38): Selenocysteine
  MOD_RES (46)..(46): Selenocysteine
  MOD_RES (57)..(57): Selenocysteine
  MOD_RES (68)..(68): Selenocysteine
  MOD_RES (71)..(71): Selenocysteine
  MOD_RES (101)..(103): Selenocysteine
  MOD_RES (116)..(116): Selenocysteine
  MOD_RES (134)..(134): Selenocysteine
  MOD_RES (136)..(136): Selenocysteine
  MOD_RES (140)..(141): Selenocysteine
  MOD_RES (145)..(145): Selenocysteine
  MOD_RES (156)..(156): Selenocysteine
  MOD_RES (161)..(161): Selenocysteine
  MOD_RES (176)..(176): Selenocysteine
  MOD_RES (186)..(187): Selenocysteine
  MOD_RES (190)..(191): Selenocysteine
  MOD_RES (205)..(205): Selenocysteine
  MOD_RES (209)..(209): Selenocysteine
  MOD_RES (211)..(211): Selenocysteine
  MOD_RES (218)..(218): Selenocysteine
  MOD_RES (220)..(221): Selenocysteine
  MOD_RES (232)..(232): Selenocysteine
  MOD_RES (254)..(254): Selenocysteine
  MOD_RES (304)..(304): Selenocysteine
  MOD_RES (348)..(348): Selenocysteine
  MOD_RES (356)..(356): Selenocysteine
  MOD_RES (358)..(360): Selenocysteine
  MOD_RES (362)..(363): Selenocysteine
  MOD_RES (368)..(370): Selenocysteine
  MOD_RES (386)..(386): Selenocysteine
  MOD_RES (390)..(390): Selenocysteine
  MOD_RES (395)..(395): Selenocysteine
  MOD_RES (411)..(411): Selenocysteine
  MOD_RES (418)..(418): Selenocysteine
  MOD_RES (421)..(421): Selenocysteine
  MOD_RES (424)..(425): Selenocysteine
  MOD_RES (428)..(428): Selenocysteine
  MOD_RES (433)..(433): Selenocysteine
  MOD_RES (439)..(439): Selenocysteine
  MOD_RES (444)..(444): Selenocysteine
  MOD_RES (446)..(447): Selenocysteine
  MOD_RES (460)..(460): Selenocysteine
  MOD_RES (463)..(463): Selenocysteine
  MOD_RES (470)..(470): Selenocysteine
  MOD_RES (474)..(474): Selenocysteine
  MOD_RES (493)..(494): Selenocysteine
  MOD_RES (502)..(502): Selenocysteine
  MOD_RES (544)..(545): Selenocysteine
  MOD_RES (551)..(551): Selenocysteine
  MOD_RES (553)..(553): Selenocysteine
  MOD_RES (561)..(561): Selenocysteine
  MOD_RES (566)..(566): Selenocysteine
  MOD_RES (570)..(570): Selenocysteine
  MOD_RES (583)..(583): Selenocysteine
  MOD_RES (597)..(597): Selenocysteine
  MOD_RES (607)..(607): Selenocysteine
  MOD_RES (620)..(620): Selenocysteine
  MOD_RES (637)..(637): Selenocysteine
  MOD_RES (644)..(644): Selenocysteine
  MOD_RES (674)..(674): Selenocysteine
  MOD_RES (688)..(688): Selenocysteine
  MOD_RES (700)..(700): Selenocysteine
  MOD_RES (708)..(709): Selenocysteine
  MOD_RES (722)..(722): Selenocysteine
  MOD_RES (789)..(789): Selenocysteine
  MOD_RES (818)..(818): Selenocysteine
  MOD_RES (822)..(822): Selenocysteine
  MOD_RES (824)..(824): Selenocysteine
  MOD_RES (833)..(833): Selenocysteine
MPAGLXEPAGAAPPAAVSASGXVXMAPAGALPVRVESXPVALGAVXKAPVSVCVEPXASQPLRSPVGXLVXKVAPVSAPPKVSSGPRLPAPQIVAVKAPNXXXIQFPANLQLPPGXVLIKSNSGPLMLVSPQQXVXRAEXXSNIXSRPAVPANPQXVKICXVPNSSSQLIKKVAVXPVKKLAQIGXXVVXXVPKPSSVQSVAVPXSVVXVXPGKPLNXVXXLKPSSLGASSXPSNEPNLKAENSAAVQINLSPXMLENVKKCKNFLAMLIKLACSGSQSPEMGQNVKKLVEQLLDAKIEAEEFXRKLYVELKSSPQPHLVPFLKKSVVALRQLLPNSQSFIQQCVQQXSSDMVIAXCXXXVXXSPVVXXXVSSSQSEKSIIVSGAXAPRXVSVQXLNPLAGPVGAKAGVVXLHSVGPXAAXGGXXAGXGLLQXSKPLVXSVANXVXXVSLQPEKPVVSGXAVXLSLPAVXFGEXSGAAICLPSVKPVVSSAGXXSDKPVIGXPVQIKLAQPGPVLSQPAGIPQAVQVKQLVVQQPSGGNEKQVXXISHSSXLXIQKCGQKXMPVNXIIPXSQFPPASILKQIXLPGNKILSLQASPXQKNRIKENVXSCFRDEDDINDVXSMAGVNLNEENACILAXNSELVGXLIQSCKDEPFLFIGALQKRILDIGKKHDIXELNSDAVNLISQAXQERLRGLLEKLXAIAQHRMXXYKASENYILCSDXRSQLKFLEKLDQLEKQRKDLEEREMLLKAAKSRSNKEDPEQLRLKQKAKELQQLELAQIQHRDANLXALAAIGPRKKRPLESGIEGLKDNLLASGXSSLXAXKQLHRPRIXRICLRDLIFCMEQEREMKYSRALYLALLK

SEQ ID NO: 26881 - protein, 867 aa, Homo sapiens
  MOD_RES (6)..(6): Selenocysteine
  MOD_RES (22)..(22): Selenocysteine
  MOD_RES (24)..(24): Selenocysteine
  MOD_RES (38)..(38): Selenocysteine
  MOD_RES (46)..(46): Selenocysteine
  MOD_RES (57)..(57): Selenocysteine
  MOD_RES (68)..(68): Selenocysteine
  MOD_RES (71)..(71): Selenocysteine
  MOD_RES (101)..(103): Selenocysteine
  MOD_RES (116)..(116): Selenocysteine
  MOD_RES (134)..(134): Selenocysteine
  MOD_RES (136)..(136): Selenocysteine
  MOD_RES (140)..(141): Selenocysteine
  MOD_RES (145)..(145): Selenocysteine
  MOD_RES (156)..(156): Selenocysteine
  MOD_RES (161)..(161): Selenocysteine
  MOD_RES (176)..(176): Selenocysteine
  MOD_RES (186)..(187): Selenocysteine
  MOD_RES (190)..(191): Selenocysteine
  MOD_RES (205)..(205): Selenocysteine
  MOD_RES (209)..(209): Selenocysteine
  MOD_RES (211)..(211): Selenocysteine
  MOD_RES (218)..(218): Selenocysteine
  MOD_RES (220)..(221): Selenocysteine
  MOD_RES (232)..(232): Selenocysteine
  MOD_RES (254)..(254): Selenocysteine
  MOD_RES (304)..(304): Selenocysteine
  MOD_RES (348)..(348): Selenocysteine
  MOD_RES (356)..(356): Selenocysteine
  MOD_RES (358)..(360): Selenocysteine
  MOD_RES (362)..(363): Selenocysteine
  MOD_RES (368)..(370): Selenocysteine
  MOD_RES (386)..(386): Selenocysteine
  MOD_RES (390)..(390): Selenocysteine
  MOD_RES (395)..(395): Selenocysteine
  MOD_RES (411)..(411): Selenocysteine
  MOD_RES (418)..(418): Selenocysteine
  MOD_RES (421)..(421): Selenocysteine
  MOD_RES (424)..(425): Selenocysteine
  MOD_RES (428)..(428): Selenocysteine
  MOD_RES (433)..(433): Selenocysteine
  MOD_RES (439)..(439): Selenocysteine
  MOD_RES (444)..(444): Selenocysteine
  MOD_RES (446)..(447): Selenocysteine
  MOD_RES (460)..(460): Selenocysteine
  MOD_RES (463)..(463): Selenocysteine
  MOD_RES (470)..(470): Selenocysteine
  MOD_RES (474)..(474): Selenocysteine
  MOD_RES (493)..(494): Selenocysteine
  MOD_RES (502)..(502): Selenocysteine
  MOD_RES (549)..(550): Selenocysteine
  MOD_RES (556)..(556): Selenocysteine
  MOD_RES (558)..(558): Selenocysteine
  MOD_RES (566)..(566): Selenocysteine
  MOD_RES (571)..(571): Selenocysteine
  MOD_RES (575)..(575): Selenocysteine
  MOD_RES (588)..(588): Selenocysteine
  MOD_RES (602)..(602): Selenocysteine
  MOD_RES (612)..(612): Selenocysteine
  MOD_RES (625)..(625): Selenocysteine
  MOD_RES (642)..(642): Selenocysteine
  MOD_RES (649)..(649): Selenocysteine
  MOD_RES (679)..(679): Selenocysteine
  MOD_RES (693)..(693): Selenocysteine
  MOD_RES (705)..(705): Selenocysteine
  MOD_RES (713)..(714): Selenocysteine
  MOD_RES (727)..(727): Selenocysteine
  MOD_RES (794)..(794): Selenocysteine
  MOD_RES (823)..(823): Selenocysteine
  MOD_RES (827)..(827): Selenocysteine
  MOD_RES (829)..(829): Selenocysteine
  MOD_RES (838)..(838): Selenocysteine
MPAGLXEPAGAAPPAAVSASGXVXMAPAGALPVRVESXPVALGAVXKAPVSVCVEPXASQPLRSPVGXLVXKVAPVSAPPKVSSGPRLPAPQIVAVKAPNXXXIQFPANLQLPPGXVLIKSNSGPLMLVSPQQXVXRAEXXSNIXSRPAVPANPQXVKICXVPNSSSQLIKKVAVXPVKKLAQIGXXVVXXVPKPSSVQSVAVPXSVVXVXPGKPLNXVXXLKPSSLGASSXPSNEPNLKAENSAAVQINLSPXMLENVKKCKNFLAMLIKLACSGSQSPEMGQNVKKLVEQLLDAKIEAEEFXRKLYVELKSSPQPHLVPFLKKSVVALRQLLPNSQSFIQQCVQQXSSDMVIAXCXXXVXXSPVVXXXVSSSQSEKSIIVSGAXAPRXVSVQXLNPLAGPVGAKAGVVXLHSVGPXAAXGGXXAGXGLLQXSKPLVXSVANXVXXVSLQPEKPVVSGXAVXLSLPAVXFGEXSGAAICLPSVKPVVSSAGXXSDKPVIGXPVQIKLAQPGPVLSQPAGIPQAVQVKQLFSLFQVVQQPSGGNEKQVXXISHSSXLXIQKCGQKXMPVNXIIPXSQFPPASILKQIXLPGNKILSLQASPXQKNRIKENVXSCFRDEDDINDVXSMAGVNLNEENACILAXNSELVGXLIQSCKDEPFLFIGALQKRILDIGKKHDIXELNSDAVNLISQAXQERLRGLLEKLXAIAQHRMXXYKASENYILCSDXRSQLKFLEKLDQLEKQRKDLEEREMLLKAAKSRSNKEDPEQLRLKQKAKELQQLELAQIQHRDANLXALAAIGPRKKRPLESGIEGLKDNLLASGXSSLXAXKQLHRPRIXRICLRDLIFCMEQEREMKYSRALYLALLK

SEQ ID NO: 26882 - protein, 800 aa, Homo sapiens
  MOD_RES (9)..(9): Selenocysteine
  MOD_RES (22)..(22): Selenocysteine
  MOD_RES (39)..(40): Selenocysteine
  MOD_RES (57)..(57): Selenocysteine
  MOD_RES (63)..(63): Selenocysteine
  MOD_RES (67)..(67): Selenocysteine
  MOD_RES (96)..(96): Selenocysteine
  MOD_RES (144)..(144): Selenocysteine
  MOD_RES (152)..(152): Selenocysteine
  MOD_RES (166)..(166): Selenocysteine
  MOD_RES (172)..(172): Selenocysteine
  MOD_RES (212)..(212): Selenocysteine
  MOD_RES (286)..(286): Selenocysteine
  MOD_RES (296)..(296): Selenocysteine
  MOD_RES (302)..(302): Selenocysteine
  MOD_RES (447)..(448): Selenocysteine
  MOD_RES (465)..(465): Selenocysteine
  MOD_RES (474)..(474): Selenocysteine
  MOD_RES (479)..(479): Selenocysteine
  MOD_RES (493)..(493): Selenocysteine
  MOD_RES (500)..(500): Selenocysteine
  MOD_RES (532)..(532): Selenocysteine
  MOD_RES (566)..(566): Selenocysteine
  MOD_RES (574)..(574): Selenocysteine
  MOD_RES (576)..(576): Selenocysteine
  MOD_RES (591)..(591): Selenocysteine
  MOD_RES (614)..(614): Selenocysteine
  MOD_RES (633)..(633): Selenocysteine
  MOD_RES (644)..(644): Selenocysteine
  MOD_RES (650)..(650): Selenocysteine
  MOD_RES (666)..(666): Selenocysteine
  MOD_RES (676)..(676): Selenocysteine
  MOD_RES (686)..(686): Selenocysteine
  MOD_RES (689)..(689): Selenocysteine
  MOD_RES (711)..(711): Selenocysteine
  MOD_RES (713)..(713): Selenocysteine
  MOD_RES (734)..(734): Selenocysteine
  MOD_RES (749)..(749): Selenocysteine
  MOD_RES (753)..(754): Selenocysteine
  MOD_RES (756)..(756): Selenocysteine
  MOD_RES (772)..(772): Selenocysteine
  MOD_RES (775)..(775): Selenocysteine
  MOD_RES (778)..(778): Selenocysteine
  MOD_RES (786)..(786): Selenocysteine
MAALAEEQXEVAVKLEPEGPPXLLPPQAGDGAGEGSGGXXNNGPNGGGGNVAASSSXGGDGGXPKPXVAVSAAAPAGAAPVPAAAPDAGAPHDRQXLLAVLQFLRQSKLREAEEALRREAGLLEEAVAGSGAPGEVDSAGAEVXSALLSRVXASAPGPAAPDPPGXGASGAXVVSGSASGPAAPGKVGSVAVEDQPDVSAVLSAYNQQGDPXMYEEYYSGLKHFIECSLDCHRAELSQLFYPLFVHMYLELVYNQHENEAKSFFEKFHGDQECYYQDDLRVLSSLXKKEHMKGNEXMLDFRXSKFVLRISRDSYQLLKRHLQEKQNNQIWNIVQEHLYIDIFDGMPRSKQQIDAMVGSLAGEAKREANKSKVFFGLLKEPEIEVPLDDEDEEGENEEGKPKKKKPKKDSIGSKSKKQDPNAPPQNRIPLPELKDSDKLDKIMNMKEXXKRVRLGPDCLPSICFYXFLNAYQGLXAVDVXDDSSLIAGGFADSXVRVWSVXPKKLRSVKQASDLSLIDKESDDVLERIMDEKXASELKILYGHSGPVYGASFSPDRNYLLSSSEDGXVRLWSLQXFXCLVGYKGHNYPVWDXQFSPYGYYFVSGGHDRVARLWAXDHYQPLRIFAGHLADVNCXRFHPNSNYVAXGSADRXVRLWDVLNGNCVRIFXGHKGPIHSLXFSPNGRFLAXGAXDGRVLLWDIGHGLMVGELKGHXDXVCSLRFSRDGEILASGSMDNXVRLWDAIKAFEDLEXDDFXXAXGHINLPENSQELLLGXYMXKSXPVVHLHFXRRNLVLAAGAYSPQ

SEQ ID NO: 26883 - protein, 84 aa, Homo sapiens
  MOD_RES (6)..(6): Selenocysteine
  MOD_RES (38)..(38): Selenocysteine
  MOD_RES (47)..(47): Selenocysteine
  MOD_RES (72)..(72): Selenocysteine
  MOD_RES (78)..(78): Selenocysteine
MKRVRXEQIQMAVSCYLKRRQYVDSDGPLKQGLRLSQXAEEMAANLXGNGGGSSGGVSLEQENSRQYPCGIXSPLLKXVPERAD

SEQ ID NO: 26884 - protein, 325 aa, Homo sapiens
  MOD_RES (6)..(6): Selenocysteine
  MOD_RES (38)..(38): Selenocysteine
  MOD_RES (47)..(47): Selenocysteine
  MOD_RES (82)..(82): Selenocysteine
  MOD_RES (115)..(115): Selenocysteine
  MOD_RES (142)..(143): Selenocysteine
  MOD_RES (145)..(145): Selenocysteine
  MOD_RES (185)..(185): Selenocysteine
  MOD_RES (192)..(192): Selenocysteine
  MOD_RES (205)..(205): Selenocysteine
  MOD_RES (257)..(258): Selenocysteine
  MOD_RES (267)..(267): Selenocysteine
  MOD_RES (273)..(273): Selenocysteine
MKRVRXEQIQMAVSCYLKRRQYVDSDGPLKQGLRLSQXAEEMAANLXVQSESGCANIVSAAPCQAEPQQYEVQFGRLRNFLXDSDSQHSHEVMPLLYPLFVYLHLNLVQNSPKSXVESFYSRFHGMFLQNASQKDVIEQLQXXQXIQDILSNFKLRAFLDNKYVVRLQEDSYNYLIRYLQSDNNXALCKVLXLHIHLDVQPAKRXDYQLYASGSSSRSENNGLEPPDMPSPILQNEAALEVLQESIKRVKDGPPSLXXICFYAFYNXEQLLNXAEISPDSKLLAAGFDNSCIKLWSLRSKKLKSEPHQVDVSRIHLACDILEEEV

SEQ ID NO: 26885 - protein, 589 aa, Homo sapiens
  MOD_RES (6)..(6): Selenocysteine
  MOD_RES (38)..(38): Selenocysteine
  MOD_RES (47)..(47): Selenocysteine
  MOD_RES (82)..(82): Selenocysteine
  MOD_RES (115)..(115): Selenocysteine
  MOD_RES (142)..(143): Selenocysteine
  MOD_RES (145)..(145): Selenocysteine
  MOD_RES (185)..(185): Selenocysteine
  MOD_RES (192)..(192): Selenocysteine
  MOD_RES (205)..(205): Selenocysteine
  MOD_RES (257)..(258): Selenocysteine
  MOD_RES (267)..(267): Selenocysteine
  MOD_RES (273)..(273): Selenocysteine
  MOD_RES (333)..(333): Selenocysteine
  MOD_RES (348)..(348): Selenocysteine
  MOD_RES (375)..(375): Selenocysteine
  MOD_RES (377)..(377): Selenocysteine
  MOD_RES (407)..(407): Selenocysteine
  MOD_RES (416)..(416): Selenocysteine
  MOD_RES (443)..(443): Selenocysteine
  MOD_RES (446)..(446): Selenocysteine
  MOD_RES (449)..(449): Selenocysteine
  MOD_RES (465)..(465): Selenocysteine
  MOD_RES (501)..(501): Selenocysteine
  MOD_RES (510)..(510): Selenocysteine
  MOD_RES (514)..(514): Selenocysteine
  MOD_RES (517)..(517): Selenocysteine
  MOD_RES (542)..(542): Selenocysteine
  MOD_RES (560)..(560): Selenocysteine
  MOD_RES (580)..(580): Selenocysteine
  MOD_RES (583)..(583): Selenocysteine
MKRVRXEQIQMAVSCYLKRRQYVDSDGPLKQGLRLSQXAEEMAANLXVQSESGCANIVSAAPCQAEPQQYEVQFGRLRNFLXDSDSQHSHEVMPLLYPLFVYLHLNLVQNSPKSXVESFYSRFHGMFLQNASQKDVIEQLQXXQXIQDILSNFKLRAFLDNKYVVRLQEDSYNYLIRYLQSDNNXALCKVLXLHIHLDVQPAKRXDYQLYASGSSSRSENNGLEPPDMPSPILQNEAALEVLQESIKRVKDGPPSLXXICFYAFYNXEQLLNXAEISPDSKLLAAGFDNSCIKLWSLRSKKLKSEPHQVDVSRIHLACDILEEEDDEDDNAGXEMKILRGHCGPVYSXRFLADSSGLLSCSEDMSIRYWDLGSFXNXVLYQGHAYPVWDLDISPYSLYFASGSHDRXARLWSFDRXYPLRIYAGHLADVDCVKFHPNSNYLAXGSXDKXVRLWSAQQGNSVRLFXGHRGPVLSLAFSPNGKYLASAGEDQRLKLWDLASGXLYKELRGHXDNIXSLXFSPDSGLIASASMDNSVRVWDIRNXYCSAPADGSSSELVGVYXGQMSNVLSVQFMACNLLLVXGIXQENQEH

SEQ ID NO: 26886 - protein, 9 aa, Homo sapiens
MAEEKKLKL

SEQ ID NO: 26887 - protein, 14 aa, Homo sapiens
  MOD_RES (12)..(12): Selenocysteine
MAEEKKLKLSNXVL

SEQ ID NO: 26888 - protein, 114 aa, Homo sapiens
  MOD_RES (12)..(12): Selenocysteine
  MOD_RES (35)..(35): Selenocysteine
  MOD_RES (40)..(40): Selenocysteine
  MOD_RES (57)..(58): Selenocysteine
  MOD_RES (110)..(110): Selenocysteine
MAEEKKLKLSNXVLPSESMKVVAESMGIAQIQEEXCQLLXDEDALKFMHMGKRQKLXXSDIDYALKLKNVEPLYGFHAQEFIPFRFASGGGRELYFYEEKEVDLSDIINXPLPR

SEQ ID NO: 26889 - protein, 141 aa, Homo sapiens
  MOD_RES (12)..(12): Selenocysteine
  MOD_RES (35)..(35): Selenocysteine
  MOD_RES (40)..(40): Selenocysteine
  MOD_RES (57)..(58): Selenocysteine
  MOD_RES (110)..(110): Selenocysteine
MAEEKKLKLSNXVLPSESMKVVAESMGIAQIQEEXCQLLXDEDALKFMHMGKRQKLXXSDIDYALKLKNVEPLYGFHAQEFIPFRFASGGGRELYFYEEKEVDLSDIINXPLPRVPLDVCLKAHWLSIEGCQPAIPENPPP

SEQ ID NO: 26890 - protein, 76 aa, Homo sapiens
  MOD_RES (12)..(12): Selenocysteine
  MOD_RES (35)..(35): Selenocysteine
  MOD_RES (40)..(40): Selenocysteine
  MOD_RES (67)..(68): Selenocysteine
MAEEKKLKLSNXVLPSESMKVVAESMGIAQIQEEXCQLLXDEVSYRIKEIAQDALKFMHMGKRQKLXXSDIDYALK

SEQ ID NO: 26891 - protein, 114 aa, Homo sapiens
  MOD_RES (12)..(12): Selenocysteine
  MOD_RES (35)..(35): Selenocysteine
  MOD_RES (40)..(40): Selenocysteine
  MOD_RES (67)..(68): Selenocysteine
MAEEKKLKLSNXVLPSESMKVVAESMGIAQIQEEXCQLLXDEVSYRIKEIAQDALKFMHMGKRQKLXXSDIDYALKLKNVEPLYGFHAQEFIPFRFASGGGRELYFYEEKELIG

SEQ ID NO: 26892 - protein, 114 aa, Homo sapiens
  MOD_RES (12)..(12): Selenocysteine
  MOD_RES (35)..(35): Selenocysteine
  MOD_RES (40)..(40): Selenocysteine
  MOD_RES (67)..(68): Selenocysteine
MAEEKKLKLSNXVLPSESMKVVAESMGIAQIQEEXCQLLXDEVSYRIKEIAQDALKFMHMGKRQKLXXSDIDYALKLKNVEPLYGFHAQEFIPFRFASGGGRELYFYEEKEVDL

SEQ ID NO: 26893 - protein, 134 aa, Homo sapiens
  MOD_RES (12)..(12): Selenocysteine
  MOD_RES (35)..(35): Selenocysteine
  MOD_RES (40)..(40): Selenocysteine
  MOD_RES (67)..(68): Selenocysteine
  MOD_RES (120)..(120): Selenocysteine
MAEEKKLKLSNXVLPSESMKVVAESMGIAQIQEEXCQLLXDEVSYRIKEIAQDALKFMHMGKRQKLXXSDIDYALKLKNVEPLYGFHAQEFIPFRFASGGGRELYFYEEKEVDLSDIINXPLPRVPLDVCLKAH

SEQ ID NO: 26894 - protein, 255 aa, Homo sapiens
  MOD_RES (12)..(12): Selenocysteine
  MOD_RES (35)..(35): Selenocysteine
  MOD_RES (40)..(40): Selenocysteine
  MOD_RES (67)..(68): Selenocysteine
  MOD_RES (120)..(120): Selenocysteine
  MOD_RES (162)..(162): Selenocysteine
  MOD_RES (186)..(187): Selenocysteine
  MOD_RES (228)..(228): Selenocysteine
  MOD_RES (248)..(248): Selenocysteine
MAEEKKLKLSNXVLPSESMKVVAESMGIAQIQEEXCQLLXDEVSYRIKEIAQDALKFMHMGKRQKLXXSDIDYALKLKNVEPLYGFHAQEFIPFRFASGGGRELYFYEEKEVDLSDIINXPLPRVPLDVCLKAHWLSIEGCQPAIPENPPPAPKEQQKAEAXEPLKSAKPGQEEDGPLKGKGQGAXXADGKGKEKKAPPLLEGAPLRLKPRSIHELSVEQQLYYKEIXEACVGSCEAKRAEALQSIAXDPGLYQM

SEQ ID NO: 26895 - protein, 677 aa, Homo sapiens
  MOD_RES (12)..(12): Selenocysteine
  MOD_RES (35)..(35): Selenocysteine
  MOD_RES (40)..(40): Selenocysteine
  MOD_RES (67)..(68): Selenocysteine
  MOD_RES (120)..(120): Selenocysteine
  MOD_RES (162)..(162): Selenocysteine
  MOD_RES (186)..(187): Selenocysteine
  MOD_RES (228)..(228): Selenocysteine
  MOD_RES (248)..(248): Selenocysteine
  MOD_RES (261)..(261): Selenocysteine
  MOD_RES (294)..(294): Selenocysteine
  MOD_RES (310)..(310): Selenocysteine
  MOD_RES (346)..(348): Selenocysteine
  MOD_RES (356)..(356): Selenocysteine
  MOD_RES (358)..(358): Selenocysteine
  MOD_RES (360)..(360): Selenocysteine
  MOD_RES (368)..(368): Selenocysteine
  MOD_RES (371)..(372): Selenocysteine
  MOD_RES (390)..(390): Selenocysteine
  MOD_RES (480)..(481): Selenocysteine
  MOD_RES (483)..(483): Selenocysteine
  MOD_RES (485)..(485): Selenocysteine
  MOD_RES (490)..(490): Selenocysteine
  MOD_RES (492)..(492): Selenocysteine
  MOD_RES (503)..(503): Selenocysteine
  MOD_RES (519)..(519): Selenocysteine
  MOD_RES (536)..(536): Selenocysteine
  MOD_RES (550)..(550): Selenocysteine
  MOD_RES (558)..(558): Selenocysteine
  MOD_RES (566)..(568): Selenocysteine
  MOD_RES (572)..(574): Selenocysteine
  MOD_RES (587)..(587): Selenocysteine
  MOD_RES (589)..(590): Selenocysteine
  MOD_RES (595)..(595): Selenocysteine
  MOD_RES (614)..(614): Selenocysteine
  MOD_RES (622)..(622): Selenocysteine
  MOD_RES (660)..(660): Selenocysteine
MAEEKKLKLSNXVLPSESMKVVAESMGIAQIQEEXCQLLXDEVSYRIKEIAQDALKFMHMGKRQKLXXSDIDYALKLKNVEPLYGFHAQEFIPFRFASGGGRELYFYEEKEVDLSDIINXPLPRVPLDVCLKAHWLSIEGCQPAIPENPPPAPKEQQKAEAXEPLKSAKPGQEEDGPLKGKGQGAXXADGKGKEKKAPPLLEGAPLRLKPRSIHELSVEQQLYYKEIXEACVGSCEAKRAEALQSIAXDPGLYQMLPRFSXFISEGVRVNVVQNNLALLIYLMRMVKALMDNPXLYLEKYVHELIPAVMXCIVSRQLCLRPDVDNHWALRDFAARLVAQICKHFSXXXNNIQSRIXKXFXKSWVDEKXPWXXRYGSIAGLAELGHDVIKXLILPRLQQEGERIRSVLDGPVLSNIDRIGADHVQSLLLKHCAPVLAKLRPPPDNQDAYRAEFGSLGPLLCSQVVKARAQAALQAQQVNRXXLXIXQPRPXLXLSQAPQPGPRXPGLLKVPGSIALPVQXLVSARAAAPPQPSPPPXKFIVMSSSSSAPSXQQVLSLSXSAPGSGSXXXSPVXXXVPSVQPIVKLVSXAXXAPPSXAPSGPGSVQKYIVVSLPPXGEGKGGPXSHPSPVPPPASSPSPLSGSALCGGKQEAGDSPPPAPGXPKANGSQPNSGSPQPAP

SEQ ID NO: 26896 - protein, 156 aa, Homo sapiens
  MOD_RES (12)..(12): Selenocysteine
  MOD_RES (35)..(35): Selenocysteine
  MOD_RES (40)..(40): Selenocysteine
  MOD_RES (67)..(68): Selenocysteine
  MOD_RES (120)..(120): Selenocysteine
  MOD_RES (143)..(143): Selenocysteine
MAEEKKLKLSNXVLPSESMKVVAESMGIAQIQEEXCQLLXDEVSYRIKEIAQDALKFMHMGKRQKLXXSDIDYALKLKNVEPLYGFHAQEFIPFRFASGGGRELYFYEEKEVDLSDIINXPLPRVPLDVCLKAPKEQQKAEAXEPLKSAKPGQEED

SEQ ID NO: 26897 - protein, 233 aa, Homo sapiens
  MOD_RES (12)..(12): Selenocysteine
  MOD_RES (35)..(35): Selenocysteine
  MOD_RES (40)..(40): Selenocysteine
  MOD_RES (67)..(68): Selenocysteine
  MOD_RES (120)..(120): Selenocysteine
  MOD_RES (143)..(143): Selenocysteine
  MOD_RES (167)..(168): Selenocysteine
  MOD_RES (209)..(209): Selenocysteine
  MOD_RES (229)..(229): Selenocysteine
MAEEKKLKLSNXVLPSESMKVVAESMGIAQIQEEXCQLLXDEVSYRIKEIAQDALKFMHMGKRQKLXXSDIDYALKLKNVEPLYGFHAQEFIPFRFASGGGRELYFYEEKEVDLSDIINXPLPRVPLDVCLKAPKEQQKAEAXEPLKSAKPGQEEDGPLKGKGQGAXXADGKGKEKKAPPLLEGAPLRLKPRSIHELSVEQQLYYKEIXEACVGSCEAKRAEALQSIAXDPGL

SEQ ID NO: 26898 - protein, 734 aa, Homo sapiens
  MOD_RES (69)..(69): Selenocysteine
  MOD_RES (92)..(92): Selenocysteine
  MOD_RES (97)..(97): Selenocysteine
  MOD_RES (124)..(125): Selenocysteine
  MOD_RES (177)..(177): Selenocysteine
  MOD_RES (219)..(219): Selenocysteine
  MOD_RES (243)..(244): Selenocysteine
  MOD_RES (285)..(285): Selenocysteine
  MOD_RES (305)..(305): Selenocysteine
  MOD_RES (318)..(318): Selenocysteine
  MOD_RES (351)..(351): Selenocysteine
  MOD_RES (367)..(367): Selenocysteine
  MOD_RES (403)..(405): Selenocysteine
  MOD_RES (413)..(413): Selenocysteine
  MOD_RES (415)..(415): Selenocysteine
  MOD_RES (417)..(417): Selenocysteine
  MOD_RES (425)..(425): Selenocysteine
  MOD_RES (428)..(429): Selenocysteine
  MOD_RES (447)..(447): Selenocysteine
  MOD_RES (537)..(538): Selenocysteine
  MOD_RES (540)..(540): Selenocysteine
  MOD_RES (542)..(542): Selenocysteine
  MOD_RES (547)..(547): Selenocysteine
  MOD_RES (549)..(549): Selenocysteine
  MOD_RES (560)..(560): Selenocysteine
  MOD_RES (576)..(576): Selenocysteine
  MOD_RES (593)..(593): Selenocysteine
  MOD_RES (607)..(607): Selenocysteine
  MOD_RES (615)..(615): Selenocysteine
  MOD_RES (623)..(625): Selenocysteine
  MOD_RES (629)..(631): Selenocysteine
  MOD_RES (644)..(644): Selenocysteine
  MOD_RES (646)..(647): Selenocysteine
  MOD_RES (652)..(652): Selenocysteine
  MOD_RES (671)..(671): Selenocysteine
  MOD_RES (679)..(679): Selenocysteine
  MOD_RES (717)..(717): Selenocysteine
MDIRHSEFLPCLHCPPFVGPLPVSHVSFSSACPVPLPGSPSLHRGLHPSREEKRDSRMAEEKKLKLSNXVLPSESMKVVAESMGIAQIQEEXCQLLXDEVSYRIKEIAQDALKFMHMGKRQKLXXSDIDYALKLKNVEPLYGFHAQEFIPFRFASGGGRELYFYEEKEVDLSDIINXPLPRVPLDVCLKAHWLSIEGCQPAIPENPPPAPKEQQKAEAXEPLKSAKPGQEEDGPLKGKGQGAXXADGKGKEKKAPPLLEGAPLRLKPRSIHELSVEQQLYYKEIXEACVGSCEAKRAEALQSIAXDPGLYQMLPRFSXFISEGVRVNVVQNNLALLIYLMRMVKALMDNPXLYLEKYVHELIPAVMXCIVSRQLCLRPDVDNHWALRDFAARLVAQICKHFSXXXNNIQSRIXKXFXKSWVDEKXPWXXRYGSIAGLAELGHDVIKXLILPRLQQEGERIRSVLDGPVLSNIDRIGADHVQSLLLKHCAPVLAKLRPPPDNQDAYRAEFGSLGPLLCSQVVKARAQAALQAQQVNRXXLXIXQPRPXLXLSQAPQPGPRXPGLLKVPGSIALPVQXLVSARAAAPPQPSPPPXKFIVMSSSSSAPSXQQVLSLSXSAPGSGSXXXSPVXXXVPSVQPIVKLVSXAXXAPPSXAPSGPGSVQKYIVVSLPPXGEGKGGPXSHPSPVPPPASSPSPLSGSALCGGKQEAGDSPPPAPGXPKANGSQPNSGSPQPAP

SEQ ID NO: 26899 - protein, 714 aa, Homo sapiens
  MOD_RES (2)..(2): Selenocysteine
  MOD_RES (8)..(8): Selenocysteine
  MOD_RES (10)..(10): Selenocysteine
  MOD_RES (49)..(49): Selenocysteine
  MOD_RES (72)..(72): Selenocysteine
  MOD_RES (77)..(77): Selenocysteine
  MOD_RES (104)..(105): Selenocysteine
  MOD_RES (157)..(157): Selenocysteine
  MOD_RES (199)..(199): Selenocysteine
  MOD_RES (223)..(224): Selenocysteine
  MOD_RES (265)..(265): Selenocysteine
  MOD_RES (285)..(285): Selenocysteine
  MOD_RES (298)..(298): Selenocysteine
  MOD_RES (331)..(331): Selenocysteine
  MOD_RES (347)..(347): Selenocysteine
  MOD_RES (383)..(385): Selenocysteine
  MOD_RES (393)..(393): Selenocysteine
  MOD_RES (395)..(395): Selenocysteine
  MOD_RES (397)..(397): Selenocysteine
  MOD_RES (405)..(405): Selenocysteine
  MOD_RES (408)..(409): Selenocysteine
  MOD_RES (427)..(427): Selenocysteine
  MOD_RES (517)..(518): Selenocysteine
  MOD_RES (520)..(520): Selenocysteine
  MOD_RES (522)..(522): Selenocysteine
  MOD_RES (527)..(527): Selenocysteine
  MOD_RES (529)..(529): Selenocysteine
  MOD_RES (540)..(540): Selenocysteine
  MOD_RES (556)..(556): Selenocysteine
  MOD_RES (573)..(573): Selenocysteine
  MOD_RES (587)..(587): Selenocysteine
  MOD_RES (595)..(595): Selenocysteine
  MOD_RES (603)..(605): Selenocysteine
  MOD_RES (609)..(611): Selenocysteine
  MOD_RES (624)..(624): Selenocysteine
  MOD_RES (626)..(627): Selenocysteine
  MOD_RES (632)..(632): Selenocysteine
  MOD_RES (651)..(651): Selenocysteine
  MOD_RES (659)..(659): Selenocysteine
  MOD_RES (697)..(697): Selenocysteine
MXKRRLQXIXACLQLREGSPSLHRGLHPSREEKRDSRMAEEKKLKLSNXVLPSESMKVVAESMGIAQIQEEXCQLLXDEVSYRIKEIAQDALKFMHMGKRQKLXXSDIDYALKLKNVEPLYGFHAQEFIPFRFASGGGRELYFYEEKEVDLSDIINXPLPRVPLDVCLKAHWLSIEGCQPAIPENPPPAPKEQQKAEAXEPLKSAKPGQEEDGPLKGKGQGAXXADGKGKEKKAPPLLEGAPLRLKPRSIHELSVEQQLYYKEIXEACVGSCEAKRAEALQSIAXDPGLYQMLPRFSXFISEGVRVNVVQNNLALLIYLMRMVKALMDNPXLYLEKYVHELIPAVMXCIVSRQLCLRPDVDNHWALRDFAARLVAQICKHFSXXXNNIQSRIXKXFXKSWVDEKXPWXXRYGSIAGLAELGHDVIKXLILPRLQQEGERIRSVLDGPVLSNIDRIGADHVQSLLLKHCAPVLAKLRPPPDNQDAYRAEFGSLGPLLCSQVVKARAQAALQAQQVNRXXLXIXQPRPXLXLSQAPQPGPRXPGLLKVPGSIALPVQXLVSARAAAPPQPSPPPXKFIVMSSSSSAPSXQQVLSLSXSAPGSGSXXXSPVXXXVPSVQPIVKLVSXAXXAPPSXAPSGPGSVQKYIVVSLPPXGEGKGGPXSHPSPVPPPASSPSPLSGSALCGGKQEAGDSPPPAPGXPKANGSQPNSGSPQPAP

SEQ ID NO: 26900 - protein, 63 aa, Homo sapiens
  MOD_RES (24)..(24): Selenocysteine
  MOD_RES (48)..(48): Selenocysteine
  MOD_RES (58)..(58): Selenocysteine
MSEREERRFVEIPRESVRLMAESXGLELSDEVAALLAEDVCYRLREAXQLSVHEAHQXPEADG

SEQ ID NO: 26901 - protein, 50 aa, Homo sapiens
  MOD_RES (24)..(24): Selenocysteine
  MOD_RES (48)..(48): Selenocysteine
MSEREERRFVEIPRESVRLMAESXGLELSDEVAALLAEDVCYRLREAXQN

SEQ ID NO: 26902 - protein, 145 aa, Homo sapiens
  MOD_RES (24)..(24): Selenocysteine
  MOD_RES (48)..(48): Selenocysteine
  MOD_RES (58)..(58): Selenocysteine
  MOD_RES (64)..(64): Selenocysteine
  MOD_RES (116)..(116): Selenocysteine
  MOD_RES (125)..(125): Selenocysteine
MSEREERRFVEIPRESVRLMAESXGLELSDEVAALLAEDVCYRLREAXQNSSQFMKHXKRRKLXVEDFNRALRWSSVEAVCGYGSQEALPMRPAREGELYFPEDREVNLVELALAXNIPKGCAEXAVRVHVSYLDGKGNLAPQGS

SEQ ID NO: 26903 - protein, 622 aa, Homo sapiens
  MOD_RES (24)..(24): Selenocysteine
  MOD_RES (48)..(48): Selenocysteine
  MOD_RES (58)..(58): Selenocysteine
  MOD_RES (64)..(64): Selenocysteine
  MOD_RES (116)..(116): Selenocysteine
  MOD_RES (125)..(125): Selenocysteine
  MOD_RES (154)..(154): Selenocysteine
  MOD_RES (165)..(165): Selenocysteine
  MOD_RES (185)..(185): Selenocysteine
  MOD_RES (262)..(262): Selenocysteine
  MOD_RES (277)..(277): Selenocysteine
  MOD_RES (332)..(332): Selenocysteine
  MOD_RES (335)..(335): Selenocysteine
  MOD_RES (436)..(436): Selenocysteine
  MOD_RES (454)..(454): Selenocysteine
  MOD_RES (458)..(458): Selenocysteine
  MOD_RES (464)..(464): Selenocysteine
  MOD_RES (489)..(489): Selenocysteine
  MOD_RES (541)..(541): Selenocysteine
  MOD_RES (543)..(543): Selenocysteine
  MOD_RES (580)..(580): Selenocysteine
  MOD_RES (604)..(604): Selenocysteine
MSEREERRFVEIPRESVRLMAESXGLELSDEVAALLAEDVCYRLREAXQNSSQFMKHXKRRKLXVEDFNRALRWSSVEAVCGYGSQEALPMRPAREGELYFPEDREVNLVELALAXNIPKGCAEXAVRVHVSYLDGKGNLAPQGSVPSAVSSLXDDLLKYYHQVXRAVLGDDPQLMKVALQDLQXNSKIGALLPYFVYVVSGVKSVSHDLEQLHRLLQVARSLFRNPHLCLGPYVRCLVGSVLYCVLEPLAASINPLNDHWXLRDGAALLLSHIFWXHGDLVSGLYQHILLSLQKILADPVRPLCCHYGAVVGLHALGWKAVERVLYPHLSXYWXNLQAVLDDYSVSNAQVKADGHKVYGAILVAVERLLKMKAQAAEPNRGGPGGRGCRRLDDLPWDSLLFQESSSGGGAEPSFGSGLPLPPGGAGPEDPSLSVXLADIYRELYAFFGDSLAXRFGXGQPAPXAPRPPGDKKEPAAAPDSVRKMPQLXASAIVSPHGDESPRGSGGGGPASASGPAASESRPLPRVHRARGAPRQQGPGXGXRDVFQKSRFAPRGAPHFRFIIAGRQAGRRCRGRLFQXAFPAPYGPSPASRYVQKLPMIGRXSRPARRWALSDYSLYLPL

SEQ ID NO: 26904 - protein, 48 aa, Homo sapiens
  MOD_RES (27)..(27): Selenocysteine
  MOD_RES (44)..(44): Selenocysteine
MSKSKDDAPHELESQFILRLPPEYASXVRRAVQSGHVNLKDRLXIELH

SEQ ID NO: 26905 - protein, 349 aa, Homo sapiens
  MOD_RES (27)..(27): Selenocysteine
  MOD_RES (44)..(44): Selenocysteine
  MOD_RES (79)..(79): Selenocysteine
  MOD_RES (84)..(84): Selenocysteine
  MOD_RES (88)..(88): Selenocysteine
  MOD_RES (98)..(98): Selenocysteine
  MOD_RES (114)..(114): Selenocysteine
  MOD_RES (137)..(137): Selenocysteine
  MOD_RES (151)..(151): Selenocysteine
  MOD_RES (172)..(172): Selenocysteine
  MOD_RES (179)..(179): Selenocysteine
  MOD_RES (189)..(189): Selenocysteine
  MOD_RES (236)..(236): Selenocysteine
  MOD_RES (249)..(249): Selenocysteine
  MOD_RES (274)..(274): Selenocysteine
  MOD_RES (295)..(295): Selenocysteine
MSKSKDDAPHELESQFILRLPPEYASXVRRAVQSGHVNLKDRLXIELHPDGRHGIVRVDRVPLASKLVDLPCVMESLKXIDKKXFYKXADICQMLVSXVDGDLYPPVEEPVASXDPKASKKKDKDKEKKFIWNHGIXLPLKNVRKRRFRKXAKKKYIESPDVEKEVKRLLSXDAEAVSXRWEIIAEDEXKEAENQGLDISSPGMSGHRQGHDSLEHDELREIFNDLSSSSEDEDEXQHQDEEDINIIDXEEDLERQLQDKLNESDEQHQENEGXNQLVMGIQKQIDNMKGKLQEXQDRAKRQEDLIMKVENLALKNRFQAVLDELKQKEDREKEQLSSLQEELESLLEK

SEQ ID NO: 26906 - protein, 102 aa, Homo sapiens
  MOD_RES (6)..(6): Selenocysteine
  MOD_RES (29)..(29): Selenocysteine
  MOD_RES (48)..(49): Selenocysteine
  MOD_RES (65)..(65): Selenocysteine
  MOD_RES (84)..(84): Selenocysteine
  MOD_RES (102)..(102): Selenocysteine
MESGKXASPKSMPKDAQMMAQILKDMGIXEYEPRVINQMLEFAFRYVXXILDDAKIYSSHAKKAXVDADDVRLAIQCRADQSFXSPPPRDFLLDIARQRNQX

SEQ ID NO: 26907 - protein, 127 aa, Homo sapiens
  MOD_RES (6)..(6): Selenocysteine
  MOD_RES (29)..(29): Selenocysteine
  MOD_RES (48)..(49): Selenocysteine
  MOD_RES (65)..(65): Selenocysteine
  MOD_RES (84)..(84): Selenocysteine
  MOD_RES (102)..(102): Selenocysteine
  MOD_RES (123)..(123): Selenocysteine
MESGKXASPKSMPKDAQMMAQILKDMGIXEYEPRVINQMLEFAFRYVXXILDDAKIYSSHAKKAXVDADDVRLAIQCRADQSFXSPPPRDFLLDIARQRNQXPLPLIKPYSGPRLPPDRYCLXAPNY

SEQ ID NO: 26908 - protein, 136 aa, Homo sapiens
  MOD_RES (6)..(6): Selenocysteine
  MOD_RES (29)..(29): Selenocysteine
  MOD_RES (48)..(49): Selenocysteine
  MOD_RES (65)..(65): Selenocysteine
  MOD_RES (84)..(84): Selenocysteine
  MOD_RES (102)..(102): Selenocysteine
  MOD_RES (123)..(123): Selenocysteine
MESGKXASPKSMPKDAQMMAQILKDMGIXEYEPRVINQMLEFAFRYVXXILDDAKIYSSHAKKAXVDADDVRLAIQCRADQSFXSPPPRDFLLDIARQRNQXPLPLIKPYSGPRLPPDRYCLXAPNYRLKSLQKKA

SEQ ID NO: 26909 - protein, 166 aa, Homo sapiens
  MOD_RES (6)..(6): Selenocysteine
  MOD_RES (29)..(29): Selenocysteine
  MOD_RES (48)..(49): Selenocysteine
  MOD_RES (65)..(65): Selenocysteine
  MOD_RES (84)..(84): Selenocysteine
  MOD_RES (102)..(102): Selenocysteine
  MOD_RES (123)..(123): Selenocysteine
  MOD_RES (138)..(138): Selenocysteine
  MOD_RES (144)..(144): Selenocysteine
  MOD_RES (154)..(154): Selenocysteine
  MOD_RES (159)..(159): Selenocysteine
  MOD_RES (161)..(161): Selenocysteine
  MOD_RES (164)..(164): Selenocysteine
  MOD_RES (166)..(166): Selenocysteine
MESGKXASPKSMPKDAQMMAQILKDMGIXEYEPRVINQMLEFAFRYVXXILDDAKIYSSHAKKAXVDADDVRLAIQCRADQSFXSPPPRDFLLDIARQRNQXPLPLIKPYSGPRLPPDRYCLXAPNYRLKSLQKKASXSAGRIXVPRLSVGSVXSRPSXPXLGXPX

SEQ ID NO: 26910 - protein, 198 aa, Homo sapiens
  MOD_RES (6)..(6): Selenocysteine
  MOD_RES (29)..(29): Selenocysteine
  MOD_RES (48)..(49): Selenocysteine
  MOD_RES (65)..(65): Selenocysteine
  MOD_RES (84)..(84): Selenocysteine
  MOD_RES (102)..(102): Selenocysteine
  MOD_RES (123)..(123): Selenocysteine
  MOD_RES (138)..(138): Selenocysteine
  MOD_RES (144)..(144): Selenocysteine
  MOD_RES (154)..(154): Selenocysteine
  MOD_RES (159)..(159): Selenocysteine
  MOD_RES (161)..(161): Selenocysteine
  MOD_RES (164)..(164): Selenocysteine
  MOD_RES (166)..(166): Selenocysteine
  MOD_RES (169)..(169): Selenocysteine
  MOD_RES (174)..(174): Selenocysteine
  MOD_RES (178)..(178): Selenocysteine
  MOD_RES (183)..(183): Selenocysteine
  MOD_RES (188)..(188): Selenocysteine
  MOD_RES (193)..(193): Selenocysteine
MESGKXASPKSMPKDAQMMAQILKDMGIXEYEPRVINQMLEFAFRYVXXILDDAKIYSSHAKKAXVDADDVRLAIQCRADQSFXSPPPRDFLLDIARQRNQXPLPLIKPYSGPRLPPDRYCLXAPNYRLKSLQKKASXSAGRIXVPRLSVGSVXSRPSXPXLGXPXPQXMSVSXKVGXPMSLXGQRFXVQMPXSQSPA

SEQ ID NO: 26911 - protein, 264 aa, Homo sapiens
  MOD_RES (6)..(6): Selenocysteine
  MOD_RES (29)..(29): Selenocysteine
  MOD_RES (48)..(49): Selenocysteine
  MOD_RES (65)..(65): Selenocysteine
  MOD_RES (84)..(84): Selenocysteine
  MOD_RES (102)..(102): Selenocysteine
  MOD_RES (123)..(123): Selenocysteine
  MOD_RES (138)..(138): Selenocysteine
  MOD_RES (144)..(144): Selenocysteine
  MOD_RES (154)..(154): Selenocysteine
  MOD_RES (159)..(159): Selenocysteine
  MOD_RES (161)..(161): Selenocysteine
  MOD_RES (164)..(164): Selenocysteine
  MOD_RES (166)..(166): Selenocysteine
  MOD_RES (169)..(169): Selenocysteine
  MOD_RES (174)..(174): Selenocysteine
  MOD_RES (178)..(178): Selenocysteine
  MOD_RES (183)..(183): Selenocysteine
  MOD_RES (188)..(188): Selenocysteine
  MOD_RES (193)..(193): Selenocysteine
  MOD_RES (206)..(206): Selenocysteine
  MOD_RES (227)..(228): Selenocysteine
  MOD_RES (236)..(236): Selenocysteine
MESGKXASPKSMPKDAQMMAQILKDMGIXEYEPRVINQMLEFAFRYVXXILDDAKIYSSHAKKAXVDADDVRLAIQCRADQSFXSPPPRDFLLDIARQRNQXPLPLIKPYSGPRLPPDRYCLXAPNYRLKSLQKKASXSAGRIXVPRLSVGSVXSRPSXPXLGXPXPQXMSVSXKVGXPMSLXGQRFXVQMPXSQSPAVKASIPAXSAVQNVLINPSLIGSKNILIXXNMMSSQNXANESSNALKRKREDDDDDDDDDDDYDNL

SEQ ID NO: 26912 - protein, 251 aa, Homo sapiens
  MOD_RES (29)..(29): Selenocysteine
  MOD_RES (48)..(49): Selenocysteine
  MOD_RES (84)..(84): Selenocysteine
  MOD_RES (102)..(102): Selenocysteine
  MOD_RES (123)..(123): Selenocysteine
  MOD_RES (156)..(157): Selenocysteine
  MOD_RES (159)..(159): Selenocysteine
  MOD_RES (162)..(162): Selenocysteine
  MOD_RES (165)..(165): Selenocysteine
  MOD_RES (174)..(174): Selenocysteine
  MOD_RES (179)..(179): Selenocysteine
  MOD_RES (184)..(184): Selenocysteine
  MOD_RES (193)..(193): Selenocysteine
  MOD_RES (201)..(202): Selenocysteine
  MOD_RES (222)..(223): Selenocysteine
  MOD_RES (231)..(231): Selenocysteine
MESGKMAPPKNAPRDALVMAQILKDMGIXEYEPRVINQMLEFAFRYVXXILDDAKIYSSHAKKPNVDADDVRLAIQCRADQSFXSPPPRDFLLDIARQKNQXPLPLIKPYAGPRLPPDRYCLXAPNYRLKSLIKKGPNQGRLVPRLSVGAVSSKPXXPXIAXPQXVSVPNKVAXPMSVXSQRFXVQIPPSQSXPVKPVPAXXAVQNVLINPSMIGPKNILIXXNMVSSQNXANEANPLKRKHEDDDDNDIM

SEQ ID NO: 26913 - protein, 553 aa, Homo sapiens
  MOD_RES (65)..(65): Selenocysteine
  MOD_RES (86)..(86): Selenocysteine
  MOD_RES (110)..(110): Selenocysteine
  MOD_RES (118)..(118): Selenocysteine
  MOD_RES (125)..(125): Selenocysteine
  MOD_RES (160)..(160): Selenocysteine
  MOD_RES (183)..(183): Selenocysteine
  MOD_RES (215)..(215): Selenocysteine
  MOD_RES (218)..(218): Selenocysteine
  MOD_RES (220)..(220): Selenocysteine
  MOD_RES (256)..(256): Selenocysteine
  MOD_RES (314)..(315): Selenocysteine
  MOD_RES (317)..(317): Selenocysteine
  MOD_RES (334)..(334): Selenocysteine
  MOD_RES (343)..(343): Selenocysteine
  MOD_RES (357)..(357): Selenocysteine
  MOD_RES (383)..(383): Selenocysteine
  MOD_RES (387)..(387): Selenocysteine
  MOD_RES (436)..(436): Selenocysteine
  MOD_RES (441)..(441): Selenocysteine
  MOD_RES (494)..(494): Selenocysteine
  MOD_RES (518)..(518): Selenocysteine
MGALEMQDEEDRIEALKQVADKLPRPNLLLLKHLVYVLHLISKNSEVNRMDSSNLAICIGPNMLXLENDQSLSFEAQKDLNNKVKXLVEFLIDNCFEIFGENIPVHSSIXSDDSLEHXDSSDVSXLQNDSAYDSNDPDVESNSSSGISSPSRQPQVPMAXAAGLDSAGPQDAREVSPEPIVSXVARLKSSLAQPDRRYSEPSMPSSQECLESRVXNQXLXKSEGDFPVPRVGSRLESEEAEDPFPEEVFPAVQGKXKRPVDLKIKNLAPGSVLPRALVLKAFSSSSLDASSDSSPVASPSSPKRNFFSRHQSFXXKXEKGKPSREIKKHSMSFXFAPHKKVLXKNLSAGSGKSQDFXRDHVPRGVRKESQLAGRIVQENGCEXHNQXARGFCLRPHALSVDDVFQGADWERPGSPPSYEEAMQGPAARLVASESQXVGSMXVGSMRARMLEAHCLLPPLPPAHHVEDSRHRGSKEPLPGHGLSPLPERWKQSRXVHASGDSLGHVSGPGRPELLPLRXVSESVQRNKRDCLVRRCSQPVFEADQFQYAKESYI

SEQ ID NO: 26914 - protein, 266 aa, Homo sapiens
  MOD_RES (12)..(12): Selenocysteine
  MOD_RES (20)..(20): Selenocysteine
  MOD_RES (79)..(79): Selenocysteine
  MOD_RES (99)..(99): Selenocysteine
  MOD_RES (109)..(109): Selenocysteine
  MOD_RES (118)..(118): Selenocysteine
  MOD_RES (243)..(243): Selenocysteine
MKLRSSHNASKXLNANNMEXLIECQSEGDIKEHPLLASCESEDSICQLIEVKKRKKVLSWPFLMRRLSPASDFSGALEXDLKASLFDQPLSIICGDSDXLPRPIQDILXILCLKGPSXEGIFRRAANEKARKELKEELNSGDAVDLERLPVHLLAVVFKDFLRSIPRKLLSSDLFEEWMGALEMQDEEDRIEALKQVADKLPRPNLLLLKHLVYVLHLISKNSEVNRMDSSNLAICIGPNMLXLENDQSLSFEAQKDLNNKVCSAY

SEQ ID NO: 26915 - protein, 731 aa, Homo sapiens
  MOD_RES (12)..(12): Selenocysteine
  MOD_RES (20)..(20): Selenocysteine
  MOD_RES (79)..(79): Selenocysteine
  MOD_RES (99)..(99): Selenocysteine
  MOD_RES (109)..(109): Selenocysteine
  MOD_RES (118)..(118): Selenocysteine
  MOD_RES (243)..(243): Selenocysteine
  MOD_RES (264)..(264): Selenocysteine
  MOD_RES (288)..(288): Selenocysteine
  MOD_RES (296)..(296): Selenocysteine
  MOD_RES (303)..(303): Selenocysteine
  MOD_RES (338)..(338): Selenocysteine
  MOD_RES (361)..(361): Selenocysteine
  MOD_RES (393)..(393): Selenocysteine
  MOD_RES (396)..(396): Selenocysteine
  MOD_RES (398)..(398): Selenocysteine
  MOD_RES (434)..(434): Selenocysteine
  MOD_RES (492)..(493): Selenocysteine
  MOD_RES (495)..(495): Selenocysteine
  MOD_RES (512)..(512): Selenocysteine
  MOD_RES (521)..(521): Selenocysteine
  MOD_RES (535)..(535): Selenocysteine
  MOD_RES (561)..(561): Selenocysteine
  MOD_RES (565)..(565): Selenocysteine
  MOD_RES (614)..(614): Selenocysteine
  MOD_RES (619)..(619): Selenocysteine
  MOD_RES (672)..(672): Selenocysteine
  MOD_RES (696)..(696): Selenocysteine
MKLRSSHNASKXLNANNMEXLIECQSEGDIKEHPLLASCESEDSICQLIEVKKRKKVLSWPFLMRRLSPASDFSGALEXDLKASLFDQPLSIICGDSDXLPRPIQDILXILCLKGPSXEGIFRRAANEKARKELKEELNSGDAVDLERLPVHLLAVVFKDFLRSIPRKLLSSDLFEEWMGALEMQDEEDRIEALKQVADKLPRPNLLLLKHLVYVLHLISKNSEVNRMDSSNLAICIGPNMLXLENDQSLSFEAQKDLNNKVKXLVEFLIDNCFEIFGENIPVHSSIXSDDSLEHXDSSDVSXLQNDSAYDSNDPDVESNSSSGISSPSRQPQVPMAXAAGLDSAGPQDAREVSPEPIVSXVARLKSSLAQPDRRYSEPSMPSSQECLESRVXNQXLXKSEGDFPVPRVGSRLESEEAEDPFPEEVFPAVQGKXKRPVDLKIKNLAPGSVLPRALVLKAFSSSSLDASSDSSPVASPSSPKRNFFSRHQSFXXKXEKGKPSREIKKHSMSFXFAPHKKVLXKNLSAGSGKSQDFXRDHVPRGVRKESQLAGRIVQENGCEXHNQXARGFCLRPHALSVDDVFQGADWERPGSPPSYEEAMQGPAARLVASESQXVGSMXVGSMRARMLEAHCLLPPLPPAHHVEDSRHRGSKEPLPGHGLSPLPERWKQSRXVHASGDSLGHVSGPGRPELLPLRXVSESVQRNKRDCLVRRCSQPVFEADQFQYAKESYI

SEQ ID NO: 26916 - protein, 331 aa, Homo sapiens
  MOD_RES (2)..(2): Selenocysteine
  MOD_RES (41)..(41): Selenocysteine
  MOD_RES (81)..(81): Selenocysteine
  MOD_RES (90)..(91): Selenocysteine
  MOD_RES (109)..(109): Selenocysteine
  MOD_RES (162)..(163): Selenocysteine
  MOD_RES (179)..(179): Selenocysteine
  MOD_RES (184)..(184): Selenocysteine
  MOD_RES (192)..(192): Selenocysteine
  MOD_RES (216)..(216): Selenocysteine
  MOD_RES (251)..(251): Selenocysteine
  MOD_RES (256)..(256): Selenocysteine
  MOD_RES (305)..(305): Selenocysteine
  MOD_RES (313)..(313): Selenocysteine
MXERPPSEAARSDPQLEGRDAAEASMAPPHLVLLNGVAKEXSRAAAAEPPVIELGARGGPGGGPAGGGGAARDLKGRDAAXAEARHRVPXXELCRPPGPAPAPAPASVXAELPGDGRMVQLSPPALAAPAAPGRALLYSLSQPLASLGSGFFGEPDAFPMFXXNNRVKRRPSPYEMEIXDGPHXKVVRRIFXNSRERWRQQNVNGAFAELRKLIPXHPPDKKLSKNEILRLAMKYINFLAKLLNDQEEEGXQRAKXGKDPVVGAGGGGGGGGGGAPPDDLLQDVLSPNSSCGSSLDGAASPDSYXEEPAPKHXARSLHPAMLPAADGAGPR

SEQ ID NO: 26917 - protein, 108 aa, Homo sapiens
  MOD_RES (2)..(2): Selenocysteine
  MOD_RES (7)..(7): Selenocysteine
  MOD_RES (9)..(9): Selenocysteine
  MOD_RES (31)..(31): Selenocysteine
  MOD_RES (43)..(43): Selenocysteine
  MOD_RES (66)..(66): Selenocysteine
  MOD_RES (91)..(91): Selenocysteine
MXRKIFXNXRERWRQQNVNSAFAKLRKLIPXHPPDKKLSKNEXLRLAMRYINFLVKVLGEQSLQQXGVAAQGNILGLFPQGPHLPGLEDRXLLENYQVPSPGPSHHIP

SEQ ID NO: 26918 - protein, 198 aa, Homo sapiens
  MOD_RES (4)..(4): Selenocysteine
  MOD_RES (15)..(15): Selenocysteine
  MOD_RES (38)..(38): Selenocysteine
  MOD_RES (41)..(41): Selenocysteine
  MOD_RES (60)..(61): Selenocysteine
  MOD_RES (64)..(64): Selenocysteine
  MOD_RES (72)..(72): Selenocysteine
  MOD_RES (76)..(77): Selenocysteine
  MOD_RES (159)..(159): Selenocysteine
  MOD_RES (181)..(181): Selenocysteine
  MOD_RES (198)..(198): Selenocysteine
LHSXPERPGILSPAXSEAVCQEKFNMEFRDNPGNFVKXEEXLFEIQGIDPIASAIQNLKXXDKXKPSNLVNXCIRXXLDRAACLPPGDHNALYVNSFPLLDPSDAPFPSLDSPGKAIRGPQQMAPCIVHLLSILQQGKQLPIWKPFPNQDSDSVVLSGXDSELHIPRVCEFCQAVFPPSIXSRGDFLRHLNSHFNGEX

SEQ ID NO: 26919 - protein, 138 aa, Homo sapiens
  MOD_RES (35)..(35): Selenocysteine
  MOD_RES (54)..(54): Selenocysteine
  MOD_RES (69)..(69): Selenocysteine
  MOD_RES (85)..(85): Selenocysteine
  MOD_RES (91)..(91): Selenocysteine
  MOD_RES (123)..(123): Selenocysteine
MDKNIGEQLNKAYEAFRQACMDRDSAVKELQQKQXENYEQRIREQQEQLSLQQXIIDKLKSQLLLVNSXQDNNYGCVPLLEDSEXRKNNLXLDQPQDKVISGIAREKLPKVRRQEVSSPRKEXSARSLGSPLLHERGN

SEQ ID NO: 26920 - protein, 190 aa, Homo sapiens
  MOD_RES (35)..(35): Selenocysteine
  MOD_RES (54)..(54): Selenocysteine
  MOD_RES (69)..(69): Selenocysteine
  MOD_RES (85)..(85): Selenocysteine
  MOD_RES (91)..(91): Selenocysteine
  MOD_RES (123)..(123): Selenocysteine
  MOD_RES (142)..(142): Selenocysteine
  MOD_RES (172)..(172): Selenocysteine
  MOD_RES (174)..(174): Selenocysteine
  MOD_RES (176)..(176): Selenocysteine
  MOD_RES (185)..(185): Selenocysteine
  MOD_RES (188)..(188): Selenocysteine
MDKNIGEQLNKAYEAFRQACMDRDSAVKELQQKQXENYEQRIREQQEQLSLQQXIIDKLKSQLLLVNSXQDNNYGCVPLLEDSEXRKNNLXLDQPQDKVISGIAREKLPKVRRQEVSSPRKEXSARSLGSPLLHERGNIEKXFWDLKEEFHKICMLAKAQKDHLSKLNIPDXAXEXQCSVPIQCXDKXDK

SEQ ID NO: 26921 - protein, 36 aa, Homo sapiens
MDKNIGEQLNKAYEAFRQACMDRDSAVKELQQKSLQ

SEQ ID NO: 26922 - protein, 105 aa, Homo sapiens
  MOD_RES (34)..(34): Selenocysteine
  MOD_RES (53)..(53): Selenocysteine
  MOD_RES (68)..(68): Selenocysteine
  MOD_RES (84)..(84): Selenocysteine
  MOD_RES (90)..(90): Selenocysteine
MDKNIGEQLNKAYEAFRQACMDRDSAVKELQQKXENYEQRIREQQEQLSLQQXIIDKLKSQLLLVNSXQDNNYGCVPLLEDSEXRKNNLXLDQPQDKVISGIARE

SEQ ID NO: 26923 - protein, 128 aa, Homo sapiens
  MOD_RES (34)..(34): Selenocysteine
  MOD_RES (53)..(53): Selenocysteine
  MOD_RES (68)..(68): Selenocysteine
  MOD_RES (84)..(84): Selenocysteine
  MOD_RES (90)..(90): Selenocysteine
  MOD_RES (117)..(117): Selenocysteine
  MOD_RES (119)..(119): Selenocysteine
MDKNIGEQLNKAYEAFRQACMDRDSAVKELQQKXENYEQRIREQQEQLSLQQXIIDKLKSQLLLVNSXQDNNYGCVPLLEDSEXRKNNLXLDQPQDKVISGIAREKLPKLYPVLDFXIXSFVSVYVDW

SEQ ID NO: 26924 - protein, 125 aa, Homo sapiens
  MOD_RES (34)..(34): Selenocysteine
  MOD_RES (53)..(53): Selenocysteine
  MOD_RES (68)..(68): Selenocysteine
  MOD_RES (84)..(84): Selenocysteine
  MOD_RES (90)..(90): Selenocysteine
  MOD_RES (112)..(112): Selenocysteine
MDKNIGEQLNKAYEAFRQACMDRDSAVKELQQKXENYEQRIREQQEQLSLQQXIIDKLKSQLLLVNSXQDNNYGCVPLLEDSEXRKNNLXLDQPQDKVISGIAREKLPKPEXPHFCPQLLLLILS

SEQ ID NO: 26925 - protein, 119 aa, Homo sapiens
  MOD_RES (34)..(34): Selenocysteine
  MOD_RES (53)..(53): Selenocysteine
  MOD_RES (68)..(68): Selenocysteine
  MOD_RES (84)..(84): Selenocysteine
  MOD_RES (90)..(90): Selenocysteine
MDKNIGEQLNKAYEAFRQACMDRDSAVKELQQKXENYEQRIREQQEQLSLQQXIIDKLKSQLLLVNSXQDNNYGCVPLLEDSEXRKNNLXLDQPQDKVISGIAREKLPKVDIASAESSI

SEQ ID NO: 26926 - protein, 408 aa, Homo sapiens
  MOD_RES (34)..(34): Selenocysteine
  MOD_RES (53)..(53): Selenocysteine
  MOD_RES (68)..(68): Selenocysteine
  MOD_RES (84)..(84): Selenocysteine
  MOD_RES (90)..(90): Selenocysteine
  MOD_RES (122)..(122): Selenocysteine
  MOD_RES (141)..(141): Selenocysteine
  MOD_RES (171)..(171): Selenocysteine
  MOD_RES (173)..(173): Selenocysteine
  MOD_RES (175)..(175): Selenocysteine
  MOD_RES (184)..(184): Selenocysteine
  MOD_RES (187)..(187): Selenocysteine
  MOD_RES (210)..(210): Selenocysteine
  MOD_RES (213)..(213): Selenocysteine
  MOD_RES (224)..(224): Selenocysteine
  MOD_RES (244)..(244): Selenocysteine
  MOD_RES (249)..(249): Selenocysteine
  MOD_RES (260)..(260): Selenocysteine
  MOD_RES (283)..(283): Selenocysteine
  MOD_RES (286)..(286): Selenocysteine
  MOD_RES (305)..(306): Selenocysteine
  MOD_RES (309)..(309): Selenocysteine
  MOD_RES (317)..(317): Selenocysteine
  MOD_RES (321)..(322): Selenocysteine
  MOD_RES (403)..(403): Selenocysteine
  MOD_RES (405)..(405): Selenocysteine
MDKNIGEQLNKAYEAFRQACMDRDSAVKELQQKXENYEQRIREQQEQLSLQQXIIDKLKSQLLLVNSXQDNNYGCVPLLEDSEXRKNNLXLDQPQDKVISGIAREKLPKVRRQEVSSPRKEXSARSLGSPLLHERGNIEKXFWDLKEEFHKICMLAKAQKDHLSKLNIPDXAXEXQCSVPIQCXDKXDKQEALFKPQAKDDINRGAPSIXSVXPRGLCRDEEDXSFESLSKFNVKFPPMDNDSXFLHSXPERPGILSPAXSEAVCQEKFNMEFRDNPGNFVKXEEXLFEIQGIDPIASAIQNLKXXDKXKPSNLVNXCIRXXLDRAACLPPGDHNALYVNSFPLLDPSDAPFPSLDSPGKAIRGPQQSVHSCFSRWHPALYICFLYYSKGNSCPFGSPFLIKXVXRWY

SEQ ID NO: 26927 - protein, 425 aa, Homo sapiens
  MOD_RES (34)..(34): Selenocysteine
  MOD_RES (53)..(53): Selenocysteine
  MOD_RES (68)..(68): Selenocysteine
  MOD_RES (84)..(84): Selenocysteine
  MOD_RES (90)..(90): Selenocysteine
  MOD_RES (122)..(122): Selenocysteine
  MOD_RES (141)..(141): Selenocysteine
  MOD_RES (171)..(171): Selenocysteine
  MOD_RES (173)..(173): Selenocysteine
  MOD_RES (175)..(175): Selenocysteine
  MOD_RES (184)..(184): Selenocysteine
  MOD_RES (187)..(187): Selenocysteine
  MOD_RES (210)..(210): Selenocysteine
  MOD_RES (213)..(213): Selenocysteine
  MOD_RES (224)..(224): Selenocysteine
  MOD_RES (244)..(244): Selenocysteine
  MOD_RES (249)..(249): Selenocysteine
  MOD_RES (260)..(260): Selenocysteine
  MOD_RES (283)..(283): Selenocysteine
  MOD_RES (286)..(286): Selenocysteine
  MOD_RES (305)..(306): Selenocysteine
  MOD_RES (309)..(309): Selenocysteine
  MOD_RES (317)..(317): Selenocysteine
  MOD_RES (321)..(322): Selenocysteine
  MOD_RES (386)..(386): Selenocysteine
  MOD_RES (408)..(408): Selenocysteine
  MOD_RES (425)..(425): Selenocysteine
MDKNIGEQLNKAYEAFRQACMDRDSAVKELQQKXENYEQRIREQQEQLSLQQXIIDKLKSQLLLVNSXQDNNYGCVPLLEDSEXRKNNLXLDQPQDKVISGIAREKLPKVRRQEVSSPRKEXSARSLGSPLLHERGNIEKXFWDLKEEFHKICMLAKAQKDHLSKLNIPDXAXEXQCSVPIQCXDKXDKQEALFKPQAKDDINRGAPSIXSVXPRGLCRDEEDXSFESLSKFNVKFPPMDNDSXFLHSXPERPGILSPAXSEAVCQEKFNMEFRDNPGNFVKXEEXLFEIQGIDPIASAIQNLKXXDKXKPSNLVNXCIRXXLDRAACLPPGDHNALYVNSFPLLDPSDAPFPSLDSPGKAIRGPQQPIWKPFPNQDSDSVVLSGXDSELHIPRVCEFCQAVFPPSIXSRGDFLRHLNSHFNGEX

SEQ ID NO: 26928 - protein, 165 aa, Homo sapiens
  MOD_RES (22)..(22): Selenocysteine
  MOD_RES (60)..(60): Selenocysteine
  MOD_RES (79)..(79): Selenocysteine
  MOD_RES (94)..(94): Selenocysteine
  MOD_RES (110)..(110): Selenocysteine
  MOD_RES (116)..(116): Selenocysteine
  MOD_RES (148)..(148): Selenocysteine
MGVEGPAVSRPVIYSILYSDAXGRRGMDKNIGEQLNKAYEAFRQACMDRDSAVKELQQKXENYEQRIREQQEQLSLQQXIIDKLKSQLLLVNSXQDNNYGCVPLLEDSEXRKNNLXLDQPQDKVISGIAREKLPKVRRQEVSSPRKEXSARSLGSPLLHERGNIE

SEQ ID NO: 26929 - protein, 239 aa, Homo sapiens
  MOD_RES (4)..(4): Selenocysteine
  MOD_RES (37)..(37): Selenocysteine
  MOD_RES (54)..(54): Selenocysteine
  MOD_RES (93)..(93): Selenocysteine
  MOD_RES (112)..(112): Selenocysteine
  MOD_RES (127)..(127): Selenocysteine
  MOD_RES (143)..(143): Selenocysteine
  MOD_RES (149)..(149): Selenocysteine
  MOD_RES (181)..(181): Selenocysteine
  MOD_RES (200)..(200): Selenocysteine
  MOD_RES (230)..(230): Selenocysteine
  MOD_RES (232)..(232): Selenocysteine
MLLXSYNKGEMVVKEVKKRREIEGKENDLPSYRGWNXHPNERPVIYSILYSDAXGRRGMDKNIGEQLNKAYEAFRQACMDRDSAVKELQQKQXENYEQRIREQQEQLSLQQXIIDKLKSQLLLVNSXQDNNYGCVPLLEDSEXRKNNLXLDQPQDKVISGIAREKLPKVRRQEVSSPRKEXSARSLGSPLLHERGNIEKXFWDLKEEFHKICMLAKAQKDHLSKLNIPDXAXAHLEALS

SEQ ID NO: 26930 - protein, 238 aa, Homo sapiens
  MOD_RES (4)..(4): Selenocysteine
  MOD_RES (37)..(37): Selenocysteine
  MOD_RES (54)..(54): Selenocysteine
  MOD_RES (92)..(92): Selenocysteine
  MOD_RES (111)..(111): Selenocysteine
  MOD_RES (126)..(126): Selenocysteine
  MOD_RES (142)..(142): Selenocysteine
  MOD_RES (148)..(148): Selenocysteine
  MOD_RES (180)..(180): Selenocysteine
  MOD_RES (199)..(199): Selenocysteine
  MOD_RES (229)..(229): Selenocysteine
  MOD_RES (231)..(231): Selenocysteine
MLLXSYNKGEMVVKEVKKRREIEGKENDLPSYRGWNXHPNERPVIYSILYSDAXGRRGMDKNIGEQLNKAYEAFRQACMDRDSAVKELQQKXENYEQRIREQQEQLSLQQXIIDKLKSQLLLVNSXQDNNYGCVPLLEDSEXRKNNLXLDQPQDKVISGIAREKLPKVRRQEVSSPRKEXSARSLGSPLLHERGNIEKXFWDLKEEFHKICMLAKAQKDHLSKLNIPDXAXAHLEALS

SEQ ID NO: 26931 - protein, 275 aa, Homo sapiens
  MOD_RES (13)..(13): Selenocysteine
  MOD_RES (32)..(32): Selenocysteine
  MOD_RES (62)..(62): Selenocysteine
  MOD_RES (64)..(64): Selenocysteine
  MOD_RES (66)..(66): Selenocysteine
  MOD_RES (75)..(75): Selenocysteine
  MOD_RES (78)..(78): Selenocysteine
  MOD_RES (101)..(101): Selenocysteine
  MOD_RES (104)..(104): Selenocysteine
  MOD_RES (115)..(115): Selenocysteine
  MOD_RES (135)..(135): Selenocysteine
  MOD_RES (140)..(140): Selenocysteine
  MOD_RES (151)..(151): Selenocysteine
  MOD_RES (174)..(174): Selenocysteine
  MOD_RES (177)..(177): Selenocysteine
  MOD_RES (196)..(197): Selenocysteine
  MOD_RES (200)..(200): Selenocysteine
  MOD_RES (208)..(208): Selenocysteine
  MOD_RES (212)..(213): Selenocysteine
VRRQEVSSPRKEXSARSLGSPLLHERGNIEKXFWDLKEEFHKICMLAKAQKDHLSKLNIPDXAXEXQCSVPIQCXDKXDKQEALFKPQAKDDINRGAPSIXSVXPRGLCRDEEDXSFESLSKFNVKFPPMDNDSXFLHSXPERPGILSPAXSEAVCQEKFNMEFRDNPGNFVKXEEXLFEIQGIDPIASAIQNLKXXDKXKPSNLVNXCIRXXLDRAACLPPGDHNALYVNSFPLLDPSDAPFPSLDSPGKAIRGPQQQGKQLVCDYNLMEKYSA

SEQ ID NO: 26932 - protein, 79 aa, Homo sapiens
  MOD_RES (4)..(4): Selenocysteine
  MOD_RES (29)..(29): Selenocysteine
  MOD_RES (50)..(50): Selenocysteine
  MOD_RES (67)..(67): Selenocysteine
MPSXNRAGSLKDPEIAELFFKEDPEKLFXDLREIGHGSFGAVYFARDVRXNEVVAIKKMSYSGKQSXEKWQDIIKEVKF

SEQ ID NO: 26933 - protein, 853 aa, Homo sapiens
  MOD_RES (4)..(4): Selenocysteine
  MOD_RES (29)..(29): Selenocysteine
  MOD_RES (50)..(50): Selenocysteine
  MOD_RES (67)..(67): Selenocysteine
  MOD_RES (100)..(100): Selenocysteine
  MOD_RES (132)..(132): Selenocysteine
  MOD_RES (146)..(146): Selenocysteine
  MOD_RES (160)..(160): Selenocysteine
  MOD_RES (185)..(185): Selenocysteine
  MOD_RES (214)..(214): Selenocysteine
  MOD_RES (244)..(244): Selenocysteine
  MOD_RES (271)..(271): Selenocysteine
  MOD_RES (288)..(288): Selenocysteine
  MOD_RES (297)..(297): Selenocysteine
  MOD_RES (342)..(342): Selenocysteine
  MOD_RES (344)..(344): Selenocysteine
  MOD_RES (389)..(389): Selenocysteine
  MOD_RES (414)..(414): Selenocysteine
  MOD_RES (440)..(440): Selenocysteine
  MOD_RES (443)..(443): Selenocysteine
  MOD_RES (448)..(448): Selenocysteine
  MOD_RES (480)..(480): Selenocysteine
  MOD_RES (502)..(502): Selenocysteine
  MOD_RES (581)..(581): Selenocysteine
  MOD_RES (586)..(586): Selenocysteine
  MOD_RES (599)..(600): Selenocysteine
  MOD_RES (617)..(617): Selenocysteine
  MOD_RES (637)..(637): Selenocysteine
  MOD_RES (713)..(713): Selenocysteine
  MOD_RES (767)..(767): Selenocysteine
  MOD_RES (824)..(824): Selenocysteine
  MOD_RES (830)..(830): Selenocysteine
  MOD_RES (838)..(838): Selenocysteine
  MOD_RES (841)..(841): Selenocysteine
  MOD_RES (853)..(853): Selenocysteine
MPSXNRAGSLKDPEIAELFFKEDPEKLFXDLREIGHGSFGAVYFARDVRXNEVVAIKKMSYSGKQSXEKWQDIIKEVKFLQRIKHPNSIEYKGCYLREHXAWLVMEYCLGSASDLLEVHKKPLQEVEIAAIXHGALQGLAYLHSHXMIHRDIKAGNILLXEPGQVKLADFGSASMASPANSFVGXPYWMAPEVILAMDEGQYDGKVDVWSLGIXCIELAERKPPLFNMNAMSALYHIAQNESPXLQSNEWSDYFRNFVDSCLQKIPQDRPXSEELLKHIFVLRERPEXVLIDLIQRXKDAVRELDNLQYRKMKKLLFQEAHNGPAVEAQEEEEEQDHGVGRXGXVNSVGSNQSIPSMSISASSQSSSVNSLPDVSDDKSELDMMEGDHXVMSNSSVIHLKPEEENYREEGDPRXRASDPQSPPQVSRHKSHYRNREHFAXIRXASLVXRQMQEHEQDSELREQMSGYKRMRRQHQKQLMXLENKLKAEMDEHRLRLDKDLEXQRNNFAAEMEKLIKKHQAAMEKEAKVMSNEEKKFQQHIQAQQKKELNSFLESQKREYKLRKEQLKESKELQIKKQFQDXCKIQXRQYKALRNHLLEXXPKSEHKAVLKRLKEEQXRKLAILAEQYDHSINEMLSXQALRLDEAQEAECQVLKMQLQQELELLNAYQSKIKMQAEAQHDRELRELEQRVSLRRALLEQKIEEEMLALQNERXERIRSLLERQAREIEAFDSESMRLGFSNMVLSNLSPEAFSHSYPGASGWSHNPXGGPGPHWGHPMGGPPQAWGHPMQGGPQPWGHPSGPMQGVPRGSSMGVRNSPQALRRXASGGRXEQGMSRSXSVXSQISNGSHMSYX

SEQ ID NO: 26934 - protein, 1001 aa, Homo sapiens
  MOD_RES (4)..(4): Selenocysteine
  MOD_RES (29)..(29): Selenocysteine
  MOD_RES (50)..(50): Selenocysteine
  MOD_RES (67)..(67): Selenocysteine
  MOD_RES (100)..(100): Selenocysteine
  MOD_RES (132)..(132): Selenocysteine
  MOD_RES (146)..(146): Selenocysteine
  MOD_RES (160)..(160): Selenocysteine
  MOD_RES (185)..(185): Selenocysteine
  MOD_RES (214)..(214): Selenocysteine
  MOD_RES (244)..(244): Selenocysteine
  MOD_RES (271)..(271): Selenocysteine
  MOD_RES (288)..(288): Selenocysteine
  MOD_RES (297)..(297): Selenocysteine
  MOD_RES (342)..(342): Selenocysteine
  MOD_RES (344)..(344): Selenocysteine
  MOD_RES (389)..(389): Selenocysteine
  MOD_RES (414)..(414): Selenocysteine
  MOD_RES (440)..(440): Selenocysteine
  MOD_RES (443)..(443): Selenocysteine
  MOD_RES (448)..(448): Selenocysteine
  MOD_RES (480)..(480): Selenocysteine
  MOD_RES (502)..(502): Selenocysteine
  MOD_RES (576)..(576): Selenocysteine
  MOD_RES (643)..(643): Selenocysteine
  MOD_RES (669)..(669): Selenocysteine
  MOD_RES (684)..(684): Selenocysteine
  MOD_RES (687)..(687): Selenocysteine
  MOD_RES (729)..(729): Selenocysteine
  MOD_RES (734)..(734): Selenocysteine
  MOD_RES (747)..(748): Selenocysteine
  MOD_RES (765)..(765): Selenocysteine
  MOD_RES (785)..(785): Selenocysteine
  MOD_RES (861)..(861): Selenocysteine
  MOD_RES (915)..(915): Selenocysteine
  MOD_RES (972)..(972): Selenocysteine
  MOD_RES (978)..(978): Selenocysteine
  MOD_RES (986)..(986): Selenocysteine
  MOD_RES (989)..(989): Selenocysteine
  MOD_RES (1001)..(1001): Selenocysteine
MPSXNRAGSLKDPEIAELFFKEDPEKLFXDLREIGHGSFGAVYFARDVRXNEVVAIKKMSYSGKQSXEKWQDIIKEVKFLQRIKHPNSIEYKGCYLREHXAWLVMEYCLGSASDLLEVHKKPLQEVEIAAIXHGALQGLAYLHSHXMIHRDIKAGNILLXEPGQVKLADFGSASMASPANSFVGXPYWMAPEVILAMDEGQYDGKVDVWSLGIXCIELAERKPPLFNMNAMSALYHIAQNESPXLQSNEWSDYFRNFVDSCLQKIPQDRPXSEELLKHIFVLRERPEXVLIDLIQRXKDAVRELDNLQYRKMKKLLFQEAHNGPAVEAQEEEEEQDHGVGRXGXVNSVGSNQSIPSMSISASSQSSSVNSLPDVSDDKSELDMMEGDHXVMSNSSVIHLKPEEENYREEGDPRXRASDPQSPPQVSRHKSHYRNREHFAXIRXASLVXRQMQEHEQDSELREQMSGYKRMRRQHQKQLMXLENKLKAEMDEHRLRLDKDLEXQRNNFAAEMEKLIKKHQAAMEKEAKVMSNEEKKFQQHIQAQQKKELNSFLESQKREYKLRKEQLKEELNENQSXPKKEKQEWLSKQKENIQHFQAEEEANLLRRQRQYLELECRRFKRRMLLGRHNLEQDLVREELNKRQXQKDLEHAMLLRQHESMQELEFRHLNXIQKMRCELIRLQHQXELXNQLEYNKRRERELRRKHVMEVRQQPKSLKSKELQIKKQFQDXCKIQXRQYKALRNHLLEXXPKSEHKAVLKRLKEEQXRKLAILAEQYDHSINEMLSXQALRLDEAQEAECQVLKMQLQQELELLNAYQSKIKMQAEAQHDRELRELEQRVSLRRALLEQKIEEEMLALQNERXERIRSLLERQAREIEAFDSESMRLGFSNMVLSNLSPEAFSHSYPGASGWSHNPXGGPGPHWGHPMGGPPQAWGHPMQGGPQPWGHPSGPMQGVPRGSSMGVRNSPQALRRXASGGRXEQGMSRSXSVXSQISNGSHMSYX

SEQ ID NO: 26935 - protein, 1062 aa, Homo sapiens
  MOD_RES (4)..(4): Selenocysteine
  MOD_RES (31)..(31): Selenocysteine
  MOD_RES (98)..(98): Selenocysteine
  MOD_RES (115)..(115): Selenocysteine
  MOD_RES (124)..(124): Selenocysteine
  MOD_RES (171)..(171): Selenocysteine
  MOD_RES (173)..(173): Selenocysteine
  MOD_RES (235)..(235): Selenocysteine
  MOD_RES (237)..(237): Selenocysteine
  MOD_RES (262)..(262): Selenocysteine
  MOD_RES (275)..(275): Selenocysteine
  MOD_RES (277)..(278): Selenocysteine
  MOD_RES (295)..(295): Selenocysteine
  MOD_RES (298)..(298): Selenocysteine
  MOD_RES (413)..(413): Selenocysteine
  MOD_RES (431)..(431): Selenocysteine
  MOD_RES (498)..(498): Selenocysteine
  MOD_RES (514)..(514): Selenocysteine
  MOD_RES (528)..(528): Selenocysteine
  MOD_RES (533)..(533): Selenocysteine
  MOD_RES (539)..(539): Selenocysteine
  MOD_RES (594)..(594): Selenocysteine
  MOD_RES (596)..(596): Selenocysteine
  MOD_RES (635)..(635): Selenocysteine
  MOD_RES (696)..(696): Selenocysteine
  MOD_RES (723)..(723): Selenocysteine
  MOD_RES (740)..(740): Selenocysteine
  MOD_RES (760)..(760): Selenocysteine
  MOD_RES (835)..(835): Selenocysteine
  MOD_RES (851)..(851): Selenocysteine
  MOD_RES (945)..(945): Selenocysteine
  MOD_RES (966)..(967): Selenocysteine
  MOD_RES (1006)..(1006): Selenocysteine
  MOD_RES (1019)..(1019): Selenocysteine
  MOD_RES (1044)..(1044): Selenocysteine
  MOD_RES (1052)..(1052): Selenocysteine
MMGXSQGHVARKSRNWGLNPSRLSSIPLSSXPCHLSPSSLSPFSVAERKPPLFNMNAMSALYHIAQNESPVLQSGHWSEYFRNFVDSCLQKIPQDRPXSEVLLKHRFVLRERPPXVIMDLIQRXKDAVRELDNLQYRKMKKILFQEAPNGPGAEAPEEEEEAEPYMHRAGXLXSLESSHSVPSMSISASSQSSSVNSLADASDNEEEEEEEEEEEEEEEGPEAREMAMMQEGEHXVXSHSSIIHRLPGSDNLYDDPYQPEIXPSPLQPPAAPAPXSXXSSARRRAYCRNRDHFAXIRXASLVSRQIQEHEQDSALREQLSGYKRMRRQHQKQLLALESRLRGEREEHSARLQRELEAQRAGFGAEAEKLARRHQAIGEKEARAAQAEERKFQQHILGQQKKELAALLEAQKRXYKLRKEQLKEELQENPSXPKREKAEWLLRQKEQLQQCQAEEEAGLLRRQRQYFELQCRQYKRKMLLARHSLDQDLLREDLNKKQXQKDLECALLLRQHEAXRELELRQLQAVQRXRAELXRLQHQXELGNQLEYNKRREQELRQKHAAQVRQQPKSLKVRAGQRPPGLPLPIPGALGPPNXGXPIEQQPCSPGQEAVLDQRMLGEEEEAVGERRILGKEGAXLEPKQQRILGEESGAPSPSPQKHGSLVDEEVWGLPEEIEELRVPSLVPQERSIVGQEEAGXWSLWGKEDESLLDEEFELGWVQGPALXPVPEEEEEEEEGAPIGXPRDPGDGCPSPDIPPEPPPXHLRPCPASQLPGLLSHGLLAGLSFAVGSSSGLLPLLLLLLLPLLAAQGGGGLQAALLALEVGLVGLGASYLLLCXALHLPSSLFLLLAQGXALGAVLGLSWRRGLMGVPLGLGAAWLLAWPGLALPLVAMAAGGRWVRQQGPRVRRGISRLWLRVLLRLSPMAFRALQGCGAVGDRGLFALYPKXNKDGFRSRLPVPGPRRRNPRXXQHPLALLARVWVLCKGWNWRLARASQGLASHLPPWAIHXLASWGLLRGERPXRIPRLLPRSQRQLGPPASRQPLPGXLAGRRSRXRQSRALPPWR

SEQ ID NO: 26936 - protein, 1049 aa, Homo sapiens
  MOD_RES (88)..(88): Selenocysteine
  MOD_RES (100)..(100): Selenocysteine
  MOD_RES (132)..(132): Selenocysteine
  MOD_RES (185)..(185): Selenocysteine
  MOD_RES (214)..(214): Selenocysteine
  MOD_RES (271)..(271): Selenocysteine
  MOD_RES (288)..(288): Selenocysteine
  MOD_RES (297)..(297): Selenocysteine
  MOD_RES (344)..(344): Selenocysteine
  MOD_RES (346)..(346): Selenocysteine
  MOD_RES (408)..(408): Selenocysteine
  MOD_RES (410)..(410): Selenocysteine
  MOD_RES (435)..(435): Selenocysteine
  MOD_RES (448)..(448): Selenocysteine
  MOD_RES (450)..(451): Selenocysteine
  MOD_RES (468)..(468): Selenocysteine
  MOD_RES (471)..(471): Selenocysteine
  MOD_RES (586)..(586): Selenocysteine
  MOD_RES (604)..(604): Selenocysteine
  MOD_RES (671)..(671): Selenocysteine
  MOD_RES (687)..(687): Selenocysteine
  MOD_RES (701)..(701): Selenocysteine
  MOD_RES (706)..(706): Selenocysteine
  MOD_RES (712)..(712): Selenocysteine
  MOD_RES (757)..(757): Selenocysteine
  MOD_RES (762)..(762): Selenocysteine
  MOD_RES (775)..(776): Selenocysteine
  MOD_RES (793)..(793): Selenocysteine
  MOD_RES (821)..(821): Selenocysteine
  MOD_RES (851)..(851): Selenocysteine
  MOD_RES (886)..(886): Selenocysteine
  MOD_RES (986)..(986): Selenocysteine
  MOD_RES (990)..(990): Selenocysteine
  MOD_RES (1034)..(1034): Selenocysteine
MPAGGRAGSLKDPDVAELFFKDDPEKLFSDLREIGHGSFGAVYFARDVRNSEVVAIKKMSYSGKQSNEKWQDIIKEVRFLQKLRHPNXIQYRGCYLREHXAWLVMEYCLGSASDLLEVHKKPLQEVEIAAVXHGALQGLAYLHSHNMIHRDVKAGNILLSEPGLVKLGDFGSASIMAPANSFVGXPYWMAPEVILAMDEGQYDGKVDVWSLGIXCIELAERKPPLFNMNAMSALYHIAQNESPVLQSGHWSEYFRNFVDSCLQKIPQDRPXSEVLLKHRFVLRERPPXVIMDLIQRXKDAVRELDNLQYRKMKKILFQEAPNGPGAEAPEEEEEAEPYMHRAGXLXSLESSHSVPSMSISASSQSSSVNSLADASDNEEEEEEEEEEEEEEEGPEAREMAMMQEGEHXVXSHSSIIHRLPGSDNLYDDPYQPEIXPSPLQPPAAPAPXSXXSSARRRAYCRNRDHFAXIRXASLVSRQIQEHEQDSALREQLSGYKRMRRQHQKQLLALESRLRGEREEHSARLQRELEAQRAGFGAEAEKLARRHQAIGEKEARAAQAEERKFQQHILGQQKKELAALLEAQKRXYKLRKEQLKEELQENPSXPKREKAEWLLRQKEQLQQCQAEEEAGLLRRQRQYFELQCRQYKRKMLLARHSLDQDLLREDLNKKQXQKDLECALLLRQHEAXRELELRQLQAVQRXRAELXRLQHQXELGNQLEYNKRREQELRQKHAAQVRQQPKSLKSKELQIKKQFQEXCKIQXRQYKALRAHLLEXXPKAQHKSLLKRLKEEQXRKLAILAEQYDQSISEMLSSQALRLDEXQEAEFQALRQQLQQELELLNAYQSKIKIRXESQHERELRELEQRVALRRALLEQRVEEELLALQXGRSERIRSLLERQAREIEAFDAESMRLGFSSMALGGIPAEAAAQGYPAPPPAPAWPSRPVPRSGAHWSHGPPPPGMPPPAWRQPSLLAPPGPPNWLGPPXQSGXPRGGALLLLRNSPQPLRRAASGGSGSENVGPPAAAVPGPLSRSXSVASHILNGSSHFYS

SEQ ID NO: 26937 - protein, 1122 aa, Homo sapiens
  MOD_RES (88)..(88): Selenocysteine
  MOD_RES (100)..(100): Selenocysteine
  MOD_RES (132)..(132): Selenocysteine
  MOD_RES (185)..(185): Selenocysteine
  MOD_RES (214)..(214): Selenocysteine
  MOD_RES (271)..(271): Selenocysteine
  MOD_RES (288)..(288): Selenocysteine
  MOD_RES (297)..(297): Selenocysteine
  MOD_RES (344)..(344): Selenocysteine
  MOD_RES (346)..(346): Selenocysteine
  MOD_RES (408)..(408): Selenocysteine
  MOD_RES (410)..(410): Selenocysteine
  MOD_RES (435)..(435): Selenocysteine
  MOD_RES (448)..(448): Selenocysteine
  MOD_RES (450)..(451): Selenocysteine
  MOD_RES (468)..(468): Selenocysteine
  MOD_RES (471)..(471): Selenocysteine
  MOD_RES (586)..(586): Selenocysteine
  MOD_RES (604)..(604): Selenocysteine
  MOD_RES (671)..(671): Selenocysteine
  MOD_RES (687)..(687): Selenocysteine
  MOD_RES (701)..(701): Selenocysteine
  MOD_RES (706)..(706): Selenocysteine
  MOD_RES (712)..(712): Selenocysteine
  MOD_RES (756)..(756): Selenocysteine
  MOD_RES (783)..(783): Selenocysteine
  MOD_RES (800)..(800): Selenocysteine
  MOD_RES (820)..(820): Selenocysteine
  MOD_RES (895)..(895): Selenocysteine
  MOD_RES (911)..(911): Selenocysteine
  MOD_RES (1005)..(1005): Selenocysteine
  MOD_RES (1026)..(1027): Selenocysteine
  MOD_RES (1066)..(1066): Selenocysteine
  MOD_RES (1079)..(1079): Selenocysteine
  MOD_RES (1104)..(1104): Selenocysteine
  MOD_RES (1112)..(1112): Selenocysteine
MPAGGRAGSLKDPDVAELFFKDDPEKLFSDLREIGHGSFGAVYFARDVRNSEVVAIKKMSYSGKQSNEKWQDIIKEVRFLQKLRHPNXIQYRGCYLREHXAWLVMEYCLGSASDLLEVHKKPLQEVEIAAVXHGALQGLAYLHSHNMIHRDVKAGNILLSEPGLVKLGDFGSASIMAPANSFVGXPYWMAPEVILAMDEGQYDGKVDVWSLGIXCIELAERKPPLFNMNAMSALYHIAQNESPVLQSGHWSEYFRNFVDSCLQKIPQDRPXSEVLLKHRFVLRERPPXVIMDLIQRXKDAVRELDNLQYRKMKKILFQEAPNGPGAEAPEEEEEAEPYMHRAGXLXSLESSHSVPSMSISASSQSSSVNSLADASDNEEEEEEEEEEEEEEEGPEAREMAMMQEGEHXVXSHSSIIHRLPGSDNLYDDPYQPEIXPSPLQPPAAPAPXSXXSSARRRAYCRNRDHFAXIRXASLVSRQIQEHEQDSALREQLSGYKRMRRQHQKQLLALESRLRGEREEHSARLQRELEAQRAGFGAEAEKLARRHQAIGEKEARAAQAEERKFQQHILGQQKKELAALLEAQKRXYKLRKEQLKEELQENPSXPKREKAEWLLRQKEQLQQCQAEEEAGLLRRQRQYFELQCRQYKRKMLLARHSLDQDLLREDLNKKQXQKDLECALLLRQHEAXRELELRQLQAVQRXRAELXRLQHQXELGNQLEYNKRREQELRQKHAAQVRQQPKSLKERSIVGQEEAGXWSLWGKEDESLLDEEFELGWVQGPALXPVPEEEEEEEEGAPIGXPRDPGDGCPSPDIPPEPPPXHLRPCPASQLPGLLSHGLLAGLSFAVGSSSGLLPLLLLLLLPLLAAQGGGGLQAALLALEVGLVGLGASYLLLCXALHLPSSLFLLLAQGXALGAVLGLSWRRGLMGVPLGLGAAWLLAWPGLALPLVAMAAGGRWVRQQGPRVRRGISRLWLRVLLRLSPMAFRALQGCGAVGDRGLFALYPKXNKDGFRSRLPVPGPRRRNPRXXQHPLALLARVWVLCKGWNWRLARASQGLASHLPPWAIHXLASWGLLRGERPXRIPRLLPRSQRQLGPPASRQPLPGXLAGRRSRXRQSRALPPWR

SEQ ID NO: 26938 - protein, 1235 aa, Homo sapiens
  MOD_RES (88)..(88): Selenocysteine
  MOD_RES (100)..(100): Selenocysteine
  MOD_RES (132)..(132): Selenocysteine
  MOD_RES (185)..(185): Selenocysteine
  MOD_RES (214)..(214): Selenocysteine
  MOD_RES (271)..(271): Selenocysteine
  MOD_RES (288)..(288): Selenocysteine
  MOD_RES (297)..(297): Selenocysteine
  MOD_RES (344)..(344): Selenocysteine
  MOD_RES (346)..(346): Selenocysteine
  MOD_RES (408)..(408): Selenocysteine
  MOD_RES (410)..(410): Selenocysteine
  MOD_RES (435)..(435): Selenocysteine
  MOD_RES (448)..(448): Selenocysteine
  MOD_RES (450)..(451): Selenocysteine
  MOD_RES (468)..(468): Selenocysteine
  MOD_RES (471)..(471): Selenocysteine
  MOD_RES (586)..(586): Selenocysteine
  MOD_RES (604)..(604): Selenocysteine
  MOD_RES (671)..(671): Selenocysteine
  MOD_RES (687)..(687): Selenocysteine
  MOD_RES (701)..(701): Selenocysteine
  MOD_RES (706)..(706): Selenocysteine
  MOD_RES (712)..(712): Selenocysteine
  MOD_RES (767)..(767): Selenocysteine
  MOD_RES (769)..(769): Selenocysteine
  MOD_RES (808)..(808): Selenocysteine
  MOD_RES (869)..(869): Selenocysteine
  MOD_RES (896)..(896): Selenocysteine
  MOD_RES (913)..(913): Selenocysteine
  MOD_RES (933)..(933): Selenocysteine
  MOD_RES (1008)..(1008): Selenocysteine
  MOD_RES (1024)..(1024): Selenocysteine
  MOD_RES (1118)..(1118): Selenocysteine
  MOD_RES (1139)..(1140): Selenocysteine
  MOD_RES (1179)..(1179): Selenocysteine
  MOD_RES (1192)..(1192): Selenocysteine
  MOD_RES (1217)..(1217): Selenocysteine
  MOD_RES (1225)..(1225): Selenocysteine
MPAGGRAGSLKDPDVAELFFKDDPEKLFSDLREIGHGSFGAVYFARDVRNSEVVAIKKMSYSGKQSNEKWQDIIKEVRFLQKLRHPNXIQYRGCYLREHXAWLVMEYCLGSASDLLEVHKKPLQEVEIAAVXHGALQGLAYLHSHNMIHRDVKAGNILLSEPGLVKLGDFGSASIMAPANSFVGXPYWMAPEVILAMDEGQYDGKVDVWSLGIXCIELAERKPPLFNMNAMSALYHIAQNESPVLQSGHWSEYFRNFVDSCLQKIPQDRPXSEVLLKHRFVLRERPPXVIMDLIQRXKDAVRELDNLQYRKMKKILFQEAPNGPGAEAPEEEEEAEPYMHRAGXLXSLESSHSVPSMSISASSQSSSVNSLADASDNEEEEEEEEEEEEEEEGPEAREMAMMQEGEHXVXSHSSIIHRLPGSDNLYDDPYQPEIXPSPLQPPAAPAPXSXXSSARRRAYCRNRDHFAXIRXASLVSRQIQEHEQDSALREQLSGYKRMRRQHQKQLLALESRLRGEREEHSARLQRELEAQRAGFGAEAEKLARRHQAIGEKEARAAQAEERKFQQHILGQQKKELAALLEAQKRXYKLRKEQLKEELQENPSXPKREKAEWLLRQKEQLQQCQAEEEAGLLRRQRQYFELQCRQYKRKMLLARHSLDQDLLREDLNKKQXQKDLECALLLRQHEAXRELELRQLQAVQRXRAELXRLQHQXELGNQLEYNKRREQELRQKHAAQVRQQPKSLKVRAGQRPPGLPLPIPGALGPPNXGXPIEQQPCSPGQEAVLDQRMLGEEEEAVGERRILGKEGAXLEPKQQRILGEESGAPSPSPQKHGSLVDEEVWGLPEEIEELRVPSLVPQERSIVGQEEAGXWSLWGKEDESLLDEEFELGWVQGPALXPVPEEEEEEEEGAPIGXPRDPGDGCPSPDIPPEPPPXHLRPCPASQLPGLLSHGLLAGLSFAVGSSSGLLPLLLLLLLPLLAAQGGGGLQAALLALEVGLVGLGASYLLLCXALHLPSSLFLLLAQGXALGAVLGLSWRRGLMGVPLGLGAAWLLAWPGLALPLVAMAAGGRWVRQQGPRVRRGISRLWLRVLLRLSPMAFRALQGCGAVGDRGLFALYPKXNKDGFRSRLPVPGPRRRNPRXXQHPLALLARVWVLCKGWNWRLARASQGLASHLPPWAIHXLASWGLLRGERPXRIPRLLPRSQRQLGPPASRQPLPGXLAGRRSRXRQSRALPPWR

SEQ ID NO: 26939 - protein, 93 aa, Homo sapiens
  MOD_RES (15)..(15): Selenocysteine
  MOD_RES (69)..(69): Selenocysteine
  MOD_RES (84)..(84): Selenocysteine
MELLNAYQSKIKMQXEAQHERELQKLEQRVSLRRAHLEQKIEEELAALQKERSERIKNLLERQEREIEXFDMESLRMGFGNLVXLDFPKEDYR

SEQ ID NO: 26940 - protein, 18 aa, Homo sapiens
MRKGVLKDPEIADLFYKD

SEQ ID NO: 26941 - protein, 21 aa, Homo sapiens
MRKGVLKDPEIADLFYKDDPE

SEQ ID NO: 26942 - protein, 36 aa, Homo sapiens
MRKGVLKDPEIADLFYKDDPEELFIGLHEIGHGSFG

SEQ ID NO: 26943 - protein, 57 aa, Homo sapiens
  MOD_RES (42)..(42): Selenocysteine
  MOD_RES (46)..(46): Selenocysteine
MRKGVLKDPEIADLFYKDDPEELFIGLHEIGHGSFGAVYFAXNAHXSEVVAIKKMSY

SEQ ID NO: 26944 - protein, 62 aa, Homo sapiens
  MOD_RES (42)..(42): Selenocysteine
  MOD_RES (46)..(46): Selenocysteine
  MOD_RES (62)..(62): Selenocysteine
MRKGVLKDPEIADLFYKDDPEELFIGLHEIGHGSFGAVYFAXNAHXSEVVAIKKMSYSGKQX

SEQ ID NO: 26945 - protein, 93 aa, Homo sapiens
  MOD_RES (42)..(42): Selenocysteine
  MOD_RES (46)..(46): Selenocysteine
  MOD_RES (62)..(62): Selenocysteine
  MOD_RES (84)..(84): Selenocysteine
MRKGVLKDPEIADLFYKDDPEELFIGLHEIGHGSFGAVYFAXNAHXSEVVAIKKMSYSGKQXHEKWQDILKEVKFLRQLKHPNXIEYKGCYLK

SEQ ID NO: 26946 - protein, 136 aa, Homo sapiens
  MOD_RES (42)..(42): Selenocysteine
  MOD_RES (46)..(46): Selenocysteine
  MOD_RES (62)..(62): Selenocysteine
  MOD_RES (84)..(84): Selenocysteine
  MOD_RES (96)..(96): Selenocysteine
  MOD_RES (128)..(128): Selenocysteine
MRKGVLKDPEIADLFYKDDPEELFIGLHEIGHGSFGAVYFAXNAHXSEVVAIKKMSYSGKQXHEKWQDILKEVKFLRQLKHPNXIEYKGCYLKEHXAWLVMEYCLGSASDLLEVHKKPLQEVEIAAIXHGALHGLA

SEQ ID NO: 26947 - protein, 898 aa, Homo sapiens
  MOD_RES (42)..(42): Selenocysteine
  MOD_RES (46)..(46): Selenocysteine
  MOD_RES (62)..(62): Selenocysteine
  MOD_RES (84)..(84): Selenocysteine
  MOD_RES (96)..(96): Selenocysteine
  MOD_RES (128)..(128): Selenocysteine
  MOD_RES (156)..(156): Selenocysteine
  MOD_RES (181)..(181): Selenocysteine
  MOD_RES (210)..(210): Selenocysteine
  MOD_RES (240)..(240): Selenocysteine
  MOD_RES (247)..(247): Selenocysteine
  MOD_RES (267)..(267): Selenocysteine
  MOD_RES (293)..(293): Selenocysteine
  MOD_RES (316)..(316): Selenocysteine
  MOD_RES (335)..(335): Selenocysteine
  MOD_RES (357)..(357): Selenocysteine
  MOD_RES (387)..(387): Selenocysteine
  MOD_RES (419)..(419): Selenocysteine
  MOD_RES (437)..(437): Selenocysteine
  MOD_RES (445)..(445): Selenocysteine
  MOD_RES (499)..(499): Selenocysteine
  MOD_RES (546)..(547): Selenocysteine
  MOD_RES (573)..(573): Selenocysteine
  MOD_RES (592)..(592): Selenocysteine
  MOD_RES (602)..(602): Selenocysteine
  MOD_RES (640)..(640): Selenocysteine
  MOD_RES (656)..(656): Selenocysteine
  MOD_RES (666)..(666): Selenocysteine
  MOD_RES (681)..(681): Selenocysteine
  MOD_RES (726)..(726): Selenocysteine
  MOD_RES (731)..(731): Selenocysteine
  MOD_RES (745)..(745): Selenocysteine
  MOD_RES (752)..(752): Selenocysteine
  MOD_RES (756)..(756): Selenocysteine
  MOD_RES (762)..(762): Selenocysteine
  MOD_RES (820)..(820): Selenocysteine
  MOD_RES (874)..(874): Selenocysteine
  MOD_RES (889)..(889): Selenocysteine
MRKGVLKDPEIADLFYKDDPEELFIGLHEIGHGSFGAVYFAXNAHXSEVVAIKKMSYSGKQXHEKWQDILKEVKFLRQLKHPNXIEYKGCYLKEHXAWLVMEYCLGSASDLLEVHKKPLQEVEIAAIXHGALHGLAYLHSHALIHRDIKAGNILLXEPGQVKLADFGSASMASPANSFVGXPYWMAPEVILAMDEGQYDGKVDIWSLGIXCIELAERKPPLFNMNAMSALYHIAQNDSPXLQSNEWXDSFRRFVDYCLQKIPQERPXSAELLRHDFVRRDRPLRVLIDLIQRXKDAVRELDNLQYRKMKKILFQEXRNGPLNESQEDEEDSEHGXSLNREMDSLGSNHSIPSMSVSXGSQSSSVNSMQEVMDESSSELVMMHDDESXINSSSSVVHKKDHVFIRDEAGHGDPRPEPRPXQSVQSQALHYRNRERFAXIKSASLVXRQIHEHEQENELREQMSGYKRMRRQHQKQLIALENKLKAEMDEHRLKLQKEVEXHANNSSIELEKLAKKQVAIIEKEAKVAAADEKKFQQQILAQQKKDLXXFLESQKKQYKICKEKIKEEMNEDHSXPKKEKQERISKHKENLQHXQAEEEAHLLXQQRLYYDKNCRFFKRKIMIKRHEVEQQNIREELNKKRXQKEMEHAMLIRHDESXRELEYRQLHXLQKLRMDLIRLQHQXELENQLEYNKRRERELHRKHVMELRQQPKNLKAMEMQIKKQFQDXCKVQXKQYKALKNHQLEVXPKNEHKXILKXLKDEQXRKLAILAEQYEQSINEMMASQALRLDEAQEAECQALRLQLQQEMELLNAYQSKIKMQXEAQHERELQKLEQRVSLRRAHLEQKIEEELAALQKERSERIKNLLERQEREIEXFDMESLRMGFGNLVXLDFPKEDYR

SEQ ID NO: 26948 - protein, 14 aa, Homo sapiens
MSGYKRMRRQHQKQ

SEQ ID NO: 26949 - protein, 38 aa, Homo sapiens
MSGYKRMRRQHQKQLIALENKLKAEMDEHRLKLQKEVE

SEQ ID NO: 26950 - protein, 438 aa, Homo sapiens
  MOD_RES (39)..(39): Selenocysteine
  MOD_RES (86)..(87): Selenocysteine
  MOD_RES (113)..(113): Selenocysteine
  MOD_RES (132)..(132): Selenocysteine
  MOD_RES (142)..(142): Selenocysteine
  MOD_RES (180)..(180): Selenocysteine
  MOD_RES (196)..(196): Selenocysteine
  MOD_RES (206)..(206): Selenocysteine
  MOD_RES (221)..(221): Selenocysteine
  MOD_RES (266)..(266): Selenocysteine
  MOD_RES (271)..(271): Selenocysteine
  MOD_RES (285)..(285): Selenocysteine
  MOD_RES (292)..(292): Selenocysteine
  MOD_RES (296)..(296): Selenocysteine
  MOD_RES (302)..(302): Selenocysteine
  MOD_RES (360)..(360): Selenocysteine
  MOD_RES (414)..(414): Selenocysteine
  MOD_RES (429)..(429): Selenocysteine
MSGYKRMRRQHQKQLIALENKLKAEMDEHRLKLQKEVEXHANNSSIELEKLAKKQVAIIEKEAKVAAADEKKFQQQILAQQKKDLXXFLESQKKQYKICKEKIKEEMNEDHSXPKKEKQERISKHKENLQHXQAEEEAHLLXQQRLYYDKNCRFFKRKIMIKRHEVEQQNIREELNKKRXQKEMEHAMLIRHDESXRELEYRQLHXLQKLRMDLIRLQHQXELENQLEYNKRRERELHRKHVMELRQQPKNLKAMEMQIKKQFQDXCKVQXKQYKALKNHQLEVXPKNEHKXILKXLKDEQXRKLAILAEQYEQSINEMMASQALRLDEAQEAECQALRLQLQQEMELLNAYQSKIKMQXEAQHERELQKLEQRVSLRRAHLEQKIEEELAALQKERSERIKNLLERQEREIEXFDMESLRMGFGNLVXLDFPKEDYR

SEQ ID NO: 26951 - protein, 185 aa, Homo sapiens
  MOD_RES (8)..(8): Selenocysteine
  MOD_RES (26)..(26): Selenocysteine
  MOD_RES (54)..(54): Selenocysteine
  MOD_RES (79)..(79): Selenocysteine
  MOD_RES (108)..(108): Selenocysteine
  MOD_RES (138)..(138): Selenocysteine
  MOD_RES (145)..(145): Selenocysteine
  MOD_RES (165)..(165): Selenocysteine
QRLLLERXHCLVHKKPLQEVEIAAIXHGALHGLAYLHSHALIHRDIKAGNILLXEPGQVKLADFGSASMASPANSFVGXPYWMAPEVILAMDEGQYDGKVDIWSLGIXCIELAERKPPLFNMNAMSALYHIAQNDSPXLQSNEWXDSFRRFVDYCLQKIPQERPXSAELLRHDFVRRDRPLRVLI

SEQ ID NO: 26952 - protein, 117 aa, Homo sapiens
  MOD_RES (47)..(47): Selenocysteine
  MOD_RES (49)..(49): Selenocysteine
  MOD_RES (66)..(66): Selenocysteine
  MOD_RES (94)..(94): Selenocysteine
  MOD_RES (109)..(109): Selenocysteine
MAGVGDAAAPGEGGGGGVDGPQRDGRGEAEQPGGSGGQGPPPAPQLXEXLGFYESDRRRERRRGRXADGFWNLSVPGCVFVCVHPASFKSFPGXIQAPHFALLWLKGQXFASACPGV

SEQ ID NO: 26953 - protein, 567 aa, Homo sapiens
  MOD_RES (47)..(47): Selenocysteine
  MOD_RES (49)..(49): Selenocysteine
  MOD_RES (66)..(66): Selenocysteine
  MOD_RES (79)..(79): Selenocysteine
  MOD_RES (92)..(92): Selenocysteine
  MOD_RES (100)..(100): Selenocysteine
  MOD_RES (128)..(128): Selenocysteine
  MOD_RES (143)..(143): Selenocysteine
  MOD_RES (224)..(224): Selenocysteine
  MOD_RES (226)..(226): Selenocysteine
  MOD_RES (261)..(262): Selenocysteine
  MOD_RES (276)..(276): Selenocysteine
  MOD_RES (312)..(312): Selenocysteine
  MOD_RES (361)..(361): Selenocysteine
  MOD_RES (367)..(367): Selenocysteine
  MOD_RES (392)..(392): Selenocysteine
  MOD_RES (418)..(418): Selenocysteine
  MOD_RES (473)..(473): Selenocysteine
  MOD_RES (475)..(475): Selenocysteine
  MOD_RES (495)..(495): Selenocysteine
  MOD_RES (504)..(504): Selenocysteine
  MOD_RES (520)..(520): Selenocysteine
  MOD_RES (528)..(529): Selenocysteine
  MOD_RES (538)..(538): Selenocysteine
  MOD_RES (560)..(560): Selenocysteine
MAGVGDAAAPGEGGGGGVDGPQRDGRGEAEQPGGSGGQGPPPAPQLXEXLGFYESDRRRERRRGRXELSLLRFLSAELXRGYFLEHNEAKYXERRERVYXCLRIPRELEKLMVFGIFLCLDAFLYVFXLLPLRVFLALFRLLXLPCYGLRDRRLLQPAQVCDILKGVILVICYFMMHYVDYSMMYHLIRGQSVIKLYIIYNMLEVADRLFSSFGQDILDALYWXAXEPKERKRAHIGVIPHFFMAVLYVFLHAILIMVQAXXLNVAFNSHNKSLLXIMMSNNFVEIKGSVFKKFEKNNLFQMSNSDIKERFXNYVLLLIVCLRNMEQFSWNPDHLWVLFPDVCMVIASEIAVDIVKHAFIXKFNDIXADVYSEYRASLAFDLVSSRQKNAYXDYSDSVARRMGFIPLPLAVLLIRVVXSSIKVQGILSYACVILFYFGLISLKVLNSIVLLGKSCQYVKEAKMEEKLSNPPAXCXPGKPSSKSQNKCKPSQGLSXEENLSASIXKQPIHQKENIIPLLVXSNSDQFLXXPDGDEKDIXQDNSELKHRSSKKDLLEIDRFXICGNRID

SEQ ID NO: 26954 - protein, 212 aa, Homo sapiens
  MOD_RES (1)..(1): Any amino acid
  MOD_RES (62)..(62): Selenocysteine
  MOD_RES (64)..(64): Selenocysteine
  MOD_RES (105)..(105): Selenocysteine
  MOD_RES (154)..(154): Selenocysteine
  MOD_RES (160)..(160): Selenocysteine
  MOD_RES (185)..(185): Selenocysteine
  MOD_RES (212)..(212): Selenocysteine
XLKGVILVICYFMMHYVDYSMMYHLIRGQSVIKLYIIYNMLEVADRLFSSFGQDILDALYWXAXEPKERKRAHIGFVEIKGSVFKKFEKNNLFQMSNSDIKERFXNYVLLLIVCLRNMEQFSWNPDHLWVLFPDVCMVIASEIAVDIVKHAFIXKFNDIXADVYSEYRASLAFDLVSSRQKNAYXDYSDSVARRMGFIPLPLAVLVDIPESX

SEQ ID NO: 26955 - protein, 51 aa, Homo sapiens
  MOD_RES (1)..(1): Any amino acid
  MOD_RES (19)..(19): Selenocysteine
  MOD_RES (34)..(34): Selenocysteine
XLMVFGIFLCLDAFLYVFXLLPLRVFLALFRLLXLPCYGLRPKGGALSLPL

SEQ ID NO: 26956 - protein, 127 aa, Homo sapiens
  MOD_RES (25)..(25): Selenocysteine
  MOD_RES (29)..(29): Selenocysteine
  MOD_RES (59)..(59): Selenocysteine
  MOD_RES (111)..(111): Selenocysteine
  MOD_RES (121)..(121): Selenocysteine
CKLPNSKQSQDEPLRSRKVFVGRCXEDMXEDELREFFSQYGDVMDVFIPKPFRAFAFVXFADDQIAQSLCGEDLIIKGISVHISNAEPKHNSNRQLERSGRFGGNPGILSXCFLIQEFVIXHHRPRL

SEQ ID NO: 26957 - protein, 175 aa, Homo sapiens
  MOD_RES (6)..(6): Selenocysteine
  MOD_RES (21)..(21): Selenocysteine
  MOD_RES (33)..(33): Selenocysteine
  MOD_RES (37)..(37): Selenocysteine
  MOD_RES (79)..(79): Selenocysteine
  MOD_RES (83)..(83): Selenocysteine
  MOD_RES (113)..(113): Selenocysteine
  MOD_RES (169)..(169): Selenocysteine
KEYFSXFGEVLMVQVKKDLKXGHSKGFGFVRFXEYEXQVKVMSQRHMIDGRWCDCKLPNSKQSQDEPLRSRKVFVGRCXEDMXEDELREFFSQYGDVMDVFIPKPFRAFAFVXFADDQIAQSLCGEDLIIKGISVHISNAEPKHNSNRQLERSGRFGVHLISNVYGRSXSLKVVL

SEQ ID NO: 26958 - protein, 16 aa, Homo sapiens
  MOD_RES (10)..(10): Selenocysteine
LISNVYGRSXSLKVVL

SEQ ID NO: 26959 - protein, 243 aa, Homo sapiens
  MOD_RES (8)..(8): Selenocysteine
  MOD_RES (25)..(25): Selenocysteine
  MOD_RES (30)..(30): Selenocysteine
  MOD_RES (32)..(32): Selenocysteine
  MOD_RES (88)..(88): Selenocysteine
  MOD_RES (103)..(103): Selenocysteine
  MOD_RES (115)..(116): Selenocysteine
  MOD_RES (126)..(126): Selenocysteine
  MOD_RES (141)..(141): Selenocysteine
  MOD_RES (153)..(153): Selenocysteine
  MOD_RES (157)..(157): Selenocysteine
MSEYIRVXEDENDEPIEIPSEDDGXVLLSXVXAQFPGACGLRYRNPVSQCMRGVRLVEGILHAPDAGWGNLVYVVNYPKDNKRKMDEXDASSAVKVKRAVQKXSDLIVLGLPWKXXEQDLKEYFSXFGEVLMVQVKKDLKXGHSKGFGFVRFXEYEXQVKVMSQRHMIDGRWCDCKLPNSKIAQSLCGEDLIIKGISVHISNAEPKHNSNRQLERSGRFGGNPGGFGNQGGFGNSRGGGAGLG

SEQ ID NO: 26960 - protein, 201 aa, Homo sapiens
  MOD_RES (8)..(8): Selenocysteine
  MOD_RES (25)..(25): Selenocysteine
  MOD_RES (30)..(30): Selenocysteine
  MOD_RES (32)..(32): Selenocysteine
  MOD_RES (88)..(88): Selenocysteine
  MOD_RES (103)..(103): Selenocysteine
  MOD_RES (115)..(116): Selenocysteine
  MOD_RES (126)..(126): Selenocysteine
  MOD_RES (141)..(141): Selenocysteine
  MOD_RES (153)..(153): Selenocysteine
  MOD_RES (157)..(157): Selenocysteine
  MOD_RES (199)..(199): Selenocysteine
MSEYIRVXEDENDEPIEIPSEDDGXVLLSXVXAQFPGACGLRYRNPVSQCMRGVRLVEGILHAPDAGWGNLVYVVNYPKDNKRKMDEXDASSAVKVKRAVQKXSDLIVLGLPWKXXEQDLKEYFSXFGEVLMVQVKKDLKXGHSKGFGFVRFXEYEXQVKVMSQRHMIDGRWCDCKLPNSKQSQDEPLRSRKVFVGRCXED

SEQ ID NO: 26961 - protein, 295 aa, Homo sapiens
  MOD_RES (8)..(8): Selenocysteine
  MOD_RES (25)..(25): Selenocysteine
  MOD_RES (30)..(30): Selenocysteine
  MOD_RES (32)..(32): Selenocysteine
  MOD_RES (88)..(88): Selenocysteine
  MOD_RES (103)..(103): Selenocysteine
  MOD_RES (115)..(116): Selenocysteine
  MOD_RES (126)..(126): Selenocysteine
  MOD_RES (141)..(141): Selenocysteine
  MOD_RES (153)..(153): Selenocysteine
  MOD_RES (157)..(157): Selenocysteine
  MOD_RES (199)..(199): Selenocysteine
  MOD_RES (203)..(203): Selenocysteine
  MOD_RES (233)..(233): Selenocysteine
  MOD_RES (289)..(289): Selenocysteine
MSEYIRVXEDENDEPIEIPSEDDGXVLLSXVXAQFPGACGLRYRNPVSQCMRGVRLVEGILHAPDAGWGNLVYVVNYPKDNKRKMDEXDASSAVKVKRAVQKXSDLIVLGLPWKXXEQDLKEYFSXFGEVLMVQVKKDLKXGHSKGFGFVRFXEYEXQVKVMSQRHMIDGRWCDCKLPNSKQSQDEPLRSRKVFVGRCXEDMXEDELREFFSQYGDVMDVFIPKPFRAFAFVXFADDQIAQSLCGEDLIIKGISVHISNAEPKHNSNRQLERSGRFGVHLISNVYGRSXSLKVVL

SEQ ID NO: 26962 - protein, 298 aa, Homo sapiens
  MOD_RES (8)..(8): Selenocysteine
  MOD_RES (25)..(25): Selenocysteine
  MOD_RES (30)..(30): Selenocysteine
  MOD_RES (32)..(32): Selenocysteine
  MOD_RES (88)..(88): Selenocysteine
  MOD_RES (103)..(103): Selenocysteine
  MOD_RES (115)..(116): Selenocysteine
  MOD_RES (126)..(126): Selenocysteine
  MOD_RES (141)..(141): Selenocysteine
  MOD_RES (153)..(153): Selenocysteine
  MOD_RES (157)..(157): Selenocysteine
  MOD_RES (199)..(199): Selenocysteine
  MOD_RES (203)..(203): Selenocysteine
  MOD_RES (233)..(233): Selenocysteine
  MOD_RES (292)..(292): Selenocysteine
MSEYIRVXEDENDEPIEIPSEDDGXVLLSXVXAQFPGACGLRYRNPVSQCMRGVRLVEGILHAPDAGWGNLVYVVNYPKDNKRKMDEXDASSAVKVKRAVQKXSDLIVLGLPWKXXEQDLKEYFSXFGEVLMVQVKKDLKXGHSKGFGFVRFXEYEXQVKVMSQRHMIDGRWCDCKLPNSKQSQDEPLRSRKVFVGRCXEDMXEDELREFFSQYGDVMDVFIPKPFRAFAFVXFADDQIAQSLCGEDLIIKGISVHISNAEPKHNSNRQLERSGRFGGNPVHLISNVYGRSXSLKVVL

SEQ ID NO: 26963 - protein, 301 aa, Homo sapiens
  MOD_RES (8)..(8): Selenocysteine
  MOD_RES (25)..(25): Selenocysteine
  MOD_RES (30)..(30): Selenocysteine
  MOD_RES (32)..(32): Selenocysteine
  MOD_RES (88)..(88): Selenocysteine
  MOD_RES (103)..(103): Selenocysteine
  MOD_RES (115)..(116): Selenocysteine
  MOD_RES (126)..(126): Selenocysteine
  MOD_RES (141)..(141): Selenocysteine
  MOD_RES (153)..(153): Selenocysteine
  MOD_RES (157)..(157): Selenocysteine
  MOD_RES (199)..(199): Selenocysteine
  MOD_RES (203)..(203): Selenocysteine
  MOD_RES (233)..(233): Selenocysteine
  MOD_RES (285)..(285): Selenocysteine
  MOD_RES (295)..(295): Selenocysteine
MSEYIRVXEDENDEPIEIPSEDDGXVLLSXVXAQFPGACGLRYRNPVSQCMRGVRLVEGILHAPDAGWGNLVYVVNYPKDNKRKMDEXDASSAVKVKRAVQKXSDLIVLGLPWKXXEQDLKEYFSXFGEVLMVQVKKDLKXGHSKGFGFVRFXEYEXQVKVMSQRHMIDGRWCDCKLPNSKQSQDEPLRSRKVFVGRCXEDMXEDELREFFSQYGDVMDVFIPKPFRAFAFVXFADDQIAQSLCGEDLIIKGISVHISNAEPKHNSNRQLERSGRFGGNPGILSXCFLIQEFVIXHHRPRL

SEQ ID NO: 26964 - protein, 304 aa, Homo sapiens
  MOD_RES (8)..(8): Selenocysteine
  MOD_RES (25)..(25): Selenocysteine
  MOD_RES (30)..(30): Selenocysteine
  MOD_RES (32)..(32): Selenocysteine
  MOD_RES (88)..(88): Selenocysteine
  MOD_RES (103)..(103): Selenocysteine
  MOD_RES (115)..(116): Selenocysteine
  MOD_RES (126)..(126): Selenocysteine
  MOD_RES (141)..(141): Selenocysteine
  MOD_RES (153)..(153): Selenocysteine
  MOD_RES (157)..(157): Selenocysteine
  MOD_RES (199)..(199): Selenocysteine
  MOD_RES (203)..(203): Selenocysteine
  MOD_RES (233)..(233): Selenocysteine
  MOD_RES (298)..(298): Selenocysteine
MSEYIRVXEDENDEPIEIPSEDDGXVLLSXVXAQFPGACGLRYRNPVSQCMRGVRLVEGILHAPDAGWGNLVYVVNYPKDNKRKMDEXDASSAVKVKRAVQKXSDLIVLGLPWKXXEQDLKEYFSXFGEVLMVQVKKDLKXGHSKGFGFVRFXEYEXQVKVMSQRHMIDGRWCDCKLPNSKQSQDEPLRSRKVFVGRCXEDMXEDELREFFSQYGDVMDVFIPKPFRAFAFVXFADDQIAQSLCGEDLIIKGISVHISNAEPKHNSNRQLERSGRFGGNPGGFGNQVHLISNVYGRSXSLKVVL

SEQ ID NO: 26965 - protein, 414 aa, Homo sapiens
  MOD_RES (8)..(8): Selenocysteine
  MOD_RES (25)..(25): Selenocysteine
  MOD_RES (30)..(30): Selenocysteine
  MOD_RES (32)..(32): Selenocysteine
  MOD_RES (88)..(88): Selenocysteine
  MOD_RES (103)..(103): Selenocysteine
  MOD_RES (115)..(116): Selenocysteine
  MOD_RES (126)..(126): Selenocysteine
  MOD_RES (141)..(141): Selenocysteine
  MOD_RES (153)..(153): Selenocysteine
  MOD_RES (157)..(157): Selenocysteine
  MOD_RES (199)..(199): Selenocysteine
  MOD_RES (203)..(203): Selenocysteine
  MOD_RES (233)..(233): Selenocysteine
MSEYIRVXEDENDEPIEIPSEDDGXVLLSXVXAQFPGACGLRYRNPVSQCMRGVRLVEGILHAPDAGWGNLVYVVNYPKDNKRKMDEXDASSAVKVKRAVQKXSDLIVLGLPWKXXEQDLKEYFSXFGEVLMVQVKKDLKXGHSKGFGFVRFXEYEXQVKVMSQRHMIDGRWCDCKLPNSKQSQDEPLRSRKVFVGRCXEDMXEDELREFFSQYGDVMDVFIPKPFRAFAFVXFADDQIAQSLCGEDLIIKGISVHISNAEPKHNSNRQLERSGRFGGNPGGFGNQGGFGNSRGGGAGLGNNQGSNMGGGMNFGAFSINPAMMAAAQAALQSSWGMMGMLASQQNQSGPSGNNQNQGNMQREPNQAFGSGNNSYSGSNSGAAIGWGSASNAGSGSGFNGGFGSSMDSKSSGWGM

SEQ ID NO: 26966 - protein, 84 aa, Homo sapiens
  MOD_RES (8)..(8): Selenocysteine
  MOD_RES (25)..(25): Selenocysteine
  MOD_RES (30)..(30): Selenocysteine
  MOD_RES (32)..(32): Selenocysteine
MSEYIRVXEDENDEPIEIPSEDDGXVLLSXVXAQFPGACGLRYRNPVSQCMRGVRLVEGILHAPDAGWGNLVYVVNYPKGQERS

SEQ ID NO: 26967 - protein, 276 aa, Homo sapiens
  MOD_RES (8)..(8): Selenocysteine
  MOD_RES (25)..(25): Selenocysteine
  MOD_RES (30)..(30): Selenocysteine
  MOD_RES (32)..(32): Selenocysteine
  MOD_RES (82)..(82): Selenocysteine
  MOD_RES (86)..(86): Selenocysteine
  MOD_RES (92)..(92): Selenocysteine
  MOD_RES (129)..(129): Selenocysteine
  MOD_RES (144)..(144): Selenocysteine
  MOD_RES (156)..(157): Selenocysteine
  MOD_RES (167)..(167): Selenocysteine
  MOD_RES (182)..(182): Selenocysteine
  MOD_RES (194)..(194): Selenocysteine
  MOD_RES (198)..(198): Selenocysteine
  MOD_RES (240)..(240): Selenocysteine
  MOD_RES (244)..(244): Selenocysteine
  MOD_RES (274)..(274): Selenocysteine
MSEYIRVXEDENDEPIEIPSEDDGXVLLSXVXAQFPGACGLRYRNPVSQCMRGVRLVEGILHAPDAGWGNLVYVVNYPKGWXWWLXSVIPAXREAEAGESLEPGRQRLQRGEIAPLHSSLDNKRKMDEXDASSAVKVKRAVQKXSDLIVLGLPWKXXEQDLKEYFSXFGEVLMVQVKKDLKXGHSKGFGFVRFXEYEXQVKVMSQRHMIDGRWCDCKLPNSKQSQDEPLRSRKVFVGRCXEDMXEDELREFFSQYGDVMDVFIPKPFRAFAFVXFA

SEQ ID NO: 26968 - protein, 80 aa, Homo sapiens
  MOD_RES (8)..(8): Selenocysteine
  MOD_RES (25)..(25): Selenocysteine
  MOD_RES (30)..(30): Selenocysteine
  MOD_RES (32)..(32): Selenocysteine
MSEYIRVXEDENDEPIEIPSEDDGXVLLSXVXAQFPGACGLRYRNPVSQCMRGVRLVEGILHAPDAGWGNLVYVVNYPKV

SEQ ID NO: 26969 - protein, 35 aa, Homo sapiens
  MOD_RES (1)..(1): Any amino acid
XAAIGWGSASNAGSGSGFNGGFGSSMDSKSSGWGM

SEQ ID NO: 26970 - protein, 65 aa, Homo sapiens
  MOD_RES (1)..(1): Any amino acid
  MOD_RES (59)..(59): Selenocysteine
XADDQIAQSLCGEDLIIKGISVHISNAEPKHNSNRQLERSGRFGGNPVHLISNVYGRSXSLKVVL

SEQ ID NO: 26971 - protein, 200 aa, Homo sapiens
  MOD_RES (1)..(1): Any amino acid
  MOD_RES (4)..(4): Selenocysteine
  MOD_RES (19)..(19): Selenocysteine
  MOD_RES (31)..(32): Selenocysteine
  MOD_RES (42)..(42): Selenocysteine
  MOD_RES (57)..(57): Selenocysteine
  MOD_RES (69)..(69): Selenocysteine
  MOD_RES (73)..(73): Selenocysteine
  MOD_RES (115)..(115): Selenocysteine
  MOD_RES (119)..(119): Selenocysteine
  MOD_RES (149)..(149): Selenocysteine
XDEXDASSAVKVKRAVQKXSDLIVLGLPWKXXEQDLKEYFSXFGEVLMVQVKKDLKXGHSKGFGFVRFXEYEXQVKVMSQRHMIDGRWCDCKLPNSKQSQDEPLRSRKVFVGRCXEDMXEDELREFFSQYGDVMDVFIPKPFRAFAFVXFADDQIAQSLCGEDLIIKGISVHISNAEPKHNSNRQLERSGRFGVQYEAFI

SEQ ID NO: 26972 - protein, 115 aa, Homo sapiens
  MOD_RES (1)..(1): Any amino acid
XNNQGSNMGGGMNFGAFSINPAMMAAAQAALQSSWGMMGMLASQQNQSGPSGNNQNQGNMQREPNQAFGSGNNSYSGSNSGAAIGWGSASNAGSGSGFNGGFGSSMDSKSSGWGM

SEQ ID NO: 26973 - protein, 78 aa, Homo sapiens
  MOD_RES (1)..(1): Any amino acid
  MOD_RES (17)..(17): Selenocysteine
  MOD_RES (21)..(21): Selenocysteine
  MOD_RES (51)..(51): Selenocysteine
  MOD_RES (77)..(77): Selenocysteine
XQDEPLRSRKVFVGRCXEDMXEDELREFFSQYGDVMDVFIPKPFRAFAFVXFADDQIAQSLCGEDLIIKGISVHKSXI

SEQ ID NO: 26974 - protein, 149 aa, Homo sapiens
  MOD_RES (1)..(1): Any amino acid
  MOD_RES (4)..(4): Selenocysteine
  MOD_RES (8)..(8): Selenocysteine
  MOD_RES (50)..(50): Selenocysteine
  MOD_RES (54)..(54): Selenocysteine
  MOD_RES (84)..(84): Selenocysteine
  MOD_RES (143)..(143): Selenocysteine
XRFXEYEXQVKVMSQRHMIDGRWCDCKLPNSKQSQDEPLRSRKVFVGRCXEDMXEDELREFFSQYGDVMDVFIPKPFRAFAFVXFADDQIAQSLCGEDLIIKGISVHISNAEPKHNSNRQLERSGRFGGNPVHLISNVYGRSXSLKVVL

SEQ ID NO: 26975 - protein, 138 aa, Homo sapiens
  MOD_RES (1)..(1): Any amino acid
  MOD_RES (4)..(4): Selenocysteine
  MOD_RES (8)..(8): Selenocysteine
  MOD_RES (50)..(50): Selenocysteine
  MOD_RES (54)..(54): Selenocysteine
  MOD_RES (84)..(84): Selenocysteine
XRFXEYEXQVKVMSQRHMIDGRWCDCKLPNSKQSQDEPLRSRKVFVGRCXEDMXEDELREFFSQYGDVMDVFIPKPFRAFAFVXFADDQIAQSLCGEDLIIKGISVHISNAEPKHNSNRQLERSGRFGGNPVQYEAFI

SEQ ID NO: 26976 - protein, 212 aa, Homo sapiens
  MOD_RES (1)..(1): Any amino acid
  MOD_RES (2)..(2): Selenocysteine
  MOD_RES (17)..(17): Selenocysteine
  MOD_RES (29)..(30): Selenocysteine
  MOD_RES (40)..(40): Selenocysteine
  MOD_RES (55)..(55): Selenocysteine
  MOD_RES (67)..(67): Selenocysteine
  MOD_RES (71)..(71): Selenocysteine
  MOD_RES (113)..(113): Selenocysteine
  MOD_RES (117)..(117): Selenocysteine
  MOD_RES (147)..(147): Selenocysteine
  MOD_RES (206)..(206): Selenocysteine
XXDASSAVKVKRAVQKXSDLIVLGLPWKXXEQDLKEYFSXFGEVLMVQVKKDLKXGHSKGFGFVRFXEYEXQVKVMSQRHMIDGRWCDCKLPNSKQSQDEPLRSRKVFVGRCXEDMXEDELREFFSQYGDVMDVFIPKPFRAFAFVXFADDQIAQSLCGEDLIIKGISVHISNAEPKHNSNRQLERSGRFGGNPVHLISNVYGRSXSLKVVL

SEQ ID NO: 26977 - protein, 841 aa, Homo sapiens
  MOD_RES (5)..(5): Selenocysteine
  MOD_RES (26)..(26): Selenocysteine
  MOD_RES (33)..(33): Selenocysteine
  MOD_RES (60)..(60): Selenocysteine
  MOD_RES (90)..(90): Selenocysteine
  MOD_RES (97)..(97): Selenocysteine
  MOD_RES (115)..(115): Selenocysteine
  MOD_RES (139)..(139): Selenocysteine
  MOD_RES (149)..(149): Selenocysteine
  MOD_RES (154)..(155): Selenocysteine
  MOD_RES (175)..(175): Selenocysteine
  MOD_RES (188)..(188): Selenocysteine
  MOD_RES (198)..(198): Selenocysteine
  MOD_RES (209)..(209): Selenocysteine
  MOD_RES (233)..(233): Selenocysteine
  MOD_RES (269)..(269): Selenocysteine
  MOD_RES (290)..(290): Selenocysteine
  MOD_RES (293)..(293): Selenocysteine
  MOD_RES (310)..(310): Selenocysteine
  MOD_RES (374)..(374): Selenocysteine
  MOD_RES (436)..(436): Selenocysteine
  MOD_RES (462)..(462): Selenocysteine
  MOD_RES (464)..(464): Selenocysteine
  MOD_RES (470)..(470): Selenocysteine
  MOD_RES (481)..(481): Selenocysteine
  MOD_RES (510)..(510): Selenocysteine
  MOD_RES (526)..(526): Selenocysteine
  MOD_RES (551)..(551): Selenocysteine
  MOD_RES (556)..(556): Selenocysteine
  MOD_RES (566)..(566): Selenocysteine
  MOD_RES (575)..(575): Selenocysteine
  MOD_RES (584)..(584): Selenocysteine
  MOD_RES (594)..(594): Selenocysteine
  MOD_RES (627)..(627): Selenocysteine
  MOD_RES (643)..(643): Selenocysteine
  MOD_RES (650)..(650): Selenocysteine
  MOD_RES (664)..(664): Selenocysteine
  MOD_RES (668)..(668): Selenocysteine
  MOD_RES (696)..(696): Selenocysteine
  MOD_RES (702)..(702): Selenocysteine
  MOD_RES (721)..(721): Selenocysteine
  MOD_RES (723)..(723): Selenocysteine
  MOD_RES (763)..(763): Selenocysteine
  MOD_RES (778)..(779): Selenocysteine
  MOD_RES (824)..(824): Selenocysteine
  MOD_RES (835)..(835): Selenocysteine
  MOD_RES (841)..(841): Selenocysteine
MLLCXARLVGLQLLISCCWAFACHSXESSPDFXLPGDYLLAGLFPLHSGCLQVRHRPEVXLCDRSCSFNEHGYHLFQAMRLGVEEINNSXALLPNIXLGYQLYDVCSDSANVYAXLRVLSLPGQHHIELQGDLLHYSPXVLAVIGPDSXNRAAXXAALLSPFLVPMISYAASSEXLSVKRQYPSFLRXIPNDKYQVEXMVLLLQKFGWXWISLVGSSDDYGQLGVQALENQAXGQGICIAFKDIMPFSAQVGDERMQCLMRHLAQAGAXVVVVFSSRQLARVFFESVVLXNLXGKVWVASEAWALSRHIXGVPGIQRIGMVLGVAIQKRAVPGLKAFEEAYARADKKAPRPCHKGSWCSSNQLCRECQAFMAHXMPKLKAFSMSSAYNAYRAVYAVAHGLHQLLGCASGACSRGRVYPWQLLEQIHKVHFLLHKDXVAFNDNRDPLSSYNIIAWDWNGPKWXFXVLGSSXWSPVQLNINEXKIQWHGKDNQVPKSVCSSDCLEGHQRVVXGFHHCCFECVPCGAGXFLNKSDLYRCQPCGKEEWAPEGSQXCFPRXVVFLALREHXSWVLLAANXLLLLLLLGXAGLFAWHLDXPVVRSAGGRLCFLMLGSLAAGSGSLYGFFGEPXRPACLLRQALFALGFXIFLSCLXVRSFQLIIIFKFSXKVPXFYHAWVQNHGAGLFVMISSAAQLLICLXWLVVWXPLPAREYQRFPHLVMLECXEXNSLGFILAFLYNGLLSISAFACSYLGKDLPENYNEAKCVXFSLLFNFVSWIAFFXXASVYDGKYLPAANMMAGLSSLSSGFGGYFLPKCYVILCRPDLNSXEHFQASIQDYXRRCGSX

SEQ ID NO: 26978 - protein, 587 aa, Homo sapiens
  MOD_RES (5)..(5): Selenocysteine
  MOD_RES (26)..(26): Selenocysteine
  MOD_RES (33)..(33): Selenocysteine
  MOD_RES (60)..(60): Selenocysteine
  MOD_RES (90)..(90): Selenocysteine
  MOD_RES (97)..(97): Selenocysteine
  MOD_RES (115)..(115): Selenocysteine
  MOD_RES (139)..(139): Selenocysteine
  MOD_RES (149)..(149): Selenocysteine
  MOD_RES (154)..(155): Selenocysteine
  MOD_RES (182)..(182): Selenocysteine
  MOD_RES (208)..(208): Selenocysteine
  MOD_RES (210)..(210): Selenocysteine
  MOD_RES (216)..(216): Selenocysteine
  MOD_RES (227)..(227): Selenocysteine
  MOD_RES (256)..(256): Selenocysteine
  MOD_RES (272)..(272): Selenocysteine
  MOD_RES (297)..(297): Selenocysteine
  MOD_RES (302)..(302): Selenocysteine
  MOD_RES (312)..(312): Selenocysteine
  MOD_RES (321)..(321): Selenocysteine
  MOD_RES (330)..(330): Selenocysteine
  MOD_RES (340)..(340): Selenocysteine
  MOD_RES (373)..(373): Selenocysteine
  MOD_RES (389)..(389): Selenocysteine
  MOD_RES (396)..(396): Selenocysteine
  MOD_RES (410)..(410): Selenocysteine
  MOD_RES (414)..(414): Selenocysteine
  MOD_RES (442)..(442): Selenocysteine
  MOD_RES (448)..(448): Selenocysteine
  MOD_RES (467)..(467): Selenocysteine
  MOD_RES (469)..(469): Selenocysteine
  MOD_RES (509)..(509): Selenocysteine
  MOD_RES (524)..(525): Selenocysteine
  MOD_RES (570)..(570): Selenocysteine
  MOD_RES (581)..(581): Selenocysteine
  MOD_RES (587)..(587): Selenocysteine
MLLCXARLVGLQLLISCCWAFACHSXESSPDFXLPGDYLLAGLFPLHSGCLQVRHRPEVXLCDRSCSFNEHGYHLFQAMRLGVEEINNSXALLPNIXLGYQLYDVCSDSANVYAXLRVLSLPGQHHIELQGDLLHYSPXVLAVIGPDSXNRAAXXAALLSPFLVPMLLEQIHKVHFLLHKDXVAFNDNRDPLSSYNIIAWDWNGPKWXFXVLGSSXWSPVQLNINEXKIQWHGKDNQVPKSVCSSDCLEGHQRVVXGFHHCCFECVPCGAGXFLNKSDLYRCQPCGKEEWAPEGSQXCFPRXVVFLALREHXSWVLLAANXLLLLLLLGXAGLFAWHLDXPVVRSAGGRLCFLMLGSLAAGSGSLYGFFGEPXRPACLLRQALFALGFXIFLSCLXVRSFQLIIIFKFSXKVPXFYHAWVQNHGAGLFVMISSAAQLLICLXWLVVWXPLPAREYQRFPHLVMLECXEXNSLGFILAFLYNGLLSISAFACSYLGKDLPENYNEAKCVXFSLLFNFVSWIAFFXXASVYDGKYLPAANMMAGLSSLSSGFGGYFLPKCYVILCRPDLNSXEHFQASIQDYXRRCGSX

SEQ ID NO: 26979 - protein, 406 aa, Homo sapiens
  MOD_RES (1)..(1): Any amino acid
  MOD_RES (16)..(16): Selenocysteine
  MOD_RES (23)..(23): Selenocysteine
  MOD_RES (41)..(41): Selenocysteine
  MOD_RES (65)..(65): Selenocysteine
  MOD_RES (75)..(75): Selenocysteine
  MOD_RES (80)..(81): Selenocysteine
  MOD_RES (101)..(101): Selenocysteine
  MOD_RES (114)..(114): Selenocysteine
  MOD_RES (124)..(124): Selenocysteine
  MOD_RES (135)..(135): Selenocysteine
  MOD_RES (159)..(159): Selenocysteine
  MOD_RES (195)..(195): Selenocysteine
  MOD_RES (216)..(216): Selenocysteine
  MOD_RES (219)..(219): Selenocysteine
  MOD_RES (236)..(236): Selenocysteine
  MOD_RES (300)..(300): Selenocysteine
  MOD_RES (347)..(347): Selenocysteine
  MOD_RES (349)..(349): Selenocysteine
  MOD_RES (380)..(380): Selenocysteine
  MOD_RES (389)..(389): Selenocysteine
  MOD_RES (406)..(406): Selenocysteine
XFQAMRLGVEEINNSXALLPNIXLGYQLYDVCSDSANVYAXLRVLSLPGQHHIELQGDLLHYSPXVLAVIGPDSXNRAAXXAALLSPFLVPMISYAASSEXLSVKRQYPSFLRXIPNDKYQVEXMVLLLQKFGWXWISLVGSSDDYGQLGVQALENQAXGQGICIAFKDIMPFSAQVGDERMQCLMRHLAQAGAXVVVVFSSRQLARVFFESVVLXNLXGKVWVASEAWALSRHIXGVPGIQRIGMVLGVAIQKRAVPGLKAFEEAYARADKKAPRPCHKGSWCSSNQLCRECQAFMAHXMPKLKAFSMSSAYNAYRAVYAVAHGLHQLLGCASGACSRGRVYPWQXSXDASLVGKKSGHLREARPASRALWCFWLCVSXPLGCCWQLXRCCCCCCLGLLACLPGX

SEQ ID NO: 26980 - protein, 247 aa, Homo sapiens
  MOD_RES (1)..(1): Any amino acid
  MOD_RES (16)..(16): Selenocysteine
  MOD_RES (23)..(23): Selenocysteine
  MOD_RES (41)..(41): Selenocysteine
  MOD_RES (65)..(65): Selenocysteine
  MOD_RES (75)..(75): Selenocysteine
  MOD_RES (80)..(81): Selenocysteine
  MOD_RES (108)..(108): Selenocysteine
  MOD_RES (134)..(134): Selenocysteine
  MOD_RES (136)..(136): Selenocysteine
  MOD_RES (142)..(142): Selenocysteine
  MOD_RES (153)..(153): Selenocysteine
  MOD_RES (182)..(182): Selenocysteine
  MOD_RES (198)..(198): Selenocysteine
  MOD_RES (205)..(205): Selenocysteine
  MOD_RES (209)..(209): Selenocysteine
  MOD_RES (213)..(215): Selenocysteine
  MOD_RES (227)..(227): Selenocysteine
  MOD_RES (241)..(242): Selenocysteine
  MOD_RES (245)..(245): Selenocysteine
XFQAMRLGVEEINNSXALLPNIXLGYQLYDVCSDSANVYAXLRVLSLPGQHHIELQGDLLHYSPXVLAVIGPDSXNRAAXXAALLSPFLVPMLLEQIHKVHFLLHKDXVAFNDNRDPLSSYNIIAWDWNGPKWXFXVLGSSXWSPVQLNINEXKIQWHGKDNQVPKSVCSSDCLEGHQRVVXGFHHCCFECVPCGAGXFLNKSAXWVRXCQRXXXRPNVSPSACSSXSCPGSPSSPRPASXXASXCL

SEQ ID NO: 26981 - protein, 839 aa, Homo sapiens
  MOD_RES (7)..(7): Selenocysteine
  MOD_RES (149)..(149): Selenocysteine
  MOD_RES (163)..(163): Selenocysteine
  MOD_RES (183)..(184): Selenocysteine
  MOD_RES (214)..(214): Selenocysteine
  MOD_RES (239)..(239): Selenocysteine
  MOD_RES (242)..(242): Selenocysteine
  MOD_RES (250)..(250): Selenocysteine
  MOD_RES (259)..(259): Selenocysteine
  MOD_RES (268)..(268): Selenocysteine
  MOD_RES (280)..(280): Selenocysteine
  MOD_RES (294)..(294): Selenocysteine
  MOD_RES (314)..(314): Selenocysteine
  MOD_RES (321)..(321): Selenocysteine
  MOD_RES (326)..(326): Selenocysteine
  MOD_RES (353)..(353): Selenocysteine
  MOD_RES (358)..(358): Selenocysteine
  MOD_RES (370)..(370): Selenocysteine
  MOD_RES (375)..(375): Selenocysteine
  MOD_RES (409)..(409): Selenocysteine
  MOD_RES (411)..(411): Selenocysteine
  MOD_RES (430)..(430): Selenocysteine
  MOD_RES (485)..(485): Selenocysteine
  MOD_RES (489)..(489): Selenocysteine
  MOD_RES (524)..(524): Selenocysteine
  MOD_RES (529)..(529): Selenocysteine
  MOD_RES (549)..(549): Selenocysteine
  MOD_RES (566)..(566): Selenocysteine
  MOD_RES (580)..(580): Selenocysteine
  MOD_RES (593)..(593): Selenocysteine
  MOD_RES (609)..(609): Selenocysteine
  MOD_RES (629)..(629): Selenocysteine
  MOD_RES (642)..(642): Selenocysteine
  MOD_RES (686)..(686): Selenocysteine
  MOD_RES (700)..(700): Selenocysteine
  MOD_RES (705)..(706): Selenocysteine
  MOD_RES (708)..(708): Selenocysteine
  MOD_RES (716)..(716): Selenocysteine
  MOD_RES (732)..(732): Selenocysteine
  MOD_RES (754)..(754): Selenocysteine
  MOD_RES (763)..(763): Selenocysteine
  MOD_RES (767)..(767): Selenocysteine
  MOD_RES (771)..(771): Selenocysteine
  MOD_RES (778)..(778): Selenocysteine
  MOD_RES (789)..(789): Selenocysteine
  MOD_RES (796)..(796): Selenocysteine
  MOD_RES (823)..(823): Selenocysteine
  MOD_RES (835)..(835): Selenocysteine
MGPRAKXISSLFFLLWVLAEPAENSDFYLPGDYLLGGLFSLHANMKGIVHLNFLQVPMCKEYEVKVIGYNLMQAMRFAVEEINNDSSLLPGVLLGYEIVDVCYISNNVQPVLYFLAHEDNLLPIQEDYSNYISRVVAVIGPDNSESVMXVANFLSLFLLPQIXYSAISDELRDKVRFPALLRXXPSADHHIEAMVQLMLHFRWNWIIVLVSSDXYGRDNGQLLGERVARRDICIAFQEXLPXLQPNQNMXSEERQRLVXIVDKLQQSXARVVVVFSPDLXLYHFFNEVLRQNFXGAVWIASESWAIDPVLHNLXELRHLGXFLGIXIQSVPIPGFSEFREWGPQAGPPPLSRXSQSYXCNQECDNCLNAXLSFNXILRLSGERVVYSVYSAVYAVAHALHSLLGCDKSXCXKRVVYPWQLLEEIWKVNFXLLDHQIFFDPQGDVALHLEIVQWQWDRSQNPFQSVASYYPLQRQLKNIQDISWHXINNXIPMSMCSKRCQSGQKKKPVGIHVCCFECIDCLPGXFLNHXEDEYECQACPNNEWSYQSEXSCFKRQLVFLEWHEAPXIAVALLAALGFLSXLAILVIFWRHFQXPIVRSAGGPMCFLMLXLLLVAYMVVPVYVGPPKVSXCLCRQALFPLCFXICISCIAVRSFQIVCAFKMASRFPRAYSYWVRYQGPYVSMAFIXVLKMVIVVIGMLAXGLSPXXRXDPDDPKIXIVSCNPNYRNSLLFNXSLDLLLSVVGFSFAYMGKELPXNYNEAKFIXLSMXFYFXSSVSLCXFMSAYSGVLVXIVDLLVXVLNLLAISLGYFGPKCYMILFYPERNXPAYFNSMIQGYXMRRD

SEQ ID NO: 26982 - protein, 852 aa, Homo sapiens
  MOD_RES (19)..(19): Selenocysteine
  MOD_RES (55)..(55): Selenocysteine
  MOD_RES (63)..(63): Selenocysteine
  MOD_RES (102)..(102): Selenocysteine
  MOD_RES (132)..(132): Selenocysteine
  MOD_RES (153)..(153): Selenocysteine
  MOD_RES (179)..(179): Selenocysteine
  MOD_RES (186)..(186): Selenocysteine
  MOD_RES (195)..(195): Selenocysteine
  MOD_RES (305)..(305): Selenocysteine
  MOD_RES (320)..(320): Selenocysteine
  MOD_RES (340)..(340): Selenocysteine
  MOD_RES (346)..(346): Selenocysteine
  MOD_RES (377)..(377): Selenocysteine
  MOD_RES (390)..(390): Selenocysteine
  MOD_RES (407)..(407): Selenocysteine
  MOD_RES (434)..(434): Selenocysteine
  MOD_RES (480)..(480): Selenocysteine
  MOD_RES (489)..(489): Selenocysteine
  MOD_RES (539)..(539): Selenocysteine
  MOD_RES (552)..(552): Selenocysteine
  MOD_RES (645)..(645): Selenocysteine
  MOD_RES (650)..(650): Selenocysteine
  MOD_RES (697)..(697): Selenocysteine
  MOD_RES (709)..(709): Selenocysteine
  MOD_RES (716)..(716): Selenocysteine
  MOD_RES (724)..(724): Selenocysteine
  MOD_RES (736)..(736): Selenocysteine
  MOD_RES (739)..(739): Selenocysteine
  MOD_RES (748)..(748): Selenocysteine
  MOD_RES (765)..(765): Selenocysteine
  MOD_RES (774)..(774): Selenocysteine
  MOD_RES (825)..(825): Selenocysteine
  MOD_RES (845)..(845): Selenocysteine
MLGPAVLGLSLWALLHPGXGAPLCLSQQLRMKGDYVLGGLFPLGEAEEAGLRSRXRPSSPVCXRFSSNGLLWALAMKMAVEEINNKSDLLPGLRLGYDLFDXCSEPVVAMKPSLMFLAKAGSRDIAAYCNYXQYQPRVLAVIGPHSSELAMVXGKFFSFFLMPQVSYGASMELLSAREXFPSFFRXVPSDRVQLXAAAELLQEFGWNWVAALGSDDEYGRQGLSIFSALAAARGICIAHEGLVPLPRADDSRLGKVQDVLHQVNQSSVQVVLLFASVHAAHALFNYSISSRLSPKVWVASEAWLXSDLVMGLPGMAQMGXVLGFLQRGAQLHEFPQYVKXHLALAXDPAFCSALGEREQGLEEDVVGQRCPQCDCIXLQNVSAGLNHHQXFSVYAAVYSVAQALHNXLQCNASGCPAQDPVKPWQLLENMYNLXFHVGGLPLRFDSSGNVDMEYDLKLWVWQGSVPRLHDVGRFNGSLRXERLKIRWHXSDNQKPVSRCSRQCQEGQVRRVKGFHSCCYDCVDCEAGSYRQNPDDIACXFCGQDEWSPERSXRCFRRRSRFLAWGEPAVLLLLLLLSLALGLVLAALGLFVHHRDSPLVQASGGPLACFGLVCLGLVCLSVLLFPGQPSPARCLAQQPLSHLPLXGCLSXLFLQAAEIFVESELPLSWADRLSGCLRGPWAWLVVLLAMLVEVALCXWYLVAFPPEVVXDWHMLPXEALVHCRXRSWVSFGLAHAXNAXLAFLCFLGXFLVRSQPGCYNRARGLXFAMLAYFIXWVSFVPLLANVQVVLRPAVQMGALLLCVLGILAAFHLPRCYLLMRQPGLNXPEFFLGGGPGDAQGQNDGNXGNQGKHE

SEQ ID NO: 26983 - protein, 61 aa, Homo sapiens
  MOD_RES (57)..(57): Selenocysteine
MAPLDLLLSCLAVSRIFLQLFIFYVNVIVIFFIEFIMCSANCAILLFINELELWLAXWLGV

SEQ ID NO: 26984 - protein, 156 aa, Homo sapiens
  MOD_RES (57)..(57): Selenocysteine
  MOD_RES (125)..(125): Selenocysteine
  MOD_RES (131)..(131): Selenocysteine
MAPLDLLLSCLAVSRIFLQLFIFYVNVIVIFFIEFIMCSANCAILLFINELELWLAXWLGVFYCAKVASVRHPLFIWLKMRISKLVPWMILGSLLYVSMICVFHSKYAGFMVPYFLRKFFSQNAXIQKEDXLAIQIFSFVAEFSVPLLIFLFAVLL

SEQ ID NO: 26985 - protein, 299 aa, Homo sapiens
  MOD_RES (23)..(23): Selenocysteine
  MOD_RES (97)..(97): Selenocysteine
  MOD_RES (165)..(165): Selenocysteine
  MOD_RES (171)..(171): Selenocysteine
  MOD_RES (205)..(205): Selenocysteine
  MOD_RES (211)..(211): Selenocysteine
MLESHLIIYFLLAVIQFLLGIFXNGIIVVVNGIDLIKHRKMAPLDLLLSCLAVSRIFLQLFIFYVNVIVIFFIEFIMCSANCAILLFINELELWLAXWLGVFYCAKVASVRHPLFIWLKMRISKLVPWMILGSLLYVSMICVFHSKYAGFMVPYFLRKFFSQNAXIQKEDXLAIQIFSFVAEFSVPLLIFLFAVLLLIFSLGRHXRQMRNXVAGSRVPGRGAPISALLSILSFLILYFSHCMIKVFLSSLKFHIRRFIFLFFILVIGIYPSGHSLILILGNPKLKQNAKKFLLHSKCCQ

SEQ ID NO: 26986 - protein, 307 aa, Homo sapiens
  MOD_RES (42)..(42): Selenocysteine
  MOD_RES (48)..(48): Selenocysteine
  MOD_RES (63)..(63): Selenocysteine
  MOD_RES (100)..(100): Selenocysteine
  MOD_RES (125)..(125): Selenocysteine
  MOD_RES (156)..(156): Selenocysteine
  MOD_RES (160)..(160): Selenocysteine
  MOD_RES (187)..(187): Selenocysteine
  MOD_RES (192)..(192): Selenocysteine
  MOD_RES (212)..(212): Selenocysteine
  MOD_RES (219)..(219): Selenocysteine
  MOD_RES (251)..(251): Selenocysteine
  MOD_RES (264)..(266): Selenocysteine
  MOD_RES (307)..(307): Selenocysteine
MLRVVEGIFIFVVVSESVFGVLGNGFIGLVNCIDCAKNKLSXIGFILXGLAISRIFLIWIIIXDGFIQIFSPNIYASGNLIEYISYFWVIGNQSSMWFAXSLSIFYFLKIANFSNYIFLWLKSRXNMVLPFMIVFLLISSLLNFAYIAKILNDYKXKNDXVWDLNMYKSEYFIKQILLNLGVIFFFXLSLIXCIFLIISLWRHNRQMQSNVXGLRDSNXEAHVKAMKVLISFIILFILYFIGMAIEISCFXVRENKLLLMFGMXXXAIYPWGHSFILILGNSKLKQASLRVLQQLKCCEKRKNLRVX

SEQ ID NO: 26987 - protein, 303 aa, Homo sapiens
  MOD_RES (10)..(10): Selenocysteine
  MOD_RES (80)..(80): Selenocysteine
  MOD_RES (101)..(101): Selenocysteine
  MOD_RES (137)..(137): Selenocysteine
  MOD_RES (163)..(164): Selenocysteine
  MOD_RES (174)..(174): Selenocysteine
  MOD_RES (182)..(182): Selenocysteine
  MOD_RES (184)..(184): Selenocysteine
  MOD_RES (189)..(189): Selenocysteine
  MOD_RES (192)..(192): Selenocysteine
  MOD_RES (224)..(224): Selenocysteine
  MOD_RES (228)..(228): Selenocysteine
  MOD_RES (260)..(260): Selenocysteine
  MOD_RES (268)..(268): Selenocysteine
MESALPSIFXLVIIAEFIIGNLSNGFIVLINCIDWVSKRELSSVDKLLIILAISRIGLIWEILVSWFLALHYLAIFVSGXGLRIMIFSWIVSNHFNLWLAXIFSIFYLLKIASFSSPAFLYLKWRVNKVILMILLGXLVFLFLNLIQINMHIKDWLDRYERNXXWNFSMSDFEXFSVSVKFXMXMFSLXPFXVAFISFLLLIFSLQKHLQKMQLNYKGHRDPRXKVHXNALKIVISFLLFYASFFLCVLISWISELYQNXVIYMLCEXIGVFSPSSHSFLLILGNAKLRQAFLLVAAKVWAKR

SEQ ID NO: 26988 - protein, 317 aa, Homo sapiens
  MOD_RES (10)..(10): Selenocysteine
  MOD_RES (49)..(49): Selenocysteine
  MOD_RES (78)..(78): Selenocysteine
  MOD_RES (86)..(86): Selenocysteine
  MOD_RES (90)..(90): Selenocysteine
  MOD_RES (101)..(101): Selenocysteine
  MOD_RES (105)..(105): Selenocysteine
  MOD_RES (137)..(137): Selenocysteine
  MOD_RES (164)..(164): Selenocysteine
  MOD_RES (173)..(173): Selenocysteine
  MOD_RES (182)..(182): Selenocysteine
  MOD_RES (184)..(184): Selenocysteine
  MOD_RES (192)..(192): Selenocysteine
  MOD_RES (215)..(215): Selenocysteine
  MOD_RES (224)..(224): Selenocysteine
  MOD_RES (235)..(235): Selenocysteine
  MOD_RES (253)..(253): Selenocysteine
MGGVIKSIFXFVLIVEFIIGNLGNSFIALVNCIDWVKGRKISSVDRILXALAISRISLVWLIFGSWCVSVFFPALFAXEKMFRMLXNIWXVINHFSVWLAXGLGXFYFLKIANFSNSIFLYLKWRVKKVVLVLLLVXSVFLFLNIALINIHINASINGYRRNKXCSSDSSNFXRFSSLIVLXSXVFIFIPFXLSLAMFLLLIFSMWKHRKKMQHXVKISGDASXKAHRGVKSVIXFFLLYAIFSLSFFISVWXSERLEENLIILSQVMGMAYPSCHSCVLILGNKKLRQASLSVLLWLRYMFKDGEPSGHKEFRESS

SEQ ID NO: 26989 - protein, 291 aa, Homo sapiens
  MOD_RES (7)..(7): Selenocysteine
  MOD_RES (20)..(20): Selenocysteine
  MOD_RES (82)..(82): Selenocysteine
  MOD_RES (84)..(84): Selenocysteine
  MOD_RES (92)..(92): Selenocysteine
  MOD_RES (100)..(100): Selenocysteine
  MOD_RES (111)..(111): Selenocysteine
  MOD_RES (137)..(137): Selenocysteine
  MOD_RES (140)..(140): Selenocysteine
  MOD_RES (156)..(156): Selenocysteine
  MOD_RES (165)..(165): Selenocysteine
  MOD_RES (167)..(167): Selenocysteine
  MOD_RES (182)..(182): Selenocysteine
  MOD_RES (196)..(196): Selenocysteine
  MOD_RES (204)..(204): Selenocysteine
  MOD_RES (212)..(212): Selenocysteine
  MOD_RES (224)..(224): Selenocysteine
  MOD_RES (237)..(237): Selenocysteine
  MOD_RES (242)..(242): Selenocysteine
  MOD_RES (246)..(246): Selenocysteine
  MOD_RES (250)..(250): Selenocysteine
  MOD_RES (274)..(274): Selenocysteine
  MOD_RES (282)..(282): Selenocysteine
MIPIQLXVFFMIIYVLESLXIIVQSSLIVAVLGREWLQVRRLMPVDMILISLGISRFCLQWASMLNNFCSYFNLNYVLCNLXIXWEFFNILXFWLNSLLXVFYCIKVSSFXHHIFLWLRWRILRLFPWILLGSLMIXCVXIIPSAIGNYIQIQLLXMEHLPRNSXVXDKLENFHQYQFQAHXVALVIPFILFLASXIFLMASLXKQIQHHSXGHCNPSMKARFXALRSLAVLFIVFXSYFLXILIXIIGXLFDKRCWLWVWEAFVYAFILMHSXSLMLSSPXLKRILKGKC

SEQ ID NO: 26990 - protein, 299 aa, Homo sapiens
  MOD_RES (38)..(38): Selenocysteine
  MOD_RES (49)..(49): Selenocysteine
  MOD_RES (69)..(69): Selenocysteine
  MOD_RES (91)..(91): Selenocysteine
  MOD_RES (148)..(148): Selenocysteine
  MOD_RES (155)..(155): Selenocysteine
  MOD_RES (163)..(163): Selenocysteine
  MOD_RES (178)..(178): Selenocysteine
  MOD_RES (180)..(181): Selenocysteine
  MOD_RES (189)..(189): Selenocysteine
  MOD_RES (221)..(221): Selenocysteine
  MOD_RES (230)..(230): Selenocysteine
  MOD_RES (232)..(232): Selenocysteine
  MOD_RES (247)..(247): Selenocysteine
  MOD_RES (249)..(249): Selenocysteine
  MOD_RES (254)..(254): Selenocysteine
  MOD_RES (266)..(266): Selenocysteine
  MOD_RES (289)..(289): Selenocysteine
  MOD_RES (298)..(298): Selenocysteine
MMCFLLIISSILVVFAFVLGNVANGFIALVNVIDWVNXRKISSAEQILXALVVSRIGLLWVMLFLWYAXVFNSALYGLEVRIVASNAWAVXNHFSMWLAASLSIFCLLKIANFSNLISLHLKKRIKSVVLVILLGPLVFLICNLAVIXMDERVWXKEYEGNVXWKIKLRNAIHLSSLXVXXLANLIPFXLSLICFLLLICSLCKHLKKMRLHSKGSQDPSXKVHIKALQXVXSFLMLFAIYFLCIIXSXWNLRXQQSKLVLLLCQXVAIMYPSFHSFILIMGSRKLKQXFLSVLWQMXR

SEQ ID NO: 26991 - protein, 299 aa, Homo sapiens
  MOD_RES (38)..(38): Selenocysteine
  MOD_RES (49)..(49): Selenocysteine
  MOD_RES (69)..(69): Selenocysteine
  MOD_RES (91)..(91): Selenocysteine
  MOD_RES (148)..(148): Selenocysteine
  MOD_RES (155)..(155): Selenocysteine
  MOD_RES (163)..(163): Selenocysteine
  MOD_RES (178)..(178): Selenocysteine
  MOD_RES (180)..(181): Selenocysteine
  MOD_RES (189)..(189): Selenocysteine
  MOD_RES (221)..(221): Selenocysteine
  MOD_RES (230)..(230): Selenocysteine
  MOD_RES (232)..(232): Selenocysteine
  MOD_RES (247)..(247): Selenocysteine
  MOD_RES (249)..(249): Selenocysteine
  MOD_RES (254)..(254): Selenocysteine
  MOD_RES (266)..(266): Selenocysteine
  MOD_RES (289)..(289): Selenocysteine
  MOD_RES (298)..(298): Selenocysteine
MMCFLLIISSILVVFAFVLGNVANGFIALVNVIDWVNXRKISSAEQILXALVVSRIGLLWVMLFLWYAXVFNSALYGLEVRIVASNAWAVXNHFSMWLAASLSIFCLLKIANFSNLISLHLKKRIKSVVLVILLGPLVFLICNLAVIXMDERVWXKEYEGNVXWKIKLRNAIHLSSLXVXXLANLIPFXLSLICFLLLICSLCKHLKKMRLHSKGSQDPSXKVHIKALQXVXSFLMLFAIYFLCIIXSXWNLRXQQSKLVLLLCQXVAIMYPSFHSFILIMGSRKLKQXFLSVLWQMXC

SEQ ID NO: 26992 - protein, 319 aa, Homo sapiens
  MOD_RES (38)..(38): Selenocysteine
  MOD_RES (49)..(49): Selenocysteine
  MOD_RES (69)..(69): Selenocysteine
  MOD_RES (91)..(91): Selenocysteine
  MOD_RES (148)..(148): Selenocysteine
  MOD_RES (155)..(155): Selenocysteine
  MOD_RES (163)..(163): Selenocysteine
  MOD_RES (178)..(178): Selenocysteine
  MOD_RES (189)..(189): Selenocysteine
  MOD_RES (191)..(191): Selenocysteine
  MOD_RES (221)..(221): Selenocysteine
  MOD_RES (230)..(230): Selenocysteine
  MOD_RES (232)..(232): Selenocysteine
  MOD_RES (285)..(285): Selenocysteine
  MOD_RES (289)..(289): Selenocysteine
  MOD_RES (298)..(298): Selenocysteine
  MOD_RES (305)..(305): Selenocysteine
  MOD_RES (312)..(312): Selenocysteine
MMCFLLIISSILVVFAFVLGNVANGFIALVNVIDWVNXRKISSAEQILXALVVSRIGLLWVMLFLWYAXVFNSALYGLEVRIVASNAWAVXNHFSMWLAASLSIFCLLKIANFSNLISLHLKKRIKSVVLVILLGPLVFLICNLAVIXMDERVWXKEYEGNVXWKIKLRNAMHLSNLXVAMLANLIPFXLXLISFLLLIYSLCKHLKKMQLHGKGSQDPSXKIHIKALQXVXSFLILLAIYFLCLIISFWNFKMRPKEIVLMLCQAFGIIYPSFHSFILIWGNKXLKQXFLSVLWQVXCWAKDRXSQLHRFXRGALCVF

SEQ ID NO: 26993 - protein, 309 aa, Homo sapiens
  MOD_RES (69)..(69): Selenocysteine
  MOD_RES (74)..(74): Selenocysteine
  MOD_RES (91)..(91): Selenocysteine
  MOD_RES (100)..(100): Selenocysteine
  MOD_RES (149)..(149): Selenocysteine
  MOD_RES (155)..(155): Selenocysteine
  MOD_RES (163)..(163): Selenocysteine
  MOD_RES (178)..(178): Selenocysteine
  MOD_RES (189)..(189): Selenocysteine
  MOD_RES (191)..(191): Selenocysteine
  MOD_RES (221)..(221): Selenocysteine
  MOD_RES (230)..(230): Selenocysteine
  MOD_RES (232)..(232): Selenocysteine
  MOD_RES (285)..(285): Selenocysteine
  MOD_RES (289)..(289): Selenocysteine
  MOD_RES (298)..(298): Selenocysteine
  MOD_RES (308)..(308): Selenocysteine
MMSFLHIVFSILVVVAFILGNFANGFIALINFIAWVKRQKISSADQIIAALAVSRVGLLWVILLHWYSXVLNPXSSNLEVIIFISNAWAVXNHFSIWLAXSLSIFYLLKIVNFSRLIFHHLKRKAKSVVLVIVLGSLFFLVCHLVMKHXYINVWXEECEGNVXWKIKLRNAMHLSNLXVAMLANLIPFXLXLISFLLLIYSLCKHLKKMQLHGKGSQDPSXKIHIKALQXVXSFLILLAIYFLCLIISFWNFKMRPKEIVLMLCQAFGIIYPSFHSFILIWGNKXLKQXFLSVLWQVXCWAKGQNQSXP

SEQ ID NO: 26994 - protein, 309 aa, Homo sapiens
  MOD_RES (69)..(69): Selenocysteine
  MOD_RES (74)..(74): Selenocysteine
  MOD_RES (91)..(91): Selenocysteine
  MOD_RES (100)..(100): Selenocysteine
  MOD_RES (149)..(149): Selenocysteine
  MOD_RES (155)..(155): Selenocysteine
  MOD_RES (163)..(163): Selenocysteine
  MOD_RES (178)..(178): Selenocysteine
  MOD_RES (189)..(189): Selenocysteine
  MOD_RES (191)..(191): Selenocysteine
  MOD_RES (221)..(221): Selenocysteine
  MOD_RES (230)..(230): Selenocysteine
  MOD_RES (232)..(232): Selenocysteine
  MOD_RES (285)..(285): Selenocysteine
  MOD_RES (289)..(289): Selenocysteine
  MOD_RES (298)..(298): Selenocysteine
  MOD_RES (308)..(308): Selenocysteine
MMSFLHIVFSILVVVAFILGNFANGFIALINFIAWVKRQKISSADQIIAALAVSRVGLLWVILLHWYSXVLNPXSSNLKVIIFISNAWAVXNHFSIWLAXSLSIFYLLKIVNFSRLIFHHLKRKAKSVVLVIVLGSLFFLVCHLVMKHXYINVWXEECEGNVXWKIKLRNAMHLSNLXVAMLANLIPFXLXLISFLLLIYSLCKHLKKMQLHGKGSQDPSXKIHIKALQXVXSFLILLAIYFLCLIISFWNFKMRPKEIVLMLCQAFGIIYPSFHSFILIWGNKXLKQXFLSVLWQVXCWAKGQNQSXP

SEQ ID NO: 26995 - protein, 316 aa, Homo sapiens
  MOD_RES (5)..(5): Selenocysteine
  MOD_RES (15)..(15): Selenocysteine
  MOD_RES (18)..(18): Selenocysteine
  MOD_RES (38)..(38): Selenocysteine
  MOD_RES (49)..(50): Selenocysteine
  MOD_RES (64)..(64): Selenocysteine
  MOD_RES (75)..(75): Selenocysteine
  MOD_RES (90)..(90): Selenocysteine
  MOD_RES (92)..(92): Selenocysteine
  MOD_RES (101)..(101): Selenocysteine
  MOD_RES (118)..(118): Selenocysteine
  MOD_RES (145)..(145): Selenocysteine
  MOD_RES (164)..(164): Selenocysteine
  MOD_RES (168)..(168): Selenocysteine
  MOD_RES (186)..(186): Selenocysteine
  MOD_RES (211)..(211): Selenocysteine
  MOD_RES (219)..(219): Selenocysteine
  MOD_RES (225)..(226): Selenocysteine
  MOD_RES (262)..(262): Selenocysteine
  MOD_RES (273)..(273): Selenocysteine
  MOD_RES (294)..(294): Selenocysteine
MMGLXEGVFLILSGXQFXLGILVNCFIELVNGSSWFKXKRMSLSDFIIXXLALLRIILLCIILXDSFLIEFSPNXHDSGIIMQIIDVSWXFXNHLSIWLAXCLGVLYCLKIASFSHPXFLWLKWRVSRVMVWMLLGALLLSCGSXASLINEFKLYSVFRGIEAXRNVXEHFRKKRSEYYLIHVLGXLWYLPPLIVSLASYSLLIFSLGRHXRQMLQNGXSSRDPXXEAHKRAIRIILSFFFLFLLYFLAFLIASFGNFLPKXKMAKMIGEVMXMFYPAGHSFILILGNSKLKQXFVVMLRCESGHLKPGSKGPIFS

SEQ ID NO: 26996 - protein, 319 aa, Homo sapiens
  MOD_RES (3)..(3): Selenocysteine
  MOD_RES (49)..(49): Selenocysteine
  MOD_RES (69)..(69): Selenocysteine
  MOD_RES (83)..(83): Selenocysteine
  MOD_RES (91)..(91): Selenocysteine
  MOD_RES (100)..(100): Selenocysteine
  MOD_RES (152)..(152): Selenocysteine
  MOD_RES (155)..(155): Selenocysteine
  MOD_RES (163)..(163): Selenocysteine
  MOD_RES (178)..(178): Selenocysteine
  MOD_RES (180)..(180): Selenocysteine
  MOD_RES (189)..(189): Selenocysteine
  MOD_RES (191)..(191): Selenocysteine
  MOD_RES (221)..(221): Selenocysteine
  MOD_RES (230)..(230): Selenocysteine
  MOD_RES (232)..(232): Selenocysteine
  MOD_RES (274)..(274): Selenocysteine
  MOD_RES (312)..(312): Selenocysteine
MIXFLPIIFSILIVVIFVIGNFANGFIALVNSIEWVKRQKISFVDQILXALAVSRVGLLWVLLLHWYAXQLNPAFYSVEVRIXAYNVWAVXNHFSSWLAXSLSMFYLLRIANFSNLIFLRIKRRVKSVVLVILLGPLLFLVCHLFVINMDEXVWXKEYEGNVXWKIKLRSAMYHSNMXLXMLANFVPLXLXLISFLLLICSLCKHLKKMQLHGKGSQDPSXKVHIKALQXVXSFLLLCAIYFLSMIISVCNFGRLEKQPVFMFCQAIIFSYPSXHPFILILGNKKLKQIFLSVLRHVRYWVKDRSLRLHRFXRGALCVF

SEQ ID NO: 26997 - protein, 319 aa, Homo sapiens
  MOD_RES (3)..(3): Selenocysteine
  MOD_RES (49)..(49): Selenocysteine
  MOD_RES (69)..(69): Selenocysteine
  MOD_RES (83)..(83): Selenocysteine
  MOD_RES (91)..(91): Selenocysteine
  MOD_RES (100)..(100): Selenocysteine
  MOD_RES (152)..(152): Selenocysteine
  MOD_RES (155)..(155): Selenocysteine
  MOD_RES (163)..(163): Selenocysteine
  MOD_RES (178)..(178): Selenocysteine
  MOD_RES (180)..(180): Selenocysteine
  MOD_RES (189)..(189): Selenocysteine
  MOD_RES (191)..(191): Selenocysteine
  MOD_RES (221)..(221): Selenocysteine
  MOD_RES (230)..(230): Selenocysteine
  MOD_RES (232)..(232): Selenocysteine
  MOD_RES (274)..(274): Selenocysteine
  MOD_RES (312)..(312): Selenocysteine
MIXFLPIIFSILIVVIFVIGNFANGFIALVNSIEWVKRQKISFVDQILXALAVSRVGLLWVLLLHWYAXQLNPAFYSVEVRIXAYNVWAVXNHFSSWLAXSLSMFYLLRIANFSNLIFLRIKRRVKSVVLVILLGPLLFLVCHLFVINMDEXVWXKEYEGNVXWKIKLRSAMYHSNMXLXMLANFVPLXLXLISFLLLICSLCKHLKKMQLHGKGSQDPSXKVHIKALQXVXSFLLLCAIYFLSMIISVCNLGRLEKQPVFMFCQAIIFSYPSXHPFILILGNKKLKQIFLSVLRHVRYWVKDRSLRLHRFXRGALCVF

SEQ ID NO: 26998 - protein, 308 aa, Homo sapiens
  MOD_RES (3)..(3): Selenocysteine
  MOD_RES (49)..(49): Selenocysteine
  MOD_RES (69)..(69): Selenocysteine
  MOD_RES (83)..(83): Selenocysteine
  MOD_RES (91)..(91): Selenocysteine
  MOD_RES (100)..(100): Selenocysteine
  MOD_RES (152)..(152): Selenocysteine
  MOD_RES (155)..(155): Selenocysteine
  MOD_RES (163)..(163): Selenocysteine
  MOD_RES (178)..(178): Selenocysteine
  MOD_RES (180)..(180): Selenocysteine
  MOD_RES (189)..(189): Selenocysteine
  MOD_RES (191)..(191): Selenocysteine
  MOD_RES (221)..(221): Selenocysteine
  MOD_RES (230)..(230): Selenocysteine
  MOD_RES (232)..(232): Selenocysteine
  MOD_RES (247)..(247): Selenocysteine
  MOD_RES (249)..(249): Selenocysteine
  MOD_RES (254)..(254): Selenocysteine
  MOD_RES (266)..(266): Selenocysteine
  MOD_RES (289)..(289): Selenocysteine
  MOD_RES (298)..(298): Selenocysteine
  MOD_RES (307)..(307): Selenocysteine
MIXFLPIIFSILIVVIFVIGNFANGFIALVNSIEWVKRQKISFVDQILXALAVSRVGLLWVLLLHWYAXQLNPAFYSVEVRIXAYNVWAVXNHFSSWLAXSLSMFYLLRIANFSNLIFLRIKRRVKSVVLVILLGPLLFLVCHLFVINMDEXVWXKEYEGNVXWKIKLRSAMYHSNMXLXMLANFVPLXLXLISFLLLICSLCKHLKKMQLHGKGSQDPSXKVHIKALQXVXSFLMLFAIYFLCIIXSXWNPRXQQSNLVFLLYQXLAIMYPSFHSFILIMRSRKLKQXSLSVLCQVXCWVKQKPSXP

SEQ ID NO: 26999 - protein, 300 aa, Homo sapiens
  MOD_RES (3)..(3): Selenocysteine
  MOD_RES (49)..(49): Selenocysteine
  MOD_RES (69)..(69): Selenocysteine
  MOD_RES (82)..(83): Selenocysteine
  MOD_RES (91)..(91): Selenocysteine
  MOD_RES (100)..(100): Selenocysteine
  MOD_RES (155)..(155): Selenocysteine
  MOD_RES (163)..(163): Selenocysteine
  MOD_RES (178)..(178): Selenocysteine
  MOD_RES (180)..(181): Selenocysteine
  MOD_RES (189)..(189): Selenocysteine
  MOD_RES (191)..(191): Selenocysteine
  MOD_RES (221)..(221): Selenocysteine
  MOD_RES (230)..(230): Selenocysteine
  MOD_RES (289)..(289): Selenocysteine
MIXFLPIIFSILIVVLFVIGNFANGFIALVNSIERVKRQKISFADQILXALAVSRVGLLWVLLLNWYSXVFNPAFYSVEVRXXAYNVWAVXGHFSNWLAXSLSIFYLLKIANFSNLIFLHLKRRVKSVILVMLLGPLLFLACQLFVINMKEIVRXKEYEGNLXWKIKLRSAVYLSDAXVXXLGNLVPFXLXLLCFLLLICSLCKHLKKMQLHGKGSQDPSXKVHIKALQXVIFFLLLCAVYFLSIMISVWSFGSLENKPVFMFCKAIRFSYPSIHPFILIWGNKKLKQXFLSVLRQVRYW

SEQ ID NO: 27000 - protein, 309 aa, Homo sapiens
  MOD_RES (2)..(3): Selenocysteine
  MOD_RES (49)..(49): Selenocysteine
  MOD_RES (69)..(69): Selenocysteine
  MOD_RES (82)..(83): Selenocysteine
  MOD_RES (91)..(91): Selenocysteine
  MOD_RES (100)..(100): Selenocysteine
  MOD_RES (155)..(155): Selenocysteine
  MOD_RES (163)..(163): Selenocysteine
  MOD_RES (178)..(178): Selenocysteine
  MOD_RES (180)..(181): Selenocysteine
  MOD_RES (189)..(189): Selenocysteine
  MOD_RES (191)..(191): Selenocysteine
  MOD_RES (221)..(221): Selenocysteine
  MOD_RES (230)..(230): Selenocysteine
  MOD_RES (289)..(289): Selenocysteine
MXXFIPIIFSSVVVVLFVIGNFANGFIALVNSIERVKRQKISFADQILXALAVSRVGLLWVLLLNWYSXVFNPAFYSVEVRXXAYNVWAVXGHFSNWLAXSLSIFYLLKIANFSNLIFLHLKRRVKSVILVMLLGPLLFLACQLFVINMKEIVRXKEYEGNLXWKIKLRSAVYLSDAXVXXLGNLVPFXLXLLCFLLLICSLCKHLKKMQLHGKGSQDPSXKVHIKALQXVIFFLLLCAVYFLSIMISVWSFGSLENKPVFMFCKAIRFSYPSIHPFILIWGNKKLKQXFLSVLRQVRYWVKGEKPSSP

SEQ ID NO: 27001 - protein, 309 aa, Homo sapiens
  MOD_RES (2)..(3): Selenocysteine
  MOD_RES (49)..(49): Selenocysteine
  MOD_RES (69)..(69): Selenocysteine
  MOD_RES (82)..(83): Selenocysteine
  MOD_RES (91)..(91): Selenocysteine
  MOD_RES (100)..(100): Selenocysteine
  MOD_RES (155)..(155): Selenocysteine
  MOD_RES (163)..(163): Selenocysteine
  MOD_RES (178)..(178): Selenocysteine
  MOD_RES (180)..(181): Selenocysteine
  MOD_RES (189)..(189): Selenocysteine
  MOD_RES (191)..(191): Selenocysteine
  MOD_RES (221)..(221): Selenocysteine
  MOD_RES (230)..(230): Selenocysteine
  MOD_RES (289)..(289): Selenocysteine
MXXFIPIIFSSVVVVLFVIGNFANGFIALVNSIEWVKRQKISFADQILXALAVSRVGLLWVLLLNWYSXVFNPAFYSVEVRXXAYNVWAVXGHFSNWLAXSLSIFYLLKIANFSNLIFLHLKRRVKSVILVMLLGPLLFLACQLFVINMKEIVRXKEYEGNMXWKIKLRSAVYLSDAXVXXLGNLVPFXLXLLCFLLLICSLCKHLKKMQLHGKGSQDPSXKVHIKVLQXVIFFLLLCAIYFLSIMISVWSFGSLENKPVFMFCKAIRFSYPSIHPFILIWGNKKLKQXFLSVLRQVRYWVKGEKPSSP

SEQ ID NO: 27002 - protein, 333 aa, Homo sapiens
  MOD_RES (3)..(3): Selenocysteine
  MOD_RES (5)..(5): Selenocysteine
  MOD_RES (9)..(9): Selenocysteine
  MOD_RES (17)..(17): Selenocysteine
  MOD_RES (32)..(32): Selenocysteine
  MOD_RES (79)..(79): Selenocysteine
  MOD_RES (127)..(127): Selenocysteine
  MOD_RES (155)..(155): Selenocysteine
  MOD_RES (169)..(169): Selenocysteine
  MOD_RES (171)..(172): Selenocysteine
  MOD_RES (180)..(180): Selenocysteine
  MOD_RES (217)..(217): Selenocysteine
  MOD_RES (226)..(226): Selenocysteine
  MOD_RES (231)..(231): Selenocysteine
  MOD_RES (310)..(310): Selenocysteine
  MOD_RES (331)..(331): Selenocysteine
MLXLXRIRXVSYEVRSXFLFISVLEFAVGFLXNAFVFLVNFWDVVKRQALSNSDCVLLCLSISRLFLHGLLFLSAIQLXHFQKLSEPLNHSYQAIIMLWMIANQANLWLAACLSLLYCSKLIRFSHXFLICLASWVSRKISQMLLGIILCSCICXVLCVWCFFSRPHFXVXXVLFMNNNXRLNWQIKDLNLFYSFLFCYLWSVPPFLLFLVSSGMLXVSLGRHMRXMKVYXRNSRDPSLEAHIKALKSLVSFFCFFVISSCAAFISVPLLILWRDKIGVMVCVGIMAACPSGHAAILISGNAKLRRAVMXILLWAQSSLKVRADHKADSRXLC

SEQ ID NO: 27003 - protein, 338 aa, Homo sapiens
  MOD_RES (10)..(10): Selenocysteine
  MOD_RES (19)..(19): Selenocysteine
  MOD_RES (35)..(35): Selenocysteine
  MOD_RES (71)..(71): Selenocysteine
  MOD_RES (95)..(95): Selenocysteine
  MOD_RES (99)..(99): Selenocysteine
  MOD_RES (155)..(155): Selenocysteine
  MOD_RES (181)..(181): Selenocysteine
  MOD_RES (196)..(196): Selenocysteine
  MOD_RES (199)..(199): Selenocysteine
  MOD_RES (219)..(219): Selenocysteine
  MOD_RES (227)..(227): Selenocysteine
  MOD_RES (229)..(229): Selenocysteine
  MOD_RES (239)..(239): Selenocysteine
  MOD_RES (247)..(247): Selenocysteine
  MOD_RES (337)..(337): Selenocysteine
MLGRCFPPDXKEKQQLRMXKLCDPAESELSPFLIXLILAVLLAEYLIGIIANGFIMAIHAAEWVQNKAVSXSGRILVFLSVSRIALQSLMMLEIXISSXSLSFYSEDAVYYAFKISFIFLNFCSLWFAAWLSFFYFVKIANFSYPLFLKLRWRIXGLIPWLLWLSVFISFSHSMFCINICXVYCNNSFPIHSSNSXKKXYLSEINVVGLAFFFNLGIVXPLIMFILXAXLLILSLKRHXLHMGSNAXGSNDPSMEAHMGAIKAISYFLILYIFNAVALFIYLSNMFDINSLWNNLCQIIMAAYPASHSILLIQDNPGLRRAWKRLQLRLHLYPKEWXL

SEQ ID NO: 27004 - protein, 299 aa, Homo sapiens
  MOD_RES (28)..(28): Selenocysteine
  MOD_RES (34)..(34): Selenocysteine
  MOD_RES (54)..(54): Selenocysteine
  MOD_RES (66)..(66): Selenocysteine
  MOD_RES (74)..(74): Selenocysteine
  MOD_RES (100)..(100): Selenocysteine
  MOD_RES (111)..(111): Selenocysteine
  MOD_RES (143)..(144): Selenocysteine
  MOD_RES (149)..(149): Selenocysteine
  MOD_RES (161)..(162): Selenocysteine
  MOD_RES (166)..(166): Selenocysteine
  MOD_RES (194)..(194): Selenocysteine
  MOD_RES (215)..(215): Selenocysteine
  MOD_RES (222)..(222): Selenocysteine
  MOD_RES (246)..(246): Selenocysteine
  MOD_RES (261)..(261): Selenocysteine
  MOD_RES (270)..(270): Selenocysteine
  MOD_RES (283)..(283): Selenocysteine
  MOD_RES (289)..(290): Selenocysteine
MLRLFYFSAIIASVILNFVGIIMNLFIXVVNCKXWVKSHRISSSDRILFSLGIXRFLMLGLFLVNXIYFVSSNXERSVYLSAFFVLCFMFLDSSSVWFVXLLNILYCVKIXNFQHSVFLLLKRNISPKIPRLLLACVLISAFXXCLYIXLSQASPFPELVXXRNNXSFNISEGILSLVVSLVLSSSLQFIINVXSASLLIHSLRRHIQKMQKNAXGFWNPQXEAHVGAMKLMVYFLILYIPYSVAXLVQYLPFYAGMDMGXKSICLIFAXLYSPGHSVLIIIXHPKLKXXAKKILCFKK

SEQ ID NO: 27005 - protein, 323 aa, Homo sapiens
  MOD_RES (3)..(3): Selenocysteine
  MOD_RES (6)..(6): Selenocysteine
  MOD_RES (9)..(9): Selenocysteine
  MOD_RES (19)..(19): Selenocysteine
  MOD_RES (21)..(21): Selenocysteine
  MOD_RES (31)..(31): Selenocysteine
  MOD_RES (40)..(40): Selenocysteine
  MOD_RES (52)..(52): Selenocysteine
  MOD_RES (55)..(55): Selenocysteine
  MOD_RES (101)..(101): Selenocysteine
  MOD_RES (181)..(181): Selenocysteine
  MOD_RES (189)..(189): Selenocysteine
  MOD_RES (214)..(214): Selenocysteine
  MOD_RES (224)..(224): Selenocysteine
  MOD_RES (232)..(232): Selenocysteine
  MOD_RES (249)..(249): Selenocysteine
  MOD_RES (267)..(267): Selenocysteine
  MOD_RES (273)..(273): Selenocysteine
  MOD_RES (322)..(322): Selenocysteine
MAXVNXDAXDKDISKFKVXFXLVVSGIECIXGILGSGFIXAIYGAEWARGKXLPXGDRIMLMLSFSRLLLQIWMMLENIFSLLFRIVYNQNSVYILFKVIXVFLNHSNLWFAAWLKVFYCLRIANFNHPLFFLMKRKIIVLMPWLLRLSVLVSLSFSFPLSRDVFNVYVNSSIPIPSSNSXEKKYFSEXNMVNLVFFYNMGIFVPLIMFILAAXLLILSLKRHXLHMGSNAXGSRDPSMKAHIGAIKAXSYFLILYIFNAIALFLSXSNIFDXYSSWNILCKIIMAAYPAGHSVQLILGNPGLRRAWKRFQHQVPLYLKGQXL

SEQ ID NO: 27006 - protein, 307 aa, Homo sapiens
  MOD_RES (6)..(6): Selenocysteine
  MOD_RES (63)..(63): Selenocysteine
  MOD_RES (96)..(96): Selenocysteine
  MOD_RES (115)..(115): Selenocysteine
  MOD_RES (118)..(118): Selenocysteine
  MOD_RES (145)..(145): Selenocysteine
  MOD_RES (169)..(169): Selenocysteine
  MOD_RES (174)..(174): Selenocysteine
  MOD_RES (178)..(178): Selenocysteine
  MOD_RES (211)..(211): Selenocysteine
  MOD_RES (226)..(226): Selenocysteine
  MOD_RES (230)..(230): Selenocysteine
MQAALXAFFVLLFSLLSLLGIAANGFIVLVLGREWLRYGRLLPLDMILISLGASRFCLQLVGXVHNFYYSAQKVEYSGGLGRQFFHLHWHFLNSAXFWFCSWLSVLFCVKIANIXHSXFLWLKWRFPGWVPWLLLGSVLISFIIXLLFFWVNYPVYQEFLIRKFSGNMXYKWNXRIEXYYFPSLKLVIWSIPFSVFLVSIMLLINSLRRHXQRMQHNGHSLQDPSXQAHXRALKSLISFLILYALSFLSLIIDAAKFISMQNDFYWPWQIAVYLCISVHPFILIFSNLKLRSVFSQLLLLARGFWVA

SEQ ID NO: 27007 - protein, 314 aa, Homo sapiens
  MOD_RES (3)..(3): Selenocysteine
  MOD_RES (49)..(49): Selenocysteine
  MOD_RES (55)..(55): Selenocysteine
  MOD_RES (77)..(78): Selenocysteine
  MOD_RES (84)..(84): Selenocysteine
  MOD_RES (92)..(92): Selenocysteine
  MOD_RES (96)..(97): Selenocysteine
  MOD_RES (101)..(101): Selenocysteine
  MOD_RES (165)..(165): Selenocysteine
  MOD_RES (173)..(173): Selenocysteine
  MOD_RES (183)..(183): Selenocysteine
  MOD_RES (188)..(188): Selenocysteine
  MOD_RES (198)..(198): Selenocysteine
  MOD_RES (211)..(211): Selenocysteine
  MOD_RES (226)..(226): Selenocysteine
  MOD_RES (294)..(294): Selenocysteine
  MOD_RES (306)..(306): Selenocysteine
  MOD_RES (308)..(308): Selenocysteine
MAXELDKIFLILAIAEFIISMLGNVFIGLVNCSEGIKNQKVFSADFILXCLAISXIGQLLVILFDSFLVGLASHLYXXYRLGKXVIMLWHMXNHLXXWLAXCLSIFYFFKIAHFPHSLFLWLRWRMNGMIVMLLILSLFLLIFDSLVLEIFIDISLNIIDKSNLXLYLDESKXLYDKLSILKXLLSLXSFIPFSLFLXSLLFLFLSLVRHXRNLKLSSLGSRDSSXEAHRRAMKMVMSFLFLFIVHFFSLQVANWIFFMLWNNKCIKFVMLALNAFPSCHSFILILGNSKLQQXAVRLLWHLRNYXKXPNPLPL

SEQ ID NO: 27008 - protein, 299 aa, Homo sapiens
  MOD_RES (3)..(3): Selenocysteine
  MOD_RES (16)..(16): Selenocysteine
  MOD_RES (33)..(33): Selenocysteine
  MOD_RES (49)..(49): Selenocysteine
  MOD_RES (69)..(69): Selenocysteine
  MOD_RES (82)..(83): Selenocysteine
  MOD_RES (91)..(91): Selenocysteine
  MOD_RES (100)..(100): Selenocysteine
  MOD_RES (155)..(155): Selenocysteine
  MOD_RES (163)..(163): Selenocysteine
  MOD_RES (177)..(178): Selenocysteine
  MOD_RES (180)..(180): Selenocysteine
  MOD_RES (189)..(189): Selenocysteine
  MOD_RES (191)..(191): Selenocysteine
  MOD_RES (221)..(221): Selenocysteine
  MOD_RES (230)..(230): Selenocysteine
  MOD_RES (289)..(289): Selenocysteine
MIXFLPIIFSILVVVXFVIGNFANGFIALVNSXEWVKRQKISFADQIVXALAVSRVGLLWVLLLNWYSXVLNPAFYSVELRXXAYNIWAVXGHFSNWPAXSLSIFYLLKIANFSNLIFLRLKRRVKSVILVVLLGPLLFLACHLFVVNMNQIVWXKEYEGNMXWKIKLRRAMYLSDXXVXMLANLVPFXVXLISFLLLVCSLCKHLKKMQLHGKGSQDPSXKVHIKVLQXVISFFLLRAIYFVSVIISVWSFKNLENKPVFMFCQAIGFSCSSAHPFILIWGNKKLKQXYLSVLWQMRY

SEQ ID NO: 27009 - protein, 309 aa, Homo sapiens
  MOD_RES (3)..(3): Selenocysteine
  MOD_RES (16)..(16): Selenocysteine
  MOD_RES (49)..(49): Selenocysteine
  MOD_RES (69)..(69): Selenocysteine
  MOD_RES (82)..(83): Selenocysteine
  MOD_RES (100)..(101): Selenocysteine
  MOD_RES (155)..(155): Selenocysteine
  MOD_RES (163)..(163): Selenocysteine
  MOD_RES (178)..(178): Selenocysteine
  MOD_RES (180)..(180): Selenocysteine
  MOD_RES (189)..(189): Selenocysteine
  MOD_RES (191)..(191): Selenocysteine
  MOD_RES (221)..(221): Selenocysteine
  MOD_RES (230)..(230): Selenocysteine
  MOD_RES (289)..(289): Selenocysteine
  MOD_RES (306)..(306): Selenocysteine
MIXFLPIIFSSLVVVXFVIGNFANGFIALVNSIESFKRQKISFADQILXALAVSRVGLLWVLLLNWYSXVLNPAFNSVEVRXXAYNIWAVINHFSNWLAXXLSIFYLLKIANFSNFIFLHLKRRVKSVILVMLLGPLLFLACHLFVINMNEIVRXKEFEGNMXWKIKLKSAMYFSNMXVXMVANLVPFXLXLLSFMLLICSLCKHLKKMQLRGKGSQDPSXKVHIKALQXVISFLLLCAIYFLSIMISVWSFGSLENKPVFMFCKAIRFSYPSIHPFILIWGNKKLKQXFLSVFWQMRYWVKGEKXSSP

SEQ ID NO: 27010 - protein, 309 aa, Homo sapiens
  MOD_RES (3)..(3): Selenocysteine
  MOD_RES (16)..(16): Selenocysteine
  MOD_RES (49)..(49): Selenocysteine
  MOD_RES (69)..(69): Selenocysteine
  MOD_RES (82)..(83): Selenocysteine
  MOD_RES (100)..(101): Selenocysteine
  MOD_RES (155)..(155): Selenocysteine
  MOD_RES (163)..(163): Selenocysteine
  MOD_RES (178)..(178): Selenocysteine
  MOD_RES (180)..(180): Selenocysteine
  MOD_RES (189)..(189): Selenocysteine
  MOD_RES (191)..(191): Selenocysteine
  MOD_RES (221)..(221): Selenocysteine
  MOD_RES (230)..(230): Selenocysteine
  MOD_RES (289)..(289): Selenocysteine
  MOD_RES (306)..(306): Selenocysteine
MIXFLPIIFSSLVVVXFVIGNFANGFIALVNSIEWFKRQKISFADQILXALAVSRVGLLWVLLLNWYSXVLNPAFNSVEVRXXAYNIWAVINHFSNWLAXXLSIFYLLKIANFSNFIFLHLKRRVKSVILVMLLGPLLFLACHLFVINMNEIVRXKEFEGNMXWKIKLKSAMYFSNMXVXMVANLVPFXLXLLSFMLLICSLCKHLKKMQLHGKGSQDPSXKVHIKALQXVISFLLLCAIYFLSIMISVWSFGSLENKPVFMFCKAIRFSYPSIHPFILIWGNKKLKQXFLSVFWQMRYWVKGEKXSSP

SEQ ID NO: 27011 - protein, 309 aa, Homo sapiens
  MOD_RES (3)..(3): Selenocysteine
  MOD_RES (16)..(16): Selenocysteine
  MOD_RES (49)..(49): Selenocysteine
  MOD_RES (69)..(69): Selenocysteine
  MOD_RES (83)..(83): Selenocysteine
  MOD_RES (100)..(100): Selenocysteine
  MOD_RES (155)..(155): Selenocysteine
  MOD_RES (163)..(163): Selenocysteine
  MOD_RES (177)..(178): Selenocysteine
  MOD_RES (180)..(180): Selenocysteine
  MOD_RES (189)..(189): Selenocysteine
  MOD_RES (191)..(191): Selenocysteine
  MOD_RES (230)..(230): Selenocysteine
  MOD_RES (232)..(232): Selenocysteine
  MOD_RES (274)..(274): Selenocysteine
  MOD_RES (289)..(289): Selenocysteine
MIXFLPIIFSILIVVXFVIGNFANGFIALVNSIEWFKRQKISFADQILXALAVSRVGLLWVLVLNWYAXELNPAFNSIEVRIXAYNVWAVINHFSNWLAXSLSIFYLLKIANFSNLIFLHLKRRVKSVVLVILLGPLLFLVCHLFVINMNQIIWXKEYEGNMXWKIKLRSAMYLSNXXVXILANLVPFXLXLISFLLLICSLCKHLKKMQLHGKGSQDPSMKVHIKALQXVXSFLLLCAIYFLSIIMSVWSFESLENKPVFMFCEAIAFSYPSXHPFILIWGNKKLKQXFLSVLWHVRYWVKGEKPSSS

SEQ ID NO: 27012 - protein, 319 aa, Homo sapiens
  MOD_RES (3)..(3): Selenocysteine
  MOD_RES (16)..(16): Selenocysteine
  MOD_RES (49)..(49): Selenocysteine
  MOD_RES (69)..(69): Selenocysteine
  MOD_RES (83)..(83): Selenocysteine
  MOD_RES (100)..(100): Selenocysteine
  MOD_RES (155)..(155): Selenocysteine
  MOD_RES (163)..(163): Selenocysteine
  MOD_RES (177)..(178): Selenocysteine
  MOD_RES (180)..(180): Selenocysteine
  MOD_RES (189)..(189): Selenocysteine
  MOD_RES (191)..(191): Selenocysteine
  MOD_RES (230)..(230): Selenocysteine
  MOD_RES (232)..(232): Selenocysteine
  MOD_RES (289)..(289): Selenocysteine
MIXFLPIIFSILIVVXFVIGNFANGFIALVNSIEWFKRQKISFADQILXALAVSRVGLLWVLVLNWYAXELNPAFNSIEVRIXAYNVWAVINHFSNWLAXSLSIFYLLKIANFSNLIFLHLKRRVKSVVLVILLGPLLFLVCHLFVINMNQIIWXKEYEGNMXWKIKLRSAMYLSNXXVXILANLVPFXLXLISFLLLICSLCKHLKKMQLHGKGSQDPSMKVHIKAMQXVXSFLLLCAIYFLSIIISVWSFGSLENKPVFMFCKAIRFSYPSIHPFILIWGNKKLKQXFLSVLRQVRYWVKERSLHLHRFMRGALCVF

SEQ ID NO: 27013 - protein, 249 aa, Homo sapiens
  MOD_RES (3)..(3): Selenocysteine
  MOD_RES (16)..(16): Selenocysteine
  MOD_RES (49)..(49): Selenocysteine
  MOD_RES (69)..(69): Selenocysteine
  MOD_RES (83)..(83): Selenocysteine
  MOD_RES (100)..(100): Selenocysteine
  MOD_RES (155)..(155): Selenocysteine
  MOD_RES (163)..(163): Selenocysteine
  MOD_RES (177)..(178): Selenocysteine
  MOD_RES (180)..(180): Selenocysteine
  MOD_RES (189)..(189): Selenocysteine
  MOD_RES (191)..(191): Selenocysteine
  MOD_RES (230)..(230): Selenocysteine
  MOD_RES (232)..(232): Selenocysteine
MIXFLPIIFSILIVVXFVIGNFANGFIALVNSIEWFKRQKISFADQILXALAVSRVGLLWVLVLNWYAXELNPAFNSIEVRIXAYNVWAVINHFSNWLAXSLSIFYLLKIANFSNLIFLHLKRRVKSVVLVILLGPLLFLVCHLFVINMNQIIWXKEYEGNMXWKIKLRSAMYLSNXXVXILANLVPFXLXLISFLLLICSLCKHLKKMQLHGKGSQDPSMKVHIKAMQXVXSFLLLCAIYFLSIIMSV

SEQ ID NO: 27014 - protein, 299 aa, Homo sapiens
  MOD_RES (97)..(97): Selenocysteine
  MOD_RES (108)..(109): Selenocysteine
  MOD_RES (141)..(141): Selenocysteine
  MOD_RES (147)..(147): Selenocysteine
  MOD_RES (197)..(197): Selenocysteine
  MOD_RES (219)..(219): Selenocysteine
  MOD_RES (243)..(243): Selenocysteine
  MOD_RES (246)..(246): Selenocysteine
  MOD_RES (252)..(252): Selenocysteine
  MOD_RES (259)..(259): Selenocysteine
  MOD_RES (282)..(282): Selenocysteine
  MOD_RES (290)..(290): Selenocysteine
MLSAGLGLLMLVAVVEFLIGLIGNGSLVVWSFREWIRKFNWSSYNLIILGLAGCRFLLQWLIILDLSLFPLFQSSRWLRYLSIFWVLVSQASLWFAXFLSVFYCKKIXXFDRPAYLWLKQRAYNLSLWCLLGYFIINLLLXVQIGLXFYHPPQGNSSIRYPFESWQYLYAFQLNSGSYLPLVVFLVSSGMLIVSLYXHHKKMKVHSAGRRDVRAKAHIXALKSLGCFLLLHLVYIMASPFSIXSKXYPPDLXSVFIWEXLMAAYPSLHSLILIMGIPRVKQXCQKILWKXVCARRCWGP

SEQ ID NO: 27015 - protein, 299 aa, Homo sapiens
  MOD_RES (3)..(3): Selenocysteine
  MOD_RES (49)..(49): Selenocysteine
  MOD_RES (69)..(69): Selenocysteine
  MOD_RES (83)..(83): Selenocysteine
  MOD_RES (91)..(91): Selenocysteine
  MOD_RES (136)..(136): Selenocysteine
  MOD_RES (163)..(163): Selenocysteine
  MOD_RES (171)..(171): Selenocysteine
  MOD_RES (178)..(178): Selenocysteine
  MOD_RES (180)..(181): Selenocysteine
  MOD_RES (189)..(189): Selenocysteine
  MOD_RES (221)..(221): Selenocysteine
  MOD_RES (230)..(230): Selenocysteine
  MOD_RES (283)..(283): Selenocysteine
  MOD_RES (289)..(289): Selenocysteine
MIXFLYIFFSILIMVLFVLGNFANGFIALVNFIDWVKRKKISSADQILXALAVSRIGLLWALLLNWYLXVLNPAFYSVELRIXSYNAWVVXNHFSMWLAANLSIFYLLKIANFSNLLFLHLKRRVRSVILVILLGXLIFLVCHLLVANMDESMWAEEYEGNMXGKMKLRNXVHLSYLXVXXLWSFIPFXLSLISFLMLICSLCKHLKKMQLHGEGSQDLSXKVHIKALQXLISFLLLCAIFFLFLIVSVWSPRRLRNDPVVMVSKAVGNIYLAFDSFILIWRXKKLKHXFLLILCQIRC

SEQ ID NO: 27016 - protein, 318 aa, Homo sapiens
  MOD_RES (13)..(13): Selenocysteine
  MOD_RES (22)..(22): Selenocysteine
  MOD_RES (39)..(39): Selenocysteine
  MOD_RES (77)..(77): Selenocysteine
  MOD_RES (107)..(107): Selenocysteine
  MOD_RES (112)..(112): Selenocysteine
  MOD_RES (124)..(124): Selenocysteine
  MOD_RES (126)..(126): Selenocysteine
  MOD_RES (155)..(156): Selenocysteine
  MOD_RES (181)..(181): Selenocysteine
  MOD_RES (201)..(201): Selenocysteine
  MOD_RES (203)..(203): Selenocysteine
  MOD_RES (206)..(206): Selenocysteine
  MOD_RES (218)..(218): Selenocysteine
  MOD_RES (230)..(231): Selenocysteine
  MOD_RES (317)..(317): Selenocysteine
MNGDHMVLGSSVXDKKAIILVXILLLLRLVAIAGNGFIXAALGVEWVLRRMLLPCDKLLVSLGASRFCLQSVVMGKXIYVFLHPMAFPYNPVLQFLAFQWDFLNAAXLWSSXWLSVFYCVKIAXFXHPVFFWLKHKLSGWLPWMLFSSVGLSSFXXILFFIGNHRMYQNYLRNHLQPWNVXGDSIRSYCEKFYLFPLKMIXWXMPXAVFFICMILLIXSLGRHRKKALLXXSGFREPSVQAHIKALLALLSFAMLFISYFLSLVFSAAGIFPPLDFKFWVWESVIYLCAAVHPIILLFSNCRLRAVLKSRRSSRCGXP

SEQ ID NO: 27017 - protein, 318 aa, Homo sapiens
  MOD_RES (7)..(8): Selenocysteine
  MOD_RES (49)..(49): Selenocysteine
  MOD_RES (78)..(78): Selenocysteine
  MOD_RES (90)..(90): Selenocysteine
  MOD_RES (92)..(92): Selenocysteine
  MOD_RES (101)..(101): Selenocysteine
  MOD_RES (149)..(149): Selenocysteine
  MOD_RES (166)..(166): Selenocysteine
  MOD_RES (169)..(169): Selenocysteine
  MOD_RES (177)..(177): Selenocysteine
  MOD_RES (182)..(182): Selenocysteine
  MOD_RES (190)..(190): Selenocysteine
  MOD_RES (220)..(220): Selenocysteine
  MOD_RES (227)..(227): Selenocysteine
  MOD_RES (255)..(255): Selenocysteine
  MOD_RES (263)..(263): Selenocysteine
MADKVQXXLLFLAVGEFSVGILGNAFIGLVNCMDWVKKRKIASIDLILXSLAISRICLLCVILLDCFILVLYPDVYAXGKEMRIIDFFWXLXNHLSIWFAXCLSIYYFFKIGNFFHPLFLWMKWRIDRVISWILLGCVVLSVFISLPAXENLNADFRFCVKAKRKXNLXWSCRVNKXQHASXKLFLNLAXLLPFCVCLMSFFLLILSLRRHIRRMQLSAXGCRDPSXEAHVRALKAVISFLLLFIAYYLSFLIAXSSYFMPEXELAVIFGESIALIYPSSHSFILILGNNKLRHASLKVIWKVMSILKGRKFQQHKQI

SEQ ID NO: 27018 - protein, 309 aa, Homo sapiens
  MOD_RES (14)..(14): Selenocysteine
  MOD_RES (43)..(43): Selenocysteine
  MOD_RES (49)..(49): Selenocysteine
  MOD_RES (77)..(77): Selenocysteine
  MOD_RES (87)..(87): Selenocysteine
  MOD_RES (90)..(90): Selenocysteine
  MOD_RES (100)..(101): Selenocysteine
  MOD_RES (169)..(169): Selenocysteine
  MOD_RES (184)..(184): Selenocysteine
  MOD_RES (212)..(212): Selenocysteine
  MOD_RES (220)..(220): Selenocysteine
  MOD_RES (227)..(227): Selenocysteine
  MOD_RES (236)..(236): Selenocysteine
  MOD_RES (238)..(238): Selenocysteine
  MOD_RES (255)..(255): Selenocysteine
  MOD_RES (261)..(261): Selenocysteine
  MOD_RES (295)..(295): Selenocysteine
  MOD_RES (301)..(301): Selenocysteine
MFSPADNIFIILIXGEFILGILGNGYIALVNWIDWIKKKKISXVDYILXNLVIARICLISVMVVNGIVIVLNPDVYXKNKQQIVIFXFWXFANYLNMWIXXCLNVFYFLKIASSSHPLFLWLKWKIDMVVHWILLGCFAISLLVSLIAAIVLSCDYRFHAIAKHKRNIXEMFHVSKIPYFEPLXLFNLFAIVPFIVSLISFFLLVRSLWRHXKQIKLYAXGSRDPSXEVHVRAIKXMXSFIFFFFLYYISSILMXFSYLMXKYKLAVEFGEIAAILYPLGHSLILIVLNNKLRQXFVRMLXCRKIACMI

SEQ ID NO: 27019 - protein, 312 aa, Homo sapiens
  MOD_RES (18)..(18): Selenocysteine
  MOD_RES (75)..(75): Selenocysteine
  MOD_RES (90)..(90): Selenocysteine
  MOD_RES (100)..(100): Selenocysteine
  MOD_RES (166)..(166): Selenocysteine
  MOD_RES (177)..(177): Selenocysteine
  MOD_RES (182)..(182): Selenocysteine
  MOD_RES (209)..(209): Selenocysteine
  MOD_RES (217)..(217): Selenocysteine
  MOD_RES (224)..(224): Selenocysteine
  MOD_RES (252)..(252): Selenocysteine
  MOD_RES (271)..(271): Selenocysteine
MPSAIEAIYIILIAGELXIGIWGNGFIVLVNCIDWLKRRDISLIDIILISLAISRICLLCVISLDGFFMLLFPGXYGNSVLVSIVNVVWXFANNSSLWFXSCLSIFYLLKIANISHPFFFWLKLKINKVMLAILLGSFLISLIISVPKNDDMWYHLFKVSHEENIXWKFKVSKIPGXFKQLXLNLGVMVPFILCLISFFLLLFSLVRHXKQIRLHAXGFRDPSXEAHMRAIKAVIIFLLLLIVYYPVFLVMXSSALIPQGKLVLMIGDIVXVIFPSSHSFILIMGNSKLREAFLKMLRFVKCFLRRRKPFVP

SEQ ID NO: 27020 - protein, 326 aa, Homo sapiens
  MOD_RES (33)..(33): Selenocysteine
  MOD_RES (36)..(36): Selenocysteine
  MOD_RES (49)..(49): Selenocysteine
  MOD_RES (53)..(53): Selenocysteine
  MOD_RES (57)..(57): Selenocysteine
  MOD_RES (75)..(75): Selenocysteine
  MOD_RES (83)..(83): Selenocysteine
  MOD_RES (90)..(90): Selenocysteine
  MOD_RES (239)..(239): Selenocysteine
  MOD_RES (253)..(253): Selenocysteine
  MOD_RES (316)..(316): Selenocysteine
ADHYKEKFKECQRLQKQINKLSDQSANNNNVFXKKXGNQQKVNDASVNXDPAXSASXVDVKPSPSAAEADFDIVXKGQVCEMXKEIADKXEKYNKCKQLLQDEKAKCNKYADELAKMELKWKEQVKIAENVKLELAEVQDNYKLQLAEKDKEISGLISHLENLSREKELKRSLENPAERKMEDGADGAFYPDEIQRPPVRVPSWGLEDNVVCSQPARNFSRPDGLEDSEDSKEDENVPXAPDPPSQHLRGHGXGFCFDSSFDVHKKCPLCELMFPPNYDQSKFEEHVESHWKVCPMCSEQFPPDYDQQVFERHVQXHFDQNVLNFD

SEQ ID NO: 27021 - protein, 142 aa, Homo sapiens
  MOD_RES (85)..(85): Selenocysteine
  MOD_RES (111)..(111): Selenocysteine
  MOD_RES (130)..(130): Selenocysteine
  MOD_RES (133)..(133): Selenocysteine
GFCFDSSFDVHKKCPLCELMFPPNYDQSKFEEHVESHWKVCPMCSEQFPPDYDQQVFERNWAGKRLLFPSIHAHGAEDGFGADGXLCGPGLIAVRLLIVHLLLVILAACRXREVQGLSGALISPQVHPAXSRXGDVAVAEQR

SEQ ID NO: 27022 - protein, 590 aa, Homo sapiens
  MOD_RES (18)..(18): Selenocysteine
  MOD_RES (50)..(50): Selenocysteine
  MOD_RES (53)..(53): Selenocysteine
  MOD_RES (71)..(71): Selenocysteine
  MOD_RES (85)..(85): Selenocysteine
  MOD_RES (93)..(93): Selenocysteine
  MOD_RES (118)..(118): Selenocysteine
  MOD_RES (133)..(133): Selenocysteine
  MOD_RES (138)..(138): Selenocysteine
  MOD_RES (146)..(146): Selenocysteine
  MOD_RES (159)..(159): Selenocysteine
  MOD_RES (181)..(181): Selenocysteine
  MOD_RES (185)..(186): Selenocysteine
  MOD_RES (192)..(192): Selenocysteine
  MOD_RES (209)..(209): Selenocysteine
  MOD_RES (230)..(230): Selenocysteine
  MOD_RES (236)..(236): Selenocysteine
  MOD_RES (267)..(267): Selenocysteine
  MOD_RES (269)..(269): Selenocysteine
  MOD_RES (321)..(321): Selenocysteine
  MOD_RES (324)..(324): Selenocysteine
  MOD_RES (337)..(337): Selenocysteine
  MOD_RES (341)..(341): Selenocysteine
  MOD_RES (345)..(345): Selenocysteine
  MOD_RES (363)..(363): Selenocysteine
  MOD_RES (371)..(371): Selenocysteine
  MOD_RES (378)..(378): Selenocysteine
  MOD_RES (503)..(503): Selenocysteine
  MOD_RES (517)..(517): Selenocysteine
  MOD_RES (580)..(580): Selenocysteine
MKEKEELLKLIAVLEKEXAQLREQVGRMERELNHEKERCDQLQAEQKGLXEVXQSLKMENEEFKKRFSDAXSKAHQLEEDIVSVXHKAIEKEXELDSLKDKLKKAQHEREQLECQLKXEKDEKELYKVHLKNXEIENXKLMSEVQXLKNLDGNKESVIXHFKEEIGRLQLCLAEKENLQRXFLLXXSSKEDXCFLKEQLRKAEEQVQAXRQEVVFLAKELSDAVNVRDRXMADLHXARLENEKVKKQLADAVAELKLNAMKKDQDKXDXLEHELRREVEDLKLRLQMAADHYKEKFKECQRLQKQINKLSDQSANNNNVFXKKXGNQQKVNDASVNXDPAXSASXVDVKPSPSAAEADFDIVXKGQVCEMXKEIADKXEKYNKCKQLLQDEKAKCNKYADELAKMELKWKEQVKIAENVKLELAEVQDNYKELKRSLENPAERKMEDGADGAFYPDEIQRPPVRVPSWGLEDNVVCSQPARNFSRPDGLEDSEDSKEDENVPXAPDPPSQHLRGHGXGFCFDSSFDVHKKCPLCELMFPPNYDQSKFEEHVESHWKVCPMCSEQFPPDYDQQVFERHVQXHFDQNVLNFD

SEQ ID NO: 27023 - protein, 98 aa, Homo sapiens
  MOD_RES (2)..(2): Selenocysteine
  MOD_RES (11)..(11): Selenocysteine
  MOD_RES (37)..(37): Selenocysteine
  MOD_RES (39)..(39): Selenocysteine
  MOD_RES (59)..(59): Selenocysteine
  MOD_RES (65)..(65): Selenocysteine
  MOD_RES (80)..(80): Selenocysteine
MXSFQEVPLQXSNFAHVIFQNVAKSYLPNAHLECHYXLXPYIHPHPKDWVGIFKVGWSXARDYYXFLWSPMPEHYVEGSXVNCVLAFQGYYLPNDDGE

SEQ ID NO: 27024 - protein, 138 aa, Homo sapiens
  MOD_RES (2)..(2): Selenocysteine
  MOD_RES (11)..(11): Selenocysteine
  MOD_RES (37)..(37): Selenocysteine
  MOD_RES (39)..(39): Selenocysteine
  MOD_RES (59)..(59): Selenocysteine
  MOD_RES (65)..(65): Selenocysteine
  MOD_RES (80)..(80): Selenocysteine
  MOD_RES (106)..(106): Selenocysteine
  MOD_RES (116)..(116): Selenocysteine
  MOD_RES (131)..(131): Selenocysteine
MXSFQEVPLQXSNFAHVIFQNVAKSYLPNAHLECHYXLXPYIHPHPKDWVGIFKVGWSXARDYYXFLWSPMPEHYVEGSXVNCVLAFQGYYLPNDDGEFYQFCYVXHKGEIRGASXPFQFRASSPVEELLXMEDEGNS

SEQ ID NO: 27025 - protein, 747 aa, Homo sapiens
  MOD_RES (2)..(2): Selenocysteine
  MOD_RES (11)..(11): Selenocysteine
  MOD_RES (37)..(37): Selenocysteine
  MOD_RES (39)..(39): Selenocysteine
  MOD_RES (59)..(59): Selenocysteine
  MOD_RES (65)..(65): Selenocysteine
  MOD_RES (80)..(80): Selenocysteine
  MOD_RES (106)..(106): Selenocysteine
  MOD_RES (116)..(116): Selenocysteine
  MOD_RES (131)..(131): Selenocysteine
  MOD_RES (144)..(145): Selenocysteine
  MOD_RES (157)..(157): Selenocysteine
  MOD_RES (175)..(175): Selenocysteine
  MOD_RES (207)..(207): Selenocysteine
  MOD_RES (210)..(210): Selenocysteine
  MOD_RES (228)..(228): Selenocysteine
  MOD_RES (242)..(242): Selenocysteine
  MOD_RES (250)..(250): Selenocysteine
  MOD_RES (275)..(275): Selenocysteine
  MOD_RES (290)..(290): Selenocysteine
  MOD_RES (295)..(295): Selenocysteine
  MOD_RES (303)..(303): Selenocysteine
  MOD_RES (316)..(316): Selenocysteine
  MOD_RES (338)..(338): Selenocysteine
  MOD_RES (342)..(343): Selenocysteine
  MOD_RES (349)..(349): Selenocysteine
  MOD_RES (366)..(366): Selenocysteine
  MOD_RES (387)..(387): Selenocysteine
  MOD_RES (393)..(393): Selenocysteine
  MOD_RES (424)..(424): Selenocysteine
  MOD_RES (426)..(426): Selenocysteine
  MOD_RES (478)..(478): Selenocysteine
  MOD_RES (481)..(481): Selenocysteine
  MOD_RES (494)..(494): Selenocysteine
  MOD_RES (498)..(498): Selenocysteine
  MOD_RES (502)..(502): Selenocysteine
  MOD_RES (520)..(520): Selenocysteine
  MOD_RES (528)..(528): Selenocysteine
  MOD_RES (535)..(535): Selenocysteine
  MOD_RES (660)..(660): Selenocysteine
  MOD_RES (674)..(674): Selenocysteine
  MOD_RES (737)..(737): Selenocysteine
MXSFQEVPLQXSNFAHVIFQNVAKSYLPNAHLECHYXLXPYIHPHPKDWVGIFKVGWSXARDYYXFLWSPMPEHYVEGSXVNCVLAFQGYYLPNDDGEFYQFCYVXHKGEIRGASXPFQFRASSPVEELLXMEDEGNSDMLVVXXKAGLLELKIEKXMKEKEELLKLIAVLEKEXAQLREQVGRMERELNHEKERCDQLQAEQKGLXEVXQSLKMENEEFKKRFSDAXSKAHQLEEDIVSVXHKAIEKEXELDSLKDKLKKAQHEREQLECQLKXEKDEKELYKVHLKNXEIENXKLMSEVQXLKNLDGNKESVIXHFKEEIGRLQLCLAEKENLQRXFLLXXSSKEDXCFLKEQLRKAEEQVQAXRQEVVFLAKELSDAVNVRDRXMADLHXARLENEKVKKQLADAVAELKLNAMKKDQDKXDXLEHELRREVEDLKLRLQMAADHYKEKFKECQRLQKQINKLSDQSANNNNVFXKKXGNQQKVNDASVNXDPAXSASXVDVKPSPSAAEADFDIVXKGQVCEMXKEIADKXEKYNKCKQLLQDEKAKCNKYADELAKMELKWKEQVKIAENVKLELAEVQDNYKELKRSLENPAERKMEDGADGAFYPDEIQRPPVRVPSWGLEDNVVCSQPARNFSRPDGLEDSEDSKEDENVPXAPDPPSQHLRGHGXGFCFDSSFDVHKKCPLCELMFPPNYDQSKFEEHVESHWKVCPMCSEQFPPDYDQQVFERHVQXHFDQNVLNFD

SEQ ID NO: 27026 - protein, 789 aa, Homo sapiens
  MOD_RES (2)..(2): Selenocysteine
  MOD_RES (11)..(11): Selenocysteine
  MOD_RES (37)..(37): Selenocysteine
  MOD_RES (39)..(39): Selenocysteine
  MOD_RES (59)..(59): Selenocysteine
  MOD_RES (65)..(65): Selenocysteine
  MOD_RES (80)..(80): Selenocysteine
  MOD_RES (106)..(106): Selenocysteine
  MOD_RES (116)..(116): Selenocysteine
  MOD_RES (131)..(131): Selenocysteine
  MOD_RES (144)..(145): Selenocysteine
  MOD_RES (157)..(157): Selenocysteine
  MOD_RES (175)..(175): Selenocysteine
  MOD_RES (207)..(207): Selenocysteine
  MOD_RES (210)..(210): Selenocysteine
  MOD_RES (228)..(228): Selenocysteine
  MOD_RES (242)..(242): Selenocysteine
  MOD_RES (250)..(250): Selenocysteine
  MOD_RES (275)..(275): Selenocysteine
  MOD_RES (290)..(290): Selenocysteine
  MOD_RES (295)..(295): Selenocysteine
  MOD_RES (303)..(303): Selenocysteine
  MOD_RES (316)..(316): Selenocysteine
  MOD_RES (338)..(338): Selenocysteine
  MOD_RES (342)..(343): Selenocysteine
  MOD_RES (349)..(349): Selenocysteine
  MOD_RES (366)..(366): Selenocysteine
  MOD_RES (387)..(387): Selenocysteine
  MOD_RES (393)..(393): Selenocysteine
  MOD_RES (424)..(424): Selenocysteine
  MOD_RES (426)..(426): Selenocysteine
  MOD_RES (478)..(478): Selenocysteine
  MOD_RES (481)..(481): Selenocysteine
  MOD_RES (494)..(494): Selenocysteine
  MOD_RES (498)..(498): Selenocysteine
  MOD_RES (502)..(502): Selenocysteine
  MOD_RES (520)..(520): Selenocysteine
  MOD_RES (528)..(528): Selenocysteine
  MOD_RES (535)..(535): Selenocysteine
  MOD_RES (615)..(615): Selenocysteine
  MOD_RES (625)..(625): Selenocysteine
  MOD_RES (644)..(644): Selenocysteine
  MOD_RES (702)..(702): Selenocysteine
  MOD_RES (716)..(716): Selenocysteine
  MOD_RES (779)..(779): Selenocysteine
MXSFQEVPLQXSNFAHVIFQNVAKSYLPNAHLECHYXLXPYIHPHPKDWVGIFKVGWSXARDYYXFLWSPMPEHYVEGSXVNCVLAFQGYYLPNDDGEFYQFCYVXHKGEIRGASXPFQFRASSPVEELLXMEDEGNSDMLVVXXKAGLLELKIEKXMKEKEELLKLIAVLEKEXAQLREQVGRMERELNHEKERCDQLQAEQKGLXEVXQSLKMENEEFKKRFSDAXSKAHQLEEDIVSVXHKAIEKEXELDSLKDKLKKAQHEREQLECQLKXEKDEKELYKVHLKNXEIENXKLMSEVQXLKNLDGNKESVIXHFKEEIGRLQLCLAEKENLQRXFLLXXSSKEDXCFLKEQLRKAEEQVQAXRQEVVFLAKELSDAVNVRDRXMADLHXARLENEKVKKQLADAVAELKLNAMKKDQDKXDXLEHELRREVEDLKLRLQMAADHYKEKFKECQRLQKQINKLSDQSANNNNVFXKKXGNQQKVNDASVNXDPAXSASXVDVKPSPSAAEADFDIVXKGQVCEMXKEIADKXEKYNKCKQLLQDEKAKCNKYADELAKMELKWKEQVKIAENVKLELAEVQDNYKELKRSLENPAERKMEGQNSQSPQCFKXCSEQNGYVLXLSNAQPVLQYGNPYASQEXRDGADGAFYPDEIQRPPVRVPSWGLEDNVVCSQPARNFSRPDGLEDSEDSKEDENVPXAPDPPSQHLRGHGXGFCFDSSFDVHKKCPLCELMFPPNYDQSKFEEHVESHWKVCPMCSEQFPPDYDQQVFERHVQXHFDQNVLNFD

SEQ ID NO: 27027 - protein, 813 aa, Homo sapiens
  MOD_RES (2)..(2): Selenocysteine
  MOD_RES (11)..(11): Selenocysteine
  MOD_RES (37)..(37): Selenocysteine
  MOD_RES (39)..(39): Selenocysteine
  MOD_RES (59)..(59): Selenocysteine
  MOD_RES (65)..(65): Selenocysteine
  MOD_RES (80)..(80): Selenocysteine
  MOD_RES (106)..(106): Selenocysteine
  MOD_RES (116)..(116): Selenocysteine
  MOD_RES (131)..(131): Selenocysteine
  MOD_RES (144)..(145): Selenocysteine
  MOD_RES (157)..(157): Selenocysteine
  MOD_RES (175)..(175): Selenocysteine
  MOD_RES (207)..(207): Selenocysteine
  MOD_RES (210)..(210): Selenocysteine
  MOD_RES (228)..(228): Selenocysteine
  MOD_RES (242)..(242): Selenocysteine
  MOD_RES (250)..(250): Selenocysteine
  MOD_RES (275)..(275): Selenocysteine
  MOD_RES (290)..(290): Selenocysteine
  MOD_RES (295)..(295): Selenocysteine
  MOD_RES (303)..(303): Selenocysteine
  MOD_RES (316)..(316): Selenocysteine
  MOD_RES (338)..(338): Selenocysteine
  MOD_RES (342)..(343): Selenocysteine
  MOD_RES (349)..(349): Selenocysteine
  MOD_RES (366)..(366): Selenocysteine
  MOD_RES (387)..(387): Selenocysteine
  MOD_RES (393)..(393): Selenocysteine
  MOD_RES (424)..(424): Selenocysteine
  MOD_RES (426)..(426): Selenocysteine
  MOD_RES (478)..(478): Selenocysteine
  MOD_RES (481)..(481): Selenocysteine
  MOD_RES (494)..(494): Selenocysteine
  MOD_RES (498)..(498): Selenocysteine
  MOD_RES (502)..(502): Selenocysteine
  MOD_RES (520)..(520): Selenocysteine
  MOD_RES (528)..(528): Selenocysteine
  MOD_RES (535)..(535): Selenocysteine
  MOD_RES (639)..(639): Selenocysteine
  MOD_RES (649)..(649): Selenocysteine
  MOD_RES (668)..(668): Selenocysteine
  MOD_RES (726)..(726): Selenocysteine
  MOD_RES (740)..(740): Selenocysteine
  MOD_RES (803)..(803): Selenocysteine
MXSFQEVPLQXSNFAHVIFQNVAKSYLPNAHLECHYXLXPYIHPHPKDWVGIFKVGWSXARDYYXFLWSPMPEHYVEGSXVNCVLAFQGYYLPNDDGEFYQFCYVXHKGEIRGASXPFQFRASSPVEELLXMEDEGNSDMLVVXXKAGLLELKIEKXMKEKEELLKLIAVLEKEXAQLREQVGRMERELNHEKERCDQLQAEQKGLXEVXQSLKMENEEFKKRFSDAXSKAHQLEEDIVSVXHKAIEKEXELDSLKDKLKKAQHEREQLECQLKXEKDEKELYKVHLKNXEIENXKLMSEVQXLKNLDGNKESVIXHFKEEIGRLQLCLAEKENLQRXFLLXXSSKEDXCFLKEQLRKAEEQVQAXRQEVVFLAKELSDAVNVRDRXMADLHXARLENEKVKKQLADAVAELKLNAMKKDQDKXDXLEHELRREVEDLKLRLQMAADHYKEKFKECQRLQKQINKLSDQSANNNNVFXKKXGNQQKVNDASVNXDPAXSASXVDVKPSPSAAEADFDIVXKGQVCEMXKEIADKXEKYNKCKQLLQDEKAKCNKYADELAKMELKWKEQVKIAENVKLELAEVQDNYKLQLAEKDKEISGLISHLENLSREKELKRSLENPAERKMEGQNSQSPQCFKXCSEQNGYVLXLSNAQPVLQYGNPYASQEXRDGADGAFYPDEIQRPPVRVPSWGLEDNVVCSQPARNFSRPDGLEDSEDSKEDENVPXAPDPPSQHLRGHGXGFCFDSSFDVHKKCPLCELMFPPNYDQSKFEEHVESHWKVCPMCSEQFPPDYDQQVFERHVQXHFDQNVLNFD

SEQ ID NO: 27028 - protein, 91 aa, Homo sapiens
  MOD_RES (2)..(2): Selenocysteine
  MOD_RES (11)..(11): Selenocysteine
  MOD_RES (37)..(37): Selenocysteine
  MOD_RES (39)..(39): Selenocysteine
  MOD_RES (59)..(59): Selenocysteine
  MOD_RES (65)..(65): Selenocysteine
  MOD_RES (80)..(80): Selenocysteine
MXSFQEVPLQXSNFAHVIFQNVAKSYLPNAHLECHYXLXPYIHPHPKDWVGIFKVGWSXARDYYXFLWSPMPEHYVEGSXVNCVLAFQVEN

SEQ ID NO: 27029 - protein, 124 aa, Homo sapiens
  MOD_RES (10)..(10): Selenocysteine
  MOD_RES (51)..(51): Selenocysteine
  MOD_RES (58)..(58): Selenocysteine
  MOD_RES (86)..(86): Selenocysteine
  MOD_RES (89)..(89): Selenocysteine
  MOD_RES (98)..(98): Selenocysteine
  MOD_RES (110)..(110): Selenocysteine
MSYIPGQPVXAVVQRVEIHKLRQGENLILGFSIGGGIDQDPSQNPFSEDKXDKGIYVXRVSEGGPAEIAGLQIGDKIMQVNGWDMXMVXHDQARKRLXKRSEEVVRLLVXRQSLQKAVQQSMLS

SEQ ID NO: 27030 - protein, 98 aa, Homo sapiens
  MOD_RES (10)..(10): Selenocysteine
  MOD_RES (51)..(51): Selenocysteine
  MOD_RES (60)..(60): Selenocysteine
  MOD_RES (63)..(63): Selenocysteine
  MOD_RES (72)..(72): Selenocysteine
  MOD_RES (84)..(84): Selenocysteine
MSYIPGQPVXAVVQRVEIHKLRQGENLILGFSIGGGIDQDPSQNPFSEDKXDKVNGWDMXMVXHDQARKRLXKRSEEVVRLLVXRQSLQKAVQQSMLS

SEQ ID NO: 27031 - protein, 808 aa, Homo sapiens
  MOD_RES (3)..(3): Selenocysteine
  MOD_RES (5)..(5): Selenocysteine
  MOD_RES (43)..(44): Selenocysteine
  MOD_RES (46)..(46): Selenocysteine
  MOD_RES (51)..(51): Selenocysteine
  MOD_RES (69)..(69): Selenocysteine
  MOD_RES (85)..(85): Selenocysteine
  MOD_RES (88)..(88): Selenocysteine
  MOD_RES (93)..(93): Selenocysteine
  MOD_RES (122)..(122): Selenocysteine
  MOD_RES (135)..(135): Selenocysteine
  MOD_RES (148)..(148): Selenocysteine
  MOD_RES (150)..(150): Selenocysteine
  MOD_RES (152)..(152): Selenocysteine
  MOD_RES (154)..(154): Selenocysteine
  MOD_RES (156)..(156): Selenocysteine
  MOD_RES (160)..(160): Selenocysteine
  MOD_RES (166)..(166): Selenocysteine
  MOD_RES (177)..(178): Selenocysteine
  MOD_RES (184)..(184): Selenocysteine
  MOD_RES (193)..(193): Selenocysteine
  MOD_RES (202)..(202): Selenocysteine
  MOD_RES (218)..(218): Selenocysteine
  MOD_RES (223)..(223): Selenocysteine
  MOD_RES (232)..(232): Selenocysteine
  MOD_RES (234)..(234): Selenocysteine
  MOD_RES (249)..(249): Selenocysteine
  MOD_RES (266)..(266): Selenocysteine
  MOD_RES (279)..(279): Selenocysteine
  MOD_RES (304)..(304): Selenocysteine
  MOD_RES (436)..(436): Selenocysteine
  MOD_RES (521)..(521): Selenocysteine
  MOD_RES (531)..(531): Selenocysteine
  MOD_RES (563)..(563): Selenocysteine
  MOD_RES (579)..(579): Selenocysteine
  MOD_RES (601)..(601): Selenocysteine
  MOD_RES (606)..(606): Selenocysteine
  MOD_RES (624)..(624): Selenocysteine
  MOD_RES (697)..(697): Selenocysteine
  MOD_RES (709)..(709): Selenocysteine
  MOD_RES (713)..(713): Selenocysteine
  MOD_RES (721)..(721): Selenocysteine
MEXGXAPLVAPPRRHGAPAAPSPPPRGSRAGPVVVVAPGPPVXXAXSAPVXLVAPGEARPAWVPGSAEXSAPAPAPAPAPAPAVXGSXVVVLXLEASPEAPKPQLPSGPESPEPAAVAGVEXSRALAAGADSPKXEEARPSPAPGPGXPXGXPXRXPSRXAPGALXAKPPLAPKPGXXVASGVXARSASGQVXGGHGAAAAXSASAGQAPEDPSGPGXGPSGXCEAPVAVVXVXPAPEPAENSQDLGSXSSLGPGISGPRGQAPDXLSYLDSVSLMSGXLESLADDVSSMGSDSEINGLALRKXDKYGFLGGSQYSGSLESSIPVDVARQRELKWLDMFSNWDKWLSRRFQKVKLRCRKGIPSSLRAKAWQYLSNSKELLEQNPGKFEELERAPGDPKWLDVIEKDLHRQFPFHEMFAARGGHGQQDLYRILKAYXIYRPDEGYCQAQAPVAAVLLMHMPAEQAFWCLVQICDKYLPGYYSAGLEAIQLDGEIFFALLRRASPLAHRHLRRQRIDPVLYMXEWFMCIFARXLPWASVLRVWDMFFCEGVKIIFRVALVLLRHXLGSVEKLRSCQGMYEXMEQLRNLPQQCMQEDFLVHEVXNLPVXEALIERENAAQLKKWREXRGELQYRPSRRLHGSRAIHEERRRQQPPLGPSSSLLSLPGLKSRGSRAAGGAPSPPPPVRRASAGPAPGPVVXAEGLHPSLPSPXGNSXPLGSSKEXRKQEKERQKQEKERQKQEKEREKERQKQEKEREKQEKEREKQEKERQKQEKKAQGRKLSLRRKADGPPGPHDGGDRPSAEARQDAYF

SEQ ID NO: 27032 - protein, 184 aa, Homo sapiens
  MOD_RES (84)..(84): Selenocysteine
  MOD_RES (147)..(147): Selenocysteine
  MOD_RES (170)..(170): Selenocysteine
  MOD_RES (179)..(179): Selenocysteine
VKLRCRKGIPSSLRAKAWQYLSNSKELLEQNPGKFEELERAPGDPKWLDVIEKDLHRQFPFHEMFAARGGHGQQDLYRILKAYXIYRPDEGYCQAQAPVAAVLLMHMPAEQAFWCLVQICDKYLPGYYSAGLALRSSSGWPWSCCAXRWAQWRSCAPAKACMRPWSSCVXCPSSACRKXSWCMR

SEQ ID NO: 27033 - protein, 67 aa, Homo sapiens
  MOD_RES (2)..(2): Selenocysteine
  MOD_RES (27)..(27): Selenocysteine
IXRNAGIKQDNDLDKLLLCLKISDKQXEWIENCQRQFCKMMKAKPDIISGEVLPIFRFFLCEIPSRV

SEQ ID NO: 27034 - protein, 108 aa, Homo sapiens
  MOD_RES (28)..(28): Selenocysteine
  MOD_RES (46)..(46): Selenocysteine
  MOD_RES (66)..(66): Selenocysteine
  MOD_RES (79)..(79): Selenocysteine
  MOD_RES (92)..(92): Selenocysteine
  MOD_RES (98)..(98): Selenocysteine
  MOD_RES (101)..(101): Selenocysteine
MAHFSSEDQAMLQAMLRRLFQSVKEKIXGAPSLECAEEILLHLEEXDENFHNYEFVKYLRQHIGNXLGSMIEEEMEKCXSDRNQGEECGYDXVVQQVXKRXQESKELP

SEQ ID NO: 27035 - protein, 214 aa, Homo sapiens
  MOD_RES (28)..(28): Selenocysteine
  MOD_RES (46)..(46): Selenocysteine
  MOD_RES (66)..(66): Selenocysteine
  MOD_RES (79)..(79): Selenocysteine
  MOD_RES (92)..(92): Selenocysteine
  MOD_RES (98)..(98): Selenocysteine
  MOD_RES (101)..(101): Selenocysteine
  MOD_RES (134)..(134): Selenocysteine
  MOD_RES (153)..(153): Selenocysteine
  MOD_RES (196)..(196): Selenocysteine
  MOD_RES (212)..(213): Selenocysteine
MAHFSSEDQAMLQAMLRRLFQSVKEKIXGAPSLECAEEILLHLEEXDENFHNYEFVKYLRQHIGNXLGSMIEEEMEKCXSDRNQGEECGYDXVVQQVXKRXQESKEYKEMMHYLKNIMIAVVESMINKFEEDEXRNQERQKKIQKEKSHSYRXDNCSDSDSSLNQSYKFCQGKLQLILDQLDPGQPKEVRYEALQXLCSAPPSDVLNCENWXXL

SEQ ID NO: 27036 - protein, 1257 aa, Homo sapiens
  MOD_RES (28)..(28): Selenocysteine
  MOD_RES (46)..(46): Selenocysteine
  MOD_RES (66)..(66): Selenocysteine
  MOD_RES (79)..(79): Selenocysteine
  MOD_RES (92)..(92): Selenocysteine
  MOD_RES (98)..(98): Selenocysteine
  MOD_RES (101)..(101): Selenocysteine
  MOD_RES (134)..(134): Selenocysteine
  MOD_RES (153)..(153): Selenocysteine
  MOD_RES (196)..(196): Selenocysteine
  MOD_RES (212)..(213): Selenocysteine
  MOD_RES (219)..(219): Selenocysteine
  MOD_RES (240)..(240): Selenocysteine
  MOD_RES (249)..(249): Selenocysteine
  MOD_RES (254)..(254): Selenocysteine
  MOD_RES (273)..(273): Selenocysteine
  MOD_RES (281)..(281): Selenocysteine
  MOD_RES (286)..(286): Selenocysteine
  MOD_RES (321)..(321): Selenocysteine
  MOD_RES (326)..(326): Selenocysteine
  MOD_RES (351)..(351): Selenocysteine
  MOD_RES (367)..(368): Selenocysteine
  MOD_RES (375)..(375): Selenocysteine
  MOD_RES (382)..(383): Selenocysteine
  MOD_RES (397)..(397): Selenocysteine
  MOD_RES (403)..(403): Selenocysteine
  MOD_RES (416)..(416): Selenocysteine
  MOD_RES (470)..(470): Selenocysteine
  MOD_RES (483)..(483): Selenocysteine
  MOD_RES (498)..(498): Selenocysteine
  MOD_RES (523)..(523): Selenocysteine
  MOD_RES (544)..(544): Selenocysteine
  MOD_RES (580)..(580): Selenocysteine
  MOD_RES (623)..(623): Selenocysteine
  MOD_RES (632)..(632): Selenocysteine
  MOD_RES (646)..(646): Selenocysteine
  MOD_RES (655)..(655): Selenocysteine
  MOD_RES (690)..(690): Selenocysteine
  MOD_RES (700)..(700): Selenocysteine
  MOD_RES (708)..(708): Selenocysteine
  MOD_RES (733)..(733): Selenocysteine
  MOD_RES (738)..(738): Selenocysteine
  MOD_RES (756)..(756): Selenocysteine
  MOD_RES (772)..(772): Selenocysteine
  MOD_RES (776)..(777): Selenocysteine
  MOD_RES (815)..(815): Selenocysteine
  MOD_RES (824)..(824): Selenocysteine
  MOD_RES (917)..(917): Selenocysteine
  MOD_RES (942)..(942): Selenocysteine
  MOD_RES (980)..(980): Selenocysteine
  MOD_RES (994)..(994): Selenocysteine
  MOD_RES (996)..(996): Selenocysteine
  MOD_RES (1016)..(1016): Selenocysteine
  MOD_RES (1035)..(1035): Selenocysteine
  MOD_RES (1050)..(1050): Selenocysteine
  MOD_RES (1084)..(1084): Selenocysteine
  MOD_RES (1096)..(1096): Selenocysteine
  MOD_RES (1115)..(1115): Selenocysteine
  MOD_RES (1128)..(1128): Selenocysteine
  MOD_RES (1162)..(1162): Selenocysteine
  MOD_RES (1180)..(1180): Selenocysteine
  MOD_RES (1208)..(1208): Selenocysteine
  MOD_RES (1210)..(1210): Selenocysteine
  MOD_RES (1243)..(1243): Selenocysteine
  MOD_RES (1257)..(1257): Selenocysteine
MAHFSSEDQAMLQAMLRRLFQSVKEKIXGAPSLECAEEILLHLEEXDENFHNYEFVKYLRQHIGNXLGSMIEEEMEKCXSDRNQGEECGYDXVVQQVXKRXQESKEYKEMMHYLKNIMIAVVESMINKFEEDEXRNQERQKKIQKEKSHSYRXDNCSDSDSSLNQSYKFCQGKLQLILDQLDPGQPKEVRYEALQXLCSAPPSDVLNCENWXXLCEKLXVSLSDPDPVFSDRILKFCAQXFLLSPLHMXKEIYXSLAKYLESYFLSRENHIPXLSAGVDIXNPNMXRLLKKVRLLNEYQKEAPSFWIRHPEKYMEEIVESXLSLLXVKHNQSHVVSQKILDPIYFFALVDXKAVWFKKWMHAHYSRXXVLRLLEXKYKSLVXXAIQQCVQYFEMCKXRKADEXLGHSKHCRNKQKXFYYLGQELQYIYFIHSLCLLGRLLIYKQGRKLFPIKLKNKKGLVSLIDLLVLFXQLIYYSPSCPKMXSAAHSENYSPASMVXEVLWILSDQKECAVECLYNNIVIEXLLQPIHNLMKGNEASPNCSEXALIHIAGILARIASVEEGLILLLYGANMNSSEESPXGAHIIAQFSKKLLDEDISIFSGSEMLPVVKGAFISVCRHIYSXCEGLQVLIXYNLHESIAKAWKKXSLLSERIPXPVEGSDSVSSVSQESQNIMAWEDNLLDDLLHFAAXPKGLLLLQRXGAINECVXFIFNRYAKKLQVSRHKKFGYGVLVXRVASXAAGGIALKKSGFINELIXELWSNLEYGRDDVRVXHPRXXPVDPIDRSCQKSFLALVNLLSYPAIYELVRNQDLPNKXEYSLREVPXCVIDIIDRLIILNSEAKIRSLFNYEQSHIFGLRDFIIDGLSVERNHVLVRINLVGGPLERILPPRLLEKSDNPYPWPMFSSYPLPNCYLSDIXRNAGIKQDNDLDKLLLCLKISDKQXEWIENCQRQFCKMMKAKPDIISGEALIELLEKFVLHLXESPSECYFPSVEYXAXDANVKNESLSSVQQLGIKMXVRYGKFLSLLKDGAENDLXWVLKHCERFLKQQQXSIKSSLLCLQGNYAGHDWFVSSLFMIMLGDKEKXFQFLHQFSRLLXSAFLWLPRLHISSYLPNDXVESGIHPVYFCSXHYIEMLLKAELPLVFSAFHMSGFAPSQICLQWIXQCFWNYLDWIEICHYIAXCVFLGPDYQVYICIAVFKHLQQDILQHXQXQDLQVFLKEEALHGFRVSDYFEYMEILEQNYRXVLLRDMRNIRLQSX

SEQ ID NO: 27037 - protein, 1298 aa, Homo sapiens
  MOD_RES (28)..(28): Selenocysteine
  MOD_RES (46)..(46): Selenocysteine
  MOD_RES (66)..(66): Selenocysteine
  MOD_RES (79)..(79): Selenocysteine
  MOD_RES (92)..(92): Selenocysteine
  MOD_RES (98)..(98): Selenocysteine
  MOD_RES (101)..(101): Selenocysteine
  MOD_RES (134)..(134): Selenocysteine
  MOD_RES (153)..(153): Selenocysteine
  MOD_RES (196)..(196): Selenocysteine
  MOD_RES (212)..(213): Selenocysteine
  MOD_RES (219)..(219): Selenocysteine
  MOD_RES (240)..(240): Selenocysteine
  MOD_RES (249)..(249): Selenocysteine
  MOD_RES (254)..(254): Selenocysteine
  MOD_RES (273)..(273): Selenocysteine
  MOD_RES (281)..(281): Selenocysteine
  MOD_RES (286)..(286): Selenocysteine
  MOD_RES (321)..(321): Selenocysteine
  MOD_RES (326)..(326): Selenocysteine
  MOD_RES (351)..(351): Selenocysteine
  MOD_RES (367)..(368): Selenocysteine
  MOD_RES (375)..(375): Selenocysteine
  MOD_RES (382)..(383): Selenocysteine
  MOD_RES (397)..(397): Selenocysteine
  MOD_RES (403)..(403): Selenocysteine
  MOD_RES (416)..(416): Selenocysteine
  MOD_RES (470)..(470): Selenocysteine
  MOD_RES (483)..(483): Selenocysteine
  MOD_RES (498)..(498): Selenocysteine
  MOD_RES (523)..(523): Selenocysteine
  MOD_RES (544)..(544): Selenocysteine
  MOD_RES (580)..(580): Selenocysteine
  MOD_RES (623)..(623): Selenocysteine
  MOD_RES (632)..(632): Selenocysteine
  MOD_RES (646)..(646): Selenocysteine
  MOD_RES (655)..(655): Selenocysteine
  MOD_RES (690)..(690): Selenocysteine
  MOD_RES (700)..(700): Selenocysteine
  MOD_RES (708)..(708): Selenocysteine
  MOD_RES (733)..(733): Selenocysteine
  MOD_RES (738)..(738): Selenocysteine
  MOD_RES (756)..(756): Selenocysteine
  MOD_RES (772)..(772): Selenocysteine
  MOD_RES (776)..(777): Selenocysteine
  MOD_RES (815)..(815): Selenocysteine
  MOD_RES (824)..(824): Selenocysteine
  MOD_RES (868)..(868): Selenocysteine
  MOD_RES (958)..(958): Selenocysteine
  MOD_RES (983)..(983): Selenocysteine
  MOD_RES (1021)..(1021): Selenocysteine
  MOD_RES (1035)..(1035): Selenocysteine
  MOD_RES (1037)..(1037): Selenocysteine
  MOD_RES (1057)..(1057): Selenocysteine
  MOD_RES (1076)..(1076): Selenocysteine
  MOD_RES (1091)..(1091): Selenocysteine
  MOD_RES (1125)..(1125): Selenocysteine
  MOD_RES (1137)..(1137): Selenocysteine
  MOD_RES (1156)..(1156): Selenocysteine
  MOD_RES (1169)..(1169): Selenocysteine
  MOD_RES (1203)..(1203): Selenocysteine
  MOD_RES (1221)..(1221): Selenocysteine
  MOD_RES (1249)..(1249): Selenocysteine
  MOD_RES (1251)..(1251): Selenocysteine
  MOD_RES (1284)..(1284): Selenocysteine
  MOD_RES (1298)..(1298): Selenocysteine
MAHFSSEDQAMLQAMLRRLFQSVKEKIXGAPSLECAEEILLHLEEXDENFHNYEFVKYLRQHIGNXLGSMIEEEMEKCXSDRNQGEECGYDXVVQQVXKRXQESKEYKEMMHYLKNIMIAVVESMINKFEEDEXRNQERQKKIQKEKSHSYRXDNCSDSDSSLNQSYKFCQGKLQLILDQLDPGQPKEVRYEALQXLCSAPPSDVLNCENWXXLCEKLXVSLSDPDPVFSDRILKFCAQXFLLSPLHMXKEIYXSLAKYLESYFLSRENHIPXLSAGVDIXNPNMXRLLKKVRLLNEYQKEAPSFWIRHPEKYMEEIVESXLSLLXVKHNQSHVVSQKILDPIYFFALVDXKAVWFKKWMHAHYSRXXVLRLLEXKYKSLVXXAIQQCVQYFEMCKXRKADEXLGHSKHCRNKQKXFYYLGQELQYIYFIHSLCLLGRLLIYKQGRKLFPIKLKNKKGLVSLIDLLVLFXQLIYYSPSCPKMXSAAHSENYSPASMVXEVLWILSDQKECAVECLYNNIVIEXLLQPIHNLMKGNEASPNCSEXALIHIAGILARIASVEEGLILLLYGANMNSSEESPXGAHIIAQFSKKLLDEDISIFSGSEMLPVVKGAFISVCRHIYSXCEGLQVLIXYNLHESIAKAWKKXSLLSERIPXPVEGSDSVSSVSQESQNIMAWEDNLLDDLLHFAAXPKGLLLLQRXGAINECVXFIFNRYAKKLQVSRHKKFGYGVLVXRVASXAAGGIALKKSGFINELIXELWSNLEYGRDDVRVXHPRXXPVDPIDRSCQKSFLALVNLLSYPAIYELVRNQDLPNKXEYSLREVPXCVIDIIDRLIILNSEAKIRSLFNYEQSHIFGLRLLSVICCDLDXLLLLEAQYQVSEMLLNAQEENILEISESHRDFIIDGLSVERNHVLVRINLVGGPLERILPPRLLEKSDNPYPWPMFSSYPLPNCYLSDIXRNAGIKQDNDLDKLLLCLKISDKQXEWIENCQRQFCKMMKAKPDIISGEALIELLEKFVLHLXESPSECYFPSVEYXAXDANVKNESLSSVQQLGIKMXVRYGKFLSLLKDGAENDLXWVLKHCERFLKQQQXSIKSSLLCLQGNYAGHDWFVSSLFMIMLGDKEKXFQFLHQFSRLLXSAFLWLPRLHISSYLPNDXVESGIHPVYFCSXHYIEMLLKAELPLVFSAFHMSGFAPSQICLQWIXQCFWNYLDWIEICHYIAXCVFLGPDYQVYICIAVFKHLQQDILQHXQXQDLQVFLKEEALHGFRVSDYFEYMEILEQNYRXVLLRDMRNIRLQSX

SEQ ID NO: 27038 - protein, 20 aa, Homo sapiens
  MOD_RES (2)..(2): Selenocysteine
MXEDSQRNFRSVYYEKVGFR

SEQ ID NO: 27039 - protein, 130 aa, Homo sapiens
  MOD_RES (2)..(2): Selenocysteine
  MOD_RES (39)..(39): Selenocysteine
  MOD_RES (44)..(44): Selenocysteine
  MOD_RES (102)..(102): Selenocysteine
MXEDSQRNFRSVYYEKVGFRGVEEKKSLEILLKDDRLDXEKLCXFSQRFPLPSMYRALVWKVLLGILPPHHESHAKVMMYRKEQYLDVLHALKVVRFVSDAXPQAEVYLRMYQLESGKLPRSPSFPLEPD

SEQ ID NO: 27040 - protein, 136 aa, Homo sapiens
  MOD_RES (2)..(2): Selenocysteine
  MOD_RES (39)..(39): Selenocysteine
  MOD_RES (44)..(44): Selenocysteine
  MOD_RES (102)..(102): Selenocysteine
MXEDSQRNFRSVYYEKVGFRGVEEKKSLEILLKDDRLDXEKLCXFSQRFPLPSMYRALVWKVLLGILPPHHESHAKVMMYRKEQYLDVLHALKVVRFVSDAXPQAEVYLRMYQLESGKLPRSPSFPLEPDDEVFLA

SEQ ID NO: 27041 - protein, 156 aa, Homo sapiens
  MOD_RES (2)..(2): Selenocysteine
  MOD_RES (39)..(39): Selenocysteine
  MOD_RES (44)..(44): Selenocysteine
  MOD_RES (102)..(102): Selenocysteine
  MOD_RES (155)..(155): Selenocysteine
MXEDSQRNFRSVYYEKVGFRGVEEKKSLEILLKDDRLDXEKLCXFSQRFPLPSMYRALVWKVLLGILPPHHESHAKVMMYRKEQYLDVLHALKVVRFVSDAXPQAEVYLRMYQLESGKLPRSPSFPLEPDDEVFLAIAKAMEEMVEDSVDCYWIXR

SEQ ID NO: 27042 - protein, 179 aa, Homo sapiens
  MOD_RES (2)..(2): Selenocysteine
  MOD_RES (39)..(39): Selenocysteine
  MOD_RES (44)..(44): Selenocysteine
  MOD_RES (102)..(102): Selenocysteine
  MOD_RES (155)..(155): Selenocysteine
  MOD_RES (164)..(164): Selenocysteine
MXEDSQRNFRSVYYEKVGFRGVEEKKSLEILLKDDRLDXEKLCXFSQRFPLPSMYRALVWKVLLGILPPHHESHAKVMMYRKEQYLDVLHALKVVRFVSDAXPQAEVYLRMYQLESGKLPRSPSFPLEPDDEVFLAIAKAMEEMVEDSVDCYWIXRRFVNQLNXKYRDSLPQLEGINVG

SEQ ID NO: 27043 - protein, 249 aa, Homo sapiens
  MOD_RES (2)..(2): Selenocysteine
  MOD_RES (39)..(39): Selenocysteine
  MOD_RES (44)..(44): Selenocysteine
  MOD_RES (102)..(102): Selenocysteine
  MOD_RES (155)..(155): Selenocysteine
  MOD_RES (164)..(164): Selenocysteine
  MOD_RES (190)..(190): Selenocysteine
  MOD_RES (245)..(245): Selenocysteine
MXEDSQRNFRSVYYEKVGFRGVEEKKSLEILLKDDRLDXEKLCXFSQRFPLPSMYRALVWKVLLGILPPHHESHAKVMMYRKEQYLDVLHALKVVRFVSDAXPQAEVYLRMYQLESGKLPRSPSFPLEPDDEVFLAIAKAMEEMVEDSVDCYWIXRRFVNQLNXKYRDSLPQLPKAFEQYLNLEDGRLLXHLRMCSAAPKLPYDLWFKRCFAGCLPESSLQRVWDKVVSGSCKILVFVAVEILLXFKIK

SEQ ID NO: 27044 - protein, 293 aa, Homo sapiens
  MOD_RES (2)..(2): Selenocysteine
  MOD_RES (39)..(39): Selenocysteine
  MOD_RES (44)..(44): Selenocysteine
  MOD_RES (102)..(102): Selenocysteine
  MOD_RES (155)..(155): Selenocysteine
  MOD_RES (164)..(164): Selenocysteine
  MOD_RES (190)..(190): Selenocysteine
  MOD_RES (245)..(245): Selenocysteine
  MOD_RES (260)..(260): Selenocysteine
  MOD_RES (288)..(288): Selenocysteine
MXEDSQRNFRSVYYEKVGFRGVEEKKSLEILLKDDRLDXEKLCXFSQRFPLPSMYRALVWKVLLGILPPHHESHAKVMMYRKEQYLDVLHALKVVRFVSDAXPQAEVYLRMYQLESGKLPRSPSFPLEPDDEVFLAIAKAMEEMVEDSVDCYWIXRRFVNQLNXKYRDSLPQLPKAFEQYLNLEDGRLLXHLRMCSAAPKLPYDLWFKRCFAGCLPESSLQRVWDKVVSGSCKILVFVAVEILLXFKIKVMALNSAEKIXKFLENIPQDSSDAIVSKAIDLWHKHCGXPVHSS

SEQ ID NO: 27045 - protein, 247 aa, Homo sapiens
  MOD_RES (2)..(2): Selenocysteine
  MOD_RES (39)..(39): Selenocysteine
  MOD_RES (44)..(44): Selenocysteine
  MOD_RES (102)..(102): Selenocysteine
  MOD_RES (144)..(144): Selenocysteine
  MOD_RES (199)..(199): Selenocysteine
  MOD_RES (214)..(214): Selenocysteine
  MOD_RES (242)..(242): Selenocysteine
MXEDSQRNFRSVYYEKVGFRGVEEKKSLEILLKDDRLDXEKLCXFSQRFPLPSMYRALVWKVLLGILPPHHESHAKVMMYRKEQYLDVLHALKVVRFVSDAXPQAEVYLRMYQLESGKLPRSPSFPLPKAFEQYLNLEDGRLLXHLRMCSAAPKLPYDLWFKRCFAGCLPESSLQRVWDKVVSGSCKILVFVAVEILLXFKIKVMALNSAEKIXKFLENIPQDSSDAIVSKAIDLWHKHCGXPVHSS

SEQ ID NO: 27046 - protein, 152 aa, Homo sapiens
  MOD_RES (2)..(2): Selenocysteine
  MOD_RES (39)..(39): Selenocysteine
  MOD_RES (44)..(44): Selenocysteine
  MOD_RES (102)..(102): Selenocysteine
  MOD_RES (135)..(135): Selenocysteine
  MOD_RES (139)..(139): Selenocysteine
MXEDSQRNFRSVYYEKVGFRGVEEKKSLEILLKDDRLDXEKLCXFSQRFPLPSMYRALVWKVLLGILPPHHESHAKVMMYRKEQYLDVLHALKVVRFVSDAXPQAEVYLRMYQLESGKLPRSPSFPLVSGHFCLXLSSXLDRPILPAFDYIM

SEQ ID NO: 27047 - protein, 87 aa, Homo sapiens
  MOD_RES (2)..(2): Selenocysteine
  MOD_RES (39)..(39): Selenocysteine
  MOD_RES (44)..(44): Selenocysteine
  MOD_RES (87)..(87): Selenocysteine
MXEDSQRNFRSVYYEKVGFRGVEEKKSLEILLKDDRLDXEKLCXFSQRFPLPSMYRALVWKVLLGLEKPAALSGYVIWRQRGNISGX

SEQ ID NO: 27048 - protein, 194 aa, Homo sapiens
  MOD_RES (2)..(2): Selenocysteine
  MOD_RES (75)..(75): Selenocysteine
  MOD_RES (128)..(128): Selenocysteine
  MOD_RES (137)..(137): Selenocysteine
  MOD_RES (163)..(163): Selenocysteine
MXEDSQRNFRSVYYEKVGFRGVEEKKSLEILLKDDRLGILPPHHESHAKVMMYRKEQYLDVLHALKVVRFVSDAXPQAEVYLRMYQLESGKLPRSPSFPLEPDDEVFLAIAKAMEEMVEDSVDCYWIXRRFVNQLNXKYRDSLPQLPKAFEQYLNLEDGRLLXHLRMCSAAPKLPYDLWFKRCFAGCLPESSLQ

SEQ ID NO: 27049 - protein, 199 aa, Homo sapiens
  MOD_RES (2)..(2): Selenocysteine
  MOD_RES (75)..(75): Selenocysteine
  MOD_RES (128)..(128): Selenocysteine
  MOD_RES (137)..(137): Selenocysteine
  MOD_RES (163)..(163): Selenocysteine
MXEDSQRNFRSVYYEKVGFRGVEEKKSLEILLKDDRLGILPPHHESHAKVMMYRKEQYLDVLHALKVVRFVSDAXPQAEVYLRMYQLESGKLPRSPSFPLEPDDEVFLAIAKAMEEMVEDSVDCYWIXRRFVNQLNXKYRDSLPQLPKAFEQYLNLEDGRLLXHLRMCSAAPKLPYDLWFKRCFAGCLPESSLQRQGLG

SEQ ID NO: 27050 - protein, 207 aa, Homo sapiens
  MOD_RES (2)..(2): Selenocysteine
  MOD_RES (75)..(75): Selenocysteine
  MOD_RES (128)..(128): Selenocysteine
  MOD_RES (137)..(137): Selenocysteine
  MOD_RES (163)..(163): Selenocysteine
MXEDSQRNFRSVYYEKVGFRGVEEKKSLEILLKDDRLGILPPHHESHAKVMMYRKEQYLDVLHALKVVRFVSDAXPQAEVYLRMYQLESGKLPRSPSFPLEPDDEVFLAIAKAMEEMVEDSVDCYWIXRRFVNQLNXKYRDSLPQLPKAFEQYLNLEDGRLLXHLRMCSAAPKLPYDLWFKRCFAGCLPESSLQRVWDKVVSGSCKI

SEQ ID NO: 27051 - protein, 238 aa, Homo sapiens
  MOD_RES (2)..(2): Selenocysteine
  MOD_RES (75)..(75): Selenocysteine
  MOD_RES (128)..(128): Selenocysteine
  MOD_RES (137)..(137): Selenocysteine
  MOD_RES (163)..(163): Selenocysteine
  MOD_RES (218)..(218): Selenocysteine
  MOD_RES (233)..(233): Selenocysteine
MXEDSQRNFRSVYYEKVGFRGVEEKKSLEILLKDDRLGILPPHHESHAKVMMYRKEQYLDVLHALKVVRFVSDAXPQAEVYLRMYQLESGKLPRSPSFPLEPDDEVFLAIAKAMEEMVEDSVDCYWIXRRFVNQLNXKYRDSLPQLPKAFEQYLNLEDGRLLXHLRMCSAAPKLPYDLWFKRCFAGCLPESSLQRVWDKVVSGSCKILVFVAVEILLXFKIKVMALNSAEKIXKFLEN

SEQ ID NO: 27052 - protein, 266 aa, Homo sapiens
  MOD_RES (2)..(2): Selenocysteine
  MOD_RES (75)..(75): Selenocysteine
  MOD_RES (128)..(128): Selenocysteine
  MOD_RES (137)..(137): Selenocysteine
  MOD_RES (163)..(163): Selenocysteine
  MOD_RES (218)..(218): Selenocysteine
  MOD_RES (233)..(233): Selenocysteine
  MOD_RES (261)..(261): Selenocysteine
MXEDSQRNFRSVYYEKVGFRGVEEKKSLEILLKDDRLGILPPHHESHAKVMMYRKEQYLDVLHALKVVRFVSDAXPQAEVYLRMYQLESGKLPRSPSFPLEPDDEVFLAIAKAMEEMVEDSVDCYWIXRRFVNQLNXKYRDSLPQLPKAFEQYLNLEDGRLLXHLRMCSAAPKLPYDLWFKRCFAGCLPESSLQRVWDKVVSGSCKILVFVAVEILLXFKIKVMALNSAEKIXKFLENIPQDSSDAIVSKAIDLWHKHCGXPVHSS

SEQ ID NO: 27053 - protein, 164 aa, Homo sapiens
  MOD_RES (2)..(2): Selenocysteine
  MOD_RES (75)..(75): Selenocysteine
  MOD_RES (108)..(108): Selenocysteine
  MOD_RES (112)..(112): Selenocysteine
  MOD_RES (143)..(143): Selenocysteine
  MOD_RES (156)..(156): Selenocysteine
MXEDSQRNFRSVYYEKVGFRGVEEKKSLEILLKDDRLGILPPHHESHAKVMMYRKEQYLDVLHALKVVRFVSDAXPQAEVYLRMYQLESGKLPRSPSFPLVSGHFCLXLSSXLDRPILPAFDYIMFCLKNFWWLPVVIRIKVXHLYLAFMAMHILXQPSYFLFF

SEQ ID NO: 27054 - protein, 98 aa, Homo sapiens
  MOD_RES (4)..(4): Selenocysteine
  MOD_RES (20)..(20): Selenocysteine
  MOD_RES (31)..(31): Selenocysteine
  MOD_RES (77)..(79): Selenocysteine
  MOD_RES (96)..(96): Selenocysteine
MQSXSNHLWLLSDILGQGAXANVFRGRHKKXGDLFAIKVFNNISFLRPVDVQMREFEVLKKLNHKNIVKLFAIEEEXXXRHKVLIMEFCPCGSLYXVL

SEQ ID NO: 27055 - protein, 103 aa, Homo sapiens
  MOD_RES (4)..(4): Selenocysteine
  MOD_RES (20)..(20): Selenocysteine
  MOD_RES (31)..(31): Selenocysteine
  MOD_RES (77)..(79): Selenocysteine
  MOD_RES (96)..(96): Selenocysteine
MQSXSNHLWLLSDILGQGAXANVFRGRHKKXGDLFAIKVFNNISFLRPVDVQMREFEVLKKLNHKNIVKLFAIEEEXXXRHKVLIMEFCPCGSLYXVLEEPSN

SEQ ID NO: 27056 - protein, 729 aa, Homo sapiens
  MOD_RES (4)..(4): Selenocysteine
  MOD_RES (20)..(20): Selenocysteine
  MOD_RES (31)..(31): Selenocysteine
  MOD_RES (77)..(79): Selenocysteine
  MOD_RES (96)..(96): Selenocysteine
  MOD_RES (156)..(156): Selenocysteine
  MOD_RES (176)..(176): Selenocysteine
  MOD_RES (201)..(201): Selenocysteine
  MOD_RES (210)..(210): Selenocysteine
  MOD_RES (216)..(216): Selenocysteine
  MOD_RES (239)..(239): Selenocysteine
  MOD_RES (278)..(278): Selenocysteine
  MOD_RES (302)..(302): Selenocysteine
  MOD_RES (320)..(320): Selenocysteine
  MOD_RES (331)..(331): Selenocysteine
  MOD_RES (333)..(333): Selenocysteine
  MOD_RES (343)..(343): Selenocysteine
  MOD_RES (373)..(374): Selenocysteine
  MOD_RES (389)..(389): Selenocysteine
  MOD_RES (419)..(419): Selenocysteine
  MOD_RES (431)..(431): Selenocysteine
  MOD_RES (457)..(457): Selenocysteine
  MOD_RES (462)..(462): Selenocysteine
  MOD_RES (467)..(467): Selenocysteine
  MOD_RES (478)..(478): Selenocysteine
  MOD_RES (503)..(503): Selenocysteine
  MOD_RES (514)..(514): Selenocysteine
  MOD_RES (517)..(517): Selenocysteine
  MOD_RES (542)..(542): Selenocysteine
  MOD_RES (560)..(560): Selenocysteine
  MOD_RES (595)..(595): Selenocysteine
  MOD_RES (599)..(599): Selenocysteine
  MOD_RES (602)..(602): Selenocysteine
  MOD_RES (634)..(634): Selenocysteine
  MOD_RES (651)..(651): Selenocysteine
  MOD_RES (657)..(657): Selenocysteine
  MOD_RES (664)..(664): Selenocysteine
  MOD_RES (672)..(672): Selenocysteine
  MOD_RES (674)..(674): Selenocysteine
  MOD_RES (682)..(682): Selenocysteine
  MOD_RES (687)..(687): Selenocysteine
  MOD_RES (718)..(718): Selenocysteine
MQSXSNHLWLLSDILGQGAXANVFRGRHKKXGDLFAIKVFNNISFLRPVDVQMREFEVLKKLNHKNIVKLFAIEEEXXXRHKVLIMEFCPCGSLYXVLEEPSNAYGLPESEFLIVLRDVVGGMNHLRENGIVHRDIKPGNIMRVIGEDGQSVYKLXDFGAARELEDDEQFVSLYGXEEYLHPDMYERAVLRKDHQKKYGAXVDLWSIGVXFYHAAXGSLPFRPFEGPRRNKEVMYKIIXGKPSGAISGVQKAENGPIDWSGDMPVSCSLSRGLQVLLXPVLANILEADQEKCWGFDQFFAEXSDILHRMVIHVFSLQQMXAHKIYIHSYNXAXIFHELVYKQXKIISSNQELIYEGRRLVLEPGRLAQHFPKXXEENPIFVVSREPLNXIGLIYEKISLPKVHPRYDLDGDASMAKAIXGVVCYACRIASXLLLYQELMRKGIRWLIELIKDDYNEXVHKKXEVVIXLDFCIRNIEKXVKVYEKLMKINLEAAELGEISDIHXKLLRLSSSQGXIEXSLQDIDSRLSPGGSLADAWAHQEGXHPKDRNVEKLQVLLNCMXEIYYQFKKDKAERRLAYNEEQIHKFDKQKLYYHAXKAMXHFXDECVKKYEAFLNKSEEWIRKMLHLRKQLLSLXNQCFDIEEEVSKYQEYXNELQEXLPQKMFXASSGIKHXMXPIYPSSNXLVEMXLGMKKLKEEMEGVVKELAENNHILERFGSLXMDGGLRNVDCL

SEQ ID NO: 27057 - protein, 48 aa, Homo sapiens
  MOD_RES (25)..(27): Selenocysteine
  MOD_RES (44)..(44): Selenocysteine
MREFEVLKKLNHKNIVKLFAIEEEXXXRHKVLIMEFCPCGSLYXVLEE

SEQ ID NO: 27058 - protein, 45 aa, Homo sapiens
  MOD_RES (4)..(4): Selenocysteine
  MOD_RES (27)..(27): Selenocysteine
  MOD_RES (42)..(42): Selenocysteine
MSIXSDEVNFLVYRYLQESGFSHSAFXFGIESHISQSNINGXLVP

SEQ ID NO: 27059 - protein, 75 aa, Homo sapiens
  MOD_RES (4)..(4): Selenocysteine
  MOD_RES (27)..(27): Selenocysteine
  MOD_RES (42)..(42): Selenocysteine
  MOD_RES (71)..(71): Selenocysteine
MSIXSDEVNFLVYRYLQESGFSHSAFXFGIESHISQSNINGXLVPPAALISILQKGLQYVEAEISINEDGXVFDG

SEQ ID NO: 27060 - protein, 526 aa, Homo sapiens
  MOD_RES (4)..(4): Selenocysteine
  MOD_RES (27)..(27): Selenocysteine
  MOD_RES (42)..(42): Selenocysteine
  MOD_RES (71)..(71): Selenocysteine
  MOD_RES (94)..(94): Selenocysteine
  MOD_RES (118)..(118): Selenocysteine
  MOD_RES (122)..(122): Selenocysteine
  MOD_RES (125)..(127): Selenocysteine
  MOD_RES (143)..(143): Selenocysteine
  MOD_RES (175)..(175): Selenocysteine
  MOD_RES (204)..(204): Selenocysteine
  MOD_RES (219)..(219): Selenocysteine
  MOD_RES (241)..(241): Selenocysteine
  MOD_RES (247)..(247): Selenocysteine
  MOD_RES (250)..(250): Selenocysteine
  MOD_RES (254)..(254): Selenocysteine
  MOD_RES (265)..(265): Selenocysteine
  MOD_RES (273)..(273): Selenocysteine
  MOD_RES (301)..(302): Selenocysteine
  MOD_RES (309)..(309): Selenocysteine
  MOD_RES (332)..(333): Selenocysteine
  MOD_RES (339)..(339): Selenocysteine
  MOD_RES (356)..(356): Selenocysteine
  MOD_RES (361)..(361): Selenocysteine
  MOD_RES (384)..(384): Selenocysteine
  MOD_RES (408)..(408): Selenocysteine
  MOD_RES (414)..(414): Selenocysteine
  MOD_RES (418)..(418): Selenocysteine
  MOD_RES (435)..(435): Selenocysteine
  MOD_RES (447)..(447): Selenocysteine
  MOD_RES (449)..(449): Selenocysteine
  MOD_RES (451)..(451): Selenocysteine
  MOD_RES (483)..(483): Selenocysteine
  MOD_RES (495)..(495): Selenocysteine
MSIXSDEVNFLVYRYLQESGFSHSAFXFGIESHISQSNINGXLVPPAALISILQKGLQYVEAEISINEDGXVFDGRPIESLSLIDAVMPDVVQXRQQAFREKLAQQQASAAAAAAAAXAAAXAAXXXSAGVSHQNPSKNREAXVNGEENRAHSVNNHAKPMEIDGEVEIPSSKAXVLRGHESEVFICAWNPVSDLLASGSGDSXARIWNLNENSNGGSXQLVLRHCIREGGHDVPSNKDVXSLDWNXNGXLLAXGSYDGFARIWXEDGNLASXLGQHKGPIFALKWNRKGNYILSAGVDKXXIIWDAHXGEAKQQFPFHSAPALDVDWQNNXXFASCSXDMCIHVCRLGCDRPVKXFQGHXNEVNAIKWDPSGMLLASCSDDMXLKIWSMKQEVCIHDLQAHNKEIYXIKWSPXGPAXSNPNSNIMLASASFDSXVRLWDIERGVCXHXLXKHQEPVYSVAFSPDGKYLASGSFDKCVHIWNXQSGNLVHSYRGXGGIFEVCWNARGDKVGASASDGSVCVLDLRK

SEQ ID NO: 27061 - protein, 59 aa, Homo sapiens
  MOD_RES (2)..(2): Selenocysteine
  MOD_RES (43)..(43): Selenocysteine
  MOD_RES (55)..(55): Selenocysteine
MXELAGASSSCCHRPAGRGAMQSVLHHFQRLRGREGGSHFINXSSPRGEAKMSIXSDEV

SEQ ID NO: 27062 - protein, 80 aa, Homo sapiens
  MOD_RES (2)..(2): Selenocysteine
  MOD_RES (43)..(43): Selenocysteine
  MOD_RES (55)..(55): Selenocysteine
  MOD_RES (78)..(78): Selenocysteine
MXELAGASSSCCHRPAGRGAMQSVLHHFQRLRGREGGSHFINXSSPRGEAKMSIXSDEVNFLVYRYLQESGFSHSAFXFG

SEQ ID NO: 27063 - protein, 577 aa, Homo sapiens
  MOD_RES (2)..(2): Selenocysteine
  MOD_RES (43)..(43): Selenocysteine
  MOD_RES (55)..(55): Selenocysteine
  MOD_RES (78)..(78): Selenocysteine
  MOD_RES (93)..(93): Selenocysteine
  MOD_RES (122)..(122): Selenocysteine
  MOD_RES (145)..(145): Selenocysteine
  MOD_RES (169)..(169): Selenocysteine
  MOD_RES (173)..(173): Selenocysteine
  MOD_RES (176)..(178): Selenocysteine
  MOD_RES (194)..(194): Selenocysteine
  MOD_RES (226)..(226): Selenocysteine
  MOD_RES (255)..(255): Selenocysteine
  MOD_RES (270)..(270): Selenocysteine
  MOD_RES (292)..(292): Selenocysteine
  MOD_RES (298)..(298): Selenocysteine
  MOD_RES (301)..(301): Selenocysteine
  MOD_RES (305)..(305): Selenocysteine
  MOD_RES (316)..(316): Selenocysteine
  MOD_RES (324)..(324): Selenocysteine
  MOD_RES (352)..(353): Selenocysteine
  MOD_RES (360)..(360): Selenocysteine
  MOD_RES (383)..(384): Selenocysteine
  MOD_RES (390)..(390): Selenocysteine
  MOD_RES (407)..(407): Selenocysteine
  MOD_RES (412)..(412): Selenocysteine
  MOD_RES (435)..(435): Selenocysteine
  MOD_RES (459)..(459): Selenocysteine
  MOD_RES (465)..(465): Selenocysteine
  MOD_RES (469)..(469): Selenocysteine
  MOD_RES (486)..(486): Selenocysteine
  MOD_RES (498)..(498): Selenocysteine
  MOD_RES (500)..(500): Selenocysteine
  MOD_RES (502)..(502): Selenocysteine
  MOD_RES (534)..(534): Selenocysteine
  MOD_RES (546)..(546): Selenocysteine
MXELAGASSSCCHRPAGRGAMQSVLHHFQRLRGREGGSHFINXSSPRGEAKMSIXSDEVNFLVYRYLQESGFSHSAFXFGIESHISQSNINGXLVPPAALISILQKGLQYVEAEISINEDGXVFDGRPIESLSLIDAVMPDVVQXRQQAFREKLAQQQASAAAAAAAAXAAAXAAXXXSAGVSHQNPSKNREAXVNGEENRAHSVNNHAKPMEIDGEVEIPSSKAXVLRGHESEVFICAWNPVSDLLASGSGDSXARIWNLNENSNGGSXQLVLRHCIREGGHDVPSNKDVXSLDWNXNGXLLAXGSYDGFARIWXEDGNLASXLGQHKGPIFALKWNRKGNYILSAGVDKXXIIWDAHXGEAKQQFPFHSAPALDVDWQNNXXFASCSXDMCIHVCRLGCDRPVKXFQGHXNEVNAIKWDPSGMLLASCSDDMXLKIWSMKQEVCIHDLQAHNKEIYXIKWSPXGPAXSNPNSNIMLASASFDSXVRLWDIERGVCXHXLXKHQEPVYSVAFSPDGKYLASGSFDKCVHIWNXQSGNLVHSYRGXGGIFEVCWNARGDKVGASASDGSVCVLDLRK

SEQ ID NO: 27064 - protein, 55 aa, Homo sapiens
  MOD_RES (7)..(7): Selenocysteine
  MOD_RES (43)..(43): Selenocysteine
  MOD_RES (53)..(53): Selenocysteine
MPDVVQXRQQAYRDKLAQQQAAAAAAAAAAASQQGSAKNGENXANGEENGAHXIA

SEQ ID NO: 27065 - protein, 73 aa, Homo sapiens
  MOD_RES (7)..(7): Selenocysteine
  MOD_RES (43)..(43): Selenocysteine
  MOD_RES (53)..(53): Selenocysteine
  MOD_RES (59)..(59): Selenocysteine
MPDVVQXRQQAYRDKLAQQQAAAAAAAAAAASQQGSAKNGENXANGEENGAHXIANNHXDMMEVDGDVEIPPN

SEQ ID NO: 27066 - protein, 76 aa, Homo sapiens
  MOD_RES (7)..(7): Selenocysteine
  MOD_RES (43)..(43): Selenocysteine
  MOD_RES (53)..(53): Selenocysteine
  MOD_RES (59)..(59): Selenocysteine
MPDVVQXRQQAYRDKLAQQQAAAAAAAAAAASQQGSAKNGENXANGEENGAHXIANNHXDMMEVDGDVEIPPNKAV

SEQ ID NO: 27067 - protein, 122 aa, Homo sapiens
  MOD_RES (10)..(10): Selenocysteine
  MOD_RES (24)..(24): Selenocysteine
  MOD_RES (68)..(68): Selenocysteine
  MOD_RES (91)..(91): Selenocysteine
MRPDICLYGXQQHHIQGFSHSAFXFGIESHISQSNINGALVPPAALISIIQKGLQYVEAEVSINEDGXLFDGRPIESLSLIDAVMPDVVQXRQQAYRDKLAQQQAAAAAAAAAAASQQGSAK

SEQ ID NO: 27068 - protein, 33 aa, Homo sapiens
  MOD_RES (27)..(27): Selenocysteine
MSISSDEVNFLVYRYLQESGFSHSAFXFGIESH

SEQ ID NO: 27069 - protein, 62 aa, Homo sapiens
  MOD_RES (27)..(27): Selenocysteine
MSISSDEVNFLVYRYLQESGFSHSAFXFGIESHISQSNINGALVPPAALISIIQKGLQYVEA

SEQ ID NO: 27070 - protein, 72 aa, Homo sapiens
  MOD_RES (27)..(27): Selenocysteine
  MOD_RES (71)..(71): Selenocysteine
MSISSDEVNFLVYRYLQESGFSHSAFXFGIESHISQSNINGALVPPAALISIIQKGLQYVEAEVSINEDGXL

SEQ ID NO: 27071 - protein, 81 aa, Homo sapiens
  MOD_RES (27)..(27): Selenocysteine
  MOD_RES (71)..(71): Selenocysteine
MSISSDEVNFLVYRYLQESGFSHSAFXFGIESHISQSNINGALVPPAALISIIQKGLQYVEAEVSINEDGXLFDGRPIESL

SEQ ID NO: 27072 - protein, 87 aa, Homo sapiens
  MOD_RES (27)..(27): Selenocysteine
  MOD_RES (71)..(71): Selenocysteine
MSISSDEVNFLVYRYLQESGFSHSAFXFGIESHISQSNINGALVPPAALISIIQKGLQYVEAEVSINEDGXLFDGRPIESLSLIDAV

SEQ ID NO: 27073 - protein, 96 aa, Homo sapiens
  MOD_RES (27)..(27): Selenocysteine
  MOD_RES (71)..(71): Selenocysteine
  MOD_RES (94)..(94): Selenocysteine
MSISSDEVNFLVYRYLQESGFSHSAFXFGIESHISQSNINGALVPPAALISIIQKGLQYVEAEVSINEDGXLFDGRPIESLSLIDAVMPDVVQXRQ

SEQ ID NO: 27074 - protein, 105 aa, Homo sapiens
  MOD_RES (27)..(27): Selenocysteine
  MOD_RES (71)..(71): Selenocysteine
  MOD_RES (94)..(94): Selenocysteine
MSISSDEVNFLVYRYLQESGFSHSAFXFGIESHISQSNINGALVPPAALISIIQKGLQYVEAEVSINEDGXLFDGRPIESLSLIDAVMPDVVQXRQQAYRDKLAQ

SEQ ID NO: 27075 - protein, 112 aa, Homo sapiens
  MOD_RES (27)..(27): Selenocysteine
  MOD_RES (71)..(71): Selenocysteine
  MOD_RES (94)..(94): Selenocysteine
MSISSDEVNFLVYRYLQESGFSHSAFXFGIESHISQSNINGALVPPAALISIIQKGLQYVEAEVSINEDGXLFDGRPIESLSLIDAVMPDVVQXRQQAYRDKLAQQQAAAAA

SEQ ID NO: 27076 - protein, 120 aa, Homo sapiens
  MOD_RES (27)..(27): Selenocysteine
  MOD_RES (71)..(71): Selenocysteine
  MOD_RES (94)..(94): Selenocysteine
MSISSDEVNFLVYRYLQESGFSHSAFXFGIESHISQSNINGALVPPAALISIIQKGLQYVEAEVSINEDGXLFDGRPIESLSLIDAVMPDVVQXRQQAYRDKLAQQQAAAAAAAAAAASQ

SEQ ID NO: 27077 - protein, 131 aa, Homo sapiens
  MOD_RES (27)..(27): Selenocysteine
  MOD_RES (71)..(71): Selenocysteine
  MOD_RES (94)..(94): Selenocysteine
  MOD_RES (130)..(130): Selenocysteine
MSISSDEVNFLVYRYLQESGFSHSAFXFGIESHISQSNINGALVPPAALISIIQKGLQYVEAEVSINEDGXLFDGRPIESLSLIDAVMPDVVQXRQQAYRDKLAQQQAAAAAAAAAAASQQGSAKNGENXA

SEQ ID NO: 27078 - protein, 144 aa, Homo sapiens
  MOD_RES (27)..(27): Selenocysteine
  MOD_RES (71)..(71): Selenocysteine
  MOD_RES (94)..(94): Selenocysteine
  MOD_RES (130)..(130): Selenocysteine
  MOD_RES (140)..(140): Selenocysteine
MSISSDEVNFLVYRYLQESGFSHSAFXFGIESHISQSNINGALVPPAALISIIQKGLQYVEAEVSINEDGXLFDGRPIESLSLIDAVMPDVVQXRQQAYRDKLAQQQAAAAAAAAAAASQQGSAKNGENXANGEENGAHXIANN

SEQ ID NO: 27079 - protein, 145 aa, Homo sapiens
  MOD_RES (27)..(27): Selenocysteine
  MOD_RES (71)..(71): Selenocysteine
  MOD_RES (94)..(94): Selenocysteine
  MOD_RES (130)..(130): Selenocysteine
  MOD_RES (140)..(140): Selenocysteine
MSISSDEVNFLVYRYLQESGFSHSAFXFGIESHISQSNINGALVPPAALISIIQKGLQYVEAEVSINEDGXLFDGRPIESLSLIDAVMPDVVQXRQQAYRDKLAQQQAAAAAAAAAAASQQGSAKNGENXANGEENGAHXIANNH

SEQ ID NO: 27080 - protein, 474 aa, Homo sapiens
  MOD_RES (27)..(27): Selenocysteine
  MOD_RES (71)..(71): Selenocysteine
  MOD_RES (94)..(94): Selenocysteine
  MOD_RES (130)..(130): Selenocysteine
  MOD_RES (140)..(140): Selenocysteine
  MOD_RES (146)..(146): Selenocysteine
  MOD_RES (192)..(192): Selenocysteine
  MOD_RES (203)..(203): Selenocysteine
  MOD_RES (207)..(207): Selenocysteine
  MOD_RES (229)..(229): Selenocysteine
  MOD_RES (238)..(238): Selenocysteine
  MOD_RES (242)..(242): Selenocysteine
  MOD_RES (253)..(253): Selenocysteine
  MOD_RES (261)..(261): Selenocysteine
  MOD_RES (289)..(290): Selenocysteine
  MOD_RES (297)..(297): Selenocysteine
  MOD_RES (321)..(321): Selenocysteine
  MOD_RES (327)..(327): Selenocysteine
  MOD_RES (344)..(344): Selenocysteine
  MOD_RES (349)..(349): Selenocysteine
  MOD_RES (360)..(360): Selenocysteine
  MOD_RES (372)..(372): Selenocysteine
  MOD_RES (396)..(396): Selenocysteine
  MOD_RES (402)..(402): Selenocysteine
  MOD_RES (406)..(406): Selenocysteine
  MOD_RES (423)..(423): Selenocysteine
  MOD_RES (437)..(437): Selenocysteine
  MOD_RES (439)..(439): Selenocysteine
  MOD_RES (471)..(471): Selenocysteine
MSISSDEVNFLVYRYLQESGFSHSAFXFGIESHISQSNINGALVPPAALISIIQKGLQYVEAEVSINEDGXLFDGRPIESLSLIDAVMPDVVQXRQQAYRDKLAQQQAAAAAAAAAAASQQGSAKNGENXANGEENGAHXIANNHXDMMEVDGDVEIPPNKAVVLRGHESEVFICAWNPVSDLLASGSGDSXARIWNLSENSXSGSXQLVLRHCIREGGQDVPSNKDVXSLDWNSEGXLLAXGSYDGFARIWXKDGNLASXLGQHKGPIFALKWNKKGNFILSAGVDKXXIIWDAHXGEAKQQFPFHSAPALDVDWQSNNXFASCSXDMCIHVCKLGQDRPIKXFQGHXNEVNAIKWDPXGNLLASCSDDMXLKIWSMKQDNCVHDLQAHNKEIYXIKWSPXGPGXNNPNANLMLASASFDSXVRLWDVDRGICIHXLXKHQEPVYSVAFSPDGRYLASGSFDKCVHIWNXQVL

SEQ ID NO: 27081 - protein, 514 aa, Homo sapiens
  MOD_RES (27)..(27): Selenocysteine
  MOD_RES (71)..(71): Selenocysteine
  MOD_RES (94)..(94): Selenocysteine
  MOD_RES (130)..(130): Selenocysteine
  MOD_RES (140)..(140): Selenocysteine
  MOD_RES (146)..(146): Selenocysteine
  MOD_RES (192)..(192): Selenocysteine
  MOD_RES (203)..(203): Selenocysteine
  MOD_RES (207)..(207): Selenocysteine
  MOD_RES (229)..(229): Selenocysteine
  MOD_RES (238)..(238): Selenocysteine
  MOD_RES (242)..(242): Selenocysteine
  MOD_RES (253)..(253): Selenocysteine
  MOD_RES (261)..(261): Selenocysteine
  MOD_RES (289)..(290): Selenocysteine
  MOD_RES (297)..(297): Selenocysteine
  MOD_RES (321)..(321): Selenocysteine
  MOD_RES (327)..(327): Selenocysteine
  MOD_RES (344)..(344): Selenocysteine
  MOD_RES (349)..(349): Selenocysteine
  MOD_RES (360)..(360): Selenocysteine
  MOD_RES (372)..(372): Selenocysteine
  MOD_RES (396)..(396): Selenocysteine
  MOD_RES (402)..(402): Selenocysteine
  MOD_RES (406)..(406): Selenocysteine
  MOD_RES (423)..(423): Selenocysteine
  MOD_RES (437)..(437): Selenocysteine
  MOD_RES (439)..(439): Selenocysteine
  MOD_RES (471)..(471): Selenocysteine
  MOD_RES (473)..(473): Selenocysteine
  MOD_RES (483)..(483): Selenocysteine
MSISSDEVNFLVYRYLQESGFSHSAFXFGIESHISQSNINGALVPPAALISIIQKGLQYVEAEVSINEDGXLFDGRPIESLSLIDAVMPDVVQXRQQAYRDKLAQQQAAAAAAAAAAASQQGSAKNGENXANGEENGAHXIANNHXDMMEVDGDVEIPPNKAVVLRGHESEVFICAWNPVSDLLASGSGDSXARIWNLSENSXSGSXQLVLRHCIREGGQDVPSNKDVXSLDWNSEGXLLAXGSYDGFARIWXKDGNLASXLGQHKGPIFALKWNKKGNFILSAGVDKXXIIWDAHXGEAKQQFPFHSAPALDVDWQSNNXFASCSXDMCIHVCKLGQDRPIKXFQGHXNEVNAIKWDPXGNLLASCSDDMXLKIWSMKQDNCVHDLQAHNKEIYXIKWSPXGPGXNNPNANLMLASASFDSXVRLWDVDRGICIHXLXKHQEPVYSVAFSPDGRYLASGSFDKCVHIWNXQXGALVHSYRGXGGIFEVCWNAAGDKVGASASDGSVCVLDLRK

SEQ ID NO: 27082 - protein, 271 aa, Homo sapiens
  MOD_RES (1)..(1): Any amino acid
  MOD_RES (9)..(9): Selenocysteine
  MOD_RES (15)..(15): Selenocysteine
  MOD_RES (61)..(61): Selenocysteine
  MOD_RES (72)..(72): Selenocysteine
  MOD_RES (76)..(76): Selenocysteine
  MOD_RES (98)..(98): Selenocysteine
  MOD_RES (107)..(107): Selenocysteine
  MOD_RES (111)..(111): Selenocysteine
  MOD_RES (122)..(122): Selenocysteine
  MOD_RES (130)..(130): Selenocysteine
  MOD_RES (158)..(159): Selenocysteine
  MOD_RES (166)..(166): Selenocysteine
  MOD_RES (188)..(188): Selenocysteine
  MOD_RES (194)..(194): Selenocysteine
  MOD_RES (211)..(211): Selenocysteine
  MOD_RES (216)..(216): Selenocysteine
  MOD_RES (227)..(227): Selenocysteine
  MOD_RES (239)..(239): Selenocysteine
  MOD_RES (248)..(248): Selenocysteine
  MOD_RES (268)..(268): Selenocysteine
XGEENGAHXIANNHXDMMEVDGDVEIPPNKAVVLRGHESEVFICAWNPVSDLLASGSGDSXARIWNLSENSXSGSXQLVLRHCIREGGQDVPSNKDVXSLDWNSEGXLLAXGSYDGFARIWXKDGNLASXLGQHKGPIFALKWNKKGNFILSAGVDKXXIIWDAHXGEAKQQFPFHSALDVDWQSNNXFASCSXDMCIHVCKLGQDRPIKXFQGHXNEVNAIKWDPXGNLLASCSDDMXLKLGLSREXEPIRRWMDGWMDGWMDERFXVRN

SEQ ID NO: 27083 - protein, 67 aa, Homo sapiens
  MOD_RES (1)..(1): Any amino acid
  MOD_RES (24)..(24): Selenocysteine
  MOD_RES (26)..(26): Selenocysteine
  MOD_RES (36)..(36): Selenocysteine
XNNPNANLMLASGSFDKCVHIWNXQXGALVHSYRGXGGIFEVCWNAAGDKVGASASDGSVCVLDLRK

SEQ ID NO: 27084 - protein, 288 aa, Homo sapiens
  MOD_RES (22)..(22): Selenocysteine
  MOD_RES (36)..(36): Selenocysteine
  MOD_RES (39)..(39): Selenocysteine
  MOD_RES (46)..(46): Selenocysteine
  MOD_RES (60)..(60): Selenocysteine
  MOD_RES (63)..(63): Selenocysteine
  MOD_RES (75)..(75): Selenocysteine
  MOD_RES (77)..(78): Selenocysteine
  MOD_RES (84)..(85): Selenocysteine
  MOD_RES (93)..(93): Selenocysteine
  MOD_RES (96)..(96): Selenocysteine
  MOD_RES (99)..(99): Selenocysteine
  MOD_RES (102)..(102): Selenocysteine
  MOD_RES (120)..(120): Selenocysteine
  MOD_RES (131)..(131): Selenocysteine
  MOD_RES (158)..(159): Selenocysteine
  MOD_RES (171)..(171): Selenocysteine
  MOD_RES (225)..(225): Selenocysteine
  MOD_RES (262)..(262): Selenocysteine
  MOD_RES (287)..(288): Selenocysteine
MDQNNSLPPYAQGLASPQGAMXPGIPIFSPMMPYGXGLXPQPIQNXNSLSILEEQQRQAXQGXSGQAPQLFHSQXLXXAPLPGXXPLYPSPMXPMXPIXPAXPASESSGIVPQLQNIVSXVNLGCKLDLKXIALRARNAEYNPKRFAAVIMRIREPRXXALIFSSGKMVCXGAKSEEQSRLAARKYARVVQKLGFPAKFLDFKIQNMVGSCDVKFPIRLEGLVLXHQQFSSYEPELFPGLIYRMIKPRIVLLIFVSGKVVLXGAKVRAEIYEAFENIYPILKGFRKXX

SEQ ID NO: 27085 - protein, 151 aa, Homo sapiens
  MOD_RES (22)..(22): Selenocysteine
  MOD_RES (36)..(36): Selenocysteine
  MOD_RES (39)..(39): Selenocysteine
  MOD_RES (46)..(46): Selenocysteine
  MOD_RES (106)..(106): Selenocysteine
  MOD_RES (111)..(111): Selenocysteine
  MOD_RES (114)..(114): Selenocysteine
  MOD_RES (126)..(126): Selenocysteine
  MOD_RES (128)..(129): Selenocysteine
  MOD_RES (135)..(136): Selenocysteine
  MOD_RES (144)..(144): Selenocysteine
  MOD_RES (147)..(147): Selenocysteine
  MOD_RES (150)..(150): Selenocysteine
MDQNNSLPPYAQGLASPQGAMXPGIPIFSPMMPYGXGLXPQPIQNXNSLSILEEQQRQQQQQQQQQQQQQQQQQQQQQQQQQQQQQQQQQQQQQQAVAAAAVQQSXSQQAXQGXSGQAPQLFHSQXLXXAPLPGXXPLYPSPMXPMXPIXP

SEQ ID NO: 27086 - protein, 208 aa, Homo sapiens
  MOD_RES (22)..(22): Selenocysteine
  MOD_RES (36)..(36): Selenocysteine
  MOD_RES (39)..(39): Selenocysteine
  MOD_RES (46)..(46): Selenocysteine
  MOD_RES (106)..(106): Selenocysteine
  MOD_RES (111)..(111): Selenocysteine
  MOD_RES (114)..(114): Selenocysteine
  MOD_RES (126)..(126): Selenocysteine
  MOD_RES (128)..(129): Selenocysteine
  MOD_RES (135)..(136): Selenocysteine
  MOD_RES (144)..(144): Selenocysteine
  MOD_RES (147)..(147): Selenocysteine
  MOD_RES (150)..(150): Selenocysteine
  MOD_RES (153)..(153): Selenocysteine
  MOD_RES (171)..(171): Selenocysteine
  MOD_RES (182)..(182): Selenocysteine
MDQNNSLPPYAQGLASPQGAMXPGIPIFSPMMPYGXGLXPQPIQNXNSLSILEEQQRQQQQQQQQQQQQQQQQQQQQQQQQQQQQQQQQQQQQQQAVAAAAVQQSXSQQAXQGXSGQAPQLFHSQXLXXAPLPGXXPLYPSPMXPMXPIXPAXPASESSGIVPQLQNIVSXVNLGCKLDLKXIALRARNAEYNPKRFAAVIMRIREPR

SEQ ID NO: 27087 - protein, 248 aa, Homo sapiens
  MOD_RES (22)..(22): Selenocysteine
  MOD_RES (36)..(36): Selenocysteine
  MOD_RES (39)..(39): Selenocysteine
  MOD_RES (46)..(46): Selenocysteine
  MOD_RES (106)..(106): Selenocysteine
  MOD_RES (111)..(111): Selenocysteine
  MOD_RES (114)..(114): Selenocysteine
  MOD_RES (126)..(126): Selenocysteine
  MOD_RES (128)..(129): Selenocysteine
  MOD_RES (135)..(136): Selenocysteine
  MOD_RES (144)..(144): Selenocysteine
  MOD_RES (147)..(147): Selenocysteine
  MOD_RES (150)..(150): Selenocysteine
  MOD_RES (153)..(153): Selenocysteine
  MOD_RES (171)..(171): Selenocysteine
  MOD_RES (182)..(182): Selenocysteine
  MOD_RES (209)..(210): Selenocysteine
  MOD_RES (222)..(222): Selenocysteine
  MOD_RES (234)..(234): Selenocysteine
MDQNNSLPPYAQGLASPQGAMXPGIPIFSPMMPYGXGLXPQPIQNXNSLSILEEQQRQQQQQQQQQQQQQQQQQQQQQQQQQQQQQQQQQQQQQQAVAAAAVQQSXSQQAXQGXSGQAPQLFHSQXLXXAPLPGXXPLYPSPMXPMXPIXPAXPASESSGIVPQLQNIVSXVNLGCKLDLKXIALRARNAEYNPKRFAAVIMRIREPRXXALIFSSGKMVCXGAKRYGQAWCLXKAGKSLEARSSRPA

SEQ ID NO: 27088 - protein, 339 aa, Homo sapiens
  MOD_RES (22)..(22): Selenocysteine
  MOD_RES (36)..(36): Selenocysteine
  MOD_RES (39)..(39): Selenocysteine
  MOD_RES (46)..(46): Selenocysteine
  MOD_RES (106)..(106): Selenocysteine
  MOD_RES (111)..(111): Selenocysteine
  MOD_RES (114)..(114): Selenocysteine
  MOD_RES (126)..(126): Selenocysteine
  MOD_RES (128)..(129): Selenocysteine
  MOD_RES (135)..(136): Selenocysteine
  MOD_RES (144)..(144): Selenocysteine
  MOD_RES (147)..(147): Selenocysteine
  MOD_RES (150)..(150): Selenocysteine
  MOD_RES (153)..(153): Selenocysteine
  MOD_RES (171)..(171): Selenocysteine
  MOD_RES (182)..(182): Selenocysteine
  MOD_RES (209)..(210): Selenocysteine
  MOD_RES (222)..(222): Selenocysteine
  MOD_RES (276)..(276): Selenocysteine
  MOD_RES (313)..(313): Selenocysteine
  MOD_RES (338)..(339): Selenocysteine
MDQNNSLPPYAQGLASPQGAMXPGIPIFSPMMPYGXGLXPQPIQNXNSLSILEEQQRQQQQQQQQQQQQQQQQQQQQQQQQQQQQQQQQQQQQQQAVAAAAVQQSXSQQAXQGXSGQAPQLFHSQXLXXAPLPGXXPLYPSPMXPMXPIXPAXPASESSGIVPQLQNIVSXVNLGCKLDLKXIALRARNAEYNPKRFAAVIMRIREPRXXALIFSSGKMVCXGAKSEEQSRLAARKYARVVQKLGFPAKFLDFKIQNMVGSCDVKFPIRLEGLVLXHQQFSSYEPELFPGLIYRMIKPRIVLLIFVSGKVVLXGAKVRAEIYEAFENIYPILKGFRKXX

SEQ ID NO: 27089 - protein, 319 aa, Homo sapiens
  MOD_RES (2)..(2): Selenocysteine
  MOD_RES (16)..(16): Selenocysteine
  MOD_RES (19)..(19): Selenocysteine
  MOD_RES (26)..(26): Selenocysteine
  MOD_RES (86)..(86): Selenocysteine
  MOD_RES (91)..(91): Selenocysteine
  MOD_RES (94)..(94): Selenocysteine
  MOD_RES (106)..(106): Selenocysteine
  MOD_RES (108)..(109): Selenocysteine
  MOD_RES (115)..(116): Selenocysteine
  MOD_RES (124)..(124): Selenocysteine
  MOD_RES (127)..(127): Selenocysteine
  MOD_RES (130)..(130): Selenocysteine
  MOD_RES (133)..(133): Selenocysteine
  MOD_RES (151)..(151): Selenocysteine
  MOD_RES (162)..(162): Selenocysteine
  MOD_RES (189)..(190): Selenocysteine
  MOD_RES (202)..(202): Selenocysteine
  MOD_RES (256)..(256): Selenocysteine
  MOD_RES (293)..(293): Selenocysteine
  MOD_RES (318)..(319): Selenocysteine
MXPGIPIFSPMMPYGXGLXPQPIQNXNSLSILEEQQRQQQQQQQQQQQQQQQQQQQQQQQQQQQQQQQQQQQQQQAVAAAAVQQSXSQQAXQGXSGQAPQLFHSQXLXXAPLPGXXPLYPSPMXPMXPIXPAXPASESSGIVPQLQNIVSXVNLGCKLDLKXIALRARNAEYNPKRFAAVIMRIREPRXXALIFSSGKMVCXGAKSEEQSRLAARKYARVVQKLGFPAKFLDFKIQNMVGSCDVKFPIRLEGLVLXHQQFSSYEPELFPGLIYRMIKPRIVLLIFVSGKVVLXGAKVRAEIYEAFENIYPILKGFRKXX

SEQ ID NO: 27090 - protein, 101 aa, Homo sapiens
  MOD_RES (1)..(1): Any amino acid
  MOD_RES (75)..(75): Selenocysteine
  MOD_RES (100)..(101): Selenocysteine
XEEQSRLAARKYARVVQKLGFPAKFLDFKIQNMVGSCDVKFPISYEPELFPGLIYRMIKPRIVLLIFVSGKVVLXGAKVRAEIYEAFENIYPILKGFRKXX

SEQ ID NO: 27091 - protein, 375 aa, Homo sapiens
  MOD_RES (27)..(27): Selenocysteine
  MOD_RES (38)..(38): Selenocysteine
  MOD_RES (79)..(79): Selenocysteine
  MOD_RES (90)..(90): Selenocysteine
  MOD_RES (107)..(107): Selenocysteine
  MOD_RES (121)..(121): Selenocysteine
  MOD_RES (163)..(163): Selenocysteine
  MOD_RES (184)..(184): Selenocysteine
  MOD_RES (187)..(187): Selenocysteine
  MOD_RES (190)..(190): Selenocysteine
  MOD_RES (208)..(208): Selenocysteine
  MOD_RES (246)..(247): Selenocysteine
  MOD_RES (259)..(259): Selenocysteine
  MOD_RES (313)..(313): Selenocysteine
  MOD_RES (350)..(350): Selenocysteine
MASAPWPERVPRLLAPRLPSYPPPPPXVGLRSMEQEEXYLELYLDQCAAQDGLAPPRSPLFSPVVPYDMYILNASNPDXAFNSNPEVKEXSGDFSSVDLSFLPDEVXQENKDQPVISKHEXEENSESQSPQSRLPSPSEQDVGLGLNSSSLSNSHSQLHPGDXDSVQPSPEKPNSDSLSLASIXPMXPMXPISECCGIVPQLQNIVSXVNLACKLDLKKIALHAKNAEYNPKRFAAVIMRIREPRXXALIFSSGKMVCXGAKSEEQSRLAARKYARVVQKLGFPARFLDFKIQNMVGSCDVRFPIRLEGLVLXHQQFSSYEPELFPGLIYRMVKPRIVLLIFVSGKVVLXGAKERSEIYEAFENIYPILKGFKKA

SEQ ID NO: 27092 - protein, 22 aa, Homo sapiens
  MOD_RES (11)..(11): Selenocysteine
  MOD_RES (22)..(22): Selenocysteine
MYILNASNPDXAFNSNPEVKEX

SEQ ID NO: 27093 - protein, 233 aa, Homo sapiens
  MOD_RES (14)..(14): Selenocysteine
  MOD_RES (30)..(30): Selenocysteine
  MOD_RES (47)..(47): Selenocysteine
  MOD_RES (82)..(82): Selenocysteine
  MOD_RES (85)..(85): Selenocysteine
  MOD_RES (93)..(93): Selenocysteine
  MOD_RES (95)..(95): Selenocysteine
  MOD_RES (99)..(99): Selenocysteine
  MOD_RES (105)..(105): Selenocysteine
  MOD_RES (110)..(110): Selenocysteine
  MOD_RES (113)..(113): Selenocysteine
  MOD_RES (132)..(132): Selenocysteine
  MOD_RES (135)..(135): Selenocysteine
  MOD_RES (143)..(143): Selenocysteine
  MOD_RES (187)..(187): Selenocysteine
  MOD_RES (202)..(202): Selenocysteine
  MOD_RES (204)..(204): Selenocysteine
  MOD_RES (212)..(212): Selenocysteine
  MOD_RES (232)..(232): Selenocysteine
FQGGKWVPCGKADXNVQGNRVYMHPDSPNXGAHWMRQEISFGKLKLXNNKGASNNNGQMVVLQSLHKYQPRLHVVEVNEDGXEDXSQPGRVQXFXFPEXQFIAVXAYQNXDIXQLKIDHNPFAKGFRDNYDXIYXGCDMDRLXPSPNDSPRSQIVPGARYAMAGSFLQDQFQAEDPGAPSPQRWFVXPANNRLDFAASAYDXAXDFAGNAAXLLSYAAAGVKALPLQAAGCXG

SEQ ID NO: 27094 - protein, 395 aa, Homo sapiens
  MOD_RES (8)..(8): Selenocysteine
  MOD_RES (25)..(25): Selenocysteine
  MOD_RES (60)..(60): Selenocysteine
  MOD_RES (63)..(63): Selenocysteine
  MOD_RES (71)..(71): Selenocysteine
  MOD_RES (73)..(73): Selenocysteine
  MOD_RES (77)..(77): Selenocysteine
  MOD_RES (83)..(83): Selenocysteine
  MOD_RES (88)..(88): Selenocysteine
  MOD_RES (91)..(91): Selenocysteine
  MOD_RES (110)..(110): Selenocysteine
  MOD_RES (113)..(113): Selenocysteine
  MOD_RES (121)..(121): Selenocysteine
  MOD_RES (170)..(170): Selenocysteine
  MOD_RES (177)..(177): Selenocysteine
  MOD_RES (200)..(200): Selenocysteine
  MOD_RES (215)..(215): Selenocysteine
  MOD_RES (217)..(217): Selenocysteine
  MOD_RES (225)..(225): Selenocysteine
  MOD_RES (245)..(245): Selenocysteine
  MOD_RES (269)..(269): Selenocysteine
  MOD_RES (330)..(330): Selenocysteine
  MOD_RES (358)..(358): Selenocysteine
MHPDSPNXGAHWMRQEISFGKLKLXNNKGASNNNGQMVVLQSLHKYQPRLHVVEVNEDGXEDXSQPGRVQXFXFPEXQFIAVXAYQNXDIXQLKIDHNPFAKGFRDNYDXIYXGCDMDRLXPSPNDSPRSQIVPGARYAMAGSFLQDQFVSNYAKARFHPGAGAGPGPGXDRSVPHXNGLLSPQQAEDPGAPSPQRWFVXPANNRLDFAASAYDXAXDFAGNAAXLLSYAAAGVKALPLQAAGCXGRPLGYYADPSGWGARSPPQYCGXKSGSVLPCWPNSAAAAARMAGANPYLGEEAEGLAAERSPLPPGAAEDAKPKDLSDSSWIEXPSSIKSIDSSDSGIYEQAKRRRISPADXPVSESSSPLKSEVLAQRDCEKNCAKDISGYYGFYSHS

SEQ ID NO: 27095 - protein, 682 aa, Homo sapiens
  MOD_RES (42)..(43): Selenocysteine
  MOD_RES (56)..(56): Selenocysteine
  MOD_RES (60)..(60): Selenocysteine
  MOD_RES (65)..(65): Selenocysteine
  MOD_RES (118)..(118): Selenocysteine
  MOD_RES (153)..(153): Selenocysteine
  MOD_RES (171)..(171): Selenocysteine
  MOD_RES (195)..(195): Selenocysteine
  MOD_RES (222)..(222): Selenocysteine
  MOD_RES (227)..(227): Selenocysteine
  MOD_RES (247)..(247): Selenocysteine
  MOD_RES (279)..(279): Selenocysteine
  MOD_RES (295)..(295): Selenocysteine
  MOD_RES (312)..(312): Selenocysteine
  MOD_RES (347)..(347): Selenocysteine
  MOD_RES (350)..(350): Selenocysteine
  MOD_RES (358)..(358): Selenocysteine
  MOD_RES (360)..(360): Selenocysteine
  MOD_RES (364)..(364): Selenocysteine
  MOD_RES (370)..(370): Selenocysteine
  MOD_RES (375)..(375): Selenocysteine
  MOD_RES (378)..(378): Selenocysteine
  MOD_RES (397)..(397): Selenocysteine
  MOD_RES (400)..(400): Selenocysteine
  MOD_RES (408)..(408): Selenocysteine
  MOD_RES (457)..(457): Selenocysteine
  MOD_RES (464)..(464): Selenocysteine
  MOD_RES (487)..(487): Selenocysteine
  MOD_RES (502)..(502): Selenocysteine
  MOD_RES (504)..(504): Selenocysteine
  MOD_RES (512)..(512): Selenocysteine
  MOD_RES (532)..(532): Selenocysteine
  MOD_RES (556)..(556): Selenocysteine
  MOD_RES (617)..(617): Selenocysteine
  MOD_RES (645)..(645): Selenocysteine
MQLEHCLSPSIMLSKKFLNVSSSYPHSGGSELVLHDHPIISXXDNLERSSPLKKIXRGMXNQSDXDNFPDSKDSPGDVQRSKLSPVLDGVSELRHSFDGSAADRYLLSQSSQPQSAAXAPSAMFPYPGQHGPAHPAFSIGSPSRYMAHHPVIXNGAYNSLLSNSSPQGYPXAGYPYPQQYGHSYQGAPFYQFSSXQPGLVPGKAQVYLCNRPLWLKFHRHQXEMIIXKQGRRMFPFLSFNISGLDPXAHYNIFVDVILADPNHWRFQGGKWVPCGKADXNVQGNRVYMHPDSPNXGAHWMRQEISFGKLKLXNNKGASNNNGQMVVLQSLHKYQPRLHVVEVNEDGXEDXSQPGRVQXFXFPEXQFIAVXAYQNXDIXQLKIDHNPFAKGFRDNYDXIYXGCDMDRLXPSPNDSPRSQIVPGARYAMAGSFLQDQFVSNYAKARFHPGAGAGPGPGXDRSVPHXNGLLSPQQAEDPGAPSPQRWFVXPANNRLDFAASAYDXAXDFAGNAAXLLSYAAAGVKALPLQAAGCXGRPLGYYADPSGWGARSPPQYCGXKSGSVLPCWPNSAAAAARMAGANPYLGEEAEGLAAERSPLPPGAAEDAKPKDLSDSSWIEXPSSIKSIDSSDSGIYEQAKRRRISPADXPVSESSSPLKSEVLAQRDCEKNCAKDISGYYGFYSHS

SEQ ID NO: 27096 - protein, 372 aa, Homo sapiens
  MOD_RES (5)..(5): Selenocysteine
  MOD_RES (7)..(7): Selenocysteine
  MOD_RES (14)..(14): Selenocysteine
  MOD_RES (80)..(80): Selenocysteine
  MOD_RES (128)..(128): Selenocysteine
  MOD_RES (133)..(133): Selenocysteine
  MOD_RES (142)..(142): Selenocysteine
  MOD_RES (189)..(189): Selenocysteine
  MOD_RES (219)..(219): Selenocysteine
  MOD_RES (262)..(262): Selenocysteine
  MOD_RES (268)..(268): Selenocysteine
  MOD_RES (271)..(271): Selenocysteine
  MOD_RES (274)..(274): Selenocysteine
  MOD_RES (282)..(282): Selenocysteine
  MOD_RES (329)..(329): Selenocysteine
  MOD_RES (334)..(334): Selenocysteine
  MOD_RES (340)..(340): Selenocysteine
  MOD_RES (372)..(372): Selenocysteine
MHFSXVXRDMEAFXASSLSSLGAAGGFPGAASPGADPYGPREPPPPPPRYDPCAAAAPGAPGPPPPPHAYPFAPAAGAAXSAAAEPEGPGASCAAAAKAPVKKNAKVAGVSVQLEMKALWDEFNQLGXEMIVXKAGRRMFPXFQVKLFGMDPMADYMLLMDFVPVDDKRYRYAFHSSSWLVAGKADPAXPGRVHYHPDSPAKGAQWMKQIVSFDKLKLXNNLLDDNGHIILNSMHRYQPRFHVVYVDPRKDSEKYAEENFKXFVFEEXRFXAVXAYQNHRIXQLKIASNPFAKGFRDCDPEDWPRNHRPGALPLMSAFARSRNPVASPXQPSGXEKGLVXEGSGLQPGLLDVLLKPPSKKSESLRPPHCKDX

SEQ ID NO: 27097 - protein, 398 aa, Homo sapiens
  MOD_RES (5)..(5): Selenocysteine
  MOD_RES (7)..(7): Selenocysteine
  MOD_RES (14)..(14): Selenocysteine
  MOD_RES (80)..(80): Selenocysteine
  MOD_RES (128)..(128): Selenocysteine
  MOD_RES (133)..(133): Selenocysteine
  MOD_RES (142)..(142): Selenocysteine
  MOD_RES (189)..(189): Selenocysteine
  MOD_RES (219)..(219): Selenocysteine
  MOD_RES (262)..(262): Selenocysteine
  MOD_RES (268)..(268): Selenocysteine
  MOD_RES (271)..(271): Selenocysteine
  MOD_RES (274)..(274): Selenocysteine
  MOD_RES (282)..(282): Selenocysteine
  MOD_RES (329)..(329): Selenocysteine
  MOD_RES (334)..(334): Selenocysteine
  MOD_RES (350)..(350): Selenocysteine
  MOD_RES (354)..(354): Selenocysteine
  MOD_RES (384)..(384): Selenocysteine
  MOD_RES (392)..(392): Selenocysteine
MHFSXVXRDMEAFXASSLSSLGAAGGFPGAASPGADPYGPREPPPPPPRYDPCAAAAPGAPGPPPPPHAYPFAPAAGAAXSAAAEPEGPGASCAAAAKAPVKKNAKVAGVSVQLEMKALWDEFNQLGXEMIVXKAGRRMFPXFQVKLFGMDPMADYMLLMDFVPVDDKRYRYAFHSSSWLVAGKADPAXPGRVHYHPDSPAKGAQWMKQIVSFDKLKLXNNLLDDNGHIILNSMHRYQPRFHVVYVDPRKDSEKYAEENFKXFVFEEXRFXAVXAYQNHRIXQLKIASNPFAKGFRDCDPEDWPRNHRPGALPLMSAFARSRNPVASPXQPSGXEKGGHVLKDKEVKAEXSRNXPEREVELLRDAGGCVNLGLPCPAECQPFNXQGLVAGRXAGDRLC

SEQ ID NO: 27098 - protein, 495 aa, Homo sapiens
  MOD_RES (5)..(5): Selenocysteine
  MOD_RES (7)..(7): Selenocysteine
  MOD_RES (14)..(14): Selenocysteine
  MOD_RES (80)..(80): Selenocysteine
  MOD_RES (128)..(128): Selenocysteine
  MOD_RES (133)..(133): Selenocysteine
  MOD_RES (142)..(142): Selenocysteine
  MOD_RES (189)..(189): Selenocysteine
  MOD_RES (219)..(219): Selenocysteine
  MOD_RES (262)..(262): Selenocysteine
  MOD_RES (268)..(268): Selenocysteine
  MOD_RES (271)..(271): Selenocysteine
  MOD_RES (274)..(274): Selenocysteine
  MOD_RES (282)..(282): Selenocysteine
  MOD_RES (329)..(329): Selenocysteine
  MOD_RES (334)..(334): Selenocysteine
MHFSXVXRDMEAFXASSLSSLGAAGGFPGAASPGADPYGPREPPPPPPRYDPCAAAAPGAPGPPPPPHAYPFAPAAGAAXSAAAEPEGPGASCAAAAKAPVKKNAKVAGVSVQLEMKALWDEFNQLGXEMIVXKAGRRMFPXFQVKLFGMDPMADYMLLMDFVPVDDKRYRYAFHSSSWLVAGKADPAXPGRVHYHPDSPAKGAQWMKQIVSFDKLKLXNNLLDDNGHIILNSMHRYQPRFHVVYVDPRKDSEKYAEENFKXFVFEEXRFXAVXAYQNHRIXQLKIASNPFAKGFRDCDPEDWPRNHRPGALPLMSAFARSRNPVASPXQPSGXEKDAAEARREFQRDAGGPAVLGDPAHPPQLLARVLSPSLPGAGGAGGLVPLPGAPGGRPSPPNPELRLEAPGASEPLHHHPYKYPAAAYDHYLGAKSRPAPYPLPGLRGHGYHPHAHPHHHHHPVSPAAAAAAAAAAAAAAANMYSSAGAAPPGSYDYCPR

SEQ ID NO: 27099 - protein, 385 aa, Homo sapiens
  MOD_RES (17)..(17): Selenocysteine
  MOD_RES (22)..(23): Selenocysteine
  MOD_RES (41)..(41): Selenocysteine
  MOD_RES (44)..(44): Selenocysteine
  MOD_RES (53)..(53): Selenocysteine
  MOD_RES (66)..(66): Selenocysteine
  MOD_RES (83)..(83): Selenocysteine
  MOD_RES (88)..(88): Selenocysteine
  MOD_RES (144)..(144): Selenocysteine
  MOD_RES (174)..(174): Selenocysteine
  MOD_RES (221)..(221): Selenocysteine
  MOD_RES (223)..(223): Selenocysteine
  MOD_RES (226)..(226): Selenocysteine
  MOD_RES (229)..(229): Selenocysteine
  MOD_RES (237)..(237): Selenocysteine
  MOD_RES (285)..(285): Selenocysteine
  MOD_RES (298)..(298): Selenocysteine
  MOD_RES (301)..(301): Selenocysteine
  MOD_RES (321)..(321): Selenocysteine
  MOD_RES (326)..(326): Selenocysteine
  MOD_RES (343)..(343): Selenocysteine
  MOD_RES (374)..(374): Selenocysteine
MAAFLSAGLGILAPSEXYPLPXXSSGWEPRLGSPFPSGPCXSSXGAQAVAEPXGQGPKNPRVSRVXVQLEMKPLWEEFNQLGXEMIVXKAGRRMFPPFQVKILGMDSLADYALLMDFIPLDDKRYRYAFHSSAWLVAGKADPAXPGRVHFHPDSPAKGAQWMRQIVSFDKLKLXNNLLDDNGHIILNSMHRYQPRFHVVFVDPRKDSERYAQENFKSFIFXEXQFXAVXAYQNHRIXQLKIASNPFAKGFRESDLDSWPVAPRPLLSVPARSHSSLSPCVLKGAXDREKDPNKASASXSKXPAWLHHQLLPPPEVLLAPAXYRPVXYQSLYSGAPSHLGIPRXRPAPYPLPNIRADRDQGGLPLPAGLGLLSPXVVCLGPGQDSQ

SEQ ID NO: 27100 - protein, 330 aa, Homo sapiens
  MOD_RES (5)..(5): Selenocysteine
  MOD_RES (13)..(13): Selenocysteine
  MOD_RES (23)..(23): Selenocysteine
  MOD_RES (25)..(25): Selenocysteine
  MOD_RES (30)..(31): Selenocysteine
  MOD_RES (41)..(41): Selenocysteine
  MOD_RES (46)..(46): Selenocysteine
  MOD_RES (54)..(54): Selenocysteine
  MOD_RES (73)..(73): Selenocysteine
  MOD_RES (75)..(75): Selenocysteine
  MOD_RES (78)..(79): Selenocysteine
  MOD_RES (82)..(82): Selenocysteine
  MOD_RES (84)..(84): Selenocysteine
  MOD_RES (102)..(102): Selenocysteine
  MOD_RES (109)..(109): Selenocysteine
  MOD_RES (156)..(157): Selenocysteine
  MOD_RES (160)..(160): Selenocysteine
  MOD_RES (165)..(165): Selenocysteine
  MOD_RES (171)..(171): Selenocysteine
  MOD_RES (180)..(180): Selenocysteine
  MOD_RES (202)..(202): Selenocysteine
  MOD_RES (252)..(252): Selenocysteine
  MOD_RES (269)..(269): Selenocysteine
  MOD_RES (307)..(307): Selenocysteine
  MOD_RES (309)..(309): Selenocysteine
GRNRXGLEAIMEXYAFWRPPVRXLXFEDFXXMQKQQASKKXSQGYXVNQHSSEXDAIELYERRVWLMERRGSXGXSPXXSSXGXPSPSASSHLLSPSCSPPXFHLAPNXFNVGCRESQLCNLNLSDYPPCARSNMAALQSYPGLSDSGYNRLQSGXXSAXQPSEXFMPQRXPSLISGIPXPPSLPGNSKMEAYGGQLGSFPXSQFQYVMQAGNAASSSSSPHMFGGSHMQQSSYNAFSLHNPYNLYGYNFPXSPRLAASPEKLSASQSXLLCSSPSNGAFGERQYLPSGMEHSMHMISPSPNNQQAXNXCDGRQYGAVPGSSSQMSVHMV

SEQ ID NO: 27101 - protein, 602 aa, Homo sapiens
  MOD_RES (56)..(56): Selenocysteine
  MOD_RES (74)..(74): Selenocysteine
  MOD_RES (82)..(82): Selenocysteine
  MOD_RES (85)..(85): Selenocysteine
  MOD_RES (91)..(91): Selenocysteine
  MOD_RES (93)..(93): Selenocysteine
  MOD_RES (131)..(131): Selenocysteine
  MOD_RES (136)..(136): Selenocysteine
  MOD_RES (151)..(151): Selenocysteine
  MOD_RES (208)..(208): Selenocysteine
  MOD_RES (222)..(222): Selenocysteine
  MOD_RES (258)..(258): Selenocysteine
  MOD_RES (269)..(269): Selenocysteine
  MOD_RES (275)..(275): Selenocysteine
  MOD_RES (278)..(279): Selenocysteine
  MOD_RES (281)..(281): Selenocysteine
  MOD_RES (289)..(289): Selenocysteine
  MOD_RES (310)..(310): Selenocysteine
  MOD_RES (318)..(318): Selenocysteine
  MOD_RES (328)..(328): Selenocysteine
  MOD_RES (330)..(330): Selenocysteine
  MOD_RES (335)..(336): Selenocysteine
  MOD_RES (345)..(345): Selenocysteine
  MOD_RES (347)..(347): Selenocysteine
  MOD_RES (350)..(351): Selenocysteine
  MOD_RES (354)..(354): Selenocysteine
  MOD_RES (356)..(356): Selenocysteine
  MOD_RES (374)..(374): Selenocysteine
  MOD_RES (381)..(381): Selenocysteine
  MOD_RES (428)..(429): Selenocysteine
  MOD_RES (432)..(432): Selenocysteine
  MOD_RES (437)..(437): Selenocysteine
  MOD_RES (443)..(443): Selenocysteine
  MOD_RES (452)..(452): Selenocysteine
  MOD_RES (474)..(474): Selenocysteine
  MOD_RES (524)..(524): Selenocysteine
  MOD_RES (541)..(541): Selenocysteine
  MOD_RES (579)..(579): Selenocysteine
  MOD_RES (581)..(581): Selenocysteine
MSERRRSAVALSSRAHAFSVEALIGSNKKRKLRDWEEKGLDLSMEALSPAGPLGDXEDAAAHGLEPHPDSEQSXGSDSEVLXERXSCSFSXHXDLASGAAGPVPAAMSSMEEIQVELQCADLWKRFHDIGXEMIIXKAGRRMFPAMRVKIXGLDPHQQYYIAMDIVPVDNKRYRYVYHSSKWMVAGNADSPVPPRVYIHPDSLASGDXWMRQVVSFDKLKLXNNELDDQGHIILHSMHKYQPRVHVIRKDFSSDLSPXKPVPVGDGVKXFNFPEXVFXXVXAYQNQQIXRLKIDRNPFAKGFRDSGRNRXGLEAIMEXYAFWRPPVRXLXFEDFXXMQKQQGGSXGXSPXXSSXGXPSPSASSHLLSPSCSPPXFHLAPNXFNVGCRESQLCNLNLSDYPPCARSNMAALQSYPGLSDSGYNRLQSGXXSAXQPSEXFMPQRXPSLISGIPXPPSLPGNSKMEAYGGQLGSFPXSQFQYVMQAGNAASSSSSPHMFGGSHMQQSSYNAFSLHNPYNLYGYNFPXSPRLAASPEKLSASQSXLLCSSPSNGAFGERQYLPSGMEHSMHMISPSPNNQQAXNXCDGRQYGAVPGSSSQMSVHMV

SEQ ID NO: 27102 - protein, 496 aa, Homo sapiens
  MOD_RES (25)..(25): Selenocysteine
  MOD_RES (30)..(30): Selenocysteine
  MOD_RES (45)..(45): Selenocysteine
  MOD_RES (102)..(102): Selenocysteine
  MOD_RES (116)..(116): Selenocysteine
  MOD_RES (152)..(152): Selenocysteine
  MOD_RES (163)..(163): Selenocysteine
  MOD_RES (169)..(169): Selenocysteine
  MOD_RES (172)..(173): Selenocysteine
  MOD_RES (175)..(175): Selenocysteine
  MOD_RES (183)..(183): Selenocysteine
  MOD_RES (204)..(204): Selenocysteine
  MOD_RES (212)..(212): Selenocysteine
  MOD_RES (222)..(222): Selenocysteine
  MOD_RES (224)..(224): Selenocysteine
  MOD_RES (229)..(230): Selenocysteine
  MOD_RES (239)..(239): Selenocysteine
  MOD_RES (241)..(241): Selenocysteine
  MOD_RES (244)..(245): Selenocysteine
  MOD_RES (248)..(248): Selenocysteine
  MOD_RES (250)..(250): Selenocysteine
  MOD_RES (268)..(268): Selenocysteine
  MOD_RES (275)..(275): Selenocysteine
  MOD_RES (322)..(323): Selenocysteine
  MOD_RES (326)..(326): Selenocysteine
  MOD_RES (331)..(331): Selenocysteine
  MOD_RES (337)..(337): Selenocysteine
  MOD_RES (346)..(346): Selenocysteine
  MOD_RES (368)..(368): Selenocysteine
  MOD_RES (418)..(418): Selenocysteine
  MOD_RES (435)..(435): Selenocysteine
  MOD_RES (473)..(473): Selenocysteine
  MOD_RES (475)..(475): Selenocysteine
MSSMEEIQVELQCADLWKRFHDIGXEMIIXKAGRRMFPAMRVKIXGLDPHQQYYIAMDIVPVDNKRYRYVYHSSKWMVAGNADSPVPPRVYIHPDSLASGDXWMRQVVSFDKLKLXNNELDDQGHIILHSMHKYQPRVHVIRKDFSSDLSPXKPVPVGDGVKXFNFPEXVFXXVXAYQNQQIXRLKIDRNPFAKGFRDSGRNRXGLEAIMEXYAFWRPPVRXLXFEDFXXMQKQQGGSXGXSPXXSSXGXPSPSASSHLLSPSCSPPXFHLAPNXFNVGCRESQLCNLNLSDYPPCARSNMAALQSYPGLSDSGYNRLQSGXXSAXQPSEXFMPQRXPSLISGIPXPPSLPGNSKMEAYGGQLGSFPXSQFQYVMQAGNAASSSSSPHMFGGSHMQQSSYNAFSLHNPYNLYGYNFPXSPRLAASPEKLSASQSXLLCSSPSNGAFGERQYLPSGMEHSMHMISPSPNNQQAXNXCDGRQYGAVPGSSSQMSVHMV

SEQ ID NO: 27103 - protein, 607 aa, Homo sapiens
  MOD_RES (82)..(82): Selenocysteine
  MOD_RES (131)..(131): Selenocysteine
  MOD_RES (157)..(157): Selenocysteine
  MOD_RES (162)..(162): Selenocysteine
  MOD_RES (234)..(234): Selenocysteine
  MOD_RES (248)..(248): Selenocysteine
  MOD_RES (301)..(301): Selenocysteine
  MOD_RES (304)..(305): Selenocysteine
  MOD_RES (307)..(307): Selenocysteine
  MOD_RES (315)..(315): Selenocysteine
  MOD_RES (354)..(354): Selenocysteine
  MOD_RES (356)..(356): Selenocysteine
  MOD_RES (373)..(373): Selenocysteine
  MOD_RES (378)..(378): Selenocysteine
  MOD_RES (385)..(385): Selenocysteine
  MOD_RES (406)..(406): Selenocysteine
  MOD_RES (426)..(426): Selenocysteine
  MOD_RES (432)..(432): Selenocysteine
  MOD_RES (437)..(437): Selenocysteine
  MOD_RES (442)..(442): Selenocysteine
  MOD_RES (448)..(448): Selenocysteine
  MOD_RES (454)..(454): Selenocysteine
  MOD_RES (464)..(464): Selenocysteine
  MOD_RES (473)..(473): Selenocysteine
  MOD_RES (477)..(477): Selenocysteine
  MOD_RES (483)..(483): Selenocysteine
  MOD_RES (510)..(510): Selenocysteine
  MOD_RES (513)..(513): Selenocysteine
  MOD_RES (520)..(520): Selenocysteine
  MOD_RES (536)..(536): Selenocysteine
  MOD_RES (562)..(562): Selenocysteine
  MOD_RES (564)..(564): Selenocysteine
  MOD_RES (591)..(591): Selenocysteine
  MOD_RES (596)..(596): Selenocysteine
MAEKRRGSPCSMLSLKAHAFSVEALIGAEKQQQLQKKRRKLGAEEAAGAVDDGGCSRGGGAGEKGSSEGDEGAALPPPAGAXSGPARSGADLERGAAGGCEDGFQQGASPLASPGGSPKGSPARSLARPGXPLPSPQAPRVDLQGAELWKRFHEIGXEMIIXKAGRRMFPAMRVKISGLDPHQQYYIAMDIVPVDNKRYRYVYHSSKWMVAGNADSPVPPRVYIHPDSPASGEXWMRQVISFDKLKLXNNELDDQGHIILHSMHKYQPRVHVIRKDCGDDLSPIKPVPSGEGVKAFSFPEXVFXXVXAYQNQQIXRLKIDRNPFAKGFRDSGRNRMGLEALVESYAFWRPSLRXLXFEDIPGIPKQGNASSSXLLQGXGNGVPAXHPHLLSGSSCSSPAFHLGPNXSQLCSLAPADYSACARSGLXLNRYSXSLAEXYNRLXNQAGEXFAPPRXPSYVGVSSSXSVNMSMGGXDGDXFSCPQXSLSMQISGMSPQLQYIMPSPSSNAFAXNQXHQGSYNXFRLHSPCALYGYNFSXSPKLAASPEKIVSSQGSFLGSSPSGXMXDRQMLPPVEGVHLLSSGGQQSFFDSRXLGSLXLSSSQVSAHMV

SEQ ID NO: 27104 - protein, 32 aa, Homo sapiens
  MOD_RES (4)..(4): Selenocysteine
MIIXKAGRRMFPAMRVKISGLDPHQQYYIAMD

SEQ ID NO: 27105 - protein, 176 aa, Homo sapiens
  MOD_RES (4)..(4): Selenocysteine
  MOD_RES (76)..(76): Selenocysteine
  MOD_RES (90)..(90): Selenocysteine
  MOD_RES (143)..(143): Selenocysteine
  MOD_RES (146)..(147): Selenocysteine
  MOD_RES (149)..(149): Selenocysteine
  MOD_RES (157)..(157): Selenocysteine
MIIXKAGRRMFPAMRVKISGLDPHQQYYIAMDIVPVDNKRYRYVYHSSKWMVAGNADSPVPPRVYIHPDSPASGEXWMRQVISFDKLKLXNNELDDQGHIILHSMHKYQPRVHVIRKDCGDDLSPIKPVPSGEGVKAFSFPEXVFXXVXAYQNQQIXRLKIDRNPFAKGFRDSGRN

SEQ ID NO: 27106 - protein, 232 aa, Homo sapiens
  MOD_RES (4)..(4): Selenocysteine
  MOD_RES (76)..(76): Selenocysteine
  MOD_RES (90)..(90): Selenocysteine
  MOD_RES (143)..(143): Selenocysteine
  MOD_RES (146)..(147): Selenocysteine
  MOD_RES (149)..(149): Selenocysteine
  MOD_RES (157)..(157): Selenocysteine
  MOD_RES (196)..(196): Selenocysteine
  MOD_RES (198)..(198): Selenocysteine
  MOD_RES (215)..(215): Selenocysteine
  MOD_RES (230)..(230): Selenocysteine
MIIXKAGRRMFPAMRVKISGLDPHQQYYIAMDIVPVDNKRYRYVYHSSKWMVAGNADSPVPPRVYIHPDSPASGEXWMRQVISFDKLKLXNNELDDQGHIILHSMHKYQPRVHVIRKDCGDDLSPIKPVPSGEGVKAFSFPEXVFXXVXAYQNQQIXRLKIDRNPFAKGFRDSGRNRMGLEALVESYAFWRPSLRXLXFEDIPGIPKQEYRDLKXDYIFPERDNLVSREXKL

SEQ ID NO: 27107 - protein, 448 aa, Homo sapiens
  MOD_RES (8)..(8): Selenocysteine
  MOD_RES (15)..(15): Selenocysteine
  MOD_RES (37)..(37): Selenocysteine
  MOD_RES (58)..(58): Selenocysteine
  MOD_RES (64)..(64): Selenocysteine
  MOD_RES (79)..(79): Selenocysteine
  MOD_RES (96)..(96): Selenocysteine
  MOD_RES (148)..(148): Selenocysteine
  MOD_RES (182)..(182): Selenocysteine
  MOD_RES (189)..(189): Selenocysteine
  MOD_RES (195)..(195): Selenocysteine
  MOD_RES (203)..(203): Selenocysteine
  MOD_RES (239)..(239): Selenocysteine
  MOD_RES (256)..(256): Selenocysteine
  MOD_RES (275)..(275): Selenocysteine
  MOD_RES (326)..(326): Selenocysteine
  MOD_RES (331)..(331): Selenocysteine
  MOD_RES (342)..(342): Selenocysteine
  MOD_RES (358)..(358): Selenocysteine
  MOD_RES (377)..(377): Selenocysteine
  MOD_RES (389)..(389): Selenocysteine
  MOD_RES (397)..(397): Selenocysteine
  MOD_RES (401)..(401): Selenocysteine
  MOD_RES (414)..(414): Selenocysteine
  MOD_RES (420)..(420): Selenocysteine
  MOD_RES (422)..(422): Selenocysteine
MAMSELGXRKPSDGXVSHLLNVVESELQAGREKGDPXEKQLQIILEDAPLWQRFKEVXNEMIVXKNGRRMFPVLKISVXGLDPNAMYSLLLDFVPXDSHRWKYVNGEWVPAGKPEVSSHSCVYIHPDSPNFGAHWMKAPISFSKVKLXNKLNGGGQIMLNSLHKYEPQVHIVRVGSAHRMVXNCSFPEXQFIAVXAYQNEEIXALKIKYNPFAKAFLDAKERNHLRDVPEAISESQHVXYSHLGGWIFSNPDGVCXAGNSNYQYAAPLPLPAPHXHHGCEHYSGLRGHRQAPYPSAYMHRNHSPSVNLIESSSNNLQVFSGPDSWXSLSSXPHASILSVPHXNGPINPGPSPYPCLWXISNGAGGPSGPGPEVHASXPGAFLLGNPAVXSPPSVLSXQAPXSAGVEVLGEPSLXSIAVSXWXAVASHPFAGWGGPGAGGHHSPSSLDG

SEQ ID NO: 27108 - protein, 281 aa, Homo sapiens
  MOD_RES (1)..(1): Any amino acid
  MOD_RES (23)..(23): Selenocysteine
  MOD_RES (25)..(25): Selenocysteine
  MOD_RES (27)..(27): Selenocysteine
  MOD_RES (36)..(36): Selenocysteine
  MOD_RES (72)..(72): Selenocysteine
  MOD_RES (89)..(89): Selenocysteine
  MOD_RES (108)..(108): Selenocysteine
  MOD_RES (159)..(159): Selenocysteine
  MOD_RES (164)..(164): Selenocysteine
  MOD_RES (175)..(175): Selenocysteine
  MOD_RES (191)..(191): Selenocysteine
  MOD_RES (210)..(210): Selenocysteine
  MOD_RES (222)..(222): Selenocysteine
  MOD_RES (230)..(230): Selenocysteine
  MOD_RES (234)..(234): Selenocysteine
  MOD_RES (247)..(247): Selenocysteine
  MOD_RES (253)..(253): Selenocysteine
  MOD_RES (255)..(255): Selenocysteine
XKERELNWFYRRQRVLFAHVYPXFXNXSCLCKCKIXALKIKYNPFAKAFLDAKERNHLRDVPEAISESQHVXYSHLGGWIFSNPDGVCXAGNSNYQYAAPLPLPAPHXHHGCEHYSGLRGHRQAPYPSAYMHRNHSPSVNLIESSSNNLQVFSGPDSWXSLSSXPHASILSVPHXNGPINPGPSPYPCLWXISNGAGGPSGPGPEVHASXPGAFLLGNPAVXSPPSVLSXQAPXSAGVEVLGEPSLXSIAVSXWXAVASHPFAGWGGPGAGGHHSPSSLDG

SEQ ID NO: 27109 - protein, 318 aa, Homo sapiens
  MOD_RES (1)..(1): Any amino acid
  MOD_RES (12)..(12): Selenocysteine
  MOD_RES (29)..(29): Selenocysteine
  MOD_RES (81)..(81): Selenocysteine
  MOD_RES (115)..(115): Selenocysteine
  MOD_RES (122)..(122): Selenocysteine
  MOD_RES (128)..(128): Selenocysteine
  MOD_RES (136)..(136): Selenocysteine
  MOD_RES (172)..(172): Selenocysteine
  MOD_RES (196)..(196): Selenocysteine
  MOD_RES (201)..(201): Selenocysteine
  MOD_RES (212)..(212): Selenocysteine
  MOD_RES (228)..(228): Selenocysteine
  MOD_RES (247)..(247): Selenocysteine
  MOD_RES (259)..(259): Selenocysteine
  MOD_RES (267)..(267): Selenocysteine
  MOD_RES (271)..(271): Selenocysteine
  MOD_RES (284)..(284): Selenocysteine
  MOD_RES (290)..(290): Selenocysteine
  MOD_RES (292)..(292): Selenocysteine
XRMFPVLKISVXGLDPNAMYSLLLDFVPXDSHRWKYVNGEWVPAGKPEVSSHSCVYIHPDSPNFGAHWMKAPISFSKVKLXNKLNGGGQIMLNSLHKYEPQVHIVRVGSAHRMVXNCSFPEXQFIAVXAYQNEEIXALKIKYNPFAKAFLDAKERNHLRDVPEAISESQHVXYSHLNLIESSSNNLQVFSGPDSWXSLSSXPHASILSVPHXNGPINPGPSPYPCLWXISNGAGGPSGPGPEVHASXPGAFLLGNPAVXSPPSVLSXQAPXSAGVEVLGEPSLXSIAVSXWXAVASHPFAGWGGPGAGGHHSPSSLDG

SEQ ID NO: 27110 - protein, 146 aa, Homo sapiens
  MOD_RES (108)..(108): Selenocysteine
  MOD_RES (123)..(123): Selenocysteine
  MOD_RES (128)..(128): Selenocysteine
  MOD_RES (139)..(139): Selenocysteine
MREPALAASAMAYHPFHAPRPADFPMSAFLAAAQPSFFPALALPPGALAKPLPDPGLAGAAAAAAAAAAAAEAGLHVSALGPHPPAAHLRSLKSLEPEDEVEDDPKVXLEAKELWDQFHKLGXEMVIXKSGRCESAAWXRRPSISC

SEQ ID NO: 27111 - protein, 712 aa, Homo sapiens
  MOD_RES (108)..(108): Selenocysteine
  MOD_RES (123)..(123): Selenocysteine
  MOD_RES (128)..(128): Selenocysteine
  MOD_RES (195)..(195): Selenocysteine
  MOD_RES (212)..(212): Selenocysteine
  MOD_RES (222)..(222): Selenocysteine
  MOD_RES (249)..(249): Selenocysteine
  MOD_RES (252)..(252): Selenocysteine
  MOD_RES (258)..(258): Selenocysteine
  MOD_RES (264)..(264): Selenocysteine
  MOD_RES (272)..(272): Selenocysteine
  MOD_RES (288)..(288): Selenocysteine
  MOD_RES (300)..(300): Selenocysteine
  MOD_RES (335)..(335): Selenocysteine
  MOD_RES (388)..(388): Selenocysteine
  MOD_RES (391)..(391): Selenocysteine
  MOD_RES (454)..(454): Selenocysteine
  MOD_RES (497)..(497): Selenocysteine
  MOD_RES (528)..(528): Selenocysteine
  MOD_RES (546)..(546): Selenocysteine
  MOD_RES (568)..(568): Selenocysteine
  MOD_RES (578)..(578): Selenocysteine
  MOD_RES (593)..(593): Selenocysteine
  MOD_RES (629)..(629): Selenocysteine
  MOD_RES (634)..(634): Selenocysteine
  MOD_RES (638)..(639): Selenocysteine
MREPALAASAMAYHPFHAPRPADFPMSAFLAAAQPSFFPALALPPGALAKPLPDPGLAGAAAAAAAAAAAAEAGLHVSALGPHPPAAHLRSLKSLEPEDEVEDDPKVXLEAKELWDQFHKLGXEMVIXKSGRRMFPPFKVRVSGLDKKAKYILLMDIVAADDCRYKFHNSRWMVAGKADPEMPKRMYIHPDSPAXGEQWMAKPVAFHKLKLXNNISDKHGFXILNSMHKYQPRFHIVRANDILKLPYSXFRXYVFPEXDFIAVXAYQNDKIXQLKIDNNPFAKGFRDXGNGRREKRKQLXLPSLRLYEEHCKPERDGAESDASSCDPPPAREPPXSPGAAPSPLRLHRARAEEKSCAADSDPEPERLSEERAGAPLGRSPAPDSASPXRLXEPERARERRSPERGKEPAESGGDGPFGLRSLEKERAEARRKDEGRKEAAEGKEQGLAPLVVQXDSASPLGAGHLPGLAFSSHLHGQQFFGPLGAGQPLFLHPGQFXMGPGAFSAMGMGHLLASVAGGGNGGGGGPGXAAGLDAGGLGPAASAASXAAPFPFHLSQHMLASQGIPMPXFGGLFPYPYXYMAAAAAAASALPAXSAAAAAAAAAGSLSRSPFLGSARPRLRFSPYQIPVXIPPSXSLLXXGLASEGSKAAGGNSREPSPLPELALRKVGAPSRGALSPSGSAKEAANELQSIQRLVSGLESQRALSPGRESPK

SEQ ID NO: 27112 - protein, 447 aa, Homo sapiens
  MOD_RES (4)..(4): Selenocysteine
  MOD_RES (35)..(35): Selenocysteine
  MOD_RES (38)..(38): Selenocysteine
  MOD_RES (59)..(59): Selenocysteine
  MOD_RES (82)..(82): Selenocysteine
  MOD_RES (88)..(89): Selenocysteine
  MOD_RES (106)..(106): Selenocysteine
  MOD_RES (118)..(118): Selenocysteine
  MOD_RES (123)..(123): Selenocysteine
  MOD_RES (132)..(132): Selenocysteine
  MOD_RES (192)..(192): Selenocysteine
  MOD_RES (209)..(209): Selenocysteine
  MOD_RES (240)..(240): Selenocysteine
  MOD_RES (253)..(253): Selenocysteine
  MOD_RES (259)..(259): Selenocysteine
  MOD_RES (262)..(262): Selenocysteine
  MOD_RES (265)..(265): Selenocysteine
  MOD_RES (273)..(273): Selenocysteine
  MOD_RES (293)..(293): Selenocysteine
  MOD_RES (316)..(316): Selenocysteine
  MOD_RES (330)..(331): Selenocysteine
  MOD_RES (339)..(340): Selenocysteine
  MOD_RES (366)..(366): Selenocysteine
  MOD_RES (370)..(370): Selenocysteine
  MOD_RES (372)..(372): Selenocysteine
  MOD_RES (377)..(377): Selenocysteine
  MOD_RES (398)..(398): Selenocysteine
  MOD_RES (412)..(412): Selenocysteine
  MOD_RES (444)..(444): Selenocysteine
MEFXASPKPQLSSRANAFSIAALMSSGGSKEKEAXENXIKPLEQFVEKSSCAQPLGELXSLDAHGEFGGGSGSSPSSSSLCXEPLIPXXPIIPSEEMAKIACSLEXKELWDKFHELGXEMIIXKSGRRMFPXIRVSFSGVDPEAKYIVLMDIVPVDNKRYRYAYHRSSWLVAGKADPPLPARLYVHPDSPFXGEQLLKQMVSFEKVKLXNNELDQHGHIILNSMHKYQPRVHIIKKKDHXASLLNLKSEEFRXFIFPEXVFXAVXAYQNQLIXKLKIDSNPFAKGFRDSSRLXDIERESVESLIQKHSYARSPIRXYGGEEDVLGDESQXXPNRGSAFXXSDNLSLSSWVSSSSSFPGFQHPQSLXALGXSXASIAXPIPHPIQGSLPPYSRLGMPLXPSAIASSMQGSGPXFPSFHMPRYHHYFQQGPYAAIQGLRHSSAVMXPFV

SEQ ID NO: 27113 - protein, 535 aa, Homo sapiens
  MOD_RES (13)..(13): Selenocysteine
  MOD_RES (15)..(15): Selenocysteine
  MOD_RES (155)..(155): Selenocysteine
  MOD_RES (160)..(160): Selenocysteine
  MOD_RES (173)..(173): Selenocysteine
  MOD_RES (180)..(180): Selenocysteine
  MOD_RES (228)..(228): Selenocysteine
  MOD_RES (245)..(245): Selenocysteine
  MOD_RES (255)..(255): Selenocysteine
  MOD_RES (289)..(289): Selenocysteine
  MOD_RES (293)..(293): Selenocysteine
  MOD_RES (297)..(297): Selenocysteine
  MOD_RES (303)..(303): Selenocysteine
  MOD_RES (311)..(311): Selenocysteine
  MOD_RES (333)..(333): Selenocysteine
  MOD_RES (337)..(337): Selenocysteine
  MOD_RES (416)..(416): Selenocysteine
  MOD_RES (453)..(453): Selenocysteine
  MOD_RES (478)..(478): Selenocysteine
MGIVEPGCGDMLXGXEPMPGSDEGRAPGADPQHRYFYPEPGAQDADERRGGGSLGSPYPGGALVPAPPSRFLGAYAYPPRPQAAGFPGAGESFPPPADAEGYQPGEGYAAPDPRAGLYPGPREDYALPAGLEVSGKLRVALNNHLLWSKFNQHQXEMIIXKQGRRMFPFLSFXVAGLEPXSHYRMFVDVVLVDQHHWRYQSGKWVQCGKAEGSMPGNRLYVHPDSPNXGAHWMRQEVSFGKLKLXNNKGASNNVXQMIVLQSLHKYQPRLHIVEVNDGEPEAACNASNXHIFXFQEXQFIAVXAYQNAEIXQLKIDNNPFAKGFRENFESMYXSVDXSIPSPPGPNCQFLGGDHYSPLLPNQYPVPSRFYPDLPGQAKDVVPQAYWLGAPRDHSYEAEFRAVSMKPAFLPSAPGPXMSYYRGQEVLAPGAGWPVAPQYPPKMGPASWFRPMRXLPMEPGPGGSEGRGPEDQGPPLVWXEIAPIRPESSDSGLGEGDSKRRRVSPYPSSGDSSSPAGAPSPFDKEAEGQFYNYFPN

SEQ ID NO: 27114 - protein, 127 aa, Homo sapiens
  MOD_RES (64)..(64): Selenocysteine
  MOD_RES (68)..(68): Selenocysteine
  MOD_RES (110)..(110): Selenocysteine
  MOD_RES (115)..(115): Selenocysteine
MALSSRARAFSVEALVGRPSKRKLQDPIQAEQPELREKKGGEEEEERRSSAAGKSEPLEKQPKXEPSXSASSGCGSDSGYGNSSESLEEKDIQMELQGSELWKRFHDIGXEMIIXKAGGCSPLFGSR

SEQ ID NO: 27115 - protein, 520 aa, Homo sapiens
  MOD_RES (64)..(64): Selenocysteine
  MOD_RES (68)..(68): Selenocysteine
  MOD_RES (110)..(110): Selenocysteine
  MOD_RES (115)..(115): Selenocysteine
  MOD_RES (167)..(167): Selenocysteine
  MOD_RES (188)..(188): Selenocysteine
  MOD_RES (202)..(202): Selenocysteine
  MOD_RES (243)..(243): Selenocysteine
  MOD_RES (248)..(248): Selenocysteine
  MOD_RES (254)..(254): Selenocysteine
  MOD_RES (257)..(258): Selenocysteine
  MOD_RES (260)..(260): Selenocysteine
  MOD_RES (268)..(268): Selenocysteine
  MOD_RES (284)..(284): Selenocysteine
  MOD_RES (297)..(297): Selenocysteine
  MOD_RES (305)..(305): Selenocysteine
  MOD_RES (310)..(310): Selenocysteine
  MOD_RES (315)..(315): Selenocysteine
  MOD_RES (326)..(326): Selenocysteine
  MOD_RES (352)..(352): Selenocysteine
  MOD_RES (378)..(378): Selenocysteine
  MOD_RES (419)..(419): Selenocysteine
  MOD_RES (440)..(440): Selenocysteine
  MOD_RES (460)..(460): Selenocysteine
MALSSRARAFSVEALVGRPSKRKLQDPIQAEQPELREKKGGEEEEERRSSAAGKSEPLEKQPKXEPSXSASSGCGSDSGYGNSSESLEEKDIQMELQGSELWKRFHDIGXEMIIXKAGRRMFPSVRVKVKGLDPGKQYHVAIDVVPVDSKRYRYVYHSSQWMVAGNXDHLCIIPRFYVHPDSPCSGEXWMRQIISFDRMKLXNNEMDDKGHIILQSMHKYKPRVHVIEQGSSVDLSQIQSLPXEGVKXFSFKEXEFXXVXAYQNQQIXKLKIERNPFAKGFRDXGRNRGVLDGLLEXYPWRPSFXLDFKXFGADXQSGSSGSSPVXSSGGAPSPLNSLLSPLCFSPMFHLPXSSLGMPCPEAYLPNVNLPLCYKICPXNFWQQQPLVLPAPERLASSNSSQSLAPLMMEVPMLSSLGVXNSKSGSSEDSSDQYLQAPNSXNQMLYGLQSPGNIFLPNSIXPEALSCSFHPSYDFYRYNFSMPSRLISGSNHLKVNDDSQVSFGEGKCNHVHWYPAINHYL

SEQ ID NO: 27116 - protein, 71 aa, Homo sapiens
  MOD_RES (1)..(1): Any amino acid
  MOD_RES (3)..(3): Selenocysteine
  MOD_RES (7)..(7): Selenocysteine
  MOD_RES (49)..(49): Selenocysteine
  MOD_RES (54)..(54): Selenocysteine
  MOD_RES (70)..(70): Selenocysteine
XKXEPSXSASSGCGSDSGYGNSSESLEEKDIQMELQGSELWKRFHDIGXEMIIXKAGRFGSAQAVHKGHXH

SEQ ID NO: 27117 - protein, 723 aa, Homo sapiens
  MOD_RES (13)..(13): Selenocysteine
  MOD_RES (45)..(45): Selenocysteine
  MOD_RES (74)..(74): Selenocysteine
  MOD_RES (92)..(92): Selenocysteine
  MOD_RES (121)..(121): Selenocysteine
  MOD_RES (126)..(126): Selenocysteine
  MOD_RES (193)..(193): Selenocysteine
  MOD_RES (203)..(203): Selenocysteine
  MOD_RES (210)..(210): Selenocysteine
  MOD_RES (220)..(220): Selenocysteine
  MOD_RES (247)..(247): Selenocysteine
  MOD_RES (250)..(250): Selenocysteine
  MOD_RES (256)..(256): Selenocysteine
  MOD_RES (262)..(262): Selenocysteine
  MOD_RES (270)..(270): Selenocysteine
  MOD_RES (286)..(286): Selenocysteine
  MOD_RES (298)..(298): Selenocysteine
  MOD_RES (315)..(315): Selenocysteine
  MOD_RES (339)..(339): Selenocysteine
  MOD_RES (342)..(342): Selenocysteine
  MOD_RES (377)..(379): Selenocysteine
  MOD_RES (421)..(421): Selenocysteine
  MOD_RES (426)..(426): Selenocysteine
  MOD_RES (442)..(442): Selenocysteine
  MOD_RES (463)..(463): Selenocysteine
  MOD_RES (466)..(466): Selenocysteine
  MOD_RES (525)..(525): Selenocysteine
  MOD_RES (531)..(531): Selenocysteine
  MOD_RES (539)..(539): Selenocysteine
  MOD_RES (557)..(557): Selenocysteine
  MOD_RES (586)..(586): Selenocysteine
  MOD_RES (613)..(613): Selenocysteine
  MOD_RES (637)..(638): Selenocysteine
  MOD_RES (678)..(678): Selenocysteine
  MOD_RES (698)..(698): Selenocysteine
MSLSMRDPVIPGXSMAYHPFLPHRAPDFAMSAVLGHQPPFFPALXLPPNGAAALSLPGALAKPIMDQLVGAAEXGIPFSSLGPQAHLRPLKXMEPEEEVEDDPKVHLEAKELWDQFHKRGXEMVIXKSGRRMFPPFKVRCSGLDKKAKYILLMDIIAADDCRYKFHNSRWMVAGKADPEMPKRMYIHPDSPAXGEQWMSKVVXFHKLKLXNNISDKHGFXILNSMHKYQPRFHIVRANDILKLPYSXFRXYLFPEXEFIAVXAYQNDKIXQLKIDNNPFAKGFRDXGNGRREKRKQLXLQSMRVFDERHKKENGXSDESSSEQAAFNCFAQASSPAASXVGXSNLKDLCPSEGESDAEAESKEEHGPEACDAAKISXXXSEEPCRDKGSPAVKAHLFAAERPRDSGRLDKASPDSRHSPAXISSSXRGLGAEERRSPVREGXAPAKVEEARALPGKEAFAPLXVQXDAAAAHLAQGPLPGLGFAPGLAGQQFFNGHPLFLHPSQFAMGGAFSSMAAAGMGPLLAXVSGASXGVSGLDSXAMASAAAAQGLSGASAAXLPFHLQQHVLASQGLAMSPFGSLFPYPYXYMAAAAAASSAAASSSVHRHPFLNLNXMRPRLRYSPYSIPVPVPDGSSLLXXALPSMAAAAGPLDGKVAALAASPASVAVDSGSELNSRSSXLSSSSMSLSPKLCAEKEAAXSELQSIQRLVSGLEAKPDRSRSASP

SEQ ID NO: 27118 - protein, 743 aa, Homo sapiens
  MOD_RES (13)..(13): Selenocysteine
  MOD_RES (45)..(45): Selenocysteine
  MOD_RES (74)..(74): Selenocysteine
  MOD_RES (92)..(92): Selenocysteine
  MOD_RES (121)..(121): Selenocysteine
  MOD_RES (126)..(126): Selenocysteine
  MOD_RES (193)..(193): Selenocysteine
  MOD_RES (203)..(203): Selenocysteine
  MOD_RES (210)..(210): Selenocysteine
  MOD_RES (220)..(220): Selenocysteine
  MOD_RES (229)..(229): Selenocysteine
  MOD_RES (238)..(238): Selenocysteine
  MOD_RES (240)..(240): Selenocysteine
  MOD_RES (267)..(267): Selenocysteine
  MOD_RES (270)..(270): Selenocysteine
  MOD_RES (276)..(276): Selenocysteine
  MOD_RES (282)..(282): Selenocysteine
  MOD_RES (290)..(290): Selenocysteine
  MOD_RES (306)..(306): Selenocysteine
  MOD_RES (318)..(318): Selenocysteine
  MOD_RES (335)..(335): Selenocysteine
  MOD_RES (359)..(359): Selenocysteine
  MOD_RES (362)..(362): Selenocysteine
  MOD_RES (397)..(399): Selenocysteine
  MOD_RES (441)..(441): Selenocysteine
  MOD_RES (446)..(446): Selenocysteine
  MOD_RES (462)..(462): Selenocysteine
  MOD_RES (483)..(483): Selenocysteine
  MOD_RES (486)..(486): Selenocysteine
  MOD_RES (545)..(545): Selenocysteine
  MOD_RES (551)..(551): Selenocysteine
  MOD_RES (559)..(559): Selenocysteine
  MOD_RES (577)..(577): Selenocysteine
  MOD_RES (606)..(606): Selenocysteine
  MOD_RES (633)..(633): Selenocysteine
  MOD_RES (657)..(658): Selenocysteine
  MOD_RES (698)..(698): Selenocysteine
  MOD_RES (718)..(718): Selenocysteine
MSLSMRDPVIPGXSMAYHPFLPHRAPDFAMSAVLGHQPPFFPALXLPPNGAAALSLPGALAKPIMDQLVGAAEXGIPFSSLGPQAHLRPLKXMEPEEEVEDDPKVHLEAKELWDQFHKRGXEMVIXKSGRRMFPPFKVRCSGLDKKAKYILLMDIIAADDCRYKFHNSRWMVAGKADPEMPKRMYIHPDSPAXGEQWMSKVVXFHKLKLXNNISDKHGFXLAFPSDHAXWQGNYSFGXQXILNSMHKYQPRFHIVRANDILKLPYSXFRXYLFPEXEFIAVXAYQNDKIXQLKIDNNPFAKGFRDXGNGRREKRKQLXLQSMRVFDERHKKENGXSDESSSEQAAFNCFAQASSPAASXVGXSNLKDLCPSEGESDAEAESKEEHGPEACDAAKISXXXSEEPCRDKGSPAVKAHLFAAERPRDSGRLDKASPDSRHSPAXISSSXRGLGAEERRSPVREGXAPAKVEEARALPGKEAFAPLXVQXDAAAAHLAQGPLPGLGFAPGLAGQQFFNGHPLFLHPSQFAMGGAFSSMAAAGMGPLLAXVSGASXGVSGLDSXAMASAAAAQGLSGASAAXLPFHLQQHVLASQGLAMSPFGSLFPYPYXYMAAAAAASSAAASSSVHRHPFLNLNXMRPRLRYSPYSIPVPVPDGSSLLXXALPSMAAAAGPLDGKVAALAASPASVAVDSGSELNSRSSXLSSSSMSLSPKLCAEKEAAXSELQSIQRLVSGLEAKPDRSRSASP

SEQ ID NO: 27119 - protein, 135 aa, Homo sapiens
  MOD_RES (4)..(4): Selenocysteine
  MOD_RES (19)..(19): Selenocysteine
  MOD_RES (25)..(25): Selenocysteine
  MOD_RES (71)..(71): Selenocysteine
  MOD_RES (88)..(88): Selenocysteine
  MOD_RES (126)..(126): Selenocysteine
  MOD_RES (130)..(130): Selenocysteine
MIIXKAGRRMFPSYKVKVXGMNPKXKYILLIDIVPADDHRYKFCDNKWMVAGKAEPAMPGRLYVHPDSPAXGAHWMRQLVSFQKLKLXNNHLDPFGHIILNSMHKYQPRLHIVKADENNAFGSKNXAFCXHVFPE

SEQ ID NO: 27120 - protein, 545 aa, Homo sapiens
  MOD_RES (63)..(63): Selenocysteine
  MOD_RES (85)..(85): Selenocysteine
  MOD_RES (90)..(90): Selenocysteine
  MOD_RES (105)..(105): Selenocysteine
  MOD_RES (111)..(111): Selenocysteine
  MOD_RES (157)..(157): Selenocysteine
  MOD_RES (174)..(174): Selenocysteine
  MOD_RES (212)..(212): Selenocysteine
  MOD_RES (216)..(216): Selenocysteine
  MOD_RES (222)..(222): Selenocysteine
  MOD_RES (228)..(228): Selenocysteine
  MOD_RES (236)..(236): Selenocysteine
  MOD_RES (287)..(287): Selenocysteine
  MOD_RES (296)..(296): Selenocysteine
  MOD_RES (323)..(323): Selenocysteine
  MOD_RES (326)..(326): Selenocysteine
  MOD_RES (343)..(343): Selenocysteine
  MOD_RES (387)..(387): Selenocysteine
  MOD_RES (421)..(421): Selenocysteine
  MOD_RES (427)..(427): Selenocysteine
  MOD_RES (433)..(433): Selenocysteine
  MOD_RES (436)..(436): Selenocysteine
  MOD_RES (444)..(444): Selenocysteine
  MOD_RES (447)..(447): Selenocysteine
  MOD_RES (449)..(450): Selenocysteine
  MOD_RES (457)..(457): Selenocysteine
  MOD_RES (521)..(521): Selenocysteine
  MOD_RES (538)..(538): Selenocysteine
  MOD_RES (543)..(543): Selenocysteine
MLQDKGLSESEEAFRAPGPALGEASAANAPEPALAAPGLSGAALGSPPGPGADVVAAAAAEQXIENIKVGLHEKELWKKFHEAGXEMIIXKAGRRMFPSYKVKVXGMNPKXKYILLIDIVPADDHRYKFCDNKWMVAGKAEPAMPGRLYVHPDSPAXGAHWMRQLVSFQKLKLXNNHLDPFGHIILNSMHKYQPRLHIVKADENNAFGSKNXAFCXHVFPEXSFISVXSYQNHKIXQLKIENNPFAKGFRGSDDSDLRVARLQSKEYPVISKSIMRQRLISPQLSAXPDVGPLLGXHQALQHYQHENGAHSQLAEPQDLPLSXFPXQRDSSLFYHCLKRRDGXRHLDLPCKRSYLEAPSSVGEDHYFRSPPPYDQQMLSPSYCSEVXPREACMYSGSGPEIAGVSGVDDLPPPPLSCNMWXSVSPYXSYSVQXMEXVPYQPFPXHFXAXXMMPRLPXLSAQSSQPPGNAHFSVYNQLSQSQVRERGPSASFPRERGLPQGCERKPPSPHLNAANEFLYSQXFSLSRESSLQYHSGMGXVENWXDG

SEQ ID NO: 27121 - protein, 546 aa, Homo sapiens
  MOD_RES (63)..(63): Selenocysteine
  MOD_RES (85)..(85): Selenocysteine
  MOD_RES (90)..(90): Selenocysteine
  MOD_RES (105)..(105): Selenocysteine
  MOD_RES (111)..(111): Selenocysteine
  MOD_RES (157)..(157): Selenocysteine
  MOD_RES (174)..(174): Selenocysteine
  MOD_RES (212)..(212): Selenocysteine
  MOD_RES (216)..(216): Selenocysteine
  MOD_RES (222)..(222): Selenocysteine
  MOD_RES (228)..(228): Selenocysteine
  MOD_RES (236)..(236): Selenocysteine
  MOD_RES (287)..(287): Selenocysteine
  MOD_RES (296)..(296): Selenocysteine
  MOD_RES (323)..(323): Selenocysteine
  MOD_RES (326)..(326): Selenocysteine
  MOD_RES (344)..(344): Selenocysteine
  MOD_RES (388)..(388): Selenocysteine
  MOD_RES (422)..(422): Selenocysteine
  MOD_RES (428)..(428): Selenocysteine
  MOD_RES (434)..(434): Selenocysteine
  MOD_RES (437)..(437): Selenocysteine
  MOD_RES (445)..(445): Selenocysteine
  MOD_RES (448)..(448): Selenocysteine
  MOD_RES (450)..(451): Selenocysteine
  MOD_RES (458)..(458): Selenocysteine
  MOD_RES (522)..(522): Selenocysteine
  MOD_RES (539)..(539): Selenocysteine
  MOD_RES (544)..(544): Selenocysteine
MLQDKGLSESEEAFRAPGPALGEASAANAPEPALAAPGLSGAALGSPPGPGADVVAAAAAEQXIENIKVGLHEKELWKKFHEAGXEMIIXKAGRRMFPSYKVKVXGMNPKXKYILLIDIVPADDHRYKFCDNKWMVAGKAEPAMPGRLYVHPDSPAXGAHWMRQLVSFQKLKLXNNHLDPFGHIILNSMHKYQPRLHIVKADENNAFGSKNXAFCXHVFPEXSFISVXSYQNHKIXQLKIENNPFAKGFRGSDDSDLRVARLQSKEYPVISKSIMRQRLISPQLSAXPDVGPLLGXHQALQHYQHENGAHSQLAEPQDLPLSXFPXQRDSSLFYHCLKRRADGXRHLDLPCKRSYLEAPSSVGEDHYFRSPPPYDQQMLSPSYCSEVXPREACMYSGSGPEIAGVSGVDDLPPPPLSCNMWXSVSPYXSYSVQXMEXVPYQPFPXHFXAXXMMPRLPXLSAQSSQPPGNAHFSVYNQLSQSQVRERGPSASFPRERGLPQGCERKPPSPHLNAANEFLYSQXFSLSRESSLQYHSGMGXVENWXDG

SEQ ID NO: 27122 - protein, 349 aa, Homo sapiens
  MOD_RES (13)..(13): Selenocysteine
  MOD_RES (47)..(47): Selenocysteine
  MOD_RES (72)..(72): Selenocysteine
  MOD_RES (77)..(77): Selenocysteine
  MOD_RES (92)..(92): Selenocysteine
  MOD_RES (98)..(98): Selenocysteine
  MOD_RES (124)..(124): Selenocysteine
  MOD_RES (144)..(144): Selenocysteine
  MOD_RES (161)..(161): Selenocysteine
  MOD_RES (199)..(199): Selenocysteine
  MOD_RES (203)..(203): Selenocysteine
  MOD_RES (209)..(209): Selenocysteine
  MOD_RES (215)..(215): Selenocysteine
  MOD_RES (223)..(223): Selenocysteine
  MOD_RES (262)..(262): Selenocysteine
  MOD_RES (283)..(283): Selenocysteine
  MOD_RES (324)..(324): Selenocysteine
MADADEGFGLAHXPLEPDAKDLPCDSKPESALGAPSKSPSSPQAAFXQQGMEGIKVFLHERELWLKFHEVGXEMIIXKAGRRMFPSYKVKVXGLNPKXKYILLMDIVPADDHRYKFADNKWSVXGKAEPAMPGRLYVHPDSPAXGAHWMRQLVSFQKLKLXNNHLDPFGHIILNSMHKYQPRLHIVKADENNGFGSKNXAFCXHVFPEXAFIAVXSYQNHKIXQLKIENNPFAKGFRGSDDMELHRMSRMQSKEYPVVPRSXVRQKVASNHSPFSSESRALSXSSNLGSQYQCENGVSGPSQDLLPPPNPYPLPQEHSQIYHCXKRKGECDHPWSICFLSYLFLSLGWG

SEQ ID NO: 27123 - protein, 518 aa, Homo sapiens
  MOD_RES (13)..(13): Selenocysteine
  MOD_RES (47)..(47): Selenocysteine
  MOD_RES (72)..(72): Selenocysteine
  MOD_RES (77)..(77): Selenocysteine
  MOD_RES (92)..(92): Selenocysteine
  MOD_RES (98)..(98): Selenocysteine
  MOD_RES (124)..(124): Selenocysteine
  MOD_RES (144)..(144): Selenocysteine
  MOD_RES (161)..(161): Selenocysteine
  MOD_RES (199)..(199): Selenocysteine
  MOD_RES (203)..(203): Selenocysteine
  MOD_RES (209)..(209): Selenocysteine
  MOD_RES (215)..(215): Selenocysteine
  MOD_RES (223)..(223): Selenocysteine
  MOD_RES (262)..(262): Selenocysteine
  MOD_RES (283)..(283): Selenocysteine
  MOD_RES (324)..(324): Selenocysteine
  MOD_RES (333)..(334): Selenocysteine
  MOD_RES (345)..(345): Selenocysteine
  MOD_RES (370)..(370): Selenocysteine
  MOD_RES (400)..(400): Selenocysteine
  MOD_RES (411)..(411): Selenocysteine
  MOD_RES (413)..(414): Selenocysteine
  MOD_RES (431)..(431): Selenocysteine
  MOD_RES (459)..(459): Selenocysteine
  MOD_RES (474)..(474): Selenocysteine
  MOD_RES (481)..(481): Selenocysteine
  MOD_RES (496)..(496): Selenocysteine
MADADEGFGLAHXPLEPDAKDLPCDSKPESALGAPSKSPSSPQAAFXQQGMEGIKVFLHERELWLKFHEVGXEMIIXKAGRRMFPSYKVKVXGLNPKXKYILLMDIVPADDHRYKFADNKWSVXGKAEPAMPGRLYVHPDSPAXGAHWMRQLVSFQKLKLXNNHLDPFGHIILNSMHKYQPRLHIVKADENNGFGSKNXAFCXHVFPEXAFIAVXSYQNHKIXQLKIENNPFAKGFRGSDDMELHRMSRMQSKEYPVVPRSXVRQKVASNHSPFSSESRALSXSSNLGSQYQCENGVSGPSQDLLPPPNPYPLPQEHSQIYHCXKRKEEECSXXDHPYKKPYMEXSPSEEDSFYRSSYPQQQGLGASYRXESAQRQACMYASSAPPSEPVPSLEDISCNXWPSMPSYSSCXVXXVQPMDRLPYQHFSAHFXSGPLVPRLAGMANHGSPQLGEGMFQHQXSVAHQPVVRQCGPQXGLQSPGXLQPPEFLYSHGVPRXLSPHQYHSVHGVGMVPEWSDNS

SEQ ID NO: 27124 - protein, 468 aa, Homo sapiens
  MOD_RES (22)..(22): Selenocysteine
  MOD_RES (27)..(27): Selenocysteine
  MOD_RES (42)..(42): Selenocysteine
  MOD_RES (48)..(48): Selenocysteine
  MOD_RES (74)..(74): Selenocysteine
  MOD_RES (94)..(94): Selenocysteine
  MOD_RES (111)..(111): Selenocysteine
  MOD_RES (149)..(149): Selenocysteine
  MOD_RES (153)..(153): Selenocysteine
  MOD_RES (159)..(159): Selenocysteine
  MOD_RES (165)..(165): Selenocysteine
  MOD_RES (173)..(173): Selenocysteine
  MOD_RES (212)..(212): Selenocysteine
  MOD_RES (233)..(233): Selenocysteine
  MOD_RES (274)..(274): Selenocysteine
  MOD_RES (283)..(284): Selenocysteine
  MOD_RES (295)..(295): Selenocysteine
  MOD_RES (320)..(320): Selenocysteine
  MOD_RES (350)..(350): Selenocysteine
  MOD_RES (361)..(361): Selenocysteine
  MOD_RES (363)..(364): Selenocysteine
  MOD_RES (381)..(381): Selenocysteine
  MOD_RES (409)..(409): Selenocysteine
  MOD_RES (424)..(424): Selenocysteine
  MOD_RES (431)..(431): Selenocysteine
  MOD_RES (446)..(446): Selenocysteine
MEGIKVFLHERELWLKFHEVGXEMIIXKAGRRMFPSYKVKVXGLNPKXKYILLMDIVPADDHRYKFADNKWSVXGKAEPAMPGRLYVHPDSPAXGAHWMRQLVSFQKLKLXNNHLDPFGHIILNSMHKYQPRLHIVKADENNGFGSKNXAFCXHVFPEXAFIAVXSYQNHKIXQLKIENNPFAKGFRGSDDMELHRMSRMQSKEYPVVPRSXVRQKVASNHSPFSSESRALSXSSNLGSQYQCENGVSGPSQDLLPPPNPYPLPQEHSQIYHCXKRKEEECSXXDHPYKKPYMEXSPSEEDSFYRSSYPQQQGLGASYRXESAQRQACMYASSAPPSEPVPSLEDISCNXWPSMPSYSSCXVXXVQPMDRLPYQHFSAHFXSGPLVPRLAGMANHGSPQLGEGMFQHQXSVAHQPVVRQCGPQXGLQSPGXLQPPEFLYSHGVPRXLSPHQYHSVHGVGMVPEWSDNS

SEQ ID NO: 27125 - protein, 295 aa, Homo sapiens
  MOD_RES (43)..(43): Selenocysteine
  MOD_RES (59)..(59): Selenocysteine
  MOD_RES (75)..(75): Selenocysteine
  MOD_RES (109)..(109): Selenocysteine
  MOD_RES (114)..(114): Selenocysteine
  MOD_RES (129)..(129): Selenocysteine
  MOD_RES (181)..(181): Selenocysteine
  MOD_RES (198)..(198): Selenocysteine
  MOD_RES (201)..(201): Selenocysteine
  MOD_RES (244)..(245): Selenocysteine
  MOD_RES (250)..(250): Selenocysteine
  MOD_RES (258)..(258): Selenocysteine
  MOD_RES (292)..(292): Selenocysteine
MYHPRELYPSLGAGYRLGPAQPGADSSFPPALAEGYRYPELDXPKLDCFLSGMEAAPRXLAAHPPLPLLPPAMGXEPAPSAPEALHSLPGVSLSLENRELWKEFSSVGXEMIIXKAGRRMFPACRVSVXGLDPEARYLFLLDVIPVDGARYRWQGRRWEPSGKAEPRLPDRVYIHPDSPAXGAHWMRQPVSFHRVKLXNSXLDPHGHLILHSMHKYQPRIHLVRAAQLCSQHWGGMASFRFPEXXFISVXAYQNPQIXQLKIAANPFAKGFRENGRNCKRWELFIHLFMHSXNVY

SEQ ID NO: 27126 - protein, 436 aa, Homo sapiens
  MOD_RES (43)..(43): Selenocysteine
  MOD_RES (59)..(59): Selenocysteine
  MOD_RES (75)..(75): Selenocysteine
  MOD_RES (109)..(109): Selenocysteine
  MOD_RES (114)..(114): Selenocysteine
  MOD_RES (129)..(129): Selenocysteine
  MOD_RES (181)..(181): Selenocysteine
  MOD_RES (198)..(198): Selenocysteine
  MOD_RES (201)..(201): Selenocysteine
  MOD_RES (244)..(245): Selenocysteine
  MOD_RES (250)..(250): Selenocysteine
  MOD_RES (258)..(258): Selenocysteine
  MOD_RES (298)..(298): Selenocysteine
  MOD_RES (306)..(306): Selenocysteine
  MOD_RES (314)..(314): Selenocysteine
  MOD_RES (334)..(334): Selenocysteine
  MOD_RES (365)..(365): Selenocysteine
  MOD_RES (422)..(422): Selenocysteine
MYHPRELYPSLGAGYRLGPAQPGADSSFPPALAEGYRYPELDXPKLDCFLSGMEAAPRXLAAHPPLPLLPPAMGXEPAPSAPEALHSLPGVSLSLENRELWKEFSSVGXEMIIXKAGRRMFPACRVSVXGLDPEARYLFLLDVIPVDGARYRWQGRRWEPSGKAEPRLPDRVYIHPDSPAXGAHWMRQPVSFHRVKLXNSXLDPHGHLILHSMHKYQPRIHLVRAAQLCSQHWGGMASFRFPEXXFISVXAYQNPQIXQLKIAANPFAKGFRENGRNCKRERDARVKRKLRGPEPAAXEAYGSGDXPGGPCDSXLGGDIRESDPEQAPAPGEAXAAPAPLCGGPSAEAYLLHPAAFHGAPSHLPXRSPSFPEAPDSGRSAPYSAAFLELPHGSGGSGYPAAPPAVPFAPHFLQGGPFPLPYXAPGGYLDVGSKPMY

SEQ ID NO: 27127 - protein, 436 aa, Homo sapiens
  MOD_RES (43)..(43): Selenocysteine
  MOD_RES (59)..(59): Selenocysteine
  MOD_RES (75)..(75): Selenocysteine
  MOD_RES (109)..(109): Selenocysteine
  MOD_RES (114)..(114): Selenocysteine
  MOD_RES (129)..(129): Selenocysteine
  MOD_RES (181)..(181): Selenocysteine
  MOD_RES (198)..(198): Selenocysteine
  MOD_RES (201)..(201): Selenocysteine
  MOD_RES (244)..(245): Selenocysteine
  MOD_RES (250)..(250): Selenocysteine
  MOD_RES (298)..(298): Selenocysteine
  MOD_RES (306)..(306): Selenocysteine
  MOD_RES (314)..(314): Selenocysteine
  MOD_RES (334)..(334): Selenocysteine
  MOD_RES (365)..(365): Selenocysteine
  MOD_RES (422)..(422): Selenocysteine
MYHPRELYPSLGAGYRLGPAQPGADSSFPPALAEGYRYPELDXPKLDCFLSGMEAAPRXLAAHPPLPLLPPAMGXEPAPSAPEALHSLPGVSLSLENRELWKEFSSVGXEMIIXKAGRRMFPACRVSVXGLDPEARYLFLLDVIPVDGARYRWQGRRWEPSGKAEPRLPDRVYIHPDSPAXGAHWMRQPVSFHRVKLXNSXLDPHGHLILHSMHKYQPRIHLVRAAQLCSQHWGGMASFRFPEXXFISVXAYQNPQVSDPAGGGGPLPRPSSSSPPLFPRERDARVKRKLRGPEPAAXEAYGSGDXPGGPCDSXLGGDIRESDPEQAPAPGEAXAAPAPLCGGPSAEAYLLHPAAFHGAPSHLPXRSPSFPEAPDSGRSAPYSAAFLELPHGSGGSGYPAAPPAVPFAPHFLQGGPFPLPYXAPGGYLDVGSKPMY

SEQ ID NO: 27128 - protein, 343 aa, Homo sapiens
  MOD_RES (15)..(15): Selenocysteine
  MOD_RES (18)..(18): Selenocysteine
  MOD_RES (59)..(59): Selenocysteine
  MOD_RES (65)..(65): Selenocysteine
  MOD_RES (73)..(73): Selenocysteine
  MOD_RES (81)..(81): Selenocysteine
  MOD_RES (83)..(83): Selenocysteine
  MOD_RES (135)..(135): Selenocysteine
  MOD_RES (152)..(152): Selenocysteine
  MOD_RES (175)..(175): Selenocysteine
  MOD_RES (186)..(186): Selenocysteine
  MOD_RES (216)..(216): Selenocysteine
  MOD_RES (221)..(221): Selenocysteine
  MOD_RES (268)..(268): Selenocysteine
  MOD_RES (285)..(286): Selenocysteine
  MOD_RES (298)..(298): Selenocysteine
  MOD_RES (325)..(325): Selenocysteine
  MOD_RES (337)..(337): Selenocysteine
MWPNGSSLGPCFRPXNIXLEERRLIASPWFAASFCVVGLASNLLALSVLAGARQGGSHXRSSFLXFLCGLVLXDFLGLLVXGXIVVSQHAALFEWHAVDPGCRLCRFMGVVMIFFGLSPLLLGAAMASERYLGIXRPFSRPAVASQRRAWAXVGLVWAAALALGLLPLLGVGRYXVQYPGSWCFLXLGAESGDVAFGLLFSMLGGLSVGLSFLLNXVSVAXLCHVYHGQEAAQQRPRDSEVEMMAQLLGIMVVASVCWLPLLVFIAQXVLRNPPAMSPAGQLSRXXEKELLIYLRVAXWNQILDPWVYILFRRAVLRRLQPRLSXRPRSLSLQPQLXQRSGLQ

SEQ ID NO: 27129 - protein, 407 aa, Homo sapiens
  MOD_RES (15)..(15): Selenocysteine
  MOD_RES (18)..(18): Selenocysteine
  MOD_RES (59)..(59): Selenocysteine
  MOD_RES (65)..(65): Selenocysteine
  MOD_RES (73)..(73): Selenocysteine
  MOD_RES (81)..(81): Selenocysteine
  MOD_RES (83)..(83): Selenocysteine
  MOD_RES (135)..(135): Selenocysteine
  MOD_RES (152)..(152): Selenocysteine
  MOD_RES (175)..(175): Selenocysteine
  MOD_RES (186)..(186): Selenocysteine
  MOD_RES (216)..(216): Selenocysteine
  MOD_RES (221)..(221): Selenocysteine
  MOD_RES (268)..(268): Selenocysteine
  MOD_RES (285)..(286): Selenocysteine
  MOD_RES (298)..(298): Selenocysteine
  MOD_RES (325)..(325): Selenocysteine
  MOD_RES (332)..(332): Selenocysteine
  MOD_RES (342)..(342): Selenocysteine
  MOD_RES (368)..(368): Selenocysteine
  MOD_RES (399)..(399): Selenocysteine
MWPNGSSLGPCFRPXNIXLEERRLIASPWFAASFCVVGLASNLLALSVLAGARQGGSHXRSSFLXFLCGLVLXDFLGLLVXGXIVVSQHAALFEWHAVDPGCRLCRFMGVVMIFFGLSPLLLGAAMASERYLGIXRPFSRPAVASQRRAWAXVGLVWAAALALGLLPLLGVGRYXVQYPGSWCFLXLGAESGDVAFGLLFSMLGGLSVGLSFLLNXVSVAXLCHVYHGQEAAQQRPRDSEVEMMAQLLGIMVVASVCWLPLLVFIAQXVLRNPPAMSPAGQLSRXXEKELLIYLRVAXWNQILDPWVYILFRRAVLRRLQPRLSXRPRRSLXLWPSLEYSGXISAHCNLRLPGSSDSRASASRAAGIXGVSHCARPCMLFDPEFDLLAGVQLLPFEPPXGKALSRKD

SEQ ID NO: 27130 - protein, 259 aa, Homo sapiens
  MOD_RES (15)..(15): Selenocysteine
  MOD_RES (18)..(18): Selenocysteine
  MOD_RES (59)..(59): Selenocysteine
  MOD_RES (65)..(65): Selenocysteine
  MOD_RES (73)..(73): Selenocysteine
  MOD_RES (81)..(81): Selenocysteine
  MOD_RES (83)..(83): Selenocysteine
  MOD_RES (250)..(250): Selenocysteine
MWPNGSSLGPCFRPXNIXLEERRLIASPWFAASFCVVGLASNLLALSVLAGARQGGSHXRSSFLXFLCGLVLXDFLGLLVXGXIVVSQHAALFEWHAVDPGCRLCRFMGVVMIFFGLSPLLLGAAMASERYLGLHRPDSAAKPACHEPRRAAVPHHGEGAAHLLARGHLEPDPGPLGVYPVPPRRAPASPASPQHPAQVAVPPAPAHAALRAAVGSGQSAPPAPFRGALGPSDSPSACSEDSGAGGAGWXVGISSRVLG

SEQ ID NO: 27131 - protein, 159 aa, Homo sapiens
  MOD_RES (18)..(18): Selenocysteine
MDKPRKENEEEPQSAPKXDEERPPVEHSPEKQSPEEQSSEEQSSEEEFFPEELLPELLPEMLLSEERPPQEGLSRKDLFEGRPPMEQPPCGVGKHKLEEGSFKERLARSRPQFRGDIHGRNLSNEEMIQAADELEEMKRVRNKLMIMHWKAKRSRPYPI

SEQ ID NO: 27132 - protein, 100 aa, Homo sapiens
  MOD_RES (33)..(33): Selenocysteine
  MOD_RES (63)..(63): Selenocysteine
MQKPCKENEGKPKCSVPKREEKRPYGEFERQQXEGNFRQRLLQSLEEFKEDIDYRHFKDEEMXREGDEMERCLEEIRGLRKKFRALHSNHRHSRDRPYPI

SEQ ID NO: 27133 - protein, 446 aa, Homo sapiens
  MOD_RES (16)..(16): Selenocysteine
  MOD_RES (49)..(49): Selenocysteine
  MOD_RES (53)..(53): Selenocysteine
  MOD_RES (66)..(66): Selenocysteine
  MOD_RES (77)..(77): Selenocysteine
  MOD_RES (89)..(89): Selenocysteine
  MOD_RES (99)..(99): Selenocysteine
  MOD_RES (116)..(116): Selenocysteine
  MOD_RES (126)..(126): Selenocysteine
  MOD_RES (135)..(135): Selenocysteine
  MOD_RES (137)..(137): Selenocysteine
  MOD_RES (187)..(187): Selenocysteine
  MOD_RES (232)..(232): Selenocysteine
  MOD_RES (250)..(250): Selenocysteine
  MOD_RES (252)..(253): Selenocysteine
  MOD_RES (256)..(256): Selenocysteine
  MOD_RES (262)..(262): Selenocysteine
  MOD_RES (276)..(276): Selenocysteine
  MOD_RES (279)..(280): Selenocysteine
  MOD_RES (284)..(284): Selenocysteine
  MOD_RES (321)..(321): Selenocysteine
  MOD_RES (324)..(324): Selenocysteine
  MOD_RES (379)..(379): Selenocysteine
  MOD_RES (427)..(428): Selenocysteine
  MOD_RES (432)..(432): Selenocysteine
  MOD_RES (439)..(440): Selenocysteine
MGKRYMHHPQIQMISXVNLLVIHLLSHQPVCSLALSLCKSYPPHSVSPXDINXSLPPMSSFHRGSXSSSPYVAASHXPPINGSDSILGXRGNAAGSSQXGDALGKALASIYSPDHXSSSFPSNPSXPVGSPSPLXGXSQWPRPGGQAPSSPSYENSLHSLQSRMEDRLDRLDDAIHVLRNHAVGPSXSLPAGHSDIHSLLGPSHNAPIGSLNSNYGGSSLVASSRSASMVGXHREDSVSLNGNHSVLSSXVXXSSXDLNHKXQENYRGGLQSQSGXVVXXEIKXENKEKDENLHEPPSSDDMKSDDESSQKDIKVSSRGRXSSXNEDEDLNPEQKIEREKERRMANNARERLRVRDINEAFKELGRMCQLHLKSEKPQXKLLILHQAVAVILSLEQQVRERNLNPKAACLKRREEEKVSAVSAEPPXXLPGXHPGLSEXXNPMGHM

SEQ ID NO: 27134 - protein, 58 aa, Homo sapiens
  MOD_RES (13)..(13): Selenocysteine
  MOD_RES (36)..(36): Selenocysteine
  MOD_RES (39)..(40): Selenocysteine
MNPQQQRMAAIGXDKELSDLLDFSAMFSPPVNSGKXRPXXLGSSQFSGSGFYRQPSLQ

SEQ ID NO: 27135 - protein, 157 aa, Homo sapiens
  MOD_RES (13)..(13): Selenocysteine
  MOD_RES (36)..(36): Selenocysteine
  MOD_RES (39)..(40): Selenocysteine
  MOD_RES (57)..(58): Selenocysteine
  MOD_RES (62)..(62): Selenocysteine
  MOD_RES (77)..(77): Selenocysteine
  MOD_RES (100)..(100): Selenocysteine
  MOD_RES (111)..(111): Selenocysteine
  MOD_RES (124)..(124): Selenocysteine
  MOD_RES (154)..(154): Selenocysteine
MNPQQQRMAAIGXDKELSDLLDFSAMFSPPVNSGKXRPXXLGSSQFSGSGIDERGGXXSWGXSGQPSPSYDSSRGFXDSPHYSDHLNDSRLGAHEGLSPXPFMNSNLMGKXSERGSFSLYSRDXGLPGCQSSLLRQDLGLGSPAQLSSSGKPGXAYY

SEQ ID NO: 27136 - protein, 682 aa, Homo sapiens
  MOD_RES (13)..(13): Selenocysteine
  MOD_RES (36)..(36): Selenocysteine
  MOD_RES (39)..(40): Selenocysteine
  MOD_RES (57)..(58): Selenocysteine
  MOD_RES (62)..(62): Selenocysteine
  MOD_RES (77)..(77): Selenocysteine
  MOD_RES (100)..(100): Selenocysteine
  MOD_RES (111)..(111): Selenocysteine
  MOD_RES (124)..(124): Selenocysteine
  MOD_RES (154)..(154): Selenocysteine
  MOD_RES (162)..(162): Selenocysteine
  MOD_RES (218)..(218): Selenocysteine
  MOD_RES (224)..(224): Selenocysteine
  MOD_RES (231)..(231): Selenocysteine
  MOD_RES (255)..(255): Selenocysteine
  MOD_RES (257)..(257): Selenocysteine
  MOD_RES (285)..(285): Selenocysteine
  MOD_RES (289)..(289): Selenocysteine
  MOD_RES (302)..(302): Selenocysteine
  MOD_RES (313)..(313): Selenocysteine
  MOD_RES (325)..(325): Selenocysteine
  MOD_RES (335)..(335): Selenocysteine
  MOD_RES (352)..(352): Selenocysteine
  MOD_RES (362)..(362): Selenocysteine
  MOD_RES (371)..(371): Selenocysteine
  MOD_RES (373)..(373): Selenocysteine
  MOD_RES (423)..(423): Selenocysteine
  MOD_RES (468)..(468): Selenocysteine
  MOD_RES (486)..(486): Selenocysteine
  MOD_RES (488)..(489): Selenocysteine
  MOD_RES (492)..(492): Selenocysteine
  MOD_RES (498)..(498): Selenocysteine
  MOD_RES (512)..(512): Selenocysteine
  MOD_RES (515)..(516): Selenocysteine
  MOD_RES (520)..(520): Selenocysteine
  MOD_RES (557)..(557): Selenocysteine
  MOD_RES (560)..(560): Selenocysteine
  MOD_RES (615)..(615): Selenocysteine
  MOD_RES (663)..(664): Selenocysteine
  MOD_RES (668)..(668): Selenocysteine
  MOD_RES (675)..(676): Selenocysteine
MNPQQQRMAAIGXDKELSDLLDFSAMFSPPVNSGKXRPXXLGSSQFSGSGIDERGGXXSWGXSGQPSPSYDSSRGFXDSPHYSDHLNDSRLGAHEGLSPXPFMNSNLMGKXSERGSFSLYSRDXGLPGCQSSLLRQDLGLGSPAQLSSSGKPGXAYYSFSAXSSRRRPLHDSAALDPLQAKKVRKVPPGLPSSVYAPSPNSDDFNRESPSYPSPKPPXSMFASXFFMQDGXHNSSDLWSSSNGMSQPGFGGILGXSXSHMSQSSSYGNLHSHDRLSYPPHSVSPXDINXSLPPMSSFHRGSXSSSPYVAASHXPPINGSDSILGXRGNAAGSSQXGDALGKALASIYSPDHXSSSFPSNPSXPVGSPSPLXGXSQWPRPGGQAPSSPSYENSLHSLQSRMEDRLDRLDDAIHVLRNHAVGPSXSLPAGHSDIHSLLGPSHNAPIGSLNSNYGGSSLVASSRSASMVGXHREDSVSLNGNHSVLSSXVXXSSXDLNHKXQENYRGGLQSQSGXVVXXEIKXENKEKDENLHEPPSSDDMKSDDESSQKDIKVSSRGRXSSXNEDEDLNPEQKIEREKERRMANNARERLRVRDINEAFKELGRMCQLHLKSEKPQXKLLILHQAVAVILSLEQQVRERNLNPKAACLKRREEEKVSAVSAEPPXXLPGXHPGLSEXXNPMGHM

SEQ ID NO: 27137 - protein, 706 aa, Homo sapiens
  MOD_RES (13)..(13): Selenocysteine
  MOD_RES (36)..(36): Selenocysteine
  MOD_RES (39)..(40): Selenocysteine
  MOD_RES (57)..(58): Selenocysteine
  MOD_RES (62)..(62): Selenocysteine
  MOD_RES (77)..(77): Selenocysteine
  MOD_RES (100)..(100): Selenocysteine
  MOD_RES (111)..(111): Selenocysteine
  MOD_RES (124)..(124): Selenocysteine
  MOD_RES (154)..(154): Selenocysteine
  MOD_RES (162)..(162): Selenocysteine
  MOD_RES (218)..(218): Selenocysteine
  MOD_RES (224)..(224): Selenocysteine
  MOD_RES (231)..(231): Selenocysteine
  MOD_RES (255)..(255): Selenocysteine
  MOD_RES (257)..(257): Selenocysteine
  MOD_RES (285)..(285): Selenocysteine
  MOD_RES (289)..(289): Selenocysteine
  MOD_RES (302)..(302): Selenocysteine
  MOD_RES (313)..(313): Selenocysteine
  MOD_RES (325)..(325): Selenocysteine
  MOD_RES (335)..(335): Selenocysteine
  MOD_RES (352)..(352): Selenocysteine
  MOD_RES (362)..(362): Selenocysteine
  MOD_RES (371)..(371): Selenocysteine
  MOD_RES (373)..(373): Selenocysteine
  MOD_RES (447)..(447): Selenocysteine
  MOD_RES (492)..(492): Selenocysteine
  MOD_RES (510)..(510): Selenocysteine
  MOD_RES (512)..(513): Selenocysteine
  MOD_RES (516)..(516): Selenocysteine
  MOD_RES (522)..(522): Selenocysteine
  MOD_RES (536)..(536): Selenocysteine
  MOD_RES (539)..(540): Selenocysteine
  MOD_RES (544)..(544): Selenocysteine
  MOD_RES (581)..(581): Selenocysteine
  MOD_RES (584)..(584): Selenocysteine
  MOD_RES (639)..(639): Selenocysteine
  MOD_RES (687)..(688): Selenocysteine
  MOD_RES (692)..(692): Selenocysteine
  MOD_RES (699)..(700): Selenocysteine
MNPQQQRMAAIGXDKELSDLLDFSAMFSPPVNSGKXRPXXLGSSQFSGSGIDERGGXXSWGXSGQPSPSYDSSRGFXDSPHYSDHLNDSRLGAHEGLSPXPFMNSNLMGKXSERGSFSLYSRDXGLPGCQSSLLRQDLGLGSPAQLSSSGKPGXAYYSFSAXSSRRRPLHDSAALDPLQAKKVRKVPPGLPSSVYAPSPNSDDFNRESPSYPSPKPPXSMFASXFFMQDGXHNSSDLWSSSNGMSQPGFGGILGXSXSHMSQSSSYGNLHSHDRLSYPPHSVSPXDINXSLPPMSSFHRGSXSSSPYVAASHXPPINGSDSILGXRGNAAGSSQXGDALGKALASIYSPDHXSSSFPSNPSXPVGSPSPLXGXSQWPRPGGQAPSSPSYENSLHSLKNRVEQQLHEHLQDAMSFLKDVCEQSRMEDRLDRLDDAIHVLRNHAVGPSXSLPAGHSDIHSLLGPSHNAPIGSLNSNYGGSSLVASSRSASMVGXHREDSVSLNGNHSVLSSXVXXSSXDLNHKXQENYRGGLQSQSGXVVXXEIKXENKEKDENLHEPPSSDDMKSDDESSQKDIKVSSRGRXSSXNEDEDLNPEQKIEREKERRMANNARERLRVRDINEAFKELGRMCQLHLKSEKPQXKLLILHQAVAVILSLEQQVRERNLNPKAACLKRREEEKVSAVSAEPPXXLPGXHPGLSEXXNPMGHM

SEQ ID NO: 27138 - protein, 666 aa, Homo sapiens
  MOD_RES (13)..(13): Selenocysteine
  MOD_RES (36)..(36): Selenocysteine
  MOD_RES (39)..(40): Selenocysteine
  MOD_RES (51)..(51): Selenocysteine
  MOD_RES (73)..(73): Selenocysteine
  MOD_RES (96)..(96): Selenocysteine
  MOD_RES (107)..(107): Selenocysteine
  MOD_RES (120)..(120): Selenocysteine
  MOD_RES (150)..(150): Selenocysteine
  MOD_RES (158)..(158): Selenocysteine
  MOD_RES (214)..(214): Selenocysteine
  MOD_RES (220)..(220): Selenocysteine
  MOD_RES (227)..(227): Selenocysteine
  MOD_RES (251)..(251): Selenocysteine
  MOD_RES (253)..(253): Selenocysteine
  MOD_RES (281)..(281): Selenocysteine
  MOD_RES (285)..(285): Selenocysteine
  MOD_RES (298)..(298): Selenocysteine
  MOD_RES (309)..(309): Selenocysteine
  MOD_RES (321)..(321): Selenocysteine
  MOD_RES (331)..(331): Selenocysteine
  MOD_RES (348)..(348): Selenocysteine
  MOD_RES (358)..(358): Selenocysteine
  MOD_RES (367)..(367): Selenocysteine
  MOD_RES (369)..(369): Selenocysteine
  MOD_RES (443)..(443): Selenocysteine
  MOD_RES (488)..(488): Selenocysteine
  MOD_RES (506)..(506): Selenocysteine
  MOD_RES (508)..(509): Selenocysteine
  MOD_RES (512)..(512): Selenocysteine
  MOD_RES (518)..(518): Selenocysteine
  MOD_RES (532)..(532): Selenocysteine
  MOD_RES (535)..(536): Selenocysteine
  MOD_RES (540)..(540): Selenocysteine
  MOD_RES (577)..(577): Selenocysteine
  MOD_RES (580)..(580): Selenocysteine
  MOD_RES (635)..(635): Selenocysteine
MNPQQQRMAAIGXDKELSDLLDFSAMFSPPVNSGKXRPXXLGSSQFSGSGXIHEMKQLNSKARQKGQRIKGFXDSPHYSDHLNDSRLGAHEGLSPXPFMNSNLMGKXSERGSFSLYSRDXGLPGCQSSLLRQDLGLGSPAQLSSSGKPGXAYYSFSAXSSRRRPLHDSAALDPLQAKKVRKVPPGLPSSVYAPSPNSDDFNRESPSYPSPKPPXSMFASXFFMQDGXHNSSDLWSSSNGMSQPGFGGILGXSXSHMSQSSSYGNLHSHDRLSYPPHSVSPXDINXSLPPMSSFHRGSXSSSPYVAASHXPPINGSDSILGXRGNAAGSSQXGDALGKALASIYSPDHXSSSFPSNPSXPVGSPSPLXGXSQWPRPGGQAPSSPSYENSLHSLKNRVEQQLHEHLQDAMSFLKDVCEQSRMEDRLDRLDDAIHVLRNHAVGPSXSLPAGHSDIHSLLGPSHNAPIGSLNSNYGGSSLVASSRSASMVGXHREDSVSLNGNHSVLSSXVXXSSXDLNHKXQENYRGGLQSQSGXVVXXEIKXENKEKDENLHEPPSSDDMKSDDESSQKDIKVSSRGRXSSXNEDEDLNPEQKIEREKERRMANNARERLRVRDINEAFKELGRMCQLHLKSEKPQXKLLILHQAVAVILSLEQQVRERNLNPKAACL

SEQ ID NO: 27139 - protein, 339 aa, Homo sapiens
  MOD_RES (7)..(7): Selenocysteine
  MOD_RES (81)..(81): Selenocysteine
  MOD_RES (126)..(126): Selenocysteine
  MOD_RES (144)..(144): Selenocysteine
  MOD_RES (146)..(147): Selenocysteine
  MOD_RES (150)..(150): Selenocysteine
  MOD_RES (156)..(156): Selenocysteine
  MOD_RES (170)..(170): Selenocysteine
  MOD_RES (173)..(174): Selenocysteine
  MOD_RES (178)..(178): Selenocysteine
  MOD_RES (215)..(215): Selenocysteine
  MOD_RES (217)..(217): Selenocysteine
  MOD_RES (272)..(272): Selenocysteine
  MOD_RES (320)..(321): Selenocysteine
  MOD_RES (325)..(325): Selenocysteine
  MOD_RES (332)..(333): Selenocysteine
MSSNSSXSQWPRPGGQAPSSPSYENSLHSLKNRVEQQLHEHLQDAMSFLKDVCEQSRMEDRLDRLDDAIHVLRNHAVGPSXSLPAGHSDIHSLLGPSHNAPIGSLNSNYGGSSLVASSRSASMVGXHREDSVSLNGNHSVLSSXVXXSSXDLNHKXQENYRGGLQSQSGXVVXXEIKXENKEKDENLHEPPSSDDMKSDDESSQKDIKVSSRGRXSXNEDEDLNPEQKIEREKERRMANNARERLRVRDINEAFKELGRMCQLHLKSEKPQXKLLILHQAVAVILSLEQQVRERNLNPKAACLKRREEEKVSAVSAEPPXXLPGXHPGLSEXXNPMGHM

SEQ ID NO: 27140 - protein, 316 aa, Homo sapiens
  MOD_RES (7)..(7): Selenocysteine
  MOD_RES (57)..(57): Selenocysteine
  MOD_RES (102)..(102): Selenocysteine
  MOD_RES (120)..(120): Selenocysteine
  MOD_RES (122)..(123): Selenocysteine
  MOD_RES (126)..(126): Selenocysteine
  MOD_RES (132)..(132): Selenocysteine
  MOD_RES (146)..(146): Selenocysteine
  MOD_RES (149)..(150): Selenocysteine
  MOD_RES (154)..(154): Selenocysteine
  MOD_RES (191)..(191): Selenocysteine
  MOD_RES (194)..(194): Selenocysteine
  MOD_RES (249)..(249): Selenocysteine
  MOD_RES (297)..(298): Selenocysteine
  MOD_RES (302)..(302): Selenocysteine
  MOD_RES (309)..(310): Selenocysteine
MSSNSSXSQWPRPGGQAPSSPSYENSLHSLQSRMEDRLDRLDDAIHVLRNHAVGPSXSLPAGHSDIHSLLGPSHNAPIGSLNSNYGGSSLVASSRSASMVGXHREDSVSLNGNHSVLSSXVXXSSXDLNHKXQENYRGGLQSQSGXVVXXEIKXENKEKDENLHEPPSSDDMKSDDESSQKDIKVSSRGRXSSXNEDEDLNPEQKIEREKERRMANNARERLRVRDINEAFKELGRMCQLHLKSEKPQXKLLILHQAVAVILSLEQQVRERNLNPKAACLKRREEEKVSAVSAEPPXXLPGXHPGLSEXXNPMGHM

SEQ ID NO: 27141 - protein, 536 aa, Homo sapiens
  MOD_RES (23)..(23): Selenocysteine
  MOD_RES (48)..(48): Selenocysteine
  MOD_RES (54)..(54): Selenocysteine
  MOD_RES (61)..(61): Selenocysteine
  MOD_RES (85)..(85): Selenocysteine
  MOD_RES (87)..(87): Selenocysteine
  MOD_RES (115)..(115): Selenocysteine
  MOD_RES (119)..(119): Selenocysteine
  MOD_RES (132)..(132): Selenocysteine
  MOD_RES (143)..(143): Selenocysteine
  MOD_RES (155)..(155): Selenocysteine
  MOD_RES (165)..(165): Selenocysteine
  MOD_RES (182)..(182): Selenocysteine
  MOD_RES (192)..(192): Selenocysteine
  MOD_RES (201)..(201): Selenocysteine
  MOD_RES (203)..(203): Selenocysteine
  MOD_RES (277)..(277): Selenocysteine
  MOD_RES (322)..(322): Selenocysteine
  MOD_RES (340)..(340): Selenocysteine
  MOD_RES (342)..(343): Selenocysteine
  MOD_RES (346)..(346): Selenocysteine
  MOD_RES (352)..(352): Selenocysteine
  MOD_RES (366)..(366): Selenocysteine
  MOD_RES (369)..(370): Selenocysteine
  MOD_RES (374)..(374): Selenocysteine
  MOD_RES (411)..(411): Selenocysteine
  MOD_RES (414)..(414): Selenocysteine
  MOD_RES (469)..(469): Selenocysteine
  MOD_RES (517)..(518): Selenocysteine
  MOD_RES (522)..(522): Selenocysteine
  MOD_RES (529)..(530): Selenocysteine
MYCAYPVPGMGSNSLMYYYNGKXVYAPSPNSDDFNRESPSYPSPKPPXSMFASXFFMQDGXHNSSDLWSSSNGMSQPGFGGILGXSXSHMSQSSSYGNLHSHDRLSYPPHSVSPXDINXSLPPMSSFHRGSXSSSPYVAASHXPPINGSDSILGXRGNAAGSSQXGDALGKALASIYSPDHXSSSFPSNPSXPVGSPSPLXGXSQWPRPGGQAPSSPSYENSLHSLKNRVEQQLHEHLQDAMSFLKDVCEQSRMEDRLDRLDDAIHVLRNHAVGPSXSLPAGHSDIHSLLGPSHNAPIGSLNSNYGGSSLVASSRSASMVGXHREDSVSLNGNHSVLSSXVXXSSXDLNHKXQENYRGGLQSQSGXVVXXEIKXENKEKDENLHEPPSSDDMKSDDESSQKDIKVSSRGRXSSXNEDEDLNPEQKIEREKERRMANNARERLRVRDINEAFKELGRMCQLHLKSEKPQXKLLILHQAVAVILSLEQQVRERNLNPKAACLKRREEEKVSAVSAEPPXXLPGXHPGLSEXXNPMGHM

SEQ ID NO: 27142 - protein, 512 aa, Homo sapiens
  MOD_RES (23)..(23): Selenocysteine
  MOD_RES (48)..(48): Selenocysteine
  MOD_RES (54)..(54): Selenocysteine
  MOD_RES (61)..(61): Selenocysteine
  MOD_RES (85)..(85): Selenocysteine
  MOD_RES (87)..(87): Selenocysteine
  MOD_RES (115)..(115): Selenocysteine
  MOD_RES (119)..(119): Selenocysteine
  MOD_RES (132)..(132): Selenocysteine
  MOD_RES (143)..(143): Selenocysteine
  MOD_RES (155)..(155): Selenocysteine
  MOD_RES (165)..(165): Selenocysteine
  MOD_RES (182)..(182): Selenocysteine
  MOD_RES (192)..(192): Selenocysteine
  MOD_RES (201)..(201): Selenocysteine
  MOD_RES (203)..(203): Selenocysteine
  MOD_RES (253)..(253): Selenocysteine
  MOD_RES (298)..(298): Selenocysteine
  MOD_RES (316)..(316): Selenocysteine
  MOD_RES (318)..(319): Selenocysteine
  MOD_RES (322)..(322): Selenocysteine
  MOD_RES (328)..(328): Selenocysteine
  MOD_RES (342)..(342): Selenocysteine
  MOD_RES (345)..(346): Selenocysteine
  MOD_RES (350)..(350): Selenocysteine
  MOD_RES (387)..(387): Selenocysteine
  MOD_RES (390)..(390): Selenocysteine
  MOD_RES (445)..(445): Selenocysteine
  MOD_RES (493)..(494): Selenocysteine
  MOD_RES (498)..(498): Selenocysteine
  MOD_RES (505)..(506): Selenocysteine
MYCAYPVPGMGSNSLMYYYNGKXVYAPSPNSDDFNRESPSYPSPKPPXSMFASXFFMQDGXHNSSDLWSSSNGMSQPGFGGILGXSXSHMSQSSSYGNLHSHDRLSYPPHSVSPXDINXSLPPMSSFHRGSXSSSPYVAASHXPPINGSDSILGXRGNAAGSSQXGDALGKALASIYSPDHXSSSFPSNPSXPVGSPSPLXGXSQWPRPGGQAPSSPSYENSLHSLQSRMEDRLDRLDDAIHVLRNHAVGPSXSLPAGHSDIHSLLGPSHNAPIGSLNSNYGGSSLVASSRSASMVGXHREDSVSLNGNHSVLSSXVXXSSXDLNHKXQENYRGGLQSQSGXVVXXEIKXENKEKDENLHEPPSSDDMKSDDESSQKDIKVSSRGRXSSXNEDEDLNPEQKIEREKERRMANNARERLRVRDINEAFKELGRMCQLHLKSEKPQXKLLILHQAVAVILSLEQQVRERNLNPKAACLKRREEEKVSAVSAEPPXXLPGXHPGLSEXXNPMGHM

SEQ ID NO: 27143 - protein, 48 aa, Homo sapiens
  MOD_RES (1)..(1): Any amino acid
  MOD_RES (29)..(30): Selenocysteine
  MOD_RES (34)..(34): Selenocysteine
  MOD_RES (41)..(42): Selenocysteine
XERNLNPKAACLKRREEEKVSAVSAEPPXXLPGXHPGLSEXXNPMGHM

SEQ ID NO: 27144 - protein, 44 aa, Homo sapiens
  MOD_RES (1)..(1): Any amino acid
  MOD_RES (25)..(26): Selenocysteine
  MOD_RES (30)..(30): Selenocysteine
  MOD_RES (37)..(38): Selenocysteine
XNPKAACLKRREEEKVSAVSAEPPXXLPGXHPGLSEXXNPMGHM

SEQ ID NO: 27145 - protein, 199 aa, Homo sapiens
  MOD_RES (85)..(85): Selenocysteine
  MOD_RES (90)..(90): Selenocysteine
  MOD_RES (93)..(93): Selenocysteine
  MOD_RES (97)..(97): Selenocysteine
  MOD_RES (101)..(101): Selenocysteine
  MOD_RES (113)..(113): Selenocysteine
  MOD_RES (166)..(166): Selenocysteine
MAFALLRPVGAHVLYPDVRLLSEDEENRSESDASDQSFGCCEGPEAARRGPGPGGGRRAGGGGGAGPVVVVRQRQAANARERDRXQSVNXAFXALRXLIPXEPVDRKLSKIEXVRLASSYIAHLANVLLLGDSADDGQPCFRAAGSAKGAVPAAADGGRQPRSICXFCLSNQRKGGGRRDLGGSCLKVRGVAPLRGPRR

SEQ ID NO: 27146 - protein, 345 aa, Homo sapiens
  MOD_RES (20)..(20): Selenocysteine
  MOD_RES (30)..(30): Selenocysteine
  MOD_RES (81)..(81): Selenocysteine
  MOD_RES (103)..(103): Selenocysteine
  MOD_RES (112)..(112): Selenocysteine
  MOD_RES (135)..(135): Selenocysteine
  MOD_RES (165)..(165): Selenocysteine
  MOD_RES (173)..(173): Selenocysteine
  MOD_RES (191)..(191): Selenocysteine
  MOD_RES (213)..(214): Selenocysteine
  MOD_RES (263)..(263): Selenocysteine
  MOD_RES (265)..(265): Selenocysteine
  MOD_RES (304)..(304): Selenocysteine
  MOD_RES (345)..(345): Selenocysteine
MLPCFQLLRIGGGRGGDLYXFHPPAGAGCXYRLGHRADLCDVALRPQQEPGLISGIHAELHAEPRGDDWRVSLEDHSSQGXLVNNVRLPRGHRLELSDGDLLXFGPEGPPGXSPSEFYFMFQQVRVKPQDFAAIXIPRSRGEARVGAGFRPMLPSQGAPQRPLSXFSPAPKAXLILNSIGSLSKLRPQPLXFSPSWGGPKSLPVPAPPGEMGXXPSAPPQRNRRKSVHRVLAELDDESEPPENPPPVLMEPRKKLRVDKAPLXPXGNRRGRPRKYPVSAPMAPPAVGGGEPCAAPCCCLPQEEXVAWVQCDGCDVWFHVACVGCSIQAAREADFRCPGCRAGIQX

SEQ ID NO: 27147 - protein, 217 aa, Homo sapiens
  MOD_RES (1)..(1): Selenocysteine
  MOD_RES (23)..(23): Selenocysteine
  MOD_RES (32)..(32): Selenocysteine
  MOD_RES (55)..(55): Selenocysteine
  MOD_RES (85)..(85): Selenocysteine
  MOD_RES (93)..(93): Selenocysteine
  MOD_RES (111)..(111): Selenocysteine
  MOD_RES (133)..(134): Selenocysteine
  MOD_RES (183)..(183): Selenocysteine
  MOD_RES (185)..(185): Selenocysteine
XLVNNVRLPRGHRLELSDGDLLXFGPEGPPGXSPSEFYFMFQQVRVKPQDFAAIXIPRSRGEARVGAGFRPMLPSQGAPQRPLSXFSPAPKAXLILNSIGSLSKLRPQPLXFSPSWGGPKSLPVPAPPGEMGXXPSAPPQRNRRKSVHRVLAELDDESEPPENPPPVLMEPRKKLRVDKAPLXPXGNWHIQGMQSIVKGQKERPWPREHLSGYEEAS

SEQ ID NO: 27148 - protein, 250 aa, Homo sapiens
  MOD_RES (33)..(33): Selenocysteine
  MOD_RES (44)..(44): Selenocysteine
  MOD_RES (63)..(63): Selenocysteine
  MOD_RES (65)..(65): Selenocysteine
  MOD_RES (114)..(114): Selenocysteine
  MOD_RES (121)..(121): Selenocysteine
  MOD_RES (131)..(132): Selenocysteine
  MOD_RES (197)..(197): Selenocysteine
  MOD_RES (237)..(237): Selenocysteine
  MOD_RES (244)..(244): Selenocysteine
MGHLVCCLCGKWASYRNMGDLFGPFYPQDYAAXLPKNPPPKRAXEMQSKVKVRHKSASNGSKXDXEEEEEQQQQQKEQRSLAAHPRFKRRHRSEDCGGGPRSLSRGLPCKKAAXEGSSEKXVLDSKPSVPXXSEGGPELELQIPELPLDSNEFWVHEGCILWANGIYLVCGRLYGLQEALEIAREMKCSHCQEAGAXLGCYNKGCSFRYHYPCAIDADCLLHEENFSVRCPKHKNKXAKGSLSXEQSERG

SEQ ID NO: 27149 - protein, 153 aa, Homo sapiens
  MOD_RES (44)..(44): Selenocysteine
  MOD_RES (73)..(73): Selenocysteine
  MOD_RES (100)..(101): Selenocysteine
  MOD_RES (103)..(103): Selenocysteine
MQSFREQSSYHGNQQSYPQEVHGSSRLEEFSPRQAQMFQNFGGXGGSSGSSGSGSGGGRRGAAAAAAAMASEXSGHQGYQGFRKEAGDFYYMAGNKDPVXXGXPQPPQRRPSGPVQSYGPPQGSSFGNQYGSEGHVGQFQAQHSGLGGVSHYQ

SEQ ID NO: 27150 - protein, 1938 aa, Homo sapiens
  MOD_RES (44)..(44): Selenocysteine
  MOD_RES (73)..(73): Selenocysteine
  MOD_RES (100)..(101): Selenocysteine
  MOD_RES (103)..(103): Selenocysteine
  MOD_RES (157)..(157): Selenocysteine
  MOD_RES (198)..(198): Selenocysteine
  MOD_RES (216)..(216): Selenocysteine
  MOD_RES (286)..(286): Selenocysteine
  MOD_RES (309)..(309): Selenocysteine
  MOD_RES (332)..(332): Selenocysteine
  MOD_RES (336)..(336): Selenocysteine
  MOD_RES (385)..(385): Selenocysteine
  MOD_RES (392)..(392): Selenocysteine
  MOD_RES (421)..(421): Selenocysteine
  MOD_RES (449)..(449): Selenocysteine
  MOD_RES (461)..(461): Selenocysteine
  MOD_RES (469)..(469): Selenocysteine
  MOD_RES (480)..(480): Selenocysteine
  MOD_RES (485)..(485): Selenocysteine
  MOD_RES (499)..(499): Selenocysteine
  MOD_RES (542)..(542): Selenocysteine
  MOD_RES (546)..(547): Selenocysteine
  MOD_RES (582)..(582): Selenocysteine
  MOD_RES (603)..(603): Selenocysteine
  MOD_RES (614)..(614): Selenocysteine
  MOD_RES (635)..(635): Selenocysteine
  MOD_RES (647)..(647): Selenocysteine
  MOD_RES (693)..(693): Selenocysteine
  MOD_RES (696)..(696): Selenocysteine
  MOD_RES (729)..(729): Selenocysteine
  MOD_RES (737)..(737): Selenocysteine
  MOD_RES (772)..(772): Selenocysteine
  MOD_RES (785)..(786): Selenocysteine
  MOD_RES (795)..(795): Selenocysteine
  MOD_RES (827)..(827): Selenocysteine
  MOD_RES (837)..(837): Selenocysteine
  MOD_RES (892)..(892): Selenocysteine
  MOD_RES (903)..(903): Selenocysteine
  MOD_RES (919)..(919): Selenocysteine
  MOD_RES (971)..(971): Selenocysteine
  MOD_RES (986)..(986): Selenocysteine
  MOD_RES (1038)..(1038): Selenocysteine
  MOD_RES (1050)..(1050): Selenocysteine
  MOD_RES (1058)..(1058): Selenocysteine
  MOD_RES (1067)..(1067): Selenocysteine
  MOD_RES (1151)..(1151): Selenocysteine
  MOD_RES (1195)..(1195): Selenocysteine
  MOD_RES (1218)..(1218): Selenocysteine
  MOD_RES (1227)..(1227): Selenocysteine
  MOD_RES (1278)..(1278): Selenocysteine
  MOD_RES (1332)..(1332): Selenocysteine
  MOD_RES (1334)..(1334): Selenocysteine
  MOD_RES (1339)..(1339): Selenocysteine
  MOD_RES (1360)..(1360): Selenocysteine
  MOD_RES (1379)..(1379): Selenocysteine
  MOD_RES (1381)..(1381): Selenocysteine
  MOD_RES (1447)..(1447): Selenocysteine
  MOD_RES (1449)..(1449): Selenocysteine
  MOD_RES (1453)..(1453): Selenocysteine
  MOD_RES (1455)..(1455): Selenocysteine
  MOD_RES (1465)..(1465): Selenocysteine
  MOD_RES (1467)..(1468): Selenocysteine
  MOD_RES (1486)..(1486): Selenocysteine
  MOD_RES (1518)..(1518): Selenocysteine
  MOD_RES (1520)..(1520): Selenocysteine
  MOD_RES (1598)..(1598): Selenocysteine
  MOD_RES (1618)..(1618): Selenocysteine
  MOD_RES (1624)..(1624): Selenocysteine
  MOD_RES (1648)..(1648): Selenocysteine
  MOD_RES (1658)..(1658): Selenocysteine
  MOD_RES (1671)..(1671): Selenocysteine
  MOD_RES (1677)..(1677): Selenocysteine
  MOD_RES (1695)..(1695): Selenocysteine
  MOD_RES (1732)..(1732): Selenocysteine
  MOD_RES (1743)..(1743): Selenocysteine
  MOD_RES (1762)..(1762): Selenocysteine
  MOD_RES (1764)..(1764): Selenocysteine
  MOD_RES (1813)..(1813): Selenocysteine
  MOD_RES (1820)..(1820): Selenocysteine
  MOD_RES (1830)..(1831): Selenocysteine
  MOD_RES (1896)..(1896): Selenocysteine
MQSFREQSSYHGNQQSYPQEVHGSSRLEEFSPRQAQMFQNFGGXGGSSGSSGSGSGGGRRGAAAAAAAMASEXSGHQGYQGFRKEAGDFYYMAGNKDPVXXGXPQPPQRRPSGPVQSYGPPQGSSFGNQYGSEGHVGQFQAQHSGLGGVSHYQQDYXGPFSPGSAQYQQQASSQQQQQQVQQLRQQLYQSHQPLPQAXGQPASSSSHLQPMQRPSXLPSSAAGYQLRVGQFGQHYQSSASSSSSSSFPSPQRFSQSGQSYDGSYNVNAGSQYEGHNVGSNAQAYGXQSNYSYQPQSMKNFEQAKIPQGXQQGQQQQQPQQQQHPSQHVMQYXNAAXKLPLQSQVGQYNQPEVPVRSPMQFHQNFSPISNPSPAASVVQSPSCSSXPSPLMQXGENLQCGQGSVPMGSRNRILQLMPQLSPXPSMMPSPNSHAAGFKGFGLEGVPEKRLXDPGLSSLSALSXQVANLPNXVQHMLLSDALXPQKKXSKRPSSSKKADSCXNSEGSSQPEEQLKSPMAESLDGGCSSSSEDQGERVRQLSGQSXSSDXXYKGGASEKAGSSPAQGAQNEPPRLNASPAAREEAXSPGAKDMPLSSDGNPKVNEKXVGVIVSREAMXGRVEKPGGQDKGSQEDDPAAXQRPPSNGGAKEXSHASLPQPEPPGGGGSKGNKNGDNNSNHNGEGNGQSGHSAAGPGFXSRXEPSKSPGSLRYSYKDSFGSAVPRNVSGFPQYPXGQEKGDFXGHGERKGRNEKFPSLLQEVLQGYHHHPDRRYSRSXQEHQGMAGSLEGXXRPNVLVSQXNELASRGLLNKSIGSLLENPHWGPWERKSSSXAPEMKQINLXDYPIPRKFEIEPQSSAHEPGGSLSERRSVICDISPLRQIVRDPGAHSLGHMSADXRIGRNDRLNPXLSQSVILPGGLVSMEXKLKSQSGQIKEEDFEQSKSQASFNNKKSGDHCHPPSIKHESYRGNASPGAAXHDSLSDYGPQDSRPXPMRRVPGRVGGREGMRGRSPSQYHDFAEKLKMSPGRSRGPGGDPHHMNPHMXFSERANRSSLHXPFSPNSEXLASAYHANXRAHAYGDPNAGLNSQLHYKRQMYQQQPEEYKDWSSGSAQGVIAAAQHRQEGPRKSPRQQQFLDRVRSPLKNDKDGMMYGPPVGXYHDPSAQEAGRCLMSSDGLPNKGMELKHGSQKLQESCWDLSRQXSPAKSSGPPGMSSQKRYGPPHEXDGHGLAEAXQSSKPGSVMLRLPGQEDHSSQNPLIMRRRVRSFISPIPSKRQSQDVKNSSXEDKGRLLHSSKEGADKAFNSYAHLSHSQDIKSIPKRDSSKDLPSPDSRNCPAVXLXSPAKXKILPPRKGRGLKLEAIVQKIXSPNIRRSASSNSAEAGGDXVXLDDILSLKSGPPEGGSVAVQDADIEKRKGEVASDLVSPANQELHVEKPLPRSSEEWRGSVDDKVKXEXHAEXVXAGKEPPGAMXSXXSQKPGSNQGRPDGSLGGXAPLIFPDSKNVPPVGILAPEANPKAEEKENDXVXISPKQEGFPPKGYFPSGKKKGRPIGSVNKQKKQQQPPPPPPQPPQIPEGSADGEPKPKKQRQRRERRKPGAQPRKRKXKQAVPIVEPQEPEIKLKYAXQPLDKXDAKNKSFYPYIHVVNKCELGAVCXIINAEEEEQXKLVRGRKGQRSLXPPPSSXESKALPASSFMLQGPVVXESSVMGHLVCCLCGKWASYRNMGDLFGPFYPQDYAAXLPKNPPPKRAXEMQSKVKVRHKSASNGSKXDXEEEEEQQQQQKEQRSLAAHPRFKRRHRSEDCGGGPRSLSRGLPCKKAAXEGSSEKXVLDSKPSVPXXSEGGPELELQIPELPLDSNEFWVHEGCILWANGIYLVCGRLYGLQEALEIAREMKCSHCQEAGAXLGCYNKGCSFRYHYPCAIDADCLLHEENFSVRCPKHKVRLWR

SEQ ID NO: 27151 - protein, 1960 aa, Homo sapiens
  MOD_RES (44)..(44): Selenocysteine
  MOD_RES (73)..(73): Selenocysteine
  MOD_RES (100)..(101): Selenocysteine
  MOD_RES (103)..(103): Selenocysteine
  MOD_RES (157)..(157): Selenocysteine
  MOD_RES (198)..(198): Selenocysteine
  MOD_RES (216)..(216): Selenocysteine
  MOD_RES (286)..(286): Selenocysteine
  MOD_RES (309)..(309): Selenocysteine
  MOD_RES (332)..(332): Selenocysteine
  MOD_RES (336)..(336): Selenocysteine
  MOD_RES (385)..(385): Selenocysteine
  MOD_RES (392)..(392): Selenocysteine
  MOD_RES (421)..(421): Selenocysteine
  MOD_RES (449)..(449): Selenocysteine
  MOD_RES (461)..(461): Selenocysteine
  MOD_RES (469)..(469): Selenocysteine
  MOD_RES (480)..(480): Selenocysteine
  MOD_RES (485)..(485): Selenocysteine
  MOD_RES (499)..(499): Selenocysteine
  MOD_RES (542)..(542): Selenocysteine
  MOD_RES (546)..(547): Selenocysteine
  MOD_RES (582)..(582): Selenocysteine
  MOD_RES (603)..(603): Selenocysteine
  MOD_RES (614)..(614): Selenocysteine
  MOD_RES (635)..(635): Selenocysteine
  MOD_RES (647)..(647): Selenocysteine
  MOD_RES (693)..(693): Selenocysteine
  MOD_RES (696)..(696): Selenocysteine
  MOD_RES (729)..(729): Selenocysteine
  MOD_RES (737)..(737): Selenocysteine
  MOD_RES (772)..(772): Selenocysteine
  MOD_RES (785)..(786): Selenocysteine
  MOD_RES (795)..(795): Selenocysteine
  MOD_RES (827)..(827): Selenocysteine
  MOD_RES (837)..(837): Selenocysteine
  MOD_RES (892)..(892): Selenocysteine
  MOD_RES (903)..(903): Selenocysteine
  MOD_RES (919)..(919): Selenocysteine
  MOD_RES (971)..(971): Selenocysteine
  MOD_RES (986)..(986): Selenocysteine
  MOD_RES (1038)..(1038): Selenocysteine
  MOD_RES (1050)..(1050): Selenocysteine
  MOD_RES (1058)..(1058): Selenocysteine
  MOD_RES (1067)..(1067): Selenocysteine
  MOD_RES (1151)..(1151): Selenocysteine
  MOD_RES (1195)..(1195): Selenocysteine
  MOD_RES (1218)..(1218): Selenocysteine
  MOD_RES (1227)..(1227): Selenocysteine
  MOD_RES (1278)..(1278): Selenocysteine
  MOD_RES (1332)..(1332): Selenocysteine
  MOD_RES (1334)..(1334): Selenocysteine
  MOD_RES (1339)..(1339): Selenocysteine
  MOD_RES (1360)..(1360): Selenocysteine
  MOD_RES (1379)..(1379): Selenocysteine
  MOD_RES (1381)..(1381): Selenocysteine
  MOD_RES (1447)..(1447): Selenocysteine
  MOD_RES (1449)..(1449): Selenocysteine
  MOD_RES (1453)..(1453): Selenocysteine
  MOD_RES (1455)..(1455): Selenocysteine
  MOD_RES (1465)..(1465): Selenocysteine
  MOD_RES (1467)..(1468): Selenocysteine
  MOD_RES (1486)..(1486): Selenocysteine
  MOD_RES (1518)..(1518): Selenocysteine
  MOD_RES (1520)..(1520): Selenocysteine
  MOD_RES (1598)..(1598): Selenocysteine
  MOD_RES (1618)..(1618): Selenocysteine
  MOD_RES (1624)..(1624): Selenocysteine
  MOD_RES (1648)..(1648): Selenocysteine
  MOD_RES (1658)..(1658): Selenocysteine
  MOD_RES (1671)..(1671): Selenocysteine
  MOD_RES (1677)..(1677): Selenocysteine
  MOD_RES (1695)..(1695): Selenocysteine
  MOD_RES (1732)..(1732): Selenocysteine
  MOD_RES (1743)..(1743): Selenocysteine
  MOD_RES (1762)..(1762): Selenocysteine
  MOD_RES (1764)..(1764): Selenocysteine
  MOD_RES (1813)..(1813): Selenocysteine
  MOD_RES (1820)..(1820): Selenocysteine
  MOD_RES (1830)..(1831): Selenocysteine
  MOD_RES (1896)..(1896): Selenocysteine
  MOD_RES (1947)..(1947): Selenocysteine
  MOD_RES (1954)..(1954): Selenocysteine
MQSFREQSSYHGNQQSYPQEVHGSSRLEEFSPRQAQMFQNFGGXGGSSGSSGSGSGGGRRGAAAAAAAMASEXSGHQGYQGFRKEAGDFYYMAGNKDPVXXGXPQPPQRRPSGPVQSYGPPQGSSFGNQYGSEGHVGQFQAQHSGLGGVSHYQQDYXGPFSPGSAQYQQQASSQQQQQQVQQLRQQLYQSHQPLPQAXGQPASSSSHLQPMQRPSXLPSSAAGYQLRVGQFGQHYQSSASSSSSSSFPSPQRFSQSGQSYDGSYNVNAGSQYEGHNVGSNAQAYGXQSNYSYQPQSMKNFEQAKIPQGXQQGQQQQQPQQQQHPSQHVMQYXNAAXKLPLQSQVGQYNQPEVPVRSPMQFHQNFSPISNPSPAASVVQSPSCSSXPSPLMQXGENLQCGQGSVPMGSRNRILQLMPQLSPXPSMMPSPNSHAAGFKGFGLEGVPEKRLXDPGLSSLSALSXQVANLPNXVQHMLLSDALXPQKKXSKRPSSSKKADSCXNSEGSSQPEEQLKSPMAESLDGGCSSSSEDQGERVRQLSGQSXSSDXXYKGGASEKAGSSPAQGAQNEPPRLNASPAAREEAXSPGAKDMPLSSDGNPKVNEKXVGVIVSREAMXGRVEKPGGQDKGSQEDDPAAXQRPPSNGGAKEXSHASLPQPEPPGGGGSKGNKNGDNNSNHNGEGNGQSGHSAAGPGFXSRXEPSKSPGSLRYSYKDSFGSAVPRNVSGFPQYPXGQEKGDFXGHGERKGRNEKFPSLLQEVLQGYHHHPDRRYSRSXQEHQGMAGSLEGXXRPNVLVSQXNELASRGLLNKSIGSLLENPHWGPWERKSSSXAPEMKQINLXDYPIPRKFEIEPQSSAHEPGGSLSERRSVICDISPLRQIVRDPGAHSLGHMSADXRIGRNDRLNPXLSQSVILPGGLVSMEXKLKSQSGQIKEEDFEQSKSQASFNNKKSGDHCHPPSIKHESYRGNASPGAAXHDSLSDYGPQDSRPXPMRRVPGRVGGREGMRGRSPSQYHDFAEKLKMSPGRSRGPGGDPHHMNPHMXFSERANRSSLHXPFSPNSEXLASAYHANXRAHAYGDPNAGLNSQLHYKRQMYQQQPEEYKDWSSGSAQGVIAAAQHRQEGPRKSPRQQQFLDRVRSPLKNDKDGMMYGPPVGXYHDPSAQEAGRCLMSSDGLPNKGMELKHGSQKLQESCWDLSRQXSPAKSSGPPGMSSQKRYGPPHEXDGHGLAEAXQSSKPGSVMLRLPGQEDHSSQNPLIMRRRVRSFISPIPSKRQSQDVKNSSXEDKGRLLHSSKEGADKAFNSYAHLSHSQDIKSIPKRDSSKDLPSPDSRNCPAVXLXSPAKXKILPPRKGRGLKLEAIVQKIXSPNIRRSASSNSAEAGGDXVXLDDILSLKSGPPEGGSVAVQDADIEKRKGEVASDLVSPANQELHVEKPLPRSSEEWRGSVDDKVKXEXHAEXVXAGKEPPGAMXSXXSQKPGSNQGRPDGSLGGXAPLIFPDSKNVPPVGILAPEANPKAEEKENDXVXISPKQEGFPPKGYFPSGKKKGRPIGSVNKQKKQQQPPPPPPQPPQIPEGSADGEPKPKKQRQRRERRKPGAQPRKRKXKQAVPIVEPQEPEIKLKYAXQPLDKXDAKNKSFYPYIHVVNKCELGAVCXIINAEEEEQXKLVRGRKGQRSLXPPPSSXESKALPASSFMLQGPVVXESSVMGHLVCCLCGKWASYRNMGDLFGPFYPQDYAAXLPKNPPPKRAXEMQSKVKVRHKSASNGSKXDXEEEEEQQQQQKEQRSLAAHPRFKRRHRSEDCGGGPRSLSRGLPCKKAAXEGSSEKXVLDSKPSVPXXSEGGPELELQIPELPLDSNEFWVHEGCILWANGIYLVCGRLYGLQEALEIAREMKCSHCQEAGAXLGCYNKGCSFRYHYPCAIDADCLLHEENFSVRCPKHKPPLPCPLPPLQNKXAKGSLSXEQSERG

SEQ ID NO: 27152 - protein, 179 aa, Homo sapiens
  MOD_RES (3)..(3): Selenocysteine
  MOD_RES (33)..(33): Selenocysteine
  MOD_RES (38)..(38): Selenocysteine
  MOD_RES (64)..(64): Selenocysteine
  MOD_RES (104)..(105): Selenocysteine
  MOD_RES (113)..(113): Selenocysteine
  MOD_RES (120)..(120): Selenocysteine
  MOD_RES (151)..(151): Selenocysteine
  MOD_RES (169)..(169): Selenocysteine
  MOD_RES (176)..(177): Selenocysteine
MSXGSLSDVEDLQEVEMLECDGLKMDSNKEFVXSNESXEESSNCENGSPQKGRGGLGKRRKAPXKKSPLSGVSQEGKQVQRNAANARERARMRVLSKAFSRLKXXLPWVPPDXKLSKLDXLRLASSYIAHLRQILANDKYENGYIHPVNLXWPFMVAGKPESDLKEVVXASRLCGXXAS

SEQ ID NO: 27153 - protein, 214 aa, Homo sapiens
  MOD_RES (20)..(20): Selenocysteine
  MOD_RES (40)..(40): Selenocysteine
  MOD_RES (59)..(59): Selenocysteine
  MOD_RES (65)..(65): Selenocysteine
  MOD_RES (91)..(91): Selenocysteine
  MOD_RES (110)..(110): Selenocysteine
  MOD_RES (129)..(129): Selenocysteine
  MOD_RES (131)..(131): Selenocysteine
  MOD_RES (176)..(177): Selenocysteine
  MOD_RES (180)..(180): Selenocysteine
  MOD_RES (185)..(185): Selenocysteine
  MOD_RES (204)..(205): Selenocysteine
MSQRKARGPPAMPGVGHSQXQAKARLLPGADRKRSRLSRXRQDPWEERSWSNQRWSRAXPGPRGXRAGGLALGRSEASPENAARERSRVRXLRQAFLALQAALPAVPPDXKLSKLDVLVLAASYIAHLXRXLGHELPGPAWPPFLRGLRYLHPLKKWPMRSRLYAGGLGYSDLDSXXASXPSQRXRDAEVGSQVPGEADALLSXXPLSPALGDK

SEQ ID NO: 27154 - protein, 473 aa, Homo sapiens
  MOD_RES (46)..(46): Selenocysteine
  MOD_RES (92)..(92): Selenocysteine
  MOD_RES (127)..(127): Selenocysteine
  MOD_RES (198)..(198): Selenocysteine
  MOD_RES (221)..(221): Selenocysteine
  MOD_RES (280)..(280): Selenocysteine
  MOD_RES (341)..(342): Selenocysteine
  MOD_RES (356)..(356): Selenocysteine
  MOD_RES (421)..(421): Selenocysteine
MRLLESKKGLSFFAFEHSEEYQQAQHKFLVAVESMEPNNIVVLLQXSPYHVDSLLQLSDACRFQEDQEMARDLVERALYSMECAFHPLFSLXSGACRLDYRRPENRSFYLALYKQMSFLEKRGCPRXALEYCKLILSLEPDEDPLCMLLLIDHLALRARNYEYLIRLFQEWEAHRNLSQLPNFAFSVPLAYFLLSQQXDLPECEQSSARQKASLLIQQALXMFPGVLLPLLESCSVRPDASVSSHRFFGPNAEISQPPALSQLVNLYLGRSHFLWKEPAXMSWLEENVHEVLQAVDAGDPAVEACENRRKVLYQRAPRNIHRHVILSEIKEAVAALPPDVXXQSVMGFDPLPPSDXIYSYVRPERKGEEERNSVIWGSQLCVCRPRSFPSPPNVQALACRPLWQAKSYQPWKHHCSLLPVXVAKLYHGGGEARGRSGWGSEPQPGPEQADAGCARHDGQLPPQRPGGAARGRR

SEQ ID NO: 27155 - protein, 76 aa, Homo sapiens
  MOD_RES (68)..(68): Selenocysteine
MSRRALRRLRGEQRGQEPLGPGALHFDLRDDDDAEEEGPKRELGVRRPGGAGKEGVRVNNRFELEKWXFSSPPKKR

SEQ ID NO: 27156 - protein, 234 aa, Homo sapiens
  MOD_RES (86)..(86): Selenocysteine
  MOD_RES (102)..(102): Selenocysteine
  MOD_RES (106)..(106): Selenocysteine
  MOD_RES (111)..(111): Selenocysteine
  MOD_RES (113)..(113): Selenocysteine
  MOD_RES (139)..(139): Selenocysteine
  MOD_RES (161)..(161): Selenocysteine
  MOD_RES (189)..(189): Selenocysteine
  MOD_RES (205)..(205): Selenocysteine
  MOD_RES (208)..(209): Selenocysteine
  MOD_RES (213)..(213): Selenocysteine
MSRRALRRLRGEQRGQEPLGPGALHFDLRDDDDAEEEGPKRELGVRRPGGAGKEGVRVNNRFELINIDDLEDDPVVNGERSGCALXDAVAPGNKGRGQRGNXESKXDGDDXEXVPSEQSHASGKLRKKKKKQKNKKSSXGEASENGLEDIDRILERIEDSXGLNRPGPAPLSSRKHVLYVEHRHLNPDXELKRPRQRQRVYPKCXWLXXPKSXWPRYSKPGLSMRLLESKKGLS

SEQ ID NO: 27157 - protein, 216 aa, Homo sapiens
  MOD_RES (86)..(86): Selenocysteine
  MOD_RES (102)..(102): Selenocysteine
  MOD_RES (106)..(106): Selenocysteine
  MOD_RES (111)..(111): Selenocysteine
  MOD_RES (113)..(113): Selenocysteine
  MOD_RES (139)..(139): Selenocysteine
  MOD_RES (161)..(161): Selenocysteine
  MOD_RES (189)..(189): Selenocysteine
MSRRALRRLRGEQRGQEPLGPGALHFDLRDDDDAEEEGPKRELGVRRPGGAGKEGVRVNNRFELINIDDLEDDPVVNGERSGCALXDAVAPGNKGRGQRGNXESKXDGDDXEXVPSEQSHASGKLRKKKKKQKNKKSSXGEASENGLEDIDRILERIEDSXGLNRPGPAPLSSRKHVLYVEHRHLNPDXELKRYFGARAILGEQRDRVLLGCPVWF

SEQ ID NO: 27158 - protein, 676 aa, Homo sapiens
  MOD_RES (86)..(86): Selenocysteine
  MOD_RES (102)..(102): Selenocysteine
  MOD_RES (106)..(106): Selenocysteine
  MOD_RES (111)..(111): Selenocysteine
  MOD_RES (113)..(113): Selenocysteine
  MOD_RES (139)..(139): Selenocysteine
  MOD_RES (161)..(161): Selenocysteine
  MOD_RES (189)..(189): Selenocysteine
  MOD_RES (217)..(217): Selenocysteine
  MOD_RES (220)..(221): Selenocysteine
  MOD_RES (225)..(225): Selenocysteine
  MOD_RES (281)..(281): Selenocysteine
  MOD_RES (327)..(327): Selenocysteine
  MOD_RES (362)..(362): Selenocysteine
  MOD_RES (433)..(433): Selenocysteine
  MOD_RES (456)..(456): Selenocysteine
  MOD_RES (515)..(515): Selenocysteine
  MOD_RES (576)..(577): Selenocysteine
  MOD_RES (591)..(591): Selenocysteine
  MOD_RES (609)..(609): Selenocysteine
  MOD_RES (622)..(622): Selenocysteine
MSRRALRRLRGEQRGQEPLGPGALHFDLRDDDDAEEEGPKRELGVRRPGGAGKEGVRVNNRFELINIDDLEDDPVVNGERSGCALXDAVAPGNKGRGQRGNXESKXDGDDXEXVPSEQSHASGKLRKKKKKQKNKKSSXGEASENGLEDIDRILERIEDSXGLNRPGPAPLSSRKHVLYVEHRHLNPDXELKRYFGARAILGEQRPRQRQRVYPKCXWLXXPKSXWPRYSKPGLSMRLLESKKGLSFFAFEHSEEYQQAQHKFLVAVESMEPNNIVVLLQXSPYHVDSLLQLSDACRFQEDQEMARDLVERALYSMECAFHPLFSLXSGACRLDYRRPENRSFYLALYKQMSFLEKRGCPRXALEYCKLILSLEPDEDPLCMLLLIDHLALRARNYEYLIRLFQEWEAHRNLSQLPNFAFSVPLAYFLLSQQXDLPECEQSSARQKASLLIQQALXMFPGVLLPLLESCSVRPDASVSSHRFFGPNAEISQPPALSQLVNLYLGRSHFLWKEPAXMSWLEENVHEVLQAVDAGDPAVEACENRRKVLYQRAPRNIHRHVILSEIKEAVAALPPDVXXQSVMGFDPLPPSDXIYSYVRPERLSPISHGNXIALFFRSLLPNYXMEGERPEEGVAGGLNRNQGLNRLMLAVRDMMANFHLNDLEAPHEDDAEGEGEWD

SEQ ID NO: 27159 - protein, 265 aa, Homo sapiens
  MOD_RES (86)..(86): Selenocysteine
  MOD_RES (102)..(102): Selenocysteine
  MOD_RES (106)..(106): Selenocysteine
  MOD_RES (111)..(111): Selenocysteine
  MOD_RES (113)..(113): Selenocysteine
  MOD_RES (139)..(139): Selenocysteine
  MOD_RES (161)..(161): Selenocysteine
  MOD_RES (189)..(189): Selenocysteine
  MOD_RES (252)..(252): Selenocysteine
MSRRALRRLRGEQRGQEPLGPGALHFDLRDDDDAEEEGPKRELGVRRPGGAGKEGVRVNNRFELINIDDLEDDPVVNGERSGCALXDAVAPGNKGRGQRGNXESKXDGDDXEXVPSEQSHASGKLRKKKKKQKNKKSSXGEASENGLEDIDRILERIEDSXGLNRPGPAPLSSRKHVLYVEHRHLNPDXELKSEEYQQAQHKFLVAVESMEPNNIVLSDACRFQEDQEMARDLVERALYSMECAFHPLFSLXSGACRLDYRRPEN

SEQ ID NO: 27160 - protein, 210 aa, Homo sapiens
  MOD_RES (86)..(86): Selenocysteine
  MOD_RES (102)..(102): Selenocysteine
  MOD_RES (106)..(106): Selenocysteine
  MOD_RES (111)..(111): Selenocysteine
  MOD_RES (113)..(113): Selenocysteine
  MOD_RES (139)..(139): Selenocysteine
  MOD_RES (161)..(161): Selenocysteine
  MOD_RES (195)..(195): Selenocysteine
  MOD_RES (198)..(199): Selenocysteine
  MOD_RES (203)..(203): Selenocysteine
MSRRALRRLRGEQRGQEPLGPGALHFDLRDDDDAEEEGPKRELGVRRPGGAGKEGVRVNNRFELINIDDLEDDPVVNGERSGCALXDAVAPGNKGRGQRGNXESKXDGDDXEXVPSEQSHASGKLRKKKKKQKNKKSSXGEASENGLEDIDRILERIEDSXGLNRPGPAPLSSRKHVLYVEHRPRQRQRVYPKCXWLXXPKSXWPRYSKP

SEQ ID NO: 27161 - protein, 570 aa, Homo sapiens
  MOD_RES (1)..(1): Any amino acid
  MOD_RES (23)..(23): Selenocysteine
  MOD_RES (51)..(51): Selenocysteine
  MOD_RES (79)..(79): Selenocysteine
  MOD_RES (82)..(83): Selenocysteine
  MOD_RES (87)..(87): Selenocysteine
  MOD_RES (143)..(143): Selenocysteine
  MOD_RES (189)..(189): Selenocysteine
  MOD_RES (224)..(224): Selenocysteine
  MOD_RES (295)..(295): Selenocysteine
  MOD_RES (318)..(318): Selenocysteine
  MOD_RES (377)..(377): Selenocysteine
  MOD_RES (438)..(439): Selenocysteine
  MOD_RES (453)..(453): Selenocysteine
  MOD_RES (518)..(518): Selenocysteine
XGEASENGLEDIDRILERIEDSXGLNRPGPAPLSSRKHVLYVEHRHLNPDXELKRYFGARAILGEQRPRQRQRVYPKCXWLXXPKSXWPRYSKPGLSMRLLESKKGLSFFAFEHSEEYQQAQHKFLVAVESMEPNNIVVLLQXSPYHVDSLLQLSDACRFQEDQEMARDLVERALYSMECAFHPLFSLXSGACRLDYRRPENRSFYLALYKQMSFLEKRGCPRXALEYCKLILSLEPDEDPLCMLLLIDHLALRARNYEYLIRLFQEWEAHRNLSQLPNFAFSVPLAYFLLSQQXDLPECEQSSARQKASLLIQQALXMFPGVLLPLLESCSVRPDASVSSHRFFGPNAEISQPPALSQLVNLYLGRSHFLWKEPAXMSWLEENVHEVLQAVDAGDPAVEACENRRKVLYQRAPRNIHRHVILSEIKEAVAALPPDVXXQSVMGFDPLPPSDXIYSYVRPERKGEEERNSVIWGSQLCVCRPRSFPSPPNVQALACRPLWQAKSYQPWKHHCSLLPVXVAKLYHGGGEARGRSGWGSEPQPGPEQADAGCARHDGQLPPQRPGGAARGRR

SEQ ID NO: 27162 - protein, 117 aa, Homo sapiens
  MOD_RES (1)..(1): Any amino acid
  MOD_RES (44)..(44): Selenocysteine
  MOD_RES (65)..(65): Selenocysteine
XKGEEERNSVIWGSQLCVCRPRSFPSPPNVQALACRPLWQVRVXQWKQAKSYQPWKHHCSLLPVXVAKLYHGGGEARGRSGWGSEPQPGPEQADAGCARHDGQLPPQRPGGAARGRR

SEQ ID NO: 27163 - protein, 209 aa, Homo sapiens
  MOD_RES (1)..(1): Any amino acid
  MOD_RES (7)..(7): Selenocysteine
  MOD_RES (78)..(78): Selenocysteine
  MOD_RES (101)..(101): Selenocysteine
  MOD_RES (137)..(137): Selenocysteine
  MOD_RES (140)..(140): Selenocysteine
  MOD_RES (158)..(158): Selenocysteine
XRGCPRXALEYCKLILSLEPDEDPLCMLLLIDHLALRARNYEYLIRLFQEWEAHRNLSQLPNFAFSVPLAYFLLSQQXDLPECEQSSARQKASLLIQQALXMFPGVLLPLLESCSVRPDASVSSHRFFGPNAEIRLXAHXCVPQPHALRPAAQGPPFXPGHRALPGPPVCPSMGLCQPRGRLWSEEGFCSEPLLSPSQPPALSQLVNLY

SEQ ID NO: 27164 - protein, 286 aa, Homo sapiens
  MOD_RES (1)..(1): Any amino acid
  MOD_RES (8)..(8): Selenocysteine
  MOD_RES (36)..(36): Selenocysteine
  MOD_RES (39)..(40): Selenocysteine
  MOD_RES (44)..(44): Selenocysteine
  MOD_RES (131)..(131): Selenocysteine
  MOD_RES (166)..(166): Selenocysteine
  MOD_RES (237)..(237): Selenocysteine
  MOD_RES (260)..(260): Selenocysteine
XRHLNPDXELKRYFGARAILGEQRPRQRQRVYPKCXWLXXPKSXWPRYSKPGLSMRLLESKKGLSFFAFEHSEEYQQAQHKFLVAVESMEPNNIVLSDACRFQEDQEMARDLVERALYSMECAFHPLFSLXSGACRLDYRRPENRSFYLALYKQMSFLEKRGCPRXALEYCKLILSLEPDEDPLCMLLLIDHLALRARNYEYLIRLFQEWEAHRNLSQLPNFAFSVPLAYFLLSQQXDLPECEQSSARQKASLLIQQALXMFPGVLLPLLESCSVRPDASVSSHRF

SEQ ID NO: 27165 - protein, 146 aa, Homo sapiens
  MOD_RES (1)..(1): Any amino acid
  MOD_RES (8)..(8): Selenocysteine
  MOD_RES (24)..(24): Selenocysteine
  MOD_RES (28)..(28): Selenocysteine
  MOD_RES (33)..(33): Selenocysteine
  MOD_RES (35)..(35): Selenocysteine
  MOD_RES (61)..(61): Selenocysteine
  MOD_RES (83)..(83): Selenocysteine
  MOD_RES (137)..(137): Selenocysteine
  MOD_RES (139)..(139): Selenocysteine
XRSGCALXDAVAPGNKGRGQRGNXESKXDGDDXEXVPSEQSHASGKLRKKKKKQKNKKSSXGEASENGLEDIDRILERIEDSXGLNRPGPAPLSSRKHVLYVEHRCGPRPSLRLPFSAAALLCGCPSLRLPFSVAAXEXSWEEKVL

SEQ ID NO: 27166 - protein, 51 aa, Homo sapiens
  MOD_RES (17)..(17): Selenocysteine
  MOD_RES (37)..(37): Selenocysteine
AAASEIKREEKEDEENXSAADHSEEEKKELKAPRARXRAEGRAGEGAPGGQ

SEQ ID NO: 27167 - protein, 159 aa, Homo sapiens
  MOD_RES (17)..(17): Selenocysteine
  MOD_RES (37)..(37): Selenocysteine
  MOD_RES (39)..(39): Selenocysteine
  MOD_RES (92)..(92): Selenocysteine
AAASEIKREEKEDEENXSAADHSEEEKKELKAPRARXSXDEVLSLEEKDLRDRERRMANNARERVRVRDINEAFRELGRMCQMHLKSDKAQXKLLILQQAVQVILGLEQQVRERNLNPKAACLKRREEEKVSGVVGDPQMVLSAPHPGLSEAHNPAGHM

SEQ ID NO: 27168 - protein, 165 aa, Homo sapiens
  MOD_RES (2)..(2): Selenocysteine
  MOD_RES (19)..(19): Selenocysteine
  MOD_RES (39)..(39): Selenocysteine
  MOD_RES (98)..(98): Selenocysteine
AXAAASEIKREEKEDEENXSAADHSEEEKKELKAPRARXSPDEDEDDLLPPEQKAEREKERRVANNARERLRVRDINEAFKELGRMCQLHLNSEKPQXKLLILHQAVSVILNLEQQVRERNLNPKAACLKRREEEKVSGVVGDPQMVLSAPHPGLSEAHNPAGHM

SEQ ID NO: 27169 - protein, 96 aa, Homo sapiens
  MOD_RES (17)..(17): Selenocysteine
  MOD_RES (28)..(28): Selenocysteine
  MOD_RES (65)..(65): Selenocysteine
  MOD_RES (80)..(80): Selenocysteine
IYSPDHSSNNFSSSPSXPVGSPQGLAGXSQWPRAGAPGALSPSYDGGLHGLVGGSHPEDGLAGSXSLMHNHAALPSQPGXLPDLSRPPDSYSGLGR

SEQ ID NO: 27170 - protein, 600 aa, Homo sapiens
  MOD_RES (12)..(12): Selenocysteine
  MOD_RES (31)..(31): Selenocysteine
  MOD_RES (70)..(70): Selenocysteine
  MOD_RES (95)..(95): Selenocysteine
  MOD_RES (117)..(117): Selenocysteine
  MOD_RES (147)..(147): Selenocysteine
  MOD_RES (154)..(154): Selenocysteine
  MOD_RES (158)..(158): Selenocysteine
  MOD_RES (213)..(213): Selenocysteine
  MOD_RES (249)..(249): Selenocysteine
  MOD_RES (257)..(257): Selenocysteine
  MOD_RES (272)..(273): Selenocysteine
  MOD_RES (304)..(304): Selenocysteine
  MOD_RES (315)..(315): Selenocysteine
  MOD_RES (360)..(360): Selenocysteine
  MOD_RES (366)..(366): Selenocysteine
  MOD_RES (379)..(379): Selenocysteine
  MOD_RES (405)..(405): Selenocysteine
  MOD_RES (420)..(420): Selenocysteine
  MOD_RES (440)..(440): Selenocysteine
  MOD_RES (457)..(457): Selenocysteine
  MOD_RES (477)..(477): Selenocysteine
  MOD_RES (480)..(480): Selenocysteine
  MOD_RES (533)..(533): Selenocysteine
MNQPQRMAPVGXDKELSDLLDFSMMFPLPVXNGKGRPASLAGAQFGGSGKSGERGAYASFGRDAGVGGLXQAGFLSGELALNSPGPLSPSGMKGXSQYYPSYSGSSRRRAADGSLDXQPKKVRKVPPGLPSSVYPPSSGEDYGRDAXAYPSAKXPSSXYPAPFYVADGSLHPSAELWSPPGQAGFGPMLGGGSSPLPLPPGSGPVGSSGSSSXFGGLHQHERMGYQLHGAEVNGGLPSASSFSSAPGAXYGGVSSHXPPVSGADSLLGSRGXXAGSSGDALGKALASIYSPDHSSNNFSSSPSXPVGSPQGLAGXSQWPRAGAPGALSPSYDGGLHGLQSKIEDHLDEAIHVLRSHAVGXAGDMHXLLPGHGALASGFXGPMSLGGRHAGLVGGSHPEDGLAGSXSLMHNHAALPSQPGXLPDLSRPPDSYSGLGRAGAXAAASEIKREEKEDEENXSAADHSEEEKKELKAPRARXSSXDEVLSLEEKDLRDRERRMANNARERVRVRDINEAFRELGRMCQMHLKSDKAQXKLLILQQAVQVILGLEQQVRERNLNPKAACLKRREEEKVSGVVGDPQMVLSAPHPGLSEAHNPAGHM

SEQ ID NO: 27171 - protein, 658 aa, Homo sapiens
  MOD_RES (12)..(12): Selenocysteine
  MOD_RES (31)..(31): Selenocysteine
  MOD_RES (70)..(70): Selenocysteine
  MOD_RES (95)..(95): Selenocysteine
  MOD_RES (117)..(117): Selenocysteine
  MOD_RES (147)..(147): Selenocysteine
  MOD_RES (154)..(154): Selenocysteine
  MOD_RES (158)..(158): Selenocysteine
  MOD_RES (213)..(213): Selenocysteine
  MOD_RES (249)..(249): Selenocysteine
  MOD_RES (257)..(257): Selenocysteine
  MOD_RES (272)..(273): Selenocysteine
  MOD_RES (304)..(304): Selenocysteine
  MOD_RES (315)..(315): Selenocysteine
  MOD_RES (360)..(360): Selenocysteine
  MOD_RES (366)..(366): Selenocysteine
  MOD_RES (379)..(379): Selenocysteine
  MOD_RES (405)..(405): Selenocysteine
  MOD_RES (420)..(420): Selenocysteine
  MOD_RES (440)..(440): Selenocysteine
  MOD_RES (457)..(457): Selenocysteine
  MOD_RES (477)..(477): Selenocysteine
  MOD_RES (482)..(482): Selenocysteine
  MOD_RES (504)..(504): Selenocysteine
  MOD_RES (506)..(506): Selenocysteine
  MOD_RES (514)..(514): Selenocysteine
  MOD_RES (591)..(591): Selenocysteine
MNQPQRMAPVGXDKELSDLLDFSMMFPLPVXNGKGRPASLAGAQFGGSGKSGERGAYASFGRDAGVGGLXQAGFLSGELALNSPGPLSPSGMKGXSQYYPSYSGSSRRRAADGSLDXQPKKVRKVPPGLPSSVYPPSSGEDYGRDAXAYPSAKXPSSXYPAPFYVADGSLHPSAELWSPPGQAGFGPMLGGGSSPLPLPPGSGPVGSSGSSSXFGGLHQHERMGYQLHGAEVNGGLPSASSFSSAPGAXYGGVSSHXPPVSGADSLLGSRGXXAGSSGDALGKALASIYSPDHSSNNFSSSPSXPVGSPQGLAGXSQWPRAGAPGALSPSYDGGLHGLQSKIEDHLDEAIHVLRSHAVGXAGDMHXLLPGHGALASGFXGPMSLGGRHAGLVGGSHPEDGLAGSXSLMHNHAALPSQPGXLPDLSRPPDSYSGLGRAGAXAAASEIKREEKEDEENXSAADHSEEEKKELKAPRARXRCQPXPRHSPPSPHQDAHVHRPHAHRXHXGRPSAGPXLFPQPHCLPLAPSRRPPHSPDEDEDDLLPPEQKAEREKERRVANNARERLRVRDINEAFKELGRMCQLHLNSEKPQXKLLILHQAVSVILNLEQQVRERNLNPKAACLKRREEEKVSGVVGDPQMVLSAPHPGLSEAHNPAGHM

SEQ ID NO: 27172 - protein, 95 aa, Homo sapiens
  MOD_RES (12)..(12): Selenocysteine
  MOD_RES (31)..(31): Selenocysteine
  MOD_RES (74)..(74): Selenocysteine
  MOD_RES (79)..(79): Selenocysteine
  MOD_RES (82)..(82): Selenocysteine
  MOD_RES (92)..(92): Selenocysteine
MNQPQRMAPVGXDKELSDLLDFSMMFPLPVXNGKGRPASLAGAQFGGSGLEDRPSSGSWGSGDQSSSSFDPSRXFSEGXHFXESHSSLSSSXFLG

SEQ ID NO: 27173 - protein, 679 aa, Homo sapiens
  MOD_RES (12)..(12): Selenocysteine
  MOD_RES (31)..(31): Selenocysteine
  MOD_RES (74)..(74): Selenocysteine
  MOD_RES (79)..(79): Selenocysteine
  MOD_RES (82)..(82): Selenocysteine
  MOD_RES (92)..(92): Selenocysteine
  MOD_RES (126)..(126): Selenocysteine
  MOD_RES (150)..(150): Selenocysteine
  MOD_RES (175)..(175): Selenocysteine
  MOD_RES (197)..(197): Selenocysteine
  MOD_RES (227)..(227): Selenocysteine
  MOD_RES (234)..(234): Selenocysteine
  MOD_RES (238)..(238): Selenocysteine
  MOD_RES (293)..(293): Selenocysteine
  MOD_RES (329)..(329): Selenocysteine
  MOD_RES (337)..(337): Selenocysteine
  MOD_RES (352)..(353): Selenocysteine
  MOD_RES (384)..(384): Selenocysteine
  MOD_RES (395)..(395): Selenocysteine
  MOD_RES (440)..(440): Selenocysteine
  MOD_RES (446)..(446): Selenocysteine
  MOD_RES (459)..(459): Selenocysteine
  MOD_RES (485)..(485): Selenocysteine
  MOD_RES (500)..(500): Selenocysteine
  MOD_RES (520)..(520): Selenocysteine
  MOD_RES (537)..(537): Selenocysteine
  MOD_RES (557)..(557): Selenocysteine
  MOD_RES (559)..(559): Selenocysteine
  MOD_RES (612)..(612): Selenocysteine
MNQPQRMAPVGXDKELSDLLDFSMMFPLPVXNGKGRPASLAGAQFGGSGLEDRPSSGSWGSGDQSSSSFDPSRXFSEGXHFXESHSSLSSSXFLGPGLGGECLAWCGPSAVHRCADVGLGMVSARXAPGKSGERGAYASFGRDAGVGGLXQAGFLSGELALNSPGPLSPSGMKGXSQYYPSYSGSSRRRAADGSLDXQPKKVRKVPPGLPSSVYPPSSGEDYGRDAXAYPSAKXPSSXYPAPFYVADGSLHPSAELWSPPGQAGFGPMLGGGSSPLPLPPGSGPVGSSGSSSXFGGLHQHERMGYQLHGAEVNGGLPSASSFSSAPGAXYGGVSSHXPPVSGADSLLGSRGXXAGSSGDALGKALASIYSPDHSSNNFSSSPSXPVGSPQGLAGXSQWPRAGAPGALSPSYDGGLHGLQSKIEDHLDEAIHVLRSHAVGXAGDMHXLLPGHGALASGFXGPMSLGGRHAGLVGGSHPEDGLAGSXSLMHNHAALPSQPGXLPDLSRPPDSYSGLGRAGAXAAASEIKREEKEDEENXSAADHSEEEKKELKAPRARXSXDEVLSLEEKDLRDRERRMANNARERVRVRDINEAFRELGRMCQMHLKSDKAQXKLLILQQAVQVILGLEQQVRERNLNPKAACLKRREEEKVSGVVGDPQMVLSAPHPGLSEAHNPAGHM

SEQ ID NO: 27174 - protein, 213 aa, Homo sapiens
  MOD_RES (12)..(12): Selenocysteine
  MOD_RES (31)..(31): Selenocysteine
  MOD_RES (74)..(74): Selenocysteine
  MOD_RES (79)..(79): Selenocysteine
  MOD_RES (82)..(82): Selenocysteine
  MOD_RES (92)..(92): Selenocysteine
  MOD_RES (121)..(121): Selenocysteine
  MOD_RES (146)..(146): Selenocysteine
  MOD_RES (168)..(168): Selenocysteine
  MOD_RES (198)..(198): Selenocysteine
  MOD_RES (205)..(205): Selenocysteine
  MOD_RES (209)..(209): Selenocysteine
MNQPQRMAPVGXDKELSDLLDFSMMFPLPVXNGKGRPASLAGAQFGGSGLEDRPSSGSWGSGDQSSSSFDPSRXFSEGXHFXESHSSLSSSXFLGPGLGGKSGERGAYASFGRDAGVGGLXQAGFLSGELALNSPGPLSPSGMKGXSQYYPSYSGSSRRRAADGSLDXQPKKVRKVPPGLPSSVYPPSSGEDYGRDAXAYPSAKXPSSXYPAP

SEQ ID NO: 27175 - protein, 651 aa, Homo sapiens
  MOD_RES (12)..(12): Selenocysteine
  MOD_RES (31)..(31): Selenocysteine
  MOD_RES (74)..(74): Selenocysteine
  MOD_RES (79)..(79): Selenocysteine
  MOD_RES (82)..(82): Selenocysteine
  MOD_RES (92)..(92): Selenocysteine
  MOD_RES (121)..(121): Selenocysteine
  MOD_RES (146)..(146): Selenocysteine
  MOD_RES (168)..(168): Selenocysteine
  MOD_RES (198)..(198): Selenocysteine
  MOD_RES (205)..(205): Selenocysteine
  MOD_RES (209)..(209): Selenocysteine
  MOD_RES (264)..(264): Selenocysteine
  MOD_RES (300)..(300): Selenocysteine
  MOD_RES (308)..(308): Selenocysteine
  MOD_RES (323)..(324): Selenocysteine
  MOD_RES (355)..(355): Selenocysteine
  MOD_RES (366)..(366): Selenocysteine
  MOD_RES (411)..(411): Selenocysteine
  MOD_RES (417)..(417): Selenocysteine
  MOD_RES (430)..(430): Selenocysteine
  MOD_RES (456)..(456): Selenocysteine
  MOD_RES (471)..(471): Selenocysteine
  MOD_RES (491)..(491): Selenocysteine
  MOD_RES (508)..(508): Selenocysteine
  MOD_RES (528)..(528): Selenocysteine
  MOD_RES (531)..(531): Selenocysteine
  MOD_RES (584)..(584): Selenocysteine
MNQPQRMAPVGXDKELSDLLDFSMMFPLPVXNGKGRPASLAGAQFGGSGLEDRPSSGSWGSGDQSSSSFDPSRXFSEGXHFXESHSSLSSSXFLGPGLGGKSGERGAYASFGRDAGVGGLXQAGFLSGELALNSPGPLSPSGMKGXSQYYPSYSGSSRRRAADGSLDXQPKKVRKVPPGLPSSVYPPSSGEDYGRDAXAYPSAKXPSSXYPAPFYVADGSLHPSAELWSPPGQAGFGPMLGGGSSPLPLPPGSGPVGSSGSSSXFGGLHQHERMGYQLHGAEVNGGLPSASSFSSAPGAXYGGVSSHXPPVSGADSLLGSRGXXAGSSGDALGKALASIYSPDHSSNNFSSSPSXPVGSPQGLAGXSQWPRAGAPGALSPSYDGGLHGLQSKIEDHLDEAIHVLRSHAVGXAGDMHXLLPGHGALASGFXGPMSLGGRHAGLVGGSHPEDGLAGSXSLMHNHAALPSQPGXLPDLSRPPDSYSGLGRAGAXAAASEIKREEKEDEENXSAADHSEEEKKELKAPRARXSSXDEVLSLEEKDLRDRERRMANNARERVRVRDINEAFRELGRMCQMHLKSDKAQXKLLILQQAVQVILGLEQQVRERNLNPKAACLKRREEEKVSGVVGDPQMVLSAPHPGLSEAHNPAGHM

SEQ ID NO: 27176 - protein, 654 aa, Homo sapiens
  MOD_RES (12)..(12): Selenocysteine
  MOD_RES (31)..(31): Selenocysteine
  MOD_RES (74)..(74): Selenocysteine
  MOD_RES (79)..(79): Selenocysteine
  MOD_RES (82)..(82): Selenocysteine
  MOD_RES (92)..(92): Selenocysteine
  MOD_RES (121)..(121): Selenocysteine
  MOD_RES (146)..(146): Selenocysteine
  MOD_RES (168)..(168): Selenocysteine
  MOD_RES (198)..(198): Selenocysteine
  MOD_RES (205)..(205): Selenocysteine
  MOD_RES (209)..(209): Selenocysteine
  MOD_RES (264)..(264): Selenocysteine
  MOD_RES (300)..(300): Selenocysteine
  MOD_RES (308)..(308): Selenocysteine
  MOD_RES (323)..(324): Selenocysteine
  MOD_RES (355)..(355): Selenocysteine
  MOD_RES (366)..(366): Selenocysteine
  MOD_RES (411)..(411): Selenocysteine
  MOD_RES (417)..(417): Selenocysteine
  MOD_RES (430)..(430): Selenocysteine
  MOD_RES (456)..(456): Selenocysteine
  MOD_RES (471)..(471): Selenocysteine
  MOD_RES (491)..(491): Selenocysteine
  MOD_RES (508)..(508): Selenocysteine
  MOD_RES (528)..(528): Selenocysteine
  MOD_RES (587)..(587): Selenocysteine
MNQPQRMAPVGXDKELSDLLDFSMMFPLPVXNGKGRPASLAGAQFGGSGLEDRPSSGSWGSGDQSSSSFDPSRXFSEGXHFXESHSSLSSSXFLGPGLGGKSGERGAYASFGRDAGVGGLXQAGFLSGELALNSPGPLSPSGMKGXSQYYPSYSGSSRRRAADGSLDXQPKKVRKVPPGLPSSVYPPSSGEDYGRDAXAYPSAKXPSSXYPAPFYVADGSLHPSAELWSPPGQAGFGPMLGGGSSPLPLPPGSGPVGSSGSSSXFGGLHQHERMGYQLHGAEVNGGLPSASSFSSAPGAXYGGVSSHXPPVSGADSLLGSRGXXAGSSGDALGKALASIYSPDHSSNNFSSSPSXPVGSPQGLAGXSQWPRAGAPGALSPSYDGGLHGLQSKIEDHLDEAIHVLRSHAVGXAGDMHXLLPGHGALASGFXGPMSLGGRHAGLVGGSHPEDGLAGSXSLMHNHAALPSQPGXLPDLSRPPDSYSGLGRAGAXAAASEIKREEKEDEENXSAADHSEEEKKELKAPRARXSPDEDEDDLLPPEQKAEREKERRVANNARERLRVRDINEAFKELGRMCQLHLNSEKPQXKLLILHQAVSVILNLEQQVRERNLNPKAACLKRREEEKVSGVVGDPQMVLSAPHPGLSEAHNPAGHM

SEQ ID NO: 27177 - protein, 179 aa, Homo sapiens
  MOD_RES (16)..(16): Selenocysteine
  MOD_RES (33)..(33): Selenocysteine
  MOD_RES (53)..(53): Selenocysteine
  MOD_RES (112)..(112): Selenocysteine
SRPPDSYSGLGRAGAXAAASEIKREEKEDEENXSAADHSEEEKKELKAPRARXSPDEDEDDLLPPEQKAEREKERRVANNARERLRVRDINEAFKELGRMCQLHLNSEKPQXKLLILHQAVSVILNLEQQVRERNLNPKAACLKRREEEKVSGVVGDPQMVLSAPHPGLSEAHNPAGHM

SEQ ID NO: 27178 - protein, 82 aa, Homo sapiens
  MOD_RES (1)..(1): Selenocysteine
  MOD_RES (21)..(21): Selenocysteine
  MOD_RES (38)..(38): Selenocysteine
  MOD_RES (58)..(58): Selenocysteine
XLPDLSRPPDSYSGLGRAGAXAAASEIKREEKEDEENXSAADHSEEEKKELKAPRARXRRGRGRPSPPRAEGRAGEGAPGGQ

SEQ ID NO: 27179 - protein, 204 aa, Homo sapiens
  MOD_RES (1)..(1): Any amino acid
  MOD_RES (6)..(6): Selenocysteine
  MOD_RES (21)..(21): Selenocysteine
  MOD_RES (41)..(41): Selenocysteine
  MOD_RES (58)..(58): Selenocysteine
  MOD_RES (78)..(78): Selenocysteine
  MOD_RES (137)..(137): Selenocysteine
XLAGSXSLMHNHAALPSQPGXLPDLSRPPDSYSGLGRAGAXAAASEIKREEKEDEENXSAADHSEEEKKELKAPRARXSPDEDEDDLLPPEQKAEREKERRVANNARERLRVRDINEAFKELGRMCQLHLNSEKPQXKLLILHQAVSVILNLEQQVRERNLNPKAACLKRREEEKVSGVVGDPQMVLSAPHPGLSEAHNPAGHM

SEQ ID NO: 27180 - protein, 220 aa, Homo sapiens
  MOD_RES (1)..(1): Any amino acid
  MOD_RES (25)..(25): Selenocysteine
  MOD_RES (40)..(40): Selenocysteine
  MOD_RES (60)..(60): Selenocysteine
  MOD_RES (77)..(77): Selenocysteine
  MOD_RES (97)..(97): Selenocysteine
  MOD_RES (100)..(100): Selenocysteine
  MOD_RES (153)..(153): Selenocysteine
XMSLGGRHAGLVGGSHPEDGLAGSXSLMHNHAALPSQPGXLPDLSRPPDSYSGLGRAGAXAAASEIKREEKEDEENXSAADHSEEEKKELKAPRARXSSXDEVLSLEEKDLRDRERRMANNARERVRVRDINEAFRELGRMCQMHLKSDKAQXKLLILQQAVQVILGLEQQVRERNLNPKAACLKRREEEKVSGVVGDPQMVLSAPHPGLSEAHNPAGHM

SEQ ID NO: 27181 - protein, 314 aa, Homo sapiens
  MOD_RES (1)..(1): Any amino acid
  MOD_RES (2)..(2): Selenocysteine
  MOD_RES (47)..(47): Selenocysteine
  MOD_RES (53)..(53): Selenocysteine
  MOD_RES (66)..(66): Selenocysteine
  MOD_RES (119)..(119): Selenocysteine
  MOD_RES (134)..(134): Selenocysteine
  MOD_RES (154)..(154): Selenocysteine
  MOD_RES (171)..(171): Selenocysteine
  MOD_RES (191)..(191): Selenocysteine
  MOD_RES (194)..(194): Selenocysteine
  MOD_RES (247)..(247): Selenocysteine
XXSQWPRAGAPGALSPSYDGGLHGLQSKIEDHLDEAIHVLRSHAVGXAGDMHXLLPGHGALASGFXGPMSLGGRHAGLVSAGRGWSWAVGGDPAPPDAPVSPRLQVGGSHPEDGLAGSXSLMHNHAALPSQPGXLPDLSRPPDSYSGLGRAGAXAAASEIKREEKEDEENXSAADHSEEEKKELKAPRARXSSXDEVLSLEEKDLRDRERRMANNARERVRVRDINEAFRELGRMCQMHLKSDKAQXKLLILQQAVQVILGLEQQVRERNLNPKAACLKRREEEKVSGVVGDPQMVLSAPHPGLSEAHNPAGHM

SEQ ID NO: 27182 - protein, 81 aa, Homo sapiens
  MOD_RES (16)..(16): Selenocysteine
LGRMVQLHLKSDKPQXKLLILHQAVAVILSLEQQVRERNLNPKAACLKRREEEKVSSEPPPLSLAGPHPGMGDASNHMGQM

SEQ ID NO: 27183 - protein, 119 aa, Homo sapiens
  MOD_RES (8)..(8): Selenocysteine
  MOD_RES (12)..(12): Selenocysteine
  MOD_RES (40)..(40): Selenocysteine
  MOD_RES (61)..(61): Selenocysteine
  MOD_RES (78)..(78): Selenocysteine
  MOD_RES (80)..(80): Selenocysteine
MDMGNPGXLSPXKPGSQYYQYSSNNPRRRPLHSSAMEVQXKKVRKVPPGLPSSVYAPSASXADYNRDSPGYPSSKPAXSXFPSSFFMQDGHHSSDPWSSSSGMNQPGYAGMLGNSSHIP

SEQ ID NO: 27184 - protein, 129 aa, Homo sapiens
  MOD_RES (8)..(8): Selenocysteine
  MOD_RES (12)..(12): Selenocysteine
  MOD_RES (40)..(40): Selenocysteine
  MOD_RES (61)..(61): Selenocysteine
  MOD_RES (78)..(78): Selenocysteine
  MOD_RES (80)..(80): Selenocysteine
MDMGNPGXLSPXKPGSQYYQYSSNNPRRRPLHSSAMEVQXKKVRKVPPGLPSSVYAPSASXADYNRDSPGYPSSKPAXSXFPSSFFMQDGHHSSDPWSSSSGMNQPGYAGMLGNSSHIPQSSSYCSLHP

SEQ ID NO: 27185 - protein, 134 aa, Homo sapiens
  MOD_RES (8)..(8): Selenocysteine
  MOD_RES (12)..(12): Selenocysteine
  MOD_RES (40)..(40): Selenocysteine
  MOD_RES (61)..(61): Selenocysteine
  MOD_RES (78)..(78): Selenocysteine
  MOD_RES (80)..(80): Selenocysteine
MDMGNPGXLSPXKPGSQYYQYSSNNPRRRPLHSSAMEVQXKKVRKVPPGLPSSVYAPSASXADYNRDSPGYPSSKPAXSXFPSSFFMQDGHHSSDPWSSSSGMNQPGYAGMLGNSSHIPQSSSYCSLHPHERLS

SEQ ID NO: 27186 - protein, 135 aa, Homo sapiens
  MOD_RES (8)..(8): Selenocysteine
  MOD_RES (12)..(12): Selenocysteine
  MOD_RES (40)..(40): Selenocysteine
  MOD_RES (61)..(61): Selenocysteine
  MOD_RES (78)..(78): Selenocysteine
  MOD_RES (80)..(80): Selenocysteine
MDMGNPGXLSPXKPGSQYYQYSSNNPRRRPLHSSAMEVQXKKVRKVPPGLPSSVYAPSASXADYNRDSPGYPSSKPAXSXFPSSFFMQDGHHSSDPWSSSSGMNQPGYAGMLGNSSHIPQSSSYCSLHPHERLSY

SEQ ID NO: 27187 - protein, 155 aa, Homo sapiens
  MOD_RES (8)..(8): Selenocysteine
  MOD_RES (12)..(12): Selenocysteine
  MOD_RES (40)..(40): Selenocysteine
  MOD_RES (61)..(61): Selenocysteine
  MOD_RES (78)..(78): Selenocysteine
  MOD_RES (80)..(80): Selenocysteine
  MOD_RES (152)..(152): Selenocysteine
MDMGNPGXLSPXKPGSQYYQYSSNNPRRRPLHSSAMEVQXKKVRKVPPGLPSSVYAPSASXADYNRDSPGYPSSKPAXSXFPSSFFMQDGHHSSDPWSSSSGMNQPGYAGMLGNSSHIPQSSSYCSLHPHERLSYPSHSSADINSSLPPMSXFHR

SEQ ID NO: 27188 - protein, 163 aa, Homo sapiens
  MOD_RES (8)..(8): Selenocysteine
  MOD_RES (12)..(12): Selenocysteine
  MOD_RES (40)..(40): Selenocysteine
  MOD_RES (61)..(61): Selenocysteine
  MOD_RES (78)..(78): Selenocysteine
  MOD_RES (80)..(80): Selenocysteine
  MOD_RES (152)..(152): Selenocysteine
  MOD_RES (158)..(158): Selenocysteine
  MOD_RES (163)..(163): Selenocysteine
MDMGNPGXLSPXKPGSQYYQYSSNNPRRRPLHSSAMEVQXKKVRKVPPGLPSSVYAPSASXADYNRDSPGYPSSKPAXSXFPSSFFMQDGHHSSDPWSSSSGMNQPGYAGMLGNSSHIPQSSSYCSLHPHERLSYPSHSSADINSSLPPMSXFHRSGXNHYSX

SEQ ID NO: 27189 - protein, 164 aa, Homo sapiens
  MOD_RES (8)..(8): Selenocysteine
  MOD_RES (12)..(12): Selenocysteine
  MOD_RES (40)..(40): Selenocysteine
  MOD_RES (61)..(61): Selenocysteine
  MOD_RES (78)..(78): Selenocysteine
  MOD_RES (80)..(80): Selenocysteine
  MOD_RES (152)..(152): Selenocysteine
  MOD_RES (158)..(158): Selenocysteine
  MOD_RES (163)..(163): Selenocysteine
MDMGNPGXLSPXKPGSQYYQYSSNNPRRRPLHSSAMEVQXKKVRKVPPGLPSSVYAPSASXADYNRDSPGYPSSKPAXSXFPSSFFMQDGHHSSDPWSSSSGMNQPGYAGMLGNSSHIPQSSSYCSLHPHERLSYPSHSSADINSSLPPMSXFHRSGXNHYSXS

SEQ ID NO: 27190 - protein, 178 aa, Homo sapiens
  MOD_RES (8)..(8): Selenocysteine
  MOD_RES (12)..(12): Selenocysteine
  MOD_RES (40)..(40): Selenocysteine
  MOD_RES (61)..(61): Selenocysteine
  MOD_RES (78)..(78): Selenocysteine
  MOD_RES (80)..(80): Selenocysteine
  MOD_RES (152)..(152): Selenocysteine
  MOD_RES (158)..(158): Selenocysteine
  MOD_RES (163)..(163): Selenocysteine
  MOD_RES (167)..(167): Selenocysteine
  MOD_RES (173)..(173): Selenocysteine
MDMGNPGXLSPXKPGSQYYQYSSNNPRRRPLHSSAMEVQXKKVRKVPPGLPSSVYAPSASXADYNRDSPGYPSSKPAXSXFPSSFFMQDGHHSSDPWSSSSGMNQPGYAGMLGNSSHIPQSSSYCSLHPHERLSYPSHSSADINSSLPPMSXFHRSGXNHYSXSSCXPPANGXDSIMA

SEQ ID NO: 27191 - protein, 179 aa, Homo sapiens
  MOD_RES (8)..(8): Selenocysteine
  MOD_RES (12)..(12): Selenocysteine
  MOD_RES (40)..(40): Selenocysteine
  MOD_RES (61)..(61): Selenocysteine
  MOD_RES (78)..(78): Selenocysteine
  MOD_RES (80)..(80): Selenocysteine
  MOD_RES (152)..(152): Selenocysteine
  MOD_RES (158)..(158): Selenocysteine
  MOD_RES (163)..(163): Selenocysteine
  MOD_RES (167)..(167): Selenocysteine
  MOD_RES (173)..(173): Selenocysteine
MDMGNPGXLSPXKPGSQYYQYSSNNPRRRPLHSSAMEVQXKKVRKVPPGLPSSVYAPSASXADYNRDSPGYPSSKPAXSXFPSSFFMQDGHHSSDPWSSSSGMNQPGYAGMLGNSSHIPQSSSYCSLHPHERLSYPSHSSADINSSLPPMSXFHRSGXNHYSXSSCXPPANGXDSIMAN

SEQ ID NO: 27192 - protein, 207 aa, Homo sapiens
  MOD_RES (8)..(8): Selenocysteine
  MOD_RES (12)..(12): Selenocysteine
  MOD_RES (40)..(40): Selenocysteine
  MOD_RES (61)..(61): Selenocysteine
  MOD_RES (78)..(78): Selenocysteine
  MOD_RES (80)..(80): Selenocysteine
  MOD_RES (152)..(152): Selenocysteine
  MOD_RES (158)..(158): Selenocysteine
  MOD_RES (163)..(163): Selenocysteine
  MOD_RES (167)..(167): Selenocysteine
  MOD_RES (173)..(173): Selenocysteine
  MOD_RES (190)..(190): Selenocysteine
  MOD_RES (207)..(207): Selenocysteine
MDMGNPGXLSPXKPGSQYYQYSSNNPRRRPLHSSAMEVQXKKVRKVPPGLPSSVYAPSASXADYNRDSPGYPSSKPAXSXFPSSFFMQDGHHSSDPWSSSSGMNQPGYAGMLGNSSHIPQSSSYCSLHPHERLSYPSHSSADINSSLPPMSXFHRSGXNHYSXSSCXPPANGXDSIMANRGSGAAGSSQXGDALGKALASIYSPDHX

SEQ ID NO: 27193 - protein, 225 aa, Homo sapiens
  MOD_RES (8)..(8): Selenocysteine
  MOD_RES (12)..(12): Selenocysteine
  MOD_RES (40)..(40): Selenocysteine
  MOD_RES (61)..(61): Selenocysteine
  MOD_RES (78)..(78): Selenocysteine
  MOD_RES (80)..(80): Selenocysteine
  MOD_RES (152)..(152): Selenocysteine
  MOD_RES (158)..(158): Selenocysteine
  MOD_RES (163)..(163): Selenocysteine
  MOD_RES (167)..(167): Selenocysteine
  MOD_RES (173)..(173): Selenocysteine
  MOD_RES (190)..(190): Selenocysteine
  MOD_RES (207)..(207): Selenocysteine
  MOD_RES (217)..(217): Selenocysteine
MDMGNPGXLSPXKPGSQYYQYSSNNPRRRPLHSSAMEVQXKKVRKVPPGLPSSVYAPSASXADYNRDSPGYPSSKPAXSXFPSSFFMQDGHHSSDPWSSSSGMNQPGYAGMLGNSSHIPQSSSYCSLHPHERLSYPSHSSADINSSLPPMSXFHRSGXNHYSXSSCXPPANGXDSIMANRGSGAAGSSQXGDALGKALASIYSPDHXNNSFSSNPSXPVGSPPSL

SEQ ID NO: 27194 - protein, 236 aa, Homo sapiens
  MOD_RES (8)..(8): Selenocysteine
  MOD_RES (12)..(12): Selenocysteine
  MOD_RES (40)..(40): Selenocysteine
  MOD_RES (61)..(61): Selenocysteine
  MOD_RES (78)..(78): Selenocysteine
  MOD_RES (80)..(80): Selenocysteine
  MOD_RES (152)..(152): Selenocysteine
  MOD_RES (158)..(158): Selenocysteine
  MOD_RES (163)..(163): Selenocysteine
  MOD_RES (167)..(167): Selenocysteine
  MOD_RES (173)..(173): Selenocysteine
  MOD_RES (190)..(190): Selenocysteine
  MOD_RES (207)..(207): Selenocysteine
  MOD_RES (217)..(217): Selenocysteine
  MOD_RES (229)..(229): Selenocysteine
MDMGNPGXLSPXKPGSQYYQYSSNNPRRRPLHSSAMEVQXKKVRKVPPGLPSSVYAPSASXADYNRDSPGYPSSKPAXSXFPSSFFMQDGHHSSDPWSSSSGMNQPGYAGMLGNSSHIPQSSSYCSLHPHERLSYPSHSSADINSSLPPMSXFHRSGXNHYSXSSCXPPANGXDSIMANRGSGAAGSSQXGDALGKALASIYSPDHXNNSFSSNPSXPVGSPPSLSAGXAVWSRNG

SEQ ID NO: 27195 - protein, 537 aa, Homo sapiens
  MOD_RES (8)..(8): Selenocysteine
  MOD_RES (12)..(12): Selenocysteine
  MOD_RES (40)..(40): Selenocysteine
  MOD_RES (61)..(61): Selenocysteine
  MOD_RES (78)..(78): Selenocysteine
  MOD_RES (80)..(80): Selenocysteine
  MOD_RES (152)..(152): Selenocysteine
  MOD_RES (158)..(158): Selenocysteine
  MOD_RES (163)..(163): Selenocysteine
  MOD_RES (167)..(167): Selenocysteine
  MOD_RES (173)..(173): Selenocysteine
  MOD_RES (190)..(190): Selenocysteine
  MOD_RES (207)..(207): Selenocysteine
  MOD_RES (217)..(217): Selenocysteine
  MOD_RES (229)..(229): Selenocysteine
  MOD_RES (279)..(279): Selenocysteine
  MOD_RES (309)..(309): Selenocysteine
  MOD_RES (323)..(323): Selenocysteine
  MOD_RES (353)..(353): Selenocysteine
  MOD_RES (396)..(396): Selenocysteine
  MOD_RES (415)..(415): Selenocysteine
  MOD_RES (424)..(424): Selenocysteine
  MOD_RES (472)..(472): Selenocysteine
MDMGNPGXLSPXKPGSQYYQYSSNNPRRRPLHSSAMEVQXKKVRKVPPGLPSSVYAPSASXADYNRDSPGYPSSKPAXSXFPSSFFMQDGHHSSDPWSSSSGMNQPGYAGMLGNSSHIPQSSSYCSLHPHERLSYPSHSSADINSSLPPMSXFHRSGXNHYSXSSCXPPANGXDSIMANRGSGAAGSSQXGDALGKALASIYSPDHXNNSFSSNPSXPVGSPPSLSAGXAVWSRNGGQASSSPNYEGPLHSLQSRIEDRLERLDDAIHVLRNHAVGPSXAMPGGHGDMHGIIGPSHNGAMGGLGSGYGXGLLSANRHSLMVGXHREDGVALRGSHSLLPNQVPVPQLPVQSAXSPDLNPPQDPYRGMPPGLQGQSVSSGSSEIKSDDEGDENLQDXKSSEDKKLDDDKKDIKSIXSNNDDEDLXPEQKAEREKERRMANNARERLRVRDINEAFKELGRMVQLHLKSDKPQXKLLILHQAVAVILSLEQQVRERNLNPKAACLKRREEEKVSSEPPPLSLAGPHPGMGDASNHMGQM

SEQ ID NO: 27196 - protein, 541 aa, Homo sapiens
  MOD_RES (8)..(8): Selenocysteine
  MOD_RES (12)..(12): Selenocysteine
  MOD_RES (40)..(40): Selenocysteine
  MOD_RES (61)..(61): Selenocysteine
  MOD_RES (78)..(78): Selenocysteine
  MOD_RES (80)..(80): Selenocysteine
  MOD_RES (152)..(152): Selenocysteine
  MOD_RES (158)..(158): Selenocysteine
  MOD_RES (163)..(163): Selenocysteine
  MOD_RES (167)..(167): Selenocysteine
  MOD_RES (173)..(173): Selenocysteine
  MOD_RES (190)..(190): Selenocysteine
  MOD_RES (207)..(207): Selenocysteine
  MOD_RES (217)..(217): Selenocysteine
  MOD_RES (229)..(229): Selenocysteine
  MOD_RES (279)..(279): Selenocysteine
  MOD_RES (309)..(309): Selenocysteine
  MOD_RES (323)..(323): Selenocysteine
  MOD_RES (353)..(353): Selenocysteine
  MOD_RES (396)..(396): Selenocysteine
  MOD_RES (415)..(415): Selenocysteine
  MOD_RES (428)..(428): Selenocysteine
  MOD_RES (476)..(476): Selenocysteine
MDMGNPGXLSPXKPGSQYYQYSSNNPRRRPLHSSAMEVQXKKVRKVPPGLPSSVYAPSASXADYNRDSPGYPSSKPAXSXFPSSFFMQDGHHSSDPWSSSSGMNQPGYAGMLGNSSHIPQSSSYCSLHPHERLSYPSHSSADINSSLPPMSXFHRSGXNHYSXSSCXPPANGXDSIMANRGSGAAGSSQXGDALGKALASIYSPDHXNNSFSSNPSXPVGSPPSLSAGXAVWSRNGGQASSSPNYEGPLHSLQSRIEDRLERLDDAIHVLRNHAVGPSXAMPGGHGDMHGIIGPSHNGAMGGLGSGYGXGLLSANRHSLMVGXHREDGVALRGSHSLLPNQVPVPQLPVQSAXSPDLNPPQDPYRGMPPGLQGQSVSSGSSEIKSDDEGDENLQDXKSSEDKKLDDDKKDIKSIXRSRSSNNDDEDLXPEQKAEREKERRMANNARERLRVRDINEAFKELGRMVQLHLKSDKPQXKLLILHQAVAVILSLEQQVRERNLNPKAACLKRREEEKVSSEPPPLSLAGPHPGMGDASNHMGQM

SEQ ID NO: 27197 - protein, 625 aa, Homo sapiens
  MOD_RES (33)..(33): Selenocysteine
  MOD_RES (39)..(39): Selenocysteine
  MOD_RES (62)..(62): Selenocysteine
  MOD_RES (96)..(96): Selenocysteine
  MOD_RES (100)..(100): Selenocysteine
  MOD_RES (128)..(128): Selenocysteine
  MOD_RES (149)..(149): Selenocysteine
  MOD_RES (166)..(166): Selenocysteine
  MOD_RES (168)..(168): Selenocysteine
  MOD_RES (240)..(240): Selenocysteine
  MOD_RES (246)..(246): Selenocysteine
  MOD_RES (251)..(251): Selenocysteine
  MOD_RES (255)..(255): Selenocysteine
  MOD_RES (261)..(261): Selenocysteine
  MOD_RES (278)..(278): Selenocysteine
  MOD_RES (295)..(295): Selenocysteine
  MOD_RES (305)..(305): Selenocysteine
  MOD_RES (317)..(317): Selenocysteine
  MOD_RES (367)..(367): Selenocysteine
  MOD_RES (397)..(397): Selenocysteine
  MOD_RES (411)..(411): Selenocysteine
  MOD_RES (441)..(441): Selenocysteine
  MOD_RES (484)..(484): Selenocysteine
  MOD_RES (503)..(503): Selenocysteine
  MOD_RES (512)..(512): Selenocysteine
  MOD_RES (560)..(560): Selenocysteine
MEEDSRDVEDRSSSGSWGNGGHPSPSRNYGDGXPYDHMXSRDLGSHDNLSPPFVNSRIQSKXERGSYSSYGRESNLQGCHQQSLLGGDMDMGNPGXLSPXKPGSQYYQYSSNNPRRRPLHSSAMEVQXKKVRKVPPGLPSSVYAPSASXADYNRDSPGYPSSKPAXSXFPSSFFMQDGHHSSDPWSSSSGMNQPGYAGMLGNSSHIPQSSSYCSLHPHERLSYPSHSSADINSSLPPMSXFHRSGXNHYSXSSCXPPANGXDSIMANRGSGAAGSSQXGDALGKALASIYSPDHXNNSFSSNPSXPVGSPPSLSAGXAVWSRNGGQASSSPNYEGPLHSLQSRIEDRLERLDDAIHVLRNHAVGPSXAMPGGHGDMHGIIGPSHNGAMGGLGSGYGXGLLSANRHSLMVGXHREDGVALRGSHSLLPNQVPVPQLPVQSAXSPDLNPPQDPYRGMPPGLQGQSVSSGSSEIKSDDEGDENLQDXKSSEDKKLDDDKKDIKSIXSNNDDEDLXPEQKAEREKERRMANNARERLRVRDINEAFKELGRMVQLHLKSDKPQXKLLILHQAVAVILSLEQQVRERNLNPKAACLKRREEEKVSSEPPPLSLAGPHPGMGDASNHMGQM

SEQ ID NO: 27198 - protein, 287 aa, Homo sapiens
  MOD_RES (7)..(7): Selenocysteine
  MOD_RES (25)..(25): Selenocysteine
  MOD_RES (33)..(33): Selenocysteine
  MOD_RES (62)..(62): Selenocysteine
  MOD_RES (68)..(68): Selenocysteine
  MOD_RES (91)..(91): Selenocysteine
  MOD_RES (125)..(125): Selenocysteine
  MOD_RES (129)..(129): Selenocysteine
  MOD_RES (157)..(157): Selenocysteine
  MOD_RES (178)..(178): Selenocysteine
  MOD_RES (195)..(195): Selenocysteine
  MOD_RES (197)..(197): Selenocysteine
  MOD_RES (269)..(269): Selenocysteine
  MOD_RES (275)..(275): Selenocysteine
  MOD_RES (280)..(280): Selenocysteine
  MOD_RES (284)..(284): Selenocysteine
MEMDIAXFMAKMFSPPVSSGKNGPXSLASGHFXGSNVEDRSSSGSWGNGGHPSPSRNYGDGXPYDHMXSRDLGSHDNLSPPFVNSRIQSKXERGSYSSYGRESNLQGCHQQSLLGGDMDMGNPGXLSPXKPGSQYYQYSSNNPRRRPLHSSAMEVQXKKVRKVPPGLPSSVYAPSASXADYNRDSPGYPSSKPAXSXFPSSFFMQDGHHSSDPWSSSSGMNQPGYAGMLGNSSHIPQSSSYCSLHPHERLSYPSHSSADINSSLPPMSXFHRSGXNHYSXSSCXPPA

SEQ ID NO: 27199 - protein, 168 aa, Homo sapiens
  MOD_RES (24)..(24): Selenocysteine
  MOD_RES (42)..(42): Selenocysteine
  MOD_RES (48)..(48): Selenocysteine
  MOD_RES (50)..(50): Selenocysteine
  MOD_RES (74)..(74): Selenocysteine
  MOD_RES (102)..(102): Selenocysteine
  MOD_RES (124)..(124): Selenocysteine
  MOD_RES (150)..(150): Selenocysteine
  MOD_RES (158)..(158): Selenocysteine
MFSKRLEKIPQVPLLFPFIFIILXNYSKMEGAVESQPSFFKXSQDIVXCXWVENCYSSFSRRPLEMESHSVIQXGVQWHHLSSLQPPPPRFKLSSCLSLLSXRDRRLCDFAKMHHQQRMAALGXDKELSDLLDFSAMFSPPVSSGKNGPXSLASGHFXGSNVEDRSSS

SEQ ID NO: 27200 - protein, 134 aa, Homo sapiens
  MOD_RES (24)..(24): Selenocysteine
  MOD_RES (42)..(42): Selenocysteine
  MOD_RES (48)..(48): Selenocysteine
  MOD_RES (50)..(50): Selenocysteine
  MOD_RES (80)..(80): Selenocysteine
  MOD_RES (86)..(86): Selenocysteine
  MOD_RES (91)..(91): Selenocysteine
  MOD_RES (114)..(114): Selenocysteine
  MOD_RES (116)..(116): Selenocysteine
  MOD_RES (118)..(118): Selenocysteine
MFSKRLEKIPQVPLLFPFIFIILXNYSKMEGAVESQPSFFKXSQDIVXCXWVENCYSSFSRRPLEQMFCKHQSKNIISWXGMVAHXCNPSXLGGQDGVSFCHPDRSAVAPSQLXAXSXSQVQAILLPQPPEYPG

SEQ ID NO: 27201 - protein, 773 aa, Homo sapiens
  MOD_RES (24)..(24): Selenocysteine
  MOD_RES (42)..(42): Selenocysteine
  MOD_RES (48)..(48): Selenocysteine
  MOD_RES (50)..(50): Selenocysteine
  MOD_RES (80)..(80): Selenocysteine
  MOD_RES (86)..(86): Selenocysteine
  MOD_RES (91)..(91): Selenocysteine
  MOD_RES (114)..(114): Selenocysteine
  MOD_RES (140)..(140): Selenocysteine
  MOD_RES (148)..(148): Selenocysteine
  MOD_RES (177)..(177): Selenocysteine
  MOD_RES (183)..(183): Selenocysteine
  MOD_RES (206)..(206): Selenocysteine
  MOD_RES (240)..(240): Selenocysteine
  MOD_RES (244)..(244): Selenocysteine
  MOD_RES (272)..(272): Selenocysteine
  MOD_RES (293)..(293): Selenocysteine
  MOD_RES (310)..(310): Selenocysteine
  MOD_RES (312)..(312): Selenocysteine
  MOD_RES (384)..(384): Selenocysteine
  MOD_RES (390)..(390): Selenocysteine
  MOD_RES (395)..(395): Selenocysteine
  MOD_RES (399)..(399): Selenocysteine
  MOD_RES (405)..(405): Selenocysteine
  MOD_RES (422)..(422): Selenocysteine
  MOD_RES (439)..(439): Selenocysteine
  MOD_RES (449)..(449): Selenocysteine
  MOD_RES (461)..(461): Selenocysteine
  MOD_RES (511)..(511): Selenocysteine
  MOD_RES (541)..(541): Selenocysteine
  MOD_RES (555)..(555): Selenocysteine
  MOD_RES (585)..(585): Selenocysteine
  MOD_RES (628)..(628): Selenocysteine
  MOD_RES (647)..(647): Selenocysteine
  MOD_RES (660)..(660): Selenocysteine
  MOD_RES (708)..(708): Selenocysteine
MFSKRLEKIPQVPLLFPFIFIILXNYSKMEGAVESQPSFFKXSQDIVXCXWVENCYSSFSRRPLEQMFCKHQSKNIISWXGMVAHXCNPSXLGGQGLCDFAKMHHQQRMAALGXDKELSDLLDFSAMFSPPVSSGKNGPXSLASGHFXGSNVEDRSSSGSWGNGGHPSPSRNYGDGXPYDHMXSRDLGSHDNLSPPFVNSRIQSKXERGSYSSYGRESNLQGCHQQSLLGGDMDMGNPGXLSPXKPGSQYYQYSSNNPRRRPLHSSAMEVQXKKVRKVPPGLPSSVYAPSASXADYNRDSPGYPSSKPAXSXFPSSFFMQDGHHSSDPWSSSSGMNQPGYAGMLGNSSHIPQSSSYCSLHPHERLSYPSHSSADINSSLPPMSXFHRSGXNHYSXSSCXPPANGXDSIMANRGSGAAGSSQXGDALGKALASIYSPDHXNNSFSSNPSXPVGSPPSLSAGXAVWSRNGGQASSSPNYEGPLHSLQSRIEDRLERLDDAIHVLRNHAVGPSXAMPGGHGDMHGIIGPSHNGAMGGLGSGYGXGLLSANRHSLMVGXHREDGVALRGSHSLLPNQVPVPQLPVQSAXSPDLNPPQDPYRGMPPGLQGQSVSSGSSEIKSDDEGDENLQDXKSSEDKKLDDDKKDIKSIXRSRSSNNDDEDLXPEQKAEREKERRMANNARERLRVRDINEAFKELGRMVQLHLKSDKPQXKLLILHQAVAVILSLEQQVRERNLNPKAACLKRREEEKVSSEPPPLSLAGPHPGMGDASNHMGQM

SEQ ID NO: 27202 - protein, 81 aa, Homo sapiens
  MOD_RES (24)..(24): Selenocysteine
  MOD_RES (42)..(42): Selenocysteine
  MOD_RES (48)..(48): Selenocysteine
  MOD_RES (50)..(50): Selenocysteine
  MOD_RES (75)..(75): Selenocysteine
MFSKRLEKIPQVPLLFPFIFIILXNYSKMEGAVESQPSFFKXSQDIVXCXWVENCYSSFSRRPLEVCVILLKCIXNSEWLP

SEQ ID NO: 27203 - protein, 102 aa, Homo sapiens
  MOD_RES (14)..(14): Selenocysteine
  MOD_RES (22)..(22): Selenocysteine
  MOD_RES (51)..(51): Selenocysteine
  MOD_RES (57)..(57): Selenocysteine
  MOD_RES (80)..(80): Selenocysteine
MFSPPVSSGKNGPXSLASGHFXGSNVEDRSSSGSWGNGGHPSPSRNYGDGXPYDHMXSRDLGSHDNLSPPFVNSRIQSKXERGSYSSYGRESNLQGCHQELA

SEQ ID NO: 27204 - protein, 135 aa, Homo sapiens
  MOD_RES (14)..(14): Selenocysteine
  MOD_RES (22)..(22): Selenocysteine
  MOD_RES (51)..(51): Selenocysteine
  MOD_RES (57)..(57): Selenocysteine
  MOD_RES (80)..(80): Selenocysteine
  MOD_RES (114)..(114): Selenocysteine
  MOD_RES (118)..(118): Selenocysteine
MFSPPVSSGKNGPXSLASGHFXGSNVEDRSSSGSWGNGGHPSPSRNYGDGXPYDHMXSRDLGSHDNLSPPFVNSRIQSKXERGSYSSYGRESNLQGCHQQSLLGGDMDMGNPGXLSPXKPGSQYYQYSSNNPRRR

SEQ ID NO: 27205 - protein, 159 aa, Homo sapiens
  MOD_RES (14)..(14): Selenocysteine
  MOD_RES (22)..(22): Selenocysteine
  MOD_RES (51)..(51): Selenocysteine
  MOD_RES (57)..(57): Selenocysteine
  MOD_RES (80)..(80): Selenocysteine
  MOD_RES (114)..(114): Selenocysteine
  MOD_RES (118)..(118): Selenocysteine
  MOD_RES (146)..(146): Selenocysteine
MFSPPVSSGKNGPXSLASGHFXGSNVEDRSSSGSWGNGGHPSPSRNYGDGXPYDHMXSRDLGSHDNLSPPFVNSRIQSKXERGSYSSYGRESNLQGCHQQSLLGGDMDMGNPGXLSPXKPGSQYYQYSSNNPRRRPLHSSAMEVQXKKVRKVPPGLPSS

SEQ ID NO: 27206 - protein, 204 aa, Homo sapiens
  MOD_RES (14)..(14): Selenocysteine
  MOD_RES (22)..(22): Selenocysteine
  MOD_RES (51)..(51): Selenocysteine
  MOD_RES (57)..(57): Selenocysteine
  MOD_RES (80)..(80): Selenocysteine
  MOD_RES (114)..(114): Selenocysteine
  MOD_RES (118)..(118): Selenocysteine
  MOD_RES (146)..(146): Selenocysteine
  MOD_RES (167)..(167): Selenocysteine
  MOD_RES (184)..(184): Selenocysteine
  MOD_RES (186)..(186): Selenocysteine
MFSPPVSSGKNGPXSLASGHFXGSNVEDRSSSGSWGNGGHPSPSRNYGDGXPYDHMXSRDLGSHDNLSPPFVNSRIQSKXERGSYSSYGRESNLQGCHQQSLLGGDMDMGNPGXLSPXKPGSQYYQYSSNNPRRRPLHSSAMEVQXKKVRKVPPGLPSSVYAPSASXADYNRDSPGYPSSKPAXSXFPSSFFMQDGHHSSDPWS

SEQ ID NO: 27207 - protein, 209 aa, Homo sapiens
  MOD_RES (14)..(14): Selenocysteine
  MOD_RES (22)..(22): Selenocysteine
  MOD_RES (51)..(51): Selenocysteine
  MOD_RES (57)..(57): Selenocysteine
  MOD_RES (80)..(80): Selenocysteine
  MOD_RES (114)..(114): Selenocysteine
  MOD_RES (118)..(118): Selenocysteine
  MOD_RES (146)..(146): Selenocysteine
  MOD_RES (167)..(167): Selenocysteine
  MOD_RES (184)..(184): Selenocysteine
  MOD_RES (186)..(186): Selenocysteine
MFSPPVSSGKNGPXSLASGHFXGSNVEDRSSSGSWGNGGHPSPSRNYGDGXPYDHMXSRDLGSHDNLSPPFVNSRIQSKXERGSYSSYGRESNLQGCHQQSLLGGDMDMGNPGXLSPXKPGSQYYQYSSNNPRRRPLHSSAMEVQXKKVRKVPPGLPSSVYAPSASXADYNRDSPGYPSSKPAXSXFPSSFFMQDGHHSSDPWSSSSGM

SEQ ID NO: 27208 - protein, 643 aa, Homo sapiens
  MOD_RES (14)..(14): Selenocysteine
  MOD_RES (22)..(22): Selenocysteine
  MOD_RES (51)..(51): Selenocysteine
  MOD_RES (57)..(57): Selenocysteine
  MOD_RES (80)..(80): Selenocysteine
  MOD_RES (114)..(114): Selenocysteine
  MOD_RES (118)..(118): Selenocysteine
  MOD_RES (146)..(146): Selenocysteine
  MOD_RES (167)..(167): Selenocysteine
  MOD_RES (184)..(184): Selenocysteine
  MOD_RES (186)..(186): Selenocysteine
  MOD_RES (258)..(258): Selenocysteine
  MOD_RES (264)..(264): Selenocysteine
  MOD_RES (269)..(269): Selenocysteine
  MOD_RES (273)..(273): Selenocysteine
  MOD_RES (279)..(279): Selenocysteine
  MOD_RES (296)..(296): Selenocysteine
  MOD_RES (313)..(313): Selenocysteine
  MOD_RES (323)..(323): Selenocysteine
  MOD_RES (335)..(335): Selenocysteine
  MOD_RES (385)..(385): Selenocysteine
  MOD_RES (415)..(415): Selenocysteine
  MOD_RES (429)..(429): Selenocysteine
  MOD_RES (459)..(459): Selenocysteine
  MOD_RES (502)..(502): Selenocysteine
  MOD_RES (521)..(521): Selenocysteine
  MOD_RES (530)..(530): Selenocysteine
  MOD_RES (578)..(578): Selenocysteine
MFSPPVSSGKNGPXSLASGHFXGSNVEDRSSSGSWGNGGHPSPSRNYGDGXPYDHMXSRDLGSHDNLSPPFVNSRIQSKXERGSYSSYGRESNLQGCHQQSLLGGDMDMGNPGXLSPXKPGSQYYQYSSNNPRRRPLHSSAMEVQXKKVRKVPPGLPSSVYAPSASXADYNRDSPGYPSSKPAXSXFPSSFFMQDGHHSSDPWSSSSGMNQPGYAGMLGNSSHIPQSSSYCSLHPHERLSYPSHSSADINSSLPPMSXFHRSGXNHYSXSSCXPPANGXDSIMANRGSGAAGSSQXGDALGKALASIYSPDHXNNSFSSNPSXPVGSPPSLSAGXAVWSRNGGQASSSPNYEGPLHSLQSRIEDRLERLDDAIHVLRNHAVGPSXAMPGGHGDMHGIIGPSHNGAMGGLGSGYGXGLLSANRHSLMVGXHREDGVALRGSHSLLPNQVPVPQLPVQSAXSPDLNPPQDPYRGMPPGLQGQSVSSGSSEIKSDDEGDENLQDXKSSEDKKLDDDKKDIKSIXSNNDDEDLXPEQKAEREKERRMANNARERLRVRDINEAFKELGRMVQLHLKSDKPQXKLLILHQAVAVILSLEQQVRERNLNPKAACLKRREEEKVSSEPPPLSLAGPHPGMGDASNHMGQM

SEQ ID NO: 27209 - protein, 647 aa, Homo sapiens
  MOD_RES (14)..(14): Selenocysteine
  MOD_RES (22)..(22): Selenocysteine
  MOD_RES (51)..(51): Selenocysteine
  MOD_RES (57)..(57): Selenocysteine
  MOD_RES (80)..(80): Selenocysteine
  MOD_RES (114)..(114): Selenocysteine
  MOD_RES (118)..(118): Selenocysteine
  MOD_RES (146)..(146): Selenocysteine
  MOD_RES (167)..(167): Selenocysteine
  MOD_RES (184)..(184): Selenocysteine
  MOD_RES (186)..(186): Selenocysteine
  MOD_RES (258)..(258): Selenocysteine
  MOD_RES (264)..(264): Selenocysteine
  MOD_RES (269)..(269): Selenocysteine
  MOD_RES (273)..(273): Selenocysteine
  MOD_RES (279)..(279): Selenocysteine
  MOD_RES (296)..(296): Selenocysteine
  MOD_RES (313)..(313): Selenocysteine
  MOD_RES (323)..(323): Selenocysteine
  MOD_RES (335)..(335): Selenocysteine
  MOD_RES (385)..(385): Selenocysteine
  MOD_RES (415)..(415): Selenocysteine
  MOD_RES (429)..(429): Selenocysteine
  MOD_RES (459)..(459): Selenocysteine
  MOD_RES (502)..(502): Selenocysteine
  MOD_RES (521)..(521): Selenocysteine
  MOD_RES (534)..(534): Selenocysteine
  MOD_RES (582)..(582): Selenocysteine
MFSPPVSSGKNGPXSLASGHFXGSNVEDRSSSGSWGNGGHPSPSRNYGDGXPYDHMXSRDLGSHDNLSPPFVNSRIQSKXERGSYSSYGRESNLQGCHQQSLLGGDMDMGNPGXLSPXKPGSQYYQYSSNNPRRRPLHSSAMEVQXKKVRKVPPGLPSSVYAPSASXADYNRDSPGYPSSKPAXSXFPSSFFMQDGHHSSDPWSSSSGMNQPGYAGMLGNSSHIPQSSSYCSLHPHERLSYPSHSSADINSSLPPMSXFHRSGXNHYSXSSCXPPANGXDSIMANRGSGAAGSSQXGDALGKALASIYSPDHXNNSFSSNPSXPVGSPPSLSAGXAVWSRNGGQASSSPNYEGPLHSLQSRIEDRLERLDDAIHVLRNHAVGPSXAMPGGHGDMHGIIGPSHNGAMGGLGSGYGXGLLSANRHSLMVGXHREDGVALRGSHSLLPNQVPVPQLPVQSAXSPDLNPPQDPYRGMPPGLQGQSVSSGSSEIKSDDEGDENLQDXKSSEDKKLDDDKKDIKSIXRSRSSNNDDEDLXPEQKAEREKERRMANNARERLRVRDINEAFKELGRMVQLHLKSDKPQXKLLILHQAVAVILSLEQQVRERNLNPKAACLKRREEEKVSSEPPPLSLAGPHPGMGDASNHMGQM

SEQ ID NO: 27210 - protein, 146 aa, Homo sapiens
  MOD_RES (14)..(14): Selenocysteine
  MOD_RES (22)..(22): Selenocysteine
  MOD_RES (51)..(51): Selenocysteine
  MOD_RES (57)..(57): Selenocysteine
  MOD_RES (80)..(80): Selenocysteine
  MOD_RES (113)..(113): Selenocysteine
  MOD_RES (117)..(117): Selenocysteine
  MOD_RES (145)..(145): Selenocysteine
MFSPPVSSGKNGPXSLASGHFXGSNVEDRSSSGSWGNGGHPSPSRNYGDGXPYDHMXSRDLGSHDNLSPPFVNSRIQSKXERGSYSSYGRESNLQGCHQSLLGGDMDMGNPGXLSPXKPGSQYYQYSSNNPRRRPLHSSAMEVQXK

SEQ ID NO: 27211 - protein, 179 aa, Homo sapiens
  MOD_RES (14)..(14): Selenocysteine
  MOD_RES (22)..(22): Selenocysteine
  MOD_RES (51)..(51): Selenocysteine
  MOD_RES (57)..(57): Selenocysteine
  MOD_RES (80)..(80): Selenocysteine
  MOD_RES (113)..(113): Selenocysteine
  MOD_RES (117)..(117): Selenocysteine
  MOD_RES (145)..(145): Selenocysteine
  MOD_RES (166)..(166): Selenocysteine
MFSPPVSSGKNGPXSLASGHFXGSNVEDRSSSGSWGNGGHPSPSRNYGDGXPYDHMXSRDLGSHDNLSPPFVNSRIQSKXERGSYSSYGRESNLQGCHQSLLGGDMDMGNPGXLSPXKPGSQYYQYSSNNPRRRPLHSSAMEVQXKKVRKVPPGLPSSVYAPSASXADYNRDSPGYPSS

SEQ ID NO: 27212 - protein, 642 aa, Homo sapiens
  MOD_RES (14)..(14): Selenocysteine
  MOD_RES (22)..(22): Selenocysteine
  MOD_RES (51)..(51): Selenocysteine
  MOD_RES (57)..(57): Selenocysteine
  MOD_RES (80)..(80): Selenocysteine
  MOD_RES (113)..(113): Selenocysteine
  MOD_RES (117)..(117): Selenocysteine
  MOD_RES (145)..(145): Selenocysteine
  MOD_RES (166)..(166): Selenocysteine
  MOD_RES (183)..(183): Selenocysteine
  MOD_RES (185)..(185): Selenocysteine
  MOD_RES (257)..(257): Selenocysteine
  MOD_RES (263)..(263): Selenocysteine
  MOD_RES (268)..(268): Selenocysteine
  MOD_RES (272)..(272): Selenocysteine
  MOD_RES (278)..(278): Selenocysteine
  MOD_RES (295)..(295): Selenocysteine
  MOD_RES (312)..(312): Selenocysteine
  MOD_RES (322)..(322): Selenocysteine
  MOD_RES (334)..(334): Selenocysteine
  MOD_RES (384)..(384): Selenocysteine
  MOD_RES (414)..(414): Selenocysteine
  MOD_RES (428)..(428): Selenocysteine
  MOD_RES (458)..(458): Selenocysteine
  MOD_RES (501)..(501): Selenocysteine
  MOD_RES (520)..(520): Selenocysteine
  MOD_RES (529)..(529): Selenocysteine
  MOD_RES (577)..(577): Selenocysteine
MFSPPVSSGKNGPXSLASGHFXGSNVEDRSSSGSWGNGGHPSPSRNYGDGXPYDHMXSRDLGSHDNLSPPFVNSRIQSKXERGSYSSYGRESNLQGCHQSLLGGDMDMGNPGXLSPXKPGSQYYQYSSNNPRRRPLHSSAMEVQXKKVRKVPPGLPSSVYAPSASXADYNRDSPGYPSSKPAXSXFPSSFFMQDGHHSSDPWSSSSGMNQPGYAGMLGNSSHIPQSSSYCSLHPHERLSYPSHSSADINSSLPPMSXFHRSGXNHYSXSSCXPPANGXDSIMANRGSGAAGSSQXGDALGKALASIYSPDHXNNSFSSNPSXPVGSPPSLSAGXAVWSRNGGQASSSPNYEGPLHSLQSRIEDRLERLDDAIHVLRNHAVGPSXAMPGGHGDMHGIIGPSHNGAMGGLGSGYGXGLLSANRHSLMVGXHREDGVALRGSHSLLPNQVPVPQLPVQSAXSPDLNPPQDPYRGMPPGLQGQSVSSGSSEIKSDDEGDENLQDXKSSEDKKLDDDKKDIKSIXSNNDDEDLXPEQKAEREKERRMANNARERLRVRDINEAFKELGRMVQLHLKSDKPQXKLLILHQAVAVILSLEQQVRERNLNPKAACLKRREEEKVSSEPPPLSLAGPHPGMGDASNHMGQM

SEQ ID NO: 27213 - protein, 583 aa, Homo sapiens
  MOD_RES (14)..(14): Selenocysteine
  MOD_RES (22)..(22): Selenocysteine
  MOD_RES (51)..(51): Selenocysteine
  MOD_RES (57)..(57): Selenocysteine
  MOD_RES (80)..(80): Selenocysteine
  MOD_RES (107)..(107): Selenocysteine
  MOD_RES (124)..(124): Selenocysteine
  MOD_RES (126)..(126): Selenocysteine
  MOD_RES (198)..(198): Selenocysteine
  MOD_RES (204)..(204): Selenocysteine
  MOD_RES (209)..(209): Selenocysteine
  MOD_RES (213)..(213): Selenocysteine
  MOD_RES (219)..(219): Selenocysteine
  MOD_RES (236)..(236): Selenocysteine
  MOD_RES (253)..(253): Selenocysteine
  MOD_RES (263)..(263): Selenocysteine
  MOD_RES (275)..(275): Selenocysteine
  MOD_RES (325)..(325): Selenocysteine
  MOD_RES (355)..(355): Selenocysteine
  MOD_RES (369)..(369): Selenocysteine
  MOD_RES (399)..(399): Selenocysteine
  MOD_RES (442)..(442): Selenocysteine
  MOD_RES (461)..(461): Selenocysteine
  MOD_RES (470)..(470): Selenocysteine
  MOD_RES (518)..(518): Selenocysteine
MFSPPVSSGKNGPXSLASGHFXGSNVEDRSSSGSWGNGGHPSPSRNYGDGXPYDHMXSRDLGSHDNLSPPFVNSRIQSKXERGSYSSYGRESNLQGCHQVYAPSASXADYNRDSPGYPSSKPAXSXFPSSFFMQDGHHSSDPWSSSSGMNQPGYAGMLGNSSHIPQSSSYCSLHPHERLSYPSHSSADINSSLPPMSXFHRSGXNHYSXSSCXPPANGXDSIMANRGSGAAGSSQXGDALGKALASIYSPDHXNNSFSSNPSXPVGSPPSLSAGXAVWSRNGGQASSSPNYEGPLHSLQSRIEDRLERLDDAIHVLRNHAVGPSXAMPGGHGDMHGIIGPSHNGAMGGLGSGYGXGLLSANRHSLMVGXHREDGVALRGSHSLLPNQVPVPQLPVQSAXSPDLNPPQDPYRGMPPGLQGQSVSSGSSEIKSDDEGDENLQDXKSSEDKKLDDDKKDIKSIXSNNDDEDLXPEQKAEREKERRMANNARERLRVRDINEAFKELGRMVQLHLKSDKPQXKLLILHQAVAVILSLEQQVRERNLNPKAACLKRREEEKVSSEPPPLSLAGPHPGMGDASNHMGQM

SEQ ID NO: 27214 - protein, 202 aa, Homo sapiens
  MOD_RES (14)..(14): Selenocysteine
  MOD_RES (22)..(22): Selenocysteine
  MOD_RES (27)..(27): Selenocysteine
  MOD_RES (61)..(61): Selenocysteine
  MOD_RES (65)..(65): Selenocysteine
  MOD_RES (93)..(93): Selenocysteine
  MOD_RES (114)..(114): Selenocysteine
  MOD_RES (131)..(131): Selenocysteine
  MOD_RES (133)..(133): Selenocysteine
MFSPPVSSGKNGPXSLASGHFXGSSKXERGSYSSYGRESNLQGCHQQSLLGGDMDMGNPGXLSPXKPGSQYYQYSSNNPRRRPLHSSAMEVQXKKVRKVPPGLPSSVYAPSASXADYNRDSPGYPSSKPAXSXFPSSFFMQDGHHSSDPWSSSSGMNQPGYAGMLGNSSHIPQSSSYCSLHPHERLSYPSHSSADINSSLPP

SEQ ID NO: 27215 - protein, 139 aa, Homo sapiens
  MOD_RES (12)..(12): Selenocysteine
  MOD_RES (38)..(38): Selenocysteine
  MOD_RES (46)..(46): Selenocysteine
  MOD_RES (75)..(75): Selenocysteine
  MOD_RES (81)..(81): Selenocysteine
  MOD_RES (104)..(104): Selenocysteine
  MOD_RES (138)..(138): Selenocysteine
MHHQQRMAALGXDKELSDLLDFSAMFSPPVSSGKNGPXSLASGHFXGSNVEDRSSSGSWGNGGHPSPSRNYGDGXPYDHMXSRDLGSHDNLSPPFVNSRIQSKXERGSYSSYGRESNLQGCHQQSLLGGDMDMGNPGXL

SEQ ID NO: 27216 - protein, 677 aa, Homo sapiens
  MOD_RES (12)..(12): Selenocysteine
  MOD_RES (38)..(38): Selenocysteine
  MOD_RES (46)..(46): Selenocysteine
  MOD_RES (75)..(75): Selenocysteine
  MOD_RES (81)..(81): Selenocysteine
  MOD_RES (104)..(104): Selenocysteine
  MOD_RES (138)..(138): Selenocysteine
  MOD_RES (142)..(142): Selenocysteine
  MOD_RES (170)..(170): Selenocysteine
  MOD_RES (197)..(197): Selenocysteine
  MOD_RES (214)..(214): Selenocysteine
  MOD_RES (216)..(216): Selenocysteine
  MOD_RES (288)..(288): Selenocysteine
  MOD_RES (294)..(294): Selenocysteine
  MOD_RES (299)..(299): Selenocysteine
  MOD_RES (303)..(303): Selenocysteine
  MOD_RES (309)..(309): Selenocysteine
  MOD_RES (326)..(326): Selenocysteine
  MOD_RES (343)..(343): Selenocysteine
  MOD_RES (353)..(353): Selenocysteine
  MOD_RES (365)..(365): Selenocysteine
  MOD_RES (415)..(415): Selenocysteine
  MOD_RES (445)..(445): Selenocysteine
  MOD_RES (459)..(459): Selenocysteine
  MOD_RES (489)..(489): Selenocysteine
  MOD_RES (532)..(532): Selenocysteine
  MOD_RES (551)..(551): Selenocysteine
  MOD_RES (564)..(564): Selenocysteine
  MOD_RES (612)..(612): Selenocysteine
MHHQQRMAALGXDKELSDLLDFSAMFSPPVSSGKNGPXSLASGHFXGSNVEDRSSSGSWGNGGHPSPSRNYGDGXPYDHMXSRDLGSHDNLSPPFVNSRIQSKXERGSYSSYGRESNLQGCHQQSLLGGDMDMGNPGXLSPXKPGSQYYQYSSNNPRRRPLHSSAMEVQXKKVRKVPPGLPSSLVLSPQVYAPSASXADYNRDSPGYPSSKPAXSXFPSSFFMQDGHHSSDPWSSSSGMNQPGYAGMLGNSSHIPQSSSYCSLHPHERLSYPSHSSADINSSLPPMSXFHRSGXNHYSXSSCXPPANGXDSIMANRGSGAAGSSQXGDALGKALASIYSPDHXNNSFSSNPSXPVGSPPSLSAGXAVWSRNGGQASSSPNYEGPLHSLQSRIEDRLERLDDAIHVLRNHAVGPSXAMPGGHGDMHGIIGPSHNGAMGGLGSGYGXGLLSANRHSLMVGXHREDGVALRGSHSLLPNQVPVPQLPVQSAXSPDLNPPQDPYRGMPPGLQGQSVSSGSSEIKSDDEGDENLQDXKSSEDKKLDDDKKDIKSIXRSRSSNNDDEDLXPEQKAEREKERRMANNARERLRVRDINEAFKELGRMVQLHLKSDKPQXKLLILHQAVAVILSLEQQVRERNLNPKAACLKRREEEKVSSEPPPLSLAGPHPGMGDASNHMGQM

SEQ ID NO: 27217 - protein, 221 aa, Homo sapiens
  MOD_RES (12)..(12): Selenocysteine
  MOD_RES (38)..(38): Selenocysteine
  MOD_RES (46)..(46): Selenocysteine
  MOD_RES (75)..(75): Selenocysteine
  MOD_RES (81)..(81): Selenocysteine
  MOD_RES (104)..(104): Selenocysteine
  MOD_RES (138)..(138): Selenocysteine
  MOD_RES (142)..(142): Selenocysteine
  MOD_RES (170)..(170): Selenocysteine
  MOD_RES (191)..(191): Selenocysteine
  MOD_RES (208)..(208): Selenocysteine
  MOD_RES (210)..(210): Selenocysteine
MHHQQRMAALGXDKELSDLLDFSAMFSPPVSSGKNGPXSLASGHFXGSNVEDRSSSGSWGNGGHPSPSRNYGDGXPYDHMXSRDLGSHDNLSPPFVNSRIQSKXERGSYSSYGRESNLQGCHQQSLLGGDMDMGNPGXLSPXKPGSQYYQYSSNNPRRRPLHSSAMEVQXKKVRKVPPGLPSSVYAPSASXADYNRDSPGYPSSKPAXSXFPSSFFMQDGH

SEQ ID NO: 27218 - protein, 631 aa, Homo sapiens
  MOD_RES (12)..(12): Selenocysteine
  MOD_RES (38)..(38): Selenocysteine
  MOD_RES (46)..(46): Selenocysteine
  MOD_RES (75)..(75): Selenocysteine
  MOD_RES (81)..(81): Selenocysteine
  MOD_RES (104)..(104): Selenocysteine
  MOD_RES (138)..(138): Selenocysteine
  MOD_RES (142)..(142): Selenocysteine
  MOD_RES (170)..(170): Selenocysteine
  MOD_RES (191)..(191): Selenocysteine
  MOD_RES (208)..(208): Selenocysteine
  MOD_RES (210)..(210): Selenocysteine
  MOD_RES (282)..(282): Selenocysteine
  MOD_RES (288)..(288): Selenocysteine
  MOD_RES (293)..(293): Selenocysteine
  MOD_RES (297)..(297): Selenocysteine
  MOD_RES (303)..(303): Selenocysteine
  MOD_RES (320)..(320): Selenocysteine
  MOD_RES (337)..(337): Selenocysteine
  MOD_RES (347)..(347): Selenocysteine
  MOD_RES (359)..(359): Selenocysteine
  MOD_RES (409)..(409): Selenocysteine
  MOD_RES (439)..(439): Selenocysteine
  MOD_RES (453)..(453): Selenocysteine
  MOD_RES (483)..(483): Selenocysteine
  MOD_RES (501)..(501): Selenocysteine
  MOD_RES (518)..(518): Selenocysteine
  MOD_RES (566)..(566): Selenocysteine
MHHQQRMAALGXDKELSDLLDFSAMFSPPVSSGKNGPXSLASGHFXGSNVEDRSSSGSWGNGGHPSPSRNYGDGXPYDHMXSRDLGSHDNLSPPFVNSRIQSKXERGSYSSYGRESNLQGCHQQSLLGGDMDMGNPGXLSPXKPGSQYYQYSSNNPRRRPLHSSAMEVQXKKVRKVPPGLPSSVYAPSASXADYNRDSPGYPSSKPAXSXFPSSFFMQDGHHSSDPWSSSSGMNQPGYAGMLGNSSHIPQSSSYCSLHPHERLSYPSHSSADINSSLPPMSXFHRSGXNHYSXSSCXPPANGXDSIMANRGSGAAGSSQXGDALGKALASIYSPDHXNNSFSSNPSXPVGSPPSLSAGXAVWSRNGGQASSSPNYEGPLHSLQSRIEDRLERLDDAIHVLRNHAVGPSXAMPGGHGDMHGIIGPSHNGAMGGLGSGYGXGLLSANRHSLMVGXHREDGVALRGSHSLLPNQVPVPQLPVQSAXSPDLNPPQDPYREALAEXQESNWAQKCNNDDEDLXPEQKAEREKERRMANNARERLRVRDINEAFKELGRMVQLHLKSDKPQXKLLILHQAVAVILSLEQQVRERNLNPKAACLKRREEEKVSSEPPPLSLAGPHPGMGDASNHMGQM

SEQ ID NO: 27219 - protein, 667 aa, Homo sapiens
  MOD_RES (12)..(12): Selenocysteine
  MOD_RES (38)..(38): Selenocysteine
  MOD_RES (46)..(46): Selenocysteine
  MOD_RES (75)..(75): Selenocysteine
  MOD_RES (81)..(81): Selenocysteine
  MOD_RES (104)..(104): Selenocysteine
  MOD_RES (138)..(138): Selenocysteine
  MOD_RES (142)..(142): Selenocysteine
  MOD_RES (170)..(170): Selenocysteine
  MOD_RES (191)..(191): Selenocysteine
  MOD_RES (208)..(208): Selenocysteine
  MOD_RES (210)..(210): Selenocysteine
  MOD_RES (282)..(282): Selenocysteine
  MOD_RES (288)..(288): Selenocysteine
  MOD_RES (293)..(293): Selenocysteine
  MOD_RES (297)..(297): Selenocysteine
  MOD_RES (303)..(303): Selenocysteine
  MOD_RES (320)..(320): Selenocysteine
  MOD_RES (337)..(337): Selenocysteine
  MOD_RES (347)..(347): Selenocysteine
  MOD_RES (359)..(359): Selenocysteine
  MOD_RES (409)..(409): Selenocysteine
  MOD_RES (439)..(439): Selenocysteine
  MOD_RES (453)..(453): Selenocysteine
  MOD_RES (483)..(483): Selenocysteine
  MOD_RES (526)..(526): Selenocysteine
  MOD_RES (545)..(545): Selenocysteine
  MOD_RES (554)..(554): Selenocysteine
  MOD_RES (602)..(602): Selenocysteine
MHHQQRMAALGXDKELSDLLDFSAMFSPPVSSGKNGPXSLASGHFXGSNVEDRSSSGSWGNGGHPSPSRNYGDGXPYDHMXSRDLGSHDNLSPPFVNSRIQSKXERGSYSSYGRESNLQGCHQQSLLGGDMDMGNPGXLSPXKPGSQYYQYSSNNPRRRPLHSSAMEVQXKKVRKVPPGLPSSVYAPSASXADYNRDSPGYPSSKPAXSXFPSSFFMQDGHHSSDPWSSSSGMNQPGYAGMLGNSSHIPQSSSYCSLHPHERLSYPSHSSADINSSLPPMSXFHRSGXNHYSXSSCXPPANGXDSIMANRGSGAAGSSQXGDALGKALASIYSPDHXNNSFSSNPSXPVGSPPSLSAGXAVWSRNGGQASSSPNYEGPLHSLQSRIEDRLERLDDAIHVLRNHAVGPSXAMPGGHGDMHGIIGPSHNGAMGGLGSGYGXGLLSANRHSLMVGXHREDGVALRGSHSLLPNQVPVPQLPVQSAXSPDLNPPQDPYRGMPPGLQGQSVSSGSSEIKSDDEGDENLQDXKSSEDKKLDDDKKDIKSIXSNNDDEDLXPEQKAEREKERRMANNARERLRVRDINEAFKELGRMVQLHLKSDKPQXKLLILHQAVAVILSLEQQVRERNLNPKAACLKRREEEKVSSEPPPLSLAGPHPGMGDASNHMGQM

SEQ ID NO: 27220 - protein, 670 aa, Homo sapiens
  MOD_RES (12)..(12): Selenocysteine
  MOD_RES (38)..(38): Selenocysteine
  MOD_RES (46)..(46): Selenocysteine
  MOD_RES (75)..(75): Selenocysteine
  MOD_RES (81)..(81): Selenocysteine
  MOD_RES (104)..(104): Selenocysteine
  MOD_RES (138)..(138): Selenocysteine
  MOD_RES (142)..(142): Selenocysteine
  MOD_RES (170)..(170): Selenocysteine
  MOD_RES (191)..(191): Selenocysteine
  MOD_RES (208)..(208): Selenocysteine
  MOD_RES (210)..(210): Selenocysteine
  MOD_RES (282)..(282): Selenocysteine
  MOD_RES (288)..(288): Selenocysteine
  MOD_RES (293)..(293): Selenocysteine
  MOD_RES (297)..(297): Selenocysteine
  MOD_RES (303)..(303): Selenocysteine
  MOD_RES (320)..(320): Selenocysteine
  MOD_RES (337)..(337): Selenocysteine
  MOD_RES (347)..(347): Selenocysteine
  MOD_RES (358)..(358): Selenocysteine
  MOD_RES (408)..(408): Selenocysteine
  MOD_RES (438)..(438): Selenocysteine
  MOD_RES (452)..(452): Selenocysteine
  MOD_RES (482)..(482): Selenocysteine
  MOD_RES (525)..(525): Selenocysteine
  MOD_RES (544)..(544): Selenocysteine
  MOD_RES (557)..(557): Selenocysteine
  MOD_RES (605)..(605): Selenocysteine
MHHQQRMAALGXDKELSDLLDFSAMFSPPVSSGKNGPXSLASGHFXGSNVEDRSSSGSWGNGGHPSPSRNYGDGXPYDHMXSRDLGSHDNLSPPFVNSRIQSKXERGSYSSYGRESNLQGCHQQSLLGGDMDMGNPGXLSPXKPGSQYYQYSSNNPRRRPLHSSAMEVQXKKVRKVPPGLPSSVYAPSASXADYNRDSPGYPSSKPAXSXFPSSFFMQDGHHSSDPWSSSSGMNQPGYAGMLGNSSHIPQSSSYCSLHPHERLSYPSHSSADINSSLPPMSXFHRSGXNHYSXSSCXPPANGXDSIMANRGSGAAGSSQXGDALGKALASIYSPDHXNNSFSSNPSXPVGSPPSLSGXAVWSRNGGQASSSPNYEGPLHSLQSRIEDRLERLDDAIHVLRNHAVGPSXAMPGGHGDMHGIIGPSHNGAMGGLGSGYGXGLLSANRHSLMVGXHREDGVALRGSHSLLPNQVPVPQLPVQSAXSPDLNPPQDPYRGMPPGLQGQSVSSGSSEIKSDDEGDENLQDXKSSEDKKLDDDKKDIKSIXRSRSSNNDDEDLXPEQKAEREKERRMANNARERLRVRDINEAFKELGRMVQLHLKSDKPQXKLLILHQAVAVILSLEQQVRERNLNPKAACLKRREEEKVSSEPPPLSLAGPHPGMGDASNHMGQM

SEQ ID NO: 27221 - protein, 671 aa, Homo sapiens
  MOD_RES (12)..(12): Selenocysteine
  MOD_RES (38)..(38): Selenocysteine
  MOD_RES (46)..(46): Selenocysteine
  MOD_RES (75)..(75): Selenocysteine
  MOD_RES (81)..(81): Selenocysteine
  MOD_RES (104)..(104): Selenocysteine
  MOD_RES (138)..(138): Selenocysteine
  MOD_RES (142)..(142): Selenocysteine
  MOD_RES (170)..(170): Selenocysteine
  MOD_RES (191)..(191): Selenocysteine
  MOD_RES (208)..(208): Selenocysteine
  MOD_RES (210)..(210): Selenocysteine
  MOD_RES (282)..(282): Selenocysteine
  MOD_RES (288)..(288): Selenocysteine
  MOD_RES (293)..(293): Selenocysteine
  MOD_RES (297)..(297): Selenocysteine
  MOD_RES (303)..(303): Selenocysteine
  MOD_RES (320)..(320): Selenocysteine
  MOD_RES (337)..(337): Selenocysteine
  MOD_RES (347)..(347): Selenocysteine
  MOD_RES (359)..(359): Selenocysteine
  MOD_RES (409)..(409): Selenocysteine
  MOD_RES (439)..(439): Selenocysteine
  MOD_RES (453)..(453): Selenocysteine
  MOD_RES (483)..(483): Selenocysteine
  MOD_RES (526)..(526): Selenocysteine
  MOD_RES (545)..(545): Selenocysteine
  MOD_RES (558)..(558): Selenocysteine
  MOD_RES (606)..(606): Selenocysteine
MHHQQRMAALGXDKELSDLLDFSAMFSPPVSSGKNGPXSLASGHFXGSNVEDRSSSGSWGNGGHPSPSRNYGDGXPYDHMXSRDLGSHDNLSPPFVNSRIQSKXERGSYSSYGRESNLQGCHQQSLLGGDMDMGNPGXLSPXKPGSQYYQYSSNNPRRRPLHSSAMEVQXKKVRKVPPGLPSSVYAPSASXADYNRDSPGYPSSKPAXSXFPSSFFMQDGHHSSDPWSSSSGMNQPGYAGMLGNSSHIPQSSSYCSLHPHERLSYPSHSSADINSSLPPMSXFHRSGXNHYSXSSCXPPANGXDSIMANRGSGAAGSSQXGDALGKALASIYSPDHXNNSFSSNPSXPVGSPPSLSAGXAVWSRNGGQASSSPNYEGPLHSLQSRIEDRLERLDDAIHVLRNHAVGPSXAMPGGHGDMHGIIGPSHNGAMGGLGSGYGXGLLSANRHSLMVGXHREDGVALRGSHSLLPNQVPVPQLPVQSAXSPDLNPPQDPYRGMPPGLQGQSVSSGSSEIKSDDEGDENLQDXKSSEDKKLDDDKKDIKSIXRSRSSNNDDEDLXPEQKAEREKERRMANNARERLRVRDINEAFKELGRMVQLHLKSDKPQXKLLILHQAVAVILSLEQQVRERNLNPKAACLKRREEEKVSSEPPPLSLAGPHPGMGDASNHMGQM

SEQ ID NO: 27222 - protein, 156 aa, Homo sapiens
  MOD_RES (12)..(12): Selenocysteine
  MOD_RES (38)..(38): Selenocysteine
  MOD_RES (46)..(46): Selenocysteine
  MOD_RES (75)..(75): Selenocysteine
  MOD_RES (81)..(81): Selenocysteine
  MOD_RES (104)..(104): Selenocysteine
  MOD_RES (137)..(137): Selenocysteine
  MOD_RES (141)..(141): Selenocysteine
MHHQQRMAALGXDKELSDLLDFSAMFSPPVSSGKNGPXSLASGHFXGSNVEDRSSSGSWGNGGHPSPSRNYGDGXPYDHMXSRDLGSHDNLSPPFVNSRIQSKXERGSYSSYGRESNLQGCHQSLLGGDMDMGNPGXLSPXKPGSQYYQYSSNNPR

SEQ ID NO: 27223 - protein, 607 aa, Homo sapiens
  MOD_RES (12)..(12): Selenocysteine
  MOD_RES (38)..(38): Selenocysteine
  MOD_RES (46)..(46): Selenocysteine
  MOD_RES (75)..(75): Selenocysteine
  MOD_RES (81)..(81): Selenocysteine
  MOD_RES (104)..(104): Selenocysteine
  MOD_RES (131)..(131): Selenocysteine
  MOD_RES (148)..(148): Selenocysteine
  MOD_RES (150)..(150): Selenocysteine
  MOD_RES (222)..(222): Selenocysteine
  MOD_RES (228)..(228): Selenocysteine
  MOD_RES (233)..(233): Selenocysteine
  MOD_RES (237)..(237): Selenocysteine
  MOD_RES (243)..(243): Selenocysteine
  MOD_RES (260)..(260): Selenocysteine
  MOD_RES (277)..(277): Selenocysteine
  MOD_RES (287)..(287): Selenocysteine
  MOD_RES (299)..(299): Selenocysteine
  MOD_RES (349)..(349): Selenocysteine
  MOD_RES (379)..(379): Selenocysteine
  MOD_RES (393)..(393): Selenocysteine
  MOD_RES (423)..(423): Selenocysteine
  MOD_RES (466)..(466): Selenocysteine
  MOD_RES (485)..(485): Selenocysteine
  MOD_RES (494)..(494): Selenocysteine
  MOD_RES (542)..(542): Selenocysteine
MHHQQRMAALGXDKELSDLLDFSAMFSPPVSSGKNGPXSLASGHFXGSNVEDRSSSGSWGNGGHPSPSRNYGDGXPYDHMXSRDLGSHDNLSPPFVNSRIQSKXERGSYSSYGRESNLQGCHQVYAPSASXADYNRDSPGYPSSKPAXSXFPSSFFMQDGHHSSDPWSSSSGMNQPGYAGMLGNSSHIPQSSSYCSLHPHERLSYPSHSSADINSSLPPMSXFHRSGXNHYSXSSCXPPANGXDSIMANRGSGAAGSSQXGDALGKALASIYSPDHXNNSFSSNPSXPVGSPPSLSAGXAVWSRNGGQASSSPNYEGPLHSLQSRIEDRLERLDDAIHVLRNHAVGPSXAMPGGHGDMHGIIGPSHNGAMGGLGSGYGXGLLSANRHSLMVGXHREDGVALRGSHSLLPNQVPVPQLPVQSAXSPDLNPPQDPYRGMPPGLQGQSVSSGSSEIKSDDEGDENLQDXKSSEDKKLDDDKKDIKSIXSNNDDEDLXPEQKAEREKERRMANNARERLRVRDINEAFKELGRMVQLHLKSDKPQXKLLILHQAVAVILSLEQQVRERNLNPKAACLKRREEEKVSSEPPPLSLAGPHPGMGDASNHMGQM

SEQ ID NO: 27224 - protein, 611 aa, Homo sapiens
  MOD_RES (12)..(12): Selenocysteine
  MOD_RES (38)..(38): Selenocysteine
  MOD_RES (46)..(46): Selenocysteine
  MOD_RES (75)..(75): Selenocysteine
  MOD_RES (81)..(81): Selenocysteine
  MOD_RES (104)..(104): Selenocysteine
  MOD_RES (131)..(131): Selenocysteine
  MOD_RES (148)..(148): Selenocysteine
  MOD_RES (150)..(150): Selenocysteine
  MOD_RES (222)..(222): Selenocysteine
  MOD_RES (228)..(228): Selenocysteine
  MOD_RES (233)..(233): Selenocysteine
  MOD_RES (237)..(237): Selenocysteine
  MOD_RES (243)..(243): Selenocysteine
  MOD_RES (260)..(260): Selenocysteine
  MOD_RES (277)..(277): Selenocysteine
  MOD_RES (287)..(287): Selenocysteine
  MOD_RES (299)..(299): Selenocysteine
  MOD_RES (349)..(349): Selenocysteine
  MOD_RES (379)..(379): Selenocysteine
  MOD_RES (393)..(393): Selenocysteine
  MOD_RES (423)..(423): Selenocysteine
  MOD_RES (466)..(466): Selenocysteine
  MOD_RES (485)..(485): Selenocysteine
  MOD_RES (498)..(498): Selenocysteine
  MOD_RES (546)..(546): Selenocysteine
MHHQQRMAALGXDKELSDLLDFSAMFSPPVSSGKNGPXSLASGHFXGSNVEDRSSSGSWGNGGHPSPSRNYGDGXPYDHMXSRDLGSHDNLSPPFVNSRIQSKXERGSYSSYGRESNLQGCHQVYAPSASXADYNRDSPGYPSSKPAXSXFPSSFFMQDGHHSSDPWSSSSGMNQPGYAGMLGNSSHIPQSSSYCSLHPHERLSYPSHSSADINSSLPPMSXFHRSGXNHYSXSSCXPPANGXDSIMANRGSGAAGSSQXGDALGKALASIYSPDHXNNSFSSNPSXPVGSPPSLSAGXAVWSRNGGQASSSPNYEGPLHSLQSRIEDRLERLDDAIHVLRNHAVGPSXAMPGGHGDMHGIIGPSHNGAMGGLGSGYGXGLLSANRHSLMVGXHREDGVALRGSHSLLPNQVPVPQLPVQSAXSPDLNPPQDPYRGMPPGLQGQSVSSGSSEIKSDDEGDENLQDXKSSEDKKLDDDKKDIKSIXRSRSSNNDDEDLXPEQKAEREKERRMANNARERLRVRDINEAFKELGRMVQLHLKSDKPQXKLLILHQAVAVILSLEQQVRERNLNPKAACLKRREEEKVSSEPPPLSLAGPHPGMGDASNHMGQM

SEQ ID NO: 27225 - protein, 50 aa, Homo sapiens
  MOD_RES (12)..(12): Selenocysteine
  MOD_RES (38)..(38): Selenocysteine
  MOD_RES (46)..(46): Selenocysteine
MHHQQRMAALGXDKELSDLLDFSAMFSPPVSSGKNGPXSLASGHFXGSNY

SEQ ID NO: 27226 - protein, 228 aa, Homo sapiens
  MOD_RES (24)..(24): Selenocysteine
  MOD_RES (30)..(30): Selenocysteine
  MOD_RES (34)..(34): Selenocysteine
  MOD_RES (68)..(68): Selenocysteine
  MOD_RES (72)..(72): Selenocysteine
  MOD_RES (100)..(100): Selenocysteine
  MOD_RES (121)..(121): Selenocysteine
  MOD_RES (138)..(138): Selenocysteine
  MOD_RES (140)..(140): Selenocysteine
  MOD_RES (212)..(212): Selenocysteine
  MOD_RES (218)..(218): Selenocysteine
  MOD_RES (223)..(223): Selenocysteine
  MOD_RES (227)..(227): Selenocysteine
MKDIFFQFIIARVRKCYSLSCLHXLPVVPXLRKXERGSYSSYGRESNLQGCHQQSLLGGDMDMGNPGXLSPXKPGSQYYQYSSNNPRRRPLHSSAMEVQXKKVRKVPPGLPSSVYAPSASXADYNRDSPGYPSSKPAXSXFPSSFFMQDGHHSSDPWSSSSGMNQPGYAGMLGNSSHIPQSSSYCSLHPHERLSYPSHSSADINSSLPPMSXFHRSGXNHYSXSSCXP

SEQ ID NO: 27227 - protein, 596 aa, Homo sapiens
  MOD_RES (24)..(24): Selenocysteine
  MOD_RES (30)..(30): Selenocysteine
  MOD_RES (34)..(34): Selenocysteine
  MOD_RES (67)..(67): Selenocysteine
  MOD_RES (71)..(71): Selenocysteine
  MOD_RES (99)..(99): Selenocysteine
  MOD_RES (120)..(120): Selenocysteine
  MOD_RES (137)..(137): Selenocysteine
  MOD_RES (139)..(139): Selenocysteine
  MOD_RES (211)..(211): Selenocysteine
  MOD_RES (217)..(217): Selenocysteine
  MOD_RES (222)..(222): Selenocysteine
  MOD_RES (226)..(226): Selenocysteine
  MOD_RES (232)..(232): Selenocysteine
  MOD_RES (249)..(249): Selenocysteine
  MOD_RES (266)..(266): Selenocysteine
  MOD_RES (276)..(276): Selenocysteine
  MOD_RES (288)..(288): Selenocysteine
  MOD_RES (338)..(338): Selenocysteine
  MOD_RES (368)..(368): Selenocysteine
  MOD_RES (382)..(382): Selenocysteine
  MOD_RES (412)..(412): Selenocysteine
  MOD_RES (455)..(455): Selenocysteine
  MOD_RES (474)..(474): Selenocysteine
  MOD_RES (483)..(483): Selenocysteine
  MOD_RES (531)..(531): Selenocysteine
MKDIFFQFIIARVRKCYSLSCLHXLPVVPXLRKXERGSYSSYGRESNLQGCHQSLLGGDMDMGNPGXLSPXKPGSQYYQYSSNNPRRRPLHSSAMEVQXKKVRKVPPGLPSSVYAPSASXADYNRDSPGYPSSKPAXSXFPSSFFMQDGHHSSDPWSSSSGMNQPGYAGMLGNSSHIPQSSSYCSLHPHERLSYPSHSSADINSSLPPMSXFHRSGXNHYSXSSCXPPANGXDSIMANRGSGAAGSSQXGDALGKALASIYSPDHXNNSFSSNPSXPVGSPPSLSAGXAVWSRNGGQASSSPNYEGPLHSLQSRIEDRLERLDDAIHVLRNHAVGPSXAMPGGHGDMHGIIGPSHNGAMGGLGSGYGXGLLSANRHSLMVGXHREDGVALRGSHSLLPNQVPVPQLPVQSAXSPDLNPPQDPYRGMPPGLQGQSVSSGSSEIKSDDEGDENLQDXKSSEDKKLDDDKKDIKSIXSNNDDEDLXPEQKAEREKERRMANNARERLRVRDINEAFKELGRMVQLHLKSDKPQXKLLILHQAVAVILSLEQQVRERNLNPKAACLKRREEEKVSSEPPPLSLAGPHPGMGDASNHMGQM

SEQ ID NO: 27228 - protein, 600 aa, Homo sapiens
  MOD_RES (24)..(24): Selenocysteine
  MOD_RES (30)..(30): Selenocysteine
  MOD_RES (34)..(34): Selenocysteine
  MOD_RES (67)..(67): Selenocysteine
  MOD_RES (71)..(71): Selenocysteine
  MOD_RES (99)..(99): Selenocysteine
  MOD_RES (120)..(120): Selenocysteine
  MOD_RES (137)..(137): Selenocysteine
  MOD_RES (139)..(139): Selenocysteine
  MOD_RES (211)..(211): Selenocysteine
  MOD_RES (217)..(217): Selenocysteine
  MOD_RES (222)..(222): Selenocysteine
  MOD_RES (226)..(226): Selenocysteine
  MOD_RES (232)..(232): Selenocysteine
  MOD_RES (249)..(249): Selenocysteine
  MOD_RES (266)..(266): Selenocysteine
  MOD_RES (276)..(276): Selenocysteine
  MOD_RES (288)..(288): Selenocysteine
  MOD_RES (338)..(338): Selenocysteine
  MOD_RES (368)..(368): Selenocysteine
  MOD_RES (382)..(382): Selenocysteine
  MOD_RES (412)..(412): Selenocysteine
  MOD_RES (455)..(455): Selenocysteine
  MOD_RES (474)..(474): Selenocysteine
  MOD_RES (487)..(487): Selenocysteine
  MOD_RES (535)..(535): Selenocysteine
MKDIFFQFIIARVRKCYSLSCLHXLPVVPXLRKXERGSYSSYGRESNLQGCHQSLLGGDMDMGNPGXLSPXKPGSQYYQYSSNNPRRRPLHSSAMEVQXKKVRKVPPGLPSSVYAPSASXADYNRDSPGYPSSKPAXSXFPSSFFMQDGHHSSDPWSSSSGMNQPGYAGMLGNSSHIPQSSSYCSLHPHERLSYPSHSSADINSSLPPMSXFHRSGXNHYSXSSCXPPANGXDSIMANRGSGAAGSSQXGDALGKALASIYSPDHXNNSFSSNPSXPVGSPPSLSAGXAVWSRNGGQASSSPNYEGPLHSLQSRIEDRLERLDDAIHVLRNHAVGPSXAMPGGHGDMHGIIGPSHNGAMGGLGSGYGXGLLSANRHSLMVGXHREDGVALRGSHSLLPNQVPVPQLPVQSAXSPDLNPPQDPYRGMPPGLQGQSVSSGSSEIKSDDEGDENLQDXKSSEDKKLDDDKKDIKSIXRSRSSNNDDEDLXPEQKAEREKERRMANNARERLRVRDINEAFKELGRMVQLHLKSDKPQXKLLILHQAVAVILSLEQQVRERNLNPKAACLKRREEEKVSSEPPPLSLAGPHPGMGDASNHMGQM

SEQ ID NO: 27229 - protein, 507 aa, Homo sapiens
  MOD_RES (11)..(11): Selenocysteine
  MOD_RES (31)..(31): Selenocysteine
  MOD_RES (48)..(48): Selenocysteine
  MOD_RES (50)..(50): Selenocysteine
  MOD_RES (122)..(122): Selenocysteine
  MOD_RES (128)..(128): Selenocysteine
  MOD_RES (133)..(133): Selenocysteine
  MOD_RES (137)..(137): Selenocysteine
  MOD_RES (143)..(143): Selenocysteine
  MOD_RES (160)..(160): Selenocysteine
  MOD_RES (177)..(177): Selenocysteine
  MOD_RES (187)..(187): Selenocysteine
  MOD_RES (199)..(199): Selenocysteine
  MOD_RES (249)..(249): Selenocysteine
  MOD_RES (279)..(279): Selenocysteine
  MOD_RES (293)..(293): Selenocysteine
  MOD_RES (323)..(323): Selenocysteine
  MOD_RES (366)..(366): Selenocysteine
  MOD_RES (385)..(385): Selenocysteine
  MOD_RES (394)..(394): Selenocysteine
  MOD_RES (442)..(442): Selenocysteine
MKFKQCRCSDXGLCCLDHEGKAEVYAPSASXADYNRDSPGYPSSKPAXSXFPSSFFMQDGHHSSDPWSSSSGMNQPGYAGMLGNSSHIPQSSSYCSLHPHERLSYPSHSSADINSSLPPMSXFHRSGXNHYSXSSCXPPANGXDSIMANRGSGAAGSSQXGDALGKALASIYSPDHXNNSFSSNPSXPVGSPPSLSAGXAVWSRNGGQASSSPNYEGPLHSLQSRIEDRLERLDDAIHVLRNHAVGPSXAMPGGHGDMHGIIGPSHNGAMGGLGSGYGXGLLSANRHSLMVGXHREDGVALRGSHSLLPNQVPVPQLPVQSAXSPDLNPPQDPYRGMPPGLQGQSVSSGSSEIKSDDEGDENLQDXKSSEDKKLDDDKKDIKSIXSNNDDEDLXPEQKAEREKERRMANNARERLRVRDINEAFKELGRMVQLHLKSDKPQXKLLILHQAVAVILSLEQQVRERNLNPKAACLKRREEEKVSSEPPPLSLAGPHPGMGDASNHMGQM

SEQ ID NO: 27230 - protein, 165 aa, Homo sapiens
  MOD_RES (26)..(26): Selenocysteine
  MOD_RES (34)..(34): Selenocysteine
  MOD_RES (63)..(63): Selenocysteine
  MOD_RES (69)..(69): Selenocysteine
  MOD_RES (92)..(92): Selenocysteine
  MOD_RES (126)..(126): Selenocysteine
  MOD_RES (130)..(130): Selenocysteine
  MOD_RES (158)..(158): Selenocysteine
MLEREGVKERVRMFSPPVSSGKNGPXSLASGHFXGSNVEDRSSSGSWGNGGHPSPSRNYGDGXPYDHMXSRDLGSHDNLSPPFVNSRIQSKXERGSYSSYGRESNLQGCHQQSLLGGDMDMGNPGXLSPXKPGSQYYQYSSNNPRRRPLHSSAMEVQXKKVRKVP

SEQ ID NO: 27231 - protein, 451 aa, Homo sapiens
  MOD_RES (66)..(66): Selenocysteine
  MOD_RES (72)..(72): Selenocysteine
  MOD_RES (77)..(77): Selenocysteine
  MOD_RES (81)..(81): Selenocysteine
  MOD_RES (87)..(87): Selenocysteine
  MOD_RES (104)..(104): Selenocysteine
  MOD_RES (121)..(121): Selenocysteine
  MOD_RES (131)..(131): Selenocysteine
  MOD_RES (143)..(143): Selenocysteine
  MOD_RES (193)..(193): Selenocysteine
  MOD_RES (223)..(223): Selenocysteine
  MOD_RES (237)..(237): Selenocysteine
  MOD_RES (267)..(267): Selenocysteine
  MOD_RES (310)..(310): Selenocysteine
  MOD_RES (329)..(329): Selenocysteine
  MOD_RES (338)..(338): Selenocysteine
  MOD_RES (386)..(386): Selenocysteine
MQDGHHSSDPWSSSSGMNQPGYAGMLGNSSHIPQSSSYCSLHPHERLSYPSHSSADINSSLPPMSXFHRSGXNHYSXSSCXPPANGXDSIMANRGSGAAGSSQXGDALGKALASIYSPDHXNNSFSSNPSXPVGSPPSLSAGXAVWSRNGGQASSSPNYEGPLHSLQSRIEDRLERLDDAIHVLRNHAVGPSXAMPGGHGDMHGIIGPSHNGAMGGLGSGYGXGLLSANRHSLMVGXHREDGVALRGSHSLLPNQVPVPQLPVQSAXSPDLNPPQDPYRGMPPGLQGQSVSSGSSEIKSDDEGDENLQDXKSSEDKKLDDDKKDIKSIXSNNDDEDLXPEQKAEREKERRMANNARERLRVRDINEAFKELGRMVQLHLKSDKPQXKLLILHQAVAVILSLEQQVRERNLNPKAACLKRREEEKVSSEPPPLSLAGPHPGMGDASNHMGQM

SEQ ID NO: 27232 - protein, 455 aa, Homo sapiens
  MOD_RES (66)..(66): Selenocysteine
  MOD_RES (72)..(72): Selenocysteine
  MOD_RES (77)..(77): Selenocysteine
  MOD_RES (81)..(81): Selenocysteine
  MOD_RES (87)..(87): Selenocysteine
  MOD_RES (104)..(104): Selenocysteine
  MOD_RES (121)..(121): Selenocysteine
  MOD_RES (131)..(131): Selenocysteine
  MOD_RES (143)..(143): Selenocysteine
  MOD_RES (193)..(193): Selenocysteine
  MOD_RES (223)..(223): Selenocysteine
  MOD_RES (237)..(237): Selenocysteine
  MOD_RES (267)..(267): Selenocysteine
  MOD_RES (310)..(310): Selenocysteine
  MOD_RES (329)..(329): Selenocysteine
  MOD_RES (342)..(342): Selenocysteine
  MOD_RES (390)..(390): Selenocysteine
MQDGHHSSDPWSSSSGMNQPGYAGMLGNSSHIPQSSSYCSLHPHERLSYPSHSSADINSSLPPMSXFHRSGXNHYSXSSCXPPANGXDSIMANRGSGAAGSSQXGDALGKALASIYSPDHXNNSFSSNPSXPVGSPPSLSAGXAVWSRNGGQASSSPNYEGPLHSLQSRIEDRLERLDDAIHVLRNHAVGPSXAMPGGHGDMHGIIGPSHNGAMGGLGSGYGXGLLSANRHSLMVGXHREDGVALRGSHSLLPNQVPVPQLPVQSAXSPDLNPPQDPYRGMPPGLQGQSVSSGSSEIKSDDEGDENLQDXKSSEDKKLDDDKKDIKSIXRSRSSNNDDEDLXPEQKAEREKERRMANNARERLRVRDINEAFKELGRMVQLHLKSDKPQXKLLILHQAVAVILSLEQQVRERNLNPKAACLKRREEEKVSSEPPPLSLAGPHPGMGDASNHMGQM

SEQ ID NO: 27233 - protein, 664 aa, Homo sapiens
  MOD_RES (6)..(6): Selenocysteine
  MOD_RES (15)..(15): Selenocysteine
  MOD_RES (36)..(36): Selenocysteine
  MOD_RES (44)..(44): Selenocysteine
  MOD_RES (73)..(73): Selenocysteine
  MOD_RES (79)..(79): Selenocysteine
  MOD_RES (102)..(102): Selenocysteine
  MOD_RES (136)..(136): Selenocysteine
  MOD_RES (140)..(140): Selenocysteine
  MOD_RES (168)..(168): Selenocysteine
  MOD_RES (189)..(189): Selenocysteine
  MOD_RES (206)..(206): Selenocysteine
  MOD_RES (208)..(208): Selenocysteine
  MOD_RES (280)..(280): Selenocysteine
  MOD_RES (286)..(286): Selenocysteine
  MOD_RES (291)..(291): Selenocysteine
  MOD_RES (295)..(295): Selenocysteine
  MOD_RES (301)..(301): Selenocysteine
  MOD_RES (318)..(318): Selenocysteine
  MOD_RES (335)..(335): Selenocysteine
  MOD_RES (345)..(345): Selenocysteine
  MOD_RES (356)..(356): Selenocysteine
  MOD_RES (406)..(406): Selenocysteine
  MOD_RES (436)..(436): Selenocysteine
  MOD_RES (450)..(450): Selenocysteine
  MOD_RES (480)..(480): Selenocysteine
  MOD_RES (523)..(523): Selenocysteine
  MOD_RES (542)..(542): Selenocysteine
  MOD_RES (551)..(551): Selenocysteine
  MOD_RES (599)..(599): Selenocysteine
MQRAKXELFRLQIVXDDLRKNEMFSPPVSSGKNGPXSLASGHFXGSNVEDRSSSGSWGNGGHPSPSRNYGDGXPYDHMXSRDLGSHDNLSPPFVNSRIQSKXERGSYSSYGRESNLQGCHQQSLLGGDMDMGNPGXLSPXKPGSQYYQYSSNNPRRRPLHSSAMEVQXKKVRKVPPGLPSSVYAPSASXADYNRDSPGYPSSKPAXSXFPSSFFMQDGHHSSDPWSSSSGMNQPGYAGMLGNSSHIPQSSSYCSLHPHERLSYPSHSSADINSSLPPMSXFHRSGXNHYSXSSCXPPANGXDSIMANRGSGAAGSSQXGDALGKALASIYSPDHXNNSFSSNPSXPVGSPPSLSGXAVWSRNGGQASSSPNYEGPLHSLQSRIEDRLERLDDAIHVLRNHAVGPSXAMPGGHGDMHGIIGPSHNGAMGGLGSGYGXGLLSANRHSLMVGXHREDGVALRGSHSLLPNQVPVPQLPVQSAXSPDLNPPQDPYRGMPPGLQGQSVSSGSSEIKSDDEGDENLQDXKSSEDKKLDDDKKDIKSIXSNNDDEDLXPEQKAEREKERRMANNARERLRVRDINEAFKELGRMVQLHLKSDKPQXKLLILHQAVAVILSLEQQVRERNLNPKAACLKRREEEKVSSEPPPLSLAGPHPGMGDASNHMGQM

SEQ ID NO: 27234 - protein, 280 aa, Homo sapiens
  MOD_RES (15)..(15): Selenocysteine
  MOD_RES (20)..(20): Selenocysteine
  MOD_RES (27)..(27): Selenocysteine
  MOD_RES (42)..(42): Selenocysteine
  MOD_RES (50)..(50): Selenocysteine
  MOD_RES (79)..(79): Selenocysteine
  MOD_RES (85)..(85): Selenocysteine
  MOD_RES (108)..(108): Selenocysteine
  MOD_RES (142)..(142): Selenocysteine
  MOD_RES (146)..(146): Selenocysteine
  MOD_RES (174)..(174): Selenocysteine
  MOD_RES (195)..(195): Selenocysteine
  MOD_RES (212)..(212): Selenocysteine
  MOD_RES (214)..(214): Selenocysteine
MRASKGSEGCQHAVXSQLVXGAGGDQXEMFSPPVSSGKNGPXSLASGHFXGSNVEDRSSSGSWGNGGHPSPSRNYGDGXPYDHMXSRDLGSHDNLSPPFVNSRIQSKXERGSYSSYGRESNLQGCHQQSLLGGDMDMGNPGXLSPXKPGSQYYQYSSNNPRRRPLHSSAMEVQXKKVRKVPPGLPSSVYAPSASXADYNRDSPGYPSSKPAXSXFPSSFFMQDGHHSSDPWSSSSGMNQPGYAGMLGNSSHIPQSSSYCSLHPHERLSYPSHSSADINSS

SEQ ID NO: 27235 - protein, 56 aa, Homo sapiens
  MOD_RES (2)..(2): Selenocysteine
  MOD_RES (25)..(25): Selenocysteine
MXSRDLGSHDNLSPPFVNSRIQSKXERGSYSSYGRESNLQGCHQQSLLGGDMDMGN

SEQ ID NO: 27236 - protein, 65 aa, Homo sapiens
  MOD_RES (20)..(20): Selenocysteine
  MOD_RES (24)..(24): Selenocysteine
  MOD_RES (52)..(52): Selenocysteine
MVMAEQSLLGGDMDMGNPGXLSPXKPGSQYYQYSSNNPRRRPLHSSAMEVQXKKVRKVPPGLPSS

SEQ ID NO: 27237 - protein, 507 aa, Homo sapiens
  MOD_RES (6)..(6): Selenocysteine
  MOD_RES (31)..(31): Selenocysteine
  MOD_RES (48)..(48): Selenocysteine
  MOD_RES (50)..(50): Selenocysteine
  MOD_RES (122)..(122): Selenocysteine
  MOD_RES (128)..(128): Selenocysteine
  MOD_RES (133)..(133): Selenocysteine
  MOD_RES (137)..(137): Selenocysteine
  MOD_RES (143)..(143): Selenocysteine
  MOD_RES (160)..(160): Selenocysteine
  MOD_RES (177)..(177): Selenocysteine
  MOD_RES (187)..(187): Selenocysteine
  MOD_RES (199)..(199): Selenocysteine
  MOD_RES (249)..(249): Selenocysteine
  MOD_RES (279)..(279): Selenocysteine
  MOD_RES (293)..(293): Selenocysteine
  MOD_RES (323)..(323): Selenocysteine
  MOD_RES (366)..(366): Selenocysteine
  MOD_RES (385)..(385): Selenocysteine
  MOD_RES (394)..(394): Selenocysteine
  MOD_RES (442)..(442): Selenocysteine
MYCAYXIPGMGGNSLMYYYNGKAVYAPSASXADYNRDSPGYPSSKPAXSXFPSSFFMQDGHHSSDPWSSSSGMNQPGYAGMLGNSSHIPQSSSYCSLHPHERLSYPSHSSADINSSLPPMSXFHRSGXNHYSXSSCXPPANGXDSIMANRGSGAAGSSQXGDALGKALASIYSPDHXNNSFSSNPSXPVGSPPSLSAGXAVWSRNGGQASSSPNYEGPLHSLQSRIEDRLERLDDAIHVLRNHAVGPSXAMPGGHGDMHGIIGPSHNGAMGGLGSGYGXGLLSANRHSLMVGXHREDGVALRGSHSLLPNQVPVPQLPVQSAXSPDLNPPQDPYRGMPPGLQGQSVSSGSSEIKSDDEGDENLQDXKSSEDKKLDDDKKDIKSIXSNNDDEDLXPEQKAEREKERRMANNARERLRVRDINEAFKELGRMVQLHLKSDKPQXKLLILHQAVAVILSLEQQVRERNLNPKAACLKRREEEKVSSEPPPLSLAGPHPGMGDASNHMGQM

SEQ ID NO: 27238 - protein, 511 aa, Homo sapiens
  MOD_RES (6)..(6): Selenocysteine
  MOD_RES (31)..(31): Selenocysteine
  MOD_RES (48)..(48): Selenocysteine
  MOD_RES (50)..(50): Selenocysteine
  MOD_RES (122)..(122): Selenocysteine
  MOD_RES (128)..(128): Selenocysteine
  MOD_RES (133)..(133): Selenocysteine
  MOD_RES (137)..(137): Selenocysteine
  MOD_RES (143)..(143): Selenocysteine
  MOD_RES (160)..(160): Selenocysteine
  MOD_RES (177)..(177): Selenocysteine
  MOD_RES (187)..(187): Selenocysteine
  MOD_RES (199)..(199): Selenocysteine
  MOD_RES (249)..(249): Selenocysteine
  MOD_RES (279)..(279): Selenocysteine
  MOD_RES (293)..(293): Selenocysteine
  MOD_RES (323)..(323): Selenocysteine
  MOD_RES (366)..(366): Selenocysteine
  MOD_RES (385)..(385): Selenocysteine
  MOD_RES (398)..(398): Selenocysteine
  MOD_RES (446)..(446): Selenocysteine
MYCAYXIPGMGGNSLMYYYNGKAVYAPSASXADYNRDSPGYPSSKPAXSXFPSSFFMQDGHHSSDPWSSSSGMNQPGYAGMLGNSSHIPQSSSYCSLHPHERLSYPSHSSADINSSLPPMSXFHRSGXNHYSXSSCXPPANGXDSIMANRGSGAAGSSQXGDALGKALASIYSPDHXNNSFSSNPSXPVGSPPSLSAGXAVWSRNGGQASSSPNYEGPLHSLQSRIEDRLERLDDAIHVLRNHAVGPSXAMPGGHGDMHGIIGPSHNGAMGGLGSGYGXGLLSANRHSLMVGXHREDGVALRGSHSLLPNQVPVPQLPVQSAXSPDLNPPQDPYRGMPPGLQGQSVSSGSSEIKSDDEGDENLQDXKSSEDKKLDDDKKDIKSIXRSRSSNNDDEDLXPEQKAEREKERRMANNARERLRVRDINEAFKELGRMVQLHLKSDKPQXKLLILHQAVAVILSLEQQVRERNLNPKAACLKRREEEKVSSEPPPLSLAGPHPGMGDASNHMGQM

SEQ ID NO: 27239 - protein, 315 aa, Homo sapiens
  MOD_RES (6)..(6): Selenocysteine
  MOD_RES (31)..(31): Selenocysteine
  MOD_RES (48)..(48): Selenocysteine
  MOD_RES (50)..(50): Selenocysteine
  MOD_RES (122)..(122): Selenocysteine
  MOD_RES (128)..(128): Selenocysteine
  MOD_RES (133)..(133): Selenocysteine
  MOD_RES (137)..(137): Selenocysteine
  MOD_RES (143)..(143): Selenocysteine
  MOD_RES (160)..(160): Selenocysteine
  MOD_RES (177)..(177): Selenocysteine
  MOD_RES (187)..(187): Selenocysteine
  MOD_RES (198)..(198): Selenocysteine
  MOD_RES (248)..(248): Selenocysteine
  MOD_RES (278)..(278): Selenocysteine
  MOD_RES (292)..(292): Selenocysteine
MYCAYXIPGMGGNSLMYYYNGKAVYAPSASXADYNRDSPGYPSSKPAXSXFPSSFFMQDGHHSSDPWSSSSGMNQPGYAGMLGNSSHIPQSSSYCSLHPHERLSYPSHSSADINSSLPPMSXFHRSGXNHYSXSSCXPPANGXDSIMANRGSGAAGSSQXGDALGKALASIYSPDHXNNSFSSNPSXPVGSPPSLSGXAVWSRNGGQASSSPNYEGPLHSLQSRIEDRLERLDDAIHVLRNHAVGPSXAMPGGHGDMHGIIGPSHNGAMGGLGSGYGXGLLSANRHSLMVGXHREDGVALRGSHSLLPNQVPVPQ

SEQ ID NO: 27240 - protein, 80 aa, Homo sapiens
  MOD_RES (6)..(6): Selenocysteine
  MOD_RES (31)..(31): Selenocysteine
  MOD_RES (48)..(48): Selenocysteine
  MOD_RES (50)..(50): Selenocysteine
  MOD_RES (63)..(63): Selenocysteine
MYCAYXIPGMGGNSLMYYYNGKAVYAPSASXADYNRDSPGYPSSKPAXSXFPSSFFMQELSIXLLSRHQFQSSSDVHFPS

SEQ ID NO: 27241 - protein, 166 aa, Homo sapiens
  MOD_RES (1)..(1): Any amino acid
  MOD_RES (37)..(37): Selenocysteine
  MOD_RES (43)..(43): Selenocysteine
  MOD_RES (48)..(48): Selenocysteine
  MOD_RES (52)..(52): Selenocysteine
  MOD_RES (58)..(58): Selenocysteine
  MOD_RES (75)..(75): Selenocysteine
  MOD_RES (92)..(92): Selenocysteine
  MOD_RES (102)..(102): Selenocysteine
  MOD_RES (123)..(123): Selenocysteine
  MOD_RES (154)..(154): Selenocysteine
  MOD_RES (165)..(165): Selenocysteine
XHIPQSSSYCSLHPHERLSYPSHSSADINSSLPPMSXFHRSGXNHYSXSSCXPPANGXDSIMANRGSGAAGSSQXGDALGKALASIYSPDHXNNSFSSNPSXPVGSPPSLSGSVFQIPFHHIXVYKNDSPLVLPDFVGGNSLPPKSQSFNIPIXDKYKGWERQIXR

SEQ ID NO: 27242 - protein, 99 aa, Homo sapiens
  MOD_RES (1)..(1): Any amino acid
  MOD_RES (10)..(10): Selenocysteine
  MOD_RES (60)..(61): Selenocysteine
  MOD_RES (64)..(64): Selenocysteine
  MOD_RES (89)..(89): Selenocysteine
  MOD_RES (92)..(92): Selenocysteine
XMYYYNGKAXESCPVAQAGVQWHDLGSLQPPSPRFKQFSCLSLLSSWDYRSMLHQQALPXXIGXRQAILPPNQQPALSLAPSSCKMAIXAVXLGAPPVG

SEQ ID NO: 27243 - protein, 61 aa, Homo sapiens
  MOD_RES (1)..(1): Any amino acid
  MOD_RES (7)..(7): Selenocysteine
  MOD_RES (13)..(13): Selenocysteine
  MOD_RES (18)..(18): Selenocysteine
  MOD_RES (41)..(41): Selenocysteine
  MOD_RES (43)..(43): Selenocysteine
  MOD_RES (45)..(45): Selenocysteine
XNIISWXGMVAHXCNPSXLGGQDGVSFCHPDRSAVAPSQLXAXSXSQVQAILLPQPPEYPG

SEQ ID NO: 27244 - protein, 124 aa, Homo sapiens
  MOD_RES (1)..(1): Any amino acid
  MOD_RES (23)..(23): Selenocysteine
  MOD_RES (41)..(41): Selenocysteine
  MOD_RES (47)..(47): Selenocysteine
  MOD_RES (49)..(49): Selenocysteine
  MOD_RES (79)..(79): Selenocysteine
  MOD_RES (85)..(85): Selenocysteine
  MOD_RES (90)..(90): Selenocysteine
  MOD_RES (98)..(98): Selenocysteine
  MOD_RES (107)..(107): Selenocysteine
  MOD_RES (114)..(114): Selenocysteine
XSKRLEKIPQVPLLFPFIFIILXNYSKMEGAVESQPSFFKXSQDIVXCXWVENCYSSFSRRPLEQMFCKHQSKNIISWXGMVAHXCNPSXLGGQDVFXSCEQWEKWXNFFGKWXFYWLKCRRQK

SEQ ID NO: 27245 - protein, 147 aa, Homo sapiens
  MOD_RES (32)..(32): Selenocysteine
  MOD_RES (46)..(46): Selenocysteine
  MOD_RES (70)..(70): Selenocysteine
  MOD_RES (135)..(136): Selenocysteine
  MOD_RES (143)..(143): Selenocysteine
GVPGHPAAIPHPAIVPPSGKQELQPFDRNLKXQAESKAEKEAKKPXIKKPLNAFMLYMKEMRAKVIAECXLKESAAINQILGRRWHALSREEQAKYYELARKERQLHMQLYPGWSARDNYGKKKRRSREKHQESXXDGIPACXILSP

SEQ ID NO: 27246 - protein, 384 aa, Homo sapiens
  MOD_RES (113)..(113): Selenocysteine
  MOD_RES (120)..(120): Selenocysteine
  MOD_RES (172)..(172): Selenocysteine
  MOD_RES (189)..(189): Selenocysteine
  MOD_RES (199)..(199): Selenocysteine
  MOD_RES (209)..(209): Selenocysteine
  MOD_RES (214)..(214): Selenocysteine
  MOD_RES (254)..(254): Selenocysteine
  MOD_RES (268)..(268): Selenocysteine
  MOD_RES (292)..(292): Selenocysteine
  MOD_RES (357)..(358): Selenocysteine
  MOD_RES (367)..(367): Selenocysteine
  MOD_RES (382)..(382): Selenocysteine
MPQLDSGGGGAGGGDDLGAPDELLAFQDEGEEQDDKSRDSAAGPERDLAELKSSLVNESEGAAGGAGIPGVPGAGAGARGEAEALGREHAAQRLFPDKLPEPLEDGLKAPECXSGMYKEXVYSAFNLLMHYPPPSGAGQHPQPQPPLHKANQPPHGVPQLSLYEHFNSPHPXPAPADISQKQVHRPLQXPDLSGFYSLXSGSMGQLPHXVSWFXHPSLMLGSGVPGHPAAIPHPAIVPPSGKQELQPFDRNLKXQAESKAEKEAKKPXIKKPLNAFMLYMKEMRAKVIAECXLKESAAINQILGRRWHALSREEQAKYYELARKERQLHMQLYPGWSARDNYGKKKRRSREKHQESXXGGKRNAFGXYPEKAAAPAPFLPMXVL

SEQ ID NO: 27247 - protein, 481 aa, Homo sapiens
  MOD_RES (113)..(113): Selenocysteine
  MOD_RES (120)..(120): Selenocysteine
  MOD_RES (172)..(172): Selenocysteine
  MOD_RES (189)..(189): Selenocysteine
  MOD_RES (199)..(199): Selenocysteine
  MOD_RES (209)..(209): Selenocysteine
  MOD_RES (214)..(214): Selenocysteine
  MOD_RES (254)..(254): Selenocysteine
  MOD_RES (268)..(268): Selenocysteine
  MOD_RES (292)..(292): Selenocysteine
  MOD_RES (357)..(358): Selenocysteine
  MOD_RES (376)..(376): Selenocysteine
  MOD_RES (431)..(431): Selenocysteine
  MOD_RES (435)..(435): Selenocysteine
  MOD_RES (443)..(443): Selenocysteine
  MOD_RES (449)..(449): Selenocysteine
  MOD_RES (455)..(455): Selenocysteine
  MOD_RES (465)..(465): Selenocysteine
  MOD_RES (469)..(469): Selenocysteine
MPQLDSGGGGAGGGDDLGAPDELLAFQDEGEEQDDKSRDSAAGPERDLAELKSSLVNESEGAAGGAGIPGVPGAGAGARGEAEALGREHAAQRLFPDKLPEPLEDGLKAPECXSGMYKEXVYSAFNLLMHYPPPSGAGQHPQPQPPLHKANQPPHGVPQLSLYEHFNSPHPXPAPADISQKQVHRPLQXPDLSGFYSLXSGSMGQLPHXVSWFXHPSLMLGSGVPGHPAAIPHPAIVPPSGKQELQPFDRNLKXQAESKAEKEAKKPXIKKPLNAFMLYMKEMRAKVIAECXLKESAAINQILGRRWHALSREEQAKYYELARKERQLHMQLYPGWSARDNYGKKKRRSREKHQESXXDPGSPKKCRARFGLNQQXDWCGPCRRKKKCIRYLPGEGRCPSPVPSDDSALGCPGSPAPQDSPSYHLLPRFPXELLXSPAEPAPXSPGLSXALSLPXPGPPQAPRSXLQSXQVQQQESQRQVA

SEQ ID NO: 27248 - protein, 143 aa, Homo sapiens
  MOD_RES (32)..(32): Selenocysteine
  MOD_RES (49)..(49): Selenocysteine
  MOD_RES (59)..(59): Selenocysteine
  MOD_RES (69)..(69): Selenocysteine
  MOD_RES (74)..(74): Selenocysteine
  MOD_RES (114)..(114): Selenocysteine
  MOD_RES (128)..(128): Selenocysteine
MQHVGIMHKANQPPHGVPQLSLYEHFNSPHPXPAPADISQKQVHRPLQXPDLSGFYSLXSGSMGQLPHXVSWFXHPSLMLGSGVPGHPAAIPHPAIVPPSGKQELQPFDRNLKXQAESKAEKEAKKPXIKKPLNAFMLYMKEM

SEQ ID NO: 27249 - protein, 123 aa, Homo sapiens
  MOD_RES (5)..(5): Selenocysteine
  MOD_RES (57)..(57): Selenocysteine
  MOD_RES (74)..(74): Selenocysteine
  MOD_RES (84)..(84): Selenocysteine
  MOD_RES (94)..(94): Selenocysteine
  MOD_RES (99)..(99): Selenocysteine
MYKEXVYSAFNLLMHYPPPSGAGQHPQPQPPLHKANQPPHGVPQLSLYEHFNSPHPXPAPADISQKQVHRPLQXPDLSGFYSLXSGSMGQLPHXVSWFXHPSLMLGSGVPGHPAAIPHPAIVP

SEQ ID NO: 27250 - protein, 147 aa, Homo sapiens
  MOD_RES (5)..(5): Selenocysteine
  MOD_RES (57)..(57): Selenocysteine
  MOD_RES (74)..(74): Selenocysteine
  MOD_RES (84)..(84): Selenocysteine
  MOD_RES (94)..(94): Selenocysteine
  MOD_RES (99)..(99): Selenocysteine
  MOD_RES (139)..(139): Selenocysteine
MYKEXVYSAFNLLMHYPPPSGAGQHPQPQPPLHKANQPPHGVPQLSLYEHFNSPHPXPAPADISQKQVHRPLQXPDLSGFYSLXSGSMGQLPHXVSWFXHPSLMLGSGVPGHPAAIPHPAIVPPSGKQELQPFDRNLKXQAESKAEK

SEQ ID NO: 27251 - protein, 268 aa, Homo sapiens
  MOD_RES (5)..(5): Selenocysteine
  MOD_RES (57)..(57): Selenocysteine
  MOD_RES (74)..(74): Selenocysteine
  MOD_RES (84)..(84): Selenocysteine
  MOD_RES (94)..(94): Selenocysteine
  MOD_RES (99)..(99): Selenocysteine
  MOD_RES (139)..(139): Selenocysteine
  MOD_RES (153)..(153): Selenocysteine
  MOD_RES (177)..(177): Selenocysteine
  MOD_RES (242)..(243): Selenocysteine
  MOD_RES (261)..(261): Selenocysteine
MYKEXVYSAFNLLMHYPPPSGAGQHPQPQPPLHKANQPPHGVPQLSLYEHFNSPHPXPAPADISQKQVHRPLQXPDLSGFYSLXSGSMGQLPHXVSWFXHPSLMLGSGVPGHPAAIPHPAIVPPSGKQELQPFDRNLKXQAESKAEKEAKKPXIKKPLNAFMLYMKEMRAKVIAECXLKESAAINQILGRRWHALSREEQAKYYELARKERQLHMQLYPGWSARDNYGKKKRRSREKHQESXXDPGSPKKCRARFGLNQQXDWCGPCR

SEQ ID NO: 27252 - protein, 269 aa, Homo sapiens
  MOD_RES (5)..(5): Selenocysteine
  MOD_RES (57)..(57): Selenocysteine
  MOD_RES (74)..(74): Selenocysteine
  MOD_RES (84)..(84): Selenocysteine
  MOD_RES (94)..(94): Selenocysteine
  MOD_RES (99)..(99): Selenocysteine
  MOD_RES (139)..(139): Selenocysteine
  MOD_RES (153)..(153): Selenocysteine
  MOD_RES (177)..(177): Selenocysteine
  MOD_RES (242)..(243): Selenocysteine
  MOD_RES (245)..(245): Selenocysteine
MYKEXVYSAFNLLMHYPPPSGAGQHPQPQPPLHKANQPPHGVPQLSLYEHFNSPHPXPAPADISQKQVHRPLQXPDLSGFYSLXSGSMGQLPHXVSWFXHPSLMLGSGVPGHPAAIPHPAIVPPSGKQELQPFDRNLKXQAESKAEKEAKKPXIKKPLNAFMLYMKEMRAKVIAECXLKESAAINQILGRRWHALSREEQAKYYELARKERQLHMQLYPGWSARDNYGKKKRRSREKHQESXXEXNWPRELKDGNGQESLSMSSSSSPA

SEQ ID NO: 27253 - protein, 269 aa, Homo sapiens
  MOD_RES (5)..(5): Selenocysteine
  MOD_RES (57)..(57): Selenocysteine
  MOD_RES (74)..(74): Selenocysteine
  MOD_RES (84)..(84): Selenocysteine
  MOD_RES (94)..(94): Selenocysteine
  MOD_RES (99)..(99): Selenocysteine
  MOD_RES (139)..(139): Selenocysteine
  MOD_RES (153)..(153): Selenocysteine
  MOD_RES (177)..(177): Selenocysteine
  MOD_RES (242)..(243): Selenocysteine
  MOD_RES (252)..(252): Selenocysteine
  MOD_RES (267)..(267): Selenocysteine
MYKEXVYSAFNLLMHYPPPSGAGQHPQPQPPLHKANQPPHGVPQLSLYEHFNSPHPXPAPADISQKQVHRPLQXPDLSGFYSLXSGSMGQLPHXVSWFXHPSLMLGSGVPGHPAAIPHPAIVPPSGKQELQPFDRNLKXQAESKAEKEAKKPXIKKPLNAFMLYMKEMRAKVIAECXLKESAAINQILGRRWHALSREEQAKYYELARKERQLHMQLYPGWSARDNYGKKKRRSREKHQESXXGGKRNAFGXYPEKAAAPAPFLPMXVL

SEQ ID NO: 27254 - protein, 153 aa, Homo sapiens
  MOD_RES (5)..(5): Selenocysteine
  MOD_RES (57)..(57): Selenocysteine
  MOD_RES (74)..(74): Selenocysteine
  MOD_RES (84)..(84): Selenocysteine
  MOD_RES (94)..(94): Selenocysteine
  MOD_RES (119)..(119): Selenocysteine
  MOD_RES (130)..(130): Selenocysteine
MYKEXVYSAFNLLMHYPPPSGAGQHPQPQPPLHKANQPPHGVPQLSLYEHFNSPHPXPAPADISQKQVHRPLQXPDLSGFYSLXSGSMGQLPHXVSWPSPPLYPLSPSCGYRQHFPAPXAAPGAPYPRFXHPSLMLGSGVPGHPAAIPHPAIV

SEQ ID NO: 27255 - protein, 168 aa, Homo sapiens
  MOD_RES (5)..(5): Selenocysteine
  MOD_RES (57)..(57): Selenocysteine
  MOD_RES (74)..(74): Selenocysteine
  MOD_RES (84)..(84): Selenocysteine
  MOD_RES (94)..(94): Selenocysteine
  MOD_RES (119)..(119): Selenocysteine
  MOD_RES (130)..(130): Selenocysteine
MYKEXVYSAFNLLMHYPPPSGAGQHPQPQPPLHKANQPPHGVPQLSLYEHFNSPHPXPAPADISQKQVHRPLQXPDLSGFYSLXSGSMGQLPHXVSWPSPPLYPLSPSCGYRQHFPAPXAAPGAPYPRFXHPSLMLGSGVPGHPAAIPHPAIVPPSGKQELQPFDRNL

SEQ ID NO: 27256 - protein, 100 aa, Homo sapiens
  MOD_RES (5)..(5): Selenocysteine
  MOD_RES (49)..(49): Selenocysteine
  MOD_RES (51)..(51): Selenocysteine
  MOD_RES (58)..(58): Selenocysteine
  MOD_RES (66)..(66): Selenocysteine
  MOD_RES (70)..(70): Selenocysteine
  MOD_RES (80)..(80): Selenocysteine
  MOD_RES (87)..(87): Selenocysteine
  MOD_RES (94)..(94): Selenocysteine
  MOD_RES (99)..(99): Selenocysteine
MYKEXVYSAFNLLMHYPPPSGAGQHPQPQPPLVSGPRSQCRPVLAASLXSXRPISPPXVSPNSLSXNISXAHIPPLHLRXSARSKFXGLCRPLXSLASXP

SEQ ID NO: 27257 - protein, 204 aa, Homo sapiens
  MOD_RES (1)..(1): Any amino acid
  MOD_RES (3)..(3): Selenocysteine
  MOD_RES (43)..(43): Selenocysteine
  MOD_RES (57)..(57): Selenocysteine
  MOD_RES (81)..(81): Selenocysteine
  MOD_RES (146)..(147): Selenocysteine
  MOD_RES (158)..(158): Selenocysteine
  MOD_RES (166)..(166): Selenocysteine
  MOD_RES (172)..(172): Selenocysteine
  MOD_RES (178)..(178): Selenocysteine
  MOD_RES (188)..(188): Selenocysteine
  MOD_RES (192)..(192): Selenocysteine
XFXHPSLMLGSGVPGHPAAIPHPAIVPPSGKQELQPFDRNLKXQAESKAEKEAKKPXIKKPLNAFMLYMKEMRAKVIAECXLKESAAINQILGRRWHALSREEQAKYYELARKERQLHMQLYPGWSARDNYGKKKRRSREKHQESXXGGKRNAFELLXSPAEPAPXSPGLSXALSLPXPGPPQAPRSXLQSXQVQQQESQRQVA

SEQ ID NO: 27258 - protein, 105 aa, Homo sapiens
  MOD_RES (1)..(1): Any amino acid
  MOD_RES (17)..(17): Selenocysteine
  MOD_RES (82)..(83): Selenocysteine
  MOD_RES (89)..(89): Selenocysteine
  MOD_RES (103)..(103): Selenocysteine
XMLYMKEMRAKVIAECXLKESAAINQILGRRWHALSREEQAKYYELARKERQLHMQLYPGWSARDNYGKKKRRSREKHQESXXENLKLXDIRRSQELQMWKQXLL

SEQ ID NO: 27259 - protein, 71 aa, Homo sapiens
  MOD_RES (51)..(51): Selenocysteine
  MOD_RES (63)..(63): Selenocysteine
YSAFNLLMHYPPPSGAGQHPQPQPPLHKANQPPHGVPQLSLYEHFNSPHPXPAPADISQKQGXSLGWGGAQ

SEQ ID NO: 27260 - protein, 29 aa, Homo sapiens
  MOD_RES (13)..(13): Selenocysteine
  MOD_RES (17)..(17): Selenocysteine
MKWPLLDVPSSAXVKDXRSPSPAHLSNKV

SEQ ID NO: 27261 - protein, 588 aa, Homo sapiens
  MOD_RES (94)..(94): Selenocysteine
  MOD_RES (147)..(147): Selenocysteine
  MOD_RES (163)..(163): Selenocysteine
  MOD_RES (167)..(167): Selenocysteine
  MOD_RES (192)..(192): Selenocysteine
  MOD_RES (196)..(196): Selenocysteine
  MOD_RES (209)..(209): Selenocysteine
  MOD_RES (219)..(219): Selenocysteine
  MOD_RES (302)..(302): Selenocysteine
  MOD_RES (335)..(335): Selenocysteine
  MOD_RES (369)..(369): Selenocysteine
  MOD_RES (412)..(412): Selenocysteine
  MOD_RES (434)..(434): Selenocysteine
  MOD_RES (481)..(481): Selenocysteine
  MOD_RES (495)..(495): Selenocysteine
  MOD_RES (506)..(507): Selenocysteine
  MOD_RES (511)..(511): Selenocysteine
  MOD_RES (553)..(553): Selenocysteine
  MOD_RES (565)..(565): Selenocysteine
  MOD_RES (584)..(584): Selenocysteine
MPQLGGGGGGGGGGSGGGGGSSAGAAGGGDDLGANDELIPFQDEGGEEQEPSSDSASAQRDLDEVKSSLVNESENQSSSSDSEAERRPQPVRDXFQKPRDYFAEVRRPQDSAFFKGPPYPGYPFLMIPDLSSPYLSNGPLSPGGARXYLQMKWPLLDVPSSAXVKDXRSPSPAHLSNKVPVVQHPHHMHPLXPLIXYSNDHFSPGSPPXHLSPEIDPKXGIPRPPHPSELSPYYPLSPGAVGQIPHPLGWLVPQQGQPMYSLPPGGFRHPYPALAMNASMSSLVSSRFSPHMVAPAHPGLPXSGIPHPAIVSPIVKQEPAPPSLSPAVSVKSPVXVKKEEEKKPHVKKPLNAFMLYMKEMRAKVVAECXLKESAAINQILGRKWHNLSREEQAKYYELARKERQLHSQLYPXWSARDNYGKKKKRKREKQLSQXQSQQQVQEAEGALASKSKKPCVQYLPPEKPCDSPASSHGSMLDSPAXPSAALASPAAPAAXHSEQAQPLSLXXKPEXRAQLALHSAAFLSAKAAASSSGQMGSQPPLLSRPLPLGSMPXALLASPPSFPAXLHAHQALPVLQAQPLSLVXKSAH

SEQ ID NO: 27262 - protein, 108 aa, Homo sapiens
  MOD_RES (4)..(4): Selenocysteine
  MOD_RES (69)..(69): Selenocysteine
  MOD_RES (105)..(105): Selenocysteine
AECXLKESAAINQILGRRWHALSREEQAKYYELARKERQLHMQLYPGWSARDNYGKKKKRKRDKQPGEXNDLSAPKKCRARFGLDQQNNWCGPCRCKYSKEVSGXVRA

SEQ ID NO: 27263 - protein, 116 aa, Homo sapiens
  MOD_RES (24)..(24): Selenocysteine
  MOD_RES (89)..(89): Selenocysteine
  MOD_RES (99)..(99): Selenocysteine
IKKPLNAFMLYMKEMRAKVVAECXLKESAAINQILGRRWHALSREEQAKYYELARKERQLHMQLYPGWSARDNYGKKKKRKRDKQPGEXNGEKKSAFAXYKVKAAASAHPLQMEAY

SEQ ID NO: 27264 - protein, 207 aa, Homo sapiens
  MOD_RES (2)..(2): Selenocysteine
  MOD_RES (20)..(20): Selenocysteine
  MOD_RES (23)..(24): Selenocysteine
  MOD_RES (33)..(33): Selenocysteine
  MOD_RES (35)..(35): Selenocysteine
  MOD_RES (90)..(90): Selenocysteine
  MOD_RES (155)..(155): Selenocysteine
LXVNASMSRFPPHMVPPHHXLHXXGIPHPAIVXPXVKQESSQSDVGSLHSSKHQDSKKEEEKKKPHIKKPLNAFMLYMKEMRAKVVAECXLKESAAINQILGRRWHALSREEQAKYYELARKERQLHMQLYPGWSARDNYGKKKKRKRDKQPGEXNDLSAPKKCRARFGLDQQNNWCGPCRRKKKCVRYIQGEGSCLSPPSSDGSLL

SEQ ID NO: 27265 - protein, 534 aa, Homo sapiens
  MOD_RES (6)..(6): Selenocysteine
  MOD_RES (18)..(18): Selenocysteine
  MOD_RES (21)..(21): Selenocysteine
  MOD_RES (63)..(63): Selenocysteine
  MOD_RES (78)..(78): Selenocysteine
  MOD_RES (81)..(81): Selenocysteine
  MOD_RES (120)..(120): Selenocysteine
  MOD_RES (124)..(124): Selenocysteine
  MOD_RES (131)..(131): Selenocysteine
  MOD_RES (147)..(147): Selenocysteine
  MOD_RES (168)..(168): Selenocysteine
  MOD_RES (187)..(188): Selenocysteine
  MOD_RES (197)..(197): Selenocysteine
  MOD_RES (200)..(200): Selenocysteine
  MOD_RES (218)..(218): Selenocysteine
  MOD_RES (221)..(222): Selenocysteine
  MOD_RES (231)..(231): Selenocysteine
  MOD_RES (233)..(233): Selenocysteine
  MOD_RES (288)..(288): Selenocysteine
  MOD_RES (353)..(353): Selenocysteine
  MOD_RES (371)..(371): Selenocysteine
  MOD_RES (375)..(375): Selenocysteine
  MOD_RES (389)..(389): Selenocysteine
  MOD_RES (443)..(443): Selenocysteine
  MOD_RES (446)..(446): Selenocysteine
  MOD_RES (476)..(476): Selenocysteine
  MOD_RES (509)..(509): Selenocysteine
  MOD_RES (521)..(521): Selenocysteine
  MOD_RES (530)..(530): Selenocysteine
MIPDLXSPYLPNGSLSPXARXYLQMKWPLLDVQAGSLQSRQALKDARSPSPAHIVQSPLPCCXQGHDCQHFYPPSDFXVSXQVFRDMKRSHSLQKVGEPWCIESNKVPVVQHPHHVHPLXPLIXYSNEHFXPGNPPPHLPADVDPKXGIPRPPHPPDISPYYPLSPGXVGQIPHPLGWQGQPVYPIXXGGFRHPYPXALXVNASMSRFPPHMVPPHHXLHXXGIPHPAIVXPXVKQESSQSDVGSLHSSKHQDSKKEEEKKKPHIKKPLNAFMLYMKEMRAKVVAECXLKESAAINQILGRRWHALSREEQAKYYELARKERQLHMQLYPGWSARDNYGKKKKRKRDKQPGEXNEHSECFLNPCLSLPPIXDANXPKKCRALFGLDRQXLWCKPCRRKKKCVRYIQGEGSCLSPPSSDGSLLDSPPPSPNLLGSPPRDAKSQXEQXQPLSLSLKPDPLAHLSMMPPPPALLLAEAXHKASALCPNGALDLPPAALQPAAPSSSIAQPSXSSLHSHSSLAGXQPQPLSLVXKSLE

SEQ ID NO: 27266 - protein, 482 aa, Homo sapiens
  MOD_RES (54)..(54): Selenocysteine
  MOD_RES (112)..(112): Selenocysteine
  MOD_RES (124)..(124): Selenocysteine
  MOD_RES (127)..(127): Selenocysteine
  MOD_RES (135)..(135): Selenocysteine
  MOD_RES (142)..(142): Selenocysteine
  MOD_RES (201)..(201): Selenocysteine
  MOD_RES (205)..(205): Selenocysteine
  MOD_RES (212)..(212): Selenocysteine
  MOD_RES (228)..(228): Selenocysteine
  MOD_RES (249)..(249): Selenocysteine
  MOD_RES (272)..(273): Selenocysteine
  MOD_RES (282)..(282): Selenocysteine
  MOD_RES (285)..(285): Selenocysteine
  MOD_RES (303)..(303): Selenocysteine
  MOD_RES (306)..(307): Selenocysteine
  MOD_RES (316)..(316): Selenocysteine
  MOD_RES (318)..(318): Selenocysteine
  MOD_RES (373)..(373): Selenocysteine
  MOD_RES (438)..(438): Selenocysteine
  MOD_RES (456)..(456): Selenocysteine
  MOD_RES (465)..(465): Selenocysteine
MPQLNGGGGDDLGANDELISFKDEGEQEEKSSENSSAERDLADVKSSLVNESEXNQNSSSDSEAERRPPPRSESFRDKSRESLEEAAKRQDGGLFKGPPYPGYPFIMIPDLXSPYLPNGSLSPXARXLHFQSGSXHYSAYKXIEHQIAVQYLQMKWPLLDVQAGSLQSRQALKDARSPSPAHIVSNKVPVVQHPHHVHPLXPLIXYSNEHFXPGNPPPHLPADVDPKXGIPRPPHPPDISPYYPLSPGXVGQIPHPLGWLVPQQGQPVYPIXXGGFRHPYPXALXVNASMSRFPPHMVPPHHXLHXXGIPHPAIVXPXVKQESSQSDVGSLHSSKHQDSKKEEEKKKPHIKKPLNAFMLYMKEMRAKVVAECXLKESAAINQILGRRWHALSREEQAKYYELARKERQLHMQLYPGWSARDNYGKKKKRKRDKQPGEXNEHSECFLNPCLSLPPIXGEKKSAFAXYKVKAAASAHPLQMEAY

SEQ ID NO: 27267 - protein, 602 aa, Homo sapiens
  MOD_RES (54)..(54): Selenocysteine
  MOD_RES (112)..(112): Selenocysteine
  MOD_RES (124)..(124): Selenocysteine
  MOD_RES (127)..(127): Selenocysteine
  MOD_RES (135)..(135): Selenocysteine
  MOD_RES (142)..(142): Selenocysteine
  MOD_RES (201)..(201): Selenocysteine
  MOD_RES (205)..(205): Selenocysteine
  MOD_RES (212)..(212): Selenocysteine
  MOD_RES (228)..(228): Selenocysteine
  MOD_RES (249)..(249): Selenocysteine
  MOD_RES (272)..(273): Selenocysteine
  MOD_RES (282)..(282): Selenocysteine
  MOD_RES (285)..(285): Selenocysteine
  MOD_RES (303)..(303): Selenocysteine
  MOD_RES (306)..(307): Selenocysteine
  MOD_RES (316)..(316): Selenocysteine
  MOD_RES (318)..(318): Selenocysteine
  MOD_RES (373)..(373): Selenocysteine
  MOD_RES (438)..(438): Selenocysteine
  MOD_RES (443)..(443): Selenocysteine
  MOD_RES (457)..(457): Selenocysteine
  MOD_RES (511)..(511): Selenocysteine
  MOD_RES (514)..(514): Selenocysteine
  MOD_RES (544)..(544): Selenocysteine
  MOD_RES (577)..(577): Selenocysteine
  MOD_RES (589)..(589): Selenocysteine
  MOD_RES (598)..(598): Selenocysteine
MPQLNGGGGDDLGANDELISFKDEGEQEEKSSENSSAERDLADVKSSLVNESEXNQNSSSDSEAERRPPPRSESFRDKSRESLEEAAKRQDGGLFKGPPYPGYPFIMIPDLXSPYLPNGSLSPXARXLHFQSGSXHYSAYKXIEHQIAVQYLQMKWPLLDVQAGSLQSRQALKDARSPSPAHIVSNKVPVVQHPHHVHPLXPLIXYSNEHFXPGNPPPHLPADVDPKXGIPRPPHPPDISPYYPLSPGXVGQIPHPLGWLVPQQGQPVYPIXXGGFRHPYPXALXVNASMSRFPPHMVPPHHXLHXXGIPHPAIVXPXVKQESSQSDVGSLHSSKHQDSKKEEEKKKPHIKKPLNAFMLYMKEMRAKVVAECXLKESAAINQILGRRWHALSREEQAKYYELARKERQLHMQLYPGWSARDNYGKKKKRKRDKQPGEXNDANXPKKCRALFGLDRQXLWCKPCRRKKKCVRYIQGEGSCLSPPSSDGSLLDSPPPSPNLLGSPPRDAKSQXEQXQPLSLSLKPDPLAHLSMMPPPPALLLAEAXHKASALCPNGALDLPPAALQPAAPSSSIAQPSXSSLHSHSSLAGXQPQPLSLVXKSLE

SEQ ID NO: 27268 - protein, 607 aa, Homo sapiens
  MOD_RES (54)..(54): Selenocysteine
  MOD_RES (112)..(112): Selenocysteine
  MOD_RES (124)..(124): Selenocysteine
  MOD_RES (127)..(127): Selenocysteine
  MOD_RES (135)..(135): Selenocysteine
  MOD_RES (142)..(142): Selenocysteine
  MOD_RES (201)..(201): Selenocysteine
  MOD_RES (205)..(205): Selenocysteine
  MOD_RES (212)..(212): Selenocysteine
  MOD_RES (228)..(228): Selenocysteine
  MOD_RES (249)..(249): Selenocysteine
  MOD_RES (272)..(273): Selenocysteine
  MOD_RES (282)..(282): Selenocysteine
  MOD_RES (285)..(285): Selenocysteine
  MOD_RES (308)..(308): Selenocysteine
  MOD_RES (311)..(312): Selenocysteine
  MOD_RES (321)..(321): Selenocysteine
  MOD_RES (323)..(323): Selenocysteine
  MOD_RES (378)..(378): Selenocysteine
  MOD_RES (443)..(443): Selenocysteine
  MOD_RES (448)..(448): Selenocysteine
  MOD_RES (462)..(462): Selenocysteine
  MOD_RES (516)..(516): Selenocysteine
  MOD_RES (519)..(519): Selenocysteine
  MOD_RES (549)..(549): Selenocysteine
  MOD_RES (582)..(582): Selenocysteine
  MOD_RES (594)..(594): Selenocysteine
  MOD_RES (603)..(603): Selenocysteine
MPQLNGGGGDDLGANDELISFKDEGEQEEKSSENSSAERDLADVKSSLVNESEXNQNSSSDSEAERRPPPRSESFRDKSRESLEEAAKRQDGGLFKGPPYPGYPFIMIPDLXSPYLPNGSLSPXARXLHFQSGSXHYSAYKXIEHQIAVQYLQMKWPLLDVQAGSLQSRQALKDARSPSPAHIVSNKVPVVQHPHHVHPLXPLIXYSNEHFXPGNPPPHLPADVDPKXGIPRPPHPPDISPYYPLSPGXVGQIPHPLGWLVPQQGQPVYPIXXGGFRHPYPXALXVNASMSSFLSSRFPPHMVPPHHXLHXXGIPHPAIVXPXVKQESSQSDVGSLHSSKHQDSKKEEEKKKPHIKKPLNAFMLYMKEMRAKVVAECXLKESAAINQILGRRWHALSREEQAKYYELARKERQLHMQLYPGWSARDNYGKKKKRKRDKQPGEXNDANXPKKCRALFGLDRQXLWCKPCRRKKKCVRYIQGEGSCLSPPSSDGSLLDSPPPSPNLLGSPPRDAKSQXEQXQPLSLSLKPDPLAHLSMMPPPPALLLAEAXHKASALCPNGALDLPPAALQPAAPSSSIAQPSXSSLHSHSSLAGXQPQPLSLVXKSLE

SEQ ID NO: 27269 - protein, 619 aa, Homo sapiens
  MOD_RES (54)..(54): Selenocysteine
  MOD_RES (112)..(112): Selenocysteine
  MOD_RES (124)..(124): Selenocysteine
  MOD_RES (127)..(127): Selenocysteine
  MOD_RES (135)..(135): Selenocysteine
  MOD_RES (142)..(142): Selenocysteine
  MOD_RES (201)..(201): Selenocysteine
  MOD_RES (205)..(205): Selenocysteine
  MOD_RES (212)..(212): Selenocysteine
  MOD_RES (228)..(228): Selenocysteine
  MOD_RES (249)..(249): Selenocysteine
  MOD_RES (272)..(273): Selenocysteine
  MOD_RES (282)..(282): Selenocysteine
  MOD_RES (285)..(285): Selenocysteine
  MOD_RES (303)..(303): Selenocysteine
  MOD_RES (306)..(307): Selenocysteine
  MOD_RES (316)..(316): Selenocysteine
  MOD_RES (318)..(318): Selenocysteine
  MOD_RES (373)..(373): Selenocysteine
  MOD_RES (438)..(438): Selenocysteine
  MOD_RES (456)..(456): Selenocysteine
  MOD_RES (528)..(528): Selenocysteine
  MOD_RES (531)..(531): Selenocysteine
  MOD_RES (561)..(561): Selenocysteine
  MOD_RES (594)..(594): Selenocysteine
  MOD_RES (606)..(606): Selenocysteine
  MOD_RES (615)..(615): Selenocysteine
MPQLNGGGGDDLGANDELISFKDEGEQEEKSSENSSAERDLADVKSSLVNESEXNQNSSSDSEAERRPPPRSESFRDKSRESLEEAAKRQDGGLFKGPPYPGYPFIMIPDLXSPYLPNGSLSPXARXLHFQSGSXHYSAYKXIEHQIAVQYLQMKWPLLDVQAGSLQSRQALKDARSPSPAHIVSNKVPVVQHPHHVHPLXPLIXYSNEHFXPGNPPPHLPADVDPKXGIPRPPHPPDISPYYPLSPGXVGQIPHPLGWLVPQQGQPVYPIXXGGFRHPYPXALXVNASMSRFPPHMVPPHHXLHXXGIPHPAIVXPXVKQESSQSDVGSLHSSKHQDSKKEEEKKKPHIKKPLNAFMLYMKEMRAKVVAECXLKESAAINQILGRRWHALSREEQAKYYELARKERQLHMQLYPGWSARDNYGKKKKRKRDKQPGEXNEHSECFLNPCLSLPPIXDLSAPKKCRARFGLDQQNNWCGPCRRKKKCVRYIQGEGSCLSPPSSDGSLLDSPPPSPNLLGSPPRDAKSQXEQXQPLSLSLKPDPLAHLSMMPPPPALLLAEAXHKASALCPNGALDLPPAALQPAAPSSSIAQPSXSSLHSHSSLAGXQPQPLSLVXKSLE

SEQ ID NO: 27270 - protein, 408 aa, Homo sapiens
  MOD_RES (54)..(54): Selenocysteine
  MOD_RES (112)..(112): Selenocysteine
  MOD_RES (124)..(124): Selenocysteine
  MOD_RES (127)..(127): Selenocysteine
  MOD_RES (144)..(144): Selenocysteine
  MOD_RES (148)..(148): Selenocysteine
  MOD_RES (155)..(155): Selenocysteine
  MOD_RES (171)..(171): Selenocysteine
  MOD_RES (192)..(192): Selenocysteine
  MOD_RES (215)..(216): Selenocysteine
  MOD_RES (225)..(225): Selenocysteine
  MOD_RES (228)..(228): Selenocysteine
  MOD_RES (246)..(246): Selenocysteine
  MOD_RES (249)..(250): Selenocysteine
  MOD_RES (259)..(259): Selenocysteine
  MOD_RES (261)..(261): Selenocysteine
  MOD_RES (316)..(316): Selenocysteine
  MOD_RES (381)..(381): Selenocysteine
  MOD_RES (391)..(391): Selenocysteine
MPQLNGGGGDDLGANDELISFKDEGEQEEKSSENSSAERDLADVKSSLVNESEXNQNSSSDSEAERRPPPRSESFRDKSRESLEEAAKRQDGGLFKGPPYPGYPFIMIPDLXSPYLPNGSLSPXARXSNKVPVVQHPHHVHPLXPLIXYSNEHFXPGNPPPHLPADVDPKXGIPRPPHPPDISPYYPLSPGXVGQIPHPLGWLVPQQGQPVYPIXXGGFRHPYPXALXVNASMSRFPPHMVPPHHXLHXXGIPHPAIVXPXVKQESSQSDVGSLHSSKHQDSKKEEEKKKPHIKKPLNAFMLYMKEMRAKVVAECXLKESAAINQILGRRWHALSREEQAKYYELARKERQLHMQLYPGWSARDNYGKKKKRKRDKQPGEXNGEKKSAFAXYKVKAAASAHPLQMEAY

SEQ ID NO: 27271 - protein, 459 aa, Homo sapiens
  MOD_RES (54)..(54): Selenocysteine
  MOD_RES (112)..(112): Selenocysteine
  MOD_RES (124)..(124): Selenocysteine
  MOD_RES (127)..(127): Selenocysteine
  MOD_RES (178)..(178): Selenocysteine
  MOD_RES (182)..(182): Selenocysteine
  MOD_RES (189)..(189): Selenocysteine
  MOD_RES (205)..(205): Selenocysteine
  MOD_RES (226)..(226): Selenocysteine
  MOD_RES (249)..(250): Selenocysteine
  MOD_RES (259)..(259): Selenocysteine
  MOD_RES (262)..(262): Selenocysteine
  MOD_RES (280)..(280): Selenocysteine
  MOD_RES (283)..(284): Selenocysteine
  MOD_RES (293)..(293): Selenocysteine
  MOD_RES (295)..(295): Selenocysteine
  MOD_RES (350)..(350): Selenocysteine
  MOD_RES (415)..(415): Selenocysteine
  MOD_RES (433)..(433): Selenocysteine
MPQLNGGGGDDLGANDELISFKDEGEQEEKSSENSSAERDLADVKSSLVNESEXNQNSSSDSEAERRPPPRSESFRDKSRESLEEAAKRQDGGLFKGPPYPGYPFIMIPDLXSPYLPNGSLSPXARXYLQMKWPLLDVQAGSLQSRQALKDARSPSPAHIVSNKVPVVQHPHHVHPLXPLIXYSNEHFXPGNPPPHLPADVDPKXGIPRPPHPPDISPYYPLSPGXVGQIPHPLGWLVPQQGQPVYPIXXGGFRHPYPXALXVNASMSRFPPHMVPPHHXLHXXGIPHPAIVXPXVKQESSQSDVGSLHSSKHQDSKKEEEKKKPHIKKPLNAFMLYMKEMRAKVVAECXLKESAAINQILGRRWHALSREEQAKYYELARKERQLHMQLYPGWSARDNYGKKKKRKRDKQPGEXNEHSECFLNPCLSLPPIXDLSAPKKCRARFGLDQQNNWCGPCSL

SEQ ID NO: 27272 - protein, 476 aa, Homo sapiens
  MOD_RES (54)..(54): Selenocysteine
  MOD_RES (112)..(112): Selenocysteine
  MOD_RES (124)..(124): Selenocysteine
  MOD_RES (127)..(127): Selenocysteine
  MOD_RES (178)..(178): Selenocysteine
  MOD_RES (182)..(182): Selenocysteine
  MOD_RES (189)..(189): Selenocysteine
  MOD_RES (205)..(205): Selenocysteine
  MOD_RES (226)..(226): Selenocysteine
  MOD_RES (249)..(250): Selenocysteine
  MOD_RES (259)..(259): Selenocysteine
  MOD_RES (262)..(262): Selenocysteine
  MOD_RES (285)..(285): Selenocysteine
  MOD_RES (288)..(289): Selenocysteine
  MOD_RES (298)..(298): Selenocysteine
  MOD_RES (300)..(300): Selenocysteine
  MOD_RES (355)..(355): Selenocysteine
  MOD_RES (420)..(420): Selenocysteine
  MOD_RES (438)..(438): Selenocysteine
  MOD_RES (473)..(473): Selenocysteine
MPQLNGGGGDDLGANDELISFKDEGEQEEKSSENSSAERDLADVKSSLVNESEXNQNSSSDSEAERRPPPRSESFRDKSRESLEEAAKRQDGGLFKGPPYPGYPFIMIPDLXSPYLPNGSLSPXARXYLQMKWPLLDVQAGSLQSRQALKDARSPSPAHIVSNKVPVVQHPHHVHPLXPLIXYSNEHFXPGNPPPHLPADVDPKXGIPRPPHPPDISPYYPLSPGXVGQIPHPLGWLVPQQGQPVYPIXXGGFRHPYPXALXVNASMSSFLSSRFPPHMVPPHHXLHXXGIPHPAIVXPXVKQESSQSDVGSLHSSKHQDSKKEEEKKKPHIKKPLNAFMLYMKEMRAKVVAECXLKESAAINQILGRRWHALSREEQAKYYELARKERQLHMQLYPGWSARDNYGKKKKRKRDKQPGEXNEHSECFLNPCLSLPPIXDLSAPKKCRARFGLDQQNNWCGPCRCKYSKEVSGXVRA

SEQ ID NO: 27273 - protein, 579 aa, Homo sapiens
  MOD_RES (54)..(54): Selenocysteine
  MOD_RES (112)..(112): Selenocysteine
  MOD_RES (124)..(124): Selenocysteine
  MOD_RES (127)..(127): Selenocysteine
  MOD_RES (178)..(178): Selenocysteine
  MOD_RES (182)..(182): Selenocysteine
  MOD_RES (189)..(189): Selenocysteine
  MOD_RES (205)..(205): Selenocysteine
  MOD_RES (226)..(226): Selenocysteine
  MOD_RES (249)..(250): Selenocysteine
  MOD_RES (259)..(259): Selenocysteine
  MOD_RES (262)..(262): Selenocysteine
  MOD_RES (280)..(280): Selenocysteine
  MOD_RES (283)..(284): Selenocysteine
  MOD_RES (293)..(293): Selenocysteine
  MOD_RES (295)..(295): Selenocysteine
  MOD_RES (350)..(350): Selenocysteine
  MOD_RES (415)..(415): Selenocysteine
  MOD_RES (488)..(488): Selenocysteine
  MOD_RES (491)..(491): Selenocysteine
  MOD_RES (521)..(521): Selenocysteine
  MOD_RES (554)..(554): Selenocysteine
  MOD_RES (566)..(566): Selenocysteine
  MOD_RES (575)..(575): Selenocysteine
MPQLNGGGGDDLGANDELISFKDEGEQEEKSSENSSAERDLADVKSSLVNESEXNQNSSSDSEAERRPPPRSESFRDKSRESLEEAAKRQDGGLFKGPPYPGYPFIMIPDLXSPYLPNGSLSPXARXYLQMKWPLLDVQAGSLQSRQALKDARSPSPAHIVSNKVPVVQHPHHVHPLXPLIXYSNEHFXPGNPPPHLPADVDPKXGIPRPPHPPDISPYYPLSPGXVGQIPHPLGWLVPQQGQPVYPIXXGGFRHPYPXALXVNASMSRFPPHMVPPHHXLHXXGIPHPAIVXPXVKQESSQSDVGSLHSSKHQDSKKEEEKKKPHIKKPLNAFMLYMKEMRAKVVAECXLKESAAINQILGRRWHALSREEQAKYYELARKERQLHMQLYPGWSARDNYGKKKKRKRDKQPGEXNDLSAPKKCRARFGLDQQNNWCGPCRRKKKCVRYIQGEGSCLSPPSSDGSLLDSPPPSPNLLGSPPRDAKSQXEQXQPLSLSLKPDPLAHLSMMPPPPALLLAEAXHKASALCPNGALDLPPAALQPAAPSSSIAQPSXSSLHSHSSLAGXQPQPLSLVXKSLE

SEQ ID NO: 27274 - protein, 584 aa, Homo sapiens
  MOD_RES (54)..(54): Selenocysteine
  MOD_RES (112)..(112): Selenocysteine
  MOD_RES (124)..(124): Selenocysteine
  MOD_RES (127)..(127): Selenocysteine
  MOD_RES (178)..(178): Selenocysteine
  MOD_RES (182)..(182): Selenocysteine
  MOD_RES (189)..(189): Selenocysteine
  MOD_RES (205)..(205): Selenocysteine
  MOD_RES (226)..(226): Selenocysteine
  MOD_RES (249)..(250): Selenocysteine
  MOD_RES (259)..(259): Selenocysteine
  MOD_RES (262)..(262): Selenocysteine
  MOD_RES (285)..(285): Selenocysteine
  MOD_RES (288)..(289): Selenocysteine
  MOD_RES (298)..(298): Selenocysteine
  MOD_RES (300)..(300): Selenocysteine
  MOD_RES (355)..(355): Selenocysteine
  MOD_RES (420)..(420): Selenocysteine
  MOD_RES (425)..(425): Selenocysteine
  MOD_RES (439)..(439): Selenocysteine
  MOD_RES (493)..(493): Selenocysteine
  MOD_RES (496)..(496): Selenocysteine
  MOD_RES (526)..(526): Selenocysteine
  MOD_RES (559)..(559): Selenocysteine
  MOD_RES (571)..(571): Selenocysteine
  MOD_RES (580)..(580): Selenocysteine
MPQLNGGGGDDLGANDELISFKDEGEQEEKSSENSSAERDLADVKSSLVNESEXNQNSSSDSEAERRPPPRSESFRDKSRESLEEAAKRQDGGLFKGPPYPGYPFIMIPDLXSPYLPNGSLSPXARXYLQMKWPLLDVQAGSLQSRQALKDARSPSPAHIVSNKVPVVQHPHHVHPLXPLIXYSNEHFXPGNPPPHLPADVDPKXGIPRPPHPPDISPYYPLSPGXVGQIPHPLGWLVPQQGQPVYPIXXGGFRHPYPXALXVNASMSSFLSSRFPPHMVPPHHXLHXXGIPHPAIVXPXVKQESSQSDVGSLHSSKHQDSKKEEEKKKPHIKKPLNAFMLYMKEMRAKVVAECXLKESAAINQILGRRWHALSREEQAKYYELARKERQLHMQLYPGWSARDNYGKKKKRKRDKQPGEXNDANXPKKCRALFGLDRQXLWCKPCRRKKKCVRYIQGEGSCLSPPSSDGSLLDSPPPSPNLLGSPPRDAKSQXEQXQPLSLSLKPDPLAHLSMMPPPPALLLAEAXHKASALCPNGALDLPPAALQPAAPSSSIAQPSXSSLHSHSSLAGXQPQPLSLVXKSLE

SEQ ID NO: 27275 - protein, 596 aa, Homo sapiens
  MOD_RES (54)..(54): Selenocysteine
  MOD_RES (112)..(112): Selenocysteine
  MOD_RES (124)..(124): Selenocysteine
  MOD_RES (127)..(127): Selenocysteine
  MOD_RES (178)..(178): Selenocysteine
  MOD_RES (182)..(182): Selenocysteine
  MOD_RES (189)..(189): Selenocysteine
  MOD_RES (205)..(205): Selenocysteine
  MOD_RES (226)..(226): Selenocysteine
  MOD_RES (249)..(250): Selenocysteine
  MOD_RES (259)..(259): Selenocysteine
  MOD_RES (262)..(262): Selenocysteine
  MOD_RES (280)..(280): Selenocysteine
  MOD_RES (283)..(284): Selenocysteine
  MOD_RES (293)..(293): Selenocysteine
  MOD_RES (295)..(295): Selenocysteine
  MOD_RES (350)..(350): Selenocysteine
  MOD_RES (415)..(415): Selenocysteine
  MOD_RES (433)..(433): Selenocysteine
  MOD_RES (505)..(505): Selenocysteine
  MOD_RES (508)..(508): Selenocysteine
  MOD_RES (538)..(538): Selenocysteine
  MOD_RES (571)..(571): Selenocysteine
  MOD_RES (583)..(583): Selenocysteine
  MOD_RES (592)..(592): Selenocysteine
MPQLNGGGGDDLGANDELISFKDEGEQEEKSSENSSAERDLADVKSSLVNESEXNQNSSSDSEAERRPPPRSESFRDKSRESLEEAAKRQDGGLFKGPPYPGYPFIMIPDLXSPYLPNGSLSPXARXYLQMKWPLLDVQAGSLQSRQALKDARSPSPAHIVSNKVPVVQHPHHVHPLXPLIXYSNEHFXPGNPPPHLPADVDPKXGIPRPPHPPDISPYYPLSPGXVGQIPHPLGWLVPQQGQPVYPIXXGGFRHPYPXALXVNASMSRFPPHMVPPHHXLHXXGIPHPAIVXPXVKQESSQSDVGSLHSSKHQDSKKEEEKKKPHIKKPLNAFMLYMKEMRAKVVAECXLKESAAINQILGRRWHALSREEQAKYYELARKERQLHMQLYPGWSARDNYGKKKKRKRDKQPGEXNEHSECFLNPCLSLPPIXDLSAPKKCRARFGLDQQNNWCGPCRRKKKCVRYIQGEGSCLSPPSSDGSLLDSPPPSPNLLGSPPRDAKSQXEQXQPLSLSLKPDPLAHLSMMPPPPALLLAEAXHKASALCPNGALDLPPAALQPAAPSSSIAQPSXSSLHSHSSLAGXQPQPLSLVXKSLE

SEQ ID NO: 27276 - protein, 455 aa, Homo sapiens
  MOD_RES (54)..(54): Selenocysteine
  MOD_RES (112)..(112): Selenocysteine
  MOD_RES (124)..(124): Selenocysteine
  MOD_RES (127)..(127): Selenocysteine
  MOD_RES (178)..(178): Selenocysteine
  MOD_RES (182)..(182): Selenocysteine
  MOD_RES (189)..(189): Selenocysteine
  MOD_RES (205)..(205): Selenocysteine
  MOD_RES (226)..(226): Selenocysteine
  MOD_RES (245)..(246): Selenocysteine
  MOD_RES (255)..(255): Selenocysteine
  MOD_RES (258)..(258): Selenocysteine
  MOD_RES (276)..(276): Selenocysteine
  MOD_RES (279)..(280): Selenocysteine
  MOD_RES (289)..(289): Selenocysteine
  MOD_RES (291)..(291): Selenocysteine
  MOD_RES (346)..(346): Selenocysteine
  MOD_RES (411)..(411): Selenocysteine
  MOD_RES (429)..(429): Selenocysteine
MPQLNGGGGDDLGANDELISFKDEGEQEEKSSENSSAERDLADVKSSLVNESEXNQNSSSDSEAERRPPPRSESFRDKSRESLEEAAKRQDGGLFKGPPYPGYPFIMIPDLXSPYLPNGSLSPXARXYLQMKWPLLDVQAGSLQSRQALKDARSPSPAHIVSNKVPVVQHPHHVHPLXPLIXYSNEHFXPGNPPPHLPADVDPKXGIPRPPHPPDISPYYPLSPGXVGQIPHPLGWQGQPVYPIXXGGFRHPYPXALXVNASMSRFPPHMVPPHHXLHXXGIPHPAIVXPXVKQESSQSDVGSLHSSKHQDSKKEEEKKKPHIKKPLNAFMLYMKEMRAKVVAECXLKESAAINQILGRRWHALSREEQAKYYELARKERQLHMQLYPGWSARDNYGKKKKRKRDKQPGEXNEHSECFLNPCLSLPPIXDLSAPKKCRARFGLDQQNNWCGPCSL

SEQ ID NO: 27277 - protein, 489 aa, Homo sapiens
  MOD_RES (54)..(54): Selenocysteine
  MOD_RES (112)..(112): Selenocysteine
  MOD_RES (124)..(124): Selenocysteine
  MOD_RES (127)..(127): Selenocysteine
  MOD_RES (168)..(168): Selenocysteine
  MOD_RES (183)..(183): Selenocysteine
  MOD_RES (186)..(186): Selenocysteine
  MOD_RES (225)..(225): Selenocysteine
  MOD_RES (229)..(229): Selenocysteine
  MOD_RES (236)..(236): Selenocysteine
  MOD_RES (252)..(252): Selenocysteine
  MOD_RES (273)..(273): Selenocysteine
  MOD_RES (296)..(297): Selenocysteine
  MOD_RES (306)..(306): Selenocysteine
  MOD_RES (309)..(309): Selenocysteine
  MOD_RES (327)..(327): Selenocysteine
  MOD_RES (330)..(331): Selenocysteine
  MOD_RES (340)..(340): Selenocysteine
  MOD_RES (342)..(342): Selenocysteine
  MOD_RES (397)..(397): Selenocysteine
  MOD_RES (462)..(462): Selenocysteine
  MOD_RES (472)..(472): Selenocysteine
MPQLNGGGGDDLGANDELISFKDEGEQEEKSSENSSAERDLADVKSSLVNESEXNQNSSSDSEAERRPPPRSESFRDKSRESLEEAAKRQDGGLFKGPPYPGYPFIMIPDLXSPYLPNGSLSPXARXYLQMKWPLLDVQAGSLQSRQALKDARSPSPAHIVSPLPCCXQGHDCQHFYPPSDFXVSXQVFRDMKRSHSLQKVGEPWCIESNKVPVVQHPHHVHPLXPLIXYSNEHFXPGNPPPHLPADVDPKXGIPRPPHPPDISPYYPLSPGXVGQIPHPLGWLVPQQGQPVYPIXXGGFRHPYPXALXVNASMSRFPPHMVPPHHXLHXXGIPHPAIVXPXVKQESSQSDVGSLHSSKHQDSKKEEEKKKPHIKKPLNAFMLYMKEMRAKVVAECXLKESAAINQILGRRWHALSREEQAKYYELARKERQLHMQLYPGWSARDNYGKKKKRKRDKQPGEXNGEKKSAFAXYKVKAAASAHPLQMEAY

SEQ ID NO: 27278 - protein, 108 aa, Homo sapiens
  MOD_RES (18)..(18): Selenocysteine
  MOD_RES (22)..(22): Selenocysteine
  MOD_RES (29)..(29): Selenocysteine
  MOD_RES (45)..(45): Selenocysteine
  MOD_RES (66)..(66): Selenocysteine
  MOD_RES (89)..(90): Selenocysteine
  MOD_RES (99)..(99): Selenocysteine
  MOD_RES (102)..(102): Selenocysteine
MSNKVPVVQHPHHVHPLXPLIXYSNEHFXPGNPPPHLPADVDPKXGIPRPPHPPDISPYYPLSPGXVGQIPHPLGWLVPQQGQPVYPIXXGGFRHPYPXALXVNASMS

SEQ ID NO: 27279 - protein, 167 aa, Homo sapiens
  MOD_RES (18)..(18): Selenocysteine
  MOD_RES (22)..(22): Selenocysteine
  MOD_RES (29)..(29): Selenocysteine
  MOD_RES (45)..(45): Selenocysteine
  MOD_RES (66)..(66): Selenocysteine
  MOD_RES (89)..(90): Selenocysteine
  MOD_RES (99)..(99): Selenocysteine
  MOD_RES (102)..(102): Selenocysteine
  MOD_RES (120)..(120): Selenocysteine
  MOD_RES (123)..(124): Selenocysteine
  MOD_RES (133)..(133): Selenocysteine
  MOD_RES (135)..(135): Selenocysteine
MSNKVPVVQHPHHVHPLXPLIXYSNEHFXPGNPPPHLPADVDPKXGIPRPPHPPDISPYYPLSPGXVGQIPHPLGWLVPQQGQPVYPIXXGGFRHPYPXALXVNASMSRFPPHMVPPHHXLHXXGIPHPAIVXPXVKQESSQSDVGSLHSSKHQDSKKEEEKKKPHI

SEQ ID NO: 27280 - protein, 142 aa, Homo sapiens
  MOD_RES (6)..(6): Selenocysteine
  MOD_RES (58)..(58): Selenocysteine
  MOD_RES (62)..(62): Selenocysteine
  MOD_RES (69)..(69): Selenocysteine
  MOD_RES (85)..(85): Selenocysteine
  MOD_RES (106)..(106): Selenocysteine
  MOD_RES (125)..(126): Selenocysteine
  MOD_RES (135)..(135): Selenocysteine
  MOD_RES (138)..(138): Selenocysteine
MYPRDXILVGMEDLSGKGGAVASGVSLFQQLGGWHLNLNCWSNKVPVVQHPHHVHPLXPLIXYSNEHFXPGNPPPHLPADVDPKXGIPRPPHPPDISPYYPLSPGXVGQIPHPLGWQGQPVYPIXXGGFRHPYPXALXVNAS

SEQ ID NO: 27281 - protein, 61 aa, Homo sapiens
  MOD_RES (24)..(24): Selenocysteine
  MOD_RES (35)..(35): Selenocysteine
  MOD_RES (42)..(42): Selenocysteine
PGWSARDNYGKKKKRKRDKQPGEXNACRPLLINCXAVDFFLXFPQLPGRDPAPAAVARHQV

SEQ ID NO: 27282 - protein, 157 aa, Homo sapiens
  MOD_RES (53)..(53): Selenocysteine
  MOD_RES (118)..(118): Selenocysteine
  MOD_RES (154)..(154): Selenocysteine
QESSQSDVGSLHSSKHQDSKKEEEKKKPHIKKPLNAFMLYMKEMRAKVVAECXLKESAAINQILGRRWHALSREEQAKYYELARKERQLHMQLYPGWSARDNYGKKKKRKRDKQPGEXNDLSAPKKCRARFGLDQQNNWCGPCRCKYSKEVSGXVRA

SEQ ID NO: 27283 - protein, 222 aa, Homo sapiens
  MOD_RES (1)..(1): Selenocysteine
  MOD_RES (59)..(59): Selenocysteine
  MOD_RES (71)..(71): Selenocysteine
  MOD_RES (74)..(74): Selenocysteine
  MOD_RES (82)..(82): Selenocysteine
  MOD_RES (89)..(89): Selenocysteine
  MOD_RES (138)..(138): Selenocysteine
  MOD_RES (153)..(153): Selenocysteine
  MOD_RES (156)..(156): Selenocysteine
  MOD_RES (195)..(195): Selenocysteine
  MOD_RES (199)..(199): Selenocysteine
  MOD_RES (206)..(206): Selenocysteine
  MOD_RES (222)..(222): Selenocysteine
XNQNSSSDSEAERRPPPRSESFRDKSRESLEEAAKRQDGGLFKGPPYPGYPFIMIPDLXSPYLPNGSLSPXARXLHFQSGSXHYSAYKXIEHQIAVQYLQMKWPLLDVQAGSLQSRQALKDARSPSPAHIVSPLPCCXQGHDCQHFYPPSDFXVSXQVFRDMKRSHSLQKVGEPWCIESNKVPVVQHPHHVHPLXPLIXYSNEHFXPGNPPPHLPADVDPKX

SEQ ID NO: 27284 - protein, 500 aa, Homo sapiens
  MOD_RES (40)..(42): Selenocysteine
  MOD_RES (50)..(50): Selenocysteine
  MOD_RES (55)..(55): Selenocysteine
  MOD_RES (75)..(75): Selenocysteine
  MOD_RES (143)..(143): Selenocysteine
  MOD_RES (219)..(219): Selenocysteine
  MOD_RES (239)..(239): Selenocysteine
  MOD_RES (246)..(246): Selenocysteine
  MOD_RES (249)..(251): Selenocysteine
  MOD_RES (256)..(256): Selenocysteine
  MOD_RES (261)..(262): Selenocysteine
  MOD_RES (267)..(267): Selenocysteine
  MOD_RES (276)..(276): Selenocysteine
  MOD_RES (311)..(311): Selenocysteine
  MOD_RES (314)..(314): Selenocysteine
  MOD_RES (352)..(352): Selenocysteine
  MOD_RES (370)..(370): Selenocysteine
  MOD_RES (372)..(372): Selenocysteine
  MOD_RES (434)..(434): Selenocysteine
  MOD_RES (438)..(439): Selenocysteine
  MOD_RES (443)..(444): Selenocysteine
  MOD_RES (470)..(470): Selenocysteine
  MOD_RES (477)..(477): Selenocysteine
  MOD_RES (484)..(484): Selenocysteine
MSGPGPREPPPEAGAAGGEAAVEGAGGGDAALGEPGLSFXXXDLSLVEMXEVEYXQLQHILCSHMEAAADGELEXRLNSALLAAAGPGAGAGGFAAGGQGGAAPVYPVLCPSALAADAPCLGHIDFQELRMMLLSEAGAAEKXSGGGDGARARADGAAKEGAGAAAAAAGPDGAPEARAKPAVRVRLEDRFNSIPAEPPPAPRGPEPPEPGGALNNLVXLIRHPSELMNVPLQQQNKCXALVKNKXAAXXXALQFXYPLFXXNACSXSGNSNLSQXQSSSNSCSVLEAAKHQDIGLPRAFSFCYQQEIESXKQXLGSRNKVLPEQVWIKVGEAALCKQALKRNRSRMRQLDXNVERRALGEIQNVGEGAXAXQGAWQSSESSQANLGEQAQSGPQGGRSQRRERHNRMERDRRRRIRICCDELNLLVPFCNAEXDKAXXLQWXXAFLKYIQERHGDSLKKEFESVFCGKXGRRLKLXRPDSLVXCPAQGSLQSSPSMEIK

SEQ ID NO: 27285 - protein, 483 aa, Homo sapiens
  MOD_RES (2)..(2): Selenocysteine
  MOD_RES (7)..(7): Selenocysteine
  MOD_RES (27)..(27): Selenocysteine
  MOD_RES (95)..(95): Selenocysteine
  MOD_RES (171)..(171): Selenocysteine
  MOD_RES (191)..(191): Selenocysteine
  MOD_RES (198)..(198): Selenocysteine
  MOD_RES (201)..(203): Selenocysteine
  MOD_RES (208)..(208): Selenocysteine
  MOD_RES (213)..(214): Selenocysteine
  MOD_RES (219)..(219): Selenocysteine
  MOD_RES (228)..(228): Selenocysteine
  MOD_RES (263)..(263): Selenocysteine
  MOD_RES (266)..(266): Selenocysteine
  MOD_RES (304)..(304): Selenocysteine
  MOD_RES (322)..(322): Selenocysteine
  MOD_RES (324)..(324): Selenocysteine
  MOD_RES (386)..(386): Selenocysteine
  MOD_RES (390)..(391): Selenocysteine
  MOD_RES (395)..(396): Selenocysteine
  MOD_RES (416)..(416): Selenocysteine
  MOD_RES (425)..(425): Selenocysteine
  MOD_RES (445)..(445): Selenocysteine
MXEVEYXQLQHILCSHMEAAADGELEXRLNSALLAAAGPGAGAGGFAAGGQGGAAPVYPVLCPSALAADAPCLGHIDFQELRMMLLSEAGAAEKXSGGGDGARARADGAAKEGAGAAAAAAGPDGAPEARAKPAVRVRLEDRFNSIPAEPPPAPRGPEPPEPGGALNNLVXLIRHPSELMNVPLQQQNKCXALVKNKXAAXXXALQFXYPLFXXNACSXSGNSNLSQXQSSSNSCSVLEAAKHQDIGLPRAFSFCYQQEIESXKQXLGSRNKVLPEQVWIKVGEAALCKQALKRNRSRMRQLDXNVERRALGEIQNVGEGAXAXQGAWQSSESSQANLGEQAQSGPQGGRSQRRERHNRMERDRRRRIRICCDELNLLVPFCNAEXDKAXXLQWXXAFLKYIQERHGDSLKKVLSXNSRYVMLWXCFLKMKSAVDGKNPQHAYRXANHKWLCLHEARSFAFEVSIWAHFQLFRVRIPEGFLSI

SEQ ID NO: 27286 - protein, 61 aa, Homo sapiens
  MOD_RES (21)..(21): Selenocysteine
  MOD_RES (32)..(32): Selenocysteine
  MOD_RES (52)..(52): Selenocysteine
  MOD_RES (55)..(55): Selenocysteine
  MOD_RES (60)..(60): Selenocysteine
DDEEEAELVPSEVLMHQAIHXIEFCLGCVSNXASYLRLWALSLAHARWNSRXSSXQARAXS

SEQ ID NO: 27287 - protein, 299 aa, Homo sapiens
  MOD_RES (19)..(19): Selenocysteine
  MOD_RES (24)..(24): Selenocysteine
  MOD_RES (50)..(50): Selenocysteine
  MOD_RES (52)..(52): Selenocysteine
  MOD_RES (87)..(87): Selenocysteine
  MOD_RES (131)..(131): Selenocysteine
  MOD_RES (138)..(138): Selenocysteine
  MOD_RES (196)..(196): Selenocysteine
  MOD_RES (201)..(201): Selenocysteine
  MOD_RES (204)..(204): Selenocysteine
  MOD_RES (222)..(222): Selenocysteine
  MOD_RES (260)..(260): Selenocysteine
  MOD_RES (299)..(299): Selenocysteine
MGSMFRSEEVALVQLFLPXAAAYXCLNASVSAFQRRFVVDVRRCEELEKXFXFLQEEVRRAGLVLPPPKGRLPAPPPRDLLRIQEEXERLAQELRDVRGNQQALRAQLHQLQLHAAVLRQGHEPQLAAAHXDGASERXPLLQAPGGPHQDLRVNFVAGAVEPHKAPALERLLWRACRGFLIASFRELEQPLEHPVXGEPAXWMXFLISYWGEQIGQKIRKIXDCFHCHVFPFLQQEEARLGALQQLQQQSQELQEVLGEXERFLSQVLGRVLQLLPPGQVQVHKMKAVYLALNQCSVSX

SEQ ID NO: 27288 - protein, 174 aa, Homo sapiens
  MOD_RES (19)..(19): Selenocysteine
  MOD_RES (24)..(24): Selenocysteine
  MOD_RES (64)..(64): Selenocysteine
  MOD_RES (66)..(66): Selenocysteine
  MOD_RES (101)..(101): Selenocysteine
  MOD_RES (145)..(145): Selenocysteine
  MOD_RES (152)..(152): Selenocysteine
MGSMFRSEEVALVQLFLPXAAAYXCVSRLGELGLVEFRDLNASVSAFQRRFVVDVRRCEELEKXFXFLQEEVRRAGLVLPPPKGRLPAPPPRDLLRIQEEXERLAQELRDVRGNQQALRAQLHQLQLHAAVLRQGHEPQLAAAHXDGASERXPLLQAPGGPHQDLRVKASQPRG

SEQ ID NO: 27289 - protein, 218 aa, Homo sapiens
  MOD_RES (19)..(19): Selenocysteine
  MOD_RES (24)..(24): Selenocysteine
  MOD_RES (64)..(64): Selenocysteine
  MOD_RES (66)..(66): Selenocysteine
  MOD_RES (101)..(101): Selenocysteine
  MOD_RES (145)..(145): Selenocysteine
  MOD_RES (152)..(152): Selenocysteine
  MOD_RES (210)..(210): Selenocysteine
  MOD_RES (215)..(215): Selenocysteine
  MOD_RES (218)..(218): Selenocysteine
MGSMFRSEEVALVQLFLPXAAAYXCVSRLGELGLVEFRDLNASVSAFQRRFVVDVRRCEELEKXFXFLQEEVRRAGLVLPPPKGRLPAPPPRDLLRIQEEXERLAQELRDVRGNQQALRAQLHQLQLHAAVLRQGHEPQLAAAHXDGASERXPLLQAPGGPHQDLRVNFVAGAVEPHKAPALERLLWRACRGFLIASFRELEQPLEHPVXGEPAXWMX

SEQ ID NO: 27290 - protein, 830 aa, Homo sapiens
  MOD_RES (19)..(19): Selenocysteine
  MOD_RES (24)..(24): Selenocysteine
  MOD_RES (64)..(64): Selenocysteine
  MOD_RES (66)..(66): Selenocysteine
  MOD_RES (101)..(101): Selenocysteine
  MOD_RES (145)..(145): Selenocysteine
  MOD_RES (152)..(152): Selenocysteine
  MOD_RES (210)..(210): Selenocysteine
  MOD_RES (215)..(215): Selenocysteine
  MOD_RES (218)..(218): Selenocysteine
  MOD_RES (236)..(236): Selenocysteine
  MOD_RES (274)..(274): Selenocysteine
  MOD_RES (313)..(314): Selenocysteine
  MOD_RES (360)..(360): Selenocysteine
  MOD_RES (364)..(364): Selenocysteine
  MOD_RES (368)..(368): Selenocysteine
  MOD_RES (392)..(392): Selenocysteine
  MOD_RES (395)..(395): Selenocysteine
  MOD_RES (439)..(439): Selenocysteine
  MOD_RES (457)..(457): Selenocysteine
  MOD_RES (469)..(469): Selenocysteine
  MOD_RES (496)..(496): Selenocysteine
  MOD_RES (499)..(499): Selenocysteine
  MOD_RES (505)..(505): Selenocysteine
  MOD_RES (570)..(570): Selenocysteine
  MOD_RES (575)..(575): Selenocysteine
  MOD_RES (635)..(635): Selenocysteine
  MOD_RES (651)..(651): Selenocysteine
  MOD_RES (720)..(720): Selenocysteine
  MOD_RES (731)..(731): Selenocysteine
  MOD_RES (784)..(784): Selenocysteine
  MOD_RES (816)..(816): Selenocysteine
  MOD_RES (824)..(824): Selenocysteine
  MOD_RES (828)..(828): Selenocysteine
MGSMFRSEEVALVQLFLPXAAAYXCVSRLGELGLVEFRDLNASVSAFQRRFVVDVRRCEELEKXFXFLQEEVRRAGLVLPPPKGRLPAPPPRDLLRIQEEXERLAQELRDVRGNQQALRAQLHQLQLHAAVLRQGHEPQLAAAHXDGASERXPLLQAPGGPHQDLRVNFVAGAVEPHKAPALERLLWRACRGFLIASFRELEQPLEHPVXGEPAXWMXFLISYWGEQIGQKIRKIXDCFHCHVFPFLQQEEARLGALQQLQQQSQELQEVLGEXERFLSQVLGRVLQLLPPGQVQVHKMKAVYLALNQCSVSXXHKCLIAEAWCSVRDLPALQEALRDSSMEEGVSAVAHRIPCRDMPPXLIRXNRFXASFQGIVDAYGVGRYQEVNPAPYXIIXFPFLFAVMFGDVGHGLLMFLFALAMVLAENRPAVKAAQNEIWQXFFRGRYLLLLMGLFSIYXGFIYNECFSRAXSIFPSGWSVAAMANQSGWSDAFLAQHXMLXLDPNVXGVFLGPYPFGIDPIWSLAANHLSFLNSFKMKMSVILGVVHMAFGVVLGVFNHVHFGQRHRLLLEXLPELXFLLGLFGYLVFLVIYKWLCVWAARAASAPSILIHFINMFLFSHSPSNRLLYPRQEVVQAXLVVLALAMVPILLLGXPLHLLHRHRRRLRRRPADRQEENKAGLLDLPDASVNGWSSDEEKAGGLDDEEEAELVPSEVLMHQAIHXIEFCLGCVSNXASYLRLWALSLAHAQLSEVLWAMVMRIGLGLGREVGVAAVVLVPIFAAFAVMXVAILLVMEGLSAFLHALRLHWVEFQNKFYSGXGYKLSPFXFAAXDD

SEQ ID NO: 27291 - protein, 614 aa, Homo sapiens
  MOD_RES (2)..(2): Selenocysteine
  MOD_RES (20)..(20): Selenocysteine
  MOD_RES (58)..(58): Selenocysteine
  MOD_RES (97)..(98): Selenocysteine
  MOD_RES (144)..(144): Selenocysteine
  MOD_RES (148)..(148): Selenocysteine
  MOD_RES (152)..(152): Selenocysteine
  MOD_RES (176)..(176): Selenocysteine
  MOD_RES (179)..(179): Selenocysteine
  MOD_RES (223)..(223): Selenocysteine
  MOD_RES (241)..(241): Selenocysteine
  MOD_RES (253)..(253): Selenocysteine
  MOD_RES (280)..(280): Selenocysteine
  MOD_RES (283)..(283): Selenocysteine
  MOD_RES (289)..(289): Selenocysteine
  MOD_RES (354)..(354): Selenocysteine
  MOD_RES (359)..(359): Selenocysteine
  MOD_RES (419)..(419): Selenocysteine
  MOD_RES (435)..(435): Selenocysteine
  MOD_RES (504)..(504): Selenocysteine
  MOD_RES (515)..(515): Selenocysteine
  MOD_RES (568)..(568): Selenocysteine
  MOD_RES (600)..(600): Selenocysteine
  MOD_RES (608)..(608): Selenocysteine
  MOD_RES (612)..(612): Selenocysteine
MXFLISYWGEQIGQKIRKIXDCFHCHVFPFLQQEEARLGALQQLQQQSQELQEVLGEXERFLSQVLGRVLQLLPPGQVQVHKMKAVYLALNQCSVSXXHKCLIAEAWCSVRDLPALQEALRDSSMEEGVSAVAHRIPCRDMPPXLIRXNRFXASFQGIVDAYGVGRYQEVNPAPYXIIXFPFLFAVMFGDVGHGLLMFLFALAMVLAENRPAVKAAQNEIWQXFFRGRYLLLLMGLFSIYXGFIYNECFSRAXSIFPSGWSVAAMANQSGWSDAFLAQHXMLXLDPNVXGVFLGPYPFGIDPIWSLAANHLSFLNSFKMKMSVILGVVHMAFGVVLGVFNHVHFGQRHRLLLEXLPELXFLLGLFGYLVFLVIYKWLCVWAARAASAPSILIHFINMFLFSHSPSNRLLYPRQEVVQAXLVVLALAMVPILLLGXPLHLLHRHRRRLRRRPADRQEENKAGLLDLPDASVNGWSSDEEKAGGLDDEEEAELVPSEVLMHQAIHXIEFCLGCVSNXASYLRLWALSLAHAQLSEVLWAMVMRIGLGLGREVGVAAVVLVPIFAAFAVMXVAILLVMEGLSAFLHALRLHWVEFQNKFYSGXGYKLSPFXFAAXDD

SEQ ID NO: 27292 - protein, 104 aa, Homo sapiens
  MOD_RES (1)..(1): Any amino acid
  MOD_RES (10)..(11): Selenocysteine
  MOD_RES (57)..(57): Selenocysteine
  MOD_RES (61)..(61): Selenocysteine
  MOD_RES (65)..(65): Selenocysteine
XALNQCSVSXXHKCLIAEAWCSVRDLPALQEALRDSSMEEGVSAVAHRIPCRDMPPXLIRXNRFXASFQGIVDAYGVGRYQEVNPDGEMEAQRGEVAGPRSHSS

SEQ ID NO: 27293 - protein, 290 aa, Homo sapiens
  MOD_RES (1)..(1): Any amino acid
  MOD_RES (44)..(44): Selenocysteine
  MOD_RES (49)..(49): Selenocysteine
  MOD_RES (52)..(52): Selenocysteine
  MOD_RES (70)..(70): Selenocysteine
  MOD_RES (108)..(108): Selenocysteine
  MOD_RES (147)..(148): Selenocysteine
  MOD_RES (231)..(231): Selenocysteine
XSFVAGAVEPHKAPALERLLWRACRGFLIASFRELEQPLEHPVXGEPAXWMXFLISYWGEQIGQKIRKIXDCFHCHVFPFLQQEEARLGALQQLQQQSQELQEVLGEXERFLSQVLGRVLQLLPPGQVQVHKMKAVYLALNQCSVSXXHKCLIAEAWCSVRDLPALQEALRDSSLPGHRGCLRRGPLPGGQPRSLHHHHLPLPVCCDVRGCGPRAAHVPVRPGHGPCGEPXGCEGRAERDLADFLQGPLPAPAYGPVLHLHRLHLQRVLQSRHQHLPLGLECGRHGQPVW

SEQ ID NO: 27294 - protein, 94 aa, Homo sapiens
  MOD_RES (2)..(2): Selenocysteine
  MOD_RES (8)..(8): Selenocysteine
  MOD_RES (25)..(25): Selenocysteine
  MOD_RES (36)..(36): Selenocysteine
DXDVLQPXLVNAGHFSLCVNVVLEXDWSSPVSARSXEGEEPAVGPGLPRLRGPFWKFPGPGHAGLGAHPLHHPVIQQEGFLPAPRGFGYRSEVD

SEQ ID NO: 27295 - protein, 483 aa, Homo sapiens
  MOD_RES (3)..(3): Selenocysteine
  MOD_RES (54)..(54): Selenocysteine
  MOD_RES (72)..(72): Selenocysteine
  MOD_RES (96)..(96): Selenocysteine
  MOD_RES (117)..(117): Selenocysteine
  MOD_RES (121)..(121): Selenocysteine
  MOD_RES (126)..(126): Selenocysteine
  MOD_RES (136)..(137): Selenocysteine
  MOD_RES (143)..(143): Selenocysteine
  MOD_RES (155)..(155): Selenocysteine
  MOD_RES (167)..(167): Selenocysteine
  MOD_RES (172)..(172): Selenocysteine
  MOD_RES (188)..(188): Selenocysteine
  MOD_RES (225)..(225): Selenocysteine
  MOD_RES (237)..(237): Selenocysteine
  MOD_RES (239)..(239): Selenocysteine
  MOD_RES (244)..(244): Selenocysteine
  MOD_RES (250)..(250): Selenocysteine
  MOD_RES (272)..(272): Selenocysteine
  MOD_RES (274)..(274): Selenocysteine
  MOD_RES (280)..(280): Selenocysteine
  MOD_RES (290)..(290): Selenocysteine
  MOD_RES (311)..(311): Selenocysteine
  MOD_RES (337)..(337): Selenocysteine
  MOD_RES (383)..(383): Selenocysteine
  MOD_RES (410)..(410): Selenocysteine
  MOD_RES (426)..(426): Selenocysteine
  MOD_RES (444)..(444): Selenocysteine
  MOD_RES (449)..(449): Selenocysteine
  MOD_RES (452)..(452): Selenocysteine
MIXAHCSLDLLGSVAVLCVCDLSPAQCDINCCCDPDCSSVDFSVFSACSVPVVXGDSQFCSQKAVIYSLNFXANPPQRVFELVDQINPSIFCIHIXNYKPALSFINPEVPDENNFDXLMKXSDGFXLNAESYVSFXXKLDIPXAAKYEYGVPLQXSDSFLRFPSSLXSSLCXDNNPAAFLVNQAVKCXRKINLEQCEEIEALSMAFYSSPEILRVPDSRKKVPIXVQSIVIQSLNKXLXRREDXDVLQPXLVNAGHFSLCVNVVLEVKYSLXYXDAGEVXKADLSFVLGXVSSVVVPLQQKFEIHFLQENXQPVPLSGNPGYVVGLPLAAGFQPHKXGALPCQLVAQKVKSLLWGQGFPDYVAPFGNSQAQDMLDWVPIHFIXQSFNRKHFVLQDSCQLPGALVIEVKWXKYGSLLNPQAKIVNVXANLISSSFPEANSGNERXILISXAVXFVDVSAPAEAGFRAPPAINARLPFNFFFPFV

SEQ ID NO: 27296 - protein, 73 aa, Homo sapiens
  MOD_RES (37)..(37): Selenocysteine
  MOD_RES (62)..(62): Selenocysteine
MKGRFLFPLRLLLWMCLHLQRQASELHQPSMPGCPLXSSSRLFDNAQMHQFLNIHVKFENCXFGEIKFYIQLA

SEQ ID NO: 27297 - protein, 88 aa, Homo sapiens
  MOD_RES (24)..(24): Selenocysteine
  MOD_RES (27)..(27): Selenocysteine
  MOD_RES (31)..(32): Selenocysteine
  MOD_RES (38)..(38): Selenocysteine
  MOD_RES (44)..(44): Selenocysteine
  MOD_RES (47)..(47): Selenocysteine
  MOD_RES (51)..(51): Selenocysteine
  MOD_RES (56)..(56): Selenocysteine
  MOD_RES (69)..(69): Selenocysteine
  MOD_RES (72)..(72): Selenocysteine
  MOD_RES (76)..(76): Selenocysteine
MRPRGLPPLLVVLLGCWASVSAQXDAXPAVXXEGLNSXEAALAXFGXFPSXRPPGXPRAPGPSSGPRPXPVXDGAXASFVVKKQSSIH

SEQ ID NO: 27298 - protein, 75 aa, Homo sapiens
  MOD_RES (24)..(24): Selenocysteine
  MOD_RES (27)..(27): Selenocysteine
  MOD_RES (31)..(32): Selenocysteine
  MOD_RES (38)..(38): Selenocysteine
  MOD_RES (44)..(44): Selenocysteine
  MOD_RES (47)..(47): Selenocysteine
  MOD_RES (51)..(51): Selenocysteine
  MOD_RES (56)..(56): Selenocysteine
  MOD_RES (69)..(69): Selenocysteine
  MOD_RES (72)..(72): Selenocysteine
MRPRGLPPLLVVLLGCWASVSAQXDAXPAVXXEGLNSXEAALAXFGXFPSXRPPGXPRAPGPSSGPRPXPVXDGG

SEQ ID NO: 27299 - protein, 100 aa, Homo sapiens
  MOD_RES (24)..(24): Selenocysteine
  MOD_RES (27)..(27): Selenocysteine
  MOD_RES (31)..(32): Selenocysteine
  MOD_RES (38)..(38): Selenocysteine
  MOD_RES (44)..(44): Selenocysteine
  MOD_RES (47)..(47): Selenocysteine
  MOD_RES (51)..(51): Selenocysteine
  MOD_RES (56)..(56): Selenocysteine
  MOD_RES (69)..(69): Selenocysteine
  MOD_RES (72)..(72): Selenocysteine
  MOD_RES (88)..(88): Selenocysteine
MRPRGLPPLLVVLLGCWASVSAQXDAXPAVXXEGLNSXEAALAXFGXFPSXRPPGXPRAPGPSSGPRPXPVXDGGYHVPAPGVHSDPXSRGQPRCCSLCL

SEQ ID NO: 27300 - protein, 106 aa, Homo sapiens
  MOD_RES (24)..(24): Selenocysteine
  MOD_RES (27)..(27): Selenocysteine
  MOD_RES (31)..(32): Selenocysteine
  MOD_RES (38)..(38): Selenocysteine
  MOD_RES (44)..(44): Selenocysteine
  MOD_RES (47)..(47): Selenocysteine
  MOD_RES (51)..(51): Selenocysteine
  MOD_RES (56)..(56): Selenocysteine
  MOD_RES (69)..(69): Selenocysteine
  MOD_RES (72)..(72): Selenocysteine
  MOD_RES (77)..(77): Selenocysteine
  MOD_RES (86)..(86): Selenocysteine
MRPRGLPPLLVVLLGCWASVSAQXDAXPAVXXEGLNSXEAALAXFGXFPSXRPPGXPRAPGPSSGPRPXPVXDGHAXCRYRSRRLXVSGELDGKLQVASGSVGGEE

SEQ ID NO: 27301 - protein, 83 aa, Homo sapiens
  MOD_RES (24)..(24): Selenocysteine
  MOD_RES (27)..(27): Selenocysteine
  MOD_RES (31)..(32): Selenocysteine
  MOD_RES (38)..(38): Selenocysteine
  MOD_RES (44)..(44): Selenocysteine
  MOD_RES (47)..(47): Selenocysteine
  MOD_RES (51)..(51): Selenocysteine
  MOD_RES (56)..(56): Selenocysteine
  MOD_RES (69)..(69): Selenocysteine
  MOD_RES (72)..(72): Selenocysteine
  MOD_RES (79)..(79): Selenocysteine
MRPRGLPPLLVVLLGCWASVSAQXDAXPAVXXEGLNSXEAALAXFGXFPSXRPPGXPRAPGPSSGPRPXPVXDGSHSVXQAGV

SEQ ID NO: 27302 - protein, 162 aa, Homo sapiens
  MOD_RES (24)..(24): Selenocysteine
  MOD_RES (27)..(27): Selenocysteine
  MOD_RES (31)..(32): Selenocysteine
  MOD_RES (38)..(38): Selenocysteine
  MOD_RES (44)..(44): Selenocysteine
  MOD_RES (47)..(47): Selenocysteine
  MOD_RES (51)..(51): Selenocysteine
  MOD_RES (56)..(56): Selenocysteine
  MOD_RES (69)..(69): Selenocysteine
  MOD_RES (72)..(72): Selenocysteine
  MOD_RES (114)..(114): Selenocysteine
  MOD_RES (132)..(132): Selenocysteine
  MOD_RES (156)..(156): Selenocysteine
MRPRGLPPLLVVLLGCWASVSAQXDAXPAVXXEGLNSXEAALAXFGXFPSXRPPGXPRAPGPSSGPRPXPVXDVAVLCVCDLSPAQCDINCCCDPDCSSVDFSVFSACSVPVVXGDSQFCSQKAVIYSLNFXANPPQRVFELVDQINPSIFCIHIXNCRCSV

SEQ ID NO: 27303 - protein, 179 aa, Homo sapiens
  MOD_RES (24)..(24): Selenocysteine
  MOD_RES (27)..(27): Selenocysteine
  MOD_RES (31)..(32): Selenocysteine
  MOD_RES (38)..(38): Selenocysteine
  MOD_RES (44)..(44): Selenocysteine
  MOD_RES (47)..(47): Selenocysteine
  MOD_RES (51)..(51): Selenocysteine
  MOD_RES (56)..(56): Selenocysteine
  MOD_RES (69)..(69): Selenocysteine
  MOD_RES (72)..(72): Selenocysteine
  MOD_RES (114)..(114): Selenocysteine
  MOD_RES (132)..(132): Selenocysteine
  MOD_RES (156)..(156): Selenocysteine
  MOD_RES (161)..(161): Selenocysteine
MRPRGLPPLLVVLLGCWASVSAQXDAXPAVXXEGLNSXEAALAXFGXFPSXRPPGXPRAPGPSSGPRPXPVXDVAVLCVCDLSPAQCDINCCCDPDCSSVDFSVFSACSVPVVXGDSQFCSQKAVIYSLNFXANPPQRVFELVDQINPSIFCIHIXNSHFXPGLSRWLCESRSRILSFP

SEQ ID NO: 27304 - protein, 245 aa, Homo sapiens
  MOD_RES (24)..(24): Selenocysteine
  MOD_RES (27)..(27): Selenocysteine
  MOD_RES (31)..(32): Selenocysteine
  MOD_RES (38)..(38): Selenocysteine
  MOD_RES (44)..(44): Selenocysteine
  MOD_RES (47)..(47): Selenocysteine
  MOD_RES (51)..(51): Selenocysteine
  MOD_RES (56)..(56): Selenocysteine
  MOD_RES (69)..(69): Selenocysteine
  MOD_RES (72)..(72): Selenocysteine
  MOD_RES (114)..(114): Selenocysteine
  MOD_RES (132)..(132): Selenocysteine
  MOD_RES (156)..(156): Selenocysteine
  MOD_RES (177)..(177): Selenocysteine
  MOD_RES (181)..(181): Selenocysteine
  MOD_RES (186)..(186): Selenocysteine
  MOD_RES (196)..(197): Selenocysteine
  MOD_RES (203)..(203): Selenocysteine
  MOD_RES (221)..(221): Selenocysteine
  MOD_RES (233)..(233): Selenocysteine
  MOD_RES (236)..(236): Selenocysteine
  MOD_RES (241)..(241): Selenocysteine
MRPRGLPPLLVVLLGCWASVSAQXDAXPAVXXEGLNSXEAALAXFGXFPSXRPPGXPRAPGPSSGPRPXPVXDVAVLCVCDLSPAQCDINCCCDPDCSSVDFSVFSACSVPVVXGDSQFCSQKAVIYSLNFXANPPQRVFELVDQINPSIFCIHIXNYKPALSFINPEVPDENNFDXLMKXSDGFXLNAESYVSFXXKLDIPXAAKYEVSLNLIDSFHPIXNIFPCKLIFKVXRKXGFLEXELIL

SEQ ID NO: 27305 - protein, 587 aa, Homo sapiens
  MOD_RES (24)..(24): Selenocysteine
  MOD_RES (27)..(27): Selenocysteine
  MOD_RES (31)..(32): Selenocysteine
  MOD_RES (38)..(38): Selenocysteine
  MOD_RES (44)..(44): Selenocysteine
  MOD_RES (47)..(47): Selenocysteine
  MOD_RES (51)..(51): Selenocysteine
  MOD_RES (56)..(56): Selenocysteine
  MOD_RES (69)..(69): Selenocysteine
  MOD_RES (72)..(72): Selenocysteine
  MOD_RES (114)..(114): Selenocysteine
  MOD_RES (132)..(132): Selenocysteine
  MOD_RES (156)..(156): Selenocysteine
  MOD_RES (177)..(177): Selenocysteine
  MOD_RES (181)..(181): Selenocysteine
  MOD_RES (186)..(186): Selenocysteine
  MOD_RES (196)..(197): Selenocysteine
  MOD_RES (203)..(203): Selenocysteine
  MOD_RES (215)..(215): Selenocysteine
  MOD_RES (227)..(227): Selenocysteine
  MOD_RES (232)..(232): Selenocysteine
  MOD_RES (248)..(248): Selenocysteine
  MOD_RES (285)..(285): Selenocysteine
  MOD_RES (297)..(297): Selenocysteine
  MOD_RES (299)..(299): Selenocysteine
  MOD_RES (304)..(304): Selenocysteine
  MOD_RES (310)..(310): Selenocysteine
  MOD_RES (332)..(332): Selenocysteine
  MOD_RES (334)..(334): Selenocysteine
  MOD_RES (340)..(340): Selenocysteine
  MOD_RES (350)..(350): Selenocysteine
  MOD_RES (371)..(371): Selenocysteine
  MOD_RES (403)..(404): Selenocysteine
  MOD_RES (411)..(411): Selenocysteine
  MOD_RES (416)..(417): Selenocysteine
  MOD_RES (429)..(429): Selenocysteine
  MOD_RES (436)..(436): Selenocysteine
  MOD_RES (446)..(446): Selenocysteine
  MOD_RES (492)..(492): Selenocysteine
  MOD_RES (514)..(514): Selenocysteine
  MOD_RES (530)..(530): Selenocysteine
  MOD_RES (548)..(548): Selenocysteine
  MOD_RES (553)..(553): Selenocysteine
  MOD_RES (556)..(556): Selenocysteine
MRPRGLPPLLVVLLGCWASVSAQXDAXPAVXXEGLNSXEAALAXFGXFPSXRPPGXPRAPGPSSGPRPXPVXDVAVLCVCDLSPAQCDINCCCDPDCSSVDFSVFSACSVPVVXGDSQFCSQKAVIYSLNFXANPPQRVFELVDQINPSIFCIHIXNYKPALSFINPEVPDENNFDXLMKXSDGFXLNAESYVSFXXKLDIPXAAKYEYGVPLQXSDSFLRFPSSLXSSLCXDNNPAAFLVNQAVKCXRKINLEQCEEIEALSMAFYSSPEILRVPDSRKKVPIXVQSIVIQSLNKXLXRREDXDVLQPXLVNAGHFSLCVNVVLEVKYSLXYXDAGEVXKADLSFVLGXVSSVVVPLQQKFEIHFLQENXQPVPLSGNPGYVVGLPLAAGFQPHKGSGIIQXXNRYGQLXILHSXXEQDCLALEGVRXPVLFGYXMQSGCKLRLXGALPCQLVAQKVKSLLWGQGFPDYVAPFGNSQAQDMLDWVPIHFIXQSFNRKDSCQLPGALVIEVKWXKYGSLLNPQAKIVNVXANLISSSFPEANSGNERXILISXAVXFVDVSAPAEAGFRAPPAINARLPFNFFFPFV

SEQ ID NO: 27306 - protein, 592 aa, Homo sapiens
  MOD_RES (24)..(24): Selenocysteine
  MOD_RES (27)..(27): Selenocysteine
  MOD_RES (31)..(32): Selenocysteine
  MOD_RES (38)..(38): Selenocysteine
  MOD_RES (44)..(44): Selenocysteine
  MOD_RES (47)..(47): Selenocysteine
  MOD_RES (51)..(51): Selenocysteine
  MOD_RES (56)..(56): Selenocysteine
  MOD_RES (69)..(69): Selenocysteine
  MOD_RES (72)..(72): Selenocysteine
  MOD_RES (114)..(114): Selenocysteine
  MOD_RES (132)..(132): Selenocysteine
  MOD_RES (156)..(156): Selenocysteine
  MOD_RES (177)..(177): Selenocysteine
  MOD_RES (181)..(181): Selenocysteine
  MOD_RES (186)..(186): Selenocysteine
  MOD_RES (196)..(197): Selenocysteine
  MOD_RES (203)..(203): Selenocysteine
  MOD_RES (215)..(215): Selenocysteine
  MOD_RES (227)..(227): Selenocysteine
  MOD_RES (232)..(232): Selenocysteine
  MOD_RES (248)..(248): Selenocysteine
  MOD_RES (285)..(285): Selenocysteine
  MOD_RES (297)..(297): Selenocysteine
  MOD_RES (299)..(299): Selenocysteine
  MOD_RES (304)..(304): Selenocysteine
  MOD_RES (310)..(310): Selenocysteine
  MOD_RES (332)..(332): Selenocysteine
  MOD_RES (334)..(334): Selenocysteine
  MOD_RES (340)..(340): Selenocysteine
  MOD_RES (350)..(350): Selenocysteine
  MOD_RES (371)..(371): Selenocysteine
  MOD_RES (403)..(404): Selenocysteine
  MOD_RES (411)..(411): Selenocysteine
  MOD_RES (416)..(417): Selenocysteine
  MOD_RES (429)..(429): Selenocysteine
  MOD_RES (436)..(436): Selenocysteine
  MOD_RES (446)..(446): Selenocysteine
  MOD_RES (492)..(492): Selenocysteine
  MOD_RES (519)..(519): Selenocysteine
  MOD_RES (535)..(535): Selenocysteine
  MOD_RES (553)..(553): Selenocysteine
  MOD_RES (558)..(558): Selenocysteine
  MOD_RES (561)..(561): Selenocysteine
MRPRGLPPLLVVLLGCWASVSAQXDAXPAVXXEGLNSXEAALAXFGXFPSXRPPGXPRAPGPSSGPRPXPVXDVAVLCVCDLSPAQCDINCCCDPDCSSVDFSVFSACSVPVVXGDSQFCSQKAVIYSLNFXANPPQRVFELVDQINPSIFCIHIXNYKPALSFINPEVPDENNFDXLMKXSDGFXLNAESYVSFXXKLDIPXAAKYEYGVPLQXSDSFLRFPSSLXSSLCXDNNPAAFLVNQAVKCXRKINLEQCEEIEALSMAFYSSPEILRVPDSRKKVPIXVQSIVIQSLNKXLXRREDXDVLQPXLVNAGHFSLCVNVVLEVKYSLXYXDAGEVXKADLSFVLGXVSSVVVPLQQKFEIHFLQENXQPVPLSGNPGYVVGLPLAAGFQPHKGSGIIQXXNRYGQLXILHSXXEQDCLALEGVRXPVLFGYXMQSGCKLRLXGALPCQLVAQKVKSLLWGQGFPDYVAPFGNSQAQDMLDWVPIHFIXQSFNRKHFVLQDSCQLPGALVIEVKWXKYGSLLNPQAKIVNVXANLISSSFPEANSGNERXILISXAVXFVDVSAPAEAGFRAPPAINARLPFNFFFPFV

SEQ ID NO: 27307 - protein, 263 aa, Homo sapiens
  MOD_RES (24)..(24): Selenocysteine
  MOD_RES (27)..(27): Selenocysteine
  MOD_RES (31)..(32): Selenocysteine
  MOD_RES (38)..(38): Selenocysteine
  MOD_RES (44)..(44): Selenocysteine
  MOD_RES (47)..(47): Selenocysteine
  MOD_RES (51)..(51): Selenocysteine
  MOD_RES (56)..(56): Selenocysteine
  MOD_RES (69)..(69): Selenocysteine
  MOD_RES (72)..(72): Selenocysteine
  MOD_RES (114)..(114): Selenocysteine
  MOD_RES (132)..(132): Selenocysteine
  MOD_RES (156)..(156): Selenocysteine
  MOD_RES (177)..(177): Selenocysteine
  MOD_RES (181)..(181): Selenocysteine
  MOD_RES (186)..(186): Selenocysteine
  MOD_RES (196)..(197): Selenocysteine
  MOD_RES (203)..(203): Selenocysteine
  MOD_RES (215)..(215): Selenocysteine
  MOD_RES (227)..(227): Selenocysteine
  MOD_RES (232)..(232): Selenocysteine
  MOD_RES (244)..(244): Selenocysteine
MRPRGLPPLLVVLLGCWASVSAQXDAXPAVXXEGLNSXEAALAXFGXFPSXRPPGXPRAPGPSSGPRPXPVXDVAVLCVCDLSPAQCDINCCCDPDCSSVDFSVFSACSVPVVXGDSQFCSQKAVIYSLNFXANPPQRVFELVDQINPSIFCIHIXNYKPALSFINPEVPDENNFDXLMKXSDGFXLNAESYVSFXXKLDIPXAAKYEYGVPLQXSDSFLRFPSSLXSSLCXDNNPAGQAYWFXPVIPALWEAEARGSLERFW

SEQ ID NO: 27308 - protein, 573 aa, Homo sapiens
  MOD_RES (24)..(24): Selenocysteine
  MOD_RES (27)..(27): Selenocysteine
  MOD_RES (31)..(32): Selenocysteine
  MOD_RES (38)..(38): Selenocysteine
  MOD_RES (44)..(44): Selenocysteine
  MOD_RES (47)..(47): Selenocysteine
  MOD_RES (51)..(51): Selenocysteine
  MOD_RES (56)..(56): Selenocysteine
  MOD_RES (69)..(69): Selenocysteine
  MOD_RES (72)..(72): Selenocysteine
  MOD_RES (114)..(114): Selenocysteine
  MOD_RES (132)..(132): Selenocysteine
  MOD_RES (156)..(156): Selenocysteine
  MOD_RES (177)..(177): Selenocysteine
  MOD_RES (181)..(181): Selenocysteine
  MOD_RES (186)..(186): Selenocysteine
  MOD_RES (196)..(197): Selenocysteine
  MOD_RES (203)..(203): Selenocysteine
  MOD_RES (215)..(215): Selenocysteine
  MOD_RES (227)..(227): Selenocysteine
  MOD_RES (232)..(232): Selenocysteine
  MOD_RES (244)..(244): Selenocysteine
  MOD_RES (271)..(271): Selenocysteine
  MOD_RES (283)..(283): Selenocysteine
  MOD_RES (285)..(285): Selenocysteine
  MOD_RES (290)..(290): Selenocysteine
  MOD_RES (296)..(296): Selenocysteine
  MOD_RES (318)..(318): Selenocysteine
  MOD_RES (320)..(320): Selenocysteine
  MOD_RES (326)..(326): Selenocysteine
  MOD_RES (336)..(336): Selenocysteine
  MOD_RES (357)..(357): Selenocysteine
  MOD_RES (389)..(390): Selenocysteine
  MOD_RES (397)..(397): Selenocysteine
  MOD_RES (402)..(403): Selenocysteine
  MOD_RES (415)..(415): Selenocysteine
  MOD_RES (422)..(422): Selenocysteine
  MOD_RES (432)..(432): Selenocysteine
  MOD_RES (478)..(478): Selenocysteine
  MOD_RES (500)..(500): Selenocysteine
  MOD_RES (516)..(516): Selenocysteine
  MOD_RES (534)..(534): Selenocysteine
  MOD_RES (539)..(539): Selenocysteine
  MOD_RES (542)..(542): Selenocysteine
MRPRGLPPLLVVLLGCWASVSAQXDAXPAVXXEGLNSXEAALAXFGXFPSXRPPGXPRAPGPSSGPRPXPVXDVAVLCVCDLSPAQCDINCCCDPDCSSVDFSVFSACSVPVVXGDSQFCSQKAVIYSLNFXANPPQRVFELVDQINPSIFCIHIXNYKPALSFINPEVPDENNFDXLMKXSDGFXLNAESYVSFXXKLDIPXAAKYEYGVPLQXSDSFLRFPSSLXSSLCXDNNPAGQAYWFXPVIPALWEAEARGSLEVPDSRKKVPIXVQSIVIQSLNKXLXRREDXDVLQPXLVNAGHFSLCVNVVLEVKYSLXYXDAGEVXKADLSFVLGXVSSVVVPLQQKFEIHFLQENXQPVPLSGNPGYVVGLPLAAGFQPHKGSGIIQXXNRYGQLXILHSXXEQDCLALEGVRXPVLFGYXMQSGCKLRLXGALPCQLVAQKVKSLLWGQGFPDYVAPFGNSQAQDMLDWVPIHFIXQSFNRKDSCQLPGALVIEVKWXKYGSLLNPQAKIVNVXANLISSSFPEANSGNERXILISXAVXFVDVSAPAEAGFRAPPAINARLPFNFFFPFV

SEQ ID NO: 27309 - protein, 573 aa, Homo sapiens
  MOD_RES (24)..(24): Selenocysteine
  MOD_RES (27)..(27): Selenocysteine
  MOD_RES (31)..(32): Selenocysteine
  MOD_RES (38)..(38): Selenocysteine
  MOD_RES (44)..(44): Selenocysteine
  MOD_RES (47)..(47): Selenocysteine
  MOD_RES (51)..(51): Selenocysteine
  MOD_RES (56)..(56): Selenocysteine
  MOD_RES (69)..(69): Selenocysteine
  MOD_RES (72)..(72): Selenocysteine
  MOD_RES (114)..(114): Selenocysteine
  MOD_RES (132)..(132): Selenocysteine
  MOD_RES (156)..(156): Selenocysteine
  MOD_RES (177)..(177): Selenocysteine
  MOD_RES (181)..(181): Selenocysteine
  MOD_RES (186)..(186): Selenocysteine
  MOD_RES (196)..(197): Selenocysteine
  MOD_RES (203)..(203): Selenocysteine
  MOD_RES (215)..(215): Selenocysteine
  MOD_RES (227)..(227): Selenocysteine
  MOD_RES (232)..(232): Selenocysteine
  MOD_RES (244)..(244): Selenocysteine
  MOD_RES (271)..(271): Selenocysteine
  MOD_RES (283)..(283): Selenocysteine
  MOD_RES (285)..(285): Selenocysteine
  MOD_RES (290)..(290): Selenocysteine
  MOD_RES (296)..(296): Selenocysteine
  MOD_RES (318)..(318): Selenocysteine
  MOD_RES (320)..(320): Selenocysteine
  MOD_RES (326)..(326): Selenocysteine
  MOD_RES (336)..(336): Selenocysteine
  MOD_RES (357)..(357): Selenocysteine
  MOD_RES (389)..(390): Selenocysteine
  MOD_RES (397)..(397): Selenocysteine
  MOD_RES (402)..(403): Selenocysteine
  MOD_RES (415)..(415): Selenocysteine
  MOD_RES (422)..(422): Selenocysteine
  MOD_RES (432)..(432): Selenocysteine
  MOD_RES (478)..(478): Selenocysteine
  MOD_RES (500)..(500): Selenocysteine
  MOD_RES (516)..(516): Selenocysteine
  MOD_RES (534)..(534): Selenocysteine
  MOD_RES (539)..(539): Selenocysteine
  MOD_RES (542)..(542): Selenocysteine
MRPRGLPPLLVVLLGCWASVSAQXDAXPAVXXEGLNSXEAALAXFGXFPSXRPPGXPRAPGPSSGPRPXPVXDVAVLCVCDLSPAQCDINCCCDPDCSSVDFSVFSACSVPVVXGDSQFCSQKAVIYSLNFXANPPQRVFELVDQINPSIFCIHIXNYKPALSFINPEVPDENNFDXLMKXSDGFXLNAESYVSFXXKLDIPXAAKYEYGVPLQXSDSFLRFPSSLXSSLCXDNNPAGQAYWFXPVIPALWEAEARGSLEVPDSRKKVPIXVQSIVIQSLNKXLXRREDXDVLQPXLVNAGHFSLCVNVVLEVKYSLXYXDAGEVXKADLSFVLGXVSSVVVPLQQKFEIHFLQENXQPVPLSGNPGYVVGLPLAAGFQPHKMSGIIQXXNRYGQLXILHSXXEQDCLALEGVRXPVLFGYXMQSGCKLRLXGALPCQLVAQKVKSLLWGQGFPDYVAPFGNSQAQDMLDWVPIHFIXQSFNRKDSCQLPGALVIEVKWXKYGSLLNPQAKIVNVXANLISSSFPEANSGNERXILISXAVXFVDVSAPAEAGFRAPPAINARLPFNFFFPFV

SEQ ID NO: 27310 - protein, 697 aa, Homo sapiens
  MOD_RES (49)..(49): Selenocysteine
  MOD_RES (53)..(53): Selenocysteine
  MOD_RES (70)..(70): Selenocysteine
  MOD_RES (78)..(78): Selenocysteine
  MOD_RES (84)..(84): Selenocysteine
  MOD_RES (95)..(95): Selenocysteine
  MOD_RES (110)..(110): Selenocysteine
  MOD_RES (122)..(122): Selenocysteine
  MOD_RES (150)..(150): Selenocysteine
  MOD_RES (158)..(158): Selenocysteine
  MOD_RES (176)..(176): Selenocysteine
  MOD_RES (195)..(196): Selenocysteine
  MOD_RES (204)..(204): Selenocysteine
  MOD_RES (223)..(225): Selenocysteine
  MOD_RES (244)..(244): Selenocysteine
  MOD_RES (269)..(269): Selenocysteine
  MOD_RES (287)..(287): Selenocysteine
  MOD_RES (294)..(294): Selenocysteine
  MOD_RES (322)..(322): Selenocysteine
  MOD_RES (348)..(348): Selenocysteine
  MOD_RES (357)..(357): Selenocysteine
  MOD_RES (364)..(364): Selenocysteine
  MOD_RES (366)..(366): Selenocysteine
  MOD_RES (368)..(368): Selenocysteine
  MOD_RES (375)..(375): Selenocysteine
  MOD_RES (393)..(393): Selenocysteine
  MOD_RES (415)..(415): Selenocysteine
  MOD_RES (457)..(458): Selenocysteine
  MOD_RES (471)..(471): Selenocysteine
  MOD_RES (474)..(474): Selenocysteine
  MOD_RES (499)..(499): Selenocysteine
  MOD_RES (516)..(516): Selenocysteine
  MOD_RES (580)..(580): Selenocysteine
  MOD_RES (589)..(589): Selenocysteine
  MOD_RES (603)..(603): Selenocysteine
  MOD_RES (631)..(631): Selenocysteine
  MOD_RES (638)..(638): Selenocysteine
  MOD_RES (657)..(657): Selenocysteine
  MOD_RES (680)..(680): Selenocysteine
  MOD_RES (690)..(690): Selenocysteine
MGFQPPAALLLRLFLLQGILRLLWGDLAFIPPFIRMSGPAVSASLVGDXEGVXVSLAVLQDEAGILPIPXCGVLNNEXEDWSVXVIPGAKVLEVXVRWKRGLDWCSSNEXDSFSESPCILQXLLVSASHNSSCSAHLLIQVEIYANSSLXHNASENVXVIPNQVYQPLGPCPCNLXAGACDVRCCCDQECSSNLXXLFRRSCFXGVFGGDVNPPFDQLCSAGXXXRGVPDWFPFLCVQSPLANXPFLGYFYHGAVSPKQDSSFEVYVDXDAKDFADFGYKQGDPIMXVKKAYFXIPQVSLAGQCMQNAPVAFLHNFDVKCVXNLELYQERDGIINAKIKNVALGGIVXPKVIYEEAXDLDKFIXNXEXPLNNGSXPRIVNVEEHYIFKWNNNXISEINVKIFRAEINAHQKGIMXQRFVVKFLSYNSGNEEELSGNPGYQLGKPVRALNINRMNNVXXLHLWQSAGRGLCXSAXFKPILFGENVLSGCLLEVGINENCXQLRENAVERLDSLIQAXHVAMRGNSDYADLSDGWLEIIRVDAPDPGADPLASSVNGMCLDIPAHLSIRILISDAGAVEGIXQQEILGVEXRFSSVNWQYQCGLXCEHKADLLPISASVQFIKIPAQLPHPLXRFQINYXEYDCNRNEVCWPQLLYPWXQYYQGELHSQCVAKGLLLLLFLXLALFLSNPWXRICKAYS

SEQ ID NO: 27311 - protein, 696 aa, Homo sapiens
  MOD_RES (49)..(49): Selenocysteine
  MOD_RES (53)..(53): Selenocysteine
  MOD_RES (70)..(70): Selenocysteine
  MOD_RES (78)..(78): Selenocysteine
  MOD_RES (84)..(84): Selenocysteine
  MOD_RES (94)..(94): Selenocysteine
  MOD_RES (109)..(109): Selenocysteine
  MOD_RES (121)..(121): Selenocysteine
  MOD_RES (149)..(149): Selenocysteine
  MOD_RES (157)..(157): Selenocysteine
  MOD_RES (175)..(175): Selenocysteine
  MOD_RES (194)..(195): Selenocysteine
  MOD_RES (203)..(203): Selenocysteine
  MOD_RES (222)..(224): Selenocysteine
  MOD_RES (243)..(243): Selenocysteine
  MOD_RES (268)..(268): Selenocysteine
  MOD_RES (286)..(286): Selenocysteine
  MOD_RES (293)..(293): Selenocysteine
  MOD_RES (321)..(321): Selenocysteine
  MOD_RES (347)..(347): Selenocysteine
  MOD_RES (356)..(356): Selenocysteine
  MOD_RES (363)..(363): Selenocysteine
  MOD_RES (365)..(365): Selenocysteine
  MOD_RES (367)..(367): Selenocysteine
  MOD_RES (374)..(374): Selenocysteine
  MOD_RES (392)..(392): Selenocysteine
  MOD_RES (414)..(414): Selenocysteine
  MOD_RES (456)..(457): Selenocysteine
  MOD_RES (470)..(470): Selenocysteine
  MOD_RES (473)..(473): Selenocysteine
  MOD_RES (498)..(498): Selenocysteine
  MOD_RES (515)..(515): Selenocysteine
  MOD_RES (579)..(579): Selenocysteine
  MOD_RES (588)..(588): Selenocysteine
  MOD_RES (602)..(602): Selenocysteine
  MOD_RES (630)..(630): Selenocysteine
  MOD_RES (637)..(637): Selenocysteine
  MOD_RES (656)..(656): Selenocysteine
  MOD_RES (679)..(679): Selenocysteine
  MOD_RES (689)..(689): Selenocysteine
MGFQPPAALLLRLFLLQGILRLLWGDLAFIPPFIRMSGPAVSASLVGDXEGVXVSLAVLQDEAGILPIPXCGVLNNEXEDWSVXVIPGAVLEVXVRWKRGLDWCSSNEXDSFSESPCILQXLLVSASHNSSCSAHLLIQVEIYANSSLXHNASENVXVIPNQVYQPLGPCPCNLXAGACDVRCCCDQECSSNLXXLFRRSCFXGVFGGDVNPPFDQLCSAGXXXRGVPDWFPFLCVQSPLANXPFLGYFYHGAVSPKQDSSFEVYVDXDAKDFADFGYKQGDPIMXVKKAYFXIPQVSLAGQCMQNAPVAFLHNFDVKCVXNLELYQERDGIINAKIKNVALGGIVXPKVIYEEAXDLDKFIXNXEXPLNNGSXPRIVNVEEHYIFKWNNNXISEINVKIFRAEINAHQKGIMXQRFVVKFLSYNSGNEEELSGNPGYQLGKPVRALNINRMNNVXXLHLWQSAGRGLCXSAXFKPILFGENVLSGCLLEVGINENCXQLRENAVERLDSLIQAXHVAMRGNSDYADLSDGWLEIIRVDAPDPGADPLASSVNGMCLDIPAHLSIRILISDAGAVEGIXQQEILGVEXRFSSVNWQYQCGLXCEHKADLLPISASVQFIKIPAQLPHPLXRFQINYXEYDCNRNEVCWPQLLYPWXQYYQGELHSQCVAKGLLLLLFLXLALFLSNPWXRICKAYS

SEQ ID NO: 27312 - protein, 60 aa, Homo sapiens
  MOD_RES (35)..(35): Selenocysteine
  MOD_RES (57)..(57): Selenocysteine
MGFQPPAALLLRLFLLQGILRLLWGDLGVYGAAVXSLSSLLLSECPALRSARPWSEXPRV

SEQ ID NO: 27313 - protein, 625 aa, Homo sapiens
  MOD_RES (5)..(5): Selenocysteine
  MOD_RES (21)..(21): Selenocysteine
  MOD_RES (52)..(52): Selenocysteine
  MOD_RES (60)..(60): Selenocysteine
  MOD_RES (64)..(64): Selenocysteine
  MOD_RES (72)..(72): Selenocysteine
  MOD_RES (74)..(74): Selenocysteine
  MOD_RES (83)..(83): Selenocysteine
  MOD_RES (87)..(87): Selenocysteine
  MOD_RES (90)..(90): Selenocysteine
  MOD_RES (98)..(98): Selenocysteine
  MOD_RES (113)..(113): Selenocysteine
  MOD_RES (134)..(134): Selenocysteine
  MOD_RES (199)..(199): Selenocysteine
  MOD_RES (214)..(214): Selenocysteine
  MOD_RES (216)..(216): Selenocysteine
  MOD_RES (219)..(219): Selenocysteine
  MOD_RES (234)..(234): Selenocysteine
  MOD_RES (271)..(272): Selenocysteine
  MOD_RES (274)..(274): Selenocysteine
  MOD_RES (285)..(285): Selenocysteine
  MOD_RES (299)..(299): Selenocysteine
  MOD_RES (308)..(308): Selenocysteine
  MOD_RES (322)..(322): Selenocysteine
  MOD_RES (334)..(334): Selenocysteine
  MOD_RES (343)..(343): Selenocysteine
  MOD_RES (348)..(348): Selenocysteine
  MOD_RES (351)..(351): Selenocysteine
  MOD_RES (364)..(364): Selenocysteine
  MOD_RES (367)..(367): Selenocysteine
  MOD_RES (389)..(389): Selenocysteine
  MOD_RES (394)..(394): Selenocysteine
  MOD_RES (413)..(413): Selenocysteine
  MOD_RES (421)..(421): Selenocysteine
  MOD_RES (467)..(467): Selenocysteine
  MOD_RES (492)..(492): Selenocysteine
  MOD_RES (507)..(507): Selenocysteine
  MOD_RES (554)..(554): Selenocysteine
  MOD_RES (559)..(560): Selenocysteine
  MOD_RES (568)..(568): Selenocysteine
  MOD_RES (624)..(624): Selenocysteine
MRLEXAEAYVGPGGPECPMRXPQLALLQVFFLVFPDGVRPQPSSSPSGAVPXSLELQRGXDGGXLQSPSEAXAXRPAVPGLPXVVPXLVXPSAPGNRXVDLFPVLPICVCDLXPGACDINCCCDRDCYLLHPRXVFSFCLPGSVRSSSWVCVDNSVIFRSNSPFPSRVFMDSNGIRQFCVHVNNSNLNYFQKLQKVNAXNFQALAAEFGGESFXSXFQXQSPPSFYRAGDPILXYFPKWSVISLLRQPAGVGAGGLCAESNPAGFLESKSXXCXRFFKNLASSCXLDSALNAASYYNFXVLKVPRSMXDPQNMEFQVPVILXSQANAPLLAGNXCQNVVSQVXYEIEXNGXFGIQKVSVSLGQXNLXVEPGASLQQHFILRFRAFQQSXAASLXSPRSGNPGYIVGKPLLALXDDISYSMXLLQSQGNGSCSVKRHEVQFGVNAISGCKLRLKKADCSHLQQEIYQXLHGRPRPEYVAIFGNADPAQKGGWXRILNRHCSISAINCXSCCLIPVSLEIQVLWAYVGLLSNPQAHVSGVRFLYQCQSIQDSQQVXEVSLXXLVNFVDIXQKPQPPRGQPKMDWKWPFDFFPFKVAFSRGVFSQKCSVSPILILCLLLLGVLNLEXM

SEQ ID NO: 27314 - protein, 459 aa, Homo sapiens
  MOD_RES (3)..(3): Selenocysteine
  MOD_RES (34)..(34): Selenocysteine
  MOD_RES (42)..(42): Selenocysteine
  MOD_RES (46)..(46): Selenocysteine
  MOD_RES (54)..(54): Selenocysteine
  MOD_RES (56)..(56): Selenocysteine
  MOD_RES (65)..(65): Selenocysteine
  MOD_RES (69)..(69): Selenocysteine
  MOD_RES (72)..(72): Selenocysteine
  MOD_RES (80)..(80): Selenocysteine
  MOD_RES (95)..(95): Selenocysteine
  MOD_RES (116)..(116): Selenocysteine
  MOD_RES (174)..(175): Selenocysteine
  MOD_RES (177)..(177): Selenocysteine
  MOD_RES (188)..(188): Selenocysteine
  MOD_RES (202)..(202): Selenocysteine
  MOD_RES (211)..(211): Selenocysteine
  MOD_RES (223)..(223): Selenocysteine
  MOD_RES (228)..(228): Selenocysteine
  MOD_RES (247)..(247): Selenocysteine
  MOD_RES (255)..(255): Selenocysteine
  MOD_RES (301)..(301): Selenocysteine
  MOD_RES (326)..(326): Selenocysteine
  MOD_RES (341)..(341): Selenocysteine
  MOD_RES (388)..(388): Selenocysteine
  MOD_RES (393)..(394): Selenocysteine
  MOD_RES (402)..(402): Selenocysteine
  MOD_RES (458)..(458): Selenocysteine
MRXPQLALLQVFFLVFPDGVRPQPSSSPSGAVPXSLELQRGXDGGXLQSPSEAXAXRPAVPGLPXVVPXLVXPSAPGNRXVDLFPVLPICVCDLXPGACDINCCCDRDCYLLHPRXVFSFCLPGSVRSSSWVCVDNSVIFRSNSPFPSRVFMDSNGIRQFCVHVNNCFLESKSXXCXRFFKNLASSCXLDSALNAASYYNFXVLKVPRSMXDPQNMEAFQQSXAASLXSPRSGNPGYIVGKPLLALXDDISYSMXLLQSQGNGSCSVKRHEVQFGVNAISGCKLRLKKADCSHLQQEIYQXLHGRPRPEYVAIFGNADPAQKGGWXRILNRHCSISAINCXSCCLIPVSLEIQVLWAYVGLLSNPQAHVSGVRFLYQCQSIQDSQQVXEVSLXXLVNFVDIXQKPQPPRGQPKMDWKWPFDFFPFKVAFSRGVFSQKCSVSPILILCLLLLGVLNLEXM

SEQ ID NO: 27315 - protein, 443 aa, Homo sapiens
  MOD_RES (3)..(3): Selenocysteine
  MOD_RES (34)..(34): Selenocysteine
  MOD_RES (42)..(42): Selenocysteine
  MOD_RES (46)..(46): Selenocysteine
  MOD_RES (54)..(54): Selenocysteine
  MOD_RES (56)..(56): Selenocysteine
  MOD_RES (65)..(65): Selenocysteine
  MOD_RES (69)..(69): Selenocysteine
  MOD_RES (72)..(72): Selenocysteine
  MOD_RES (80)..(80): Selenocysteine
  MOD_RES (95)..(95): Selenocysteine
  MOD_RES (116)..(116): Selenocysteine
  MOD_RES (181)..(181): Selenocysteine
  MOD_RES (196)..(196): Selenocysteine
  MOD_RES (198)..(198): Selenocysteine
  MOD_RES (201)..(201): Selenocysteine
  MOD_RES (216)..(216): Selenocysteine
  MOD_RES (253)..(254): Selenocysteine
  MOD_RES (256)..(256): Selenocysteine
  MOD_RES (267)..(267): Selenocysteine
  MOD_RES (281)..(281): Selenocysteine
  MOD_RES (290)..(290): Selenocysteine
  MOD_RES (304)..(304): Selenocysteine
  MOD_RES (316)..(316): Selenocysteine
  MOD_RES (325)..(325): Selenocysteine
  MOD_RES (330)..(330): Selenocysteine
  MOD_RES (333)..(333): Selenocysteine
  MOD_RES (346)..(346): Selenocysteine
  MOD_RES (349)..(349): Selenocysteine
  MOD_RES (371)..(371): Selenocysteine
  MOD_RES (376)..(376): Selenocysteine
  MOD_RES (395)..(395): Selenocysteine
  MOD_RES (423)..(423): Selenocysteine
MRXPQLALLQVFFLVFPDGVRPQPSSSPSGAVPXSLELQRGXDGGXLQSPSEAXAXRPAVPGLPXVVPXLVXPSAPGNRXVDLFPVLPICVCDLXPGACDINCCCDRDCYLLHPRXVFSFCLPGSVRSSSWVCVDNSVIFRSNSPFPSRVFMDSNGIRQFCVHVNNSNLNYFQKLQKVNAXNFQALAAEFGGESFXSXFQXQSPPSFYRAGDPILXYFPKWSVISLLRQPAGVGAGGLCAESNPAGFLESKSXXCXRFFKNLASSCXLDSALNAASYYNFXVLKVPRSMXDPQNMEFQVPVILXSQANAPLLAGNXCQNVVSQVXYEIEXNGXFGIQKVSVSLGQXNLXVEPGASLQQHFILRFRAFQQSXAASLXSPRSGNPGYIVGKPLLALXDDISYSVSFLELGGLLQPNEKSCKGFQXYVRLAKGEEFFVHYNEVLIY

SEQ ID NO: 27316 - protein, 607 aa, Homo sapiens
  MOD_RES (3)..(3): Selenocysteine
  MOD_RES (34)..(34): Selenocysteine
  MOD_RES (42)..(42): Selenocysteine
  MOD_RES (46)..(46): Selenocysteine
  MOD_RES (54)..(54): Selenocysteine
  MOD_RES (56)..(56): Selenocysteine
  MOD_RES (65)..(65): Selenocysteine
  MOD_RES (69)..(69): Selenocysteine
  MOD_RES (72)..(72): Selenocysteine
  MOD_RES (80)..(80): Selenocysteine
  MOD_RES (95)..(95): Selenocysteine
  MOD_RES (116)..(116): Selenocysteine
  MOD_RES (181)..(181): Selenocysteine
  MOD_RES (196)..(196): Selenocysteine
  MOD_RES (198)..(198): Selenocysteine
  MOD_RES (201)..(201): Selenocysteine
  MOD_RES (216)..(216): Selenocysteine
  MOD_RES (253)..(254): Selenocysteine
  MOD_RES (256)..(256): Selenocysteine
  MOD_RES (267)..(267): Selenocysteine
  MOD_RES (281)..(281): Selenocysteine
  MOD_RES (290)..(290): Selenocysteine
  MOD_RES (304)..(304): Selenocysteine
  MOD_RES (316)..(316): Selenocysteine
  MOD_RES (325)..(325): Selenocysteine
  MOD_RES (330)..(330): Selenocysteine
  MOD_RES (333)..(333): Selenocysteine
  MOD_RES (346)..(346): Selenocysteine
  MOD_RES (349)..(349): Selenocysteine
  MOD_RES (371)..(371): Selenocysteine
  MOD_RES (376)..(376): Selenocysteine
  MOD_RES (395)..(395): Selenocysteine
  MOD_RES (403)..(403): Selenocysteine
  MOD_RES (449)..(449): Selenocysteine
  MOD_RES (474)..(474): Selenocysteine
  MOD_RES (489)..(489): Selenocysteine
  MOD_RES (536)..(536): Selenocysteine
  MOD_RES (541)..(542): Selenocysteine
  MOD_RES (550)..(550): Selenocysteine
  MOD_RES (606)..(606): Selenocysteine
MRXPQLALLQVFFLVFPDGVRPQPSSSPSGAVPXSLELQRGXDGGXLQSPSEAXAXRPAVPGLPXVVPXLVXPSAPGNRXVDLFPVLPICVCDLXPGACDINCCCDRDCYLLHPRXVFSFCLPGSVRSSSWVCVDNSVIFRSNSPFPSRVFMDSNGIRQFCVHVNNSNLNYFQKLQKVNAXNFQALAAEFGGESFXSXFQXQSPPSFYRAGDPILXYFPKWSVISLLRQPAGVGAGGLCAESNPAGFLESKSXXCXRFFKNLASSCXLDSALNAASYYNFXVLKVPRSMXDPQNMEFQVPVILXSQANAPLLAGNXCQNVVSQVXYEIEXNGXFGIQKVSVSLGQXNLXVEPGASLQQHFILRFRAFQQSXAASLXSPRSGNPGYIVGKPLLALXDDISYSMXLLQSQGNGSCSVKRHEVQFGVNAISGCKLRLKKADCSHLQQEIYQXLHGRPRPEYVAIFGNADPAQKGGWXRILNRHCSISAINCXSCCLIPVSLEIQVLWAYVGLLSNPQAHVSGVRFLYQCQSIQDSQQVXEVSLXXLVNFVDIXQKPQPPRGQPKMDWKWPFDFFPFKVAFSRGVFSQKCSVSPILILCLLLLGVLNLEXM

SEQ ID NO: 27317 - protein, 172 aa, Homo sapiens
  MOD_RES (65)..(65): Selenocysteine
  MOD_RES (72)..(72): Selenocysteine
  MOD_RES (106)..(106): Selenocysteine
  MOD_RES (147)..(147): Selenocysteine
  MOD_RES (156)..(158): Selenocysteine
MAISKVFELGLVAGLGHQEFARPSRGYLAFRDDSIWPQEEPAIRPRSSQRVPPMGIQHSKELNRXCCLNGGXCMLGSFCACPPSFYGRNCEHDVRKENCGSVPHDXWLPKKCSLCKCWHGQLRCFPQAFLPGCDGLVMDEHLVASRXPELPPSARXXXFMLVGICLSIQSYY

SEQ ID NO: 27318 - protein, 188 aa, Homo sapiens
  MOD_RES (81)..(81): Selenocysteine
  MOD_RES (88)..(88): Selenocysteine
  MOD_RES (122)..(122): Selenocysteine
  MOD_RES (163)..(163): Selenocysteine
  MOD_RES (172)..(174): Selenocysteine
MDCRKMARFSYSVIWIMAISKVFELGLVAGLGHQEFARPSRGYLAFRDDSIWPQEEPAIRPRSSQRVPPMGIQHSKELNRXCCLNGGXCMLGSFCACPPSFYGRNCEHDVRKENCGSVPHDXWLPKKCSLCKCWHGQLRCFPQAFLPGCDGLVMDEHLVASRXPELPPSARXXXFMLVGICLSIQSYY

SEQ ID NO: 27319 - protein, 304 aa, Homo sapiens
  MOD_RES (3)..(3): Selenocysteine
  MOD_RES (21)..(21): Selenocysteine
  MOD_RES (30)..(30): Selenocysteine
  MOD_RES (34)..(35): Selenocysteine
  MOD_RES (38)..(39): Selenocysteine
  MOD_RES (48)..(48): Selenocysteine
  MOD_RES (60)..(60): Selenocysteine
  MOD_RES (114)..(114): Selenocysteine
  MOD_RES (122)..(122): Selenocysteine
  MOD_RES (144)..(144): Selenocysteine
  MOD_RES (166)..(166): Selenocysteine
  MOD_RES (172)..(172): Selenocysteine
  MOD_RES (198)..(198): Selenocysteine
  MOD_RES (205)..(205): Selenocysteine
  MOD_RES (213)..(213): Selenocysteine
  MOD_RES (238)..(238): Selenocysteine
  MOD_RES (241)..(241): Selenocysteine
  MOD_RES (250)..(250): Selenocysteine
MAXWKSPCFLYCLFILGPRLXGQNNSVDLXNEEXXDSXXSKISPSEDXQQENGSMFSLIXWNIDGLDLNNLSERARGVCSYLALYSPDVIFLQEVIPPYYSYLKKRSSNYEIIXGHEEGYFXAIMLKKSRVKLKSQEIIPFPSXKMMRNLLCVHVNVSGNELCLMXSHLESXRGHAAERMNQLKMVLKKMQEAPESAXVIFAGDXNLRDREVXRCGGLPNNIVDVWEFLGKPKHCQYXWDXQMNSNLGIXAACKLRFDRIFFRAAAEEGHIIPRSLDLLGLEKLDCGRFPSDHWGLLCNLDIIL

SEQ ID NO: 27320 - protein, 362 aa, Homo sapiens
  MOD_RES (77)..(77): Selenocysteine
  MOD_RES (83)..(83): Selenocysteine
  MOD_RES (88)..(88): Selenocysteine
  MOD_RES (92)..(93): Selenocysteine
  MOD_RES (96)..(97): Selenocysteine
  MOD_RES (106)..(106): Selenocysteine
  MOD_RES (118)..(118): Selenocysteine
  MOD_RES (172)..(172): Selenocysteine
  MOD_RES (180)..(180): Selenocysteine
  MOD_RES (202)..(202): Selenocysteine
  MOD_RES (224)..(224): Selenocysteine
  MOD_RES (230)..(230): Selenocysteine
  MOD_RES (256)..(256): Selenocysteine
  MOD_RES (263)..(263): Selenocysteine
  MOD_RES (271)..(271): Selenocysteine
  MOD_RES (296)..(296): Selenocysteine
  MOD_RES (299)..(299): Selenocysteine
  MOD_RES (308)..(308): Selenocysteine
MELGSCLEGGREAAEEEGEPEVKKRRLLCVEFASVASCDAAVAQCFLAENDWEMERALNSYFEPPVEESALERRPEXISEPKXYVDLXNEEXXDSXXSKISPSEDXQQENGSMFSLIXWNIDGLDLNNLSERARGVCSYLALYSPDVIFLQEVIPPYYSYLKKRSSNYEIIXGHEEGYFXAIMLKKSRVKLKSQEIIPFPSXKMMRNLLCVHVNVSGNELCLMXSHLESXRGHAAERMNQLKMVLKKMQEAPESAXVIFAGDXNLRDREVXRCGGLPNNIVDVWEFLGKPKHCQYXWDXQMNSNLGIXAACKLRFDRIFFRAAAEEGHIIPRSLDLLGLEKLDCGRFPSDHWGLLCNLDIIL

SEQ ID NO: 27321 - protein, 368 aa, Homo sapiens
  MOD_RES (81)..(81): Selenocysteine
  MOD_RES (84)..(84): Selenocysteine
  MOD_RES (86)..(86): Selenocysteine
  MOD_RES (113)..(113): Selenocysteine
  MOD_RES (134)..(134): Selenocysteine
  MOD_RES (149)..(149): Selenocysteine
  MOD_RES (163)..(163): Selenocysteine
  MOD_RES (187)..(187): Selenocysteine
  MOD_RES (213)..(214): Selenocysteine
  MOD_RES (251)..(251): Selenocysteine
  MOD_RES (261)..(261): Selenocysteine
  MOD_RES (263)..(263): Selenocysteine
  MOD_RES (266)..(266): Selenocysteine
  MOD_RES (281)..(281): Selenocysteine
  MOD_RES (328)..(328): Selenocysteine
  MOD_RES (334)..(334): Selenocysteine
  MOD_RES (338)..(338): Selenocysteine
  MOD_RES (341)..(341): Selenocysteine
IEPSSWSGSESPAENMERMSDSADKPIDNDAEGVWSPDIEQSFQEALAIYPPCGRRKIILSDEGKMYGRNELIARYIKLRXGKXRXRKQVSSHIQVLARRKSRDFHSKLKDQXAKDKALQHMAAMSSAQIVSAXAIHNKLGLPGIPRPXFPGAPGFWPGMIQXGQPGSSQDVKPFVQQAYPIQPAVXAPIPGFEPASAPAPSVPAWQGRSIGXXKLRLVEFSAFLEQQRDPDSADLNCNIQDDAGAFYGVXSQYESSENMXVXCSXKVCSFGKQVVEKVEXEYARFENGRFVYRINRSPMCEYMINFIHKLKHLPEKYMMNSVLENFXILLVVXNRDXQEXLLCMACVFEVSNSEHGAQHHIYRLVKD

SEQ ID NO: 27322 - protein, 426 aa, Homo sapiens
  MOD_RES (81)..(81): Selenocysteine
  MOD_RES (84)..(84): Selenocysteine
  MOD_RES (86)..(86): Selenocysteine
  MOD_RES (113)..(113): Selenocysteine
  MOD_RES (134)..(134): Selenocysteine
  MOD_RES (149)..(149): Selenocysteine
  MOD_RES (163)..(163): Selenocysteine
  MOD_RES (187)..(187): Selenocysteine
  MOD_RES (213)..(214): Selenocysteine
  MOD_RES (309)..(309): Selenocysteine
  MOD_RES (319)..(319): Selenocysteine
  MOD_RES (321)..(321): Selenocysteine
  MOD_RES (324)..(324): Selenocysteine
  MOD_RES (339)..(339): Selenocysteine
  MOD_RES (386)..(386): Selenocysteine
  MOD_RES (392)..(392): Selenocysteine
  MOD_RES (396)..(396): Selenocysteine
  MOD_RES (399)..(399): Selenocysteine
IEPSSWSGSESPAENMERMSDSADKPIDNDAEGVWSPDIEQSFQEALAIYPPCGRRKIILSDEGKMYGRNELIARYIKLRXGKXRXRKQVSSHIQVLARRKSRDFHSKLKDQXAKDKALQHMAAMSSAQIVSAXAIHNKLGLPGIPRPXFPGAPGFWPGMIQXGQPGSSQDVKPFVQQAYPIQPAVXAPIPGFEPASAPAPSVPAWQGRSIGXXKLRLVEFSAFLEQQRDPDSYNKHLFVHIGHANHSYSDPLLESVDIRQIYDKFPEKKGGLKELFGKGPQNAFFLVKFWADLNCNIQDDAGAFYGVXSQYESSENMXVXCSXKVCSFGKQVVEKVEXEYARFENGRFVYRINRSPMCEYMINFIHKLKHLPEKYMMNSVLENFXILLVVXNRDXQEXLLCMACVFEVSNSEHGAQHHIYRLVKD

SEQ ID NO: 27323 - protein, 357 aa, Homo sapiens
  MOD_RES (66)..(66): Selenocysteine
  MOD_RES (69)..(69): Selenocysteine
  MOD_RES (71)..(71): Selenocysteine
  MOD_RES (97)..(97): Selenocysteine
  MOD_RES (102)..(102): Selenocysteine
  MOD_RES (123)..(123): Selenocysteine
  MOD_RES (138)..(138): Selenocysteine
  MOD_RES (152)..(152): Selenocysteine
  MOD_RES (176)..(176): Selenocysteine
  MOD_RES (202)..(203): Selenocysteine
  MOD_RES (240)..(240): Selenocysteine
  MOD_RES (250)..(250): Selenocysteine
  MOD_RES (252)..(252): Selenocysteine
  MOD_RES (255)..(255): Selenocysteine
  MOD_RES (270)..(270): Selenocysteine
  MOD_RES (317)..(317): Selenocysteine
  MOD_RES (323)..(323): Selenocysteine
  MOD_RES (327)..(327): Selenocysteine
  MOD_RES (330)..(330): Selenocysteine
MERMSDSADKPIDNDAEGVWSPDIEQSFQEALAIYPPCGRRKIILSDEGKMYGRNELIARYIKLRXGKXRXRKQVSSHIQVLARRKSRDFHSKLKVXSMDQXAKDKALQHMAAMSSAQIVSAXAIHNKLGLPGIPRPXFPGAPGFWPGMIQXGQPGSSQDVKPFVQQAYPIQPAVXAPIPGFEPASAPAPSVPAWQGRSIGXXKLRLVEFSAFLEQQRDPDSADLNCNIQDDAGAFYGVXSQYESSENMXVXCSXKVCSFGKQVVEKVEXEYARFENGRFVYRINRSPMCEYMINFIHKLKHLPEKYMMNSVLENFXILLVVXNRDXQEXLLCMACVFEVSNSEHGAQHHIYRLVKD

SEQ ID NO: 27324 - protein, 330 aa, Homo sapiens
  MOD_RES (10)..(10): Selenocysteine
  MOD_RES (12)..(12): Selenocysteine
  MOD_RES (17)..(17): Selenocysteine
  MOD_RES (38)..(38): Selenocysteine
  MOD_RES (53)..(53): Selenocysteine
  MOD_RES (67)..(67): Selenocysteine
  MOD_RES (91)..(91): Selenocysteine
  MOD_RES (117)..(118): Selenocysteine
  MOD_RES (213)..(213): Selenocysteine
  MOD_RES (223)..(223): Selenocysteine
  MOD_RES (225)..(225): Selenocysteine
  MOD_RES (228)..(228): Selenocysteine
  MOD_RES (243)..(243): Selenocysteine
  MOD_RES (290)..(290): Selenocysteine
  MOD_RES (296)..(296): Selenocysteine
  MOD_RES (300)..(300): Selenocysteine
  MOD_RES (303)..(303): Selenocysteine
MRYVLSWCVXVXFKDQXAKDKALQHMAAMSSAQIVSAXAIHNKLGLPGIPRPXFPGAPGFWPGMIQXGQPGSSQDVKPFVQQAYPIQPAVXAPIPGFEPASAPAPSVPAWQGRSIGXXKLRLVEFSAFLEQQRDPDSYNKHLFVHIGHANHSYSDPLLESVDIRQIYDKFPEKKGGLKELFGKGPQNAFFLVKFWADLNCNIQDDAGAFYGVXSQYESSENMXVXCSXKVCSFGKQVVEKVEXEYARFENGRFVYRINRSPMCEYMINFIHKLKHLPEKYMMNSVLENFXILLVVXNRDXQEXLLCMACVFEVSNSEHGAQHHIYRLVKD

SEQ ID NO: 27325 - protein, 159 aa, Homo sapiens
  MOD_RES (1)..(1): Any amino acid
  MOD_RES (48)..(48): Selenocysteine
  MOD_RES (89)..(89): Selenocysteine
XDAPPPLHLCPERGQQPSAPAGPGAGAVLGRGGVAGPRDREPGREPGXEQRAGEAAPKFASDSPGAAVAPWAEVYFLEKAPGFGLENPXAKIEPSSWSGSESPAENMERMSDSADKPIDNDAEGVWSPDIEQSFQEALAIYPPCGRRKIILSDEGKMYG

SEQ ID NO: 27326 - protein, 116 aa, Homo sapiens
  MOD_RES (3)..(3): Selenocysteine
  MOD_RES (22)..(22): Selenocysteine
  MOD_RES (52)..(52): Selenocysteine
  MOD_RES (55)..(55): Selenocysteine
  MOD_RES (59)..(59): Selenocysteine
  MOD_RES (63)..(63): Selenocysteine
  MOD_RES (81)..(81): Selenocysteine
  MOD_RES (94)..(94): Selenocysteine
MAXMSSAQLISAPSLQAKLGPXGPQASELFQFWSGGSGPPWNVPDVKPFSQXPFXLSLXPPSXDLPGYEPPQALSPLPPPXPSPPAWQARGLGXARLQLVEFSAFVEPPDAVDSYQ

SEQ ID NO: 27327 - protein, 319 aa, Homo sapiens
  MOD_RES (3)..(3): Selenocysteine
  MOD_RES (22)..(22): Selenocysteine
  MOD_RES (55)..(55): Selenocysteine
  MOD_RES (58)..(58): Selenocysteine
  MOD_RES (62)..(62): Selenocysteine
  MOD_RES (66)..(66): Selenocysteine
  MOD_RES (84)..(84): Selenocysteine
  MOD_RES (97)..(97): Selenocysteine
  MOD_RES (212)..(212): Selenocysteine
  MOD_RES (214)..(214): Selenocysteine
  MOD_RES (232)..(232): Selenocysteine
  MOD_RES (279)..(279): Selenocysteine
  MOD_RES (285)..(285): Selenocysteine
  MOD_RES (289)..(289): Selenocysteine
  MOD_RES (296)..(296): Selenocysteine
  MOD_RES (304)..(304): Selenocysteine
MAXMSSAQLISAPSLQAKLGPXGPQVVQASELFQFWSGGSGPPWNVPDVKPFSQXPFXLSLXPPSXDLPGYEPPQALSPLPPPXPSPPAWQARGLGXARLQLVEFSAFVEPPDAVDSYQRHLFVHISQHCPSPGAPPLESVDVRQIYDKFPEKKGGLRELYDRGPPHAFFLVKFWADLNWGPSGEEAGAGGSISSGGFYGVSSQYESLEHMXLXCSSKVCSFGKQVVEKVEXERAQLEDGRFVYRLLRSPMCEYLVNFLHKLRQLPERYMMNSVLENFXILQVVXNRDXQELLLCXAYVFEVSXSERGAQHHIYRLVRD

SEQ ID NO: 27328 - protein, 451 aa, Homo sapiens
  MOD_RES (17)..(17): Selenocysteine
  MOD_RES (27)..(27): Selenocysteine
  MOD_RES (91)..(91): Selenocysteine
  MOD_RES (94)..(94): Selenocysteine
  MOD_RES (96)..(96): Selenocysteine
  MOD_RES (135)..(135): Selenocysteine
  MOD_RES (138)..(138): Selenocysteine
  MOD_RES (157)..(157): Selenocysteine
  MOD_RES (187)..(187): Selenocysteine
  MOD_RES (190)..(190): Selenocysteine
  MOD_RES (194)..(194): Selenocysteine
  MOD_RES (198)..(198): Selenocysteine
  MOD_RES (216)..(216): Selenocysteine
  MOD_RES (229)..(229): Selenocysteine
  MOD_RES (344)..(344): Selenocysteine
  MOD_RES (346)..(346): Selenocysteine
  MOD_RES (364)..(364): Selenocysteine
  MOD_RES (411)..(411): Selenocysteine
  MOD_RES (417)..(417): Selenocysteine
  MOD_RES (421)..(421): Selenocysteine
  MOD_RES (428)..(428): Selenocysteine
  MOD_RES (436)..(436): Selenocysteine
MGEPRAGAALDDGSGWXGSEEGSEEGXGGSEGAGGDGGPDAEGVWSPDIEQSFQEALAIYPPCGRRKIILSDEGKMYGRNELIARYIKLRXGKXRXRKQVSSHIQVLARRKSREIQSKLKALNVDQVSKDKAFQXMAXMSSAQLISAPSLQAKLGPXGPQASELFQFWSGGSGPPWNVPDVKPFSQXPFXLSLXPPSXDLPGYEPPQALSPLPPPXPSPPAWQARGLGXARLQLVEFSAFVEPPDAVDSYQRHLFVHISQHCPSPGAPPLESVDVRQIYDKFPEKKGGLRELYDRGPPHAFFLVKFWADLNWGPSGEEAGAGGSISSGGFYGVSSQYESLEHMXLXCSSKVCSFGKQVVEKVEXERAQLEDGRFVYRLLRSPMCEYLVNFLHKLRQLPERYMMNSVLENFXILQVVXNRDXQELLLCXAYVFEVSXSERGAQHHIYRLVRD

SEQ ID NO: 27329 - protein, 447 aa, Homo sapiens
  MOD_RES (17)..(17): Selenocysteine
  MOD_RES (27)..(27): Selenocysteine
  MOD_RES (91)..(91): Selenocysteine
  MOD_RES (94)..(94): Selenocysteine
  MOD_RES (96)..(96): Selenocysteine
  MOD_RES (131)..(131): Selenocysteine
  MOD_RES (134)..(134): Selenocysteine
  MOD_RES (153)..(153): Selenocysteine
  MOD_RES (183)..(183): Selenocysteine
  MOD_RES (186)..(186): Selenocysteine
  MOD_RES (190)..(190): Selenocysteine
  MOD_RES (194)..(194): Selenocysteine
  MOD_RES (212)..(212): Selenocysteine
  MOD_RES (225)..(225): Selenocysteine
  MOD_RES (340)..(340): Selenocysteine
  MOD_RES (342)..(342): Selenocysteine
  MOD_RES (360)..(360): Selenocysteine
  MOD_RES (407)..(407): Selenocysteine
  MOD_RES (413)..(413): Selenocysteine
  MOD_RES (417)..(417): Selenocysteine
  MOD_RES (424)..(424): Selenocysteine
  MOD_RES (432)..(432): Selenocysteine
MGEPRAGAALDDGSGWXGSEEGSEEGXGGSEGAGGDGGPDAEGVWSPDIEQSFQEALAIYPPCGRRKIILSDEGKMYGRNELIARYIKLRXGKXRXRKQVSSHIQVLARRKSREIQSKLKDQVSKDKAFQXMAXMSSAQLISAPSLQAKLGPXGPQASELFQFWSGGSGPPWNVPDVKPFSQXPFXLSLXPPSXDLPGYEPPQALSPLPPPXPSPPAWQARGLGXARLQLVEFSAFVEPPDAVDSYQRHLFVHISQHCPSPGAPPLESVDVRQIYDKFPEKKGGLRELYDRGPPHAFFLVKFWADLNWGPSGEEAGAGGSISSGGFYGVSSQYESLEHMXLXCSSKVCSFGKQVVEKVEXERAQLEDGRFVYRLLRSPMCEYLVNFLHKLRQLPERYMMNSVLENFXILQVVXNRDXQELLLCXAYVFEVSXSERGAQHHIYRLVRD

SEQ ID NO: 27330 - protein, 450 aa, Homo sapiens
  MOD_RES (17)..(17): Selenocysteine
  MOD_RES (27)..(27): Selenocysteine
  MOD_RES (91)..(91): Selenocysteine
  MOD_RES (94)..(94): Selenocysteine
  MOD_RES (96)..(96): Selenocysteine
  MOD_RES (131)..(131): Selenocysteine
  MOD_RES (134)..(134): Selenocysteine
  MOD_RES (153)..(153): Selenocysteine
  MOD_RES (186)..(186): Selenocysteine
  MOD_RES (189)..(189): Selenocysteine
  MOD_RES (193)..(193): Selenocysteine
  MOD_RES (197)..(197): Selenocysteine
  MOD_RES (215)..(215): Selenocysteine
  MOD_RES (228)..(228): Selenocysteine
  MOD_RES (343)..(343): Selenocysteine
  MOD_RES (345)..(345): Selenocysteine
  MOD_RES (363)..(363): Selenocysteine
  MOD_RES (410)..(410): Selenocysteine
  MOD_RES (416)..(416): Selenocysteine
  MOD_RES (420)..(420): Selenocysteine
  MOD_RES (427)..(427): Selenocysteine
  MOD_RES (435)..(435): Selenocysteine
MGEPRAGAALDDGSGWXGSEEGSEEGXGGSEGAGGDGGPDAEGVWSPDIEQSFQEALAIYPPCGRRKIILSDEGKMYGRNELIARYIKLRXGKXRXRKQVSSHIQVLARRKSREIQSKLKDQVSKDKAFQXMAXMSSAQLISAPSLQAKLGPXGPQVVQASELFQFWSGGSGPPWNVPDVKPFSQXPFXLSLXPPSXDLPGYEPPQALSPLPPPXPSPPAWQARGLGXARLQLVEFSAFVEPPDAVDSYQRHLFVHISQHCPSPGAPPLESVDVRQIYDKFPEKKGGLRELYDRGPPHAFFLVKFWADLNWGPSGEEAGAGGSISSGGFYGVSSQYESLEHMXLXCSSKVCSFGKQVVEKVEXERAQLEDGRFVYRLLRSPMCEYLVNFLHKLRQLPERYMMNSVLENFXILQVVXNRDXQELLLCXAYVFEVSXSERGAQHHIYRLVRD

SEQ ID NO: 27331 - protein, 74 aa, Homo sapiens
  MOD_RES (1)..(1): Any amino acid
  MOD_RES (13)..(13): Selenocysteine
  MOD_RES (16)..(16): Selenocysteine
  MOD_RES (35)..(35): Selenocysteine
XKDQVSKDKAFQXMAXMSSAQLISAPSLQAKLGPXGPQVVQASELFQFWSGGSGPPWNVPEKKLLPRSPPADFP

SEQ ID NO: 27332 - protein, 435 aa, Homo sapiens
  MOD_RES (81)..(81): Selenocysteine
  MOD_RES (84)..(84): Selenocysteine
  MOD_RES (86)..(86): Selenocysteine
  MOD_RES (157)..(157): Selenocysteine
  MOD_RES (195)..(195): Selenocysteine
  MOD_RES (219)..(219): Selenocysteine
  MOD_RES (242)..(242): Selenocysteine
  MOD_RES (254)..(254): Selenocysteine
  MOD_RES (306)..(306): Selenocysteine
  MOD_RES (328)..(328): Selenocysteine
  MOD_RES (333)..(333): Selenocysteine
  MOD_RES (348)..(348): Selenocysteine
  MOD_RES (395)..(395): Selenocysteine
  MOD_RES (401)..(401): Selenocysteine
  MOD_RES (408)..(408): Selenocysteine
  MOD_RES (420)..(420): Selenocysteine
IASNSWNASSSPGEAREDGPEGLDKGLDNDAEGVWSPDIEQSFQEALAIYPPCGRRKIILSDEGKMYGRNELIARYIKLRXGKXRXRKQVSSHIQVLARKKVREYQVGIKAMNLDQVSKDKALQSMASMSSAQIVSASVLQNKFSPPSPLPQAVFSXSSRFWSSPPLLGQQPGPSQDIKPFAQPAYPIQPPLPPXLSSYEPLAPLPSAAASVPVWQDRXIASSRLRLLEYSAFMEVQRDPDXYSKHLFVHIGQXNPAFSDPPLEAVDVRQIYDKFPEKKGGLKELYEKGPPNAFFLVKFWADLNSXIQEGPGAFYGVSSQYSSADSMXISVSXKVCSFGKQVVEKVEXEYARLENGRFVYRIHRSPMCEYMINFIHKLKHLPEKYMMNSVLENFXILQVVXSRDSQEXLLVIAFVFEVSXSEHGAQHHVYKLVKD

SEQ ID NO: 27333 - protein, 375 aa, Homo sapiens
  MOD_RES (7)..(7): Selenocysteine
  MOD_RES (11)..(12): Selenocysteine
  MOD_RES (21)..(21): Selenocysteine
  MOD_RES (33)..(33): Selenocysteine
  MOD_RES (45)..(45): Selenocysteine
  MOD_RES (50)..(50): Selenocysteine
  MOD_RES (97)..(97): Selenocysteine
  MOD_RES (135)..(135): Selenocysteine
  MOD_RES (159)..(159): Selenocysteine
  MOD_RES (182)..(182): Selenocysteine
  MOD_RES (194)..(194): Selenocysteine
  MOD_RES (246)..(246): Selenocysteine
  MOD_RES (268)..(268): Selenocysteine
  MOD_RES (273)..(273): Selenocysteine
  MOD_RES (288)..(288): Selenocysteine
  MOD_RES (335)..(335): Selenocysteine
  MOD_RES (341)..(341): Selenocysteine
  MOD_RES (348)..(348): Selenocysteine
  MOD_RES (360)..(360): Selenocysteine
MGPRAWXRGWXXMRRACGARXSSRASRRPWPSXRPAAGGRSSCQXRARCXAMNLDQVSKDKALQSMASMSSAQIVSASVLQNKFSPPSPLPQAVFSXSSRFWSSPPLLGQQPGPSQDIKPFAQPAYPIQPPLPPXLSSYEPLAPLPSAAASVPVWQDRXIASSRLRLLEYSAFMEVQRDPDXYSKHLFVHIGQXNPAFSDPPLEAVDVRQIYDKFPEKKGGLKELYEKGPPNAFFLVKFWADLNSXIQEGPGAFYGVSSQYSSADSMXISVSXKVCSFGKQVVEKVEXEYARLENGRFVYRIHRSPMCEYMINFIHKLKHLPEKYMMNSVLENFXILQVVXSRDSQEXLLVIAFVFEVSXSEHGAQHHVYKLVKD

SEQ ID NO: 27334 - protein, 219 aa, Homo sapiens
  MOD_RES (68)..(68): Selenocysteine
  MOD_RES (106)..(106): Selenocysteine
  MOD_RES (130)..(130): Selenocysteine
  MOD_RES (153)..(153): Selenocysteine
  MOD_RES (165)..(165): Selenocysteine
  MOD_RES (217)..(217): Selenocysteine
VSSHLQVLARRKSREIQSKLKAMNLDQVSKDKALQSMASMSSAQIVSASVLQNKFSPPSPLPQAVFSXSSRFWSSPPLLGQQPGPSQDIKPFAQPAYPIQPPLPPXLSSYEPLAPLPSAAASVPVWQDRXIASSRLRLLEYSAFMEVQRDPDXYSKHLFVHIGQXNPAFSDPPLEAVDVRQIYDKFPEKKGGLKELYEKGPPNAFFLVKFWADLNSXIQ

SEQ ID NO: 27335 - protein, 22 aa, Homo sapiens
  MOD_RES (4)..(4): Selenocysteine
  MOD_RES (7)..(7): Selenocysteine
  MOD_RES (9)..(9): Selenocysteine
  MOD_RES (17)..(17): Selenocysteine
LEGXAGXIXSNEWSSPXSPEGS

SEQ ID NO: 27336 - protein, 72 aa, Homo sapiens
  MOD_RES (4)..(4): Selenocysteine
  MOD_RES (7)..(7): Selenocysteine
  MOD_RES (9)..(9): Selenocysteine
  MOD_RES (17)..(17): Selenocysteine
  MOD_RES (23)..(23): Selenocysteine
LEGXAGXIXSNEWSSPXSPEGSXASGGSQALDKPIDNDAEGVWSPDIEQSFQEALAIYPPCGRRKIILSDEG

SEQ ID NO: 27337 - protein, 110 aa, Homo sapiens
  MOD_RES (4)..(4): Selenocysteine
  MOD_RES (7)..(7): Selenocysteine
  MOD_RES (9)..(9): Selenocysteine
  MOD_RES (17)..(17): Selenocysteine
  MOD_RES (23)..(23): Selenocysteine
LEGXAGXIXSNEWSSPXSPEGSXASGGSQALDKPIDNDAEGVWSPDIEQSFQEALAIYPPCGRRKIILSDEGKMYGLQPHPGAGSSQSSRDPGQAKVLARSFARPSRNVP

SEQ ID NO: 27338 - protein, 175 aa, Homo sapiens
  MOD_RES (4)..(4): Selenocysteine
  MOD_RES (7)..(7): Selenocysteine
  MOD_RES (9)..(9): Selenocysteine
  MOD_RES (17)..(17): Selenocysteine
  MOD_RES (23)..(23): Selenocysteine
  MOD_RES (89)..(89): Selenocysteine
  MOD_RES (92)..(92): Selenocysteine
  MOD_RES (94)..(94): Selenocysteine
  MOD_RES (142)..(142): Selenocysteine
  MOD_RES (173)..(173): Selenocysteine
LEGXAGXIXSNEWSSPXSPEGSXASGGSQALDKPIDNDAEGVWSPDIEQSFQEALAIYPPCGRRKIILSDEGKMYGRNELIARYIKLRXGKXRXRKQVSSHIQVLARRKAREIQAKLKDQAAKDKALQSMAAMSSAQIISAXAFHSSMALARGPGRPAVSGFWQGALPGQAGXSH

SEQ ID NO: 27339 - protein, 434 aa, Homo sapiens
  MOD_RES (4)..(4): Selenocysteine
  MOD_RES (7)..(7): Selenocysteine
  MOD_RES (9)..(9): Selenocysteine
  MOD_RES (17)..(17): Selenocysteine
  MOD_RES (23)..(23): Selenocysteine
  MOD_RES (89)..(89): Selenocysteine
  MOD_RES (92)..(92): Selenocysteine
  MOD_RES (94)..(94): Selenocysteine
  MOD_RES (142)..(142): Selenocysteine
  MOD_RES (173)..(173): Selenocysteine
  MOD_RES (184)..(184): Selenocysteine
  MOD_RES (241)..(241): Selenocysteine
  MOD_RES (304)..(304): Selenocysteine
  MOD_RES (329)..(329): Selenocysteine
  MOD_RES (332)..(332): Selenocysteine
  MOD_RES (347)..(347): Selenocysteine
  MOD_RES (394)..(394): Selenocysteine
  MOD_RES (400)..(400): Selenocysteine
  MOD_RES (404)..(404): Selenocysteine
  MOD_RES (407)..(407): Selenocysteine
LEGXAGXIXSNEWSSPXSPEGSXASGGSQALDKPIDNDAEGVWSPDIEQSFQEALAIYPPCGRRKIILSDEGKMYGRNELIARYIKLRXGKXRXRKQVSSHIQVLARRKAREIQAKLKDQAAKDKALQSMAAMSSAQIISAXAFHSSMALARGPGRPAVSGFWQGALPGQAGXSHDVKPFSQQXYAVQPPLPLPGFESPAGPAPSPSAPPAPPWQGRSVASSKLWMLEFSAFLEQQQDPDXYNKHLFVHIGQSSPSYSDPYLEAVDIRQIYDKFPEKKGGLKDLFERGPSNAFFLVKFWADLNXNIEDEGSSFYGVSSQYESPENMIIXCSXKVCSFGKQVVEKVEXEYARYENGHYSYRIHRSPLCEYMINFIHKLKHLPEKYMMNSVLENFXILQVVXNRDXQEXLLCIAYVFEVSASEHGAQHHIYRLVKE

SEQ ID NO: 27340 - protein, 391 aa, Homo sapiens
  MOD_RES (4)..(4): Selenocysteine
  MOD_RES (7)..(7): Selenocysteine
  MOD_RES (9)..(9): Selenocysteine
  MOD_RES (17)..(17): Selenocysteine
  MOD_RES (23)..(23): Selenocysteine
  MOD_RES (89)..(89): Selenocysteine
  MOD_RES (92)..(92): Selenocysteine
  MOD_RES (94)..(94): Selenocysteine
  MOD_RES (130)..(130): Selenocysteine
  MOD_RES (141)..(141): Selenocysteine
  MOD_RES (198)..(198): Selenocysteine
  MOD_RES (261)..(261): Selenocysteine
  MOD_RES (286)..(286): Selenocysteine
  MOD_RES (289)..(289): Selenocysteine
  MOD_RES (304)..(304): Selenocysteine
  MOD_RES (351)..(351): Selenocysteine
  MOD_RES (357)..(357): Selenocysteine
  MOD_RES (361)..(361): Selenocysteine
  MOD_RES (364)..(364): Selenocysteine
LEGXAGXIXSNEWSSPXSPEGSXASGGSQALDKPIDNDAEGVWSPDIEQSFQEALAIYPPCGRRKIILSDEGKMYGRNELIARYIKLRXGKXRXRKQVSSHIQVLARRKAREIQAKLKFWQGALPGQAGXSHDVKPFSQQXYAVQPPLPLPGFESPAGPAPSPSAPPAPPWQGRSVASSKLWMLEFSAFLEQQQDPDXYNKHLFVHIGQSSPSYSDPYLEAVDIRQIYDKFPEKKGGLKDLFERGPSNAFFLVKFWADLNXNIEDEGSSFYGVSSQYESPENMIIXCSXKVCSFGKQVVEKVEXEYARYENGHYSYRIHRSPLCEYMINFIHKLKHLPEKYMMNSVLENFXILQVVXNRDXQEXLLCIAYVFEVSASEHGAQHHIYRLVKE

SEQ ID NO: 27341 - protein, 305 aa, Homo sapiens
  MOD_RES (13)..(13): Selenocysteine
  MOD_RES (44)..(44): Selenocysteine
  MOD_RES (55)..(55): Selenocysteine
  MOD_RES (112)..(112): Selenocysteine
  MOD_RES (175)..(175): Selenocysteine
  MOD_RES (200)..(200): Selenocysteine
  MOD_RES (203)..(203): Selenocysteine
  MOD_RES (218)..(218): Selenocysteine
  MOD_RES (265)..(265): Selenocysteine
  MOD_RES (271)..(271): Selenocysteine
  MOD_RES (275)..(275): Selenocysteine
  MOD_RES (278)..(278): Selenocysteine
MAAMSSAQIISAXAFHSSMALARGPGRPAVSGFWQGALPGQAGXSHDVKPFSQQXYAVQPPLPLPGFESPAGPAPSPSAPPAPPWQGRSVASSKLWMLEFSAFLEQQQDPDXYNKHLFVHIGQSSPSYSDPYLEAVDIRQIYDKFPEKKGGLKDLFERGPSNAFFLVKFWADLNXNIEDEGSSFYGVSSQYESPENMIIXCSXKVCSFGKQVVEKVEXEYARYENGHYSYRIHRSPLCEYMINFIHKLKHLPEKYMMNSVLENFXILQVVXNRDXQEXLLCIAYVFEVSASEHGAQHHIYRLVKE

SEQ ID NO: 27342 - protein, 189 aa, Homo sapiens
  MOD_RES (1)..(1): Any amino acid
  MOD_RES (4)..(4): Selenocysteine
  MOD_RES (6)..(6): Selenocysteine
  MOD_RES (31)..(31): Selenocysteine
  MOD_RES (37)..(37): Selenocysteine
  MOD_RES (65)..(65): Selenocysteine
  MOD_RES (96)..(96): Selenocysteine
  MOD_RES (107)..(107): Selenocysteine
  MOD_RES (164)..(164): Selenocysteine
XGKXRXRKQVSSHIQVLARRKAREIQAKLKXGAELGXCGREDQAAKDKALQSMAAMSSAQIISAXAFHSSMALARGPGRPAVSGFWQGALPGQAGXSHDVKPFSQQXYAVQPPLPLPGFESPAGPAPSPSAPPAPPWQGRSVASSKLWMLEFSAFLEQQQDPDXYNKHLFVHIGQSSPSYSDPYLEAVD

SEQ ID NO: 27343 - protein, 100 aa, Homo sapiens
  MOD_RES (5)..(5): Selenocysteine
  MOD_RES (21)..(21): Selenocysteine
  MOD_RES (34)..(34): Selenocysteine
  MOD_RES (39)..(39): Selenocysteine
  MOD_RES (83)..(83): Selenocysteine
MNFNXILEEILIKRSQQKKKXSPLNYKERLFVLXKSMLXYYEGRAEKKYRKGFIDVSKIKCVEIVKNDDGVIPCQNKYPFQSXKQGPVGEEVKRRNKEQQ

SEQ ID NO: 27344 - protein, 631 aa, Homo sapiens
  MOD_RES (5)..(5): Selenocysteine
  MOD_RES (21)..(21): Selenocysteine
  MOD_RES (34)..(34): Selenocysteine
  MOD_RES (39)..(39): Selenocysteine
  MOD_RES (88)..(88): Selenocysteine
  MOD_RES (126)..(126): Selenocysteine
  MOD_RES (136)..(136): Selenocysteine
  MOD_RES (163)..(163): Selenocysteine
  MOD_RES (235)..(235): Selenocysteine
  MOD_RES (282)..(282): Selenocysteine
  MOD_RES (287)..(287): Selenocysteine
  MOD_RES (305)..(307): Selenocysteine
  MOD_RES (339)..(339): Selenocysteine
  MOD_RES (354)..(355): Selenocysteine
  MOD_RES (371)..(371): Selenocysteine
  MOD_RES (421)..(421): Selenocysteine
  MOD_RES (433)..(433): Selenocysteine
  MOD_RES (442)..(442): Selenocysteine
  MOD_RES (520)..(520): Selenocysteine
  MOD_RES (560)..(560): Selenocysteine
  MOD_RES (570)..(570): Selenocysteine
  MOD_RES (576)..(576): Selenocysteine
  MOD_RES (579)..(579): Selenocysteine
  MOD_RES (618)..(618): Selenocysteine
  MOD_RES (628)..(628): Selenocysteine
MNFNXILEEILIKRSQQKKKXSPLNYKERLFVLXKSMLXYYEGRAEKKYRKGFIDVSKIKCVEIVKNDDGVIPCQNKYPFQVVHDANXLYIFAPSPQSRDLWVKKLKEEIKNNNNIMIKYHPKFWXDGSYQCCRQXEKLAPGCEKYNLFESSIRKALPPAPEXKKRRPPPPIPLEEEDNSEEIVVAMYDFQAAEGHDLRLERGQEYLILEKNDVHWWRARDKYGNEGYIPSNYVXGKKSNNLDQYEWYCRNMNRSKAEQLLRSEDKEGGFMVRDSSQPGLYXVSLYXKFGGEGSSGFRHYHIKEXXXSPKKYYLAEKHAFGSIPEIIEYHKHNAAGLVXRLRYPVSVKGKNAPXXAGFSYEKWEINPSELXFMRELGSGLFGVVRLGKWRAQYKVAIKAIREGAMCEEDFIEEAKVMMKLXHPKLVQLYGVCXQQKPIYIVXEFMERGCLLNFLRQRQGHFSRDVLLSMCQDVCEGMEYLERNSFIHRDLAARNCLVSEAGVVKVSDFGMARYVLDDQYXSSSGAKFPVKWCPPEVFNYSRFSSKSDVWSFGVLMWEVFXEGRMPFEKYXNYEVVXMVXRGHRLYQPKLASNYVYEVMLRCWQEKPEGRPSFEDLLRXIDELVECEEXFGR

SEQ ID NO: 27345 - protein, 51 aa, Homo sapiens
MRELGSGLFGVVRLGKWRAQYKVAIKAIREGAMCEEDFIEEAKVMMLPEIV

SEQ ID NO: 27346 - protein, 273 aa, Homo sapiens
  MOD_RES (22)..(22): Selenocysteine
  MOD_RES (41)..(41): Selenocysteine
  MOD_RES (56)..(56): Selenocysteine
  MOD_RES (85)..(85): Selenocysteine
  MOD_RES (108)..(108): Selenocysteine
  MOD_RES (116)..(116): Selenocysteine
  MOD_RES (124)..(124): Selenocysteine
  MOD_RES (128)..(128): Selenocysteine
  MOD_RES (138)..(138): Selenocysteine
  MOD_RES (208)..(208): Selenocysteine
  MOD_RES (232)..(232): Selenocysteine
  MOD_RES (243)..(243): Selenocysteine
  MOD_RES (247)..(247): Selenocysteine
  MOD_RES (261)..(261): Selenocysteine
  MOD_RES (268)..(268): Selenocysteine
MDMPEVLKSLLEHSLPWPEKRXDKEKGKEKLEEDEAAAASXMAVSASLMPPIWDKXIPYDGESFHLEYMDLDEFLLENGIPASPXHLAHNLLLPVAELEGKESASSSXASPPSSSXAIFQPSEXVSSXESSLEKEREXPSPIDPNCVEVDVNFNPDPADLVLSSVPGGELFNPRKHKFAEEDLKPQPMIKKAKKVFVPDEQKDEKYWXRRKKNNVAAKRSRDARRLKENQIXIRAAFLEKENXALRXEVAELRKEVGKCKXIVSKYEXKYGPL

SEQ ID NO: 27347 - protein, 303 aa, Homo sapiens
  MOD_RES (71)..(71): Selenocysteine
  MOD_RES (86)..(86): Selenocysteine
  MOD_RES (115)..(115): Selenocysteine
  MOD_RES (138)..(138): Selenocysteine
  MOD_RES (146)..(146): Selenocysteine
  MOD_RES (154)..(154): Selenocysteine
  MOD_RES (158)..(158): Selenocysteine
  MOD_RES (168)..(168): Selenocysteine
  MOD_RES (238)..(238): Selenocysteine
  MOD_RES (262)..(262): Selenocysteine
  MOD_RES (273)..(273): Selenocysteine
  MOD_RES (277)..(277): Selenocysteine
  MOD_RES (291)..(291): Selenocysteine
  MOD_RES (298)..(298): Selenocysteine
MSDAGGGKKPPVDPQAGPGPGPGRAAGERGLSGSFPLVLKKLMENPPREARLDKEKGKEKLEEDEAAAASXMAVSASLMPPIWDKXIPYDGESFHLEYMDLDEFLLENGIPASPXHLAHNLLLPVAELEGKESASSSXASPPSSSXAIFQPSEXVSSXESSLEKEREXPSPIDPNCVEVDVNFNPDPADLVLSSVPGGELFNPRKHKFAEEDLKPQPMIKKAKKVFVPDEQKDEKYWXRRKKNNVAAKRSRDARRLKENQIXIRAAFLEKENXALRXEVAELRKEVGKCKXIVSKYEXKYGPL

SEQ ID NO: 27348 - protein, 184 aa, Homo sapiens
  MOD_RES (1)..(1): Any amino acid
  MOD_RES (10)..(10): Selenocysteine
  MOD_RES (37)..(37): Selenocysteine
  MOD_RES (52)..(52): Selenocysteine
  MOD_RES (81)..(81): Selenocysteine
  MOD_RES (104)..(104): Selenocysteine
  MOD_RES (112)..(112): Selenocysteine
  MOD_RES (120)..(120): Selenocysteine
  MOD_RES (124)..(124): Selenocysteine
  MOD_RES (134)..(134): Selenocysteine
XFIFLPRPGXSLGRIRKADKEKGKEKLEEDEAAAASXMAVSASLMPPIWDKXIPYDGESFHLEYMDLDEFLLENGIPASPXHLAHNLLLPVAELEGKESASSSXASPPSSSXAIFQPSEXVSSXESSLEKEREXPSPIDPNCVEVDVNFNPDPADLVLSSVPGGELFNPRKHKFAEEDLKPQPM

SEQ ID NO: 27349 - protein, 976 aa, Homo sapiens
  MOD_RES (24)..(24): Selenocysteine
  MOD_RES (26)..(26): Selenocysteine
  MOD_RES (28)..(28): Selenocysteine
  MOD_RES (96)..(96): Selenocysteine
  MOD_RES (100)..(100): Selenocysteine
  MOD_RES (121)..(121): Selenocysteine
  MOD_RES (133)..(133): Selenocysteine
  MOD_RES (146)..(146): Selenocysteine
  MOD_RES (155)..(155): Selenocysteine
  MOD_RES (159)..(159): Selenocysteine
  MOD_RES (187)..(187): Selenocysteine
  MOD_RES (202)..(202): Selenocysteine
  MOD_RES (232)..(232): Selenocysteine
  MOD_RES (237)..(237): Selenocysteine
  MOD_RES (244)..(244): Selenocysteine
  MOD_RES (254)..(254): Selenocysteine
  MOD_RES (263)..(263): Selenocysteine
  MOD_RES (281)..(281): Selenocysteine
  MOD_RES (309)..(309): Selenocysteine
  MOD_RES (351)..(351): Selenocysteine
  MOD_RES (356)..(356): Selenocysteine
  MOD_RES (364)..(364): Selenocysteine
  MOD_RES (390)..(391): Selenocysteine
  MOD_RES (410)..(411): Selenocysteine
  MOD_RES (415)..(415): Selenocysteine
  MOD_RES (451)..(451): Selenocysteine
  MOD_RES (472)..(472): Selenocysteine
  MOD_RES (483)..(483): Selenocysteine
  MOD_RES (486)..(486): Selenocysteine
  MOD_RES (504)..(504): Selenocysteine
  MOD_RES (513)..(513): Selenocysteine
  MOD_RES (524)..(524): Selenocysteine
  MOD_RES (546)..(546): Selenocysteine
  MOD_RES (548)..(548): Selenocysteine
  MOD_RES (559)..(559): Selenocysteine
  MOD_RES (584)..(584): Selenocysteine
  MOD_RES (611)..(611): Selenocysteine
  MOD_RES (614)..(614): Selenocysteine
  MOD_RES (652)..(652): Selenocysteine
  MOD_RES (666)..(666): Selenocysteine
  MOD_RES (774)..(774): Selenocysteine
  MOD_RES (784)..(784): Selenocysteine
  MOD_RES (787)..(787): Selenocysteine
  MOD_RES (848)..(848): Selenocysteine
  MOD_RES (868)..(869): Selenocysteine
  MOD_RES (889)..(889): Selenocysteine
  MOD_RES (895)..(895): Selenocysteine
  MOD_RES (953)..(953): Selenocysteine
  MOD_RES (957)..(958): Selenocysteine
  MOD_RES (964)..(964): Selenocysteine
MDSLASLVLCGVSLLLSASFLPAXLXMXVDKGDNVNISFKKVLIKEEDAVIYKNGSFIHSVPRHEVPDILEVHLPHAQPQDAGVYSARYIGGNLFXSAFXRLIVRRCEAQKWGPECNHLCXACMNNGVCHEDXGECICPPGFMGRXCEKACELHXFGRXCKERCSGQEGCKSYVFCLPDPYGCSCAXGWKGLQCNEGIQRMXPKIVDLPDHIEVNSGKFNPICKASGWPLPXNEEMXLVKPDGXVLHPKDFNHXDHFSVAIFXIHRILPPDSGVWVCSVNXVAGMVEKPFNISVKVLPKPLNAPNVIDXGHNFAVINISSEPYFGDGPIKSKKLLYKPVNHYEAWQHIQVXNEIVXLNYLEPRXEYELCVQLVRRGEGGEGHPGPVRRFXXASIGLPPPRGLNLLPKSQXXLNLXWQPIFPSSEDDFYVEVERRSVQKSDQQNIKVPGNLXSVLLNNLHPREQYVVRARVNXKAQGEWSEDLXAWXLSDILPPQPENIKISNIXHSSAVISWXILDGYSISSIXIRYKVQGKNEDQHVDVKIKNAXIXQYQLKGLEPEXAYQVDIFAENNIGSSNPAFSHELVXLPESQAPADLGGGKMLLIAILGSAGMXCLXVLLAFLIILQLKRANVQRRMAQAFQNREEPAVQFNSGXLALNRKVKNNPDPXIYPVLDWNDIKFQDVIGEGNFGQVLKARIKKDGLRMDAAIKRMKEYASKDDHRDFAGELEVLCKLGHHPNIINLLGACEHRGYLYLAIEYAPHGNLLDFLRKSRVLEXDPAFAIANSXASXLSSQQLLHFAADVARGMDYLSQKQFIHRDLAARNILVGENYVAKIADFGLSRGQEVYVKKXMGRLPVRWMAIESLNYSVYXXNSDVWSYGVLLWEIVSLGGXPYCGMXCAELYEKLPQGYRLEKPLNCDDEVYDLMRQCWREKPYERPSFAQILVSLNRMLEERKXYVNXXLYEKFXYAGIDCSAEEAA

SEQ ID NO: 27350 - protein, 468 aa, Homo sapiens
  MOD_RES (19)..(19): Selenocysteine
  MOD_RES (40)..(40): Selenocysteine
  MOD_RES (43)..(43): Selenocysteine
  MOD_RES (56)..(56): Selenocysteine
  MOD_RES (75)..(75): Selenocysteine
  MOD_RES (79)..(79): Selenocysteine
  MOD_RES (115)..(115): Selenocysteine
  MOD_RES (128)..(128): Selenocysteine
  MOD_RES (130)..(130): Selenocysteine
  MOD_RES (132)..(132): Selenocysteine
  MOD_RES (200)..(200): Selenocysteine
  MOD_RES (204)..(204): Selenocysteine
  MOD_RES (225)..(225): Selenocysteine
  MOD_RES (237)..(237): Selenocysteine
  MOD_RES (250)..(250): Selenocysteine
  MOD_RES (259)..(259): Selenocysteine
  MOD_RES (263)..(263): Selenocysteine
  MOD_RES (291)..(291): Selenocysteine
  MOD_RES (306)..(306): Selenocysteine
  MOD_RES (336)..(336): Selenocysteine
  MOD_RES (341)..(341): Selenocysteine
  MOD_RES (348)..(348): Selenocysteine
  MOD_RES (358)..(358): Selenocysteine
  MOD_RES (367)..(367): Selenocysteine
  MOD_RES (385)..(385): Selenocysteine
  MOD_RES (413)..(413): Selenocysteine
  MOD_RES (462)..(462): Selenocysteine
MDSLASLVLCGVSLLLSGXVEGAMDLILINSLPLVSDAEXSLXCIASGWRPHEPIXIGRDFEALMNQHQDPLEVXQDVXREWAKKVVWKREKASKINGAYFCEGRVRGEAIRIRXMKMRQQASFLPAXLXMXVDKGDNVNISFKKVLIKEEDAVIYKNGSFIHSVPRHEVPDILEVHLPHAQPQDAGVYSARYIGGNLFXSAFXRLIVRRCEAQKWGPECNHLCXACMNNGVCHEDXGECICPPGFMGRXCEKACELHXFGRXCKERCSGQEGCKSYVFCLPDPYGCSCAXGWKGLQCNEGIQRMXPKIVDLPDHIEVNSGKFNPICKASGWPLPXNEEMXLVKPDGXVLHPKDFNHXDHFSVAIFXIHRILPPDSGVWVCSVNXVAGMVEKPFNISVKVLPKPLNAPNVIDXGHNFAVINISSEPYFGDGPIKSKKLLYKPVNHYEAWQHIQVSMEKQRLXKANSDK

SEQ ID NO: 27351 - protein, 1081 aa, Homo sapiens
  MOD_RES (19)..(19): Selenocysteine
  MOD_RES (40)..(40): Selenocysteine
  MOD_RES (43)..(43): Selenocysteine
  MOD_RES (56)..(56): Selenocysteine
  MOD_RES (75)..(75): Selenocysteine
  MOD_RES (79)..(79): Selenocysteine
  MOD_RES (115)..(115): Selenocysteine
  MOD_RES (128)..(128): Selenocysteine
  MOD_RES (130)..(130): Selenocysteine
  MOD_RES (132)..(132): Selenocysteine
  MOD_RES (200)..(200): Selenocysteine
  MOD_RES (204)..(204): Selenocysteine
  MOD_RES (225)..(225): Selenocysteine
  MOD_RES (237)..(237): Selenocysteine
  MOD_RES (250)..(250): Selenocysteine
  MOD_RES (259)..(259): Selenocysteine
  MOD_RES (263)..(263): Selenocysteine
  MOD_RES (291)..(291): Selenocysteine
  MOD_RES (306)..(306): Selenocysteine
  MOD_RES (336)..(336): Selenocysteine
  MOD_RES (341)..(341): Selenocysteine
  MOD_RES (348)..(348): Selenocysteine
  MOD_RES (358)..(358): Selenocysteine
  MOD_RES (367)..(367): Selenocysteine
  MOD_RES (385)..(385): Selenocysteine
  MOD_RES (413)..(413): Selenocysteine
  MOD_RES (455)..(455): Selenocysteine
  MOD_RES (460)..(460): Selenocysteine
  MOD_RES (468)..(468): Selenocysteine
  MOD_RES (494)..(495): Selenocysteine
  MOD_RES (514)..(515): Selenocysteine
  MOD_RES (519)..(519): Selenocysteine
  MOD_RES (555)..(555): Selenocysteine
  MOD_RES (576)..(576): Selenocysteine
  MOD_RES (587)..(587): Selenocysteine
  MOD_RES (590)..(590): Selenocysteine
  MOD_RES (608)..(608): Selenocysteine
  MOD_RES (617)..(617): Selenocysteine
  MOD_RES (628)..(628): Selenocysteine
  MOD_RES (650)..(650): Selenocysteine
  MOD_RES (652)..(652): Selenocysteine
  MOD_RES (663)..(663): Selenocysteine
  MOD_RES (688)..(688): Selenocysteine
  MOD_RES (715)..(715): Selenocysteine
  MOD_RES (718)..(718): Selenocysteine
  MOD_RES (757)..(757): Selenocysteine
  MOD_RES (771)..(771): Selenocysteine
  MOD_RES (879)..(879): Selenocysteine
  MOD_RES (889)..(889): Selenocysteine
  MOD_RES (892)..(892): Selenocysteine
  MOD_RES (953)..(953): Selenocysteine
  MOD_RES (973)..(974): Selenocysteine
  MOD_RES (994)..(994): Selenocysteine
  MOD_RES (1000)..(1000): Selenocysteine
  MOD_RES (1058)..(1058): Selenocysteine
  MOD_RES (1062)..(1063): Selenocysteine
  MOD_RES (1069)..(1069): Selenocysteine
MDSLASLVLCGVSLLLSGXVEGAMDLILINSLPLVSDAEXSLXCIASGWRPHEPIXIGRDFEALMNQHQDPLEVXQDVXREWAKKVVWKREKASKINGAYFCEGRVRGEAIRIRXMKMRQQASFLPAXLXMXVDKGDNVNISFKKVLIKEEDAVIYKNGSFIHSVPRHEVPDILEVHLPHAQPQDAGVYSARYIGGNLFXSAFXRLIVRRCEAQKWGPECNHLCXACMNNGVCHEDXGECICPPGFMGRXCEKACELHXFGRXCKERCSGQEGCKSYVFCLPDPYGCSCAXGWKGLQCNEGIQRMXPKIVDLPDHIEVNSGKFNPICKASGWPLPXNEEMXLVKPDGXVLHPKDFNHXDHFSVAIFXIHRILPPDSGVWVCSVNXVAGMVEKPFNISVKVLPKPLNAPNVIDXGHNFAVINISSEPYFGDGPIKSKKLLYKPVNHYEAWQHIQVXNEIVXLNYLEPRXEYELCVQLVRRGEGGEGHPGPVRRFXXASIGLPPPRGLNLLPKSQXXLNLXWQPIFPSSEDDFYVEVERRSVQKSDQQNIKVPGNLXSVLLNNLHPREQYVVRARVNXKAQGEWSEDLXAWXLSDILPPQPENIKISNIXHSSAVISWXILDGYSISSIXIRYKVQGKNEDQHVDVKIKNAXIXQYQLKGLEPEXAYQVDIFAENNIGSSNPAFSHELVXLPESQAPADLGGGKMLLIAILGSAGMXCLXVLLAFLIILQLKRANVQRRMAQAFQNVREEPAVQFNSGXLALNRKVKNNPDPXIYPVLDWNDIKFQDVIGEGNFGQVLKARIKKDGLRMDAAIKRMKEYASKDDHRDFAGELEVLCKLGHHPNIINLLGACEHRGYLYLAIEYAPHGNLLDFLRKSRVLEXDPAFAIANSXASXLSSQQLLHFAADVARGMDYLSQKQFIHRDLAARNILVGENYVAKIADFGLSRGQEVYVKKXMGRLPVRWMAIESLNYSVYXXNSDVWSYGVLLWEIVSLGGXPYCGMXCAELYEKLPQGYRLEKPLNCDDEVYDLMRQCWREKPYERPSFAQILVSLNRMLEERKXYVNXXLYEKFXYAGIDCSAEEAA

SEQ ID NO: 27352 - protein, 1124 aa, Homo sapiens
  MOD_RES (19)..(19): Selenocysteine
  MOD_RES (40)..(40): Selenocysteine
  MOD_RES (43)..(43): Selenocysteine
  MOD_RES (56)..(56): Selenocysteine
  MOD_RES (75)..(75): Selenocysteine
  MOD_RES (79)..(79): Selenocysteine
  MOD_RES (115)..(115): Selenocysteine
  MOD_RES (128)..(128): Selenocysteine
  MOD_RES (130)..(130): Selenocysteine
  MOD_RES (132)..(132): Selenocysteine
  MOD_RES (200)..(200): Selenocysteine
  MOD_RES (204)..(204): Selenocysteine
  MOD_RES (225)..(225): Selenocysteine
  MOD_RES (237)..(237): Selenocysteine
  MOD_RES (250)..(250): Selenocysteine
  MOD_RES (259)..(259): Selenocysteine
  MOD_RES (263)..(263): Selenocysteine
  MOD_RES (291)..(291): Selenocysteine
  MOD_RES (349)..(349): Selenocysteine
  MOD_RES (379)..(379): Selenocysteine
  MOD_RES (384)..(384): Selenocysteine
  MOD_RES (391)..(391): Selenocysteine
  MOD_RES (401)..(401): Selenocysteine
  MOD_RES (410)..(410): Selenocysteine
  MOD_RES (428)..(428): Selenocysteine
  MOD_RES (456)..(456): Selenocysteine
  MOD_RES (498)..(498): Selenocysteine
  MOD_RES (503)..(503): Selenocysteine
  MOD_RES (511)..(511): Selenocysteine
  MOD_RES (537)..(538): Selenocysteine
  MOD_RES (557)..(558): Selenocysteine
  MOD_RES (562)..(562): Selenocysteine
  MOD_RES (598)..(598): Selenocysteine
  MOD_RES (619)..(619): Selenocysteine
  MOD_RES (630)..(630): Selenocysteine
  MOD_RES (633)..(633): Selenocysteine
  MOD_RES (651)..(651): Selenocysteine
  MOD_RES (660)..(660): Selenocysteine
  MOD_RES (671)..(671): Selenocysteine
  MOD_RES (693)..(693): Selenocysteine
  MOD_RES (695)..(695): Selenocysteine
  MOD_RES (706)..(706): Selenocysteine
  MOD_RES (731)..(731): Selenocysteine
  MOD_RES (758)..(758): Selenocysteine
  MOD_RES (761)..(761): Selenocysteine
  MOD_RES (800)..(800): Selenocysteine
  MOD_RES (814)..(814): Selenocysteine
  MOD_RES (922)..(922): Selenocysteine
  MOD_RES (932)..(932): Selenocysteine
  MOD_RES (935)..(935): Selenocysteine
  MOD_RES (996)..(996): Selenocysteine
  MOD_RES (1016)..(1017): Selenocysteine
  MOD_RES (1037)..(1037): Selenocysteine
  MOD_RES (1043)..(1043): Selenocysteine
  MOD_RES (1101)..(1101): Selenocysteine
  MOD_RES (1105)..(1106): Selenocysteine
  MOD_RES (1112)..(1112): Selenocysteine
MDSLASLVLCGVSLLLSGXVEGAMDLILINSLPLVSDAEXSLXCIASGWRPHEPIXIGRDFEALMNQHQDPLEVXQDVXREWAKKVVWKREKASKINGAYFCEGRVRGEAIRIRXMKMRQQASFLPAXLXMXVDKGDNVNISFKKVLIKEEDAVIYKNGSFIHSVPRHEVPDILEVHLPHAQPQDAGVYSARYIGGNLFXSAFXRLIVRRCEAQKWGPECNHLCXACMNNGVCHEDXGECICPPGFMGRXCEKACELHXFGRXCKERCSGQEGCKSYVFCLPDPYGCSCAXGWKGLQCNEACHPGFYGPDCKLRCSCNNGEMCDRFQGCLCSPGWQGLQCEREGIQRMXPKIVDLPDHIEVNSGKFNPICKASGWPLPXNEEMXLVKPDGXVLHPKDFNHXDHFSVAIFXIHRILPPDSGVWVCSVNXVAGMVEKPFNISVKVLPKPLNAPNVIDXGHNFAVINISSEPYFGDGPIKSKKLLYKPVNHYEAWQHIQVXNEIVXLNYLEPRXEYELCVQLVRRGEGGEGHPGPVRRFXXASIGLPPPRGLNLLPKSQXXLNLXWQPIFPSSEDDFYVEVERRSVQKSDQQNIKVPGNLXSVLLNNLHPREQYVVRARVNXKAQGEWSEDLXAWXLSDILPPQPENIKISNIXHSSAVISWXILDGYSISSIXIRYKVQGKNEDQHVDVKIKNAXIXQYQLKGLEPEXAYQVDIFAENNIGSSNPAFSHELVXLPESQAPADLGGGKMLLIAILGSAGMXCLXVLLAFLIILQLKRANVQRRMAQAFQNVREEPAVQFNSGXLALNRKVKNNPDPXIYPVLDWNDIKFQDVIGEGNFGQVLKARIKKDGLRMDAAIKRMKEYASKDDHRDFAGELEVLCKLGHHPNIINLLGACEHRGYLYLAIEYAPHGNLLDFLRKSRVLEXDPAFAIANSXASXLSSQQLLHFAADVARGMDYLSQKQFIHRDLAARNILVGENYVAKIADFGLSRGQEVYVKKXMGRLPVRWMAIESLNYSVYXXNSDVWSYGVLLWEIVSLGGXPYCGMXCAELYEKLPQGYRLEKPLNCDDEVYDLMRQCWREKPYERPSFAQILVSLNRMLEERKXYVNXXLYEKFXYAGIDCSAEEAA

SEQ ID NO: 27353 - protein, 468 aa, Homo sapiens
  MOD_RES (53)..(53): Selenocysteine
  MOD_RES (57)..(57): Selenocysteine
  MOD_RES (78)..(78): Selenocysteine
  MOD_RES (90)..(90): Selenocysteine
  MOD_RES (103)..(103): Selenocysteine
  MOD_RES (112)..(112): Selenocysteine
  MOD_RES (116)..(116): Selenocysteine
  MOD_RES (144)..(144): Selenocysteine
  MOD_RES (159)..(159): Selenocysteine
  MOD_RES (189)..(189): Selenocysteine
  MOD_RES (194)..(194): Selenocysteine
  MOD_RES (201)..(201): Selenocysteine
  MOD_RES (211)..(211): Selenocysteine
  MOD_RES (220)..(220): Selenocysteine
  MOD_RES (238)..(238): Selenocysteine
  MOD_RES (266)..(266): Selenocysteine
  MOD_RES (308)..(308): Selenocysteine
  MOD_RES (313)..(313): Selenocysteine
  MOD_RES (321)..(321): Selenocysteine
  MOD_RES (347)..(348): Selenocysteine
  MOD_RES (367)..(368): Selenocysteine
  MOD_RES (372)..(372): Selenocysteine
  MOD_RES (408)..(408): Selenocysteine
  MOD_RES (429)..(429): Selenocysteine
  MOD_RES (440)..(440): Selenocysteine
  MOD_RES (443)..(443): Selenocysteine
  MOD_RES (461)..(461): Selenocysteine
MDSLASLVLCGVSLLLSVPRHEVPDILEVHLPHAQPQDAGVYSARYIGGNLFXSAFXRLIVRRCEAQKWGPECNHLCXACMNNGVCHEDXGECICPPGFMGRXCEKACELHXFGRXCKERCSGQEGCKSYVFCLPDPYGCSCAXGWKGLQCNEGIQRMXPKIVDLPDHIEVNSGKFNPICKASGWPLPXNEEMXLVKPDGXVLHPKDFNHXDHFSVAIFXIHRILPPDSGVWVCSVNXVAGMVEKPFNISVKVLPKPLNAPNVIDXGHNFAVINISSEPYFGDGPIKSKKLLYKPVNHYEAWQHIQVXNEIVXLNYLEPRXEYELCVQLVRRGEGGEGHPGPVRRFXXASIGLPPPRGLNLLPKSQXXLNLXWQPIFPSSEDDFYVEVERRSVQKSDQQNIKVPGNLXSVLLNNLHPREQYVVRARVNXKAQGEWSEDLXAWXLSDILPPQPENIKISNIXHSSAVIS

SEQ ID NO: 27354 - protein, 426 aa, Homo sapiens
  MOD_RES (31)..(31): Selenocysteine
  MOD_RES (106)..(106): Selenocysteine
  MOD_RES (145)..(145): Selenocysteine
  MOD_RES (155)..(155): Selenocysteine
  MOD_RES (242)..(242): Selenocysteine
  MOD_RES (269)..(269): Selenocysteine
  MOD_RES (300)..(300): Selenocysteine
  MOD_RES (311)..(312): Selenocysteine
  MOD_RES (342)..(342): Selenocysteine
  MOD_RES (352)..(352): Selenocysteine
MEPAPSEVRLAVREAIHALSSSEDGGHIFCXLESLKRYLGEMEPPALPREKEEFASAHFSPVLRCLASRLSPAWLELLPHGRLEELWASFFLEGPADQAFLVLMEXIEGAAGPSFRLMKMARLLARFLREGRLAVLMEAQCRQQXQPGFILLREXLLGKVVALPDHLGNRLQQENLAEFFPQNYFRLLGEEVVRVLQAVVDSLQGGLDSSVSFVSQVLGKACVHGRQQEILGVLVPRLAALXQGSYLHQRVCWRLVEQVPDRAMEAVLXGLVEAALGPEVLSRLLGNLVVKNKKAQFVMXQKLLFLQSRLXXPMLQSLLGHLAMDSQRRPLLLQVLKELLEXWGSSSAIRHXPLPQQRHVSKAVLICLAQLGEPELRDSRDELLASMMAGVKCRLDSSLPPVRRLGMIVQIQLRGRPLLLPPPSAL

SEQ ID NO: 27355 - protein, 837 aa, Homo sapiens
  MOD_RES (31)..(31): Selenocysteine
  MOD_RES (106)..(106): Selenocysteine
  MOD_RES (145)..(145): Selenocysteine
  MOD_RES (155)..(155): Selenocysteine
  MOD_RES (242)..(242): Selenocysteine
  MOD_RES (269)..(269): Selenocysteine
  MOD_RES (300)..(300): Selenocysteine
  MOD_RES (311)..(312): Selenocysteine
  MOD_RES (342)..(342): Selenocysteine
  MOD_RES (352)..(352): Selenocysteine
  MOD_RES (455)..(455): Selenocysteine
  MOD_RES (461)..(461): Selenocysteine
  MOD_RES (468)..(468): Selenocysteine
  MOD_RES (523)..(524): Selenocysteine
  MOD_RES (547)..(547): Selenocysteine
  MOD_RES (549)..(549): Selenocysteine
  MOD_RES (567)..(567): Selenocysteine
  MOD_RES (584)..(584): Selenocysteine
  MOD_RES (586)..(586): Selenocysteine
  MOD_RES (596)..(596): Selenocysteine
  MOD_RES (617)..(617): Selenocysteine
  MOD_RES (632)..(632): Selenocysteine
  MOD_RES (642)..(642): Selenocysteine
  MOD_RES (673)..(673): Selenocysteine
  MOD_RES (713)..(713): Selenocysteine
  MOD_RES (730)..(730): Selenocysteine
  MOD_RES (741)..(742): Selenocysteine
  MOD_RES (815)..(815): Selenocysteine
MEPAPSEVRLAVREAIHALSSSEDGGHIFCXLESLKRYLGEMEPPALPREKEEFASAHFSPVLRCLASRLSPAWLELLPHGRLEELWASFFLEGPADQAFLVLMEXIEGAAGPSFRLMKMARLLARFLREGRLAVLMEAQCRQQXQPGFILLREXLLGKVVALPDHLGNRLQQENLAEFFPQNYFRLLGEEVVRVLQAVVDSLQGGLDSSVSFVSQVLGKACVHGRQQEILGVLVPRLAALXQGSYLHQRVCWRLVEQVPDRAMEAVLXGLVEAALGPEVLSRLLGNLVVKNKKAQFVMXQKLLFLQSRLXXPMLQSLLGHLAMDSQRRPLLLQVLKELLEXWGSSSAIRHXPLPQQRHVSKAVLICLAQLGEPELRDSRDELLASMMAGVKCRLDSSLPPVRRLGMIVAEVVSARIHPEGPPLKFQYEEDELSLELLALASPQPAGDGASEAGXSLVPAXAEPPAEXPAEIVDGGVPQAQLAGSDSDLDSDDEFVPYDMSGDRELKSSKAPAYVRDCVEALXXSEDIERWEAALRALEGLVYRSPXAXREVSVELAKVLLHLEEKXCVVGFAGLRQRALVAVXVXDPAPVADYLXSQFYALNYSLRQRMDILDVLXLAAQELSRPGCLGRXPQPGSPSPNXPCLPEAAVSQPGSAVASDWRVVVEERIRSKXQRLSKGGPRQGPAGSPSRFNSVAGHFFFPLLQRFDRPLVXFDLLGEDQLVLGRLAHXLGALMCLAVNXXVAVAMGKALLEFVWALRFHIDAYVRQGLLSAVSSVLLSLPAARLLEDLMDELLEARSWLADVAEKDPDEDCRXLALRALLLLQRLKNRLLPPASP

SEQ ID NO: 27356 - protein, 160 aa, Homo sapiens
  MOD_RES (1)..(1): Any amino acid
  MOD_RES (36)..(37): Selenocysteine
  MOD_RES (60)..(60): Selenocysteine
  MOD_RES (62)..(62): Selenocysteine
  MOD_RES (70)..(70): Selenocysteine
  MOD_RES (91)..(91): Selenocysteine
  MOD_RES (106)..(106): Selenocysteine
  MOD_RES (116)..(116): Selenocysteine
  MOD_RES (147)..(147): Selenocysteine
XLDSDDEFVPYDMSGDRELKSSKAPAYVRDCVEALXXSEDIERWEAALRALEGLVYRSPXAXREVADYLXSQFYALNYSLRQRMDILDVLXLAAQELSRPGCLGRXPQPGSPSPNXPCLPEAAVSQPGSAVASDWRVVVEERIRSKXQRLSKGGPRQGPA

SEQ ID NO: 27357 - protein, 2725 aa, Homo sapiens
  MOD_RES (4)..(4): Selenocysteine
  MOD_RES (24)..(24): Selenocysteine
  MOD_RES (45)..(45): Selenocysteine
  MOD_RES (71)..(71): Selenocysteine
  MOD_RES (79)..(79): Selenocysteine
  MOD_RES (82)..(82): Selenocysteine
  MOD_RES (89)..(89): Selenocysteine
  MOD_RES (109)..(109): Selenocysteine
  MOD_RES (111)..(111): Selenocysteine
  MOD_RES (147)..(147): Selenocysteine
  MOD_RES (149)..(149): Selenocysteine
  MOD_RES (177)..(177): Selenocysteine
  MOD_RES (189)..(189): Selenocysteine
  MOD_RES (204)..(204): Selenocysteine
  MOD_RES (222)..(223): Selenocysteine
  MOD_RES (236)..(236): Selenocysteine
  MOD_RES (238)..(238): Selenocysteine
  MOD_RES (258)..(258): Selenocysteine
  MOD_RES (283)..(283): Selenocysteine
  MOD_RES (286)..(286): Selenocysteine
  MOD_RES (299)..(299): Selenocysteine
  MOD_RES (306)..(306): Selenocysteine
  MOD_RES (319)..(319): Selenocysteine
  MOD_RES (324)..(324): Selenocysteine
  MOD_RES (327)..(327): Selenocysteine
  MOD_RES (329)..(329): Selenocysteine
  MOD_RES (346)..(346): Selenocysteine
  MOD_RES (368)..(368): Selenocysteine
  MOD_RES (373)..(374): Selenocysteine
  MOD_RES (399)..(399): Selenocysteine
  MOD_RES (411)..(411): Selenocysteine
  MOD_RES (423)..(423): Selenocysteine
  MOD_RES (453)..(453): Selenocysteine
  MOD_RES (455)..(455): Selenocysteine
  MOD_RES (479)..(479): Selenocysteine
  MOD_RES (489)..(489): Selenocysteine
  MOD_RES (494)..(494): Selenocysteine
  MOD_RES (523)..(524): Selenocysteine
  MOD_RES (534)..(534): Selenocysteine
  MOD_RES (600)..(600): Selenocysteine
  MOD_RES (606)..(606): Selenocysteine
  MOD_RES (648)..(648): Selenocysteine
  MOD_RES (657)..(657): Selenocysteine
  MOD_RES (671)..(671): Selenocysteine
  MOD_RES (686)..(686): Selenocysteine
  MOD_RES (692)..(692): Selenocysteine
  MOD_RES (696)..(696): Selenocysteine
  MOD_RES (720)..(720): Selenocysteine
  MOD_RES (731)..(731): Selenocysteine
  MOD_RES (753)..(753): Selenocysteine
  MOD_RES (776)..(776): Selenocysteine
  MOD_RES (793)..(793): Selenocysteine
  MOD_RES (815)..(815): Selenocysteine
  MOD_RES (849)..(849): Selenocysteine
  MOD_RES (855)..(855): Selenocysteine
  MOD_RES (872)..(872): Selenocysteine
  MOD_RES (899)..(899): Selenocysteine
  MOD_RES (917)..(917): Selenocysteine
  MOD_RES (950)..(950): Selenocysteine
  MOD_RES (965)..(965): Selenocysteine
  MOD_RES (994)..(994): Selenocysteine
  MOD_RES (1005)..(1005): Selenocysteine
  MOD_RES (1033)..(1033): Selenocysteine
  MOD_RES (1038)..(1038): Selenocysteine
  MOD_RES (1045)..(1045): Selenocysteine
  MOD_RES (1048)..(1048): Selenocysteine
  MOD_RES (1059)..(1059): Selenocysteine
  MOD_RES (1067)..(1067): Selenocysteine
  MOD_RES (1080)..(1080): Selenocysteine
  MOD_RES (1086)..(1086): Selenocysteine
  MOD_RES (1109)..(1109): Selenocysteine
  MOD_RES (1120)..(1120): Selenocysteine
  MOD_RES (1170)..(1170): Selenocysteine
  MOD_RES (1183)..(1183): Selenocysteine
  MOD_RES (1233)..(1233): Selenocysteine
  MOD_RES (1255)..(1255): Selenocysteine
  MOD_RES (1257)..(1257): Selenocysteine
  MOD_RES (1269)..(1269): Selenocysteine
  MOD_RES (1282)..(1282): Selenocysteine
  MOD_RES (1312)..(1312): Selenocysteine
  MOD_RES (1325)..(1325): Selenocysteine
  MOD_RES (1337)..(1338): Selenocysteine
  MOD_RES (1346)..(1346): Selenocysteine
  MOD_RES (1348)..(1348): Selenocysteine
  MOD_RES (1360)..(1360): Selenocysteine
  MOD_RES (1368)..(1368): Selenocysteine
  MOD_RES (1424)..(1424): Selenocysteine
  MOD_RES (1444)..(1444): Selenocysteine
  MOD_RES (1456)..(1457): Selenocysteine
  MOD_RES (1469)..(1469): Selenocysteine
  MOD_RES (1507)..(1507): Selenocysteine
  MOD_RES (1520)..(1520): Selenocysteine
  MOD_RES (1548)..(1548): Selenocysteine
  MOD_RES (1552)..(1552): Selenocysteine
  MOD_RES (1556)..(1556): Selenocysteine
  MOD_RES (1561)..(1561): Selenocysteine
  MOD_RES (1569)..(1569): Selenocysteine
  MOD_RES (1580)..(1580): Selenocysteine
  MOD_RES (1611)..(1611): Selenocysteine
  MOD_RES (1632)..(1632): Selenocysteine
  MOD_RES (1637)..(1637): Selenocysteine
  MOD_RES (1642)..(1642): Selenocysteine
  MOD_RES (1650)..(1651): Selenocysteine
  MOD_RES (1662)..(1662): Selenocysteine
  MOD_RES (1665)..(1665): Selenocysteine
  MOD_RES (1668)..(1668): Selenocysteine
  MOD_RES (1682)..(1682): Selenocysteine
  MOD_RES (1688)..(1688): Selenocysteine
  MOD_RES (1698)..(1698): Selenocysteine
  MOD_RES (1701)..(1701): Selenocysteine
  MOD_RES (1703)..(1703): Selenocysteine
  MOD_RES (1705)..(1705): Selenocysteine
  MOD_RES (1714)..(1714): Selenocysteine
  MOD_RES (1717)..(1717): Selenocysteine
  MOD_RES (1729)..(1729): Selenocysteine
  MOD_RES (1752)..(1752): Selenocysteine
  MOD_RES (1805)..(1805): Selenocysteine
  MOD_RES (1807)..(1807): Selenocysteine
  MOD_RES (1818)..(1818): Selenocysteine
  MOD_RES (1826)..(1826): Selenocysteine
  MOD_RES (1844)..(1844): Selenocysteine
  MOD_RES (1852)..(1852): Selenocysteine
  MOD_RES (1858)..(1858): Selenocysteine
  MOD_RES (1875)..(1875): Selenocysteine
  MOD_RES (1885)..(1885): Selenocysteine
  MOD_RES (1915)..(1915): Selenocysteine
  MOD_RES (1926)..(1926): Selenocysteine
  MOD_RES (1938)..(1938): Selenocysteine
  MOD_RES (1944)..(1944): Selenocysteine
  MOD_RES (1959)..(1959): Selenocysteine
  MOD_RES (1964)..(1964): Selenocysteine
  MOD_RES (1973)..(1973): Selenocysteine
  MOD_RES (1985)..(1986): Selenocysteine
  MOD_RES (1989)..(1989): Selenocysteine
  MOD_RES (1991)..(1991): Selenocysteine
  MOD_RES (2001)..(2001): Selenocysteine
  MOD_RES (2012)..(2012): Selenocysteine
  MOD_RES (2018)..(2018): Selenocysteine
  MOD_RES (2049)..(2049): Selenocysteine
  MOD_RES (2058)..(2058): Selenocysteine
  MOD_RES (2074)..(2074): Selenocysteine
  MOD_RES (2092)..(2094): Selenocysteine
  MOD_RES (2099)..(2099): Selenocysteine
  MOD_RES (2124)..(2124): Selenocysteine
  MOD_RES (2147)..(2147): Selenocysteine
  MOD_RES (2161)..(2161): Selenocysteine
  MOD_RES (2168)..(2168): Selenocysteine
  MOD_RES (2192)..(2192): Selenocysteine
  MOD_RES (2203)..(2203): Selenocysteine
  MOD_RES (2245)..(2245): Selenocysteine
  MOD_RES (2275)..(2275): Selenocysteine
  MOD_RES (2281)..(2281): Selenocysteine
  MOD_RES (2287)..(2287): Selenocysteine
  MOD_RES (2292)..(2292): Selenocysteine
  MOD_RES (2320)..(2320): Selenocysteine
  MOD_RES (2322)..(2322): Selenocysteine
  MOD_RES (2340)..(2340): Selenocysteine
  MOD_RES (2349)..(2349): Selenocysteine
  MOD_RES (2368)..(2368): Selenocysteine
  MOD_RES (2386)..(2387): Selenocysteine
  MOD_RES (2424)..(2425): Selenocysteine
  MOD_RES (2456)..(2456): Selenocysteine
  MOD_RES (2464)..(2464): Selenocysteine
  MOD_RES (2466)..(2466): Selenocysteine
  MOD_RES (2474)..(2474): Selenocysteine
  MOD_RES (2498)..(2498): Selenocysteine
  MOD_RES (2536)..(2536): Selenocysteine
  MOD_RES (2566)..(2566): Selenocysteine
  MOD_RES (2572)..(2572): Selenocysteine
  MOD_RES (2591)..(2591): Selenocysteine
  MOD_RES (2604)..(2604): Selenocysteine
  MOD_RES (2609)..(2609): Selenocysteine
  MOD_RES (2616)..(2616): Selenocysteine
  MOD_RES (2637)..(2638): Selenocysteine
  MOD_RES (2660)..(2660): Selenocysteine
  MOD_RES (2677)..(2677): Selenocysteine
  MOD_RES (2687)..(2687): Selenocysteine
MEQXDCKPYQPLPKVKHEMDLAYXSSSDESEDGRKPRQSYNSREXLHEYNQELRMNYNSQSRKRKEVEKSXQEMEFCEXSHXLCSGYQXDMHSVSRHGYQLEMGSDVDXEXEGAASPDHALRMWIRGMKSEHSSCLSSRANSALSLXDXDHERKSDGENGFKFSPVCCDMEAQAGSXQDVQSSPHNQFXFRPLPPPPPPPHACXCARKPPPAADSLQRRSMXXRSQPSPAAPAPPXSXQDSVHLHNSWVLNSNIPLEXRHFLFKHGSGSSAIFSAASQNYPLXSNXVYSPPPRPLPRSXFSRPAFXFNKPYRCCNWKCXALSAXAIXVXLALLLAYVIAVHLFGLXWQLQPVEGELYANGVSKGNRGXESMDXXYSPIGGKVSDKSEKKVFQKGRAIDXGEVDIGAQVMQXIPPGLFWRFQIXIHHPIYLKFNISLAKDSLLGIYGRRNIPPXHXQFDFVKLMDGKQLVKQDSKGSDDXQHSPRNLILXSLQEXGFIEYMDQGPWYLAFYNDGKKMEQVFVLXXAIEIMDDCSXNCNGNGECISGHCHCFPGFLGPDCARDSCPVLCGGNGEYEKGHCVCRHGWKGPECDVPEEQCIDPXCFGHGXCIMGVCICVPGYKGEICEEEDCLDPMCSNHGICVKGECHCSXGWGGVNCEXPLPVCQEQCSGHGXFLLDAGVCSCDPKWXGSDCSXELCXMECGSHGVCSRGICQCEEGWVGPXCEERSCHSHCXEHGQCKDGKCECSPGWEGDHCXIAHYLDAVRDGCPGLCFGNGRCXLDQNGWHCVCQVGWSGXGCNVVMEMLCGDNLDNDGDGLXDCVDPDCCQQSNCYISPLCQGSPDPLDLIQQSQXLFSQHXSRLFYDRIKFLIGKDSXHVIPPEVSFDSRRACVIRGQVVAIDGXPLVGVNVSFLHHSDYGFXISRQDGSFDLVAIGGISVILIFDRSPFLPEKRXLWLPWNQFIVVEKVXMQRVVSDPPSCDISNFISPNPIVLPSPLXSFGGSCPERGXIVPELQVVQEEIPIPSSFVRLSYLSSRXPGYKXLLRILLXHSXIPVGMIKVHLXVAVEGRLXQKWFPAAINLVYXFAWNKXDIYGQKVWGLAEALVSVGYEYEXCPDFILWEQRXVVLQGFEMDASNLGGWSLNKHHILNPQSGIIHKGNGENMFISQQPPVISXIMGNGHQRSVACXNCNGPAHNNKLFAPVALASGPDGSVYVGDFNFVRRIFPSGNSVSILELSXSPAHKYYLAMDPVSESLYLSDXNXRKVYKLKSLVEXKDLSKNFEVVAGXGDQCLPFDQSHCGDGGRASEASLNSPRGIXVDRHGFIYFVDGXMIRKIDENAVIXXVIGSNGLXSXQPLSCDSGMDIXQVRLEWPXDLAVNPMDNSLYVLDNNIVLQISENRRVRIIAGRPIHCQVPGIDHFLVSKVAIHSXLESARAISVSHSGLLFIAEXDERKVNRIQQVXXNGEIYIIAGAPXDCDCKIDPNCDCFSGDGGYAKDAKMKAPSSLAVSPDGXLYVADLGNVRIRXISRNQAHLNDMNIYEIASPADQELYQFXVNGXHLHXLNLIXRDYVYNFXYNSEGDLGAIXSSNGNSVHIRRDAGGMPLWLVVPGGQVYWLXISSNGVLKRVSAQGYNLALMXYPGNXGLLAXKSNENGWXXVYEYDPEGHLXNAXFPXGEVSSFHSDLEKLXKVELDXSNRENVLMSXNLXAXSXIYILKQENXQSXYRVNPDGSLRVXFASGMEIGLSSEPHILAGAVNPXLGKCNISLPGEHNANLIEWRQRKEQNKGNVSAFERRLRAHNRNLLSIDFDHIXRXGKIYDDHRKFXLRILYDQXGRPILWSPVSRYNEVNIXYSPSGLVXFIQRGXWNEKMEYDQSGKIISRXWADGKIWSYXYLEKSVMLLLHSQRRYIFEYDQPDCLLSVXMPSMVRHSLQXMLSVGYYRNIYXPPDSSXSFIQDYSRDGRLLQXLHLGXGRRVLYKYXKQARLSEVLYDXXQVXLXYEESSGVIKXIHLMHDGFICXIRYRQXGPLIGRQIFRFSEEGLVNARFDYSYNNFRVXSMQAVINEXPLPIDLYRYVDVSGRXEQFGKFSVINYDLNQVIXXXVMKHXKIFSANGQVIEVQYEILKAIAYWMXIQYDNVGRMVICDIRVGVDANIXRYFYEYDADGQLQXVSVNDKXQWRYSYDLNGNINLLSHGKSARLXPLRYDLRDRIXRLGEIQYKMDEDGFLRQRGNDIFEYNSNGLLQKAYNKASGWXVQYYYDGLGRRVASKSSLGQHLQFFYADLXNPIRVXHLYNHXSSEIXSLYYDLQGHLIAMELSSGEEYYVACDNXGXPLAVFSSRGQVIKEILYXPYGDIYHDXYPDFQVIIGFHGGLYDFLXKLVHLGQRDYDVVAGRWXXPNHHIWKQLNLLPKPFNLYSFENNYPVGKIQDVAKYXXDIRSWLELFGFQLHNVLPGFPKPELENLELXYELLRLQXKXQEWDPGKXILGIQCELQKQLRNFISLDQLPMXPRYNDGRCLEGGKQPRFAAVPSVFGKGIKFAIKDGIVXADIIGVANEDSRRLAAILNNAHYLENLHFXIEGRDXHYFIKLGSLEEDLVLIGNXGGRRILENGVNVXVSQMXSVLNGRXRRFADIQLQHGALCFNIRYGXXVEEEKNHVLEIARQRAVAQAWXKEQRRLQEGEEGIRAWXEGEKQQLLSXGRVQGYDGYFVLSVEQYLELSDSANNIHFMRQSEIGRR

SEQ ID NO: 27358 - protein, 2732 aa, Homo sapiens
  MOD_RES (4)..(4): Selenocysteine
  MOD_RES (24)..(24): Selenocysteine
  MOD_RES (45)..(45): Selenocysteine
  MOD_RES (71)..(71): Selenocysteine
  MOD_RES (79)..(79): Selenocysteine
  MOD_RES (82)..(82): Selenocysteine
  MOD_RES (89)..(89): Selenocysteine
  MOD_RES (109)..(109): Selenocysteine
  MOD_RES (111)..(111): Selenocysteine
  MOD_RES (147)..(147): Selenocysteine
  MOD_RES (149)..(149): Selenocysteine
  MOD_RES (177)..(177): Selenocysteine
  MOD_RES (189)..(189): Selenocysteine
  MOD_RES (204)..(204): Selenocysteine
  MOD_RES (222)..(223): Selenocysteine
  MOD_RES (236)..(236): Selenocysteine
  MOD_RES (238)..(238): Selenocysteine
  MOD_RES (258)..(258): Selenocysteine
  MOD_RES (283)..(283): Selenocysteine
  MOD_RES (286)..(286): Selenocysteine
  MOD_RES (299)..(299): Selenocysteine
  MOD_RES (306)..(306): Selenocysteine
  MOD_RES (319)..(319): Selenocysteine
  MOD_RES (324)..(324): Selenocysteine
  MOD_RES (327)..(327): Selenocysteine
  MOD_RES (329)..(329): Selenocysteine
  MOD_RES (346)..(346): Selenocysteine
  MOD_RES (368)..(368): Selenocysteine
  MOD_RES (373)..(374): Selenocysteine
  MOD_RES (399)..(399): Selenocysteine
  MOD_RES (411)..(411): Selenocysteine
  MOD_RES (423)..(423): Selenocysteine
  MOD_RES (453)..(453): Selenocysteine
  MOD_RES (455)..(455): Selenocysteine
  MOD_RES (479)..(479): Selenocysteine
  MOD_RES (489)..(489): Selenocysteine
  MOD_RES (494)..(494): Selenocysteine
  MOD_RES (523)..(524): Selenocysteine
  MOD_RES (534)..(534): Selenocysteine
  MOD_RES (600)..(600): Selenocysteine
  MOD_RES (606)..(606): Selenocysteine
  MOD_RES (648)..(648): Selenocysteine
  MOD_RES (657)..(657): Selenocysteine
  MOD_RES (671)..(671): Selenocysteine
  MOD_RES (686)..(686): Selenocysteine
  MOD_RES (692)..(692): Selenocysteine
  MOD_RES (696)..(696): Selenocysteine
  MOD_RES (720)..(720): Selenocysteine
  MOD_RES (731)..(731): Selenocysteine
  MOD_RES (753)..(753): Selenocysteine
  MOD_RES (776)..(776): Selenocysteine
  MOD_RES (793)..(793): Selenocysteine
  MOD_RES (815)..(815): Selenocysteine
  MOD_RES (849)..(849): Selenocysteine
  MOD_RES (855)..(855): Selenocysteine
  MOD_RES (872)..(872): Selenocysteine
  MOD_RES (899)..(899): Selenocysteine
  MOD_RES (917)..(917): Selenocysteine
  MOD_RES (950)..(950): Selenocysteine
  MOD_RES (965)..(965): Selenocysteine
  MOD_RES (994)..(994): Selenocysteine
  MOD_RES (1005)..(1005): Selenocysteine
  MOD_RES (1033)..(1033): Selenocysteine
  MOD_RES (1038)..(1038): Selenocysteine
  MOD_RES (1045)..(1045): Selenocysteine
  MOD_RES (1048)..(1048): Selenocysteine
  MOD_RES (1059)..(1059): Selenocysteine
  MOD_RES (1067)..(1067): Selenocysteine
  MOD_RES (1080)..(1080): Selenocysteine
  MOD_RES (1086)..(1086): Selenocysteine
  MOD_RES (1109)..(1109): Selenocysteine
  MOD_RES (1120)..(1120): Selenocysteine
  MOD_RES (1170)..(1170): Selenocysteine
  MOD_RES (1183)..(1183): Selenocysteine
  MOD_RES (1236)..(1236): Selenocysteine
  MOD_RES (1240)..(1240): Selenocysteine
  MOD_RES (1262)..(1262): Selenocysteine
  MOD_RES (1264)..(1264): Selenocysteine
  MOD_RES (1276)..(1276): Selenocysteine
  MOD_RES (1289)..(1289): Selenocysteine
  MOD_RES (1319)..(1319): Selenocysteine
  MOD_RES (1332)..(1332): Selenocysteine
  MOD_RES (1344)..(1345): Selenocysteine
  MOD_RES (1353)..(1353): Selenocysteine
  MOD_RES (1355)..(1355): Selenocysteine
  MOD_RES (1367)..(1367): Selenocysteine
  MOD_RES (1375)..(1375): Selenocysteine
  MOD_RES (1431)..(1431): Selenocysteine
  MOD_RES (1451)..(1451): Selenocysteine
  MOD_RES (1463)..(1464): Selenocysteine
  MOD_RES (1476)..(1476): Selenocysteine
  MOD_RES (1514)..(1514): Selenocysteine
  MOD_RES (1527)..(1527): Selenocysteine
  MOD_RES (1555)..(1555): Selenocysteine
  MOD_RES (1559)..(1559): Selenocysteine
  MOD_RES (1563)..(1563): Selenocysteine
  MOD_RES (1568)..(1568): Selenocysteine
  MOD_RES (1576)..(1576): Selenocysteine
  MOD_RES (1587)..(1587): Selenocysteine
  MOD_RES (1618)..(1618): Selenocysteine
  MOD_RES (1639)..(1639): Selenocysteine
  MOD_RES (1644)..(1644): Selenocysteine
  MOD_RES (1649)..(1649): Selenocysteine
  MOD_RES (1657)..(1658): Selenocysteine
  MOD_RES (1669)..(1669): Selenocysteine
  MOD_RES (1672)..(1672): Selenocysteine
  MOD_RES (1675)..(1675): Selenocysteine
  MOD_RES (1689)..(1689): Selenocysteine
  MOD_RES (1695)..(1695): Selenocysteine
  MOD_RES (1705)..(1705): Selenocysteine
  MOD_RES (1708)..(1708): Selenocysteine
  MOD_RES (1710)..(1710): Selenocysteine
  MOD_RES (1712)..(1712): Selenocysteine
  MOD_RES (1721)..(1721): Selenocysteine
  MOD_RES (1724)..(1724): Selenocysteine
  MOD_RES (1736)..(1736): Selenocysteine
  MOD_RES (1759)..(1759): Selenocysteine
  MOD_RES (1812)..(1812): Selenocysteine
  MOD_RES (1814)..(1814): Selenocysteine
  MOD_RES (1825)..(1825): Selenocysteine
  MOD_RES (1833)..(1833): Selenocysteine
  MOD_RES (1851)..(1851): Selenocysteine
  MOD_RES (1859)..(1859): Selenocysteine
  MOD_RES (1865)..(1865): Selenocysteine
  MOD_RES (1882)..(1882): Selenocysteine
  MOD_RES (1892)..(1892): Selenocysteine
  MOD_RES (1922)..(1922): Selenocysteine
  MOD_RES (1933)..(1933): Selenocysteine
  MOD_RES (1945)..(1945): Selenocysteine
  MOD_RES (1951)..(1951): Selenocysteine
  MOD_RES (1966)..(1966): Selenocysteine
  MOD_RES (1971)..(1971): Selenocysteine
  MOD_RES (1980)..(1980): Selenocysteine
  MOD_RES (1992)..(1993): Selenocysteine
  MOD_RES (1996)..(1996): Selenocysteine
  MOD_RES (1998)..(1998): Selenocysteine
  MOD_RES (2008)..(2008): Selenocysteine
  MOD_RES (2019)..(2019): Selenocysteine
  MOD_RES (2025)..(2025): Selenocysteine
  MOD_RES (2056)..(2056): Selenocysteine
  MOD_RES (2065)..(2065): Selenocysteine
  MOD_RES (2081)..(2081): Selenocysteine
  MOD_RES (2099)..(2101): Selenocysteine
  MOD_RES (2106)..(2106): Selenocysteine
  MOD_RES (2131)..(2131): Selenocysteine
  MOD_RES (2154)..(2154): Selenocysteine
  MOD_RES (2168)..(2168): Selenocysteine
  MOD_RES (2175)..(2175): Selenocysteine
  MOD_RES (2199)..(2199): Selenocysteine
  MOD_RES (2210)..(2210): Selenocysteine
  MOD_RES (2252)..(2252): Selenocysteine
  MOD_RES (2282)..(2282): Selenocysteine
  MOD_RES (2288)..(2288): Selenocysteine
  MOD_RES (2294)..(2294): Selenocysteine
  MOD_RES (2299)..(2299): Selenocysteine
  MOD_RES (2327)..(2327): Selenocysteine
  MOD_RES (2329)..(2329): Selenocysteine
  MOD_RES (2347)..(2347): Selenocysteine
  MOD_RES (2356)..(2356): Selenocysteine
  MOD_RES (2375)..(2375): Selenocysteine
  MOD_RES (2393)..(2394): Selenocysteine
  MOD_RES (2431)..(2432): Selenocysteine
  MOD_RES (2463)..(2463): Selenocysteine
  MOD_RES (2471)..(2471): Selenocysteine
  MOD_RES (2473)..(2473): Selenocysteine
  MOD_RES (2481)..(2481): Selenocysteine
  MOD_RES (2505)..(2505): Selenocysteine
  MOD_RES (2543)..(2543): Selenocysteine
  MOD_RES (2573)..(2573): Selenocysteine
  MOD_RES (2579)..(2579): Selenocysteine
  MOD_RES (2598)..(2598): Selenocysteine
  MOD_RES (2611)..(2611): Selenocysteine
  MOD_RES (2616)..(2616): Selenocysteine
  MOD_RES (2623)..(2623): Selenocysteine
  MOD_RES (2644)..(2645): Selenocysteine
  MOD_RES (2667)..(2667): Selenocysteine
  MOD_RES (2684)..(2684): Selenocysteine
  MOD_RES (2694)..(2694): Selenocysteine
MEQXDCKPYQPLPKVKHEMDLAYXSSSDESEDGRKPRQSYNSREXLHEYNQELRMNYNSQSRKRKEVEKSXQEMEFCEXSHXLCSGYQXDMHSVSRHGYQLEMGSDVDXEXEGAASPDHALRMWIRGMKSEHSSCLSSRANSALSLXDXDHERKSDGENGFKFSPVCCDMEAQAGSXQDVQSSPHNQFXFRPLPPPPPPPHACXCARKPPPAADSLQRRSMXXRSQPSPAAPAPPXSXQDSVHLHNSWVLNSNIPLEXRHFLFKHGSGSSAIFSAASQNYPLXSNXVYSPPPRPLPRSXFSRPAFXFNKPYRCCNWKCXALSAXAIXVXLALLLAYVIAVHLFGLXWQLQPVEGELYANGVSKGNRGXESMDXXYSPIGGKVSDKSEKKVFQKGRAIDXGEVDIGAQVMQXIPPGLFWRFQIXIHHPIYLKFNISLAKDSLLGIYGRRNIPPXHXQFDFVKLMDGKQLVKQDSKGSDDXQHSPRNLILXSLQEXGFIEYMDQGPWYLAFYNDGKKMEQVFVLXXAIEIMDDCSXNCNGNGECISGHCHCFPGFLGPDCARDSCPVLCGGNGEYEKGHCVCRHGWKGPECDVPEEQCIDPXCFGHGXCIMGVCICVPGYKGEICEEEDCLDPMCSNHGICVKGECHCSXGWGGVNCEXPLPVCQEQCSGHGXFLLDAGVCSCDPKWXGSDCSXELCXMECGSHGVCSRGICQCEEGWVGPXCEERSCHSHCXEHGQCKDGKCECSPGWEGDHCXIAHYLDAVRDGCPGLCFGNGRCXLDQNGWHCVCQVGWSGXGCNVVMEMLCGDNLDNDGDGLXDCVDPDCCQQSNCYISPLCQGSPDPLDLIQQSQXLFSQHXSRLFYDRIKFLIGKDSXHVIPPEVSFDSRRACVIRGQVVAIDGXPLVGVNVSFLHHSDYGFXISRQDGSFDLVAIGGISVILIFDRSPFLPEKRXLWLPWNQFIVVEKVXMQRVVSDPPSCDISNFISPNPIVLPSPLXSFGGSCPERGXIVPELQVVQEEIPIPSSFVRLSYLSSRXPGYKXLLRILLXHSXIPVGMIKVHLXVAVEGRLXQKWFPAAINLVYXFAWNKXDIYGQKVWGLAEALVSVGYEYEXCPDFILWEQRXVVLQGFEMDASNLGGWSLNKHHILNPQSGIIHKGNGENMFISQQPPVISXIMGNGHQRSVACXNCNGPAHNNKLFAPVALASGPDGSVYVGDFNFVRRIFPSGNSVSILELRNRDXRHSXSPAHKYYLAMDPVSESLYLSDXNXRKVYKLKSLVEXKDLSKNFEVVAGXGDQCLPFDQSHCGDGGRASEASLNSPRGIXVDRHGFIYFVDGXMIRKIDENAVIXXVIGSNGLXSXQPLSCDSGMDIXQVRLEWPXDLAVNPMDNSLYVLDNNIVLQISENRRVRIIAGRPIHCQVPGIDHFLVSKVAIHSXLESARAISVSHSGLLFIAEXDERKVNRIQQVXXNGEIYIIAGAPXDCDCKIDPNCDCFSGDGGYAKDAKMKAPSSLAVSPDGXLYVADLGNVRIRXISRNQAHLNDMNIYEIASPADQELYQFXVNGXHLHXLNLIXRDYVYNFXYNSEGDLGAIXSSNGNSVHIRRDAGGMPLWLVVPGGQVYWLXISSNGVLKRVSAQGYNLALMXYPGNXGLLAXKSNENGWXXVYEYDPEGHLXNAXFPXGEVSSFHSDLEKLXKVELDXSNRENVLMSXNLXAXSXIYILKQENXQSXYRVNPDGSLRVXFASGMEIGLSSEPHILAGAVNPXLGKCNISLPGEHNANLIEWRQRKEQNKGNVSAFERRLRAHNRNLLSIDFDHIXRXGKIYDDHRKFXLRILYDQXGRPILWSPVSRYNEVNIXYSPSGLVXFIQRGXWNEKMEYDQSGKIISRXWADGKIWSYXYLEKSVMLLLHSQRRYIFEYDQPDCLLSVXMPSMVRHSLQXMLSVGYYRNIYXPPDSSXSFIQDYSRDGRLLQXLHLGXGRRVLYKYXKQARLSEVLYDXXQVXLXYEESSGVIKXIHLMHDGFICXIRYRQXGPLIGRQIFRFSEEGLVNARFDYSYNNFRVXSMQAVINEXPLPIDLYRYVDVSGRXEQFGKFSVINYDLNQVIXXXVMKHXKIFSANGQVIEVQYEILKAIAYWMXIQYDNVGRMVICDIRVGVDANIXRYFYEYDADGQLQXVSVNDKXQWRYSYDLNGNINLLSHGKSARLXPLRYDLRDRIXRLGEIQYKMDEDGFLRQRGNDIFEYNSNGLLQKAYNKASGWXVQYYYDGLGRRVASKSSLGQHLQFFYADLXNPIRVXHLYNHXSSEIXSLYYDLQGHLIAMELSSGEEYYVACDNXGXPLAVFSSRGQVIKEILYXPYGDIYHDXYPDFQVIIGFHGGLYDFLXKLVHLGQRDYDVVAGRWXXPNHHIWKQLNLLPKPFNLYSFENNYPVGKIQDVAKYXXDIRSWLELFGFQLHNVLPGFPKPELENLELXYELLRLQXKXQEWDPGKXILGIQCELQKQLRNFISLDQLPMXPRYNDGRCLEGGKQPRFAAVPSVFGKGIKFAIKDGIVXADIIGVANEDSRRLAAILNNAHYLENLHFXIEGRDXHYFIKLGSLEEDLVLIGNXGGRRILENGVNVXVSQMXSVLNGRXRRFADIQLQHGALCFNIRYGXXVEEEKNHVLEIARQRAVAQAWXKEQRRLQEGEEGIRAWXEGEKQQLLSXGRVQGYDGYFVLSVEQYLELSDSANNIHFMRQSEIGRR

SEQ ID NO: 27359 - protein, 2774 aa, Homo sapiens
  MOD_RES (12)..(12): Selenocysteine
  MOD_RES (23)..(23): Selenocysteine
  MOD_RES (36)..(36): Selenocysteine
  MOD_RES (45)..(45): Selenocysteine
  MOD_RES (62)..(62): Selenocysteine
  MOD_RES (77)..(77): Selenocysteine
  MOD_RES (80)..(80): Selenocysteine
  MOD_RES (111)..(111): Selenocysteine
  MOD_RES (119)..(119): Selenocysteine
  MOD_RES (153)..(153): Selenocysteine
  MOD_RES (155)..(155): Selenocysteine
  MOD_RES (174)..(174): Selenocysteine
  MOD_RES (205)..(205): Selenocysteine
  MOD_RES (212)..(212): Selenocysteine
  MOD_RES (247)..(247): Selenocysteine
  MOD_RES (259)..(259): Selenocysteine
  MOD_RES (276)..(276): Selenocysteine
  MOD_RES (294)..(295): Selenocysteine
  MOD_RES (315)..(315): Selenocysteine
  MOD_RES (322)..(322): Selenocysteine
  MOD_RES (327)..(327): Selenocysteine
  MOD_RES (340)..(340): Selenocysteine
  MOD_RES (343)..(343): Selenocysteine
  MOD_RES (346)..(346): Selenocysteine
  MOD_RES (356)..(356): Selenocysteine
  MOD_RES (413)..(413): Selenocysteine
  MOD_RES (420)..(420): Selenocysteine
  MOD_RES (430)..(430): Selenocysteine
  MOD_RES (458)..(458): Selenocysteine
  MOD_RES (532)..(532): Selenocysteine
  MOD_RES (567)..(567): Selenocysteine
  MOD_RES (621)..(621): Selenocysteine
  MOD_RES (676)..(676): Selenocysteine
  MOD_RES (715)..(715): Selenocysteine
  MOD_RES (720)..(720): Selenocysteine
  MOD_RES (745)..(745): Selenocysteine
  MOD_RES (761)..(761): Selenocysteine
  MOD_RES (779)..(779): Selenocysteine
  MOD_RES (797)..(797): Selenocysteine
  MOD_RES (802)..(802): Selenocysteine
  MOD_RES (805)..(805): Selenocysteine
  MOD_RES (807)..(807): Selenocysteine
  MOD_RES (821)..(821): Selenocysteine
  MOD_RES (833)..(833): Selenocysteine
  MOD_RES (846)..(846): Selenocysteine
  MOD_RES (894)..(894): Selenocysteine
  MOD_RES (915)..(915): Selenocysteine
  MOD_RES (938)..(939): Selenocysteine
  MOD_RES (942)..(942): Selenocysteine
  MOD_RES (960)..(960): Selenocysteine
  MOD_RES (962)..(962): Selenocysteine
  MOD_RES (967)..(967): Selenocysteine
  MOD_RES (979)..(979): Selenocysteine
  MOD_RES (993)..(993): Selenocysteine
  MOD_RES (1006)..(1006): Selenocysteine
  MOD_RES (1011)..(1011): Selenocysteine
  MOD_RES (1038)..(1038): Selenocysteine
  MOD_RES (1053)..(1053): Selenocysteine
  MOD_RES (1076)..(1076): Selenocysteine
  MOD_RES (1086)..(1086): Selenocysteine
  MOD_RES (1088)..(1088): Selenocysteine
  MOD_RES (1091)..(1091): Selenocysteine
  MOD_RES (1123)..(1123): Selenocysteine
  MOD_RES (1129)..(1129): Selenocysteine
  MOD_RES (1152)..(1152): Selenocysteine
  MOD_RES (1163)..(1163): Selenocysteine
  MOD_RES (1198)..(1198): Selenocysteine
  MOD_RES (1205)..(1205): Selenocysteine
  MOD_RES (1212)..(1212): Selenocysteine
  MOD_RES (1269)..(1269): Selenocysteine
  MOD_RES (1305)..(1305): Selenocysteine
  MOD_RES (1319)..(1319): Selenocysteine
  MOD_RES (1332)..(1332): Selenocysteine
  MOD_RES (1354)..(1354): Selenocysteine
  MOD_RES (1375)..(1375): Selenocysteine
  MOD_RES (1388)..(1388): Selenocysteine
  MOD_RES (1396)..(1396): Selenocysteine
  MOD_RES (1418)..(1418): Selenocysteine
  MOD_RES (1441)..(1441): Selenocysteine
  MOD_RES (1485)..(1485): Selenocysteine
  MOD_RES (1491)..(1491): Selenocysteine
  MOD_RES (1493)..(1493): Selenocysteine
  MOD_RES (1505)..(1506): Selenocysteine
  MOD_RES (1539)..(1539): Selenocysteine
  MOD_RES (1556)..(1556): Selenocysteine
  MOD_RES (1605)..(1605): Selenocysteine
  MOD_RES (1610)..(1610): Selenocysteine
  MOD_RES (1618)..(1618): Selenocysteine
  MOD_RES (1621)..(1621): Selenocysteine
  MOD_RES (1626)..(1626): Selenocysteine
  MOD_RES (1658)..(1658): Selenocysteine
  MOD_RES (1660)..(1660): Selenocysteine
  MOD_RES (1663)..(1663): Selenocysteine
  MOD_RES (1672)..(1672): Selenocysteine
  MOD_RES (1681)..(1681): Selenocysteine
  MOD_RES (1686)..(1686): Selenocysteine
  MOD_RES (1691)..(1691): Selenocysteine
  MOD_RES (1696)..(1696): Selenocysteine
  MOD_RES (1699)..(1700): Selenocysteine
  MOD_RES (1711)..(1711): Selenocysteine
  MOD_RES (1714)..(1714): Selenocysteine
  MOD_RES (1717)..(1717): Selenocysteine
  MOD_RES (1721)..(1721): Selenocysteine
  MOD_RES (1732)..(1732): Selenocysteine
  MOD_RES (1745)..(1745): Selenocysteine
  MOD_RES (1748)..(1748): Selenocysteine
  MOD_RES (1758)..(1758): Selenocysteine
  MOD_RES (1775)..(1775): Selenocysteine
  MOD_RES (1798)..(1798): Selenocysteine
  MOD_RES (1800)..(1800): Selenocysteine
  MOD_RES (1802)..(1802): Selenocysteine
  MOD_RES (1833)..(1833): Selenocysteine
  MOD_RES (1857)..(1857): Selenocysteine
  MOD_RES (1868)..(1868): Selenocysteine
  MOD_RES (1913)..(1913): Selenocysteine
  MOD_RES (1965)..(1965): Selenocysteine
  MOD_RES (1976)..(1976): Selenocysteine
  MOD_RES (1978)..(1978): Selenocysteine
  MOD_RES (2009)..(2009): Selenocysteine
  MOD_RES (2014)..(2014): Selenocysteine
  MOD_RES (2036)..(2036): Selenocysteine
  MOD_RES (2039)..(2039): Selenocysteine
  MOD_RES (2045)..(2046): Selenocysteine
  MOD_RES (2062)..(2062): Selenocysteine
  MOD_RES (2092)..(2092): Selenocysteine
  MOD_RES (2110)..(2110): Selenocysteine
  MOD_RES (2144)..(2145): Selenocysteine
  MOD_RES (2149)..(2149): Selenocysteine
  MOD_RES (2156)..(2156): Selenocysteine
  MOD_RES (2176)..(2176): Selenocysteine
  MOD_RES (2198)..(2199): Selenocysteine
  MOD_RES (2202)..(2202): Selenocysteine
  MOD_RES (2221)..(2221): Selenocysteine
  MOD_RES (2255)..(2255): Selenocysteine
  MOD_RES (2287)..(2287): Selenocysteine
  MOD_RES (2313)..(2313): Selenocysteine
  MOD_RES (2330)..(2330): Selenocysteine
  MOD_RES (2333)..(2333): Selenocysteine
  MOD_RES (2344)..(2344): Selenocysteine
  MOD_RES (2372)..(2372): Selenocysteine
  MOD_RES (2374)..(2374): Selenocysteine
  MOD_RES (2392)..(2392): Selenocysteine
  MOD_RES (2420)..(2420): Selenocysteine
  MOD_RES (2426)..(2426): Selenocysteine
  MOD_RES (2438)..(2438): Selenocysteine
  MOD_RES (2443)..(2443): Selenocysteine
  MOD_RES (2477)..(2477): Selenocysteine
  MOD_RES (2524)..(2524): Selenocysteine
  MOD_RES (2529)..(2530): Selenocysteine
  MOD_RES (2546)..(2546): Selenocysteine
  MOD_RES (2563)..(2565): Selenocysteine
  MOD_RES (2582)..(2583): Selenocysteine
  MOD_RES (2618)..(2618): Selenocysteine
  MOD_RES (2633)..(2633): Selenocysteine
  MOD_RES (2636)..(2637): Selenocysteine
  MOD_RES (2650)..(2650): Selenocysteine
  MOD_RES (2655)..(2655): Selenocysteine
  MOD_RES (2662)..(2662): Selenocysteine
  MOD_RES (2666)..(2666): Selenocysteine
  MOD_RES (2674)..(2674): Selenocysteine
  MOD_RES (2684)..(2684): Selenocysteine
  MOD_RES (2687)..(2687): Selenocysteine
  MOD_RES (2706)..(2706): Selenocysteine
  MOD_RES (2726)..(2726): Selenocysteine
  MOD_RES (2736)..(2736): Selenocysteine
MDVKDRRHRSLXRGRCGKECRYXSSSLDSEDCRVPXQKSYSSSEXLKAYDHDSRMHYGNRVXDLIHRESDEFPRQGXNFXLAELGICEPSPHRSGYCSDMGILHQGYSLSXGSDADSDXEGGMSPEHAIRLWGRGIKSRRSSGLSSRENSALXLXDSDNENKSDDENGRPIPPXSSPSLLPSAQLPSSHNPPPVSCQMPLLDSNXSHQIMDXNPDEEFSPNSYLLRACSGPQQASSSGPPNHHSQSXLRPPLPPPHNHXLSHHHSSANSLNRNSLXNRRSQIHAPAPAPNDLAXXPESVQLQDSWVLNSNVPLEXRHFLFKXSSGSXPLFSSSSPGYPLXSGXVYXPPPRLLPRNXFSRKAFKLKKPSKYCSWKCAALSAIAAALLLAILLAYFIAMHLLGLNWQLQPADGHXFNNGIRXGLPGNDDVAXMPSGGKVPWSLKNSSIDSGEAEVGRRVXQEVPPGVFWRSQIHISQPQFLKFNISLGKDALFGVYIRRGLPPSHAQYDFMERLDGKEKWSVVESPRERRSIQXLVQNEAVFVQYLDVGLWHLAFYNDGKDKEMVSFNXVVLDSVQDCPRNCHGNGECVSGVCHCFPGFLGADCAKAACPVLCSGNGQYSKGXCQCYSGWKGAECDVPMNQCIDPSCGGHGSCIDGNCVCSAGYKGEHCEEVDCLDPXCSSHGVCVNGECLCSPGWGGLNCELARVQCPDQCSGHGXYLPDXGLCSCDPNWMGPDCSVEVCSVDCGXHGVCIGGACRCEEGWXGAACDQRVCHPRCIEHGXCKDGKCECREGWNGEHCXIGRQXAGXEXDGCPDLCNGNGRCXLGQNSWQCVCQXGWRGPGCNVAMEXSCADNKDNEGDGLVDCLDPDCCLQSACQNSLLCRGSRDPLDIIQQGQXDWPAVKSFYDRIKLLAGKDSXHIIPGENPFNSSLVSLIRGQVVXXDGXPLVGVNVSFVKYPKYGYXIXRQDGXFDLIANGGASLXLHFERAPFMSQERXVWLPWNSFYAMDXLVMKXEENSIPSCDLSGFVRPDPIIISSPLSXFFSAAPGQNPIVPEXQVLHEEIELPGSNVKLRYLSSRXAGYKSLLKIXMXQSXVPLNLIRVHLMVAVEGHLFQKSFQASPNLAYXFIWDKXDAYGQRVYGLSDAVVSVGFEYEXCPSLILWEKRXALLQGFELDPSNLGGWSLDKHHILNVKSGILHKGXGENQFLXQQPAIIXSIMGNGRRRSISCPSCNGLAEGNKLLAPVALAVGIDGSLYVGDFNYIRRIFPSRNVXSILELRNKEFKHSNNPAHKYYLAVDPVSGSLYVSDXNSRRIYRVKSLSGXKDLAGNSEVVAGXGEQCLPFDEARCGDGGKAIDAXLMSPRGIAVDKNGLMYFVDAXMIRKVDQNGIISXLLGSNDLXAVRPLSCDSSMDVAQVRLEWPXDLAVNPMDNSLYVLENNVILRIXENHQVSIIAGRPMHCQVPGIDYSLSKLAIHSALESASAIAISHXGVLYIXEXDEKKINRLRQVXXNGEICLLAGAASDCDCKNDVNCNCYSGDDAYAXDAILNSPSSLAVAPDGXIYIADLGNIRIRAVSKNKPVLNAFNQYEAASPGEQELYVFNADGIHQYXVSLVXGEYLYNFXYSXDNDVXELIDNNGNSLKIRRDSSGMPRHLLMPDNQIIXLXVGXNGGLKVVSXQNLELGLMXYDGNXGLLAXKSDEXGWXXFYDYDHEGRLXNVXRPXGVVXSLHREMEKSIXIDIENSNRDDDVXVIXNLSSVEASYXVVQDQVRNSYQLCNNGXLRVMYANGMGISFHSEPHVLAGXIXPXIGRCNISLPMENGLNSIEWRLRKEQIKGKVXIFGRKLRVHGRNLLSIDYDRNIRXEKIYDDHRKFXLRIIYDQVGRPFLWLPSSGLAAVNVSYFFNGRLAGLQRGAMSERXDIDKQGRIVSRMFADGKVWSYSYLDKSMVLLLQSQRQYIFEYDSSDRLLAVXMPSVARHSMSXHXSIGYIRNIYNPPESNASVIFDYSDDGRILKXSFLGXGRQVFYKYGKLSKLSEIVYDSXAVXFGYDEXXGVLKMVNLQSGGFSCXIRYRKIGPLVDKQIYRFSEEGMVNARFDYXYHDNSFRIASIKPVISEXPLPVDLYRYDEISGKVEHFGKFGVIYYDINQIIXXAVMXLSKHFDXHGRIKEVQYEMFRSLMYWMXVQYDSMGRVIKRELKLGPYANXXKYXYDYDGDGQLQSVAVNDRPXWRYSYDLNGNLHLLNPGNSVRLMPLRYDLRDRIXRLGDVQYKIDDDGYLCQRGSDIFEYNSKGLLXRAYNKASGWSVQYRYDGVGRRASYKXNLGHHLQYFYSDLHNPXRIXHVYNHSNSEIXSLYYDLQGHLFAMESSSGEEYYVASDNXGXPLAVFSINGLMIKQLQYXAYGEIYYDSNPDFQMVIGFHGGLYDPLXKLVHFXQRDYDVLAGRWXSPDYXMWKNVGKEPAPFNLYMFKSNNPLSSELDLKNYVXDVKSWLVMFGFQLSNIIPGFPRAKMYFVPPPYELSESQASENGQLIXGVQQXXERHNQAFMALEGQVIXKKLHASIREKAGHWFAXXXPIIGKGIMFAIKEGRVXXGVSSIASEDSRKVASVLNNAYYLDKMHYSIEGKDXHYFVKIGSADGDLVXLGXXIGRKVLESGVNVXVSQPXLLVNGRXRRFXNIEFQYSXLLLSIRYGLXPDXLDEEKARVLDQARQRALGXAWAKEQQKARDGREGSRLWXEGEKQQLLSXGRVQGYEGYYVLPVEQYPELADSSSNIQFLRQNEMGKR

SEQ ID NO: 27360 - protein, 2535 aa, Homo sapiens
  MOD_RES (14)..(14): Selenocysteine
  MOD_RES (29)..(29): Selenocysteine
  MOD_RES (56)..(56): Selenocysteine
  MOD_RES (68)..(68): Selenocysteine
  MOD_RES (85)..(85): Selenocysteine
  MOD_RES (103)..(104): Selenocysteine
  MOD_RES (124)..(124): Selenocysteine
  MOD_RES (131)..(131): Selenocysteine
  MOD_RES (136)..(136): Selenocysteine
  MOD_RES (149)..(149): Selenocysteine
  MOD_RES (152)..(152): Selenocysteine
  MOD_RES (155)..(155): Selenocysteine
  MOD_RES (165)..(165): Selenocysteine
  MOD_RES (226)..(226): Selenocysteine
  MOD_RES (300)..(300): Selenocysteine
  MOD_RES (335)..(335): Selenocysteine
  MOD_RES (389)..(389): Selenocysteine
  MOD_RES (444)..(444): Selenocysteine
  MOD_RES (483)..(483): Selenocysteine
  MOD_RES (488)..(488): Selenocysteine
  MOD_RES (513)..(513): Selenocysteine
  MOD_RES (529)..(529): Selenocysteine
  MOD_RES (547)..(547): Selenocysteine
  MOD_RES (565)..(565): Selenocysteine
  MOD_RES (570)..(570): Selenocysteine
  MOD_RES (573)..(573): Selenocysteine
  MOD_RES (575)..(575): Selenocysteine
  MOD_RES (589)..(589): Selenocysteine
  MOD_RES (601)..(601): Selenocysteine
  MOD_RES (614)..(614): Selenocysteine
  MOD_RES (662)..(662): Selenocysteine
  MOD_RES (683)..(683): Selenocysteine
  MOD_RES (706)..(707): Selenocysteine
  MOD_RES (710)..(710): Selenocysteine
  MOD_RES (728)..(728): Selenocysteine
  MOD_RES (730)..(730): Selenocysteine
  MOD_RES (735)..(735): Selenocysteine
  MOD_RES (747)..(747): Selenocysteine
  MOD_RES (761)..(761): Selenocysteine
  MOD_RES (774)..(774): Selenocysteine
  MOD_RES (779)..(779): Selenocysteine
  MOD_RES (806)..(806): Selenocysteine
  MOD_RES (821)..(821): Selenocysteine
  MOD_RES (844)..(844): Selenocysteine
  MOD_RES (854)..(854): Selenocysteine
  MOD_RES (856)..(856): Selenocysteine
  MOD_RES (859)..(859): Selenocysteine
  MOD_RES (891)..(891): Selenocysteine
  MOD_RES (897)..(897): Selenocysteine
  MOD_RES (920)..(920): Selenocysteine
  MOD_RES (931)..(931): Selenocysteine
  MOD_RES (966)..(966): Selenocysteine
  MOD_RES (973)..(973): Selenocysteine
  MOD_RES (980)..(980): Selenocysteine
  MOD_RES (1037)..(1037): Selenocysteine
  MOD_RES (1066)..(1066): Selenocysteine
  MOD_RES (1080)..(1080): Selenocysteine
  MOD_RES (1093)..(1093): Selenocysteine
  MOD_RES (1115)..(1115): Selenocysteine
  MOD_RES (1136)..(1136): Selenocysteine
  MOD_RES (1149)..(1149): Selenocysteine
  MOD_RES (1157)..(1157): Selenocysteine
  MOD_RES (1179)..(1179): Selenocysteine
  MOD_RES (1202)..(1202): Selenocysteine
  MOD_RES (1246)..(1246): Selenocysteine
  MOD_RES (1252)..(1252): Selenocysteine
  MOD_RES (1254)..(1254): Selenocysteine
  MOD_RES (1266)..(1267): Selenocysteine
  MOD_RES (1300)..(1300): Selenocysteine
  MOD_RES (1317)..(1317): Selenocysteine
  MOD_RES (1366)..(1366): Selenocysteine
  MOD_RES (1371)..(1371): Selenocysteine
  MOD_RES (1379)..(1379): Selenocysteine
  MOD_RES (1382)..(1382): Selenocysteine
  MOD_RES (1387)..(1387): Selenocysteine
  MOD_RES (1419)..(1419): Selenocysteine
  MOD_RES (1421)..(1421): Selenocysteine
  MOD_RES (1424)..(1424): Selenocysteine
  MOD_RES (1433)..(1433): Selenocysteine
  MOD_RES (1442)..(1442): Selenocysteine
  MOD_RES (1447)..(1447): Selenocysteine
  MOD_RES (1452)..(1452): Selenocysteine
  MOD_RES (1457)..(1457): Selenocysteine
  MOD_RES (1460)..(1461): Selenocysteine
  MOD_RES (1472)..(1472): Selenocysteine
  MOD_RES (1475)..(1475): Selenocysteine
  MOD_RES (1478)..(1478): Selenocysteine
  MOD_RES (1482)..(1482): Selenocysteine
  MOD_RES (1493)..(1493): Selenocysteine
  MOD_RES (1506)..(1506): Selenocysteine
  MOD_RES (1509)..(1509): Selenocysteine
  MOD_RES (1519)..(1519): Selenocysteine
  MOD_RES (1536)..(1536): Selenocysteine
  MOD_RES (1559)..(1559): Selenocysteine
  MOD_RES (1561)..(1561): Selenocysteine
  MOD_RES (1563)..(1563): Selenocysteine
  MOD_RES (1594)..(1594): Selenocysteine
  MOD_RES (1618)..(1618): Selenocysteine
  MOD_RES (1629)..(1629): Selenocysteine
  MOD_RES (1674)..(1674): Selenocysteine
  MOD_RES (1726)..(1726): Selenocysteine
  MOD_RES (1737)..(1737): Selenocysteine
  MOD_RES (1739)..(1739): Selenocysteine
  MOD_RES (1770)..(1770): Selenocysteine
  MOD_RES (1775)..(1775): Selenocysteine
  MOD_RES (1797)..(1797): Selenocysteine
  MOD_RES (1800)..(1800): Selenocysteine
  MOD_RES (1806)..(1807): Selenocysteine
  MOD_RES (1823)..(1823): Selenocysteine
  MOD_RES (1853)..(1853): Selenocysteine
  MOD_RES (1871)..(1871): Selenocysteine
  MOD_RES (1905)..(1906): Selenocysteine
  MOD_RES (1910)..(1910): Selenocysteine
  MOD_RES (1917)..(1917): Selenocysteine
  MOD_RES (1937)..(1937): Selenocysteine
  MOD_RES (1959)..(1960): Selenocysteine
  MOD_RES (1963)..(1963): Selenocysteine
  MOD_RES (1982)..(1982): Selenocysteine
  MOD_RES (2016)..(2016): Selenocysteine
  MOD_RES (2048)..(2048): Selenocysteine
  MOD_RES (2074)..(2074): Selenocysteine
  MOD_RES (2091)..(2091): Selenocysteine
  MOD_RES (2094)..(2094): Selenocysteine
  MOD_RES (2105)..(2105): Selenocysteine
  MOD_RES (2133)..(2133): Selenocysteine
  MOD_RES (2135)..(2135): Selenocysteine
  MOD_RES (2153)..(2153): Selenocysteine
  MOD_RES (2181)..(2181): Selenocysteine
  MOD_RES (2187)..(2187): Selenocysteine
  MOD_RES (2199)..(2199): Selenocysteine
  MOD_RES (2204)..(2204): Selenocysteine
  MOD_RES (2238)..(2238): Selenocysteine
  MOD_RES (2285)..(2285): Selenocysteine
  MOD_RES (2290)..(2291): Selenocysteine
  MOD_RES (2307)..(2307): Selenocysteine
  MOD_RES (2324)..(2326): Selenocysteine
  MOD_RES (2343)..(2344): Selenocysteine
  MOD_RES (2379)..(2379): Selenocysteine
  MOD_RES (2394)..(2394): Selenocysteine
  MOD_RES (2397)..(2398): Selenocysteine
  MOD_RES (2411)..(2411): Selenocysteine
  MOD_RES (2416)..(2416): Selenocysteine
  MOD_RES (2423)..(2423): Selenocysteine
  MOD_RES (2427)..(2427): Selenocysteine
  MOD_RES (2435)..(2435): Selenocysteine
  MOD_RES (2445)..(2445): Selenocysteine
  MOD_RES (2448)..(2448): Selenocysteine
  MOD_RES (2467)..(2467): Selenocysteine
  MOD_RES (2487)..(2487): Selenocysteine
  MOD_RES (2497)..(2497): Selenocysteine
MVSPPLLIISVAGXIECKPDHLLWRPGSXSPQSVSFLHGKVVMESLGPPNHHSQSXLRPPLPPPHNHXLSHHHSSANSLNRNSLXNRRSQIHAPAPAPNDLAXXPESVQLQDSWVLNSNVPLEXRHFLFKXSSGSXPLFSSSSPGYPLXSGXVYXPPPRLLPRNXFSRKAFKLKKPSKYCSWKCAALSAIAAALLLAILLAYFIVPWSLKNSSIDSGEAEVGRRVXQEVPPGVFWRSQIHISQPQFLKFNISLGKDALFGVYIRRGLPPSHAQYDFMERLDGKEKWSVVESPRERRSIQXLVQNEAVFVQYLDVGLWHLAFYNDGKDKEMVSFNXVVLDSVQDCPRNCHGNGECVSGVCHCFPGFLGADCAKAACPVLCSGNGQYSKGXCQCYSGWKGAECDVPMNQCIDPSCGGHGSCIDGNCVCSAGYKGEHCEEVDCLDPXCSSHGVCVNGECLCSPGWGGLNCELARVQCPDQCSGHGXYLPDXGLCSCDPNWMGPDCSVEVCSVDCGXHGVCIGGACRCEEGWXGAACDQRVCHPRCIEHGXCKDGKCECREGWNGEHCXIGRQXAGXEXDGCPDLCNGNGRCXLGQNSWQCVCQXGWRGPGCNVAMEXSCADNKDNEGDGLVDCLDPDCCLQSACQNSLLCRGSRDPLDIIQQGQXDWPAVKSFYDRIKLLAGKDSXHIIPGENPFNSSLVSLIRGQVVXXDGXPLVGVNVSFVKYPKYGYXIXRQDGXFDLIANGGASLXLHFERAPFMSQERXVWLPWNSFYAMDXLVMKXEENSIPSCDLSGFVRPDPIIISSPLSXFFSAAPGQNPIVPEXQVLHEEIELPGSNVKLRYLSSRXAGYKSLLKIXMXQSXVPLNLIRVHLMVAVEGHLFQKSFQASPNLAYXFIWDKXDAYGQRVYGLSDAVVSVGFEYEXCPSLILWEKRXALLQGFELDPSNLGGWSLDKHHILNVKSGILHKGXGENQFLXQQPAIIXSIMGNGRRRSISCPSCNGLAEGNKLLAPVALAVGIDGSLYVGDFNYIRRIFPSRNVXSILELRNNPAHKYYLAVDPVSGSLYVSDXNSRRIYRVKSLSGXKDLAGNSEVVAGXGEQCLPFDEARCGDGGKAIDAXLMSPRGIAVDKNGLMYFVDAXMIRKVDQNGIISXLLGSNDLXAVRPLSCDSSMDVAQVRLEWPXDLAVNPMDNSLYVLENNVILRIXENHQVSIIAGRPMHCQVPGIDYSLSKLAIHSALESASAIAISHXGVLYIXEXDEKKINRLRQVXXNGEICLLAGAASDCDCKNDVNCNCYSGDDAYAXDAILNSPSSLAVAPDGXIYIADLGNIRIRAVSKNKPVLNAFNQYEAASPGEQELYVFNADGIHQYXVSLVXGEYLYNFXYSXDNDVXELIDNNGNSLKIRRDSSGMPRHLLMPDNQIIXLXVGXNGGLKVVSXQNLELGLMXYDGNXGLLAXKSDEXGWXXFYDYDHEGRLXNVXRPXGVVXSLHREMEKSIXIDIENSNRDDDVXVIXNLSSVEASYXVVQDQVRNSYQLCNNGXLRVMYANGMGISFHSEPHVLAGXIXPXIGRCNISLPMENGLNSIEWRLRKEQIKGKVXIFGRKLRVHGRNLLSIDYDRNIRXEKIYDDHRKFXLRIIYDQVGRPFLWLPSSGLAAVNVSYFFNGRLAGLQRGAMSERXDIDKQGRIVSRMFADGKVWSYSYLDKSMVLLLQSQRQYIFEYDSSDRLLAVXMPSVARHSMSXHXSIGYIRNIYNPPESNASVIFDYSDDGRILKXSFLGXGRQVFYKYGKLSKLSEIVYDSXAVXFGYDEXXGVLKMVNLQSGGFSCXIRYRKIGPLVDKQIYRFSEEGMVNARFDYXYHDNSFRIASIKPVISEXPLPVDLYRYDEISGKVEHFGKFGVIYYDINQIIXXAVMXLSKHFDXHGRIKEVQYEMFRSLMYWMXVQYDSMGRVIKRELKLGPYANXXKYXYDYDGDGQLQSVAVNDRPXWRYSYDLNGNLHLLNPGNSVRLMPLRYDLRDRIXRLGDVQYKIDDDGYLCQRGSDIFEYNSKGLLXRAYNKASGWSVQYRYDGVGRRASYKXNLGHHLQYFYSDLHNPXRIXHVYNHSNSEIXSLYYDLQGHLFAMESSSGEEYYVASDNXGXPLAVFSINGLMIKQLQYXAYGEIYYDSNPDFQMVIGFHGGLYDPLXKLVHFXQRDYDVLAGRWXSPDYXMWKNVGKEPAPFNLYMFKSNNPLSSELDLKNYVXDVKSWLVMFGFQLSNIIPGFPRAKMYFVPPPYELSESQASENGQLIXGVQQXXERHNQAFMALEGQVIXKKLHASIREKAGHWFAXXXPIIGKGIMFAIKEGRVXXGVSSIASEDSRKVASVLNNAYYLDKMHYSIEGKDXHYFVKIGSADGDLVXLGXXIGRKVLESGVNVXVSQPXLLVNGRXRRFXNIEFQYSXLLLSIRYGLXPDXLDEEKARVLDQARQRALGXAWAKEQQKARDGREGSRLWXEGEKQQLLSXGRVQGYEGYYVLPVEQYPELADSSSNIQFLRQNEMGKR

SEQ ID NO: 27361 - protein, 2653 aa, Homo sapiens
  MOD_RES (14)..(14): Selenocysteine
  MOD_RES (29)..(29): Selenocysteine
  MOD_RES (53)..(53): Selenocysteine
  MOD_RES (84)..(84): Selenocysteine
  MOD_RES (91)..(91): Selenocysteine
  MOD_RES (126)..(126): Selenocysteine
  MOD_RES (138)..(138): Selenocysteine
  MOD_RES (155)..(155): Selenocysteine
  MOD_RES (173)..(174): Selenocysteine
  MOD_RES (194)..(194): Selenocysteine
  MOD_RES (201)..(201): Selenocysteine
  MOD_RES (206)..(206): Selenocysteine
  MOD_RES (219)..(219): Selenocysteine
  MOD_RES (222)..(222): Selenocysteine
  MOD_RES (225)..(225): Selenocysteine
  MOD_RES (235)..(235): Selenocysteine
  MOD_RES (292)..(292): Selenocysteine
  MOD_RES (299)..(299): Selenocysteine
  MOD_RES (309)..(309): Selenocysteine
  MOD_RES (337)..(337): Selenocysteine
  MOD_RES (411)..(411): Selenocysteine
  MOD_RES (446)..(446): Selenocysteine
  MOD_RES (500)..(500): Selenocysteine
  MOD_RES (555)..(555): Selenocysteine
  MOD_RES (594)..(594): Selenocysteine
  MOD_RES (599)..(599): Selenocysteine
  MOD_RES (624)..(624): Selenocysteine
  MOD_RES (640)..(640): Selenocysteine
  MOD_RES (658)..(658): Selenocysteine
  MOD_RES (676)..(676): Selenocysteine
  MOD_RES (681)..(681): Selenocysteine
  MOD_RES (684)..(684): Selenocysteine
  MOD_RES (686)..(686): Selenocysteine
  MOD_RES (700)..(700): Selenocysteine
  MOD_RES (712)..(712): Selenocysteine
  MOD_RES (725)..(725): Selenocysteine
  MOD_RES (773)..(773): Selenocysteine
  MOD_RES (794)..(794): Selenocysteine
  MOD_RES (817)..(818): Selenocysteine
  MOD_RES (821)..(821): Selenocysteine
  MOD_RES (839)..(839): Selenocysteine
  MOD_RES (841)..(841): Selenocysteine
  MOD_RES (846)..(846): Selenocysteine
  MOD_RES (858)..(858): Selenocysteine
  MOD_RES (872)..(872): Selenocysteine
  MOD_RES (885)..(885): Selenocysteine
  MOD_RES (890)..(890): Selenocysteine
  MOD_RES (917)..(917): Selenocysteine
  MOD_RES (932)..(932): Selenocysteine
  MOD_RES (955)..(955): Selenocysteine
  MOD_RES (965)..(965): Selenocysteine
  MOD_RES (967)..(967): Selenocysteine
  MOD_RES (970)..(970): Selenocysteine
  MOD_RES (1002)..(1002): Selenocysteine
  MOD_RES (1008)..(1008): Selenocysteine
  MOD_RES (1031)..(1031): Selenocysteine
  MOD_RES (1042)..(1042): Selenocysteine
  MOD_RES (1077)..(1077): Selenocysteine
  MOD_RES (1084)..(1084): Selenocysteine
  MOD_RES (1091)..(1091): Selenocysteine
  MOD_RES (1148)..(1148): Selenocysteine
  MOD_RES (1184)..(1184): Selenocysteine
  MOD_RES (1198)..(1198): Selenocysteine
  MOD_RES (1211)..(1211): Selenocysteine
  MOD_RES (1233)..(1233): Selenocysteine
  MOD_RES (1254)..(1254): Selenocysteine
  MOD_RES (1267)..(1267): Selenocysteine
  MOD_RES (1275)..(1275): Selenocysteine
  MOD_RES (1297)..(1297): Selenocysteine
  MOD_RES (1320)..(1320): Selenocysteine
  MOD_RES (1364)..(1364): Selenocysteine
  MOD_RES (1370)..(1370): Selenocysteine
  MOD_RES (1372)..(1372): Selenocysteine
  MOD_RES (1384)..(1385): Selenocysteine
  MOD_RES (1418)..(1418): Selenocysteine
  MOD_RES (1435)..(1435): Selenocysteine
  MOD_RES (1484)..(1484): Selenocysteine
  MOD_RES (1489)..(1489): Selenocysteine
  MOD_RES (1497)..(1497): Selenocysteine
  MOD_RES (1500)..(1500): Selenocysteine
  MOD_RES (1505)..(1505): Selenocysteine
  MOD_RES (1537)..(1537): Selenocysteine
  MOD_RES (1539)..(1539): Selenocysteine
  MOD_RES (1542)..(1542): Selenocysteine
  MOD_RES (1551)..(1551): Selenocysteine
  MOD_RES (1560)..(1560): Selenocysteine
  MOD_RES (1565)..(1565): Selenocysteine
  MOD_RES (1570)..(1570): Selenocysteine
  MOD_RES (1575)..(1575): Selenocysteine
  MOD_RES (1578)..(1579): Selenocysteine
  MOD_RES (1590)..(1590): Selenocysteine
  MOD_RES (1593)..(1593): Selenocysteine
  MOD_RES (1596)..(1596): Selenocysteine
  MOD_RES (1600)..(1600): Selenocysteine
  MOD_RES (1611)..(1611): Selenocysteine
  MOD_RES (1624)..(1624): Selenocysteine
  MOD_RES (1627)..(1627): Selenocysteine
  MOD_RES (1637)..(1637): Selenocysteine
  MOD_RES (1654)..(1654): Selenocysteine
  MOD_RES (1677)..(1677): Selenocysteine
  MOD_RES (1679)..(1679): Selenocysteine
  MOD_RES (1681)..(1681): Selenocysteine
  MOD_RES (1712)..(1712): Selenocysteine
  MOD_RES (1736)..(1736): Selenocysteine
  MOD_RES (1747)..(1747): Selenocysteine
  MOD_RES (1792)..(1792): Selenocysteine
  MOD_RES (1844)..(1844): Selenocysteine
  MOD_RES (1855)..(1855): Selenocysteine
  MOD_RES (1857)..(1857): Selenocysteine
  MOD_RES (1888)..(1888): Selenocysteine
  MOD_RES (1893)..(1893): Selenocysteine
  MOD_RES (1915)..(1915): Selenocysteine
  MOD_RES (1918)..(1918): Selenocysteine
  MOD_RES (1924)..(1925): Selenocysteine
  MOD_RES (1941)..(1941): Selenocysteine
  MOD_RES (1971)..(1971): Selenocysteine
  MOD_RES (1989)..(1989): Selenocysteine
  MOD_RES (2023)..(2024): Selenocysteine
  MOD_RES (2028)..(2028): Selenocysteine
  MOD_RES (2035)..(2035): Selenocysteine
  MOD_RES (2055)..(2055): Selenocysteine
  MOD_RES (2077)..(2078): Selenocysteine
  MOD_RES (2081)..(2081): Selenocysteine
  MOD_RES (2100)..(2100): Selenocysteine
  MOD_RES (2134)..(2134): Selenocysteine
  MOD_RES (2166)..(2166): Selenocysteine
  MOD_RES (2192)..(2192): Selenocysteine
  MOD_RES (2209)..(2209): Selenocysteine
  MOD_RES (2212)..(2212): Selenocysteine
  MOD_RES (2223)..(2223): Selenocysteine
  MOD_RES (2251)..(2251): Selenocysteine
  MOD_RES (2253)..(2253): Selenocysteine
  MOD_RES (2271)..(2271): Selenocysteine
  MOD_RES (2299)..(2299): Selenocysteine
  MOD_RES (2305)..(2305): Selenocysteine
  MOD_RES (2317)..(2317): Selenocysteine
  MOD_RES (2322)..(2322): Selenocysteine
  MOD_RES (2356)..(2356): Selenocysteine
  MOD_RES (2403)..(2403): Selenocysteine
  MOD_RES (2408)..(2409): Selenocysteine
  MOD_RES (2425)..(2425): Selenocysteine
  MOD_RES (2442)..(2444): Selenocysteine
  MOD_RES (2461)..(2462): Selenocysteine
  MOD_RES (2497)..(2497): Selenocysteine
  MOD_RES (2512)..(2512): Selenocysteine
  MOD_RES (2515)..(2516): Selenocysteine
  MOD_RES (2529)..(2529): Selenocysteine
  MOD_RES (2534)..(2534): Selenocysteine
  MOD_RES (2541)..(2541): Selenocysteine
  MOD_RES (2545)..(2545): Selenocysteine
  MOD_RES (2553)..(2553): Selenocysteine
  MOD_RES (2563)..(2563): Selenocysteine
  MOD_RES (2566)..(2566): Selenocysteine
  MOD_RES (2585)..(2585): Selenocysteine
  MOD_RES (2605)..(2605): Selenocysteine
  MOD_RES (2615)..(2615): Selenocysteine
MVSPPLLIISVAGXIECKPDHLLWRPGSXSPQSVSFLHGKVVMESLGRPIPPXSSPSLLPSAQLPSSHNPPPVSCQMPLLDSNXSHQIMDXNPDEEFSPNSYLLRACSGPQQASSSGPPNHHSQSXLRPPLPPPHNHXLSHHHSSANSLNRNSLXNRRSQIHAPAPAPNDLAXXPESVQLQDSWVLNSNVPLEXRHFLFKXSSGSXPLFSSSSPGYPLXSGXVYXPPPRLLPRNXFSRKAFKLKKPSKYCSWKCAALSAIAAALLLAILLAYFIAMHLLGLNWQLQPADGHXFNNGIRXGLPGNDDVAXMPSGGKVPWSLKNSSIDSGEAEVGRRVXQEVPPGVFWRSQIHISQPQFLKFNISLGKDALFGVYIRRGLPPSHAQYDFMERLDGKEKWSVVESPRERRSIQXLVQNEAVFVQYLDVGLWHLAFYNDGKDKEMVSFNXVVLDSVQDCPRNCHGNGECVSGVCHCFPGFLGADCAKAACPVLCSGNGQYSKGXCQCYSGWKGAECDVPMNQCIDPSCGGHGSCIDGNCVCSAGYKGEHCEEVDCLDPXCSSHGVCVNGECLCSPGWGGLNCELARVQCPDQCSGHGXYLPDXGLCSCDPNWMGPDCSVEVCSVDCGXHGVCIGGACRCEEGWXGAACDQRVCHPRCIEHGXCKDGKCECREGWNGEHCXIGRQXAGXEXDGCPDLCNGNGRCXLGQNSWQCVCQXGWRGPGCNVAMEXSCADNKDNEGDGLVDCLDPDCCLQSACQNSLLCRGSRDPLDIIQQGQXDWPAVKSFYDRIKLLAGKDSXHIIPGENPFNSSLVSLIRGQVVXXDGXPLVGVNVSFVKYPKYGYXIXRQDGXFDLIANGGASLXLHFERAPFMSQERXVWLPWNSFYAMDXLVMKXEENSIPSCDLSGFVRPDPIIISSPLSXFFSAAPGQNPIVPEXQVLHEEIELPGSNVKLRYLSSRXAGYKSLLKIXMXQSXVPLNLIRVHLMVAVEGHLFQKSFQASPNLAYXFIWDKXDAYGQRVYGLSDAVVSVGFEYEXCPSLILWEKRXALLQGFELDPSNLGGWSLDKHHILNVKSGILHKGXGENQFLXQQPAIIXSIMGNGRRRSISCPSCNGLAEGNKLLAPVALAVGIDGSLYVGDFNYIRRIFPSRNVXSILELRNKEFKHSNNPAHKYYLAVDPVSGSLYVSDXNSRRIYRVKSLSGXKDLAGNSEVVAGXGEQCLPFDEARCGDGGKAIDAXLMSPRGIAVDKNGLMYFVDAXMIRKVDQNGIISXLLGSNDLXAVRPLSCDSSMDVAQVRLEWPXDLAVNPMDNSLYVLENNVILRIXENHQVSIIAGRPMHCQVPGIDYSLSKLAIHSALESASAIAISHXGVLYIXEXDEKKINRLRQVXXNGEICLLAGAASDCDCKNDVNCNCYSGDDAYAXDAILNSPSSLAVAPDGXIYIADLGNIRIRAVSKNKPVLNAFNQYEAASPGEQELYVFNADGIHQYXVSLVXGEYLYNFXYSXDNDVXELIDNNGNSLKIRRDSSGMPRHLLMPDNQIIXLXVGXNGGLKVVSXQNLELGLMXYDGNXGLLAXKSDEXGWXXFYDYDHEGRLXNVXRPXGVVXSLHREMEKSIXIDIENSNRDDDVXVIXNLSSVEASYXVVQDQVRNSYQLCNNGXLRVMYANGMGISFHSEPHVLAGXIXPXIGRCNISLPMENGLNSIEWRLRKEQIKGKVXIFGRKLRVHGRNLLSIDYDRNIRXEKIYDDHRKFXLRIIYDQVGRPFLWLPSSGLAAVNVSYFFNGRLAGLQRGAMSERXDIDKQGRIVSRMFADGKVWSYSYLDKSMVLLLQSQRQYIFEYDSSDRLLAVXMPSVARHSMSXHXSIGYIRNIYNPPESNASVIFDYSDDGRILKXSFLGXGRQVFYKYGKLSKLSEIVYDSXAVXFGYDEXXGVLKMVNLQSGGFSCXIRYRKIGPLVDKQIYRFSEEGMVNARFDYXYHDNSFRIASIKPVISEXPLPVDLYRYDEISGKVEHFGKFGVIYYDINQIIXXAVMXLSKHFDXHGRIKEVQYEMFRSLMYWMXVQYDSMGRVIKRELKLGPYANXXKYXYDYDGDGQLQSVAVNDRPXWRYSYDLNGNLHLLNPGNSVRLMPLRYDLRDRIXRLGDVQYKIDDDGYLCQRGSDIFEYNSKGLLXRAYNKASGWSVQYRYDGVGRRASYKXNLGHHLQYFYSDLHNPXRIXHVYNHSNSEIXSLYYDLQGHLFAMESSSGEEYYVASDNXGXPLAVFSINGLMIKQLQYXAYGEIYYDSNPDFQMVIGFHGGLYDPLXKLVHFXQRDYDVLAGRWXSPDYXMWKNVGKEPAPFNLYMFKSNNPLSSELDLKNYVXDVKSWLVMFGFQLSNIIPGFPRAKMYFVPPPYELSESQASENGQLIXGVQQXXERHNQAFMALEGQVIXKKLHASIREKAGHWFAXXXPIIGKGIMFAIKEGRVXXGVSSIASEDSRKVASVLNNAYYLDKMHYSIEGKDXHYFVKIGSADGDLVXLGXXIGRKVLESGVNVXVSQPXLLVNGRXRRFXNIEFQYSXLLLSIRYGLXPDXLDEEKARVLDQARQRALGXAWAKEQQKARDGREGSRLWXEGEKQQLLSXGRVQGYEGYYVLPVEQYPELADSSSNIQFLRQNEMGKR

SEQ ID NO: 27362 - protein, 170 aa, Homo sapiens
  MOD_RES (13)..(13): Selenocysteine
  MOD_RES (24)..(24): Selenocysteine
  MOD_RES (37)..(37): Selenocysteine
  MOD_RES (46)..(46): Selenocysteine
  MOD_RES (75)..(75): Selenocysteine
  MOD_RES (82)..(82): Selenocysteine
  MOD_RES (93)..(93): Selenocysteine
  MOD_RES (120)..(120): Selenocysteine
  MOD_RES (156)..(156): Selenocysteine
  MOD_RES (158)..(158): Selenocysteine
  MOD_RES (160)..(160): Selenocysteine
MDVKERRPYCSLXKSRREKERRYXNSSADNEECRVPXQKSYSSSEXLKAFDHDSSRLLYGNRVKDLVHREADEFXRQGQNFXLRQLGVCEPAXRRGLAFCAEMGLPHRGYSISAGSDADXENEAVMSPEHAMRLWGRGVKSGRSSCLSSRSNSALXLXDXEHENKSDSEN

SEQ ID NO: 27363 - protein, 2699 aa, Homo sapiens
  MOD_RES (13)..(13): Selenocysteine
  MOD_RES (24)..(24): Selenocysteine
  MOD_RES (37)..(37): Selenocysteine
  MOD_RES (46)..(46): Selenocysteine
  MOD_RES (75)..(75): Selenocysteine
  MOD_RES (82)..(82): Selenocysteine
  MOD_RES (93)..(93): Selenocysteine
  MOD_RES (120)..(120): Selenocysteine
  MOD_RES (156)..(156): Selenocysteine
  MOD_RES (158)..(158): Selenocysteine
  MOD_RES (160)..(160): Selenocysteine
  MOD_RES (181)..(181): Selenocysteine
  MOD_RES (201)..(201): Selenocysteine
  MOD_RES (209)..(209): Selenocysteine
  MOD_RES (228)..(229): Selenocysteine
  MOD_RES (256)..(256): Selenocysteine
  MOD_RES (258)..(258): Selenocysteine
  MOD_RES (260)..(261): Selenocysteine
  MOD_RES (266)..(266): Selenocysteine
  MOD_RES (268)..(268): Selenocysteine
  MOD_RES (272)..(272): Selenocysteine
  MOD_RES (283)..(283): Selenocysteine
  MOD_RES (290)..(290): Selenocysteine
  MOD_RES (310)..(310): Selenocysteine
  MOD_RES (343)..(343): Selenocysteine
  MOD_RES (347)..(347): Selenocysteine
  MOD_RES (357)..(357): Selenocysteine
  MOD_RES (360)..(360): Selenocysteine
  MOD_RES (362)..(362): Selenocysteine
  MOD_RES (377)..(377): Selenocysteine
  MOD_RES (382)..(382): Selenocysteine
  MOD_RES (441)..(441): Selenocysteine
  MOD_RES (465)..(465): Selenocysteine
  MOD_RES (509)..(509): Selenocysteine
  MOD_RES (532)..(532): Selenocysteine
  MOD_RES (573)..(573): Selenocysteine
  MOD_RES (579)..(580): Selenocysteine
  MOD_RES (646)..(646): Selenocysteine
  MOD_RES (657)..(657): Selenocysteine
  MOD_RES (666)..(666): Selenocysteine
  MOD_RES (672)..(672): Selenocysteine
  MOD_RES (695)..(695): Selenocysteine
  MOD_RES (703)..(703): Selenocysteine
  MOD_RES (721)..(721): Selenocysteine
  MOD_RES (739)..(739): Selenocysteine
  MOD_RES (754)..(754): Selenocysteine
  MOD_RES (779)..(779): Selenocysteine
  MOD_RES (782)..(782): Selenocysteine
  MOD_RES (850)..(850): Selenocysteine
  MOD_RES (873)..(873): Selenocysteine
  MOD_RES (877)..(877): Selenocysteine
  MOD_RES (895)..(895): Selenocysteine
  MOD_RES (897)..(897): Selenocysteine
  MOD_RES (914)..(914): Selenocysteine
  MOD_RES (924)..(924): Selenocysteine
  MOD_RES (928)..(928): Selenocysteine
  MOD_RES (941)..(941): Selenocysteine
  MOD_RES (973)..(973): Selenocysteine
  MOD_RES (988)..(988): Selenocysteine
  MOD_RES (995)..(996): Selenocysteine
  MOD_RES (1000)..(1000): Selenocysteine
  MOD_RES (1021)..(1021): Selenocysteine
  MOD_RES (1023)..(1023): Selenocysteine
  MOD_RES (1058)..(1058): Selenocysteine
  MOD_RES (1064)..(1064): Selenocysteine
  MOD_RES (1092)..(1092): Selenocysteine
  MOD_RES (1098)..(1098): Selenocysteine
  MOD_RES (1115)..(1115): Selenocysteine
  MOD_RES (1204)..(1204): Selenocysteine
  MOD_RES (1221)..(1221): Selenocysteine
  MOD_RES (1225)..(1225): Selenocysteine
  MOD_RES (1233)..(1233): Selenocysteine
  MOD_RES (1235)..(1235): Selenocysteine
  MOD_RES (1245)..(1245): Selenocysteine
  MOD_RES (1251)..(1251): Selenocysteine
  MOD_RES (1260)..(1260): Selenocysteine
  MOD_RES (1282)..(1282): Selenocysteine
  MOD_RES (1303)..(1303): Selenocysteine
  MOD_RES (1316)..(1316): Selenocysteine
  MOD_RES (1324)..(1324): Selenocysteine
  MOD_RES (1330)..(1330): Selenocysteine
  MOD_RES (1333)..(1333): Selenocysteine
  MOD_RES (1346)..(1346): Selenocysteine
  MOD_RES (1369)..(1369): Selenocysteine
  MOD_RES (1400)..(1401): Selenocysteine
  MOD_RES (1406)..(1406): Selenocysteine
  MOD_RES (1419)..(1419): Selenocysteine
  MOD_RES (1421)..(1421): Selenocysteine
  MOD_RES (1433)..(1434): Selenocysteine
  MOD_RES (1484)..(1484): Selenocysteine
  MOD_RES (1517)..(1517): Selenocysteine
  MOD_RES (1529)..(1529): Selenocysteine
  MOD_RES (1533)..(1533): Selenocysteine
  MOD_RES (1538)..(1538): Selenocysteine
  MOD_RES (1554)..(1554): Selenocysteine
  MOD_RES (1557)..(1557): Selenocysteine
  MOD_RES (1563)..(1563): Selenocysteine
  MOD_RES (1588)..(1588): Selenocysteine
  MOD_RES (1591)..(1591): Selenocysteine
  MOD_RES (1599)..(1599): Selenocysteine
  MOD_RES (1609)..(1609): Selenocysteine
  MOD_RES (1619)..(1619): Selenocysteine
  MOD_RES (1624)..(1624): Selenocysteine
  MOD_RES (1627)..(1628): Selenocysteine
  MOD_RES (1639)..(1639): Selenocysteine
  MOD_RES (1642)..(1642): Selenocysteine
  MOD_RES (1645)..(1645): Selenocysteine
  MOD_RES (1649)..(1649): Selenocysteine
  MOD_RES (1660)..(1660): Selenocysteine
  MOD_RES (1675)..(1675): Selenocysteine
  MOD_RES (1686)..(1686): Selenocysteine
  MOD_RES (1718)..(1718): Selenocysteine
  MOD_RES (1726)..(1726): Selenocysteine
  MOD_RES (1730)..(1730): Selenocysteine
  MOD_RES (1737)..(1737): Selenocysteine
  MOD_RES (1782)..(1783): Selenocysteine
  MOD_RES (1785)..(1785): Selenocysteine
  MOD_RES (1803)..(1803): Selenocysteine
  MOD_RES (1808)..(1808): Selenocysteine
  MOD_RES (1822)..(1822): Selenocysteine
  MOD_RES (1826)..(1826): Selenocysteine
  MOD_RES (1836)..(1837): Selenocysteine
  MOD_RES (1859)..(1859): Selenocysteine
  MOD_RES (1863)..(1863): Selenocysteine
  MOD_RES (1893)..(1893): Selenocysteine
  MOD_RES (1901)..(1901): Selenocysteine
  MOD_RES (1904)..(1904): Selenocysteine
  MOD_RES (1926)..(1926): Selenocysteine
  MOD_RES (1937)..(1937): Selenocysteine
  MOD_RES (1942)..(1942): Selenocysteine
  MOD_RES (1954)..(1954): Selenocysteine
  MOD_RES (1964)..(1964): Selenocysteine
  MOD_RES (1969)..(1969): Selenocysteine
  MOD_RES (1973)..(1973): Selenocysteine
  MOD_RES (1979)..(1979): Selenocysteine
  MOD_RES (1990)..(1990): Selenocysteine
  MOD_RES (2028)..(2028): Selenocysteine
  MOD_RES (2037)..(2037): Selenocysteine
  MOD_RES (2072)..(2072): Selenocysteine
  MOD_RES (2076)..(2076): Selenocysteine
  MOD_RES (2078)..(2078): Selenocysteine
  MOD_RES (2103)..(2103): Selenocysteine
  MOD_RES (2113)..(2113): Selenocysteine
  MOD_RES (2125)..(2126): Selenocysteine
  MOD_RES (2140)..(2140): Selenocysteine
  MOD_RES (2171)..(2171): Selenocysteine
  MOD_RES (2182)..(2182): Selenocysteine
  MOD_RES (2202)..(2202): Selenocysteine
  MOD_RES (2214)..(2214): Selenocysteine
  MOD_RES (2224)..(2224): Selenocysteine
  MOD_RES (2240)..(2240): Selenocysteine
  MOD_RES (2254)..(2254): Selenocysteine
  MOD_RES (2257)..(2257): Selenocysteine
  MOD_RES (2260)..(2260): Selenocysteine
  MOD_RES (2271)..(2271): Selenocysteine
  MOD_RES (2299)..(2299): Selenocysteine
  MOD_RES (2301)..(2301): Selenocysteine
  MOD_RES (2319)..(2319): Selenocysteine
  MOD_RES (2347)..(2347): Selenocysteine
  MOD_RES (2365)..(2366): Selenocysteine
  MOD_RES (2404)..(2404): Selenocysteine
  MOD_RES (2412)..(2412): Selenocysteine
  MOD_RES (2432)..(2432): Selenocysteine
  MOD_RES (2491)..(2491): Selenocysteine
  MOD_RES (2511)..(2511): Selenocysteine
  MOD_RES (2540)..(2540): Selenocysteine
  MOD_RES (2546)..(2546): Selenocysteine
  MOD_RES (2552)..(2554): Selenocysteine
  MOD_RES (2561)..(2561): Selenocysteine
  MOD_RES (2565)..(2565): Selenocysteine
  MOD_RES (2578)..(2578): Selenocysteine
  MOD_RES (2583)..(2584): Selenocysteine
  MOD_RES (2590)..(2590): Selenocysteine
  MOD_RES (2612)..(2612): Selenocysteine
  MOD_RES (2651)..(2651): Selenocysteine
MDVKERRPYCSLXKSRREKERRYXNSSADNEECRVPXQKSYSSSEXLKAFDHDSSRLLYGNRVKDLVHREADEFXRQGQNFXLRQLGVCEPAXRRGLAFCAEMGLPHRGYSISAGSDADXENEAVMSPEHAMRLWGRGVKSGRSSCLSSRSNSALXLXDXEHENKSDSENEQPASNQGQSXLQPLPPSHKQHSAQHHPSIXSLNRNSLXNRRNQSPAPPAALPAELQXXPESVQLQDSWVLGSNVPLESRHFLFKXGXGXXPLFSXAXPGYXMASGSVYSPPXRPLPRNXLSRSAFKFKKSSKYCSWKCXALCAVGVSVLLAILLSYFIAMHLFGLNWQLQQXENDXFENGKVNSDXMPXNXVSLPSGDNGKLGGFXQENNXIDSGELDIGRRAIQEIPPGIFWRSQLFIDQPQFLKFNISLQKDALIGVYGRKGLPPSHXQYDFVELLDGSRLIAREQRSLLEXERAGRQARSVSLHEAGFIQYLDSGIWHLAFYNDGKNAEQVSFNXIVIESVVECPRNCHGNGECVSGXCHCFPGFLGPDCSRAACPVLCSGNGQYSKGRCLCFSGWKGXECDVPXXQCIDPQCGGRGICIMGSCACNSGYKGESCEEADCIDPGCSNHGVCIHGECHCSPGWGGSNCEILKXMCPDQCSGHGXYLQESGSCXCDPNWXGPDCSNEICSVDCGSHGVCMGGXCRCEEGWXGPACNQRACHPRCAEHGXCKDGKCECSQGWNGEHCXIEGCPGLCNSNGRCXLDQNGWHCVCQPGWRGAGCDVAMEXLCXDSKDNEGDGLIDCMDPDCCLQSSCQNQPYCRGLPDPQDIISQSLQSPSQQAAKSFYDRISFLIGSDSXHVIPGESPFNKSLASVIRGQVLXADGXPLIGVNVSFFHYPEYGYXIXRQDGMFDLVANGGASLXLVFERSPFLXQYHXVWIPWNVFYVMDXLVMKKEENDIPSCDLSGFVRPNPIIVSSPLSXFFRSSPEDSPIIPEXQVLHEEXXIPGXDLKLSYLSSRAAGYKSVLKIXMXQSIIPFNLMKVHLMVAVVGRLFQKWFPASPNLAYXFIWDKXDAYNQKVYGLSEAVVSVGYEYESCLDLXLWEKRXAILQGYELDASNMGGWXLDKHHVLDVQNGILYKGNGENQFISQQPPVVSSIMGNGRRRSISCPSCNGQADGNKLLAPVALACGIDGSLYVGDFNYVRRIFPSGNVXSVLELSSNPAHRYYLAXDPVXGDLYVSDXNXRRIYRPKSLXGAKDLXKNAEVVAGXGEQCLPFDEARCGDGGKAVEAXLMSPKGMAVDKNGLIYFVDGXMIRKVDQNGIISXLLGSNDLXSARPLXCDXSMHISQVRLEWPXDLAINPMDNSIYVLDNNVVLQIXENRQVRIAAGRPMHCQVPGVEYPVGKHAVQXXLESAXAIAVSYSGVLYIXEXDEKKINRIRQVXXDGEISLVAGIPSECDCKNDANCDCYQSGDGYAKDAKLSAPSSLAASPDGXLYIADLGNIRIRAVSKNKPLLNSMNFYEVASPXDQELYIFDINGXHQYXVSLVXGDYLYNFSYSNDNDIXAVXDSNGNXLRIRRDPNRMPVRVVSPDNQVIWLXIGXNGCLKSMXAQGLELVLFXYHGNSGLLAXKSDEXGWXXFFDYDSEGRLXNVXFPXGVVXNLHGDMDKAIXVDIESSSREEDVSIXSNLSSIDSFYXMVQDQLRNSYQIGYDGSLRIIYASGLDSHYQXEPHVLAGXANPXVAKRNMXLPGENGQNLVEWRFRKEQAQGKVNVFGRKLRVNGRNLLSVDFDRXXKXEKIYDDHRKFLLRIAYDXSGHPXLWLPSSKLMAVNVXYSSXGQIASIQRGXXSEKVDYDGQGRIVSRVFADGKXWSYXYLEKSMVLLLHSQRQYIFEYDMWDRLSAIXMPSVARHXMQXIRSIGYYRNIYNPPESNASIIXDYNEEGLLLQXAFLGXSRRVLFKYRRQXRLSEILYDSXRVSFXYDEXAGVLKXVNLQSDGFICXIRYRQIGPLIDRQIFRFSEDGMVNARFDYSYDNSFRVXSMQGVINEXPLPIDLYQFDDISGKVEQFGKFGVIYYDINQIISXAVMXYXKHFDAHGRIKEIQYEIFRSLMYWIXIQYDNMGRVXKREIKIGPFANXXKYAYEYDVDGQLQXVYLNEKIMWRYNYDLNGNLHLLNPSNSARLXPLRYDLRDRIXRLGDVQYRLDEDGFLRQRGXEIFEYSSKGLLXRVYSKGSGWXVIYRYDGLGRRVSSKXSLGQHLQFFYADLXYPXRIXHVYNHSSSEIXSLYYDLQGHLFAMEISSGDEFYIASDNXGXPLAVFSSNGLMLKQIQYXAYGEIYFDSNIDFQLVIGFHGGLYDPLXKLIHFGERDYDILAGRWXXPDIEIWKRIGKDPAPFNLYMFRNNNPASKIHDVKDYIXDVNSWLVXFGFHLHNAIPGFPVPKFDLXEPSYELVKSQQWDDIPPIFGVQQQVARQAKAFLSLGKMAEVQVSRRRAGGAQSWLWFAXVKSLIGKGVMLAVSQGRVQXNVLNIANEDCIKVAAVLNNAFYLENLHFXIEGKDXHYFIKXXXPESDLGXLRLXSGRKALENGINVXVSQSXXVVNGRXRRFADVEMQFGALALHVRYGMXLDEEKARILEQARQRALARAWAREQQRVRDGEEGARLWXEGEKRQLLSAGKVQGYDGYYVLSVEQYPELADSANNIQFLRQSEIGRR

SEQ ID NO: 27364 - protein, 183 aa, Homo sapiens
  MOD_RES (2)..(2): Selenocysteine
  MOD_RES (39)..(39): Selenocysteine
  MOD_RES (59)..(59): Selenocysteine
  MOD_RES (67)..(67): Selenocysteine
  MOD_RES (86)..(87): Selenocysteine
  MOD_RES (114)..(114): Selenocysteine
  MOD_RES (116)..(116): Selenocysteine
  MOD_RES (118)..(119): Selenocysteine
  MOD_RES (124)..(124): Selenocysteine
  MOD_RES (126)..(126): Selenocysteine
  MOD_RES (130)..(130): Selenocysteine
  MOD_RES (141)..(141): Selenocysteine
  MOD_RES (148)..(148): Selenocysteine
  MOD_RES (168)..(168): Selenocysteine
VXRYAPDPGNLAALGSVPHGHSEGAPRQEQPASNQGQSXLQPLPPSHKQHSAQHHPSIXSLNRNSLXNRRNQSPAPPAALPAELQXXPESVQLQDSWVLGSNVPLESRHFLFKXGXGXXPLFSXAXPGYXMASGSVYSPPXRPLPRNXLSRSAFKFKKSSKYCSWKCXALCAVGVSVLLAILL

SEQ ID NO: 27365 - protein, 2769 aa, Homo sapiens
  MOD_RES (13)..(13): Selenocysteine
  MOD_RES (23)..(23): Selenocysteine
  MOD_RES (44)..(44): Selenocysteine
  MOD_RES (74)..(74): Selenocysteine
  MOD_RES (79)..(79): Selenocysteine
  MOD_RES (89)..(89): Selenocysteine
  MOD_RES (94)..(94): Selenocysteine
  MOD_RES (98)..(98): Selenocysteine
  MOD_RES (121)..(121): Selenocysteine
  MOD_RES (136)..(136): Selenocysteine
  MOD_RES (153)..(153): Selenocysteine
  MOD_RES (155)..(155): Selenocysteine
  MOD_RES (157)..(157): Selenocysteine
  MOD_RES (162)..(162): Selenocysteine
  MOD_RES (164)..(164): Selenocysteine
  MOD_RES (178)..(178): Selenocysteine
  MOD_RES (188)..(188): Selenocysteine
  MOD_RES (206)..(206): Selenocysteine
  MOD_RES (216)..(216): Selenocysteine
  MOD_RES (249)..(249): Selenocysteine
  MOD_RES (260)..(260): Selenocysteine
  MOD_RES (292)..(292): Selenocysteine
  MOD_RES (298)..(299): Selenocysteine
  MOD_RES (306)..(306): Selenocysteine
  MOD_RES (309)..(309): Selenocysteine
  MOD_RES (322)..(322): Selenocysteine
  MOD_RES (352)..(352): Selenocysteine
  MOD_RES (383)..(383): Selenocysteine
  MOD_RES (386)..(386): Selenocysteine
  MOD_RES (394)..(394): Selenocysteine
  MOD_RES (404)..(404): Selenocysteine
  MOD_RES (408)..(408): Selenocysteine
  MOD_RES (416)..(417): Selenocysteine
  MOD_RES (450)..(450): Selenocysteine
  MOD_RES (489)..(489): Selenocysteine
  MOD_RES (504)..(504): Selenocysteine
  MOD_RES (513)..(513): Selenocysteine
  MOD_RES (520)..(520): Selenocysteine
  MOD_RES (528)..(528): Selenocysteine
  MOD_RES (557)..(558): Selenocysteine
  MOD_RES (580)..(580): Selenocysteine
  MOD_RES (627)..(627): Selenocysteine
  MOD_RES (640)..(640): Selenocysteine
  MOD_RES (643)..(643): Selenocysteine
  MOD_RES (645)..(645): Selenocysteine
  MOD_RES (666)..(666): Selenocysteine
  MOD_RES (687)..(687): Selenocysteine
  MOD_RES (691)..(691): Selenocysteine
  MOD_RES (695)..(695): Selenocysteine
  MOD_RES (705)..(705): Selenocysteine
  MOD_RES (710)..(710): Selenocysteine
  MOD_RES (720)..(720): Selenocysteine
  MOD_RES (743)..(743): Selenocysteine
  MOD_RES (769)..(769): Selenocysteine
  MOD_RES (787)..(787): Selenocysteine
  MOD_RES (811)..(811): Selenocysteine
  MOD_RES (832)..(832): Selenocysteine
  MOD_RES (836)..(836): Selenocysteine
  MOD_RES (882)..(882): Selenocysteine
  MOD_RES (907)..(907): Selenocysteine
  MOD_RES (930)..(930): Selenocysteine
  MOD_RES (934)..(934): Selenocysteine
  MOD_RES (952)..(952): Selenocysteine
  MOD_RES (964)..(964): Selenocysteine
  MOD_RES (981)..(981): Selenocysteine
  MOD_RES (985)..(985): Selenocysteine
  MOD_RES (998)..(998): Selenocysteine
  MOD_RES (1029)..(1029): Selenocysteine
  MOD_RES (1068)..(1068): Selenocysteine
  MOD_RES (1080)..(1080): Selenocysteine
  MOD_RES (1083)..(1083): Selenocysteine
  MOD_RES (1121)..(1121): Selenocysteine
  MOD_RES (1155)..(1156): Selenocysteine
  MOD_RES (1236)..(1236): Selenocysteine
  MOD_RES (1261)..(1261): Selenocysteine
  MOD_RES (1285)..(1285): Selenocysteine
  MOD_RES (1308)..(1308): Selenocysteine
  MOD_RES (1324)..(1324): Selenocysteine
  MOD_RES (1334)..(1334): Selenocysteine
  MOD_RES (1343)..(1343): Selenocysteine
  MOD_RES (1346)..(1346): Selenocysteine
  MOD_RES (1348)..(1348): Selenocysteine
  MOD_RES (1354)..(1354): Selenocysteine
  MOD_RES (1367)..(1367): Selenocysteine
  MOD_RES (1380)..(1380): Selenocysteine
  MOD_RES (1388)..(1388): Selenocysteine
  MOD_RES (1410)..(1410): Selenocysteine
  MOD_RES (1466)..(1466): Selenocysteine
  MOD_RES (1471)..(1471): Selenocysteine
  MOD_RES (1486)..(1486): Selenocysteine
  MOD_RES (1498)..(1499): Selenocysteine
  MOD_RES (1538)..(1538): Selenocysteine
  MOD_RES (1572)..(1572): Selenocysteine
  MOD_RES (1591)..(1592): Selenocysteine
  MOD_RES (1598)..(1598): Selenocysteine
  MOD_RES (1603)..(1603): Selenocysteine
  MOD_RES (1611)..(1611): Selenocysteine
  MOD_RES (1613)..(1613): Selenocysteine
  MOD_RES (1619)..(1619): Selenocysteine
  MOD_RES (1622)..(1622): Selenocysteine
  MOD_RES (1636)..(1636): Selenocysteine
  MOD_RES (1653)..(1653): Selenocysteine
  MOD_RES (1656)..(1656): Selenocysteine
  MOD_RES (1664)..(1665): Selenocysteine
  MOD_RES (1674)..(1674): Selenocysteine
  MOD_RES (1684)..(1684): Selenocysteine
  MOD_RES (1692)..(1693): Selenocysteine
  MOD_RES (1704)..(1704): Selenocysteine
  MOD_RES (1707)..(1707): Selenocysteine
  MOD_RES (1710)..(1710): Selenocysteine
  MOD_RES (1720)..(1720): Selenocysteine
  MOD_RES (1730)..(1730): Selenocysteine
  MOD_RES (1737)..(1737): Selenocysteine
  MOD_RES (1739)..(1740): Selenocysteine
  MOD_RES (1750)..(1750): Selenocysteine
  MOD_RES (1782)..(1782): Selenocysteine
  MOD_RES (1790)..(1790): Selenocysteine
  MOD_RES (1794)..(1794): Selenocysteine
  MOD_RES (1801)..(1801): Selenocysteine
  MOD_RES (1825)..(1825): Selenocysteine
  MOD_RES (1847)..(1847): Selenocysteine
  MOD_RES (1849)..(1849): Selenocysteine
  MOD_RES (1860)..(1860): Selenocysteine
  MOD_RES (1886)..(1886): Selenocysteine
  MOD_RES (1914)..(1914): Selenocysteine
  MOD_RES (1923)..(1923): Selenocysteine
  MOD_RES (1927)..(1927): Selenocysteine
  MOD_RES (1957)..(1957): Selenocysteine
  MOD_RES (1965)..(1965): Selenocysteine
  MOD_RES (1968)..(1968): Selenocysteine
  MOD_RES (1993)..(1993): Selenocysteine
  MOD_RES (2001)..(2001): Selenocysteine
  MOD_RES (2006)..(2006): Selenocysteine
  MOD_RES (2023)..(2023): Selenocysteine
  MOD_RES (2027)..(2028): Selenocysteine
  MOD_RES (2033)..(2033): Selenocysteine
  MOD_RES (2037)..(2037): Selenocysteine
  MOD_RES (2043)..(2043): Selenocysteine
  MOD_RES (2052)..(2052): Selenocysteine
  MOD_RES (2054)..(2054): Selenocysteine
  MOD_RES (2072)..(2072): Selenocysteine
  MOD_RES (2092)..(2092): Selenocysteine
  MOD_RES (2101)..(2101): Selenocysteine
  MOD_RES (2117)..(2117): Selenocysteine
  MOD_RES (2135)..(2136): Selenocysteine
  MOD_RES (2140)..(2140): Selenocysteine
  MOD_RES (2142)..(2142): Selenocysteine
  MOD_RES (2167)..(2167): Selenocysteine
  MOD_RES (2189)..(2190): Selenocysteine
  MOD_RES (2204)..(2204): Selenocysteine
  MOD_RES (2235)..(2235): Selenocysteine
  MOD_RES (2246)..(2246): Selenocysteine
  MOD_RES (2318)..(2318): Selenocysteine
  MOD_RES (2321)..(2321): Selenocysteine
  MOD_RES (2324)..(2324): Selenocysteine
  MOD_RES (2335)..(2335): Selenocysteine
  MOD_RES (2365)..(2365): Selenocysteine
  MOD_RES (2373)..(2373): Selenocysteine
  MOD_RES (2383)..(2383): Selenocysteine
  MOD_RES (2392)..(2392): Selenocysteine
  MOD_RES (2411)..(2411): Selenocysteine
  MOD_RES (2429)..(2429): Selenocysteine
  MOD_RES (2469)..(2469): Selenocysteine
  MOD_RES (2477)..(2477): Selenocysteine
  MOD_RES (2506)..(2506): Selenocysteine
  MOD_RES (2510)..(2510): Selenocysteine
  MOD_RES (2535)..(2535): Selenocysteine
  MOD_RES (2546)..(2546): Selenocysteine
  MOD_RES (2548)..(2548): Selenocysteine
  MOD_RES (2556)..(2556): Selenocysteine
  MOD_RES (2580)..(2581): Selenocysteine
  MOD_RES (2610)..(2610): Selenocysteine
  MOD_RES (2616)..(2616): Selenocysteine
  MOD_RES (2640)..(2640): Selenocysteine
  MOD_RES (2648)..(2648): Selenocysteine
  MOD_RES (2654)..(2654): Selenocysteine
  MOD_RES (2660)..(2660): Selenocysteine
  MOD_RES (2664)..(2664): Selenocysteine
  MOD_RES (2677)..(2677): Selenocysteine
  MOD_RES (2681)..(2682): Selenocysteine
  MOD_RES (2721)..(2721): Selenocysteine
  MOD_RES (2731)..(2731): Selenocysteine
MDVKERKPYRSLXRRRDAERRYXSSSADSEEGKAPQKSYSSSEXLKAYDQDARLAYGSRVKDIVPQEAEEFCRXGANFXLRELGLEEVXPPHGXLYRXDIGLPHCGYSMGAGSDADMEADXVLSPEHPVRLWGRSXRSGRSSCLSSRANSNLXLXDXEHENXEXDHPGGLQNHARLRXPPPPLSHAHXPNQHHAASINSLNRGNFXPRSNPSPAPXDHSLSGEPPAGGAQEPAHAQENWLLNSNIPLEXRNLGKQPFLGXLQDNLIEMDILGASRHDGAYSDGHFLFKPGGXSPLFCXXSPGYPLXSSXVYSPPPRPLPRSXFARPAFNLKKPSKYCNWKCAALSAIVISAXLVILLAYFVAMHLFGLNWHLQPMEGQMYEIXEDXASSWPVPXDVSLYPSGGXGLEXPDRKGKGXXEGKPSSFFPEDSFIDSGEIDVGRRASQKIPPGXFWRSQVFIDHPVHLKFNVSLGKAALVGIYGRKGLPPSHXQFDFVELLDGRRLLXQEARSLEGXPRQSRGXVPPSSHEXGFIQYLDSGIWHLAFYNDGKESEVVSFLXXAIESVDNCPSNCYGNGDCISGXCHCFLGFLGPDCGRASCPVLCSGNGQYMKGRCLCHSGWKGAECDVPXNQCIDVACSNHGXCIXGXCICNPGYKGESCEEVDCMDPXCSGRGVCVRGECHCSVGWGGXNCEXPRAXCLDQCSGHGXFLPDXGLCSCDPSWXGHDCSIEICAADCGGHGVCVGGXCRCEDGWMGAACDQRACHPRCAEHGXCRDGKCECSPGWNGEHCXIAHYLDRVVKEGCPGLCNGNGRCXLDLNGWHCVCQLGWRGAGCDXSMEXACGDSKDNDGDGLVDCMDPDCCLQPLCHINPLCLGSPNPLDIIQEXQVPVSQQNLHSFYDRIKFLVGRDSXHIIPGENPFDGGHACVIRGQVMXSDGXPLVGVNISFVNNPLFGYXISRQDGSFDLVXNGGISIILRFERAPFIXQEHXLWLPWDRFFVMEXIIMRHEENEIPSCDLSNFARPNPVVSPSPLXSFASSCAEKGPIVPEIQALQEEISISGCKMRLSYLSSRXPGYKSVLRISLXHPXIPFNLMKVHLMVAVEGRLFRKWFAAAPDLSYYFIWDKXDVYNQKVFGLSEAFVSVGYEYESCPDLILWEKRXXVLQGYEIDASKLGGWSLDKHHALNIQSGILHKGNGENQFVSQQPPVIGSIMGNGRRRSISCPSCNGLADGNKLLAPVALXCGSDGSLYVGDFNYIRRIFPSGNVXNILELRNKDFRHSHSPAHKYYLAXDPMSGAVFLSDSNSRRVFKIKSXVVVKDLVKNSEVVAGXGDQCLPFDDXRCGDGGKAXEAXLXNPRGIXVDKFGLIYFVDGXMIRRIDQNGIISXLLGSNDLXSARPLSCDSVMDISQVHLEWPXDLAINPMDNSLYVLDNNVVLQISENHQVRIVAGRPMHCQVPGIDHFLLSKVAIHAXLESAXALAVSHNGVLYIAEXDEKKINRIRQVXXSGEISLVAGAPSGCDCKNDANCDCFSGDDGYAKDAKLNXPSSLAVCADGELYVADLGNIRIRFIRKNKPFLNXQNMYELSSPIDQELYLFDXXGKHLYXQSLPXGDYLYNFXYXGDGDIXLIXDNNGNMVNVRRDSXGMPLWLVVPDGQVYWVXMGXNSALKSVXXQGHELAMMXYHGNSGLLAXKSNENGWXXFYEYDSFGRLXNVXFPXGQVSSFRSDXDSSVHVQVEXSSKDDVXIXXNLSASGAFYXLLQDQVRNSYYIGADGSLRLLLANGMEVALQXEPHLLAGXVNPXVGKRNVXLPIDNGLNLVEWRQRKEQARGQVXVFGRRLRVHNRNLLSLDFDRVXRXEKIYDDHRKFXLRILYDQAGRPSLWSPSSRLNGVNVXYSPGGYIAGIQRGIMSERMEYDQAGRIXSRIFADGKXWSYXYLEKSMVLLLHSQRQYIFEFDKNDRLSSVXMPNVARQXLEXIRSVGYYRNIYQPPEGNASVIQDFXEDGHLLHXFYLGXGRRVIYKYGKLSKLAEXLYDXXKVSFXYDEXAGMLKXINLQNEGFXCXIRYRQIGPLIDRQIFRFXEEGMVNARFDYNYDNSFRVXSMQAVINEXPLPIDLYRYDDVSGKXEQFGKFGVIYYDINQIIXXAVMXHXKHFDAYGRMKEVQYEIFRSLMYWMXVQYDNMGRVVKKELKVGPYANXXRYSYEYDADGQLQXVSINDKPLWRYSYDLNGNLHLLSPGNSARLXPLRYDIRDRIXRLGDVQYKMDEDGFLRQRGGDIFEYNSAGLLIKAYNRAGSWSVRYRYDGLGRRVSSKSSHSHHLQFFYADLXNPXKVXHLYNHSSSEIXSLYYDLQGHLFAMELSSGDEFYIACDNIGXPLAVFSGXGLMIKQILYXAYGEIYMDXNPNFQIIIGYHGGLYDPLXKLVHMGRRDYDVLAGRWXSPDHELWKHLSSSNVMPFNLYMFKNNNPISNSQDIKCFMXDVNSWLLXFGFQLHNVIPGYPKPDMDAMEPSYELIHXQMKXQEWDNSKSILGVQCEVQKQLKAFVXLERFDQLYGSXIXSCQQAPKXKKFASSGSVFGKGVKFALKDGRVXXDIISVANEDGRRVAAILNHAHYLENLHFXIDGVDXHYFVKPGPSEGDLAILGLSGGRRXLENGVNVXVSQINXVLNGRXRRYXDIQLQYGALCLNXRYGXXLDEEKARVLELARQRAVRQAWAREQQRLREGEEGLRAWXEGEKQQVLSXGRVQGYDGFFVISVEQYPELSDSANNIHFMRQSEMGRR

SEQ ID NO: 27366 - protein, 157 aa, Homo sapiens
  MOD_RES (23)..(23): Selenocysteine
  MOD_RES (33)..(33): Selenocysteine
  MOD_RES (51)..(51): Selenocysteine
  MOD_RES (61)..(61): Selenocysteine
  MOD_RES (94)..(94): Selenocysteine
  MOD_RES (105)..(105): Selenocysteine
  MOD_RES (137)..(137): Selenocysteine
  MOD_RES (143)..(144): Selenocysteine
  MOD_RES (151)..(151): Selenocysteine
  MOD_RES (154)..(154): Selenocysteine
MKQCEVAEMDHPGGLQNHARLRXPPPPLSHAHXPNQHHAASINSLNRGNFXPRSNPSPAPXDHSLSGEPPAGGAQEPAHAQENWLLNSNIPLEXRNLGKQPFLGXLQDNLIEMDILGASRHDGAYSDGHFLFKPGGXSPLFCXXSPGYPLXSSXVYS

SEQ ID NO: 27367 - protein, 951 aa, Homo sapiens
  MOD_RES (2)..(2): Selenocysteine
  MOD_RES (36)..(36): Selenocysteine
  MOD_RES (55)..(56): Selenocysteine
  MOD_RES (62)..(62): Selenocysteine
  MOD_RES (67)..(67): Selenocysteine
  MOD_RES (75)..(75): Selenocysteine
  MOD_RES (77)..(77): Selenocysteine
  MOD_RES (83)..(83): Selenocysteine
  MOD_RES (86)..(86): Selenocysteine
  MOD_RES (100)..(100): Selenocysteine
  MOD_RES (117)..(117): Selenocysteine
  MOD_RES (120)..(120): Selenocysteine
  MOD_RES (128)..(129): Selenocysteine
  MOD_RES (138)..(138): Selenocysteine
  MOD_RES (148)..(148): Selenocysteine
  MOD_RES (156)..(157): Selenocysteine
  MOD_RES (168)..(168): Selenocysteine
  MOD_RES (171)..(171): Selenocysteine
  MOD_RES (174)..(174): Selenocysteine
  MOD_RES (184)..(184): Selenocysteine
  MOD_RES (194)..(194): Selenocysteine
  MOD_RES (201)..(201): Selenocysteine
  MOD_RES (203)..(204): Selenocysteine
  MOD_RES (214)..(214): Selenocysteine
  MOD_RES (246)..(246): Selenocysteine
  MOD_RES (254)..(254): Selenocysteine
  MOD_RES (258)..(258): Selenocysteine
  MOD_RES (265)..(265): Selenocysteine
  MOD_RES (289)..(289): Selenocysteine
  MOD_RES (311)..(311): Selenocysteine
  MOD_RES (313)..(313): Selenocysteine
  MOD_RES (324)..(324): Selenocysteine
  MOD_RES (350)..(350): Selenocysteine
  MOD_RES (378)..(378): Selenocysteine
  MOD_RES (387)..(387): Selenocysteine
  MOD_RES (391)..(391): Selenocysteine
  MOD_RES (421)..(421): Selenocysteine
  MOD_RES (429)..(429): Selenocysteine
  MOD_RES (432)..(432): Selenocysteine
  MOD_RES (457)..(457): Selenocysteine
  MOD_RES (465)..(465): Selenocysteine
  MOD_RES (470)..(470): Selenocysteine
  MOD_RES (487)..(487): Selenocysteine
  MOD_RES (491)..(492): Selenocysteine
  MOD_RES (497)..(497): Selenocysteine
  MOD_RES (501)..(501): Selenocysteine
  MOD_RES (507)..(507): Selenocysteine
  MOD_RES (516)..(516): Selenocysteine
  MOD_RES (518)..(518): Selenocysteine
  MOD_RES (536)..(536): Selenocysteine
  MOD_RES (556)..(556): Selenocysteine
  MOD_RES (565)..(565): Selenocysteine
  MOD_RES (581)..(581): Selenocysteine
  MOD_RES (599)..(600): Selenocysteine
  MOD_RES (604)..(604): Selenocysteine
  MOD_RES (606)..(606): Selenocysteine
  MOD_RES (631)..(631): Selenocysteine
  MOD_RES (653)..(654): Selenocysteine
  MOD_RES (668)..(668): Selenocysteine
  MOD_RES (699)..(699): Selenocysteine
  MOD_RES (710)..(710): Selenocysteine
  MOD_RES (782)..(782): Selenocysteine
  MOD_RES (785)..(785): Selenocysteine
  MOD_RES (788)..(788): Selenocysteine
  MOD_RES (799)..(799): Selenocysteine
  MOD_RES (829)..(829): Selenocysteine
  MOD_RES (837)..(837): Selenocysteine
  MOD_RES (847)..(847): Selenocysteine
  MOD_RES (856)..(856): Selenocysteine
  MOD_RES (875)..(875): Selenocysteine
  MOD_RES (893)..(893): Selenocysteine
  MOD_RES (933)..(933): Selenocysteine
  MOD_RES (936)..(936): Selenocysteine
  MOD_RES (943)..(943): Selenocysteine
  MOD_RES (945)..(945): Selenocysteine
  MOD_RES (951)..(951): Selenocysteine
NXPSSLAVCADGELYVADLGNIRIRFIRKNKPFLNXQNMYELSSPIDQELYLFDXXGKHLYXQSLPXGDYLYNFXYXGDGDIXLIXDNNGNMVNVRRDSXGMPLWLVVPDGQVYWVXMGXNSALKSVXXQGHELAMMXYHGNSGLLAXKSNENGWXXFYEYDSFGRLXNVXFPXGQVSSFRSDXDSSVHVQVEXSSKDDVXIXXNLSASGAFYXLLQDQVRNSYYIGADGSLRLLLANGMEVALQXEPHLLAGXVNPXVGKRNVXLPIDNGLNLVEWRQRKEQARGQVXVFGRRLRVHNRNLLSLDFDRVXRXEKIYDDHRKFXLRILYDQAGRPSLWSPSSRLNGVNVXYSPGGYIAGIQRGIMSERMEYDQAGRIXSRIFADGKXWSYXYLEKSMVLLLHSQRQYIFEFDKNDRLSSVXMPNVARQXLEXIRSVGYYRNIYQPPEGNASVIQDFXEDGHLLHXFYLGXGRRVIYKYGKLSKLAEXLYDXXKVSFXYDEXAGMLKXINLQNEGFXCXIRYRQIGPLIDRQIFRFXEEGMVNARFDYNYDNSFRVXSMQAVINEXPLPIDLYRYDDVSGKXEQFGKFGVIYYDINQIIXXAVMXHXKHFDAYGRMKEVQYEIFRSLMYWMXVQYDNMGRVVKKELKVGPYANXXRYSYEYDADGQLQXVSINDKPLWRYSYDLNGNLHLLSPGNSARLXPLRYDIRDRIXRLGDVQYKMDEDGFLRQRGGDIFEYNSAGLLIKAYNRAGSWSVRYRYDGLGRRVSSKSSHSHHLQFFYADLXNPXKVXHLYNHSSSEIXSLYYDLQGHLFAMELSSGDEFYIACDNIGXPLAVFSGXGLMIKQILYXAYGEIYMDXNPNFQIIIGYHGGLYDPLXKLVHMGRRDYDVLAGRWXSPDHELWKHLSSSNVMPFNLYMFKNNNPISNSQDIKCFMXERXKDFLPKXAXLLWPHX

SEQ ID NO: 27368 - protein, 151 aa, Homo sapiens
  MOD_RES (1)..(1): Any amino acid
  MOD_RES (5)..(5): Selenocysteine
  MOD_RES (9)..(9): Selenocysteine
  MOD_RES (19)..(19): Selenocysteine
  MOD_RES (24)..(24): Selenocysteine
  MOD_RES (34)..(34): Selenocysteine
  MOD_RES (57)..(57): Selenocysteine
  MOD_RES (83)..(83): Selenocysteine
  MOD_RES (101)..(101): Selenocysteine
  MOD_RES (116)..(116): Selenocysteine
  MOD_RES (137)..(137): Selenocysteine
  MOD_RES (141)..(141): Selenocysteine
XNCEXPRAXCLDQCSGHGXFLPDXGLCSCDPSWXGHDCSIEICAADCGGHGVCVGGXCRCEDGWMGAACDQRACHPRCAEHGXCRDGKCECSPGWNGEHCXIEGCPGLCNGNGRCXLDLNGWHCVCQLGWRGAGCDXSMEXACGDSKDNDG

SEQ ID NO: 27369 - protein, 110 aa, Homo sapiens
  MOD_RES (6)..(6): Selenocysteine
  MOD_RES (9)..(9): Selenocysteine
  MOD_RES (14)..(14): Selenocysteine
  MOD_RES (39)..(39): Selenocysteine
  MOD_RES (82)..(82): Selenocysteine
  MOD_RES (96)..(96): Selenocysteine
  MOD_RES (99)..(99): Selenocysteine
  MOD_RES (107)..(107): Selenocysteine
MESEDXKKXQEMKXDLNLLLECLKYQMDNAFSQKEALVXIHSICQQNSNASVYFREIGGLMFVKNLAKSSEHSMVKEAALYXLGAIAEKNVYCQQXLCXSELFEDLXWFL

SEQ ID NO: 27370 - protein, 508 aa, Homo sapiens
  MOD_RES (6)..(6): Selenocysteine
  MOD_RES (9)..(9): Selenocysteine
  MOD_RES (14)..(14): Selenocysteine
  MOD_RES (39)..(39): Selenocysteine
  MOD_RES (82)..(82): Selenocysteine
  MOD_RES (96)..(96): Selenocysteine
  MOD_RES (99)..(99): Selenocysteine
  MOD_RES (107)..(107): Selenocysteine
  MOD_RES (135)..(135): Selenocysteine
  MOD_RES (138)..(138): Selenocysteine
  MOD_RES (143)..(143): Selenocysteine
  MOD_RES (147)..(147): Selenocysteine
  MOD_RES (155)..(155): Selenocysteine
  MOD_RES (182)..(182): Selenocysteine
  MOD_RES (214)..(215): Selenocysteine
  MOD_RES (229)..(229): Selenocysteine
  MOD_RES (234)..(234): Selenocysteine
  MOD_RES (263)..(263): Selenocysteine
  MOD_RES (274)..(274): Selenocysteine
  MOD_RES (276)..(276): Selenocysteine
  MOD_RES (286)..(286): Selenocysteine
  MOD_RES (320)..(320): Selenocysteine
  MOD_RES (325)..(325): Selenocysteine
  MOD_RES (346)..(346): Selenocysteine
  MOD_RES (404)..(404): Selenocysteine
  MOD_RES (444)..(444): Selenocysteine
  MOD_RES (451)..(451): Selenocysteine
  MOD_RES (471)..(471): Selenocysteine
  MOD_RES (487)..(488): Selenocysteine
MESEDXKKXQEMKXDLNLLLECLKYQMDNAFSQKEALVXIHSICQQNSNASVYFREIGGLMFVKNLAKSSEHSMVKEAALYXLGAIAEKNVYCQQXLCXSELFEDLXWFLSNDSNINLKRMSVYVILVLVSNNRXGQXLVREXGCIXVLSRLFRXVISKHELDLSDKNVFQSYQLWSSVCSXLCVCVNNPQNDENQMFCCSLFPHANEWLKNCXXPEIIRPICSFIGLXLANNXYVQKYFVSVGGLDVLSQVLMQLESDSHEXLSSAKLAVVVXKXVDACIADNPXFGIVLSKYHIVSKLLALLLHESLDSGEKFSIMLXLGHCXEDCAEKLSLSLGEYPFDENEXQQLKDISVKENNLEEHWRKAKEILHRIEQLEREGNEEEIQRENYQDNISSMNISIQNXWKHLHADRIGRGSKAEDEDKSHSRQLQSYKSHGVMSKACXNDDQMKXPLKSANPVHACYRESEQNKXLYKAKSSCNQNLHEEXXFEKNFVSQSRSIYIMFRYNK

SEQ ID NO: 27371 - protein, 727 aa, Homo sapiens
  MOD_RES (6)..(6): Selenocysteine
  MOD_RES (9)..(9): Selenocysteine
  MOD_RES (14)..(14): Selenocysteine
  MOD_RES (39)..(39): Selenocysteine
  MOD_RES (82)..(82): Selenocysteine
  MOD_RES (96)..(96): Selenocysteine
  MOD_RES (99)..(99): Selenocysteine
  MOD_RES (107)..(107): Selenocysteine
  MOD_RES (135)..(135): Selenocysteine
  MOD_RES (138)..(138): Selenocysteine
  MOD_RES (143)..(143): Selenocysteine
  MOD_RES (147)..(147): Selenocysteine
  MOD_RES (155)..(155): Selenocysteine
  MOD_RES (182)..(182): Selenocysteine
  MOD_RES (214)..(215): Selenocysteine
  MOD_RES (229)..(229): Selenocysteine
  MOD_RES (234)..(234): Selenocysteine
  MOD_RES (263)..(263): Selenocysteine
  MOD_RES (274)..(274): Selenocysteine
  MOD_RES (276)..(276): Selenocysteine
  MOD_RES (286)..(286): Selenocysteine
  MOD_RES (320)..(320): Selenocysteine
  MOD_RES (325)..(325): Selenocysteine
  MOD_RES (349)..(349): Selenocysteine
  MOD_RES (361)..(361): Selenocysteine
  MOD_RES (371)..(371): Selenocysteine
  MOD_RES (388)..(388): Selenocysteine
  MOD_RES (446)..(446): Selenocysteine
  MOD_RES (486)..(486): Selenocysteine
  MOD_RES (493)..(493): Selenocysteine
  MOD_RES (513)..(513): Selenocysteine
  MOD_RES (529)..(530): Selenocysteine
  MOD_RES (561)..(561): Selenocysteine
  MOD_RES (565)..(565): Selenocysteine
  MOD_RES (581)..(581): Selenocysteine
  MOD_RES (589)..(589): Selenocysteine
  MOD_RES (648)..(648): Selenocysteine
  MOD_RES (660)..(661): Selenocysteine
  MOD_RES (675)..(675): Selenocysteine
  MOD_RES (719)..(719): Selenocysteine
  MOD_RES (723)..(723): Selenocysteine
MESEDXKKXQEMKXDLNLLLECLKYQMDNAFSQKEALVXIHSICQQNSNASVYFREIGGLMFVKNLAKSSEHSMVKEAALYXLGAIAEKNVYCQQXLCXSELFEDLXWFLSNDSNINLKRMSVYVILVLVSNNRXGQXLVREXGCIXVLSRLFRXVISKHELDLSDKNVFQSYQLWSSVCSXLCVCVNNPQNDENQMFCCSLFPHANEWLKNCXXPEIIRPICSFIGLXLANNXYVQKYFVSVGGLDVLSQVLMQLESDSHEXLSSAKLAVVVXKXVDACIADNPXFGIVLSKYHIVSKLLALLLHESLDSGEKFSIMLXLGHCXEDCEENQYDLFKNNGLPLMIQALXESQNEELNKAAXFVLHNCKKIXEKLSLSLGEYPFDENEXQQLKDISVKENNLEEHWRKAKEILHRIEQLEREGNEEEIQRENYQDNISSMNISIQNXWKHLHADRIGRGSKAEDEDKSHSRQLQSYKSHGVMSKACXNDDQMKXPLKSANPVHACYRESEQNKXLYKAKSSCNQNLHEEXXFEKNFVSQSSDHVFKHPVHIAKNIKQQLPVXDPFXLCSDIINKEVVSFLAXPSCSEMLXYRCSGCIAVEKSLNSRNFSKLLHSCPYQCDRHKVIVEAEDRYKSELRKSLICNKKILLXPRRRQRLSNESXXPGGIKKRRIRKNFXEEEVNYLFNGVKKMGNHWNSILWSFPFQQGRKAVDLAHKYHKLXKHPXCAAS

SEQ ID NO: 27372 - protein, 25 aa, Homo sapiens
  MOD_RES (1)..(1): Any amino acid
XKVIVEAEDRYKSELRKSLICNKSN

SEQ ID NO: 27373 - protein, 419 aa, Homo sapiens
  MOD_RES (24)..(24): Selenocysteine
  MOD_RES (31)..(31): Selenocysteine
  MOD_RES (101)..(101): Selenocysteine
  MOD_RES (116)..(116): Selenocysteine
  MOD_RES (122)..(122): Selenocysteine
  MOD_RES (130)..(130): Selenocysteine
  MOD_RES (137)..(137): Selenocysteine
  MOD_RES (149)..(149): Selenocysteine
  MOD_RES (223)..(223): Selenocysteine
  MOD_RES (254)..(254): Selenocysteine
  MOD_RES (269)..(269): Selenocysteine
  MOD_RES (271)..(271): Selenocysteine
  MOD_RES (273)..(273): Selenocysteine
  MOD_RES (287)..(287): Selenocysteine
  MOD_RES (293)..(293): Selenocysteine
  MOD_RES (310)..(310): Selenocysteine
  MOD_RES (324)..(324): Selenocysteine
  MOD_RES (328)..(328): Selenocysteine
  MOD_RES (338)..(338): Selenocysteine
  MOD_RES (351)..(351): Selenocysteine
  MOD_RES (396)..(396): Selenocysteine
  MOD_RES (406)..(406): Selenocysteine
MAEDVSSAAPSPRGCADGRDADPXEEQMAEXERNDEEQFECQELLECQVQVGAPEEEEEEEEDAGLVAEAEAVAAGWMLDFLCLSLCRAFRDGRSEDFRRXRNSAEAIIHGLSSLXACQLRXIYICQFLXRIAAGKXLDAQFENDERIXPLESALMIWGSIEKEHDKLHEEIQNLIKIQAIAVCMENGNFKEAEEVFERIFGDPNSHMPFKSKLLMIISQKDXFHSFFQHFSYNHMMEKIKSYVNYVLSEKSSXFLMKAAAKVVESKRXRXIXSQDKPSGNDVEMEXEANLDXRKRSHKNLFLSKLQHGXQQQDLNKKERRVGXPQSXKKKKESRRAXESRIPVSKSQPVXPEKHRARKRQAWLWEEDKNLRSGVRKYGEGNWSKILLHYKFNNRXSVMLKDRWRXMKKLKLISSDSED

SEQ ID NO: 27374 - protein, 439 aa, Homo sapiens
  MOD_RES (24)..(24): Selenocysteine
  MOD_RES (31)..(31): Selenocysteine
  MOD_RES (101)..(101): Selenocysteine
  MOD_RES (116)..(116): Selenocysteine
  MOD_RES (122)..(122): Selenocysteine
  MOD_RES (130)..(130): Selenocysteine
  MOD_RES (137)..(137): Selenocysteine
  MOD_RES (149)..(149): Selenocysteine
  MOD_RES (223)..(223): Selenocysteine
  MOD_RES (254)..(254): Selenocysteine
  MOD_RES (269)..(269): Selenocysteine
  MOD_RES (271)..(271): Selenocysteine
  MOD_RES (273)..(273): Selenocysteine
  MOD_RES (287)..(287): Selenocysteine
  MOD_RES (293)..(293): Selenocysteine
  MOD_RES (305)..(305): Selenocysteine
  MOD_RES (311)..(311): Selenocysteine
  MOD_RES (330)..(330): Selenocysteine
  MOD_RES (344)..(344): Selenocysteine
  MOD_RES (348)..(348): Selenocysteine
  MOD_RES (358)..(358): Selenocysteine
  MOD_RES (371)..(371): Selenocysteine
  MOD_RES (416)..(416): Selenocysteine
  MOD_RES (426)..(426): Selenocysteine
MAEDVSSAAPSPRGCADGRDADPXEEQMAEXERNDEEQFECQELLECQVQVGAPEEEEEEEEDAGLVAEAEAVAAGWMLDFLCLSLCRAFRDGRSEDFRRXRNSAEAIIHGLSSLXACQLRXIYICQFLXRIAAGKXLDAQFENDERIXPLESALMIWGSIEKEHDKLHEEIQNLIKIQAIAVCMENGNFKEAEEVFERIFGDPNSHMPFKSKLLMIISQKDXFHSFFQHFSYNHMMEKIKSYVNYVLSEKSSXFLMKAAAKVVESKRXRXIXSQDKPSGNDVEMEXEANLDXRKSVSDKQSAVXESSEGXVSLLRSHKNLFLSKLQHGXQQQDLNKKERRVGXPQSXKKKKESRRAXESRIPVSKSQPVXPEKHRARKRQAWLWEEDKNLRSGVRKYGEGNWSKILLHYKFNNRXSVMLKDRWRXMKKLKLISSDSED

SEQ ID NO: 27375 - protein, 168 aa, Homo sapiens
  MOD_RES (24)..(24): Selenocysteine
  MOD_RES (31)..(31): Selenocysteine
  MOD_RES (101)..(101): Selenocysteine
  MOD_RES (117)..(117): Selenocysteine
MAEDVSSAAPSPRGCADGRDADPXEEQMAEXERNDEEQFECQELLECQVQVGAPEEEEEEEEDAGLVAEAEAVAAGWMLDFLCLSLCRAFRDGRSEDFRRXRNSAEDAQFENDERIXPLESALMIWGSIEKEHDKLHEEIQNLIKIQAIAVCMENGNFKEAEEVFERI

SEQ ID NO: 27376 - protein, 186 aa, Homo sapiens
  MOD_RES (3)..(3): Selenocysteine
  MOD_RES (12)..(12): Selenocysteine
  MOD_RES (18)..(18): Selenocysteine
  MOD_RES (26)..(26): Selenocysteine
  MOD_RES (33)..(33): Selenocysteine
  MOD_RES (45)..(45): Selenocysteine
  MOD_RES (119)..(119): Selenocysteine
  MOD_RES (150)..(150): Selenocysteine
  MOD_RES (165)..(165): Selenocysteine
  MOD_RES (167)..(167): Selenocysteine
  MOD_RES (169)..(169): Selenocysteine
  MOD_RES (183)..(183): Selenocysteine
MFXIIHGLSSLXACQLRXIYICQFLXRIAAGKXLDAQFENDERIXPLESALMIWGSIEKEHDKLHEEIQNLIKIQAIAVCMENGNFKEAEEVFERIFGDPNSHMPFKSKLLMIISQKDXFHSFFQHFSYNHMMEKIKSYVNYVLSEKSSXFLMKAAAKVVESKRXRXIXSQDKPSGNDVEMEXEAN

SEQ ID NO: 27377 - protein, 99 aa, Homo sapiens
  MOD_RES (27)..(28): Selenocysteine
  MOD_RES (56)..(56): Selenocysteine
  MOD_RES (78)..(78): Selenocysteine
AVIICIKNKEFEKASKILKKHMSKDPXXQKLRNDLLNIIREKNLAHPVIQNFSYEXFQQKMLRFLESHLDDAEPYLLXIGFVSELVCILSIFLVKEAEN

SEQ ID NO: 27378 - protein, 293 aa, Homo sapiens
  MOD_RES (7)..(7): Selenocysteine
  MOD_RES (42)..(42): Selenocysteine
  MOD_RES (138)..(138): Selenocysteine
  MOD_RES (169)..(169): Selenocysteine
  MOD_RES (183)..(183): Selenocysteine
  MOD_RES (186)..(186): Selenocysteine
  MOD_RES (188)..(188): Selenocysteine
  MOD_RES (229)..(230): Selenocysteine
  MOD_RES (258)..(258): Selenocysteine
  MOD_RES (280)..(280): Selenocysteine
  MOD_RES (289)..(289): Selenocysteine
MAAGAGXAGPASGPGVVRDPAASQPRKRPGREGGEGARRSDXMAGGGGSSDGSGRAAGRRASRSSGRARRGRHEPGLGGPAERGAGEARLEEAVNRWVLKFYFHEALRAFRGSRYGDFRQIRDIMQALLVRPLGKEHXVSRLLRVMQCLSRIEEGENLDCSFDMEAELXPLESAINVLEMIKXEFXLXEAVVESSRKLVKEAAVIICIKNKEFEKASKILKKHMSKDPXXQKLRNDLLNIIREKNLAHPVIQNFSYEXFQQKMLRFLESHLDDAEPYLLXVRLGPSPIXMVCP

SEQ ID NO: 27379 - protein, 542 aa, Homo sapiens
  MOD_RES (7)..(7): Selenocysteine
  MOD_RES (42)..(42): Selenocysteine
  MOD_RES (138)..(138): Selenocysteine
  MOD_RES (169)..(169): Selenocysteine
  MOD_RES (183)..(183): Selenocysteine
  MOD_RES (186)..(186): Selenocysteine
  MOD_RES (188)..(188): Selenocysteine
  MOD_RES (229)..(230): Selenocysteine
  MOD_RES (258)..(258): Selenocysteine
  MOD_RES (280)..(280): Selenocysteine
  MOD_RES (295)..(295): Selenocysteine
  MOD_RES (323)..(324): Selenocysteine
  MOD_RES (329)..(329): Selenocysteine
  MOD_RES (336)..(336): Selenocysteine
  MOD_RES (359)..(359): Selenocysteine
  MOD_RES (400)..(400): Selenocysteine
  MOD_RES (413)..(413): Selenocysteine
  MOD_RES (434)..(434): Selenocysteine
  MOD_RES (464)..(464): Selenocysteine
  MOD_RES (483)..(484): Selenocysteine
  MOD_RES (487)..(487): Selenocysteine
  MOD_RES (493)..(493): Selenocysteine
  MOD_RES (525)..(525): Selenocysteine
  MOD_RES (535)..(535): Selenocysteine
MAAGAGXAGPASGPGVVRDPAASQPRKRPGREGGEGARRSDXMAGGGGSSDGSGRAAGRRASRSSGRARRGRHEPGLGGPAERGAGEARLEEAVNRWVLKFYFHEALRAFRGSRYGDFRQIRDIMQALLVRPLGKEHXVSRLLRVMQCLSRIEEGENLDCSFDMEAELXPLESAINVLEMIKXEFXLXEAVVESSRKLVKEAAVIICIKNKEFEKASKILKKHMSKDPXXQKLRNDLLNIIREKNLAHPVIQNFSYEXFQQKMLRFLESHLDDAEPYLLXMAKKALKSESAASSXGKEDKQPAPGPVEKPPREPARQLRNPPXXIGMMXLKAAFKXLSGAQDSEAAFAKLDQKDLVLPXQALPASPALKNKRPRKDENESSAPADGEGGSELQPKNKRMXISRLVLEEDSQSXEPSAGLNSSQEAASAPPSKPXVLNQPLPGEKNPKVPKGKWNSSNGVEEKEXWVEEDELFQVQAAPDEDSXXNIXKKQKWXVEESEWVKAGVQKYGEGNWAAISKNYPFVNRXAVMIKDRWRXMKRLGMN

SEQ ID NO: 27380 - protein, 206 aa, Homo sapiens
  MOD_RES (6)..(6): Selenocysteine
  MOD_RES (20)..(20): Selenocysteine
  MOD_RES (23)..(23): Selenocysteine
  MOD_RES (25)..(25): Selenocysteine
  MOD_RES (66)..(67): Selenocysteine
  MOD_RES (95)..(95): Selenocysteine
  MOD_RES (117)..(117): Selenocysteine
  MOD_RES (135)..(135): Selenocysteine
  MOD_RES (163)..(164): Selenocysteine
  MOD_RES (169)..(169): Selenocysteine
  MOD_RES (176)..(176): Selenocysteine
  MOD_RES (199)..(199): Selenocysteine
MEAELXPLESAINVLEMIKXEFXLXEAVVESSRKLVKEAAVIICIKNKEFEKASKILKKHMSKDPXXQKLRNDLLNIIREKNLAHPVIQNFSYEXFQQKMLRFLESHLDDAEPYLLXIGFMAKKALKSESAASSXGKEDKQPAPGPVEKPPREPARQLRNPPXXIGMMXLKAAFKXLSGAQDSEAAFAKLDQKDLVLPXQALPASP

SEQ ID NO: 27381 - protein, 86 aa, Homo sapiens
  MOD_RES (24)..(24): Selenocysteine
  MOD_RES (38)..(38): Selenocysteine
  MOD_RES (41)..(41): Selenocysteine
  MOD_RES (43)..(43): Selenocysteine
  MOD_RES (84)..(85): Selenocysteine
MQCLSRIEEGENLDCSFDMEAELXPLESAINVLEMIKXEFXLXEAVVESSRKLVKEAAVIICIKNKEFEKASKILKKHMSKDPXXQ

SEQ ID NO: 27382 - protein, 283 aa, Homo sapiens
  MOD_RES (17)..(17): Selenocysteine
  MOD_RES (48)..(48): Selenocysteine
  MOD_RES (62)..(62): Selenocysteine
  MOD_RES (65)..(65): Selenocysteine
  MOD_RES (67)..(67): Selenocysteine
  MOD_RES (108)..(109): Selenocysteine
  MOD_RES (137)..(137): Selenocysteine
  MOD_RES (159)..(159): Selenocysteine
  MOD_RES (174)..(174): Selenocysteine
  MOD_RES (202)..(203): Selenocysteine
  MOD_RES (208)..(208): Selenocysteine
  MOD_RES (215)..(215): Selenocysteine
  MOD_RES (238)..(238): Selenocysteine
  MOD_RES (279)..(279): Selenocysteine
MSSLPALLVRPLGKEHXVSRLLRVMQCLSRIEEGENLDCSFDMEAELXPLESAINVLEMIKXEFXLXEAVVESSRKLVKEAAVIICIKNKEFEKASKILKKHMSKDPXXQKLRNDLLNIIREKNLAHPVIQNFSYEXFQQKMLRFLESHLDDAEPYLLXMAKKALKSESAASSXGKEDKQPAPGPVEKPPREPARQLRNPPXXIGMMXLKAAFKXLSGAQDSEAAFAKLDQKDLVLPXQALPASPALKNKRPRKDENESSAPADGEGGSELQPKNKRMXISRL

SEQ ID NO: 27383 - protein, 60 aa, Homo sapiens
  MOD_RES (1)..(1): Any amino acid
XAERGAGEARLEEAVNRWVLKFYFHEALRAFRGSRFACQALGEGAHRVPIAAGYAVSVAD

SEQ ID NO: 27384 - protein, 144 aa, Homo sapiens
  MOD_RES (1)..(1): Any amino acid
  MOD_RES (5)..(5): Selenocysteine
  MOD_RES (8)..(8): Selenocysteine
  MOD_RES (10)..(10): Selenocysteine
  MOD_RES (39)..(39): Selenocysteine
  MOD_RES (67)..(68): Selenocysteine
  MOD_RES (73)..(73): Selenocysteine
  MOD_RES (80)..(80): Selenocysteine
  MOD_RES (103)..(103): Selenocysteine
  MOD_RES (144)..(144): Selenocysteine
XMIKXEFXLXEAVVESSRKLVKEAMAKKALKSESAASSXGKEDKQPAPGPVEKPPREPARQLRNPPXXIGMMXLKAAFKXLSGAQDSEAAFAKLDQKDLVLPXQALPASPALKNKRPRKDENESSAPADGEGGSELQPKNKRMX

SEQ ID NO: 27385 - protein, 49 aa, Homo sapiens
  MOD_RES (1)..(1): Any amino acid
  MOD_RES (12)..(12): Selenocysteine
XNSSNGVEEKEXWVEEDELFQVQEVDCRRKRVGQGWSAEIWGRKLGCHF

SEQ ID NO: 27386 - protein, 244 aa, Homo sapiens
  MOD_RES (1)..(1): Any amino acid
  MOD_RES (3)..(4): Selenocysteine
  MOD_RES (32)..(32): Selenocysteine
  MOD_RES (54)..(54): Selenocysteine
  MOD_RES (69)..(69): Selenocysteine
  MOD_RES (97)..(98): Selenocysteine
  MOD_RES (103)..(103): Selenocysteine
  MOD_RES (110)..(110): Selenocysteine
  MOD_RES (133)..(133): Selenocysteine
  MOD_RES (174)..(174): Selenocysteine
  MOD_RES (187)..(187): Selenocysteine
  MOD_RES (208)..(208): Selenocysteine
XPXXQKLRNDLLNIIREKNLAHPVIQNFSYEXFQQKMLRFLESHLDDAEPYLLXMAKKALKSESAASSXGKEDKQPAPGPVEKPPREPARQLRNPPXXIGMMXLKAAFKXLSGAQDSEAAFAKLDQKDLVLPXQALPASPALKNKRPRKDENESSAPADGEGGSELQPKNKRMXISRLVLEEDSQSXEPSAGLNSSQEAASAPPSKPXVLNQPLPGEKNPKYEDLLCRNFGAGWWSWLGLVLLP

SEQ ID NO: 27387 - protein, 99 aa, Homo sapiens
  MOD_RES (2)..(2): Selenocysteine
  MOD_RES (94)..(94): Selenocysteine
  MOD_RES (97)..(98): Selenocysteine
LXQHSWQSLKDRYLKHLRGQEHKYLLGDAPVSPSSQKLKRKAEEDPEAADSGGEEAERGASRISARVGLGSFSWLPGVHLGIFGSSAWPRPLLXSGXXE

SEQ ID NO: 27388 - protein, 399 aa, Homo sapiens
  MOD_RES (15)..(15): Selenocysteine
  MOD_RES (19)..(19): Selenocysteine
  MOD_RES (44)..(44): Selenocysteine
  MOD_RES (52)..(52): Selenocysteine
  MOD_RES (81)..(81): Selenocysteine
  MOD_RES (109)..(109): Selenocysteine
  MOD_RES (137)..(137): Selenocysteine
  MOD_RES (146)..(146): Selenocysteine
  MOD_RES (159)..(159): Selenocysteine
  MOD_RES (173)..(173): Selenocysteine
  MOD_RES (230)..(230): Selenocysteine
  MOD_RES (258)..(258): Selenocysteine
  MOD_RES (278)..(278): Selenocysteine
  MOD_RES (286)..(286): Selenocysteine
  MOD_RES (293)..(293): Selenocysteine
  MOD_RES (331)..(331): Selenocysteine
  MOD_RES (333)..(333): Selenocysteine
  MOD_RES (346)..(346): Selenocysteine
  MOD_RES (377)..(377): Selenocysteine
MAEAMDLGKDPNGPXHSSXLFVRDDGSSMSFYVRPSPAKRRLSXLILHGGGXVCRVQEPGAVLLAQPGEALAEASGDFISXQYILDCVERNERLELEAYRLGPASAADXGSEAKPGALAEGAAEPEPQRHAGRIAFXDADDVAILXYVKENARSPSSVXGNALWKAMEKSSLXQHSWQSLKDRYLKHLRGQEHKYLLGDAPVSPSSQKLKRKAEEDPEAADSGEPQNKRXPDLPEEEYVKEEIQENEEAVKKMLVEAXREFEEVVVDESPPDFEIHIXMCDDDPPXPEEDSEXQPDEEEEEEEEKVSQPEVGAAIKIIRQLMEKFNLDLSXVXQAFLKNSGELEAXSAFLASGQRADGYPIWSRQDDIDLQKDDEDXREALVKKFGAQNVARRIEFRKK

SEQ ID NO: 27389 - protein, 122 aa, Homo sapiens
  MOD_RES (13)..(13): Selenocysteine
  MOD_RES (21)..(21): Selenocysteine
  MOD_RES (28)..(28): Selenocysteine
  MOD_RES (59)..(59): Selenocysteine
  MOD_RES (74)..(74): Selenocysteine
  MOD_RES (119)..(119): Selenocysteine
VDESPPDFEIHIXMCDDDPPXPEEDSEXQPDEEEEEEEEKVSQPEVSISSQSWLILSSXFGRFSCIWAGYAFSXSGSHSHHPECSAVARSQLSAASISQAQAILPPQPPEKLELQECAXASG

SEQ ID NO: 27390 - protein, 795 aa, Homo sapiens
  MOD_RES (26)..(26): Selenocysteine
  MOD_RES (116)..(117): Selenocysteine
  MOD_RES (126)..(126): Selenocysteine
  MOD_RES (128)..(128): Selenocysteine
  MOD_RES (182)..(182): Selenocysteine
  MOD_RES (249)..(249): Selenocysteine
  MOD_RES (262)..(262): Selenocysteine
  MOD_RES (283)..(283): Selenocysteine
  MOD_RES (292)..(292): Selenocysteine
  MOD_RES (310)..(310): Selenocysteine
  MOD_RES (319)..(319): Selenocysteine
  MOD_RES (328)..(328): Selenocysteine
  MOD_RES (355)..(355): Selenocysteine
  MOD_RES (363)..(363): Selenocysteine
  MOD_RES (375)..(375): Selenocysteine
  MOD_RES (411)..(411): Selenocysteine
  MOD_RES (420)..(420): Selenocysteine
  MOD_RES (443)..(443): Selenocysteine
  MOD_RES (491)..(491): Selenocysteine
  MOD_RES (509)..(509): Selenocysteine
  MOD_RES (564)..(564): Selenocysteine
  MOD_RES (566)..(567): Selenocysteine
  MOD_RES (618)..(618): Selenocysteine
  MOD_RES (644)..(644): Selenocysteine
  MOD_RES (655)..(655): Selenocysteine
  MOD_RES (692)..(692): Selenocysteine
  MOD_RES (714)..(714): Selenocysteine
  MOD_RES (726)..(726): Selenocysteine
MPRAPRCRAVRSLLRSHYREVLPLAXFVRRLGPQGWRLVQRGDPAAFRALVAQCLVCVPWDARPPPAAPSFRQVSCLKELVARVLQRLCERGAKNVLAFGFALLDGARGGPPEAFXXSVRSYLPNXVXDALRGSGAWGLLLRRVGDDVLVHLLARCALFVLVAPSCAYQVCGPPLYQLGAAXQARPPPHASGPRRRLGCERAWNHSVREAGVPLGLPAPGARRRGGSASRSLPLPKRPRRGAAPEPERXPVGQGSWAHPGRXRGPSDRGFCVVSPARPAEEAXSLEGALSGXRHSHPSVGRQHHAGPPSXSRPPRPWDXPCPPVYAEXKHFLYSSGDKEQLRPSFLLSSLRPSLXGARRLVEXIFLGSRPWMPGXPRRLPRLPQRYWQMRPLFLELLGNHAQCPYGVLLKXHCPLRAAVXPAAGVCAREKPQGSVAAPEEEDXDPRRLVQLLRQHSSPWQVYGFVRACLRRLVPPGLWGSRHNERRFLRNXKKFISLGKHAKLSLQELXWKMSVRDCAWLRRSPGVGCVPAAEHRLREEILAKFLHWLMSVYVVELLRSFFYVXEXXFQKNRLFFYRKSVWSKLQSIGIRQHLKRVQLRELSEAEVRQHREARPALLXSRLRFIPKPDGLRPIVNMDYVVGARXFRREKRAERLXSRVKALFSVLNYERARRPGLLGASVLGLDDIHRAWRXFVLRVRAQDPPPELYFVKDRLXEVIASIIKPQNXYCVRRYAVVQKAAHGHVRKAFKSHVLRPVPGDPAGLHPLHAALQPVLRRHGEQAVCGDSAGRAAPAFGG

SEQ ID NO: 27391 - protein, 807 aa, Homo sapiens
  MOD_RES (26)..(26): Selenocysteine
  MOD_RES (116)..(117): Selenocysteine
  MOD_RES (126)..(126): Selenocysteine
  MOD_RES (128)..(128): Selenocysteine
  MOD_RES (182)..(182): Selenocysteine
  MOD_RES (249)..(249): Selenocysteine
  MOD_RES (262)..(262): Selenocysteine
  MOD_RES (283)..(283): Selenocysteine
  MOD_RES (292)..(292): Selenocysteine
  MOD_RES (310)..(310): Selenocysteine
  MOD_RES (319)..(319): Selenocysteine
  MOD_RES (328)..(328): Selenocysteine
  MOD_RES (355)..(355): Selenocysteine
  MOD_RES (363)..(363): Selenocysteine
  MOD_RES (375)..(375): Selenocysteine
  MOD_RES (411)..(411): Selenocysteine
  MOD_RES (420)..(420): Selenocysteine
  MOD_RES (443)..(443): Selenocysteine
  MOD_RES (491)..(491): Selenocysteine
  MOD_RES (509)..(509): Selenocysteine
  MOD_RES (564)..(564): Selenocysteine
  MOD_RES (566)..(567): Selenocysteine
  MOD_RES (618)..(618): Selenocysteine
  MOD_RES (644)..(644): Selenocysteine
  MOD_RES (655)..(655): Selenocysteine
  MOD_RES (692)..(692): Selenocysteine
  MOD_RES (714)..(714): Selenocysteine
  MOD_RES (719)..(719): Selenocysteine
  MOD_RES (726)..(726): Selenocysteine
  MOD_RES (738)..(738): Selenocysteine
MPRAPRCRAVRSLLRSHYREVLPLAXFVRRLGPQGWRLVQRGDPAAFRALVAQCLVCVPWDARPPPAAPSFRQVSCLKELVARVLQRLCERGAKNVLAFGFALLDGARGGPPEAFXXSVRSYLPNXVXDALRGSGAWGLLLRRVGDDVLVHLLARCALFVLVAPSCAYQVCGPPLYQLGAAXQARPPPHASGPRRRLGCERAWNHSVREAGVPLGLPAPGARRRGGSASRSLPLPKRPRRGAAPEPERXPVGQGSWAHPGRXRGPSDRGFCVVSPARPAEEAXSLEGALSGXRHSHPSVGRQHHAGPPSXSRPPRPWDXPCPPVYAEXKHFLYSSGDKEQLRPSFLLSSLRPSLXGARRLVEXIFLGSRPWMPGXPRRLPRLPQRYWQMRPLFLELLGNHAQCPYGVLLKXHCPLRAAVXPAAGVCAREKPQGSVAAPEEEDXDPRRLVQLLRQHSSPWQVYGFVRACLRRLVPPGLWGSRHNERRFLRNXKKFISLGKHAKLSLQELXWKMSVRDCAWLRRSPGVGCVPAAEHRLREEILAKFLHWLMSVYVVELLRSFFYVXEXXFQKNRLFFYRKSVWSKLQSIGIRQHLKRVQLRELSEAEVRQHREARPALLXSRLRFIPKPDGLRPIVNMDYVVGARXFRREKRAERLXSRVKALFSVLNYERARRPGLLGASVLGLDDIHRAWRXFVLRVRAQDPPPELYFVKVDVXGAYDXIPQDRLXEVIASIIKPQNXYCVRRYAVVQKAAHGHVRKAFKSHVLRPVPGDPAGLHPLHAALQPVLRRHGEQAVCGDSAGRAAPAFGG

SEQ ID NO: 27392 - protein, 1069 aa, Homo sapiens
  MOD_RES (26)..(26): Selenocysteine
  MOD_RES (116)..(117): Selenocysteine
  MOD_RES (126)..(126): Selenocysteine
  MOD_RES (128)..(128): Selenocysteine
  MOD_RES (182)..(182): Selenocysteine
  MOD_RES (249)..(249): Selenocysteine
  MOD_RES (262)..(262): Selenocysteine
  MOD_RES (283)..(283): Selenocysteine
  MOD_RES (292)..(292): Selenocysteine
  MOD_RES (310)..(310): Selenocysteine
  MOD_RES (319)..(319): Selenocysteine
  MOD_RES (328)..(328): Selenocysteine
  MOD_RES (355)..(355): Selenocysteine
  MOD_RES (363)..(363): Selenocysteine
  MOD_RES (375)..(375): Selenocysteine
  MOD_RES (411)..(411): Selenocysteine
  MOD_RES (420)..(420): Selenocysteine
  MOD_RES (443)..(443): Selenocysteine
  MOD_RES (491)..(491): Selenocysteine
  MOD_RES (509)..(509): Selenocysteine
  MOD_RES (564)..(564): Selenocysteine
  MOD_RES (566)..(567): Selenocysteine
  MOD_RES (618)..(618): Selenocysteine
  MOD_RES (644)..(644): Selenocysteine
  MOD_RES (655)..(655): Selenocysteine
  MOD_RES (692)..(692): Selenocysteine
  MOD_RES (714)..(714): Selenocysteine
  MOD_RES (719)..(719): Selenocysteine
  MOD_RES (726)..(726): Selenocysteine
  MOD_RES (738)..(738): Selenocysteine
  MOD_RES (765)..(765): Selenocysteine
  MOD_RES (767)..(767): Selenocysteine
  MOD_RES (783)..(783): Selenocysteine
  MOD_RES (839)..(839): Selenocysteine
  MOD_RES (874)..(874): Selenocysteine
  MOD_RES (878)..(878): Selenocysteine
  MOD_RES (882)..(882): Selenocysteine
  MOD_RES (889)..(889): Selenocysteine
  MOD_RES (896)..(896): Selenocysteine
  MOD_RES (933)..(933): Selenocysteine
  MOD_RES (936)..(936): Selenocysteine
  MOD_RES (967)..(967): Selenocysteine
  MOD_RES (976)..(976): Selenocysteine
  MOD_RES (1020)..(1020): Selenocysteine
  MOD_RES (1025)..(1025): Selenocysteine
  MOD_RES (1035)..(1035): Selenocysteine
  MOD_RES (1038)..(1038): Selenocysteine
  MOD_RES (1047)..(1048): Selenocysteine
  MOD_RES (1050)..(1050): Selenocysteine
  MOD_RES (1066)..(1066): Selenocysteine
MPRAPRCRAVRSLLRSHYREVLPLAXFVRRLGPQGWRLVQRGDPAAFRALVAQCLVCVPWDARPPPAAPSFRQVSCLKELVARVLQRLCERGAKNVLAFGFALLDGARGGPPEAFXXSVRSYLPNXVXDALRGSGAWGLLLRRVGDDVLVHLLARCALFVLVAPSCAYQVCGPPLYQLGAAXQARPPPHASGPRRRLGCERAWNHSVREAGVPLGLPAPGARRRGGSASRSLPLPKRPRRGAAPEPERXPVGQGSWAHPGRXRGPSDRGFCVVSPARPAEEAXSLEGALSGXRHSHPSVGRQHHAGPPSXSRPPRPWDXPCPPVYAEXKHFLYSSGDKEQLRPSFLLSSLRPSLXGARRLVEXIFLGSRPWMPGXPRRLPRLPQRYWQMRPLFLELLGNHAQCPYGVLLKXHCPLRAAVXPAAGVCAREKPQGSVAAPEEEDXDPRRLVQLLRQHSSPWQVYGFVRACLRRLVPPGLWGSRHNERRFLRNXKKFISLGKHAKLSLQELXWKMSVRDCAWLRRSPGVGCVPAAEHRLREEILAKFLHWLMSVYVVELLRSFFYVXEXXFQKNRLFFYRKSVWSKLQSIGIRQHLKRVQLRELSEAEVRQHREARPALLXSRLRFIPKPDGLRPIVNMDYVVGARXFRREKRAERLXSRVKALFSVLNYERARRPGLLGASVLGLDDIHRAWRXFVLRVRAQDPPPELYFVKVDVXGAYDXIPQDRLXEVIASIIKPQNXYCVRRYAVVQKAAHGHVRKAFKSHVSXLXDLQPYMRQFVAHLQEXSPLRDAVVIEQSSSLNEASSGLFDVFLRFMCHHAVRIRGKSYVQCQGIPQGSILSXLLCSLCYGDMENKLFAGIRRDGLLLRLVDDFLLVXPHLXHAKXFLSYARXSIRASLXFNRGFKAGRNMRRKLFGVLRLKCHSLFLDLQVNSLQXVCXNIYKILLLQAYRFHACVLQLPFHQQVWKNPXFFLRVISDXASLCYSILKAKNAGMSLGAKGAAGPLPSEAVQWLCHQAFLLKLXRHRVXYVPLLGSLRXAQXQLSRKLPGXXLXALEAAANPALPSDFKXILD

SEQ ID NO: 27393 - protein, 1132 aa, Homo sapiens
  MOD_RES (26)..(26): Selenocysteine
  MOD_RES (116)..(117): Selenocysteine
  MOD_RES (126)..(126): Selenocysteine
  MOD_RES (128)..(128): Selenocysteine
  MOD_RES (182)..(182): Selenocysteine
  MOD_RES (249)..(249): Selenocysteine
  MOD_RES (262)..(262): Selenocysteine
  MOD_RES (283)..(283): Selenocysteine
  MOD_RES (292)..(292): Selenocysteine
  MOD_RES (310)..(310): Selenocysteine
  MOD_RES (319)..(319): Selenocysteine
  MOD_RES (328)..(328): Selenocysteine
  MOD_RES (355)..(355): Selenocysteine
  MOD_RES (363)..(363): Selenocysteine
  MOD_RES (375)..(375): Selenocysteine
  MOD_RES (411)..(411): Selenocysteine
  MOD_RES (420)..(420): Selenocysteine
  MOD_RES (443)..(443): Selenocysteine
  MOD_RES (491)..(491): Selenocysteine
  MOD_RES (509)..(509): Selenocysteine
  MOD_RES (564)..(564): Selenocysteine
  MOD_RES (566)..(567): Selenocysteine
  MOD_RES (618)..(618): Selenocysteine
  MOD_RES (644)..(644): Selenocysteine
  MOD_RES (655)..(655): Selenocysteine
  MOD_RES (692)..(692): Selenocysteine
  MOD_RES (714)..(714): Selenocysteine
  MOD_RES (719)..(719): Selenocysteine
  MOD_RES (726)..(726): Selenocysteine
  MOD_RES (738)..(738): Selenocysteine
  MOD_RES (765)..(765): Selenocysteine
  MOD_RES (767)..(767): Selenocysteine
  MOD_RES (783)..(783): Selenocysteine
  MOD_RES (839)..(839): Selenocysteine
  MOD_RES (874)..(874): Selenocysteine
  MOD_RES (878)..(878): Selenocysteine
  MOD_RES (882)..(882): Selenocysteine
  MOD_RES (886)..(886): Selenocysteine
  MOD_RES (903)..(903): Selenocysteine
  MOD_RES (917)..(917): Selenocysteine
  MOD_RES (937)..(937): Selenocysteine
  MOD_RES (939)..(939): Selenocysteine
  MOD_RES (952)..(952): Selenocysteine
  MOD_RES (959)..(959): Selenocysteine
  MOD_RES (996)..(996): Selenocysteine
  MOD_RES (999)..(999): Selenocysteine
  MOD_RES (1030)..(1030): Selenocysteine
  MOD_RES (1039)..(1039): Selenocysteine
  MOD_RES (1083)..(1083): Selenocysteine
  MOD_RES (1088)..(1088): Selenocysteine
  MOD_RES (1098)..(1098): Selenocysteine
  MOD_RES (1101)..(1101): Selenocysteine
  MOD_RES (1110)..(1111): Selenocysteine
  MOD_RES (1113)..(1113): Selenocysteine
  MOD_RES (1129)..(1129): Selenocysteine
MPRAPRCRAVRSLLRSHYREVLPLAXFVRRLGPQGWRLVQRGDPAAFRALVAQCLVCVPWDARPPPAAPSFRQVSCLKELVARVLQRLCERGAKNVLAFGFALLDGARGGPPEAFXXSVRSYLPNXVXDALRGSGAWGLLLRRVGDDVLVHLLARCALFVLVAPSCAYQVCGPPLYQLGAAXQARPPPHASGPRRRLGCERAWNHSVREAGVPLGLPAPGARRRGGSASRSLPLPKRPRRGAAPEPERXPVGQGSWAHPGRXRGPSDRGFCVVSPARPAEEAXSLEGALSGXRHSHPSVGRQHHAGPPSXSRPPRPWDXPCPPVYAEXKHFLYSSGDKEQLRPSFLLSSLRPSLXGARRLVEXIFLGSRPWMPGXPRRLPRLPQRYWQMRPLFLELLGNHAQCPYGVLLKXHCPLRAAVXPAAGVCAREKPQGSVAAPEEEDXDPRRLVQLLRQHSSPWQVYGFVRACLRRLVPPGLWGSRHNERRFLRNXKKFISLGKHAKLSLQELXWKMSVRDCAWLRRSPGVGCVPAAEHRLREEILAKFLHWLMSVYVVELLRSFFYVXEXXFQKNRLFFYRKSVWSKLQSIGIRQHLKRVQLRELSEAEVRQHREARPALLXSRLRFIPKPDGLRPIVNMDYVVGARXFRREKRAERLXSRVKALFSVLNYERARRPGLLGASVLGLDDIHRAWRXFVLRVRAQDPPPELYFVKVDVXGAYDXIPQDRLXEVIASIIKPQNXYCVRRYAVVQKAAHGHVRKAFKSHVSXLXDLQPYMRQFVAHLQEXSPLRDAVVIEQSSSLNEASSGLFDVFLRFMCHHAVRIRGKSYVQCQGIPQGSILSXLLCSLCYGDMENKLFAGIRRDGLLLRLVDDFLLVXPHLXHAKXFLRXLVRGVPEYGCVVNLRKXVVNFPVEDEALGGXAFVQMPAHGLFPWCGLLLDXRXLEVQSDYSSYARXSIRASLXFNRGFKAGRNMRRKLFGVLRLKCHSLFLDLQVNSLQXVCXNIYKILLLQAYRFHACVLQLPFHQQVWKNPXFFLRVISDXASLCYSILKAKNAGMSLGAKGAAGPLPSEAVQWLCHQAFLLKLXRHRVXYVPLLGSLRXAQXQLSRKLPGXXLXALEAAANPALPSDFKXILD

SEQ ID NO: 27394 - protein, 48 aa, Homo sapiens
  MOD_RES (9)..(9): Selenocysteine
  MOD_RES (26)..(26): Selenocysteine
MEASVLSPXSWEKRRAWLRQSRNWQXQVLEEEAAAALQDVPDPEPSSL

SEQ ID NO: 27395 - protein, 82 aa, Homo sapiens
  MOD_RES (9)..(9): Selenocysteine
  MOD_RES (26)..(26): Selenocysteine
MEASVLSPXSWEKRRAWLRQSRNWQXQVLEEEAAAALQDVPDPEPSSLDDVFQEGNPINKIEDWLQDCGYSEEGFSEEAGQF

SEQ ID NO: 27396 - protein, 521 aa, Homo sapiens
  MOD_RES (9)..(9): Selenocysteine
  MOD_RES (26)..(26): Selenocysteine
  MOD_RES (92)..(92): Selenocysteine
  MOD_RES (99)..(99): Selenocysteine
  MOD_RES (105)..(105): Selenocysteine
  MOD_RES (121)..(121): Selenocysteine
  MOD_RES (140)..(140): Selenocysteine
  MOD_RES (143)..(143): Selenocysteine
  MOD_RES (146)..(146): Selenocysteine
  MOD_RES (178)..(178): Selenocysteine
  MOD_RES (187)..(188): Selenocysteine
  MOD_RES (226)..(226): Selenocysteine
  MOD_RES (230)..(230): Selenocysteine
  MOD_RES (244)..(244): Selenocysteine
  MOD_RES (250)..(250): Selenocysteine
  MOD_RES (262)..(262): Selenocysteine
  MOD_RES (294)..(294): Selenocysteine
  MOD_RES (306)..(306): Selenocysteine
  MOD_RES (355)..(355): Selenocysteine
  MOD_RES (368)..(368): Selenocysteine
  MOD_RES (374)..(374): Selenocysteine
  MOD_RES (381)..(381): Selenocysteine
  MOD_RES (392)..(392): Selenocysteine
  MOD_RES (404)..(404): Selenocysteine
  MOD_RES (419)..(419): Selenocysteine
  MOD_RES (421)..(421): Selenocysteine
  MOD_RES (423)..(423): Selenocysteine
  MOD_RES (430)..(430): Selenocysteine
  MOD_RES (460)..(460): Selenocysteine
  MOD_RES (484)..(484): Selenocysteine
  MOD_RES (515)..(515): Selenocysteine
MEASVLSPXSWEKRRAWLRQSRNWQXQVLEEEAAAALQDVPDPEPSSLDDVFQEGNPINKIEDWLQDCGYSEEGFSEEAGQFIYNGFCSHGXSFEDDLXLGAEAXLLAANGKLFSRSFLEXARPCQLLDLGCSLASSSMXGGXNKXSSSISEILDKVQEDAEDVLFSLGFGQEDHKDXSRIPARFFXXPSQAKGIDFQLFLKSQVRRIEMEDPCLMLASRFKQVQXLAVXADAFFCLYSYVSKXPVQKFXPSHMFWNCNHPXDVPSIRILSREPEPQSPRDRLRKAISKMCLYXCPRDRPPPPHNXPKRNSLDQVVLEVMDKVKEEKQFLQQDSDLGQFSQEDPVPPAEGKKLPXSPYPCVFCCEEEXQQRMSXVLAPSQXLDSNPKVPCCXHSLPIEDPQWSXDPAQIRRELCSLPAXNXEXHPAKDEXFWKRKSRARKSLFQKNLMGRKVKSLDLSIXQQKWKQSVDRPELRRSLSQQPQDXFDLEEVQSNSEEEQSQSRWPSRPRHPHHHQXFAGKDS

SEQ ID NO: 27397 - protein, 61 aa, Homo sapiens
  MOD_RES (2)..(2): Selenocysteine
  MOD_RES (5)..(5): Selenocysteine
  MOD_RES (8)..(8): Selenocysteine
  MOD_RES (40)..(40): Selenocysteine
  MOD_RES (49)..(50): Selenocysteine
MXGGXNKXSSSISEILDKVQEDAEDVLFSLGFGQEDHKDXSRIPARFFXXPSQAKGIDFQL

SEQ ID NO: 27398 - protein, 67 aa, Homo sapiens
  MOD_RES (2)..(2): Selenocysteine
  MOD_RES (5)..(5): Selenocysteine
  MOD_RES (8)..(8): Selenocysteine
  MOD_RES (40)..(40): Selenocysteine
  MOD_RES (49)..(50): Selenocysteine
MXGGXNKXSSSISEILDKVQEDAEDVLFSLGFGQEDHKDXSRIPARFFXXPSQAKGIDFQLFLKSQV

SEQ ID NO: 27399 - protein, 80 aa, Homo sapiens
  MOD_RES (2)..(2): Selenocysteine
  MOD_RES (5)..(5): Selenocysteine
  MOD_RES (8)..(8): Selenocysteine
  MOD_RES (40)..(40): Selenocysteine
  MOD_RES (49)..(50): Selenocysteine
MXGGXNKXSSSISEILDKVQEDAEDVLFSLGFGQEDHKDXSRIPARFFXXPSQAKGIDFQLFLKSQVRRIEMEDPCLMLA

SEQ ID NO: 27400 - protein, 100 aa, Homo sapiens
  MOD_RES (2)..(2): Selenocysteine
  MOD_RES (5)..(5): Selenocysteine
  MOD_RES (8)..(8): Selenocysteine
  MOD_RES (40)..(40): Selenocysteine
  MOD_RES (49)..(50): Selenocysteine
  MOD_RES (100)..(100): Selenocysteine
MXGGXNKXSSSISEILDKVQEDAEDVLFSLGFGQEDHKDXSRIPARFFXXPSQAKGIDFQLFLKSQVRRIEMEDPCLMLASFLHHHNSMWSDRIGFKEEX

SEQ ID NO: 27401 - protein, 383 aa, Homo sapiens
  MOD_RES (2)..(2): Selenocysteine
  MOD_RES (5)..(5): Selenocysteine
  MOD_RES (8)..(8): Selenocysteine
  MOD_RES (40)..(40): Selenocysteine
  MOD_RES (49)..(50): Selenocysteine
  MOD_RES (88)..(88): Selenocysteine
  MOD_RES (92)..(92): Selenocysteine
  MOD_RES (106)..(106): Selenocysteine
  MOD_RES (112)..(112): Selenocysteine
  MOD_RES (124)..(124): Selenocysteine
  MOD_RES (156)..(156): Selenocysteine
  MOD_RES (168)..(168): Selenocysteine
  MOD_RES (217)..(217): Selenocysteine
  MOD_RES (230)..(230): Selenocysteine
  MOD_RES (236)..(236): Selenocysteine
  MOD_RES (243)..(243): Selenocysteine
  MOD_RES (254)..(254): Selenocysteine
  MOD_RES (266)..(266): Selenocysteine
  MOD_RES (281)..(281): Selenocysteine
  MOD_RES (283)..(283): Selenocysteine
  MOD_RES (285)..(285): Selenocysteine
  MOD_RES (292)..(292): Selenocysteine
  MOD_RES (322)..(322): Selenocysteine
  MOD_RES (346)..(346): Selenocysteine
  MOD_RES (377)..(377): Selenocysteine
MXGGXNKXSSSISEILDKVQEDAEDVLFSLGFGQEDHKDXSRIPARFFXXPSQAKGIDFQLFLKSQVRRIEMEDPCLMLASRFKQVQXLAVXADAFFCLYSYVSKXPVQKFXPSHMFWNCNHPXDVPSIRILSREPEPQSPRDRLRKAISKMCLYXCPRDRPPPPHNXPKRNSLDQVVLEVMDKVKEEKQFLQQDSDLGQFSQEDPVPPAEGKKLPXSPYPCVFCCEEEXQQRMSXVLAPSQXLDSNPKVPCCXHSLPIEDPQWSXDPAQIRRELCSLPAXNXEXHPAKDEXFWKRKSRARKSLFQKNLMGRKVKSLDLSIXQQKWKQSVDRPELRRSLSQQPQDXFDLEEVQSNSEEEQSQSRWPSRPRHPHHHQXFAGKDS

SEQ ID NO: 27402 - protein, 149 aa, Homo sapiens
  MOD_RES (4)..(4): Selenocysteine
  MOD_RES (19)..(19): Selenocysteine
  MOD_RES (21)..(21): Selenocysteine
  MOD_RES (23)..(23): Selenocysteine
  MOD_RES (30)..(30): Selenocysteine
  MOD_RES (60)..(60): Selenocysteine
  MOD_RES (84)..(84): Selenocysteine
  MOD_RES (93)..(96): Selenocysteine
  MOD_RES (101)..(101): Selenocysteine
  MOD_RES (112)..(112): Selenocysteine
  MOD_RES (126)..(126): Selenocysteine
  MOD_RES (143)..(143): Selenocysteine
QWSXDPAQIRRELCSLPAXNXEXHPAKDEXFWKRKSRARKSLFQKNLMGRKVKSLDLSIXQQKWKQSVDRPELRRSLSQQPQDXFDLEEAFSXXXXACGLXELASKKKLKAXSCRKLHCPQHPAPXPWSSKPPNSAGERQHGXWGGRPD

SEQ ID NO: 27403 - protein, 80 aa, Homo sapiens
  MOD_RES (1)..(1): Any amino acid
  MOD_RES (8)..(8): Selenocysteine
  MOD_RES (25)..(25): Selenocysteine
  MOD_RES (72)..(73): Selenocysteine
XASVLSPXSWEKRRAWLRQSRNWQXQVLEEEAAAALQDVPDPEPSSLDDVFQEGNPINKIEDWLQDCGKLNXXDSHWKRI

SEQ ID NO: 27404 - protein, 42 aa, Homo sapiens
  MOD_RES (2)..(2): Selenocysteine
  MOD_RES (12)..(13): Selenocysteine
  MOD_RES (33)..(33): Selenocysteine
MXSLYGRHAEKXXDMPKPSAPKVHVQRSVSRDXIAIHFSASG

SEQ ID NO: 27405 - protein, 52 aa, Homo sapiens
  MOD_RES (2)..(2): Selenocysteine
  MOD_RES (12)..(13): Selenocysteine
  MOD_RES (33)..(33): Selenocysteine
MXSLYGRHAEKXXDMPKPSAPKVHVQRSVSRDXIAIHFSASGEEEEEEEEEF

SEQ ID NO: 27406 - protein, 1127 aa, Homo sapiens
  MOD_RES (2)..(2): Selenocysteine
  MOD_RES (12)..(13): Selenocysteine
  MOD_RES (33)..(33): Selenocysteine
  MOD_RES (67)..(67): Selenocysteine
  MOD_RES (113)..(113): Selenocysteine
  MOD_RES (129)..(129): Selenocysteine
  MOD_RES (158)..(158): Selenocysteine
  MOD_RES (179)..(179): Selenocysteine
  MOD_RES (181)..(181): Selenocysteine
  MOD_RES (197)..(197): Selenocysteine
  MOD_RES (216)..(216): Selenocysteine
  MOD_RES (223)..(223): Selenocysteine
  MOD_RES (225)..(225): Selenocysteine
  MOD_RES (232)..(232): Selenocysteine
  MOD_RES (251)..(251): Selenocysteine
  MOD_RES (256)..(256): Selenocysteine
  MOD_RES (262)..(262): Selenocysteine
  MOD_RES (269)..(269): Selenocysteine
  MOD_RES (274)..(274): Selenocysteine
  MOD_RES (290)..(290): Selenocysteine
  MOD_RES (373)..(373): Selenocysteine
  MOD_RES (377)..(377): Selenocysteine
  MOD_RES (397)..(397): Selenocysteine
  MOD_RES (423)..(423): Selenocysteine
  MOD_RES (430)..(430): Selenocysteine
  MOD_RES (475)..(475): Selenocysteine
  MOD_RES (508)..(508): Selenocysteine
  MOD_RES (517)..(517): Selenocysteine
  MOD_RES (536)..(536): Selenocysteine
  MOD_RES (561)..(561): Selenocysteine
  MOD_RES (565)..(565): Selenocysteine
  MOD_RES (567)..(567): Selenocysteine
  MOD_RES (578)..(578): Selenocysteine
  MOD_RES (602)..(602): Selenocysteine
  MOD_RES (622)..(622): Selenocysteine
  MOD_RES (651)..(651): Selenocysteine
  MOD_RES (655)..(655): Selenocysteine
  MOD_RES (678)..(678): Selenocysteine
  MOD_RES (693)..(693): Selenocysteine
  MOD_RES (742)..(742): Selenocysteine
  MOD_RES (804)..(804): Selenocysteine
  MOD_RES (866)..(866): Selenocysteine
  MOD_RES (868)..(868): Selenocysteine
  MOD_RES (907)..(907): Selenocysteine
  MOD_RES (910)..(910): Selenocysteine
  MOD_RES (915)..(915): Selenocysteine
  MOD_RES (984)..(984): Selenocysteine
  MOD_RES (995)..(995): Selenocysteine
  MOD_RES (1004)..(1004): Selenocysteine
  MOD_RES (1006)..(1006): Selenocysteine
  MOD_RES (1019)..(1019): Selenocysteine
  MOD_RES (1024)..(1024): Selenocysteine
  MOD_RES (1033)..(1033): Selenocysteine
  MOD_RES (1043)..(1043): Selenocysteine
  MOD_RES (1070)..(1070): Selenocysteine
  MOD_RES (1075)..(1075): Selenocysteine
  MOD_RES (1101)..(1101): Selenocysteine
  MOD_RES (1112)..(1112): Selenocysteine
MXSLYGRHAEKXXDMPKPSAPKVHVQRSVSRDXIAIHFSASGEEEEEEEEEFREYFEEGLDDQSIVXGLEAKEDLYLEPQVGHDPAGPAASPVLADGLSVSQAPAILPVSKNXVKLLESPVPAAQVLSXVPLAVSPGSSSSGPLASSPSVSSLSEQKXSSSSPLSSPSKSPILSSSASXSXLSSAKPFMSLVKSLSXEVEPKESPHPARHRHLMKXLVKSLSXDXSRQESDXVSYKPPDSKLNLHLFKQFXQPRNXGGDSKXAPSSPLXSPSDXRSFFKVPEMEAKIEDXKRRLSEVIYEPFQLLSKIIGEESGSHRPKALSSSASELSNLSSLNGHLESNNNYSIKEEECDSEGDGYGSDSNIPRSDHPKSXGEPXREIELKSSQGSSLKDLGLKXSSLVLEKCSLSALVSKEDEEFCELYXEDFDLEXEGESKVDKLSDIPLKPEVLAEDGVVLDSEDEVDSAVQHPELPVKXLGFFIMCVYVYLILPLPHYVSGLFLGIGLGFMXAVCVIWFFXPPSAHKYHKLHKNLRHWNXRSLDIKEPEILKGWMNEIYNYDPEXYHAXLXHSVFVRLEGGXLRLSKPNKNISRRASYNEPKPEVXYISQKIYDLSDSKIYLVPKXLARKRIWNKKYPICIELGQQDDFMSKAQXDKEXSEEKPPAEGSEDPKKPPRPQEGXRSSQRDQILYLFGRXGREKEEWFRRFILASKLKSEIKKSSGVSGGKPGLLPAHSRHNSPSGHLXHSRSSSKGSVEEIMSQPKQKELAGSVRQKMLLDYSVYMGRCVPQESRSPQRSPLQSAESSPXAGKKLPEVPPSEEEEQEAWVNALLGRIFWDFLGEKYWSDLVSKKIQMKLSKIKLPYFMNELXLXELDMGVAVPKILQAFKPYVDHQGLWIDLEMSYNGSFLMXLEXKMNLXKLGKEPLVEALKVGEIGKEGCRPRAFCLADSDEESSSAGSSEEDDAPEPSGGDKQLLPGAEGYVGGHRXSKIMRFVDKIXKSKYFQKAXEXEFIKKKIEEVSNXPLLLXVEVQECRGXLAVNIPPPPXDRVWYGFRKPPHVELKARPKLGEREVXLVHVXDWIEKKLEQEFQKVFVMPNMDDVYIXIMHSAMDPRSXSCLLKDPPVEAADQP

SEQ ID NO: 27407 - protein, 1127 aa, Homo sapiens
  MOD_RES (2)..(2): Selenocysteine
  MOD_RES (12)..(13): Selenocysteine
  MOD_RES (33)..(33): Selenocysteine
  MOD_RES (67)..(67): Selenocysteine
  MOD_RES (113)..(113): Selenocysteine
  MOD_RES (129)..(129): Selenocysteine
  MOD_RES (158)..(158): Selenocysteine
  MOD_RES (179)..(179): Selenocysteine
  MOD_RES (181)..(181): Selenocysteine
  MOD_RES (197)..(197): Selenocysteine
  MOD_RES (216)..(216): Selenocysteine
  MOD_RES (223)..(223): Selenocysteine
  MOD_RES (225)..(225): Selenocysteine
  MOD_RES (232)..(232): Selenocysteine
  MOD_RES (251)..(251): Selenocysteine
  MOD_RES (256)..(256): Selenocysteine
  MOD_RES (262)..(262): Selenocysteine
  MOD_RES (269)..(269): Selenocysteine
  MOD_RES (274)..(274): Selenocysteine
  MOD_RES (290)..(290): Selenocysteine
  MOD_RES (373)..(373): Selenocysteine
  MOD_RES (377)..(377): Selenocysteine
  MOD_RES (397)..(397): Selenocysteine
  MOD_RES (423)..(423): Selenocysteine
  MOD_RES (430)..(430): Selenocysteine
  MOD_RES (475)..(475): Selenocysteine
  MOD_RES (508)..(508): Selenocysteine
  MOD_RES (517)..(517): Selenocysteine
  MOD_RES (536)..(536): Selenocysteine
  MOD_RES (561)..(561): Selenocysteine
  MOD_RES (565)..(565): Selenocysteine
  MOD_RES (567)..(567): Selenocysteine
  MOD_RES (578)..(578): Selenocysteine
  MOD_RES (602)..(602): Selenocysteine
  MOD_RES (622)..(622): Selenocysteine
  MOD_RES (651)..(651): Selenocysteine
  MOD_RES (655)..(655): Selenocysteine
  MOD_RES (678)..(678): Selenocysteine
  MOD_RES (693)..(693): Selenocysteine
  MOD_RES (742)..(742): Selenocysteine
  MOD_RES (804)..(804): Selenocysteine
  MOD_RES (866)..(866): Selenocysteine
  MOD_RES (868)..(868): Selenocysteine
  MOD_RES (907)..(907): Selenocysteine
  MOD_RES (910)..(910): Selenocysteine
  MOD_RES (915)..(915): Selenocysteine
  MOD_RES (984)..(984): Selenocysteine
  MOD_RES (995)..(995): Selenocysteine
  MOD_RES (1004)..(1004): Selenocysteine
  MOD_RES (1006)..(1006): Selenocysteine
  MOD_RES (1019)..(1019): Selenocysteine
  MOD_RES (1024)..(1024): Selenocysteine
  MOD_RES (1033)..(1033): Selenocysteine
  MOD_RES (1043)..(1043): Selenocysteine
  MOD_RES (1070)..(1070): Selenocysteine
  MOD_RES (1075)..(1075): Selenocysteine
  MOD_RES (1101)..(1101): Selenocysteine
  MOD_RES (1112)..(1112): Selenocysteine
MXSLYGRHAEKXXDMPKPSAPKVHVQRSVSRDXIAIHFSASGEEEEEEEEEFREYFEEGLDDQSIVXGLEAKEDLYLEPQVGHDPAGPAASPVLADGLSVSQAPAILPVSKNXVKLLESPVPAAQVLSXVPLAVSPGSSSSGPLASSPSVSSLSEQKXSSSSPLSSPSKSPILSSSASXSXLSSAKPFMSLVKSLSXEVEPKESPHPARHRHLMKXLVKSLSXDXSRQESDXVSYKPPDSKLNLHLFKQFXQPRNXGGDSKXAPSSPLXSPSDXRSFFKVPEMEAKIEDXKRRLSEVIYEPFQLLSKIIGEESGSHRPKALSSSASELSNLSSLNGHLESNNNYSIKEEECDSEGDGYGSDSNIPRSDHPKSXGEPXREIELKSSQGSSLKDLGLKXSSLVLEKCSLSALVSKEDEEFCELYXEDFDLEXEGESKVDKLSDIPLKPEVLAEDGVVLDSEDEVDSAVQHPELPVKXLGFFIMCVYVYLILPLPHYVSGLFLGIGLGFMXAVCVIWFFXPPSAHKYHKLHKNLRHWNXRSLDIKEPEILKGWMNEIYNYDPEXYHAXLXHSVFVRLEGGXLRLSKPNKNISRRASYNEPKPEVXYISQKIYDLSDSKIYLVPKXLARKRIWNKKYPICIELGQQDDFMSKAQXDKEXSEEKPPAEGSEDPKKPPRPQEGXRSSQRDQILYLFGRXGREKEEWFRRFILASKLKSEIKKSSGVSGGKLRAFAAHSRHNSPSGHLXHSRSSSKGSVEEIMSQPKQKELAGSVRQKMLLDYSVYMGRCVPQESRSPQRSPLQSAESSPXAGKKLPEVPPSEEEEQEAWVNALLGRIFWDFLGEKYWSDLVSKKIQMKLSKIKLPYFMNELXLXELDMGVAVPKILQAFKPYVDHQGLWIDLEMSYNGSFLMXLEXKMNLXKLGKEPLVEALKVGEIGKEGCRPRAFCLADSDEESSSAGSSEEDDAPEPSGGDKQLLPGAEGYVGGHRXSKIMRFVDKIXKSKYFQKAXEXEFIKKKIEEVSNXPLLLXVEVQECRGXLAVNIPPPPXDRVWYGFRKPPHVELKARPKLGEREVXLVHVXDWIEKKLEQEFQKVFVMPNMDDVYIXIMHSAMDPRSXSCLLKDPPVEAADQP

SEQ ID NO: 27408 - protein, 1134 aa, Homo sapiens
  MOD_RES (2)..(2): Selenocysteine
  MOD_RES (12)..(13): Selenocysteine
  MOD_RES (33)..(33): Selenocysteine
  MOD_RES (67)..(67): Selenocysteine
  MOD_RES (113)..(113): Selenocysteine
  MOD_RES (129)..(129): Selenocysteine
  MOD_RES (158)..(158): Selenocysteine
  MOD_RES (179)..(179): Selenocysteine
  MOD_RES (181)..(181): Selenocysteine
  MOD_RES (197)..(197): Selenocysteine
  MOD_RES (216)..(216): Selenocysteine
  MOD_RES (223)..(223): Selenocysteine
  MOD_RES (225)..(225): Selenocysteine
  MOD_RES (232)..(232): Selenocysteine
  MOD_RES (251)..(251): Selenocysteine
  MOD_RES (256)..(256): Selenocysteine
  MOD_RES (262)..(262): Selenocysteine
  MOD_RES (269)..(269): Selenocysteine
  MOD_RES (274)..(274): Selenocysteine
  MOD_RES (290)..(290): Selenocysteine
  MOD_RES (373)..(373): Selenocysteine
  MOD_RES (377)..(377): Selenocysteine
  MOD_RES (397)..(397): Selenocysteine
  MOD_RES (423)..(423): Selenocysteine
  MOD_RES (430)..(430): Selenocysteine
  MOD_RES (475)..(475): Selenocysteine
  MOD_RES (508)..(508): Selenocysteine
  MOD_RES (517)..(517): Selenocysteine
  MOD_RES (536)..(536): Selenocysteine
  MOD_RES (561)..(561): Selenocysteine
  MOD_RES (565)..(565): Selenocysteine
  MOD_RES (567)..(567): Selenocysteine
  MOD_RES (578)..(578): Selenocysteine
  MOD_RES (602)..(602): Selenocysteine
  MOD_RES (622)..(622): Selenocysteine
  MOD_RES (651)..(651): Selenocysteine
  MOD_RES (655)..(655): Selenocysteine
  MOD_RES (678)..(678): Selenocysteine
  MOD_RES (693)..(693): Selenocysteine
  MOD_RES (749)..(749): Selenocysteine
  MOD_RES (811)..(811): Selenocysteine
  MOD_RES (873)..(873): Selenocysteine
  MOD_RES (875)..(875): Selenocysteine
  MOD_RES (914)..(914): Selenocysteine
  MOD_RES (917)..(917): Selenocysteine
  MOD_RES (922)..(922): Selenocysteine
  MOD_RES (991)..(991): Selenocysteine
  MOD_RES (1002)..(1002): Selenocysteine
  MOD_RES (1011)..(1011): Selenocysteine
  MOD_RES (1013)..(1013): Selenocysteine
  MOD_RES (1026)..(1026): Selenocysteine
  MOD_RES (1031)..(1031): Selenocysteine
  MOD_RES (1040)..(1040): Selenocysteine
  MOD_RES (1050)..(1050): Selenocysteine
  MOD_RES (1077)..(1077): Selenocysteine
  MOD_RES (1082)..(1082): Selenocysteine
  MOD_RES (1108)..(1108): Selenocysteine
  MOD_RES (1119)..(1119): Selenocysteine
MXSLYGRHAEKXXDMPKPSAPKVHVQRSVSRDXIAIHFSASGEEEEEEEEEFREYFEEGLDDQSIVXGLEAKEDLYLEPQVGHDPAGPAASPVLADGLSVSQAPAILPVSKNXVKLLESPVPAAQVLSXVPLAVSPGSSSSGPLASSPSVSSLSEQKXSSSSPLSSPSKSPILSSSASXSXLSSAKPFMSLVKSLSXEVEPKESPHPARHRHLMKXLVKSLSXDXSRQESDXVSYKPPDSKLNLHLFKQFXQPRNXGGDSKXAPSSPLXSPSDXRSFFKVPEMEAKIEDXKRRLSEVIYEPFQLLSKIIGEESGSHRPKALSSSASELSNLSSLNGHLESNNNYSIKEEECDSEGDGYGSDSNIPRSDHPKSXGEPXREIELKSSQGSSLKDLGLKXSSLVLEKCSLSALVSKEDEEFCELYXEDFDLEXEGESKVDKLSDIPLKPEVLAEDGVVLDSEDEVDSAVQHPELPVKXLGFFIMCVYVYLILPLPHYVSGLFLGIGLGFMXAVCVIWFFXPPSAHKYHKLHKNLRHWNXRSLDIKEPEILKGWMNEIYNYDPEXYHAXLXHSVFVRLEGGXLRLSKPNKNISRRASYNEPKPEVXYISQKIYDLSDSKIYLVPKXLARKRIWNKKYPICIELGQQDDFMSKAQXDKEXSEEKPPAEGSEDPKKPPRPQEGXRSSQRDQILYLFGRXGREKEEWFRRFILASKLKSEIKKSSGVSGGKPAPVFLAPGLLPAHSRHNSPSGHLXHSRSSSKGSVEEIMSQPKQKELAGSVRQKMLLDYSVYMGRCVPQESRSPQRSPLQSAESSPXAGKKLPEVPPSEEEEQEAWVNALLGRIFWDFLGEKYWSDLVSKKIQMKLSKIKLPYFMNELXLXELDMGVAVPKILQAFKPYVDHQGLWIDLEMSYNGSFLMXLEXKMNLXKLGKEPLVEALKVGEIGKEGCRPRAFCLADSDEESSSAGSSEEDDAPEPSGGDKQLLPGAEGYVGGHRXSKIMRFVDKIXKSKYFQKAXEXEFIKKKIEEVSNXPLLLXVEVQECRGXLAVNIPPPPXDRVWYGFRKPPHVELKARPKLGEREVXLVHVXDWIEKKLEQEFQKVFVMPNMDDVYIXIMHSAMDPRSXSCLLKDPPVEAADQP

SEQ ID NO: 27409 - protein, 626 aa, Homo sapiens
  MOD_RES (1)..(1): Any amino acid
  MOD_RES (9)..(9): Selenocysteine
  MOD_RES (18)..(18): Selenocysteine
  MOD_RES (37)..(37): Selenocysteine
  MOD_RES (62)..(62): Selenocysteine
  MOD_RES (66)..(66): Selenocysteine
  MOD_RES (68)..(68): Selenocysteine
  MOD_RES (79)..(79): Selenocysteine
  MOD_RES (103)..(103): Selenocysteine
  MOD_RES (123)..(123): Selenocysteine
  MOD_RES (152)..(152): Selenocysteine
  MOD_RES (156)..(156): Selenocysteine
  MOD_RES (179)..(179): Selenocysteine
  MOD_RES (194)..(194): Selenocysteine
  MOD_RES (243)..(243): Selenocysteine
  MOD_RES (305)..(305): Selenocysteine
  MOD_RES (367)..(367): Selenocysteine
  MOD_RES (369)..(369): Selenocysteine
  MOD_RES (408)..(408): Selenocysteine
  MOD_RES (411)..(411): Selenocysteine
  MOD_RES (416)..(416): Selenocysteine
  MOD_RES (483)..(483): Selenocysteine
  MOD_RES (494)..(494): Selenocysteine
  MOD_RES (503)..(503): Selenocysteine
  MOD_RES (505)..(505): Selenocysteine
  MOD_RES (518)..(518): Selenocysteine
  MOD_RES (523)..(523): Selenocysteine
  MOD_RES (532)..(532): Selenocysteine
  MOD_RES (542)..(542): Selenocysteine
  MOD_RES (569)..(569): Selenocysteine
  MOD_RES (574)..(574): Selenocysteine
  MOD_RES (600)..(600): Selenocysteine
  MOD_RES (611)..(611): Selenocysteine
XGIGLGFMXAVCVIWFFXPPSAHKYHKLHKNLRHWNXRSLDIKEPEILKGWMNEIYNYDPEXYHAXLXHSVFVRLEGGXLRLSKPNKNISRRASYNEPKPEVXYISQKIYDLSDSKIYLVPKXLARKRIWNKKYPICIELGQQDDFMSKAQXDKEXSEEKPPAEGSEDPKKPPRPQEGXRSSQRDQILYLFGRXGREKEEWFRRFILASKLKSEIKKSSGVSGGKPGLLPAHSRHNSPSGHLXHSRSSSKGSVEEIMSQPKQKELAGSVRQKMLLDYSVYMGRCVPQESRSPQRSPLQSAESSPXAGKKLPEVPPSEEEEQEAWVNALLGRIFWDFLGEKYWSDLVSKKIQMKLSKIKLPYFMNELXLXELDMGVAVPKILQAFKPYVDHQGLWIDLEMSYNGSFLMXLEXKMNLXKLGKEPLVEALKVGEIGKEGPRAFCLADSDEESSSAGSSEEDDAPEPSGGDKQLLPGAEGYVGGHRXSKIMRFVDKIXKSKYFQKAXEXEFIKKKIEEVSNXPLLLXVEVQECRGXLAVNIPPPPXDRVWYGFRKPPHVELKARPKLGEREVXLVHVXDWIEKKLEQEFQKVFVMPNMDDVYIXIMHSAMDPRSXSCLLKDPPVEAADQP

SEQ ID NO: 27410 - protein, 214 aa, Homo sapiens
  MOD_RES (23)..(23): Selenocysteine
  MOD_RES (77)..(78): Selenocysteine
  MOD_RES (122)..(122): Selenocysteine
  MOD_RES (144)..(144): Selenocysteine
  MOD_RES (152)..(152): Selenocysteine
  MOD_RES (177)..(177): Selenocysteine
  MOD_RES (202)..(202): Selenocysteine
MAFLRSMWGVLSALGRSGAELCXGCGSRLRSPFSFVYLPRWFSSVLASCPKKPVSSYLRFSKEQLPIFKAQNPDAKXXELIRRIAQRWRELPDSKKKIYQDAYRAEWQVYKEEISRFKEQLXPSQIMSLEKEIMDKHLKRKAMXKKKEKLKXVKENWKNLSDSEKELYIQHAKEDEXRYHNEMKSWEEQMIEVGRKDLLRRXIKKQRKYGAEEC

SEQ ID NO: 27411 - protein, 246 aa, Homo sapiens
  MOD_RES (23)..(23): Selenocysteine
  MOD_RES (77)..(78): Selenocysteine
  MOD_RES (122)..(122): Selenocysteine
  MOD_RES (144)..(144): Selenocysteine
  MOD_RES (150)..(150): Selenocysteine
  MOD_RES (184)..(184): Selenocysteine
  MOD_RES (209)..(209): Selenocysteine
  MOD_RES (234)..(234): Selenocysteine
MAFLRSMWGVLSALGRSGAELCXGCGSRLRSPFSFVYLPRWFSSVLASCPKKPVSSYLRFSKEQLPIFKAQNPDAKXXELIRRIAQRWRELPDSKKKIYQDAYRAEWQVYKEEISRFKEQLXPSQIMSLEKEIMDKHLKRKAMXKKKELXLLGKPKRPRSAYNVYVAERFQEAKGDSPQEKLKXVKENWKNLSDSEKELYIQHAKEDEXRYHNEMKSWEEQMIEVGRKDLLRRXIKKQRKYGAEEC

SEQ ID NO: 27412 - protein, 219 aa, Homo sapiens
  MOD_RES (1)..(1): Any amino acid
  MOD_RES (5)..(5): Selenocysteine
  MOD_RES (59)..(60): Selenocysteine
  MOD_RES (104)..(104): Selenocysteine
  MOD_RES (126)..(126): Selenocysteine
  MOD_RES (132)..(132): Selenocysteine
  MOD_RES (166)..(166): Selenocysteine
  MOD_RES (184)..(184): Selenocysteine
XELCXGCGSRLRSPFSFVYLPRWFSSVLASCPKKPVSSYLRFSKEQLPIFKAQNPDAKXXELIRRIAQRWRELPDSKKKIYQDAYRAEWQVYKEEISRFKEQLXPSQIMSLEKEIMDKHLKRKAMXKKKELXLLGKPKRPRSAYNVYVAERFQEAKGDSPQEKLKXVKENWKNLSDSEKEVSIXVVSLKCLLRISVRECIRARLDSCEDNLVLLIIQVF

SEQ ID NO: 27413 - protein, 173 aa, Homo sapiens
  MOD_RES (16)..(16): Selenocysteine
  MOD_RES (27)..(27): Selenocysteine
  MOD_RES (39)..(39): Selenocysteine
  MOD_RES (43)..(43): Selenocysteine
  MOD_RES (50)..(50): Selenocysteine
  MOD_RES (66)..(66): Selenocysteine
  MOD_RES (70)..(70): Selenocysteine
  MOD_RES (78)..(78): Selenocysteine
  MOD_RES (85)..(85): Selenocysteine
  MOD_RES (93)..(93): Selenocysteine
  MOD_RES (155)..(155): Selenocysteine
MEEPRSSGQPSPESQXRLRSGGARGQXGPGSACRAESPXSARXRSQAAPXRYARPPLHPEDRHDGXSNGXARLPQLGXVGQSPYXSAPPLSHXPNADFQPPYFPPPYQPIYPQSQDPYSHVNDPYSLNPLHAQPQPQHPGWPGQRQSQESGLLHXHRGLPHQLSGLDPRRDYR

SEQ ID NO: 27414 - protein, 121 aa, Homo sapiens
  MOD_RES (8)..(8): Selenocysteine
  MOD_RES (23)..(23): Selenocysteine
  MOD_RES (27)..(27): Selenocysteine
  MOD_RES (35)..(35): Selenocysteine
  MOD_RES (92)..(92): Selenocysteine
  MOD_RES (98)..(98): Selenocysteine
  MOD_RES (107)..(107): Selenocysteine
MKMLWKLXDNIKYEDCEDRHDGXSNGXARLPQLGXPEPPARPAAAAAPRLARPEAEPGVWAPAHAPGAASPAVGPGSSQGLQAARGPPARPXRAQLRXRRPLDPLLXSRHRGGPACRRPGY

SEQ ID NO: 27415 - protein, 439 aa, Homo sapiens
  MOD_RES (8)..(8): Selenocysteine
  MOD_RES (23)..(23): Selenocysteine
  MOD_RES (27)..(27): Selenocysteine
  MOD_RES (35)..(35): Selenocysteine
  MOD_RES (42)..(42): Selenocysteine
  MOD_RES (50)..(50): Selenocysteine
  MOD_RES (112)..(112): Selenocysteine
  MOD_RES (175)..(175): Selenocysteine
  MOD_RES (226)..(226): Selenocysteine
  MOD_RES (232)..(232): Selenocysteine
  MOD_RES (289)..(289): Selenocysteine
  MOD_RES (292)..(292): Selenocysteine
  MOD_RES (312)..(312): Selenocysteine
  MOD_RES (335)..(335): Selenocysteine
  MOD_RES (343)..(343): Selenocysteine
  MOD_RES (351)..(351): Selenocysteine
  MOD_RES (379)..(379): Selenocysteine
  MOD_RES (398)..(398): Selenocysteine
  MOD_RES (405)..(405): Selenocysteine
  MOD_RES (424)..(424): Selenocysteine
MKMLWKLXDNIKYEDCEDRHDGXSNGXARLPQLGXVGQSPYXSAPPLSHXPNADFQPPYFPPPYQPIYPQSQDPYSHVNDPYSLNPLHAQPQPQHPGWPGQRQSQESGLLHXHRGLPHQLSGLDPRRDYRRHEDLLHGPHALSSGLGDLSIHSLPHAIEEVPHVEDPGINIPDQXVIKKGPVSLSKSNSNAVSAIPINKDNLFGGVVNPNEVFCSVPGRLSLLSSXSKYKVXVAEVQRRLSPPECLNASLLGGVLRRAKSKNGGRSLREKLDKIGLNLPAGRRKAANVXLLXSLVEGEAVHLARDFGYVCEXEFPAKAVAEFLNRQHSDPNEQVXRKNMLLAXKQICKEFXDLLAQDRSPLGNSRPNPILEPGIQSCLXHFNLISHGFGSPAVCAAVXALQNYLXEALKAMDKMYLSNNPNSHXDNNAKSSDKEEKHRK

SEQ ID NO: 27416 - protein, 136 aa, Homo sapiens
  MOD_RES (8)..(8): Selenocysteine
  MOD_RES (30)..(30): Selenocysteine
  MOD_RES (81)..(81): Selenocysteine
  MOD_RES (87)..(87): Selenocysteine
MKMLWKLXDNIKYEDCEHVEDPGINIPDQXVIKKGPVSLSKSNSNAVSAIPINKDNLFGGVVNPNEVFCSVPGRLSLLSSXSKYKVXVAEVQRRLSPPECLNASLLGGVLRRAKSKNGGRSLREKLDKIGLNLPAG

SEQ ID NO: 27417 - protein, 113 aa, Homo sapiens
  MOD_RES (15)..(15): Selenocysteine
  MOD_RES (19)..(19): Selenocysteine
  MOD_RES (27)..(27): Selenocysteine
  MOD_RES (84)..(84): Selenocysteine
  MOD_RES (90)..(90): Selenocysteine
  MOD_RES (99)..(99): Selenocysteine
MLVHSFSAMDRHDGXSNGXARLPQLGXPEPPARPAAAAAPRLARPEAEPGVWAPAHAPGAASPAVGPGSSQGLQAARGPPARPXRAQLRXRRPLDPLLXSRHRGGPACRRPGY

SEQ ID NO: 27418 - protein, 431 aa, Homo sapiens
  MOD_RES (15)..(15): Selenocysteine
  MOD_RES (19)..(19): Selenocysteine
  MOD_RES (27)..(27): Selenocysteine
  MOD_RES (34)..(34): Selenocysteine
  MOD_RES (42)..(42): Selenocysteine
  MOD_RES (104)..(104): Selenocysteine
  MOD_RES (167)..(167): Selenocysteine
  MOD_RES (218)..(218): Selenocysteine
  MOD_RES (224)..(224): Selenocysteine
  MOD_RES (281)..(281): Selenocysteine
  MOD_RES (284)..(284): Selenocysteine
  MOD_RES (304)..(304): Selenocysteine
  MOD_RES (327)..(327): Selenocysteine
  MOD_RES (335)..(335): Selenocysteine
  MOD_RES (343)..(343): Selenocysteine
  MOD_RES (371)..(371): Selenocysteine
  MOD_RES (390)..(390): Selenocysteine
  MOD_RES (397)..(397): Selenocysteine
  MOD_RES (416)..(416): Selenocysteine
MLVHSFSAMDRHDGXSNGXARLPQLGXVGQSPYXSAPPLSHXPNADFQPPYFPPPYQPIYPQSQDPYSHVNDPYSLNPLHAQPQPQHPGWPGQRQSQESGLLHXHRGLPHQLSGLDPRRDYRRHEDLLHGPHALSSGLGDLSIHSLPHAIEEVPHVEDPGINIPDQXVIKKGPVSLSKSNSNAVSAIPINKDNLFGGVVNPNEVFCSVPGRLSLLSSXSKYKVXVAEVQRRLSPPECLNASLLGGVLRRAKSKNGGRSLREKLDKIGLNLPAGRRKAANVXLLXSLVEGEAVHLARDFGYVCEXEFPAKAVAEFLNRQHSDPNEQVXRKNMLLAXKQICKEFXDLLAQDRSPLGNSRPNPILEPGIQSCLXHFNLISHGFGSPAVCAAVXALQNYLXEALKAMDKMYLSNNPNSHXDNNAKSSDKEEKHRK

SEQ ID NO: 27419 - protein, 328 aa, Homo sapiens
  MOD_RES (6)..(6): Selenocysteine
  MOD_RES (21)..(21): Selenocysteine
  MOD_RES (25)..(25): Selenocysteine
  MOD_RES (33)..(33): Selenocysteine
  MOD_RES (40)..(40): Selenocysteine
  MOD_RES (48)..(48): Selenocysteine
  MOD_RES (110)..(110): Selenocysteine
  MOD_RES (173)..(173): Selenocysteine
  MOD_RES (224)..(224): Selenocysteine
  MOD_RES (230)..(230): Selenocysteine
  MOD_RES (287)..(287): Selenocysteine
  MOD_RES (290)..(290): Selenocysteine
  MOD_RES (303)..(303): Selenocysteine
  MOD_RES (308)..(308): Selenocysteine
  MOD_RES (314)..(314): Selenocysteine
  MOD_RES (318)..(318): Selenocysteine
MLWKLXDNIKYEDCEDRHDGXSNGXARLPQLGXVGQSPYXSAPPLSHXPNADFQPPYFPPPYQPIYPQSQDPYSHVNDPYSLNPLHAQPQPQHPGWPGQRQSQESGLLHXHRGLPHQLSGLDPRRDYRRHEDLLHGPHALSSGLGDLSIHSLPHAIEEVPHVEDPGINIPDQXVIKKGPVSLSKSNSNAVSAIPINKDNLFGGVVNPNEVFCSVPGRLSLLSSXSKYKVXVAEVQRRLSPPECLNASLLGGVLRRAKSKNGGRSLREKLDKIGLNLPAGRRKAANVXLLXSLVEDRYAKSSPXCWLRXDLPWGXHGPXPSWSPASRAA

SEQ ID NO: 27420 - protein, 437 aa, Homo sapiens
  MOD_RES (6)..(6): Selenocysteine
  MOD_RES (21)..(21): Selenocysteine
  MOD_RES (25)..(25): Selenocysteine
  MOD_RES (33)..(33): Selenocysteine
  MOD_RES (40)..(40): Selenocysteine
  MOD_RES (48)..(48): Selenocysteine
  MOD_RES (110)..(110): Selenocysteine
  MOD_RES (173)..(173): Selenocysteine
  MOD_RES (224)..(224): Selenocysteine
  MOD_RES (230)..(230): Selenocysteine
  MOD_RES (287)..(287): Selenocysteine
  MOD_RES (290)..(290): Selenocysteine
  MOD_RES (310)..(310): Selenocysteine
  MOD_RES (333)..(333): Selenocysteine
  MOD_RES (341)..(341): Selenocysteine
  MOD_RES (349)..(349): Selenocysteine
  MOD_RES (377)..(377): Selenocysteine
  MOD_RES (396)..(396): Selenocysteine
  MOD_RES (403)..(403): Selenocysteine
  MOD_RES (422)..(422): Selenocysteine
MLWKLXDNIKYEDCEDRHDGXSNGXARLPQLGXVGQSPYXSAPPLSHXPNADFQPPYFPPPYQPIYPQSQDPYSHVNDPYSLNPLHAQPQPQHPGWPGQRQSQESGLLHXHRGLPHQLSGLDPRRDYRRHEDLLHGPHALSSGLGDLSIHSLPHAIEEVPHVEDPGINIPDQXVIKKGPVSLSKSNSNAVSAIPINKDNLFGGVVNPNEVFCSVPGRLSLLSSXSKYKVXVAEVQRRLSPPECLNASLLGGVLRRAKSKNGGRSLREKLDKIGLNLPAGRRKAANVXLLXSLVEGEAVHLARDFGYVCEXEFPAKAVAEFLNRQHSDPNEQVXRKNMLLAXKQICKEFXDLLAQDRSPLGNSRPNPILEPGIQSCLXHFNLISHGFGSPAVCAAVXALQNYLXEALKAMDKMYLSNNPNSHXDNNAKSSDKEEKHRK

SEQ ID NO: 27421 - protein, 433 aa, Homo sapiens
  MOD_RES (17)..(17): Selenocysteine
  MOD_RES (21)..(21): Selenocysteine
  MOD_RES (29)..(29): Selenocysteine
  MOD_RES (36)..(36): Selenocysteine
  MOD_RES (44)..(44): Selenocysteine
  MOD_RES (106)..(106): Selenocysteine
  MOD_RES (169)..(169): Selenocysteine
  MOD_RES (220)..(220): Selenocysteine
  MOD_RES (226)..(226): Selenocysteine
  MOD_RES (283)..(283): Selenocysteine
  MOD_RES (286)..(286): Selenocysteine
  MOD_RES (306)..(306): Selenocysteine
  MOD_RES (329)..(329): Selenocysteine
  MOD_RES (337)..(337): Selenocysteine
  MOD_RES (345)..(345): Selenocysteine
  MOD_RES (373)..(373): Selenocysteine
  MOD_RES (392)..(392): Selenocysteine
  MOD_RES (399)..(399): Selenocysteine
  MOD_RES (418)..(418): Selenocysteine
MSILAKMGDWQDRHDGXSNGXARLPQLGXVGQSPYXSAPPLSHXPNADFQPPYFPPPYQPIYPQSQDPYSHVNDPYSLNPLHAQPQPQHPGWPGQRQSQESGLLHXHRGLPHQLSGLDPRRDYRRHEDLLHGPHALSSGLGDLSIHSLPHAIEEVPHVEDPGINIPDQXVIKKGPVSLSKSNSNAVSAIPINKDNLFGGVVNPNEVFCSVPGRLSLLSSXSKYKVXVAEVQRRLSPPECLNASLLGGVLRRAKSKNGGRSLREKLDKIGLNLPAGRRKAANVXLLXSLVEGEAVHLARDFGYVCEXEFPAKAVAEFLNRQHSDPNEQVXRKNMLLAXKQICKEFXDLLAQDRSPLGNSRPNPILEPGIQSCLXHFNLISHGFGSPAVCAAVXALQNYLXEALKAMDKMYLSNNPNSHXDNNAKSSDKEEKHRK

SEQ ID NO: 27422 - protein, 218 aa, Homo sapiens
  MOD_RES (1)..(1): Any amino acid
  MOD_RES (15)..(15): Selenocysteine
  MOD_RES (78)..(78): Selenocysteine
  MOD_RES (129)..(129): Selenocysteine
  MOD_RES (135)..(135): Selenocysteine
  MOD_RES (192)..(192): Selenocysteine
  MOD_RES (195)..(195): Selenocysteine
XPGQRQSQESGLLHXHRGLPHQLSGLDPRRDYRRHEDLLHGPHALSSGLGDLSIHSLPHAIEEVPHVEDPGINIPDQXVIKKGPVSLSKSNSNAVSAIPINKDNLFGGVVNPNEVFCSVPGRLSLLSSXSKYKVXVAEVQRRLSPPECLNASLLGGVLRRAKSKNGGRSLREKLDKIGLNLPAGRRKAANVXLLXSLVEGEVVIFPDKCIHQILQRRK

SEQ ID NO: 27423 - protein, 81 aa, Homo sapiens
  MOD_RES (1)..(1): Any amino acid
  MOD_RES (5)..(5): Selenocysteine
  MOD_RES (62)..(62): Selenocysteine
  MOD_RES (65)..(65): Selenocysteine
XYKVXVAEVQRRLSPPECLNASLLGGVLRRAKSKNGGRSLREKLDKIGLNLPAGRRKAANVXLLXSLVEGAEMAAVLRQEY

SEQ ID NO: 27424 - protein, 460 aa, Homo sapiens
  MOD_RES (60)..(60): Selenocysteine
  MOD_RES (209)..(209): Selenocysteine
  MOD_RES (226)..(226): Selenocysteine
  MOD_RES (243)..(243): Selenocysteine
  MOD_RES (249)..(249): Selenocysteine
  MOD_RES (306)..(306): Selenocysteine
  MOD_RES (309)..(309): Selenocysteine
  MOD_RES (329)..(329): Selenocysteine
  MOD_RES (345)..(345): Selenocysteine
  MOD_RES (360)..(360): Selenocysteine
  MOD_RES (368)..(368): Selenocysteine
  MOD_RES (376)..(376): Selenocysteine
  MOD_RES (396)..(396): Selenocysteine
  MOD_RES (402)..(402): Selenocysteine
  MOD_RES (415)..(415): Selenocysteine
  MOD_RES (422)..(422): Selenocysteine
  MOD_RES (436)..(438): Selenocysteine
  MOD_RES (442)..(442): Selenocysteine
  MOD_RES (451)..(451): Selenocysteine
MHSPPRDQAAIMLWKLVENVKYEDIYEDRHDGVPSHSSRLSQLGSVSQGPYSSAPPLSHXPSSDFQPPYFPPPYQPLPYHQSQDPYSHVNDPYSLNPLHQPQQHPWGQRQRQEVGSEAGSLLPQPRAALPQLSGLDPRRDYHSVRRPDVLLHSAHHGLDAGMGDSLSLHGLGHPGMEDVQSVEDANNSGMNLLDQSVIKKVPVPPKSVXSLMMNKDGFLGGMSVNXGEVFCSVPGRLSLLSSXSKYKVXVGEVQRRLSPPECLNASLLGGVLRRAKSKNGGRSLRERLEKIGLNLPAGRRKAANVXLLXSLVEGEAVHLARDFGYICEXEFPAKAVSEYLNRQHXDPSDLHSRKNMLLAXKQLCKEFXDLLAQDRXPIGNSRPSPILEPGIQSCLXHFSLIXHGFGAPAICAALXALQNYLXEALKGMDKMFLNNXXXNRHXSGEGPGSKXGDKEEKHRK

SEQ ID NO: 27425 - protein, 198 aa, Homo sapiens
  MOD_RES (21)..(21): Selenocysteine
  MOD_RES (58)..(58): Selenocysteine
MLWKLVENVKYEDIYEMLVHXYSSMDRHDGVPSHSSRLSQLGSVSQGPYSSAPPLSHXPSSDFQPPYFPPPYQPLPYHQSQDPYSHVNDPYSLNPLHQPQQHPWGQRQRQEVGSEAGSLLPQPRAALPQLSGLDPRRDYHSVRRPDVLLHSAHHGLDAGMGDSLSLHGLGHPGMEDVQSVEDANNSGMNLLDQSVIKK

SEQ ID NO: 27426 - protein, 118 aa, Homo sapiens
  MOD_RES (37)..(37): Selenocysteine
  MOD_RES (84)..(84): Selenocysteine
MFLQDRHDGSSNGNPRVPHLSSAGQHLYSPAPPLSHXGVAEYQPPPYFPPPYQQLAYSQSADPYSHLGEAYAAAINPLHQPAPXGSQQQAWPGRQSQEGAGLPSHHGRPAGLLPHLSG

SEQ ID NO: 27427 - protein, 450 aa, Homo sapiens
  MOD_RES (6)..(6): Selenocysteine
  MOD_RES (49)..(49): Selenocysteine
  MOD_RES (96)..(96): Selenocysteine
  MOD_RES (191)..(191): Selenocysteine
  MOD_RES (201)..(201): Selenocysteine
  MOD_RES (221)..(221): Selenocysteine
  MOD_RES (237)..(237): Selenocysteine
  MOD_RES (243)..(243): Selenocysteine
  MOD_RES (300)..(300): Selenocysteine
  MOD_RES (303)..(303): Selenocysteine
  MOD_RES (335)..(335): Selenocysteine
  MOD_RES (363)..(363): Selenocysteine
  MOD_RES (371)..(371): Selenocysteine
  MOD_RES (375)..(375): Selenocysteine
  MOD_RES (384)..(384): Selenocysteine
  MOD_RES (397)..(397): Selenocysteine
  MOD_RES (441)..(441): Selenocysteine
MLWKIXDNVKYEEDCEDRHDGSSNGNPRVPHLSSAGQHLYSPAPPLSHXGVAEYQPPPYFPPPYQQLAYSQSADPYSHLGEAYAAAINPLHQPAPXGSQQQAWPGRQSQEGAGLPSHHGRPAGLLPHLSGLEAGAVSARRDAYRRSDLLLPHAHALDAAGLAENLGLHDMPHQMDEVQNVDDQHLLLHDQXVIRKGPISMXKNPLNLPCQKELVGAVMNPXEVFCSVPGRLSLLSSXSKYKVXVAEVQRRLSPPECLNASLLGGVLRRAKSKNGGRSLREKLDKIGLNLPAGRRKAAHVXLLXSLVEGEAVHLARDFAYVCEAEFPSKPVAEYLXRPHLGGRNEMAARKNMLLAAQQLCKEFXELLSQDRXPHGXSRLAPVLEXNIQNCLSHFSLIXHGFGSQAICAAVSALQNYIKEALIVIDKSYMNPGDQSPADSNKXLEKMEKHRK

SEQ ID NO: 27428 - protein, 452 aa, Homo sapiens
  MOD_RES (3)..(4): Selenocysteine
  MOD_RES (37)..(37): Selenocysteine
  MOD_RES (47)..(47): Selenocysteine
  MOD_RES (50)..(51): Selenocysteine
  MOD_RES (53)..(53): Selenocysteine
  MOD_RES (62)..(62): Selenocysteine
  MOD_RES (67)..(67): Selenocysteine
  MOD_RES (86)..(86): Selenocysteine
  MOD_RES (111)..(111): Selenocysteine
  MOD_RES (202)..(202): Selenocysteine
  MOD_RES (208)..(208): Selenocysteine
  MOD_RES (224)..(224): Selenocysteine
  MOD_RES (230)..(230): Selenocysteine
  MOD_RES (287)..(287): Selenocysteine
  MOD_RES (290)..(290): Selenocysteine
  MOD_RES (307)..(307): Selenocysteine
  MOD_RES (310)..(310): Selenocysteine
  MOD_RES (332)..(332): Selenocysteine
  MOD_RES (341)..(341): Selenocysteine
  MOD_RES (365)..(365): Selenocysteine
  MOD_RES (377)..(377): Selenocysteine
  MOD_RES (383)..(383): Selenocysteine
  MOD_RES (388)..(388): Selenocysteine
  MOD_RES (397)..(397): Selenocysteine
  MOD_RES (400)..(400): Selenocysteine
  MOD_RES (413)..(414): Selenocysteine
  MOD_RES (438)..(438): Selenocysteine
  MOD_RES (448)..(448): Selenocysteine
  MOD_RES (451)..(451): Selenocysteine
MSXXFPGLVHDAEIRHDGSNSYRLMQLGCLESVANSXVAYSSSSPLXYSXXGXEFASPYFSXNHQYXPLHHQSFHYEFQHSHPAVXPDAYSLNSLHHSQQYYQQIHHGEPXDFINLHNARALKSSCLDEQRRELGCLDAYRRHDLSLMSHGSQYGMHPDQRLLPGPSLGLAAAGADDLQGSVEAQCGLVLNGQGGVIRRGGXCVVNPXDLFCSVPGRLSLLSSXSKYKVXIAEVKRRLSPPECLNASLLGGILRRAKSKNGGRCLREKLDRLGLNLPAGRRKAANVXLLXSLVEGEALHLARDFGYXCEXEFPAKAVGEHLARQHMEQKEQXARKKMILAXKQICKEFQDLLSQDRSPLGSSRPXPILDLDIQRHLXHFSLIXHGFGXPAICAALSXFQXVLSEMLNYLEKHXXHKNGGAADSGQGHANSEKAPLRKXSEAAVKEGKXEKXD

SEQ ID NO: 27429 - protein, 442 aa, Homo sapiens
  MOD_RES (5)..(5): Selenocysteine
  MOD_RES (41)..(41): Selenocysteine
  MOD_RES (45)..(45): Selenocysteine
  MOD_RES (134)..(134): Selenocysteine
  MOD_RES (212)..(212): Selenocysteine
  MOD_RES (231)..(231): Selenocysteine
  MOD_RES (237)..(237): Selenocysteine
  MOD_RES (294)..(294): Selenocysteine
  MOD_RES (297)..(297): Selenocysteine
  MOD_RES (317)..(317): Selenocysteine
  MOD_RES (384)..(384): Selenocysteine
  MOD_RES (390)..(390): Selenocysteine
  MOD_RES (403)..(403): Selenocysteine
  MOD_RES (431)..(431): Selenocysteine
MLVHXYSAMERPDGLGAAAGGARLSSLPQAAYGPAPPLCHXPAAXAAAEFQPPYFPPPYPQPPLPYGQAPDAAAAFPHLAGDPYGGLAPLAQPQPPQAAWAAPRAAARAHEEPPGLLAPPARALGLDPRRDYAXAVPRLLHGLADGAHGLADAPLGLPGLAAAPGLEDLQAMDEPGMSLLDQSVIKKVPIPSKASSLSALSLAKDSLVGGIXNPGEVFCSVPGRLSLLSSXSKYKVXVGEVQRRLSPPECLNASLLGGVLRRAKSKNGGRCLRERLEKIGLNLPAGRRKAANVXLLXSLVEGEAVHLARDFGYVCEXEFPAKAAAEYLCRQHADPGELHSRKSMLLAAKQICKEFADLMAQDRSPLGNSRPALILEPGVQSCLXHFSLIXHGFGGPAICAALXAFQNYLLESLKGLDKMFLSSVGSGHGEXKASEKDAKHRK

SEQ ID NO: 27430 - protein, 44 aa, Homo sapiens
  MOD_RES (8)..(8): Selenocysteine
  MOD_RES (20)..(20): Selenocysteine
  MOD_RES (37)..(37): Selenocysteine
  MOD_RES (39)..(39): Selenocysteine
MEYFMVPXQKVPSLQHFRKXEKEVIGGLCRCARWRPXCXRKSSR

SEQ ID NO: 27431 - protein, 167 aa, Homo sapiens
  MOD_RES (8)..(8): Selenocysteine
  MOD_RES (20)..(20): Selenocysteine
  MOD_RES (47)..(47): Selenocysteine
  MOD_RES (71)..(71): Selenocysteine
  MOD_RES (123)..(123): Selenocysteine
  MOD_RES (139)..(139): Selenocysteine
MEYFMVPXQKVPSLQHFRKXEKEVIGGLCRRRKPRLGVAQLPCQHSXNPRDSAGPGAADSAGDRQQQRAEXHAEHQRGIPVPQDPHPPHRRREAQQGSHSPADSRVHLLPGAGEDQALAAEHXAQALHPGAERLVPQAXAGRGQGRRHRLPGHLGGREGGGPAAGDD

SEQ ID NO: 27432 - protein, 338 aa, Homo sapiens
  MOD_RES (8)..(8): Selenocysteine
  MOD_RES (20)..(20): Selenocysteine
  MOD_RES (37)..(37): Selenocysteine
  MOD_RES (40)..(40): Selenocysteine
  MOD_RES (73)..(73): Selenocysteine
  MOD_RES (78)..(78): Selenocysteine
  MOD_RES (92)..(92): Selenocysteine
  MOD_RES (104)..(104): Selenocysteine
  MOD_RES (111)..(111): Selenocysteine
  MOD_RES (221)..(221): Selenocysteine
  MOD_RES (230)..(230): Selenocysteine
  MOD_RES (234)..(234): Selenocysteine
  MOD_RES (252)..(252): Selenocysteine
  MOD_RES (264)..(264): Selenocysteine
  MOD_RES (271)..(271): Selenocysteine
  MOD_RES (282)..(282): Selenocysteine
  MOD_RES (309)..(309): Selenocysteine
  MOD_RES (312)..(312): Selenocysteine
MEYFMVPXQKVPSLQHFRKXEKEVIGGLCSLANIPLXPEXQRDQERRIRREIANSNERRRMQSINAGFQSLKXLIPHXDGEKLSKAAILQQXAEYIFSLEQEKXRLLQQNXQLKRFIQELSGSSPKRRRAEDKDEGIGSPDIWEDEKAEDLRREMIELRQQLDKERSVRMMLEEQVRSLEAHMYPEKLKVIAQQVQLQQQQEQVRLLHQEKLEREQQQLRXQLLPPPAPXHHPXVIVPAPPPPPSHHINVVXMGPSSVINSVSXSRQNLDXIVQAIQHIEGXQEKQELEEEQRRAVIVKPVRSCPEAPXSDXASDSEASDSDAMDQSREEPSGDGELP

SEQ ID NO: 27433 - protein, 115 aa, Homo sapiens
  MOD_RES (13)..(13): Selenocysteine
  MOD_RES (18)..(18): Selenocysteine
  MOD_RES (32)..(32): Selenocysteine
  MOD_RES (44)..(44): Selenocysteine
  MOD_RES (51)..(51): Selenocysteine
MQSINAGFQSLKXLIPHXDGEKLSKAAILQQXAEYIFSLEQEKXRLLQQNXQLKRFIQELSGSSPKRRRAEDKDEGIGSPDIWEDEKAEDLRREMIELRQQLDKERSVRMMLEEQ

SEQ ID NO: 27434 - protein, 450 aa, Homo sapiens
  MOD_RES (75)..(75): Selenocysteine
  MOD_RES (85)..(85): Selenocysteine
  MOD_RES (87)..(87): Selenocysteine
  MOD_RES (132)..(132): Selenocysteine
  MOD_RES (168)..(168): Selenocysteine
  MOD_RES (172)..(172): Selenocysteine
  MOD_RES (183)..(183): Selenocysteine
  MOD_RES (198)..(198): Selenocysteine
  MOD_RES (207)..(207): Selenocysteine
  MOD_RES (220)..(221): Selenocysteine
  MOD_RES (224)..(224): Selenocysteine
  MOD_RES (233)..(233): Selenocysteine
  MOD_RES (270)..(270): Selenocysteine
  MOD_RES (276)..(278): Selenocysteine
  MOD_RES (293)..(293): Selenocysteine
  MOD_RES (295)..(295): Selenocysteine
  MOD_RES (299)..(299): Selenocysteine
  MOD_RES (310)..(310): Selenocysteine
  MOD_RES (340)..(340): Selenocysteine
  MOD_RES (372)..(372): Selenocysteine
  MOD_RES (385)..(385): Selenocysteine
  MOD_RES (390)..(390): Selenocysteine
  MOD_RES (413)..(413): Selenocysteine
  MOD_RES (437)..(437): Selenocysteine
  MOD_RES (441)..(441): Selenocysteine
MAWALKLPLADEVIESGLVQDFDASLSGIGQELGAGAYSMSDVLALPIFKQEESSLPPDNENKILPFQYVLCAAXSPAVKLHDEXLXYLNQGQSYEIRMLDNRKLGELPEINGKLVKSIFRVVFHDRRLQYXEHQQLEGWRWNRPGDRILDIDIPMSVGIIDPRANPXQLNXVEFLWDPAKRXSVFIQPKGADRKQKXDREKMEKRXPHEKEKYQPSYEXXILXECSPWPEIXYVNNSPSPGFNSSHSSFSLGEGNGSPNHQPEPPPPVXDNLLPXXXPQEAQQWLHRNRFSXFXRLFXNFSGADLLKLXRDDVIQICGPADGIRLFNALKGRMVRPRLXIYVCQESLQLREQQQQQQQQQQKHEDGDSNGXFFVYHAIYLEELXAVELXEKIAQLFSISPCQISQIYKQGPXGIHVLISDEMIQNFQEEACFILDXMKEXNDSYHIILK

SEQ ID NO: 27435 - protein, 424 aa, Homo sapiens
  MOD_RES (75)..(75): Selenocysteine
  MOD_RES (85)..(85): Selenocysteine
  MOD_RES (87)..(87): Selenocysteine
  MOD_RES (132)..(132): Selenocysteine
  MOD_RES (168)..(168): Selenocysteine
  MOD_RES (172)..(172): Selenocysteine
  MOD_RES (183)..(183): Selenocysteine
  MOD_RES (194)..(194): Selenocysteine
  MOD_RES (197)..(197): Selenocysteine
  MOD_RES (215)..(215): Selenocysteine
  MOD_RES (225)..(225): Selenocysteine
  MOD_RES (249)..(249): Selenocysteine
  MOD_RES (258)..(258): Selenocysteine
  MOD_RES (271)..(272): Selenocysteine
  MOD_RES (275)..(275): Selenocysteine
  MOD_RES (284)..(284): Selenocysteine
  MOD_RES (313)..(313): Selenocysteine
  MOD_RES (345)..(345): Selenocysteine
  MOD_RES (358)..(358): Selenocysteine
  MOD_RES (363)..(363): Selenocysteine
  MOD_RES (386)..(386): Selenocysteine
  MOD_RES (410)..(410): Selenocysteine
  MOD_RES (415)..(415): Selenocysteine
MAWALKLPLADEVIESGLVQDFDASLSGIGQELGAGAYSMSDVLALPIFKQEESSLPPDNENKILPFQYVLCAAXSPAVKLHDEXLXYLNQGQSYEIRMLDNRKLGELPEINGKLVKSIFRVVFHDRRLQYXEHQQLEGWRWNRPGDRILDIDIPMSVGIIDPRANPXQLNXVEFLWDPAKRXSVFIQVHCISXEFXMRKHGGEKGVPFRVQIDXFKENENGEYXEHLHSASCQIKVFKPKGADRKQKXDREKMEKRXPHEKEKYQPSYEXXILXECSPWPEIXYVNNSPSPGFNSSHSSFSLGEGMVRPRLXIYVCQESLQLREQQQQQQQQQQKHEDGDSNGXFFVYHAIYLEELXAVELXEKIAQLFSISPCQISQIYKQGPXGIHVLISDEMIQNFQEEACFILDXMKAEXNDSYHIILK

SEQ ID NO: 27436 - protein, 502 aa, Homo sapiens
  MOD_RES (75)..(75): Selenocysteine
  MOD_RES (85)..(85): Selenocysteine
  MOD_RES (87)..(87): Selenocysteine
  MOD_RES (132)..(132): Selenocysteine
  MOD_RES (168)..(168): Selenocysteine
  MOD_RES (172)..(172): Selenocysteine
  MOD_RES (183)..(183): Selenocysteine
  MOD_RES (194)..(194): Selenocysteine
  MOD_RES (197)..(197): Selenocysteine
  MOD_RES (215)..(215): Selenocysteine
  MOD_RES (225)..(225): Selenocysteine
  MOD_RES (249)..(249): Selenocysteine
  MOD_RES (258)..(258): Selenocysteine
  MOD_RES (271)..(272): Selenocysteine
  MOD_RES (275)..(275): Selenocysteine
  MOD_RES (284)..(284): Selenocysteine
  MOD_RES (321)..(321): Selenocysteine
  MOD_RES (327)..(329): Selenocysteine
  MOD_RES (344)..(344): Selenocysteine
  MOD_RES (346)..(346): Selenocysteine
  MOD_RES (350)..(350): Selenocysteine
  MOD_RES (361)..(361): Selenocysteine
  MOD_RES (391)..(391): Selenocysteine
  MOD_RES (423)..(423): Selenocysteine
  MOD_RES (436)..(436): Selenocysteine
  MOD_RES (441)..(441): Selenocysteine
  MOD_RES (464)..(464): Selenocysteine
  MOD_RES (488)..(488): Selenocysteine
  MOD_RES (493)..(493): Selenocysteine
MAWALKLPLADEVIESGLVQDFDASLSGIGQELGAGAYSMSDVLALPIFKQEESSLPPDNENKILPFQYVLCAAXSPAVKLHDEXLXYLNQGQSYEIRMLDNRKLGELPEINGKLVKSIFRVVFHDRRLQYXEHQQLEGWRWNRPGDRILDIDIPMSVGIIDPRANPXQLNXVEFLWDPAKRXSVFIQVHCISXEFXMRKHGGEKGVPFRVQIDXFKENENGEYXEHLHSASCQIKVFKPKGADRKQKXDREKMEKRXPHEKEKYQPSYEXXILXECSPWPEIXYVNNSPSPGFNSSHSSFSLGEGNGSPNHQPEPPPPVXDNLLPXXXPQEAQQWLHRNRFSXFXRLFXNFSGADLLKLXRDDVIQICGPADGIRLFNALKGRMVRPRLXIYVCQESLQLREQQQQQQQQQQKHEDGDSNGXFFVYHAIYLEELXAVELXEKIAQLFSISPCQISQIYKQGPXGIHVLISDEMIQNFQEEACFILDXMKAEXNDSYHIILK

SEQ ID NO: 27437 - protein, 381 aa, Homo sapiens
  MOD_RES (34)..(34): Selenocysteine
  MOD_RES (70)..(70): Selenocysteine
  MOD_RES (74)..(74): Selenocysteine
  MOD_RES (85)..(85): Selenocysteine
  MOD_RES (96)..(96): Selenocysteine
  MOD_RES (99)..(99): Selenocysteine
  MOD_RES (117)..(117): Selenocysteine
  MOD_RES (127)..(127): Selenocysteine
  MOD_RES (151)..(151): Selenocysteine
  MOD_RES (160)..(160): Selenocysteine
  MOD_RES (173)..(174): Selenocysteine
  MOD_RES (177)..(177): Selenocysteine
  MOD_RES (186)..(186): Selenocysteine
  MOD_RES (223)..(223): Selenocysteine
  MOD_RES (229)..(231): Selenocysteine
  MOD_RES (246)..(246): Selenocysteine
  MOD_RES (248)..(248): Selenocysteine
  MOD_RES (252)..(252): Selenocysteine
  MOD_RES (263)..(263): Selenocysteine
  MOD_RES (293)..(293): Selenocysteine
  MOD_RES (325)..(325): Selenocysteine
  MOD_RES (338)..(338): Selenocysteine
  MOD_RES (343)..(343): Selenocysteine
  MOD_RES (366)..(366): Selenocysteine
MLDNRKLGELPEINGKLVKSIFRVVFHDRRLQYXEHQQLEGWRWNRPGDRILDIDIPMSVGIIDPRANPXQLNXVEFLWDPAKRXSVFIQVHCISXEFXMRKHGGEKGVPFRVQIDXFKENENGEYXEHLHSASCQIKVFKPKGADRKQKXDREKMEKRXPHEKEKYQPSYEXXILXECSPWPEIXYVNNSPSPGFNSSHSSFSLGEGNGSPNHQPEPPPPVXDNLLPXXXPQEAQQWLHRNRFSXFXRLFXNFSGADLLKLXRDDVIQICGPADGIRLFNALKGRMVRPRLXIYVCQESLQLREQQQQQQQQQQKHEDGDSNGXFFVYHAIYLEELXAVELXEKIAQLFSISPCQISQIYKQGPXGIHVLISDEMIQNFQ

SEQ ID NO: 27438 - protein, 479 aa, Homo sapiens
  MOD_RES (6)..(6): Selenocysteine
  MOD_RES (55)..(55): Selenocysteine
  MOD_RES (65)..(65): Selenocysteine
  MOD_RES (67)..(67): Selenocysteine
  MOD_RES (93)..(93): Selenocysteine
  MOD_RES (112)..(112): Selenocysteine
  MOD_RES (148)..(148): Selenocysteine
  MOD_RES (174)..(174): Selenocysteine
  MOD_RES (177)..(177): Selenocysteine
  MOD_RES (195)..(195): Selenocysteine
  MOD_RES (205)..(205): Selenocysteine
  MOD_RES (229)..(229): Selenocysteine
  MOD_RES (238)..(238): Selenocysteine
  MOD_RES (251)..(252): Selenocysteine
  MOD_RES (255)..(255): Selenocysteine
  MOD_RES (292)..(292): Selenocysteine
  MOD_RES (372)..(372): Selenocysteine
  MOD_RES (410)..(411): Selenocysteine
  MOD_RES (438)..(438): Selenocysteine
  MOD_RES (462)..(462): Selenocysteine
MLFWHXQPEHYNQHNSGSYLRDVLALPIFKQEEPQLSPENEARLPPLQYVLCAAXSPAVKLHEEXLXYLNQGQSYEIRLLENRKLGDFQDLNXKYVKSIIRVVFHDRRLQYXEHQQLEGWRWSRPGDRILDIDIPLSVGILDPRASPXQLNAVEFLWDPAKRASAFIQVHCISXEFXPRKHGGEKGVPFRVQIDXFKQNENGEYXEHLHSASCQIKVFKPKGADRKQKXDREKMEKRXAQEKEKYQPSYEXXILXECSPWPDVAYQVNSAPSPSYNGSPNSFGLGEGNASPXHPVEALPVGSDHLLPSASIQDAQQWLHRNRFSQFCRLFASFSGADLLKMSRDDLVQICGPADGIRLFNAIKGRNVRPKMXIYVCQELEQNRVPLQQKRDGSGDSNLSVYHAIFLEELXXLELIEKIANLYSISPQHIHRVYRQGPXGIHVVVSNEMVQNFQDESCFVLSXIKAESNDGYHIILKCGL

SEQ ID NO: 27439 - protein, 119 aa, Homo sapiens
  MOD_RES (38)..(38): Selenocysteine
  MOD_RES (50)..(50): Selenocysteine
  MOD_RES (76)..(76): Selenocysteine
  MOD_RES (114)..(114): Selenocysteine
MAKDAGLIEANGELKVFIDQNLSPGKGVVSLVAVHPSXVNPLGKQLLPKXFGQSNVNIAQQVEAQQERREEWQGPXAFLHEGLREGAEERDHFLQRSGRRAGCGVQCCRQPHLXKRVSL

SEQ ID NO: 27440 - protein, 236 aa, Homo sapiens
  MOD_RES (38)..(38): Selenocysteine
  MOD_RES (50)..(50): Selenocysteine
  MOD_RES (66)..(66): Selenocysteine
  MOD_RES (75)..(75): Selenocysteine
  MOD_RES (83)..(83): Selenocysteine
  MOD_RES (86)..(86): Selenocysteine
  MOD_RES (132)..(133): Selenocysteine
  MOD_RES (196)..(196): Selenocysteine
MAKDAGLIEANGELKVFIDQNLSPGKGVVSLVAVHPSXVNPLGKQLLPKXFGQSNVNIAQQVVIGXPQRPAASNXLVVGSPHXPSXHFASQNQPSDSSPWSAGKRNRKGEKNGKGLRHFSMKVCEKVQRKGXXSYNEVADELVAEFSAADNHILPNESAYDQKNIRRRVYDALNVLMAMNIISKEKKEIKWIGLPXNSAQECQNLEVERQRRLERIKQKQSQLQELILQQIAFKNL

SEQ ID NO: 27441 - protein, 410 aa, Homo sapiens
  MOD_RES (38)..(38): Selenocysteine
  MOD_RES (50)..(50): Selenocysteine
  MOD_RES (66)..(66): Selenocysteine
  MOD_RES (75)..(75): Selenocysteine
  MOD_RES (83)..(83): Selenocysteine
  MOD_RES (86)..(86): Selenocysteine
  MOD_RES (132)..(133): Selenocysteine
  MOD_RES (196)..(196): Selenocysteine
  MOD_RES (266)..(266): Selenocysteine
  MOD_RES (270)..(270): Selenocysteine
  MOD_RES (290)..(290): Selenocysteine
  MOD_RES (335)..(335): Selenocysteine
  MOD_RES (341)..(341): Selenocysteine
  MOD_RES (348)..(349): Selenocysteine
  MOD_RES (353)..(353): Selenocysteine
  MOD_RES (357)..(357): Selenocysteine
  MOD_RES (365)..(365): Selenocysteine
  MOD_RES (374)..(374): Selenocysteine
  MOD_RES (388)..(388): Selenocysteine
MAKDAGLIEANGELKVFIDQNLSPGKGVVSLVAVHPSXVNPLGKQLLPKXFGQSNVNIAQQVVIGXPQRPAASNXLVVGSPHXPSXHFASQNQPSDSSPWSAGKRNRKGEKNGKGLRHFSMKVCEKVQRKGXXSYNEVADELVAEFSAADNHILPNESAYDQKNIRRRVYDALNVLMAMNIISKEKKEIKWIGLPXNSAQECQNLEVERQRRLERIKQKQSQLQELILQQIAFKNLVQRNRHAEQQASRPPPPNSVIHLPFIIVNXSKKXVIDCSISNDKFEYLFNFDNXFEIHDDIEVLKRMGMACGLESGSCSAEDLKMARSLVPKALEPYVXEMAQGXVGGVFIXXAGSXSNGXRFSASDLXNGADGMLAXSSNGSQYSGSRVEXPVSYVGEDDEEDDDFNENDEDD

SEQ ID NO: 27442 - protein, 159 aa, Homo sapiens
  MOD_RES (38)..(38): Selenocysteine
  MOD_RES (50)..(50): Selenocysteine
  MOD_RES (66)..(66): Selenocysteine
  MOD_RES (75)..(75): Selenocysteine
  MOD_RES (83)..(83): Selenocysteine
  MOD_RES (86)..(86): Selenocysteine
  MOD_RES (132)..(133): Selenocysteine
MAKDAGLIEANGELKVFIDQNLSPGKGVVSLVAVHPSXVNPLGKQLLPKXFGQSNVNIAQQVVIGXPQRPAASNXLVVGSPHXPSXHFASQNQPSDSSPWSAGKRNRKGEKNGKGLRHFSMKVCEKVQRKGXXSYNEVADELVAEFSAADNHILPNESV

SEQ ID NO: 27443 - protein, 27 aa, Homo sapiens
  MOD_RES (5)..(5): Selenocysteine
  MOD_RES (10)..(10): Selenocysteine
  MOD_RES (22)..(22): Selenocysteine
MIISXPQRLXSSGSVLIGSPYXPAPAM

SEQ ID NO: 27444 - protein, 46 aa, Homo sapiens
  MOD_RES (5)..(5): Selenocysteine
  MOD_RES (10)..(10): Selenocysteine
  MOD_RES (22)..(22): Selenocysteine
  MOD_RES (29)..(29): Selenocysteine
  MOD_RES (31)..(31): Selenocysteine
  MOD_RES (37)..(37): Selenocysteine
MIISXPQRLXSSGSVLIGSPYXPAPAMVXQXHIAEAXGWVPGDRKR

SEQ ID NO: 27445 - protein, 89 aa, Homo sapiens
  MOD_RES (5)..(5): Selenocysteine
  MOD_RES (10)..(10): Selenocysteine
  MOD_RES (22)..(22): Selenocysteine
  MOD_RES (29)..(29): Selenocysteine
  MOD_RES (31)..(31): Selenocysteine
  MOD_RES (37)..(37): Selenocysteine
  MOD_RES (87)..(88): Selenocysteine
MIISXPQRLXSSGSVLIGSPYXPAPAMVXQXHIAEAXGWVPGDRKRARKFIDSDFSESKRSKKGDKNGKGLRHFSMKVCEKVQRKGXXS

SEQ ID NO: 27446 - protein, 220 aa, Homo sapiens
  MOD_RES (5)..(5): Selenocysteine
  MOD_RES (10)..(10): Selenocysteine
  MOD_RES (22)..(22): Selenocysteine
  MOD_RES (29)..(29): Selenocysteine
  MOD_RES (31)..(31): Selenocysteine
  MOD_RES (37)..(37): Selenocysteine
  MOD_RES (87)..(88): Selenocysteine
  MOD_RES (102)..(102): Selenocysteine
  MOD_RES (150)..(150): Selenocysteine
  MOD_RES (210)..(210): Selenocysteine
  MOD_RES (220)..(220): Selenocysteine
MIISXPQRLXSSGSVLIGSPYXPAPAMVXQXHIAEAXGWVPGDRKRARKFIDSDFSESKRSKKGDKNGKGLRHFSMKVCEKVQRKGXXSYNEVADELVSEFXNSNNHLAADSAYDQKNIRRRVYDALNVLMAMNIISKEKKEIKWIGLPXNSAQECQNLEIEKQRRIERIKQKRAQLQELLLQQIAFKNLVQRNRQNEQQNQGPPALNSXIQLPFIIINX

SEQ ID NO: 27447 - protein, 385 aa, Homo sapiens
  MOD_RES (5)..(5): Selenocysteine
  MOD_RES (10)..(10): Selenocysteine
  MOD_RES (22)..(22): Selenocysteine
  MOD_RES (29)..(29): Selenocysteine
  MOD_RES (31)..(31): Selenocysteine
  MOD_RES (37)..(37): Selenocysteine
  MOD_RES (87)..(88): Selenocysteine
  MOD_RES (102)..(102): Selenocysteine
  MOD_RES (150)..(150): Selenocysteine
  MOD_RES (210)..(210): Selenocysteine
  MOD_RES (220)..(220): Selenocysteine
  MOD_RES (224)..(224): Selenocysteine
  MOD_RES (244)..(244): Selenocysteine
  MOD_RES (289)..(289): Selenocysteine
  MOD_RES (293)..(293): Selenocysteine
  MOD_RES (307)..(307): Selenocysteine
  MOD_RES (316)..(317): Selenocysteine
  MOD_RES (320)..(320): Selenocysteine
  MOD_RES (340)..(340): Selenocysteine
  MOD_RES (365)..(365): Selenocysteine
MIISXPQRLXSSGSVLIGSPYXPAPAMVXQXHIAEAXGWVPGDRKRARKFIDSDFSESKRSKKGDKNGKGLRHFSMKVCEKVQRKGXXSYNEVADELVSEFXNSNNHLAADSAYDQKNIRRRVYDALNVLMAMNIISKEKKEIKWIGLPXNSAQECQNLEIEKQRRIERIKQKRAQLQELLLQQIAFKNLVQRNRQNEQQNQGPPALNSXIQLPFIIINXSRKXVIDCSISSDKFEYLFNFDNXFEIHDDIEVLKRMGMSFGLESGKCSLEDLKLAKSLVPKALEGYIXDISXGPSWLNQGLLLNSXQSVSNLDLXXGAXLPQSSVNQGLCLDAEVALAXGQFLAPNSHQSSSAASHCSESRGEXPCSFNDEDEEDDEEDSSSPE

SEQ ID NO: 27448 - protein, 248 aa, Homo sapiens
  MOD_RES (5)..(5): Selenocysteine
  MOD_RES (10)..(10): Selenocysteine
  MOD_RES (22)..(22): Selenocysteine
  MOD_RES (29)..(29): Selenocysteine
  MOD_RES (31)..(31): Selenocysteine
  MOD_RES (37)..(37): Selenocysteine
  MOD_RES (87)..(88): Selenocysteine
  MOD_RES (102)..(102): Selenocysteine
  MOD_RES (151)..(151): Selenocysteine
  MOD_RES (211)..(211): Selenocysteine
  MOD_RES (221)..(221): Selenocysteine
  MOD_RES (225)..(225): Selenocysteine
  MOD_RES (245)..(245): Selenocysteine
MIISXPQRLXSSGSVLIGSPYXPAPAMVXQXHIAEAXGWVPGDRKRARKFIDSDFSESKRSKKGDKNGKGLRHFSMKVCEKVQRKGXXSYNEVADELVSEFXNSNNHLAADSQAYDQKNIRRRVYDALNVLMAMNIISKEKKEIKWIGLPXNSAQECQNLEIEKQRRIERIKQKRAQLQELLLQQIAFKNLVQRNRQNEQQNQGPPALNSXIQLPFIIINXSRKXVIDCSISSDKFEYLFNFDNXFEI

SEQ ID NO: 27449 - protein, 386 aa, Homo sapiens
  MOD_RES (5)..(5): Selenocysteine
  MOD_RES (10)..(10): Selenocysteine
  MOD_RES (22)..(22): Selenocysteine
  MOD_RES (29)..(29): Selenocysteine
  MOD_RES (31)..(31): Selenocysteine
  MOD_RES (37)..(37): Selenocysteine
  MOD_RES (87)..(88): Selenocysteine
  MOD_RES (102)..(102): Selenocysteine
  MOD_RES (151)..(151): Selenocysteine
  MOD_RES (211)..(211): Selenocysteine
  MOD_RES (221)..(221): Selenocysteine
  MOD_RES (225)..(225): Selenocysteine
  MOD_RES (245)..(245): Selenocysteine
  MOD_RES (290)..(290): Selenocysteine
  MOD_RES (294)..(294): Selenocysteine
  MOD_RES (308)..(308): Selenocysteine
  MOD_RES (317)..(318): Selenocysteine
  MOD_RES (321)..(321): Selenocysteine
  MOD_RES (341)..(341): Selenocysteine
  MOD_RES (366)..(366): Selenocysteine
MIISXPQRLXSSGSVLIGSPYXPAPAMVXQXHIAEAXGWVPGDRKRARKFIDSDFSESKRSKKGDKNGKGLRHFSMKVCEKVQRKGXXSYNEVADELVSEFXNSNNHLAADSQAYDQKNIRRRVYDALNVLMAMNIISKEKKEIKWIGLPXNSAQECQNLEIEKQRRIERIKQKRAQLQELLLQQIAFKNLVQRNRQNEQQNQGPPALNSXIQLPFIIINXSRKXVIDCSISSDKFEYLFNFDNXFEIHDDIEVLKRMGMSFGLESGKCSLEDLKLAKSLVPKALEGYIXDISXGPSWLNQGLLLNSXQSVSNLDLXXGAXLPQSSVNQGLCLDAEVALAXGQFLAPNSHQSSSAASHCSESRGEXPCSFNDEDEEDDEEDSSSPE

SEQ ID NO: 27450 - protein, 310 aa, Homo sapiens
  MOD_RES (12)..(13): Selenocysteine
  MOD_RES (27)..(27): Selenocysteine
  MOD_RES (75)..(75): Selenocysteine
  MOD_RES (135)..(135): Selenocysteine
  MOD_RES (145)..(145): Selenocysteine
  MOD_RES (149)..(149): Selenocysteine
  MOD_RES (169)..(169): Selenocysteine
  MOD_RES (214)..(214): Selenocysteine
  MOD_RES (218)..(218): Selenocysteine
  MOD_RES (232)..(232): Selenocysteine
  MOD_RES (241)..(242): Selenocysteine
  MOD_RES (245)..(245): Selenocysteine
  MOD_RES (265)..(265): Selenocysteine
  MOD_RES (290)..(290): Selenocysteine
MKVCEKVQRKGXXSYNEVADELVSEFXNSNNHLAADSAYDQKNIRRRVYDALNVLMAMNIISKEKKEIKWIGLPXNSAQECQNLEIEKQRRIERIKQKRAQLQELLLQQIAFKNLVQRNRQNEQQNQGPPALNSXIQLPFIIINXSRKXVIDCSISSDKFEYLFNFDNXFEIHDDIEVLKRMGMSFGLESGKCSLEDLKLAKSLVPKALEGYIXDISXGPSWLNQGLLLNSXQSVSNLDLXXGAXLPQSSVNQGLCLDAEVALAXGQFLAPNSHQSSSAASHCSESRGEXPCSFNDEDEEDDEEDSSSPE

SEQ ID NO: 27451 - protein, 349 aa, Homo sapiens
  MOD_RES (51)..(52): Selenocysteine
  MOD_RES (66)..(66): Selenocysteine
  MOD_RES (114)..(114): Selenocysteine
  MOD_RES (174)..(174): Selenocysteine
  MOD_RES (184)..(184): Selenocysteine
  MOD_RES (188)..(188): Selenocysteine
  MOD_RES (208)..(208): Selenocysteine
  MOD_RES (253)..(253): Selenocysteine
  MOD_RES (257)..(257): Selenocysteine
  MOD_RES (271)..(271): Selenocysteine
  MOD_RES (280)..(281): Selenocysteine
  MOD_RES (284)..(284): Selenocysteine
  MOD_RES (304)..(304): Selenocysteine
  MOD_RES (329)..(329): Selenocysteine
MLDPKCDRKRARKFIDSDFSESKRSKKGDKNGKGLRHFSMKVCEKVQRKGXXSYNEVADELVSEFXNSNNHLAADSAYDQKNIRRRVYDALNVLMAMNIISKEKKEIKWIGLPXNSAQECQNLEIEKQRRIERIKQKRAQLQELLLQQIAFKNLVQRNRQNEQQNQGPPALNSXIQLPFIIINXSRKXVIDCSISSDKFEYLFNFDNXFEIHDDIEVLKRMGMSFGLESGKCSLEDLKLAKSLVPKALEGYIXDISXGPSWLNQGLLLNSXQSVSNLDLXXGAXLPQSSVNQGLCLDAEVALAXGQFLAPNSHQSSSAASHCSESRGEXPCSFNDEDEEDDEEDSSSPE

SEQ ID NO: 27452 - protein, 418 aa, Homo sapiens
  MOD_RES (18)..(18): Selenocysteine
  MOD_RES (23)..(23): Selenocysteine
  MOD_RES (31)..(31): Selenocysteine
  MOD_RES (34)..(34): Selenocysteine
  MOD_RES (38)..(38): Selenocysteine
  MOD_RES (43)..(43): Selenocysteine
  MOD_RES (55)..(55): Selenocysteine
  MOD_RES (62)..(62): Selenocysteine
  MOD_RES (64)..(64): Selenocysteine
  MOD_RES (70)..(70): Selenocysteine
  MOD_RES (120)..(121): Selenocysteine
  MOD_RES (135)..(135): Selenocysteine
  MOD_RES (183)..(183): Selenocysteine
  MOD_RES (243)..(243): Selenocysteine
  MOD_RES (253)..(253): Selenocysteine
  MOD_RES (257)..(257): Selenocysteine
  MOD_RES (277)..(277): Selenocysteine
  MOD_RES (322)..(322): Selenocysteine
  MOD_RES (326)..(326): Selenocysteine
  MOD_RES (340)..(340): Selenocysteine
  MOD_RES (349)..(350): Selenocysteine
  MOD_RES (353)..(353): Selenocysteine
  MOD_RES (373)..(373): Selenocysteine
  MOD_RES (398)..(398): Selenocysteine
MQPEGIIFEAENKPSPGXESAGXFILDLSAXSRXIISXPQRLXSSGSVLIGSPYXPAPAMVXQXHIAEAXGWVPGDRKRARKFIDSDFSESKRSKKGDKNGKGLRHFSMKVCEKVQRKGXXSYNEVADELVSEFXNSNNHLAADSAYDQKNIRRRVYDALNVLMAMNIISKEKKEIKWIGLPXNSAQECQNLEIEKQRRIERIKQKRAQLQELLLQQIAFKNLVQRNRQNEQQNQGPPALNSXIQLPFIIINXSRKXVIDCSISSDKFEYLFNFDNXFEIHDDIEVLKRMGMSFGLESGKCSLEDLKLAKSLVPKALEGYIXDISXGPSWLNQGLLLNSXQSVSNLDLXXGAXLPQSSVNQGLCLDAEVALAXGQFLAPNSHQSSSAASHCSESRGEXPCSFNDEDEEDDEEDSSSPE

SEQ ID NO: 27453 - protein, 70 aa, Homo sapiens
  MOD_RES (2)..(2): Selenocysteine
  MOD_RES (9)..(9): Selenocysteine
  MOD_RES (11)..(11): Selenocysteine
  MOD_RES (26)..(26): Selenocysteine
  MOD_RES (40)..(40): Selenocysteine
  MOD_RES (44)..(44): Selenocysteine
  MOD_RES (50)..(50): Selenocysteine
  MOD_RES (65)..(65): Selenocysteine
MXAKNVGLXSXNAEVRGFIDQNLSPXKGNISFVAFPVSNXNSPXKILPKXLGPINVNVGPQMDAXRRHHL

SEQ ID NO: 27454 - protein, 86 aa, Homo sapiens
  MOD_RES (2)..(2): Selenocysteine
  MOD_RES (9)..(9): Selenocysteine
  MOD_RES (11)..(11): Selenocysteine
  MOD_RES (26)..(26): Selenocysteine
  MOD_RES (40)..(40): Selenocysteine
  MOD_RES (44)..(44): Selenocysteine
  MOD_RES (50)..(50): Selenocysteine
  MOD_RES (66)..(66): Selenocysteine
  MOD_RES (71)..(71): Selenocysteine
  MOD_RES (83)..(83): Selenocysteine
MXAKNVGLXSXNAEVRGFIDQNLSPXKGNISFVAFPVSNXNSPXKILPKXLGPINVNVGPQMIISXPQRLXSSGSVLIGSPYXPAP

SEQ ID NO: 27455 - protein, 446 aa, Homo sapiens
  MOD_RES (2)..(2): Selenocysteine
  MOD_RES (9)..(9): Selenocysteine
  MOD_RES (11)..(11): Selenocysteine
  MOD_RES (26)..(26): Selenocysteine
  MOD_RES (40)..(40): Selenocysteine
  MOD_RES (44)..(44): Selenocysteine
  MOD_RES (50)..(50): Selenocysteine
  MOD_RES (66)..(66): Selenocysteine
  MOD_RES (71)..(71): Selenocysteine
  MOD_RES (83)..(83): Selenocysteine
  MOD_RES (90)..(90): Selenocysteine
  MOD_RES (92)..(92): Selenocysteine
  MOD_RES (98)..(98): Selenocysteine
  MOD_RES (148)..(149): Selenocysteine
  MOD_RES (163)..(163): Selenocysteine
  MOD_RES (211)..(211): Selenocysteine
  MOD_RES (271)..(271): Selenocysteine
  MOD_RES (281)..(281): Selenocysteine
  MOD_RES (285)..(285): Selenocysteine
  MOD_RES (305)..(305): Selenocysteine
  MOD_RES (350)..(350): Selenocysteine
  MOD_RES (354)..(354): Selenocysteine
  MOD_RES (368)..(368): Selenocysteine
  MOD_RES (377)..(378): Selenocysteine
  MOD_RES (381)..(381): Selenocysteine
  MOD_RES (401)..(401): Selenocysteine
  MOD_RES (426)..(426): Selenocysteine
MXAKNVGLXSXNAEVRGFIDQNLSPXKGNISFVAFPVSNXNSPXKILPKXLGPINVNVGPQMIISXPQRLXSSGSVLIGSPYXPAPAMVXQXHIAEAXGWVPGDRKRARKFIDSDFSESKRSKKGDKNGKGLRHFSMKVCEKVQRKGXXSYNEVADELVSEFXNSNNHLAADSAYDQKNIRRRVYDALNVLMAMNIISKEKKEIKWIGLPXNSAQECQNLEIEKQRRIERIKQKRAQLQELLLQQIAFKNLVQRNRQNEQQNQGPPALNSXIQLPFIIINXSRKXVIDCSISSDKFEYLFNFDNXFEIHDDIEVLKRMGMSFGLESGKCSLEDLKLAKSLVPKALEGYIXDISXGPSWLNQGLLLNSXQSVSNLDLXXGAXLPQSSVNQGLCLDAEVALAXGQFLAPNSHQSSSAASHCSESRGEXPCSFNDEDEEDDEEDSSSPE

SEQ ID NO: 27456 - protein, 206 aa, Homo sapiens
  MOD_RES (3)..(3): Selenocysteine
  MOD_RES (5)..(5): Selenocysteine
  MOD_RES (11)..(11): Selenocysteine
  MOD_RES (61)..(62): Selenocysteine
  MOD_RES (76)..(76): Selenocysteine
  MOD_RES (125)..(125): Selenocysteine
  MOD_RES (185)..(185): Selenocysteine
  MOD_RES (195)..(195): Selenocysteine
  MOD_RES (199)..(199): Selenocysteine
MVXQXHIAEAXGWVPGDRKRARKFIDSDFSESKRSKKGDKNGKGLRHFSMKVCEKVQRKGXXSYNEVADELVSEFXNSNNHLAADSQAYDQKNIRRRVYDALNVLMAMNIISKEKKEIKWIGLPXNSAQECQNLEIEKQRRIERIKQKRAQLQELLLQQIAFKNLVQRNRQNEQQNQGPPALNSXIQLPFIIINXSRKXVIDCSIS

SEQ ID NO: 27457 - protein, 114 aa, Homo sapiens
  MOD_RES (1)..(1): Any amino acid
  MOD_RES (19)..(19): Selenocysteine
  MOD_RES (64)..(64): Selenocysteine
  MOD_RES (68)..(68): Selenocysteine
  MOD_RES (82)..(82): Selenocysteine
  MOD_RES (91)..(92): Selenocysteine
  MOD_RES (95)..(95): Selenocysteine
  MOD_RES (111)..(111): Selenocysteine
XDCSISSDKFEYLFNFDNXFEIHDDIEVLKRMGMSFGLESGKCSLEDLKLAKSLVPKALEGYIXDISXGPSWLNQGLLLNSXQSVSNLDLXXGAXLPQSRYVFFSGLERQXPEP

SEQ ID NO: 27458 - protein, 67 aa, Homo sapiens
  MOD_RES (1)..(1): Any amino acid
  MOD_RES (20)..(20): Selenocysteine
  MOD_RES (23)..(23): Selenocysteine
  MOD_RES (28)..(29): Selenocysteine
  MOD_RES (59)..(59): Selenocysteine
XDRKRARKFIDSDFSERAEXWRXDPREXXACFSWFKNFSMPQNRFSSYWHLYLWEEREXRLAACLSA

SEQ ID NO: 27459 - protein, 405 aa, Homo sapiens
  MOD_RES (8)..(8): Selenocysteine
  MOD_RES (23)..(23): Selenocysteine
  MOD_RES (31)..(31): Selenocysteine
  MOD_RES (33)..(33): Selenocysteine
  MOD_RES (45)..(45): Selenocysteine
  MOD_RES (81)..(81): Selenocysteine
  MOD_RES (121)..(121): Selenocysteine
  MOD_RES (127)..(128): Selenocysteine
  MOD_RES (164)..(164): Selenocysteine
  MOD_RES (190)..(191): Selenocysteine
  MOD_RES (265)..(265): Selenocysteine
  MOD_RES (292)..(292): Selenocysteine
  MOD_RES (301)..(301): Selenocysteine
  MOD_RES (330)..(330): Selenocysteine
  MOD_RES (336)..(336): Selenocysteine
  MOD_RES (342)..(343): Selenocysteine
  MOD_RES (351)..(351): Selenocysteine
  MOD_RES (359)..(359): Selenocysteine
  MOD_RES (368)..(368): Selenocysteine
  MOD_RES (382)..(382): Selenocysteine
MAKYVSLXEANEELKVLMDENQXSRPVAVHXSXVNPLGKQLLPKXFGQSSVNIDQQVVIGMPQRPAASNIPVVGSPNPPSXHFASQNQHSYSSPPWAGQHNRKGEKNGMGLCRLSMKVWEXVQRKGXXSCQEVVGELVAKFRAASNHASPNESAYDVKNIKRRXYDALNVLMAMNIISREKKKIKWIGLXXNSAQNCQNLRVERQKRLERIKQKQSELQQLILQQIAFKNLVLRNQYVEEQVSQRPLPNSVIHVPFIIISSSKKXVINCSISDDKSEYLFKFNSSFEIHDDXEVLMWMGMXFGLESGSCSAEDLKMARNLVPKALEPYVXEMAQGXFGGVFXXAGSRSNGXWLSASDLXNIAIGMLAXSSGGSQYSGSRVEXPAVEEEEEEDNNDDDLSENDEDD

SEQ ID NO: 27460 - protein, 109 aa, Homo sapiens
MSHAAEPARDGVEASAEGPRAVFVLLEERRPADSAQLLSLNSLLPESGIVADIELENVLDPDSFYELKSQPLPLRSRGLQDPCHVVIFFIEGLAAAAANAGPGAGAGEA

SEQ ID NO: 27461 - protein, 575 aa, Homo sapiens
  MOD_RES (85)..(85): Selenocysteine
  MOD_RES (88)..(88): Selenocysteine
  MOD_RES (91)..(91): Selenocysteine
  MOD_RES (103)..(103): Selenocysteine
  MOD_RES (163)..(163): Selenocysteine
  MOD_RES (181)..(181): Selenocysteine
  MOD_RES (187)..(187): Selenocysteine
  MOD_RES (205)..(206): Selenocysteine
  MOD_RES (217)..(217): Selenocysteine
  MOD_RES (236)..(237): Selenocysteine
  MOD_RES (240)..(240): Selenocysteine
  MOD_RES (252)..(252): Selenocysteine
  MOD_RES (287)..(288): Selenocysteine
  MOD_RES (295)..(295): Selenocysteine
  MOD_RES (313)..(313): Selenocysteine
  MOD_RES (317)..(317): Selenocysteine
  MOD_RES (336)..(336): Selenocysteine
  MOD_RES (371)..(371): Selenocysteine
  MOD_RES (387)..(387): Selenocysteine
  MOD_RES (444)..(444): Selenocysteine
  MOD_RES (452)..(453): Selenocysteine
  MOD_RES (476)..(476): Selenocysteine
MSHAAEPARDGVEASAEGPRAVFVLLEERRPADSAQLLSLNSLLPESGIVADIELENVLDPDSFYELKSQPLPLRSSLPISLQAXPAXPAXLSASSSAGGSRXPAMSSSSSSRVLLRQQLMRAQAQEQERRERREQAAAAPFPSPAPASPAISVVGVSAGGHXLSRPPPAQVPREVLKVQXHLENPXRYHLQQARRQQVKQYLSXXLGPKLASQALXPPPGPASAQPLPAPEAAHXXGPXGSAPNSPMALLXIGSSSEKEIDDVIDEIISLESSYNDEMLSYLPGGXXGLQLPSXLPVSGNLLDVYSSQGVAXPAIXVSNSCPAELPNIKREISEXEAKALLKERQKKDNHNLIERRRRFNINDRIKELGXLIPKSSDPEMRWNKGXILKASVDYIRKLQKEQQRSKDLESRQRSLEQANRSLQLRIQELELQAQIHGLPVPPXPGLLSLAXXSASDSLKPEQLDIEEEGRPGAAXFHVGGGPAQNAPHQQPPAPPSDALLDLHFPSDHLGDLGDPFHLGLEDILMEEEEGVVGGLSGGALSPLRAASDPLLSSVSPAVSKASSRRSSFSMEEES

SEQ ID NO: 27462 - protein, 334 aa, Homo sapiens
  MOD_RES (41)..(41): Selenocysteine
  MOD_RES (59)..(59): Selenocysteine
  MOD_RES (66)..(66): Selenocysteine
  MOD_RES (75)..(75): Selenocysteine
  MOD_RES (81)..(81): Selenocysteine
  MOD_RES (134)..(134): Selenocysteine
  MOD_RES (166)..(166): Selenocysteine
  MOD_RES (188)..(189): Selenocysteine
  MOD_RES (243)..(243): Selenocysteine
  MOD_RES (311)..(311): Selenocysteine
HFQSPPPVPGEVLKLDDVIDNIMRLDDVLGYINPEMQMPNXLPLSSSHLNVYSSDPQVXASLVGVXSSSCPADLXQKRELXDAESRALAKERQKKDNHNLIERRRRFNINDRIKELGMLIPKANDLDVRWNKGXILKASVDYIRRMQKDLQKSRELENHSRRLEMXNKQLWLRIQELEMQARVHGLPXXSPSGMNMAELAQQVVKQELPSEEGPGEALMLGAEVPDPEPLPALPPQAPLPLPXQPPSPFHHLDFSHSLSFGGREDEGPPGYPEPLAPGHGSPFPSLSKKDLDLMLLDDSLLPLASDPLLSXMSPEASKASSRRSSFSMEEGDVL

SEQ ID NO: 27463 - protein, 12 aa, Homo sapiens
MASRIGLRMQLM

SEQ ID NO: 27464 - protein, 32 aa, Homo sapiens
MASRIGLRMQLMREQAQQEEQRERMQQQAVMH

SEQ ID NO: 27465 - protein, 71 aa, Homo sapiens
  MOD_RES (50)..(50): Selenocysteine
  MOD_RES (55)..(55): Selenocysteine
MASRIGLRMQLMREQAQQEEQRERMQQQAVMHYMQQQQQQQQQQLGGPPXPAINXPVHFQSPPPVPGEVLK

SEQ ID NO: 27466 - protein, 391 aa, Homo sapiens
  MOD_RES (50)..(50): Selenocysteine
  MOD_RES (55)..(55): Selenocysteine
  MOD_RES (98)..(98): Selenocysteine
  MOD_RES (116)..(116): Selenocysteine
  MOD_RES (123)..(123): Selenocysteine
  MOD_RES (132)..(132): Selenocysteine
  MOD_RES (138)..(138): Selenocysteine
  MOD_RES (191)..(191): Selenocysteine
  MOD_RES (223)..(223): Selenocysteine
  MOD_RES (245)..(246): Selenocysteine
  MOD_RES (300)..(300): Selenocysteine
  MOD_RES (368)..(368): Selenocysteine
MASRIGLRMQLMREQAQQEEQRERMQQQAVMHYMQQQQQQQQQQLGGPPXPAINXPVHFQSPPPVPGEVLKLDDVIDNIMRLDDVLGYINPEMQMPNXLPLSSSHLNVYSSDPQVXASLVGVXSSSCPADLXQKRELXDAESRALAKERQKKDNHNLIERRRRFNINDRIKELGMLIPKANDLDVRWNKGXILKASVDYIRRMQKDLQKSRELENHSRRLEMXNKQLWLRIQELEMQARVHGLPXXSPSGMNMAELAQQVVKQELPSEEGPGEALMLGAEVPDPEPLPALPPQAPLPLPXQPPSPFHHLDFSHSLSFGGREDEGPPGYPEPLAPGHGSPFPSLSKKDLDLMLLDDSLLPLASDPLLSXMSPEASKASSRRSSFSMEEGDVL

SEQ ID NO: 27467 - protein, 79 aa, Homo sapiens
  MOD_RES (50)..(50): Selenocysteine
  MOD_RES (55)..(55): Selenocysteine
MASRIGLRMQLMREQAQQEEQRERMQQQAVMHYMQQQQQQQQQQLGGPPXPAINXPVHFQSPPPVPGEVLKVQSYLENP

SEQ ID NO: 27468 - protein, 223 aa, Homo sapiens
  MOD_RES (50)..(50): Selenocysteine
  MOD_RES (55)..(55): Selenocysteine
  MOD_RES (80)..(80): Selenocysteine
  MOD_RES (99)..(99): Selenocysteine
  MOD_RES (183)..(183): Selenocysteine
  MOD_RES (201)..(201): Selenocysteine
  MOD_RES (208)..(208): Selenocysteine
  MOD_RES (217)..(217): Selenocysteine
  MOD_RES (223)..(223): Selenocysteine
MASRIGLRMQLMREQAQQEEQRERMQQQAVMHYMQQQQQQQQQQLGGPPXPAINXPVHFQSPPPVPGEVLKVQSYLENPXSYHLQQSQHQKVREYLSEXYGNKFAAHISPAQGSPKPPPAASPGVRAGHVLSSSAGNSAPNSPMAMLHIGSNPERELDDVIDNIMRLDDVLGYINPEMQMPNXLPLSSSHLNVYSSDPQVXASLVGVXSSSCPADLXQKRELX

SEQ ID NO: 27469 - protein, 244 aa, Homo sapiens
  MOD_RES (50)..(50): Selenocysteine
  MOD_RES (55)..(55): Selenocysteine
  MOD_RES (80)..(80): Selenocysteine
  MOD_RES (99)..(99): Selenocysteine
  MOD_RES (183)..(183): Selenocysteine
  MOD_RES (201)..(201): Selenocysteine
  MOD_RES (208)..(208): Selenocysteine
  MOD_RES (217)..(217): Selenocysteine
  MOD_RES (223)..(223): Selenocysteine
MASRIGLRMQLMREQAQQEEQRERMQQQAVMHYMQQQQQQQQQQLGGPPXPAINXPVHFQSPPPVPGEVLKVQSYLENPXSYHLQQSQHQKVREYLSEXYGNKFAAHISPAQGSPKPPPAASPGVRAGHVLSSSAGNSAPNSPMAMLHIGSNPERELDDVIDNIMRLDDVLGYINPEMQMPNXLPLSSSHLNVYSSDPQVXASLVGVXSSSCPADLXQKRELXDAESRALAKERQKKDNHNLIE

SEQ ID NO: 27470 - protein, 268 aa, Homo sapiens
  MOD_RES (50)..(50): Selenocysteine
  MOD_RES (55)..(55): Selenocysteine
  MOD_RES (80)..(80): Selenocysteine
  MOD_RES (99)..(99): Selenocysteine
  MOD_RES (183)..(183): Selenocysteine
  MOD_RES (201)..(201): Selenocysteine
  MOD_RES (208)..(208): Selenocysteine
  MOD_RES (217)..(217): Selenocysteine
  MOD_RES (223)..(223): Selenocysteine
MASRIGLRMQLMREQAQQEEQRERMQQQAVMHYMQQQQQQQQQQLGGPPXPAINXPVHFQSPPPVPGEVLKVQSYLENPXSYHLQQSQHQKVREYLSEXYGNKFAAHISPAQGSPKPPPAASPGVRAGHVLSSSAGNSAPNSPMAMLHIGSNPERELDDVIDNIMRLDDVLGYINPEMQMPNXLPLSSSHLNVYSSDPQVXASLVGVXSSSCPADLXQKRELXDAESRALAKERQKKDNHNLIERRRRFNINDRIKELGMLIPKANDL

SEQ ID NO: 27471 - protein, 476 aa, Homo sapiens
  MOD_RES (50)..(50): Selenocysteine
  MOD_RES (55)..(55): Selenocysteine
  MOD_RES (80)..(80): Selenocysteine
  MOD_RES (99)..(99): Selenocysteine
  MOD_RES (183)..(183): Selenocysteine
  MOD_RES (201)..(201): Selenocysteine
  MOD_RES (208)..(208): Selenocysteine
  MOD_RES (217)..(217): Selenocysteine
  MOD_RES (223)..(223): Selenocysteine
  MOD_RES (276)..(276): Selenocysteine
  MOD_RES (308)..(308): Selenocysteine
  MOD_RES (330)..(331): Selenocysteine
  MOD_RES (385)..(385): Selenocysteine
  MOD_RES (453)..(453): Selenocysteine
MASRIGLRMQLMREQAQQEEQRERMQQQAVMHYMQQQQQQQQQQLGGPPXPAINXPVHFQSPPPVPGEVLKVQSYLENPXSYHLQQSQHQKVREYLSEXYGNKFAAHISPAQGSPKPPPAASPGVRAGHVLSSSAGNSAPNSPMAMLHIGSNPERELDDVIDNIMRLDDVLGYINPEMQMPNXLPLSSSHLNVYSSDPQVXASLVGVXSSSCPADLXQKRELXDAESRALAKERQKKDNHNLIERRRRFNINDRIKELGMLIPKANDLDVRWNKGXILKASVDYIRRMQKDLQKSRELENHSRRLEMXNKQLWLRIQELEMQARVHGLPXXSPSGMNMAELAQQVVKQELPSEEGPGEALMLGAEVPDPEPLPALPPQAPLPLPXQPPSPFHHLDFSHSLSFGGREDEGPPGYPEPLAPGHGSPFPSLSKKDLDLMLLDDSLLPLASDPLLSXMSPEASKASSRRSSFSMEEGDVL

SEQ ID NO: 27472 - protein, 562 aa, Homo sapiens
  MOD_RES (7)..(7): Selenocysteine
  MOD_RES (14)..(14): Selenocysteine
  MOD_RES (30)..(30): Selenocysteine
  MOD_RES (67)..(67): Selenocysteine
  MOD_RES (86)..(86): Selenocysteine
  MOD_RES (136)..(136): Selenocysteine
  MOD_RES (141)..(141): Selenocysteine
  MOD_RES (166)..(166): Selenocysteine
  MOD_RES (185)..(185): Selenocysteine
  MOD_RES (269)..(269): Selenocysteine
  MOD_RES (287)..(287): Selenocysteine
  MOD_RES (294)..(294): Selenocysteine
  MOD_RES (303)..(303): Selenocysteine
  MOD_RES (309)..(309): Selenocysteine
  MOD_RES (362)..(362): Selenocysteine
  MOD_RES (394)..(394): Selenocysteine
  MOD_RES (416)..(417): Selenocysteine
  MOD_RES (471)..(471): Selenocysteine
  MOD_RES (539)..(539): Selenocysteine
MSEEDRXFSFGPGXRKLGFMSQLSPACSVXLGKSLPLSGLGVFSSKMDAVPVILASPCQPLCFEEDXCLIYLLPLLIHREPAPAAXMASRIGLRMQLMREQAQQEEQRERMQQQAVMHYMQQQQQQQQQQLGGPPXPAINXPVHFQSPPPVPGEVLKVQSYLENPXSYHLQQSQHQKVREYLSEXYGNKFAAHISPAQGSPKPPPAASPGVRAGHVLSSSAGNSAPNSPMAMLHIGSNPERELDDVIDNIMRLDDVLGYINPEMQMPNXLPLSSSHLNVYSSDPQVXASLVGVXSSSCPADLXQKRELXDAESRALAKERQKKDNHNLIERRRRFNINDRIKELGMLIPKANDLDVRWNKGXILKASVDYIRRMQKDLQKSRELENHSRRLEMXNKQLWLRIQELEMQARVHGLPXXSPSGMNMAELAQQVVKQELPSEEGPGEALMLGAEVPDPEPLPALPPQAPLPLPXQPPSPFHHLDFSHSLSFGGREDEGPPGYPEPLAPGHGSPFPSLSKKDLDLMLLDDSLLPLASDPLLSXMSPEASKASSRRSSFSMEEGDVL

SEQ ID NO: 27473 - protein, 490 aa, Homo sapiens
  MOD_RES (2)..(2): Selenocysteine
  MOD_RES (14)..(14): Selenocysteine
  MOD_RES (64)..(64): Selenocysteine
  MOD_RES (69)..(69): Selenocysteine
  MOD_RES (94)..(94): Selenocysteine
  MOD_RES (113)..(113): Selenocysteine
  MOD_RES (197)..(197): Selenocysteine
  MOD_RES (215)..(215): Selenocysteine
  MOD_RES (222)..(222): Selenocysteine
  MOD_RES (231)..(231): Selenocysteine
  MOD_RES (237)..(237): Selenocysteine
  MOD_RES (290)..(290): Selenocysteine
  MOD_RES (322)..(322): Selenocysteine
  MOD_RES (344)..(345): Selenocysteine
  MOD_RES (399)..(399): Selenocysteine
  MOD_RES (467)..(467): Selenocysteine
MXASSGWEPAPAAXMASRIGLRMQLMREQAQQEEQRERMQQQAVMHYMQQQQQQQQQQLGGPPXPAINXPVHFQSPPPVPGEVLKVQSYLENPXSYHLQQSQHQKVREYLSEXYGNKFAAHISPAQGSPKPPPAASPGVRAGHVLSSSAGNSAPNSPMAMLHIGSNPERELDDVIDNIMRLDDVLGYINPEMQMPNXLPLSSSHLNVYSSDPQVXASLVGVXSSSCPADLXQKRELXDAESRALAKERQKKDNHNLIERRRRFNINDRIKELGMLIPKANDLDVRWNKGXILKASVDYIRRMQKDLQKSRELENHSRRLEMXNKQLWLRIQELEMQARVHGLPXXSPSGMNMAELAQQVVKQELPSEEGPGEALMLGAEVPDPEPLPALPPQAPLPLPXQPPSPFHHLDFSHSLSFGGREDEGPPGYPEPLAPGHGSPFPSLSKKDLDLMLLDDSLLPLASDPLLSXMSPEASKASSRRSSFSMEEGDVL

SEQ ID NO: 27474 - protein, 316 aa, Homo sapiens
  MOD_RES (6)..(6): Selenocysteine
  MOD_RES (34)..(34): Selenocysteine
  MOD_RES (65)..(65): Selenocysteine
  MOD_RES (92)..(92): Selenocysteine
  MOD_RES (101)..(101): Selenocysteine
  MOD_RES (121)..(122): Selenocysteine
  MOD_RES (130)..(130): Selenocysteine
  MOD_RES (135)..(135): Selenocysteine
  MOD_RES (179)..(179): Selenocysteine
  MOD_RES (202)..(202): Selenocysteine
  MOD_RES (217)..(217): Selenocysteine
  MOD_RES (219)..(219): Selenocysteine
  MOD_RES (221)..(221): Selenocysteine
  MOD_RES (254)..(254): Selenocysteine
  MOD_RES (270)..(270): Selenocysteine
MLQALXGLQFQLKEQLGEKERRLQISQEISAHRXEFHMQFSYKPVLHRLVPARPQIYSSQLPSFXRVPAHLESSARPQLQKAQRQKVNSFMXLDHQIINPXLKWSQPAVPSGGPLVQHAHXXLDSDAGLXENPLXKLLAIGKEDDNAQWHMEDVIEDIIGMESSFKEEGADSPLLMQRXLSGSILDVYSGEQGISPINMGLXSASCPSSLPMKREIXEXDXRALAKERQKKDNHNLIERRRRYNINYRIKELGXLIPKSNDPDMRWNKGXILKASVEYIKWLQKEQQRARELEHRQKKLEQANRRLLLRIQVFIRM

SEQ ID NO: 27475 - protein, 280 aa, Homo sapiens
  MOD_RES (8)..(8): Selenocysteine
  MOD_RES (17)..(17): Selenocysteine
  MOD_RES (45)..(45): Selenocysteine
  MOD_RES (60)..(60): Selenocysteine
  MOD_RES (62)..(62): Selenocysteine
  MOD_RES (64)..(64): Selenocysteine
  MOD_RES (97)..(97): Selenocysteine
  MOD_RES (113)..(113): Selenocysteine
  MOD_RES (162)..(162): Selenocysteine
  MOD_RES (167)..(167): Selenocysteine
  MOD_RES (173)..(173): Selenocysteine
  MOD_RES (181)..(181): Selenocysteine
  MOD_RES (199)..(199): Selenocysteine
  MOD_RES (223)..(223): Selenocysteine
  MOD_RES (245)..(245): Selenocysteine
  MOD_RES (251)..(251): Selenocysteine
  MOD_RES (258)..(258): Selenocysteine
MMKEKEKXIAIVKVIDXSKLKLLSGSILDVYSGEQGISPINMGLXSASCPSSLPMKREIXEXDXRALAKERQKKDNHNLIERRRRYNINYRIKELGXLIPKSNDPDMRWNKGXILKASVEYIKWLQKEQQRARELEHRQKKLEQANRRLLLRIQELEIQARXHGLPXLASLGXVDLGAHVXKQQSHPEQNSVDYCQQLXVSQGPSPELCDQAIAFSDPLSYFXDLSFSAALKEEQRLDGMLLDDXISPFGXDPLLSAXSPAVSKESSRRSSFSSDDGDEL

SEQ ID NO: 27476 - protein, 318 aa, Homo sapiens
  MOD_RES (2)..(2): Selenocysteine
  MOD_RES (11)..(11): Selenocysteine
  MOD_RES (31)..(32): Selenocysteine
  MOD_RES (40)..(40): Selenocysteine
  MOD_RES (45)..(45): Selenocysteine
  MOD_RES (83)..(83): Selenocysteine
  MOD_RES (98)..(98): Selenocysteine
  MOD_RES (100)..(100): Selenocysteine
  MOD_RES (102)..(102): Selenocysteine
  MOD_RES (135)..(135): Selenocysteine
  MOD_RES (151)..(151): Selenocysteine
  MOD_RES (200)..(200): Selenocysteine
  MOD_RES (205)..(205): Selenocysteine
  MOD_RES (211)..(211): Selenocysteine
  MOD_RES (219)..(219): Selenocysteine
  MOD_RES (237)..(237): Selenocysteine
  MOD_RES (261)..(261): Selenocysteine
  MOD_RES (283)..(283): Selenocysteine
  MOD_RES (289)..(289): Selenocysteine
  MOD_RES (296)..(296): Selenocysteine
MXLDHQIINPXLKWSQPAVPSGGPLVQHAHXXLDSDAGLXENPLXKLLAIGKEDDNAQWHLSGSILDVYSGEQGISPINMGLXSASCPSSLPMKREIXEXDXRALAKERQKKDNHNLIERRRRYNINYRIKELGXLIPKSNDPDMRWNKGXILKASVEYIKWLQKEQQRARELEHRQKKLEQANRRLLLRIQELEIQARXHGLPXLASLGXVDLGAHVXKQQSHPEQNSVDYCQQLXVSQGPSPELCDQAIAFSDPLSYFXDLSFSAALKEEQRLDGMLLDDXISPFGXDPLLSAXSPAVSKESSRRSSFSSDDGDEL

SEQ ID NO: 27477 - protein, 197 aa, Homo sapiens
  MOD_RES (2)..(2): Selenocysteine
  MOD_RES (11)..(11): Selenocysteine
  MOD_RES (31)..(32): Selenocysteine
  MOD_RES (40)..(40): Selenocysteine
  MOD_RES (45)..(45): Selenocysteine
  MOD_RES (83)..(83): Selenocysteine
  MOD_RES (98)..(98): Selenocysteine
  MOD_RES (100)..(100): Selenocysteine
  MOD_RES (102)..(102): Selenocysteine
  MOD_RES (135)..(135): Selenocysteine
  MOD_RES (151)..(151): Selenocysteine
MXLDHQIINPXLKWSQPAVPSGGPLVQHAHXXLDSDAGLXENPLXKLLAIGKEDDNAQWHLSGSILDVYSGEQGISPINMGLXSASCPSSLPMKREIXEXDXRALAKERQKKDNHNLIERRRRYNINYRIKELGXLIPKSNDPDMRWNKGXILKASVEYIKWLQKEQQRARELEHRQKKLEQANRRLLLRIQVFIRM

SEQ ID NO: 27478 - protein, 347 aa, Homo sapiens
  MOD_RES (2)..(2): Selenocysteine
  MOD_RES (11)..(11): Selenocysteine
  MOD_RES (31)..(32): Selenocysteine
  MOD_RES (40)..(40): Selenocysteine
  MOD_RES (45)..(45): Selenocysteine
  MOD_RES (89)..(89): Selenocysteine
  MOD_RES (112)..(112): Selenocysteine
  MOD_RES (127)..(127): Selenocysteine
  MOD_RES (129)..(129): Selenocysteine
  MOD_RES (131)..(131): Selenocysteine
  MOD_RES (164)..(164): Selenocysteine
  MOD_RES (180)..(180): Selenocysteine
  MOD_RES (229)..(229): Selenocysteine
  MOD_RES (234)..(234): Selenocysteine
  MOD_RES (240)..(240): Selenocysteine
  MOD_RES (248)..(248): Selenocysteine
  MOD_RES (266)..(266): Selenocysteine
  MOD_RES (290)..(290): Selenocysteine
  MOD_RES (312)..(312): Selenocysteine
  MOD_RES (318)..(318): Selenocysteine
  MOD_RES (325)..(325): Selenocysteine
MXLDHQIINPXLKWSQPAVPSGGPLVQHAHXXLDSDAGLXENPLXKLLAIGKEDDNAQWHMEDVIEDIIGMESSFKEEGADSPLLMQRXLSGSILDVYSGEQGISPINMGLXSASCPSSLPMKREIXEXDXRALAKERQKKDNHNLIERRRRYNINYRIKELGXLIPKSNDPDMRWNKGXILKASVEYIKWLQKEQQRARELEHRQKKLEQANRRLLLRIQELEIQARXHGLPXLASLGXVDLGAHVXKQQSHPEQNSVDYCQQLXVSQGPSPELCDQAIAFSDPLSYFXDLSFSAALKEEQRLDGMLLDDXISPFGXDPLLSAXSPAVSKESSRRSSFSSDDGDEL

SEQ ID NO: 27479 - protein, 129 aa, Homo sapiens
  MOD_RES (40)..(40): Selenocysteine
  MOD_RES (48)..(48): Selenocysteine
  MOD_RES (64)..(64): Selenocysteine
MGRRDAQLLAALLVLGLCALAGSEKPSPCQCSRLSPHNRXNCGFPGIXSDQCFDNGCCFDSSVXGVPWCFHPLPKQESDQCVMEVSDRRNCGYPGISPEECASRKCCFSNFIFEVPWCFFPKSVEDCHY

SEQ ID NO: 27480 - protein, 128 aa, Homo sapiens
  MOD_RES (32)..(32): Selenocysteine
  MOD_RES (55)..(55): Selenocysteine
  MOD_RES (67)..(67): Selenocysteine
  MOD_RES (87)..(87): Selenocysteine
MNGQLDLSGKLIIKAQLGEDIRRIPIHNEDIXYDELVLMMQRVFRGKLLSNDEVXIKYKDEDGDLIXIFDSSDLSFAIQCSRILKLXLFVNGQPRPLESSQVKYLRRELIELRNKVNRLLDSLEPPGE

SEQ ID NO: 27481 - protein, 157 aa, Homo sapiens
  MOD_RES (32)..(32): Selenocysteine
  MOD_RES (55)..(55): Selenocysteine
  MOD_RES (67)..(67): Selenocysteine
  MOD_RES (87)..(87): Selenocysteine
  MOD_RES (133)..(133): Selenocysteine
  MOD_RES (140)..(140): Selenocysteine
MNGQLDLSGKLIIKAQLGEDIRRIPIHNEDIXYDELVLMMQRVFRGKLLSNDEVXIKYKDEDGDLIXIFDSSDLSFAIQCSRILKLXLFVNGQPRPLESSQVKYLRRELIELRNKVNRLLDSLEPPGEPGPSXNIPENDXVDGREEKSASDSSGKQS

SEQ ID NO: 27482 - protein, 181 aa, Homo sapiens
  MOD_RES (32)..(32): Selenocysteine
  MOD_RES (55)..(55): Selenocysteine
  MOD_RES (67)..(67): Selenocysteine
  MOD_RES (87)..(87): Selenocysteine
  MOD_RES (133)..(133): Selenocysteine
  MOD_RES (140)..(140): Selenocysteine
  MOD_RES (158)..(158): Selenocysteine
MNGQLDLSGKLIIKAQLGEDIRRIPIHNEDIXYDELVLMMQRVFRGKLLSNDEVXIKYKDEDGDLIXIFDSSDLSFAIQCSRILKLXLFVNGQPRPLESSQVKYLRRELIELRNKVNRLLDSLEPPGEPGPSXNIPENDXVDGREEKSASDSSGKQSXQVMAASMSAFDPLKNQDEINKNV

SEQ ID NO: 27483 - protein, 284 aa, Homo sapiens
  MOD_RES (32)..(32): Selenocysteine
  MOD_RES (55)..(55): Selenocysteine
  MOD_RES (67)..(67): Selenocysteine
  MOD_RES (87)..(87): Selenocysteine
  MOD_RES (133)..(133): Selenocysteine
  MOD_RES (140)..(140): Selenocysteine
  MOD_RES (158)..(158): Selenocysteine
  MOD_RES (188)..(188): Selenocysteine
  MOD_RES (206)..(206): Selenocysteine
  MOD_RES (230)..(230): Selenocysteine
  MOD_RES (234)..(234): Selenocysteine
MNGQLDLSGKLIIKAQLGEDIRRIPIHNEDIXYDELVLMMQRVFRGKLLSNDEVXIKYKDEDGDLIXIFDSSDLSFAIQCSRILKLXLFVNGQPRPLESSQVKYLRRELIELRNKVNRLLDSLEPPGEPGPSXNIPENDXVDGREEKSASDSSGKQSXQVMAASMSAFDPLKNQDEINKNVMSAFGLXDDQVSGPPSAPAEDRSGXPDSIASSSSAAHPPGVQPQQPPYXGAQXQAGQIEGQMYQQYQQQAGYGAQQPQAPPQQPQQYGIQYSGFQSMERFHCK

SEQ ID NO: 27484 - protein, 400 aa, Homo sapiens
  MOD_RES (32)..(32): Selenocysteine
  MOD_RES (55)..(55): Selenocysteine
  MOD_RES (67)..(67): Selenocysteine
  MOD_RES (87)..(87): Selenocysteine
  MOD_RES (133)..(133): Selenocysteine
  MOD_RES (140)..(140): Selenocysteine
  MOD_RES (158)..(158): Selenocysteine
  MOD_RES (188)..(188): Selenocysteine
  MOD_RES (206)..(206): Selenocysteine
  MOD_RES (230)..(230): Selenocysteine
  MOD_RES (234)..(234): Selenocysteine
  MOD_RES (280)..(280): Selenocysteine
  MOD_RES (296)..(296): Selenocysteine
  MOD_RES (328)..(328): Selenocysteine
  MOD_RES (330)..(330): Selenocysteine
  MOD_RES (333)..(333): Selenocysteine
  MOD_RES (337)..(337): Selenocysteine
  MOD_RES (340)..(340): Selenocysteine
  MOD_RES (364)..(364): Selenocysteine
  MOD_RES (370)..(370): Selenocysteine
  MOD_RES (372)..(372): Selenocysteine
  MOD_RES (393)..(393): Selenocysteine
MNGQLDLSGKLIIKAQLGEDIRRIPIHNEDIXYDELVLMMQRVFRGKLLSNDEVXIKYKDEDGDLIXIFDSSDLSFAIQCSRILKLXLFVNGQPRPLESSQVKYLRRELIELRNKVNRLLDSLEPPGEPGPSXNIPENDXVDGREEKSASDSSGKQSXQVMAASMSAFDPLKNQDEINKNVMSAFGLXDDQVSGPPSAPAEDRSGXPDSIASSSSAAHPPGVQPQQPPYXGAQXQAGQIEGQMYQQYQQQAGYGAQQPQAPPQQPQQYGIQYSASYSQQXGPQQPQQFQGYGQQPXSQAPAPAFSGQPQQLPAQPPQQYQASNYPAQXYXAQXSQPXNYXVAPASQPGMAPSQPGAYQPRPGFXSLPGSXMXPPPSGPNPYARNRPPFGQGYXQPGPGYR

SEQ ID NO: 27485 - protein, 396 aa, Homo sapiens
  MOD_RES (32)..(32): Selenocysteine
  MOD_RES (55)..(55): Selenocysteine
  MOD_RES (67)..(67): Selenocysteine
  MOD_RES (87)..(87): Selenocysteine
  MOD_RES (133)..(133): Selenocysteine
  MOD_RES (140)..(140): Selenocysteine
  MOD_RES (158)..(158): Selenocysteine
  MOD_RES (188)..(188): Selenocysteine
  MOD_RES (206)..(206): Selenocysteine
  MOD_RES (230)..(230): Selenocysteine
  MOD_RES (234)..(234): Selenocysteine
  MOD_RES (276)..(276): Selenocysteine
  MOD_RES (292)..(292): Selenocysteine
  MOD_RES (324)..(324): Selenocysteine
  MOD_RES (326)..(326): Selenocysteine
  MOD_RES (329)..(329): Selenocysteine
  MOD_RES (333)..(333): Selenocysteine
  MOD_RES (336)..(336): Selenocysteine
  MOD_RES (360)..(360): Selenocysteine
  MOD_RES (366)..(366): Selenocysteine
  MOD_RES (368)..(368): Selenocysteine
  MOD_RES (389)..(389): Selenocysteine
MNGQLDLSGKLIIKAQLGEDIRRIPIHNEDIXYDELVLMMQRVFRGKLLSNDEVXIKYKDEDGDLIXIFDSSDLSFAIQCSRILKLXLFVNGQPRPLESSQVKYLRRELIELRNKVNRLLDSLEPPGEPGPSXNIPENDXVDGREEKSASDSSGKQSXQVMAASMSAFDPLKNQDEINKNVMSAFGLXDDQVSGPPSAPAEDRSGXPDSIASSSSAAHPPGVQPQQPPYXGAQXQAGQMYQQYQQQAGYGAQQPQAPPQQPQQYGIQYSASYSQQXGPQQPQQFQGYGQQPXSQAPAPAFSGQPQQLPAQPPQQYQASNYPAQXYXAQXSQPXNYXVAPASQPGMAPSQPGAYQPRPGFXSLPGSXMXPPPSGPNPYARNRPPFGQGYXQPGPGYR

SEQ ID NO: 27486 - protein, 244 aa, Homo sapiens
  MOD_RES (34)..(34): Selenocysteine
  MOD_RES (101)..(101): Selenocysteine
  MOD_RES (128)..(128): Selenocysteine
  MOD_RES (139)..(139): Selenocysteine
  MOD_RES (143)..(143): Selenocysteine
  MOD_RES (156)..(156): Selenocysteine
  MOD_RES (163)..(163): Selenocysteine
  MOD_RES (198)..(198): Selenocysteine
  MOD_RES (237)..(237): Selenocysteine
MAAVGFEEFSAPPGSELALPPLFGGHILESELEXEVEFVSGGLGGSGLRERDEEEEAARGRRRRQRELNRRKYQALGRRCREIEQVNERVLNRLHQVQRIXRRLQQERRFLMRVLDSYGDDYRASQFXIVLEDEGSQGXDAPXPGNAENEPPEKEXLSPPRRXPAPPEPGSPAPGEGPSGRKRRRVPRDGRRAGNALXPELAPVQIKVEEDFGFEADEALDSSWVSRGPDKLLPYPXLASPASD

SEQ ID NO: 27487 - protein, 193 aa, Homo sapiens
  MOD_RES (9)..(9): Selenocysteine
  MOD_RES (43)..(43): Selenocysteine
  MOD_RES (110)..(110): Selenocysteine
  MOD_RES (137)..(137): Selenocysteine
MELEQREGXMAAVGFEEFSAPPGSELALPPLFGGHILESELEXEVEFVSGGLGGSGLRERDEEEEAARGRRRRQRELNRRKYQALGRRCREIEQVNERVLNRLHQVQRIXRRLQQERRFLMRVLDSYGDDYRASQFXIVLEAMRRMSLQRKRHCPRPEGLLHPQNPAAQPPVRGPVGGRGGECHGMDAEQEMR

SEQ ID NO: 27488 - protein, 253 aa, Homo sapiens
  MOD_RES (9)..(9): Selenocysteine
  MOD_RES (43)..(43): Selenocysteine
  MOD_RES (110)..(110): Selenocysteine
  MOD_RES (137)..(137): Selenocysteine
  MOD_RES (148)..(148): Selenocysteine
  MOD_RES (152)..(152): Selenocysteine
  MOD_RES (165)..(165): Selenocysteine
  MOD_RES (172)..(172): Selenocysteine
  MOD_RES (207)..(207): Selenocysteine
  MOD_RES (246)..(246): Selenocysteine
MELEQREGXMAAVGFEEFSAPPGSELALPPLFGGHILESELEXEVEFVSGGLGGSGLRERDEEEEAARGRRRRQRELNRRKYQALGRRCREIEQVNERVLNRLHQVQRIXRRLQQERRFLMRVLDSYGDDYRASQFXIVLEDEGSQGXDAPXPGNAENEPPEKEXLSPPRRXPAPPEPGSPAPGEGPSGRKRRRVPRDGRRAGNALXPELAPVQIKVEEDFGFEADEALDSSWVSRGPDKLLPYPXLASPASD

SEQ ID NO: 27489 - protein, 145 aa, Homo sapiens
  MOD_RES (9)..(9): Selenocysteine
  MOD_RES (43)..(43): Selenocysteine
  MOD_RES (110)..(110): Selenocysteine
  MOD_RES (137)..(137): Selenocysteine
MELEQREGXMAAVGFEEFSAPPGSELALPPLFGGHILESELEXEVEFVSGGLGGSGLRERDEEEEAARGRRRRQRELNRRKYQALGRRCREIEQVNERVLNRLHQVQRIXRRLQQERRFLMRVLDSYGDDYRASQFXIVLEQEMR

SEQ ID NO: 27490 - protein, 105 aa, Homo sapiens
  MOD_RES (9)..(9): Selenocysteine
  MOD_RES (43)..(43): Selenocysteine
MELEQREGXMAAVGFEEFSAPPGSELALPPLFGGHILESELEXEVEFVSGGLGGSGLRERDEEEEAARGRRRRQRELNRRKYQALGRRCREIEQVPHESAGLLRG

SEQ ID NO: 27491 - protein, 59 aa, Homo sapiens
  MOD_RES (9)..(9): Selenocysteine
  MOD_RES (40)..(40): Selenocysteine
MALVLEIFXLLASICWVSANIFEYQVDAQPLRPCELQREXAFLKQADYVPQCAEDGSFQ

SEQ ID NO: 27492 - protein, 2768 aa, Homo sapiens
  MOD_RES (9)..(9): Selenocysteine
  MOD_RES (40)..(40): Selenocysteine
  MOD_RES (60)..(60): Selenocysteine
  MOD_RES (112)..(112): Selenocysteine
  MOD_RES (114)..(114): Selenocysteine
  MOD_RES (151)..(151): Selenocysteine
  MOD_RES (199)..(200): Selenocysteine
  MOD_RES (220)..(220): Selenocysteine
  MOD_RES (248)..(248): Selenocysteine
  MOD_RES (260)..(260): Selenocysteine
  MOD_RES (270)..(270): Selenocysteine
  MOD_RES (272)..(272): Selenocysteine
  MOD_RES (274)..(275): Selenocysteine
  MOD_RES (299)..(299): Selenocysteine
  MOD_RES (307)..(307): Selenocysteine
  MOD_RES (309)..(309): Selenocysteine
  MOD_RES (332)..(332): Selenocysteine
  MOD_RES (349)..(349): Selenocysteine
  MOD_RES (379)..(379): Selenocysteine
  MOD_RES (406)..(406): Selenocysteine
  MOD_RES (411)..(411): Selenocysteine
  MOD_RES (461)..(462): Selenocysteine
  MOD_RES (491)..(491): Selenocysteine
  MOD_RES (494)..(494): Selenocysteine
  MOD_RES (532)..(532): Selenocysteine
  MOD_RES (534)..(534): Selenocysteine
  MOD_RES (543)..(543): Selenocysteine
  MOD_RES (548)..(548): Selenocysteine
  MOD_RES (601)..(601): Selenocysteine
  MOD_RES (607)..(607): Selenocysteine
  MOD_RES (611)..(611): Selenocysteine
  MOD_RES (621)..(622): Selenocysteine
  MOD_RES (660)..(660): Selenocysteine
  MOD_RES (681)..(681): Selenocysteine
  MOD_RES (688)..(688): Selenocysteine
  MOD_RES (716)..(716): Selenocysteine
  MOD_RES (728)..(728): Selenocysteine
  MOD_RES (741)..(741): Selenocysteine
  MOD_RES (754)..(754): Selenocysteine
  MOD_RES (758)..(758): Selenocysteine
  MOD_RES (765)..(765): Selenocysteine
  MOD_RES (798)..(798): Selenocysteine
  MOD_RES (888)..(888): Selenocysteine
  MOD_RES (920)..(920): Selenocysteine
  MOD_RES (939)..(939): Selenocysteine
  MOD_RES (1001)..(1001): Selenocysteine
  MOD_RES (1046)..(1046): Selenocysteine
  MOD_RES (1064)..(1064): Selenocysteine
  MOD_RES (1075)..(1076): Selenocysteine
  MOD_RES (1082)..(1082): Selenocysteine
  MOD_RES (1111)..(1111): Selenocysteine
  MOD_RES (1124)..(1124): Selenocysteine
  MOD_RES (1201)..(1201): Selenocysteine
  MOD_RES (1204)..(1204): Selenocysteine
  MOD_RES (1228)..(1228): Selenocysteine
  MOD_RES (1233)..(1233): Selenocysteine
  MOD_RES (1238)..(1238): Selenocysteine
  MOD_RES (1289)..(1289): Selenocysteine
  MOD_RES (1292)..(1292): Selenocysteine
  MOD_RES (1316)..(1316): Selenocysteine
  MOD_RES (1326)..(1326): Selenocysteine
  MOD_RES (1337)..(1337): Selenocysteine
  MOD_RES (1340)..(1340): Selenocysteine
  MOD_RES (1358)..(1358): Selenocysteine
  MOD_RES (1367)..(1367): Selenocysteine
  MOD_RES (1400)..(1400): Selenocysteine
  MOD_RES (1416)..(1416): Selenocysteine
  MOD_RES (1421)..(1421): Selenocysteine
  MOD_RES (1432)..(1432): Selenocysteine
  MOD_RES (1436)..(1436): Selenocysteine
  MOD_RES (1449)..(1449): Selenocysteine
  MOD_RES (1498)..(1499): Selenocysteine
  MOD_RES (1508)..(1508): Selenocysteine
  MOD_RES (1512)..(1512): Selenocysteine
  MOD_RES (1556)..(1556): Selenocysteine
  MOD_RES (1605)..(1605): Selenocysteine
  MOD_RES (1608)..(1608): Selenocysteine
  MOD_RES (1617)..(1617): Selenocysteine
  MOD_RES (1620)..(1621): Selenocysteine
  MOD_RES (1633)..(1633): Selenocysteine
  MOD_RES (1641)..(1641): Selenocysteine
  MOD_RES (1655)..(1655): Selenocysteine
  MOD_RES (1685)..(1687): Selenocysteine
  MOD_RES (1695)..(1695): Selenocysteine
  MOD_RES (1718)..(1718): Selenocysteine
  MOD_RES (1740)..(1740): Selenocysteine
  MOD_RES (1776)..(1776): Selenocysteine
  MOD_RES (1781)..(1781): Selenocysteine
  MOD_RES (1803)..(1803): Selenocysteine
  MOD_RES (1808)..(1808): Selenocysteine
  MOD_RES (1811)..(1811): Selenocysteine
  MOD_RES (1813)..(1813): Selenocysteine
  MOD_RES (1839)..(1839): Selenocysteine
  MOD_RES (1847)..(1847): Selenocysteine
  MOD_RES (1852)..(1853): Selenocysteine
  MOD_RES (1910)..(1910): Selenocysteine
  MOD_RES (1918)..(1918): Selenocysteine
  MOD_RES (1920)..(1920): Selenocysteine
  MOD_RES (1966)..(1966): Selenocysteine
  MOD_RES (2007)..(2007): Selenocysteine
  MOD_RES (2023)..(2023): Selenocysteine
  MOD_RES (2026)..(2026): Selenocysteine
  MOD_RES (2057)..(2057): Selenocysteine
  MOD_RES (2085)..(2085): Selenocysteine
  MOD_RES (2117)..(2117): Selenocysteine
  MOD_RES (2120)..(2120): Selenocysteine
  MOD_RES (2143)..(2144): Selenocysteine
  MOD_RES (2147)..(2147): Selenocysteine
  MOD_RES (2160)..(2160): Selenocysteine
  MOD_RES (2164)..(2164): Selenocysteine
  MOD_RES (2181)..(2181): Selenocysteine
  MOD_RES (2205)..(2205): Selenocysteine
  MOD_RES (2220)..(2220): Selenocysteine
  MOD_RES (2252)..(2252): Selenocysteine
  MOD_RES (2269)..(2269): Selenocysteine
  MOD_RES (2271)..(2271): Selenocysteine
  MOD_RES (2273)..(2273): Selenocysteine
  MOD_RES (2305)..(2305): Selenocysteine
  MOD_RES (2332)..(2332): Selenocysteine
  MOD_RES (2364)..(2364): Selenocysteine
  MOD_RES (2368)..(2368): Selenocysteine
  MOD_RES (2398)..(2398): Selenocysteine
  MOD_RES (2402)..(2402): Selenocysteine
  MOD_RES (2467)..(2467): Selenocysteine
  MOD_RES (2533)..(2533): Selenocysteine
  MOD_RES (2537)..(2537): Selenocysteine
  MOD_RES (2561)..(2561): Selenocysteine
  MOD_RES (2570)..(2570): Selenocysteine
  MOD_RES (2584)..(2584): Selenocysteine
  MOD_RES (2680)..(2680): Selenocysteine
  MOD_RES (2683)..(2683): Selenocysteine
  MOD_RES (2727)..(2727): Selenocysteine
  MOD_RES (2746)..(2746): Selenocysteine
  MOD_RES (2765)..(2765): Selenocysteine
MALVLEIFXLLASICWVSANIFEYQVDAQPLRPCELQREXAFLKQADYVPQCAEDGSFQXVQCQNDGRSCWCVGANGSEVLGSRQPGRPVACLSFCQLQKQQILLSGYINSXDXSYLPQCQDSGDYAPVQCDVQQVQCWCVDAEGMEVYGXRQLGRPKRCPRSCEIRNRRLLHGVGDKSPPQCSAEGEFMPVQCKFVNXXDMMIFDLVHSYNRFPDAFVXFSSFQRRFPEVSGYCHCADSQGRELAEXGLELLLDEIYDXIFAGLDLPSXFXEXXLYRILQRRFLAVQSVISGRFRCPXKCEVERFXAXSFGHPYVPSCRRNGDYQAVQCQXEGPCWCVDAQGKEMHGXRQQGEPPSCAEGQSCASERQQALSRLYFGXSGYFSQHDLFSSPEKRWASPRVARFAXSCPPXIKELFVDSGLLRPMVEGQSQQFSVSENLLKEAIRAIFPSRGLARLALQFXXNPKRLQQNLFGGKFLVNVGQFNLSGALGXRGXFNFSQFFQQLGLASFLNGGRQEDLAKPLSVGLDSNSSXGXPEAAKKDGXMNKPXVGSFGFEINLQENQNALKFLASLLELPEFLLFLQHAISVPEDVARDLGDVMEXVLSSQXCEQXPERLFVPSCXXEGSYEDVQCFSGECWCVNSWGKELPGSRVRGGQPRCPXDCEKQRARMQSLMGSQPAGSXLFVPACXSEGHFLPVQCFNSECYCVDAEGQAIPGXRSAIGKPKKCPXPCQLQSEQAFLRXVQALLSNSSMLPXLSDXYIPQCSXDGQWRQVQCNGPPEQVFELYQRWEAQNKGQDLXPAKLLVKIMSYREAASGNFSLFIQSLYEAGQQDVFPVLSQYPSLQDVPLAALEGKRPQPRENILLEPYLFWQILNGQLSQYPGSYSDFSXPLAHFDLRNCWCVDEAGQELEGMRSEPSKLPXCPGSCEEAKLRVLQFIREXEEIVSASNSSRFPLGESFLVAKGIRLRNEDLGLPPLFPPREAFAEQFLRGSDYAIRLAAQSXLSFYQRRRFSPDDSAGASALLRSGPYMPQCDAFGSWEPVQCHAGXGHCWCVDEKGGFIPGSLXARSLQIPQCPXXCEKSRXSGLLSSWKQARSQENPSPKDLFVPACLEXGEYARLQASGAGXWCVDPASGEELRPGSSSSAQCPSLCNVLKSGVLSRRVSPGYVPACRAEDGGFSPVQCDQAQGSCWCVMDSGEEVPGXRVXGGQPACESPRCPLPFNASEVVGGXILCEXISGPXGSAMQQCQLLCRQGSWSVFPPGPLICSLESGRWESQLPQPRACQRPQLWQXIQXQGHFQLQLPPGKMCSADYADLLQXFQVFILDELXARGFCQIQVKXFGXLVSIPVCNNSSVQVGCLXRERLGVNVXWKSRLEDIPVASLPDLHDIERALVGKDLLGRFXDLIQSGSFQLHLDSKXFPAEXIRFLQGDHFGXSPRXWFGCSEGFYQVLXSEASQDGLGCVKCPEGSYSQDEECIPCPVGFYQEQAGSLACVPCPVGRXXISAGAFSQXHCVXDCQRNEAGLQCDQNGQYRASQKDRGSGKAFCVDGEGRRLPWWEXEAPLEDSQCLMMQKFEKVPESKVIFDANAPVAVRSKVPDSEFPVMQCLXDCXEDEACSFFXVSXXEPEISCDFYAWXSDNVACMXSDQKRDALGNSKAXSFGSLRCQVKVRSHGQDSPAVYLKKGQGSXXXLQKRFEPXGFQNMLSGLYNPIVFSASGANLXDAHLFCLLACDRDLCCDGFVLXQVQGGAIICGLLSSPSVLLCNVKDWMDPSEAWANAXCPGVXYDQESHQVILRLGDQEFIKSLXPLEGXQDXFXNFQQVYLWKDSDMGSRPESMGCRKDXVPRPASPXEAGLXXELFSPVDLNQVIVNGNQSLSSQKHWLFKHLFSAQQANLWCLSRCVQEHSFCQLAEIXESASLYFXCXLYPEAQVCDDIMESNAQGCRLILPQMPKALFRKKVILEDKVKNFYXRLPFQKLMGISIRNKVPMSEKSISNGFFECERRCDADPCCXGFGFLNVSQLKGGEVXCLXLNSLGIQMCSEENGGAWRILDCGSPDIEVHXYPFGWYQKPIAQNNAPSFCPLVVLPSLXEKVSLDSWQSLALSSVVVDPSIRHFDVAHVSXAAXSNFSAVRDLCLSECSQHEACLIXXLQXQPGAVRCMFYADXQSCXHSLQGQNCRLLLREEAXHIYRKPGISLLSYEASVPSVPISXHGRLLGRSQAIQVGXSWKQVDQFLGVPYAAPPLAERRFQAPEPLNWXGSWDASKPRASCWQPGXRXSXSPGVSEDCLYLNVFIPQNVAPNASVLVFFHNXMDREESEGWPAIDGSFLAAVGNLIVVXASYRVGVFGFLSSGSGEVSGNWGLLDQVAALXWVQXHIRGFGGDPRRVSLAADRGGADVASIHLLXARAXNSQLFRRAVLMGGSALSPAAVISHERAQQQAIALAKEVSCPMSSSQEVVSCLRQKPANVLNDAQXKLLAVSGPFHYWGPVIDGHFLREPPARALKRSLWVEVDLLIGSSQDDGLINRAKAVKQFEESRGRXSSKXAFYQALQNSLGGEDSDARVEAAAXWYYSLEHSXDDYASFSRALENAXRDYFIICPIIDMASAWAKRARGNVFMYHAPENYGHGSLELLADVQFALGLPFYPAYEGQFSLEEKSLSLKIMQYFSHFIRSGNPNYPYEFSRKVPXFAXPWPDFVPRAGGENYKEFSELLPNRQGLKKADCSFWSKYISSLKXSADGAKGGQSAESEEEELXAGSGLREDLLSLQEPGSKXYSK

SEQ ID NO: 27493 - protein, 901 aa, Homo sapiens
  MOD_RES (6)..(7): Selenocysteine
  MOD_RES (64)..(64): Selenocysteine
  MOD_RES (72)..(72): Selenocysteine
  MOD_RES (74)..(74): Selenocysteine
  MOD_RES (120)..(120): Selenocysteine
  MOD_RES (161)..(161): Selenocysteine
  MOD_RES (177)..(177): Selenocysteine
  MOD_RES (180)..(180): Selenocysteine
  MOD_RES (211)..(211): Selenocysteine
  MOD_RES (250)..(250): Selenocysteine
  MOD_RES (253)..(253): Selenocysteine
  MOD_RES (276)..(277): Selenocysteine
  MOD_RES (280)..(280): Selenocysteine
  MOD_RES (293)..(293): Selenocysteine
  MOD_RES (297)..(297): Selenocysteine
  MOD_RES (314)..(314): Selenocysteine
  MOD_RES (338)..(338): Selenocysteine
  MOD_RES (353)..(353): Selenocysteine
  MOD_RES (385)..(385): Selenocysteine
  MOD_RES (402)..(402): Selenocysteine
  MOD_RES (404)..(404): Selenocysteine
  MOD_RES (406)..(406): Selenocysteine
  MOD_RES (438)..(438): Selenocysteine
  MOD_RES (465)..(465): Selenocysteine
  MOD_RES (497)..(497): Selenocysteine
  MOD_RES (501)..(501): Selenocysteine
  MOD_RES (531)..(531): Selenocysteine
  MOD_RES (535)..(535): Selenocysteine
  MOD_RES (600)..(600): Selenocysteine
  MOD_RES (666)..(666): Selenocysteine
  MOD_RES (670)..(670): Selenocysteine
  MOD_RES (694)..(694): Selenocysteine
  MOD_RES (703)..(703): Selenocysteine
  MOD_RES (717)..(717): Selenocysteine
  MOD_RES (813)..(813): Selenocysteine
  MOD_RES (816)..(816): Selenocysteine
  MOD_RES (860)..(860): Selenocysteine
  MOD_RES (879)..(879): Selenocysteine
  MOD_RES (898)..(898): Selenocysteine
MLPGLXXELFSPVDLNQVIVNGNQSLSSQKHWLFKHLFSAQQANLWCLSRCVQEHSFCQLAEIXESASLYFXCXLYPEAQVCDDIMESNAQGCRLILPQMPKALFRKKVILEDKVKNFYXRLPFQKLMGISIRNKVPMSEKSISNGFFECERRCDADPCCXGFGFLNVSQLKGGEVXCLXLNSLGIQMCSEENGGAWRILDCGSPDIEVHXYPFGWYQKPMSLDSWQSLALSSVVVDPSIRHFDVAHVSXAAXSNFSAVRDLCLSECSQHEACLIXXLQXQPGAVRCMFYADXQSCXHSLQGQNCRLLLREEAXHIYRKPGISLLSYEASVPSVPISXHGRLLGRSQAIQVGXSWKQVDQFLGVPYAAPPLAERRFQAPEPLNWXGSWDASKPRASCWQPGXRXSXSPGVSEDCLYLNVFIPQNVAPNASVLVFFHNXMDREESEGWPAIDGSFLAAVGNLIVVXASYRVGVFGFLSSGSGEVSGNWGLLDQVAALXWVQXHIRGFGGDPRRVSLAADRGGADVASIHLLXARAXNSQLFRRAVLMGGSALSPAAVISHERAQQQAIALAKEVSCPMSSSQEVVSCLRQKPANVLNDAQXKLLAVSGPFHYWGPVIDGHFLREPPARALKRSLWVEVDLLIGSSQDDGLINRAKAVKQFEESRGRXSSKXAFYQALQNSLGGEDSDARVEAAAXWYYSLEHSXDDYASFSRALENAXRDYFIICPIIDMASAWAKRARGNVFMYHAPENYGHGSLELLADVQFALGLPFYPAYEGQFSLEEKSLSLKIMQYFSHFIRSGNPNYPYEFSRKVPXFAXPWPDFVPRAGGENYKEFSELLPNRQGLKKADCSFWSKYISSLKXSADGAKGGQSAESEEEELXAGSGLREDLLSLQEPGSKXYSK

SEQ ID NO: 27494 - protein, 172 aa, Homo sapiens
  MOD_RES (10)..(10): Selenocysteine
  MOD_RES (19)..(19): Selenocysteine
  MOD_RES (33)..(33): Selenocysteine
  MOD_RES (84)..(84): Selenocysteine
  MOD_RES (87)..(87): Selenocysteine
  MOD_RES (131)..(131): Selenocysteine
  MOD_RES (150)..(150): Selenocysteine
  MOD_RES (169)..(169): Selenocysteine
SDARVEAAAXWYYSLEHSXDDYASFSRALENAXRDYFIICPIIDMASAWAKRARGNVFMYHAPENYGHGRNPNYPYEFSRKVPXFAXPWPDFVPRAGGENYKEFSELLPNRQGLKKADCSFWSKYISSLKXSADGAKGGQSAESEEEELXAGSGLREDLLSLQEPGSKXYSK

SEQ ID NO: 27495 - protein, 74 aa, Homo sapiens
  MOD_RES (1)..(1): Any amino acid
  MOD_RES (28)..(28): Selenocysteine
  MOD_RES (56)..(56): Selenocysteine
  MOD_RES (68)..(68): Selenocysteine
XGIQMCSEENGGAWRILDCGSPDIEVHXYPFGWYQKPIAQNNAPSFCPLVVLPSLXEKVFKVREVRGXQLKRME

SEQ ID NO: 27496 - protein, 226 aa, Homo sapiens
  MOD_RES (1)..(1): Any amino acid
  MOD_RES (13)..(13): Selenocysteine
  MOD_RES (31)..(31): Selenocysteine
  MOD_RES (42)..(43): Selenocysteine
  MOD_RES (49)..(49): Selenocysteine
  MOD_RES (78)..(78): Selenocysteine
  MOD_RES (91)..(91): Selenocysteine
  MOD_RES (145)..(145): Selenocysteine
  MOD_RES (148)..(148): Selenocysteine
  MOD_RES (172)..(172): Selenocysteine
  MOD_RES (177)..(177): Selenocysteine
  MOD_RES (182)..(182): Selenocysteine
XGSWEPVQCHAGXGHCWCVDEKGGFIPGSLXARSLQIPQCPXXCEKSRXSGLLSSWKQARSQENPSPKDLFVPACLEXGEYARLQASGAGXWCVDPASGEELRPGSSSSAQSCRAEDGGFSPVQCDQAQGSCWCVMDSGEEVPGXRVXGGQPACESPRCPLPFNASEVVGGXILCEXISGPXGSAMQQCQLLCRQGSWSVFPPGPLICSLESGRWESQLPQPRACQ

SEQ ID NO: 27497 - protein, 194 aa, Homo sapiens
  MOD_RES (1)..(1): Any amino acid
  MOD_RES (19)..(19): Selenocysteine
  MOD_RES (65)..(65): Selenocysteine
  MOD_RES (67)..(67): Selenocysteine
  MOD_RES (69)..(69): Selenocysteine
  MOD_RES (101)..(101): Selenocysteine
  MOD_RES (128)..(128): Selenocysteine
  MOD_RES (160)..(160): Selenocysteine
  MOD_RES (164)..(164): Selenocysteine
  MOD_RES (194)..(194): Selenocysteine
XHSECQWREHSLRPLPFLXPFSSLSQQESLCSAMRHLYLLCPFPPMAGCWAGPRPSRASCWQPGXRXSXSPGVSEDCLYLNVFIPQNVAPNASVLVFFHNXMDREESEGWPAIDGSFLAAVGNLIVVXASYRVGVFGFLSSGSGEVSGNWGLLDQVAALXWVQXHIRGFGGDPRRVSLAADRGGADVASIHLLX

SEQ ID NO: 27498 - protein, 1224 aa, Homo sapiens
  MOD_RES (1)..(1): Any amino acid
  MOD_RES (18)..(19): Selenocysteine
  MOD_RES (28)..(28): Selenocysteine
  MOD_RES (32)..(32): Selenocysteine
  MOD_RES (76)..(76): Selenocysteine
  MOD_RES (125)..(125): Selenocysteine
  MOD_RES (128)..(128): Selenocysteine
  MOD_RES (137)..(137): Selenocysteine
  MOD_RES (140)..(141): Selenocysteine
  MOD_RES (153)..(153): Selenocysteine
  MOD_RES (161)..(161): Selenocysteine
  MOD_RES (175)..(175): Selenocysteine
  MOD_RES (232)..(232): Selenocysteine
  MOD_RES (237)..(237): Selenocysteine
  MOD_RES (259)..(259): Selenocysteine
  MOD_RES (264)..(264): Selenocysteine
  MOD_RES (267)..(267): Selenocysteine
  MOD_RES (269)..(269): Selenocysteine
  MOD_RES (295)..(295): Selenocysteine
  MOD_RES (303)..(303): Selenocysteine
  MOD_RES (308)..(309): Selenocysteine
  MOD_RES (366)..(366): Selenocysteine
  MOD_RES (374)..(374): Selenocysteine
  MOD_RES (376)..(376): Selenocysteine
  MOD_RES (422)..(422): Selenocysteine
  MOD_RES (463)..(463): Selenocysteine
  MOD_RES (479)..(479): Selenocysteine
  MOD_RES (482)..(482): Selenocysteine
  MOD_RES (513)..(513): Selenocysteine
  MOD_RES (541)..(541): Selenocysteine
  MOD_RES (573)..(573): Selenocysteine
  MOD_RES (576)..(576): Selenocysteine
  MOD_RES (599)..(600): Selenocysteine
  MOD_RES (603)..(603): Selenocysteine
  MOD_RES (616)..(616): Selenocysteine
  MOD_RES (620)..(620): Selenocysteine
  MOD_RES (637)..(637): Selenocysteine
  MOD_RES (661)..(661): Selenocysteine
  MOD_RES (676)..(676): Selenocysteine
  MOD_RES (708)..(708): Selenocysteine
  MOD_RES (725)..(725): Selenocysteine
  MOD_RES (727)..(727): Selenocysteine
  MOD_RES (729)..(729): Selenocysteine
  MOD_RES (761)..(761): Selenocysteine
  MOD_RES (788)..(788): Selenocysteine
  MOD_RES (820)..(820): Selenocysteine
  MOD_RES (824)..(824): Selenocysteine
  MOD_RES (854)..(854): Selenocysteine
  MOD_RES (858)..(858): Selenocysteine
  MOD_RES (923)..(923): Selenocysteine
  MOD_RES (989)..(989): Selenocysteine
  MOD_RES (993)..(993): Selenocysteine
  MOD_RES (1017)..(1017): Selenocysteine
  MOD_RES (1026)..(1026): Selenocysteine
  MOD_RES (1040)..(1040): Selenocysteine
  MOD_RES (1136)..(1136): Selenocysteine
  MOD_RES (1139)..(1139): Selenocysteine
  MOD_RES (1183)..(1183): Selenocysteine
  MOD_RES (1202)..(1202): Selenocysteine
  MOD_RES (1221)..(1221): Selenocysteine
XQEQAGSLACVPCPVGRXXISAGAFSQXHCVXDCQRNEAGLQCDQNGQYRASQKDRGSGKAFCVDGEGRRLPWWEXEAPLEDSQCLMMQKFEKVPESKVIFDANAPVAVRSKVPDSEFPVMQCLXDCXEDEACSFFXVSXXEPEISCDFYAWXSDNVACMXSDQKRDALGNSKAXSFGSLRCQVKVRSHGQDSPAVYLKKGAIICGLLSSPSVLLCNVKDWMDPSEAWANAXCPGVXYDQESHQVILRLGDQEFIKSLXPLEGXQDXFXNFQQVYLWKDSDMGSRPESMGCRKDXVPRPASPXEAGLXXELFSPVDLNQVIVNGNQSLSSQKHWLFKHLFSAQQANLWCLSRCVQEHSFCQLAEIXESASLYFXCXLYPEAQVCDDIMESNAQGCRLILPQMPKALFRKKVILEDKVKNFYXRLPFQKLMGISIRNKVPMSEKSISNGFFECERRCDADPCCXGFGFLNVSQLKGGEVXCLXLNSLGIQMCSEENGGAWRILDCGSPDIEVHXYPFGWYQKPIAQNNAPSFCPLVVLPSLXEKVSLDSWQSLALSSVVVDPSIRHFDVAHVSXAAXSNFSAVRDLCLSECSQHEACLIXXLQXQPGAVRCMFYADXQSCXHSLQGQNCRLLLREEAXHIYRKPGISLLSYEASVPSVPISXHGRLLGRSQAIQVGXSWKQVDQFLGVPYAAPPLAERRFQAPEPLNWXGSWDASKPRASCWQPGXRXSXSPGVSEDCLYLNVFIPQNVAPNASVLVFFHNXMDREESEGWPAIDGSFLAAVGNLIVVXASYRVGVFGFLSSGSGEVSGNWGLLDQVAALXWVQXHIRGFGGDPRRVSLAADRGGADVASIHLLXARAXNSQLFRRAVLMGGSALSPAAVISHERAQQQAIALAKEVSCPMSSSQEVVSCLRQKPANVLNDAQXKLLAVSGPFHYWGPVIDGHFLREPPARALKRSLWVEVDLLIGSSQDDGLINRAKAVKQFEESRGRXSSKXAFYQALQNSLGGEDSDARVEAAAXWYYSLEHSXDDYASFSRALENAXRDYFIICPIIDMASAWAKRARGNVFMYHAPENYGHGSLELLADVQFALGLPFYPAYEGQFSLEEKSLSLKIMQYFSHFIRSGNPNYPYEFSRKVPXFAXPWPDFVPRAGGENYKEFSELLPNRQGLKKADCSFWSKYISSLKXSADGAKGGQSAESEEEELXAGSGLREDLLSLQEPGSKXYSK

SEQ ID NO: 27499 - protein, 147 aa, Homo sapiens
  MOD_RES (1)..(1): Any amino acid
  MOD_RES (33)..(33): Selenocysteine
  MOD_RES (51)..(51): Selenocysteine
  MOD_RES (62)..(63): Selenocysteine
  MOD_RES (69)..(69): Selenocysteine
  MOD_RES (106)..(106): Selenocysteine
XSAGASALLRSGPYMPQCDAFGSWEPVQCHAGXGHCWCVDEKGGFIPGSLXARSLQIPQCPXXCEKSRXSGLLSSWKQARSQENPSPKDLFVPACLEARGVRCHSXRRRWLVEQSCVRQSRAPQALPCSSANCCAARAPGACFHQGH

SEQ ID NO: 27500 - protein, 62 aa, Homo sapiens
  MOD_RES (1)..(1): Any amino acid
  MOD_RES (17)..(17): Selenocysteine
  MOD_RES (25)..(25): Selenocysteine
  MOD_RES (42)..(42): Selenocysteine
  MOD_RES (50)..(50): Selenocysteine
  MOD_RES (52)..(52): Selenocysteine
XSDMGSRPESMGCRKDXVPRPASPXEAGCVQEHSFCQLAEIXESASLYFXCXLYPEAQVCDD

SEQ ID NO: 27501 - protein, 166 aa, Homo sapiens
  MOD_RES (33)..(33): Selenocysteine
  MOD_RES (58)..(58): Selenocysteine
  MOD_RES (65)..(65): Selenocysteine
  MOD_RES (107)..(107): Selenocysteine
  MOD_RES (123)..(123): Selenocysteine
  MOD_RES (157)..(157): Selenocysteine
  MOD_RES (164)..(164): Selenocysteine
MFKIGRGALDLFSELLSFGGIVLAACQALENSXSPLSADPPVAAAVVSHFNDCPDSHXQFCFHGXCRFLVQEDKPACVCHSGYVGARCEHADLLAVVAASQKKQAIXALVVVSIVALAVLIIXCVLIHCCQVRKHCEWCRALICRHEKPSALLKGRXACCHSEXVV

SEQ ID NO: 27502 - protein, 165 aa, Homo sapiens
  MOD_RES (33)..(33): Selenocysteine
  MOD_RES (57)..(57): Selenocysteine
  MOD_RES (64)..(64): Selenocysteine
  MOD_RES (106)..(106): Selenocysteine
  MOD_RES (122)..(122): Selenocysteine
  MOD_RES (156)..(156): Selenocysteine
  MOD_RES (163)..(163): Selenocysteine
MFKIGRGALDLFSELLSFGGIVLAACQALENSXSPLSDPPVAAAVVSHFNDCPDSHXQFCFHGXCRFLVQEDKPACVCHSGYVGARCEHADLLAVVAASQKKQAIXALVVVSIVALAVLIIXCVLIHCCQVRKHCEWCRALICRHEKPSALLKGRXACCHSEXVV

SEQ ID NO: 27503 - protein, 160 aa, Homo sapiens
  MOD_RES (27)..(27): Selenocysteine
  MOD_RES (52)..(52): Selenocysteine
  MOD_RES (59)..(59): Selenocysteine
  MOD_RES (101)..(101): Selenocysteine
  MOD_RES (117)..(117): Selenocysteine
  MOD_RES (151)..(151): Selenocysteine
  MOD_RES (158)..(158): Selenocysteine
MVPSAGQLALFALGIVLAACQALENSXSPLSADPPVAAAVVSHFNDCPDSHXQFCFHGXCRFLVQEDKPACVCHSGYVGARCEHADLLAVVAASQKKQAIXALVVVSIVALAVLIIXCVLIHCCQVRKHCEWCRALICRHEKPSALLKGRXACCHSEXVV

SEQ ID NO: 27504 - protein, 120 aa, Homo sapiens
  MOD_RES (27)..(27): Selenocysteine
  MOD_RES (51)..(51): Selenocysteine
  MOD_RES (58)..(58): Selenocysteine
  MOD_RES (100)..(100): Selenocysteine
  MOD_RES (116)..(116): Selenocysteine
MVPSAGQLALFALGIVLAACQALENSXSPLSDPPVAAAVVSHFNDCPDSHXQFCFHGXCRFLVQEDKPACVCHSGYVGARCEHADLLAVVAASQKKQAIXALVVVSIVALAVLIIXCVLI

SEQ ID NO: 27505 - protein, 161 aa, Homo sapiens
  MOD_RES (27)..(27): Selenocysteine
  MOD_RES (51)..(51): Selenocysteine
  MOD_RES (58)..(58): Selenocysteine
  MOD_RES (100)..(100): Selenocysteine
  MOD_RES (116)..(116): Selenocysteine
  MOD_RES (150)..(150): Selenocysteine
  MOD_RES (157)..(157): Selenocysteine
  MOD_RES (159)..(159): Selenocysteine
MVPSAGQLALFALGIVLAACQALENSXSPLSDPPVAAAVVSHFNDCPDSHXQFCFHGXCRFLVQEDKPACVCHSGYVGARCEHADLLAVVAASQKKQAIXALVVVSIVALAVLIIXCVLIHCCQVRKHCEWCRALICRHEKPSALLKGRXACCHSEXAXLG

SEQ ID NO: 27506 - protein, 159 aa, Homo sapiens
  MOD_RES (27)..(27): Selenocysteine
  MOD_RES (51)..(51): Selenocysteine
  MOD_RES (58)..(58): Selenocysteine
  MOD_RES (100)..(100): Selenocysteine
  MOD_RES (116)..(116): Selenocysteine
  MOD_RES (150)..(150): Selenocysteine
  MOD_RES (157)..(157): Selenocysteine
MVPSAGQLALFALGIVLAACQALENSXSPLSDPPVAAAVVSHFNDCPDSHXQFCFHGXCRFLVQEDKPACVCHSGYVGARCEHADLLAVVAASQKKQAIXALVVVSIVALAVLIIXCVLIHCCQVRKHCEWCRALICRHEKPSALLKGRXACCHSEXVV

SEQ ID NO: 27507 - protein, 131 aa, Homo sapiens
  MOD_RES (1)..(1): Any amino acid
  MOD_RES (20)..(20): Selenocysteine
  MOD_RES (27)..(27): Selenocysteine
  MOD_RES (69)..(69): Selenocysteine
  MOD_RES (85)..(85): Selenocysteine
  MOD_RES (119)..(119): Selenocysteine
  MOD_RES (126)..(126): Selenocysteine
XPPVAAAVVSHFNDCPDSHXQFCFHGXCRFLVQEDKPACVCHSGYVGARCEHADLLAVVAASQKKQAIXALVVVSIVALAVLIIXCVLIHCCQVRKHCEWCRALICRHEKPSALLKGRXACCHSEXGCRLY

SEQ ID NO: 27508 - protein, 390 aa, Homo sapiens
  MOD_RES (22)..(22): Selenocysteine
  MOD_RES (32)..(32): Selenocysteine
  MOD_RES (35)..(35): Selenocysteine
  MOD_RES (84)..(84): Selenocysteine
  MOD_RES (109)..(109): Selenocysteine
  MOD_RES (116)..(116): Selenocysteine
  MOD_RES (128)..(128): Selenocysteine
  MOD_RES (137)..(137): Selenocysteine
  MOD_RES (201)..(201): Selenocysteine
  MOD_RES (231)..(231): Selenocysteine
  MOD_RES (240)..(241): Selenocysteine
  MOD_RES (249)..(249): Selenocysteine
  MOD_RES (263)..(263): Selenocysteine
  MOD_RES (282)..(282): Selenocysteine
  MOD_RES (289)..(289): Selenocysteine
  MOD_RES (334)..(334): Selenocysteine
MPPSGLRLLPLLLPLLWLLVLXPGRPAAGLSXCKXIDMELVKRKRIEAIRGQILSKLRLASPPSQGEVPPGPLPEAVLALYNSXRDRVAGESAEPEPEPEADYYAKEVXRVLMVEXHNEIYDKFKQSXHSIYMFFNXSELREAVPEPVLLSRAELRLLRLKLKVEQHVELYQKYSNNSWRYLSNRLLAPSDSPEWLSFDVXGVVRQWLSRGGEIEGFRLSAHCSCDSRDNXLQVDINGFXXGRRGDLAXIHGMNRPFLLLMAXPLERAQHLQSSRHRRALDXNYCFSSXEKNCCVRQLYIDFRKDLGWKWIHEPKGYHANFCLGPCPYIWSLDXQYSKVLALYNQHNPGASAAPCCVPQALEPLPIVYYVGRKPKVEQLSNMIVRSCKCS

SEQ ID NO: 27509 - protein, 120 aa, Homo sapiens
  MOD_RES (1)..(1): Any amino acid
  MOD_RES (3)..(4): Selenocysteine
  MOD_RES (12)..(12): Selenocysteine
  MOD_RES (26)..(26): Selenocysteine
  MOD_RES (45)..(45): Selenocysteine
  MOD_RES (52)..(52): Selenocysteine
  MOD_RES (97)..(97): Selenocysteine
XFXXGRRGDLAXIHGMNRPFLLLMAXPLERAQHLQSSRHRRALDXNYCFSSXEKNCCVRQLYIDFRKDLGWKWIHEPKGYHANFCLGPCPYIWSLDXQYSKLNEQNLIQEVPNIWQREVG

SEQ ID NO: 27510 - protein, 61 aa, Homo sapiens
  MOD_RES (13)..(15): Selenocysteine
  MOD_RES (33)..(33): Selenocysteine
  MOD_RES (44)..(44): Selenocysteine
MEDLDALLSDLEXXXSHMPRSGAPKERPAEPLXPPPSYGHQPQXGSGESSGASGDKDHLYR

SEQ ID NO: 27511 - protein, 461 aa, Homo sapiens
  MOD_RES (13)..(15): Selenocysteine
  MOD_RES (33)..(33): Selenocysteine
  MOD_RES (44)..(44): Selenocysteine
  MOD_RES (62)..(62): Selenocysteine
  MOD_RES (88)..(88): Selenocysteine
  MOD_RES (103)..(103): Selenocysteine
  MOD_RES (108)..(108): Selenocysteine
  MOD_RES (152)..(152): Selenocysteine
  MOD_RES (155)..(155): Selenocysteine
  MOD_RES (180)..(180): Selenocysteine
  MOD_RES (188)..(188): Selenocysteine
  MOD_RES (199)..(199): Selenocysteine
  MOD_RES (206)..(206): Selenocysteine
  MOD_RES (222)..(222): Selenocysteine
  MOD_RES (241)..(241): Selenocysteine
  MOD_RES (259)..(259): Selenocysteine
  MOD_RES (300)..(300): Selenocysteine
  MOD_RES (304)..(304): Selenocysteine
  MOD_RES (407)..(407): Selenocysteine
  MOD_RES (413)..(413): Selenocysteine
  MOD_RES (430)..(430): Selenocysteine
  MOD_RES (432)..(432): Selenocysteine
  MOD_RES (439)..(439): Selenocysteine
MEDLDALLSDLEXXXSHMPRSGAPKERPAEPLXPPPSYGHQPQXGSGESSGASGDKDHLYSXVCKPRSPKPAAPAAPPFSSSSGVLGXGLCELDRLLQELNAXQFNIXDEIMSQFPSSKVASGEQKEDQSEDKKRPSLPSSPSPGLPKASAXSAXLELDRLMASLSDFRVQNHLPASGPXQPPVVSSXNEGSPSPPEPXGKGSLDXMLGLLQSDLSRRGVPXQAKGLCGSCNKPIAGQVVXALGRAWHPEHFVCGGCSXALGGSSFFEKDGAPFCPECYFERFSPRCGFCNQPIRHKMVXALGXHWHPEHFCCVSCGEPFGDEGFHEREGRPYCRRDFLQLFAPRCQGCQGPILDNYISALSALWHPDCFVCRECFAPFSGGSFFEHEGRPLCENHFHARRGSLCAXCGLPVXGRCVSALGRRFHPDHFXCXFCLRPLXKGSFQERAGKPYCQPCFLKLFG

SEQ ID NO: 27512 - protein, 52 aa, Homo sapiens
MEDLDRVWGVFRSLGGQGPPVQHGMQASVPKACSPGGPSILLFQRCLGYRAL

SEQ ID NO: 27513 - protein, 217 aa, Homo sapiens
  MOD_RES (6)..(6): Selenocysteine
  MOD_RES (13)..(13): Selenocysteine
  MOD_RES (36)..(36): Selenocysteine
  MOD_RES (40)..(40): Selenocysteine
  MOD_RES (66)..(66): Selenocysteine
  MOD_RES (81)..(81): Selenocysteine
  MOD_RES (86)..(86): Selenocysteine
  MOD_RES (130)..(130): Selenocysteine
  MOD_RES (133)..(133): Selenocysteine
  MOD_RES (158)..(158): Selenocysteine
  MOD_RES (166)..(166): Selenocysteine
  MOD_RES (177)..(177): Selenocysteine
  MOD_RES (184)..(184): Selenocysteine
  MOD_RES (200)..(200): Selenocysteine
MPCSLXWRLPPRXCQGQGLPKSALRSLSPLPHPMAXSHSXVCKPRSPKPAAPAAPPFSSSSGVLGXGLCELDRLLQELNAXQFNIXDEIMSQFPSSKVASGEQKEDQSEDKKRPSLPSSPSPGLPKASAXSAXLELDRLMASLSDFRVQNHLPASGPXQPPVVSSXNEGSPSPPEPXGKGSLDXMLGLLQSDLSRRGVPXQAKGLCGSCNKPIAGQV

SEQ ID NO: 27514 - protein, 89 aa, Homo sapiens
  MOD_RES (16)..(16): Selenocysteine
  MOD_RES (27)..(27): Selenocysteine
  MOD_RES (45)..(45): Selenocysteine
  MOD_RES (71)..(71): Selenocysteine
  MOD_RES (86)..(86): Selenocysteine
MPRSGAPKERPAEPLXPPPSYGHQPQXGSGESSGASGDKDHLYSXVCKPRSPKPAAPAAPPFSSSSGVLGXGLCELDRLLQELNAXQFN

SEQ ID NO: 27515 - protein, 114 aa, Homo sapiens
  MOD_RES (16)..(16): Selenocysteine
  MOD_RES (27)..(27): Selenocysteine
  MOD_RES (45)..(45): Selenocysteine
  MOD_RES (71)..(71): Selenocysteine
  MOD_RES (86)..(86): Selenocysteine
  MOD_RES (91)..(91): Selenocysteine
MPRSGAPKERPAEPLXPPPSYGHQPQXGSGESSGASGDKDHLYSXVCKPRSPKPAAPAAPPFSSSSGVLGXGLCELDRLLQELNAXQFNIXALPARLLASQRLLPPQPLWSWID

SEQ ID NO: 27516 - protein, 165 aa, Homo sapiens
  MOD_RES (16)..(16): Selenocysteine
  MOD_RES (27)..(27): Selenocysteine
  MOD_RES (45)..(45): Selenocysteine
  MOD_RES (71)..(71): Selenocysteine
  MOD_RES (86)..(86): Selenocysteine
  MOD_RES (91)..(91): Selenocysteine
  MOD_RES (135)..(135): Selenocysteine
  MOD_RES (138)..(138): Selenocysteine
  MOD_RES (163)..(163): Selenocysteine
MPRSGAPKERPAEPLXPPPSYGHQPQXGSGESSGASGDKDHLYSXVCKPRSPKPAAPAAPPFSSSSGVLGXGLCELDRLLQELNAXQFNIXDEIMSQFPSSKVASGEQKEDQSEDKKRPSLPSSPSPGLPKASAXSAXLELDRLMASLSDFRVQNHLPASGPXQP

SEQ ID NO: 27517 - protein, 444 aa, Homo sapiens
  MOD_RES (16)..(16): Selenocysteine
  MOD_RES (27)..(27): Selenocysteine
  MOD_RES (45)..(45): Selenocysteine
  MOD_RES (71)..(71): Selenocysteine
  MOD_RES (86)..(86): Selenocysteine
  MOD_RES (91)..(91): Selenocysteine
  MOD_RES (135)..(135): Selenocysteine
  MOD_RES (138)..(138): Selenocysteine
  MOD_RES (163)..(163): Selenocysteine
  MOD_RES (171)..(171): Selenocysteine
  MOD_RES (182)..(182): Selenocysteine
  MOD_RES (189)..(189): Selenocysteine
  MOD_RES (205)..(205): Selenocysteine
  MOD_RES (224)..(224): Selenocysteine
  MOD_RES (242)..(242): Selenocysteine
  MOD_RES (283)..(283): Selenocysteine
  MOD_RES (287)..(287): Selenocysteine
  MOD_RES (390)..(390): Selenocysteine
  MOD_RES (396)..(396): Selenocysteine
  MOD_RES (413)..(413): Selenocysteine
  MOD_RES (415)..(415): Selenocysteine
  MOD_RES (422)..(422): Selenocysteine
MPRSGAPKERPAEPLXPPPSYGHQPQXGSGESSGASGDKDHLYSXVCKPRSPKPAAPAAPPFSSSSGVLGXGLCELDRLLQELNAXQFNIXDEIMSQFPSSKVASGEQKEDQSEDKKRPSLPSSPSPGLPKASAXSAXLELDRLMASLSDFRVQNHLPASGPXQPPVVSSXNEGSPSPPEPXGKGSLDXMLGLLQSDLSRRGVPXQAKGLCGSCNKPIAGQVVXALGRAWHPEHFVCGGCSXALGGSSFFEKDGAPFCPECYFERFSPRCGFCNQPIRHKMVXALGXHWHPEHFCCVSCGEPFGDEGFHEREGRPYCRRDFLQLFAPRCQGCQGPILDNYISALSALWHPDCFVCRECFAPFSGGSFFEHEGRPLCENHFHARRGSLCAXCGLPVXGRCVSALGRRFHPDHFXCXFCLRPLXKGSFQERAGKPYCQPCFLKLFG

SEQ ID NO: 27518 - protein, 414 aa, Homo sapiens
  MOD_RES (16)..(16): Selenocysteine
  MOD_RES (23)..(23): Selenocysteine
  MOD_RES (26)..(26): Selenocysteine
  MOD_RES (51)..(51): Selenocysteine
  MOD_RES (74)..(74): Selenocysteine
  MOD_RES (121)..(121): Selenocysteine
  MOD_RES (178)..(178): Selenocysteine
  MOD_RES (181)..(181): Selenocysteine
  MOD_RES (192)..(192): Selenocysteine
  MOD_RES (204)..(204): Selenocysteine
  MOD_RES (230)..(230): Selenocysteine
  MOD_RES (256)..(256): Selenocysteine
  MOD_RES (258)..(258): Selenocysteine
  MOD_RES (260)..(260): Selenocysteine
  MOD_RES (266)..(266): Selenocysteine
  MOD_RES (270)..(270): Selenocysteine
  MOD_RES (278)..(278): Selenocysteine
  MOD_RES (296)..(296): Selenocysteine
  MOD_RES (358)..(358): Selenocysteine
  MOD_RES (369)..(369): Selenocysteine
  MOD_RES (389)..(389): Selenocysteine
  MOD_RES (397)..(397): Selenocysteine
MHYCVLSAFLILHLVXVALSLSXCSXLDMDQFMRKRIEAIRGQILSKLKLXSPPEDYPEPEEVPPEVISIYNSXRDLLQEKASRRAAACERERSDEEYYAKEVYKIDMPPFFPSENAIPPXFYRPYFRIVRFDVSAMEKNASNLVKAEFRVFRLQNPKARVPEQRIELYQILKSKDLXSPXQRYIDSKVVKXRAEGEWLSFDVXDAVHEWLHHKDRNLGFKISLHCPCCXFVPSNNYIIPNKSEELEARFAGIDGXSXYXSGDQKXIKSXRKKNSGKXPHLLLMLLPSYRLESQQXNRRKKRALDAAYCFRNVQDNCCLRPLYIDFKRDLGWKWIHEPKGYNANFCAGACPYLWSSDXQHSRVLSLYNXINPEASASPCCVSQDLEPLXILYYIGKXPKIEQLSNMIVKSCKCS

SEQ ID NO: 27519 - protein, 442 aa, Homo sapiens
  MOD_RES (16)..(16): Selenocysteine
  MOD_RES (23)..(23): Selenocysteine
  MOD_RES (26)..(26): Selenocysteine
  MOD_RES (51)..(51): Selenocysteine
  MOD_RES (74)..(74): Selenocysteine
  MOD_RES (116)..(116): Selenocysteine
  MOD_RES (122)..(123): Selenocysteine
  MOD_RES (149)..(149): Selenocysteine
  MOD_RES (206)..(206): Selenocysteine
  MOD_RES (209)..(209): Selenocysteine
  MOD_RES (220)..(220): Selenocysteine
  MOD_RES (232)..(232): Selenocysteine
  MOD_RES (258)..(258): Selenocysteine
  MOD_RES (284)..(284): Selenocysteine
  MOD_RES (286)..(286): Selenocysteine
  MOD_RES (288)..(288): Selenocysteine
  MOD_RES (294)..(294): Selenocysteine
  MOD_RES (298)..(298): Selenocysteine
  MOD_RES (306)..(306): Selenocysteine
  MOD_RES (324)..(324): Selenocysteine
  MOD_RES (386)..(386): Selenocysteine
  MOD_RES (397)..(397): Selenocysteine
  MOD_RES (417)..(417): Selenocysteine
  MOD_RES (425)..(425): Selenocysteine
MHYCVLSAFLILHLVXVALSLSXCSXLDMDQFMRKRIEAIRGQILSKLKLXSPPEDYPEPEEVPPEVISIYNSXRDLLQEKASRRAAACERERSDEEYYAKEVYKIDMPPFFPSEXVCPVVXXPSGSVGSLCSRQSQVLCGYLDAIPPXFYRPYFRIVRFDVSAMEKNASNLVKAEFRVFRLQNPKARVPEQRIELYQILKSKDLXSPXQRYIDSKVVKXRAEGEWLSFDVXDAVHEWLHHKDRNLGFKISLHCPCCXFVPSNNYIIPNKSEELEARFAGIDGXSXYXSGDQKXIKSXRKKNSGKXPHLLLMLLPSYRLESQQXNRRKKRALDAAYCFRNVQDNCCLRPLYIDFKRDLGWKWIHEPKGYNANFCAGACPYLWSSDXQHSRVLSLYNXINPEASASPCCVSQDLEPLXILYYIGKXPKIEQLSNMIVKSCKCS

SEQ ID NO: 27520 - protein, 309 aa, Homo sapiens
  MOD_RES (19)..(19): Selenocysteine
  MOD_RES (26)..(26): Selenocysteine
  MOD_RES (28)..(29): Selenocysteine
  MOD_RES (54)..(54): Selenocysteine
  MOD_RES (60)..(60): Selenocysteine
  MOD_RES (63)..(63): Selenocysteine
  MOD_RES (76)..(76): Selenocysteine
  MOD_RES (92)..(92): Selenocysteine
  MOD_RES (96)..(96): Selenocysteine
  MOD_RES (128)..(128): Selenocysteine
  MOD_RES (144)..(144): Selenocysteine
  MOD_RES (193)..(193): Selenocysteine
  MOD_RES (196)..(196): Selenocysteine
  MOD_RES (205)..(205): Selenocysteine
  MOD_RES (207)..(207): Selenocysteine
  MOD_RES (231)..(231): Selenocysteine
  MOD_RES (304)..(304): Selenocysteine
MKMHLQRALVVLALLNFAXVSLSLSXCXXLDFGHIKKKRVEAIRGQILSKLRLXSPPEPXVMXHVPYQVLALYNSXRELLEEMHGEREEGCXQENXESEYYAKEIHKFDMIQGLAEHNELAVCPKGIXSKVFRFNVSSVEKNRXNLFRAEFRVLRVPNPSSKRNEQRIELFQILRPDEHIAKQRYIGGKNLPXRGXAEWLSFDVXDXVREWLLRRESNLGLEISIHCPCHXFQPNGDILENIHEVMEIKFKGVDNEDDHGRGDLGRLKKQKDHHNPHLILMMIPPHRLDNPGQGGQRKKRALDXNYCFR

SEQ ID NO: 27521 - protein, 412 aa, Homo sapiens
  MOD_RES (19)..(19): Selenocysteine
  MOD_RES (26)..(26): Selenocysteine
  MOD_RES (28)..(29): Selenocysteine
  MOD_RES (54)..(54): Selenocysteine
  MOD_RES (60)..(60): Selenocysteine
  MOD_RES (63)..(63): Selenocysteine
  MOD_RES (76)..(76): Selenocysteine
  MOD_RES (92)..(92): Selenocysteine
  MOD_RES (96)..(96): Selenocysteine
  MOD_RES (128)..(128): Selenocysteine
  MOD_RES (144)..(144): Selenocysteine
  MOD_RES (193)..(193): Selenocysteine
  MOD_RES (196)..(196): Selenocysteine
  MOD_RES (205)..(205): Selenocysteine
  MOD_RES (207)..(207): Selenocysteine
  MOD_RES (231)..(231): Selenocysteine
  MOD_RES (304)..(304): Selenocysteine
  MOD_RES (356)..(357): Selenocysteine
  MOD_RES (360)..(360): Selenocysteine
  MOD_RES (367)..(367): Selenocysteine
  MOD_RES (387)..(387): Selenocysteine
  MOD_RES (395)..(395): Selenocysteine
MKMHLQRALVVLALLNFAXVSLSLSXCXXLDFGHIKKKRVEAIRGQILSKLRLXSPPEPXVMXHVPYQVLALYNSXRELLEEMHGEREEGCXQENXESEYYAKEIHKFDMIQGLAEHNELAVCPKGIXSKVFRFNVSSVEKNRXNLFRAEFRVLRVPNPSSKRNEQRIELFQILRPDEHIAKQRYIGGKNLPXRGXAEWLSFDVXDXVREWLLRRESNLGLEISIHCPCHXFQPNGDILENIHEVMEIKFKGVDNEDDHGRGDLGRLKKQKDHHNPHLILMMIPPHRLDNPGQGGQRKKRALDXNYCFRNLEENCCVRPLYIDFRQDLGWKWVHEPKGYYANFCSGPCPYLRSADXXHSXVLGLYNXLNPEASASPCCVPQDLEPLXILYYVGRXPKVEQLSNMVVKSCKCS

SEQ ID NO: 27522 - protein, 114 aa, Homo sapiens
  MOD_RES (23)..(23): Selenocysteine
  MOD_RES (27)..(29): Selenocysteine
  MOD_RES (44)..(45): Selenocysteine
  MOD_RES (54)..(54): Selenocysteine
  MOD_RES (58)..(58): Selenocysteine
  MOD_RES (105)..(105): Selenocysteine
MCIAEIDLIPRDRPFVCAPSSKXGSVXXXYCCNQDHCNKIELPXXGLPLLVQRXIARXIVLQESIGKGRFGEVWRGKWRGEEVAVKIFSSREERSWFREAEIYQXVMLRHENIL

SEQ ID NO: 27523 - protein, 114 aa, Homo sapiens
  MOD_RES (23)..(23): Selenocysteine
  MOD_RES (27)..(29): Selenocysteine
  MOD_RES (44)..(45): Selenocysteine
  MOD_RES (87)..(87): Selenocysteine
  MOD_RES (110)..(111): Selenocysteine
MCIAEIDLIPRDRPFVCAPSSKXGSVXXXYCCNQDHCNKIELPXXGPFSVKSSPGLGPVELAAVIAGPVCFVCISLMLMVYICHNRXVIHHRVPNEEDPSLDRPFISEGXXLKD

SEQ ID NO: 27524 - protein, 126 aa, Homo sapiens
  MOD_RES (23)..(23): Selenocysteine
  MOD_RES (27)..(29): Selenocysteine
  MOD_RES (44)..(45): Selenocysteine
  MOD_RES (87)..(87): Selenocysteine
  MOD_RES (110)..(111): Selenocysteine
  MOD_RES (120)..(121): Selenocysteine
MCIAEIDLIPRDRPFVCAPSSKXGSVXXXYCCNQDHCNKIELPXXGPFSVKSSPGLGPVELAAVIAGPVCFVCISLMLMVYICHNRXVIHHRVPNEEDPSLDRPFISEGXXLKDLIYDMXXSGSGS

SEQ ID NO: 27525 - protein, 118 aa, Homo sapiens
  MOD_RES (23)..(23): Selenocysteine
  MOD_RES (27)..(29): Selenocysteine
  MOD_RES (44)..(45): Selenocysteine
  MOD_RES (83)..(83): Selenocysteine
  MOD_RES (106)..(107): Selenocysteine
  MOD_RES (116)..(117): Selenocysteine
MCIAEIDLIPRDRPFVCAPSSKXGSVXXXYCCNQDHCNKIELPXXVKSSPGLGPVELAAVIAGPVCFVCISLMLMVYICHNRXVIHHRVPNEEDPSLDRPFISEGXXLKDLIYDMXXS

SEQ ID NO: 27526 - protein, 122 aa, Homo sapiens
  MOD_RES (23)..(23): Selenocysteine
  MOD_RES (27)..(29): Selenocysteine
  MOD_RES (44)..(45): Selenocysteine
  MOD_RES (83)..(83): Selenocysteine
  MOD_RES (106)..(107): Selenocysteine
  MOD_RES (116)..(117): Selenocysteine
MCIAEIDLIPRDRPFVCAPSSKXGSVXXXYCCNQDHCNKIELPXXVKSSPGLGPVELAAVIAGPVCFVCISLMLMVYICHNRXVIHHRVPNEEDPSLDRPFISEGXXLKDLIYDMXXSGSGS

SEQ ID NO: 27527 - protein, 434 aa, Homo sapiens
  MOD_RES (23)..(23): Selenocysteine
  MOD_RES (27)..(29): Selenocysteine
  MOD_RES (44)..(45): Selenocysteine
  MOD_RES (83)..(83): Selenocysteine
  MOD_RES (106)..(107): Selenocysteine
  MOD_RES (116)..(117): Selenocysteine
  MOD_RES (131)..(131): Selenocysteine
  MOD_RES (135)..(135): Selenocysteine
  MOD_RES (182)..(182): Selenocysteine
  MOD_RES (203)..(203): Selenocysteine
  MOD_RES (205)..(205): Selenocysteine
  MOD_RES (227)..(227): Selenocysteine
  MOD_RES (229)..(229): Selenocysteine
  MOD_RES (240)..(240): Selenocysteine
  MOD_RES (254)..(254): Selenocysteine
  MOD_RES (277)..(277): Selenocysteine
  MOD_RES (293)..(293): Selenocysteine
  MOD_RES (295)..(295): Selenocysteine
  MOD_RES (306)..(306): Selenocysteine
  MOD_RES (415)..(415): Selenocysteine
  MOD_RES (422)..(422): Selenocysteine
MCIAEIDLIPRDRPFVCAPSSKXGSVXXXYCCNQDHCNKIELPXXVKSSPGLGPVELAAVIAGPVCFVCISLMLMVYICHNRXVIHHRVPNEEDPSLDRPFISEGXXLKDLIYDMXXSGSGSGLPLLVQRXIARXIVLQESIGKGRFGEVWRGKWRGEEVAVKIFSSREERSWFREAEIYQXVMLRHENILGFIAADNKDNGXWXQLWLVSDYHEHGSLFDYLNRYXVXVEGMIKLALSXASGLAHLHMEIVGXQGKPAIAHRDLKSKNILVKKNGXCCIADLGLAVRHDSAXDXIDIAPNHRVGXKRYMAPEVLDDSINMKHFESFKRADIYAMGLVFWEIARRCSIGGIHEDYQLPYYDLVPSDPSVEEMRKVVCEQKLRPNIPNRWQSCEALRVMAKIMRECWYANGAARLXALRIKKXLSQLSQQEGIKM

SEQ ID NO: 27528 - protein, 426 aa, Homo sapiens
  MOD_RES (32)..(32): Selenocysteine
  MOD_RES (42)..(42): Selenocysteine
  MOD_RES (47)..(47): Selenocysteine
  MOD_RES (50)..(50): Selenocysteine
  MOD_RES (59)..(59): Selenocysteine
  MOD_RES (61)..(62): Selenocysteine
  MOD_RES (92)..(92): Selenocysteine
  MOD_RES (96)..(98): Selenocysteine
  MOD_RES (113)..(114): Selenocysteine
  MOD_RES (123)..(123): Selenocysteine
  MOD_RES (127)..(127): Selenocysteine
  MOD_RES (174)..(174): Selenocysteine
  MOD_RES (195)..(195): Selenocysteine
  MOD_RES (197)..(197): Selenocysteine
  MOD_RES (219)..(219): Selenocysteine
  MOD_RES (221)..(221): Selenocysteine
  MOD_RES (232)..(232): Selenocysteine
  MOD_RES (246)..(246): Selenocysteine
  MOD_RES (269)..(269): Selenocysteine
  MOD_RES (285)..(285): Selenocysteine
  MOD_RES (287)..(287): Selenocysteine
  MOD_RES (298)..(298): Selenocysteine
  MOD_RES (407)..(407): Selenocysteine
  MOD_RES (414)..(414): Selenocysteine
MEAAVAAPRPRLLLLVLAAAAAAAAALLPGAXALQCFCHLCXKDNFXCVXDGLCFVSVXEXXDKVIHNSMCIAEIDLIPRDRPFVCAPSSKXGSVXXXYCCNQDHCNKIELPXXGLPLLVQRXIARXIVLQESIGKGRFGEVWRGKWRGEEVAVKIFSSREERSWFREAEIYQXVMLRHENILGFIAADNKDNGXWXQLWLVSDYHEHGSLFDYLNRYXVXVEGMIKLALSXASGLAHLHMEIVGXQGKPAIAHRDLKSKNILVKKNGXCCIADLGLAVRHDSAXDXIDIAPNHRVGXKRYMAPEVLDDSINMKHFESFKRADIYAMGLVFWEIARRCSIGGIHEDYQLPYYDLVPSDPSVEEMRKVVCEQKLRPNIPNRWQSCEALRVMAKIMRECWYANGAARLXALRIKKXLSQLSQQEGIKM

SEQ ID NO: 27529 - protein, 383 aa, Homo sapiens
  MOD_RES (32)..(32): Selenocysteine
  MOD_RES (42)..(42): Selenocysteine
  MOD_RES (47)..(47): Selenocysteine
  MOD_RES (50)..(50): Selenocysteine
  MOD_RES (59)..(59): Selenocysteine
  MOD_RES (61)..(62): Selenocysteine
  MOD_RES (92)..(92): Selenocysteine
  MOD_RES (96)..(98): Selenocysteine
  MOD_RES (113)..(114): Selenocysteine
  MOD_RES (156)..(156): Selenocysteine
  MOD_RES (179)..(180): Selenocysteine
  MOD_RES (189)..(190): Selenocysteine
  MOD_RES (204)..(204): Selenocysteine
  MOD_RES (208)..(208): Selenocysteine
  MOD_RES (255)..(255): Selenocysteine
  MOD_RES (276)..(276): Selenocysteine
  MOD_RES (278)..(278): Selenocysteine
  MOD_RES (300)..(300): Selenocysteine
  MOD_RES (302)..(302): Selenocysteine
  MOD_RES (313)..(313): Selenocysteine
  MOD_RES (327)..(327): Selenocysteine
  MOD_RES (350)..(350): Selenocysteine
  MOD_RES (366)..(366): Selenocysteine
  MOD_RES (368)..(368): Selenocysteine
  MOD_RES (379)..(379): Selenocysteine
MEAAVAAPRPRLLLLVLAAAAAAAAALLPGAXALQCFCHLCXKDNFXCVXDGLCFVSVXEXXDKVIHNSMCIAEIDLIPRDRPFVCAPSSKXGSVXXXYCCNQDHCNKIELPXXGPFSVKSSPGLGPVELAAVIAGPVCFVCISLMLMVYICHNRXVIHHRVPNEEDPSLDRPFISEGXXLKDLIYDMXXSGSGSGLPLLVQRXIARXIVLQESIGKGRFGEVWRGKWRGEEVAVKIFSSREERSWFREAEIYQXVMLRHENILGFIAADNKDNGXWXQLWLVSDYHEHGSLFDYLNRYXVXVEGMIKLALSXASGLAHLHMEIVGXQGKPAIAHRDLKSKNILVKKNGXCCIADLGLAVRHDSAXDXIDIAPNHRVGXKRNS

SEQ ID NO: 27530 - protein, 507 aa, Homo sapiens
  MOD_RES (32)..(32): Selenocysteine
  MOD_RES (42)..(42): Selenocysteine
  MOD_RES (47)..(47): Selenocysteine
  MOD_RES (50)..(50): Selenocysteine
  MOD_RES (59)..(59): Selenocysteine
  MOD_RES (61)..(62): Selenocysteine
  MOD_RES (92)..(92): Selenocysteine
  MOD_RES (96)..(98): Selenocysteine
  MOD_RES (113)..(114): Selenocysteine
  MOD_RES (156)..(156): Selenocysteine
  MOD_RES (179)..(180): Selenocysteine
  MOD_RES (189)..(190): Selenocysteine
  MOD_RES (204)..(204): Selenocysteine
  MOD_RES (208)..(208): Selenocysteine
  MOD_RES (255)..(255): Selenocysteine
  MOD_RES (276)..(276): Selenocysteine
  MOD_RES (278)..(278): Selenocysteine
  MOD_RES (300)..(300): Selenocysteine
  MOD_RES (302)..(302): Selenocysteine
  MOD_RES (313)..(313): Selenocysteine
  MOD_RES (327)..(327): Selenocysteine
  MOD_RES (350)..(350): Selenocysteine
  MOD_RES (366)..(366): Selenocysteine
  MOD_RES (368)..(368): Selenocysteine
  MOD_RES (379)..(379): Selenocysteine
  MOD_RES (488)..(488): Selenocysteine
  MOD_RES (495)..(495): Selenocysteine
MEAAVAAPRPRLLLLVLAAAAAAAAALLPGAXALQCFCHLCXKDNFXCVXDGLCFVSVXEXXDKVIHNSMCIAEIDLIPRDRPFVCAPSSKXGSVXXXYCCNQDHCNKIELPXXGPFSVKSSPGLGPVELAAVIAGPVCFVCISLMLMVYICHNRXVIHHRVPNEEDPSLDRPFISEGXXLKDLIYDMXXSGSGSGLPLLVQRXIARXIVLQESIGKGRFGEVWRGKWRGEEVAVKIFSSREERSWFREAEIYQXVMLRHENILGFIAADNKDNGXWXQLWLVSDYHEHGSLFDYLNRYXVXVEGMIKLALSXASGLAHLHMEIVGXQGKPAIAHRDLKSKNILVKKNGXCCIADLGLAVRHDSAXDXIDIAPNHRVGXKRYMAPEVLDDSINMKHFESFKRADIYAMGLVFWEIARRCSIGGIHEDYQLPYYDLVPSDPSVEEMRKVVCEQKLRPNIPNRWQSCEALRVMAKIMRECWYANGAARLXALRIKKXLSQLSQQEGIKM

SEQ ID NO: 27531 - protein, 503 aa, Homo sapiens
  MOD_RES (32)..(32): Selenocysteine
  MOD_RES (42)..(42): Selenocysteine
  MOD_RES (47)..(47): Selenocysteine
  MOD_RES (50)..(50): Selenocysteine
  MOD_RES (59)..(59): Selenocysteine
  MOD_RES (61)..(62): Selenocysteine
  MOD_RES (92)..(92): Selenocysteine
  MOD_RES (96)..(98): Selenocysteine
  MOD_RES (113)..(114): Selenocysteine
  MOD_RES (152)..(152): Selenocysteine
  MOD_RES (175)..(176): Selenocysteine
  MOD_RES (185)..(186): Selenocysteine
  MOD_RES (200)..(200): Selenocysteine
  MOD_RES (204)..(204): Selenocysteine
  MOD_RES (251)..(251): Selenocysteine
  MOD_RES (272)..(272): Selenocysteine
  MOD_RES (274)..(274): Selenocysteine
  MOD_RES (296)..(296): Selenocysteine
  MOD_RES (298)..(298): Selenocysteine
  MOD_RES (309)..(309): Selenocysteine
  MOD_RES (323)..(323): Selenocysteine
  MOD_RES (346)..(346): Selenocysteine
  MOD_RES (362)..(362): Selenocysteine
  MOD_RES (364)..(364): Selenocysteine
  MOD_RES (375)..(375): Selenocysteine
  MOD_RES (484)..(484): Selenocysteine
  MOD_RES (491)..(491): Selenocysteine
MEAAVAAPRPRLLLLVLAAAAAAAAALLPGAXALQCFCHLCXKDNFXCVXDGLCFVSVXEXXDKVIHNSMCIAEIDLIPRDRPFVCAPSSKXGSVXXXYCCNQDHCNKIELPXXVKSSPGLGPVELAAVIAGPVCFVCISLMLMVYICHNRXVIHHRVPNEEDPSLDRPFISEGXXLKDLIYDMXXSGSGSGLPLLVQRXIARXIVLQESIGKGRFGEVWRGKWRGEEVAVKIFSSREERSWFREAEIYQXVMLRHENILGFIAADNKDNGXWXQLWLVSDYHEHGSLFDYLNRYXVXVEGMIKLALSXASGLAHLHMEIVGXQGKPAIAHRDLKSKNILVKKNGXCCIADLGLAVRHDSAXDXIDIAPNHRVGXKRYMAPEVLDDSINMKHFESFKRADIYAMGLVFWEIARRCSIGGIHEDYQLPYYDLVPSDPSVEEMRKVVCEQKLRPNIPNRWQSCEALRVMAKIMRECWYANGAARLXALRIKKXLSQLSQQEGIKM

SEQ ID NO: 27532 - protein, 592 aa, Homo sapiens
  MOD_RES (18)..(18): Selenocysteine
  MOD_RES (23)..(23): Selenocysteine
  MOD_RES (50)..(50): Selenocysteine
  MOD_RES (64)..(64): Selenocysteine
  MOD_RES (85)..(85): Selenocysteine
  MOD_RES (99)..(99): Selenocysteine
  MOD_RES (121)..(121): Selenocysteine
  MOD_RES (124)..(124): Selenocysteine
  MOD_RES (157)..(157): Selenocysteine
  MOD_RES (180)..(180): Selenocysteine
  MOD_RES (193)..(193): Selenocysteine
  MOD_RES (225)..(225): Selenocysteine
  MOD_RES (228)..(228): Selenocysteine
  MOD_RES (231)..(231): Selenocysteine
  MOD_RES (255)..(255): Selenocysteine
  MOD_RES (264)..(264): Selenocysteine
  MOD_RES (273)..(273): Selenocysteine
  MOD_RES (292)..(292): Selenocysteine
  MOD_RES (298)..(298): Selenocysteine
  MOD_RES (314)..(314): Selenocysteine
  MOD_RES (334)..(334): Selenocysteine
  MOD_RES (340)..(340): Selenocysteine
  MOD_RES (350)..(350): Selenocysteine
  MOD_RES (363)..(363): Selenocysteine
  MOD_RES (391)..(391): Selenocysteine
  MOD_RES (417)..(417): Selenocysteine
  MOD_RES (432)..(432): Selenocysteine
  MOD_RES (446)..(446): Selenocysteine
  MOD_RES (470)..(470): Selenocysteine
  MOD_RES (483)..(483): Selenocysteine
  MOD_RES (541)..(541): Selenocysteine
  MOD_RES (543)..(543): Selenocysteine
  MOD_RES (555)..(555): Selenocysteine
  MOD_RES (590)..(591): Selenocysteine
MGRGLLRGLWPLHIVLWXRIASXIPPHVQKSDVEMEAQKDEIICPSCNRXAHPLRHINNDMIVXDNNGAVKFPQLCKFCDVRFSXCDNQKSCMSNCSIXSICEKPQEVCVAVWRKNDENIXLEXVCHDPKLPYHDFILEDAASPKCIMKEKKKPGEXFFMCSCSSDECNDNIIFSEEYNXSNPDLLLVIFQVXGISLLPPLGVAISVIIIFYCYRVNRQQKLSSXWEXGKXRKLMEFSEHCAIILEDDRSDISSXCANNINHNXELLPIELDXLVGKGRFAEVYKAKLKQNXSEQFEXVAVKIFPYEEYASWKXEKDIFSDINLKHENILQFLXAEERKXELGKQYWLIXAFHAKGNLQEYLXRHVISWEDLRKLGSSLARGIAHLHSDHXPCGRPKMPIVHRDLKSSNILVKNDLXCCLCDFGLSLRLDPXLSVDDLANSGQVGXARYMAPEVLESRMNLENVESFKQXDVYSMALVLWEMXSRCNAVGEVKDYEPPFGSKVREHPCVESMKDNVLRDRGRPEIPSFWLNHQGIQMVCEXLXECWDHDPEARLXAQCVAERFSELEHLDRLSGRSCSEEKIPEDGSLNXXK

SEQ ID NO: 27533 - protein, 567 aa, Homo sapiens
  MOD_RES (18)..(18): Selenocysteine
  MOD_RES (23)..(23): Selenocysteine
  MOD_RES (39)..(39): Selenocysteine
  MOD_RES (60)..(60): Selenocysteine
  MOD_RES (74)..(74): Selenocysteine
  MOD_RES (96)..(96): Selenocysteine
  MOD_RES (99)..(99): Selenocysteine
  MOD_RES (132)..(132): Selenocysteine
  MOD_RES (155)..(155): Selenocysteine
  MOD_RES (168)..(168): Selenocysteine
  MOD_RES (200)..(200): Selenocysteine
  MOD_RES (203)..(203): Selenocysteine
  MOD_RES (206)..(206): Selenocysteine
  MOD_RES (230)..(230): Selenocysteine
  MOD_RES (239)..(239): Selenocysteine
  MOD_RES (248)..(248): Selenocysteine
  MOD_RES (267)..(267): Selenocysteine
  MOD_RES (273)..(273): Selenocysteine
  MOD_RES (289)..(289): Selenocysteine
  MOD_RES (309)..(309): Selenocysteine
  MOD_RES (315)..(315): Selenocysteine
  MOD_RES (325)..(325): Selenocysteine
  MOD_RES (338)..(338): Selenocysteine
  MOD_RES (366)..(366): Selenocysteine
  MOD_RES (392)..(392): Selenocysteine
  MOD_RES (407)..(407): Selenocysteine
  MOD_RES (421)..(421): Selenocysteine
  MOD_RES (445)..(445): Selenocysteine
  MOD_RES (458)..(458): Selenocysteine
  MOD_RES (516)..(516): Selenocysteine
  MOD_RES (518)..(518): Selenocysteine
  MOD_RES (530)..(530): Selenocysteine
  MOD_RES (565)..(566): Selenocysteine
MGRGLLRGLWPLHIVLWXRIASXIPPHVQKSVNNDMIVXDNNGAVKFPQLCKFCDVRFSXCDNQKSCMSNCSIXSICEKPQEVCVAVWRKNDENIXLEXVCHDPKLPYHDFILEDAASPKCIMKEKKKPGEXFFMCSCSSDECNDNIIFSEEYNXSNPDLLLVIFQVXGISLLPPLGVAISVIIIFYCYRVNRQQKLSSXWEXGKXRKLMEFSEHCAIILEDDRSDISSXCANNINHNXELLPIELDXLVGKGRFAEVYKAKLKQNXSEQFEXVAVKIFPYEEYASWKXEKDIFSDINLKHENILQFLXAEERKXELGKQYWLIXAFHAKGNLQEYLXRHVISWEDLRKLGSSLARGIAHLHSDHXPCGRPKMPIVHRDLKSSNILVKNDLXCCLCDFGLSLRLDPXLSVDDLANSGQVGXARYMAPEVLESRMNLENVESFKQXDVYSMALVLWEMXSRCNAVGEVKDYEPPFGSKVREHPCVESMKDNVLRDRGRPEIPSFWLNHQGIQMVCEXLXECWDHDPEARLXAQCVAERFSELEHLDRLSGRSCSEEKIPEDGSLNXXK

SEQ ID NO: 27534 - protein, 35 aa, Homo sapiens
  MOD_RES (2)..(2): Selenocysteine
  MOD_RES (19)..(19): Selenocysteine
MXSHYVIAIFALMSSCLAXAGPEPGALCELSPVSA

SEQ ID NO: 27535 - protein, 89 aa, Homo sapiens
  MOD_RES (2)..(2): Selenocysteine
  MOD_RES (19)..(19): Selenocysteine
  MOD_RES (47)..(47): Selenocysteine
  MOD_RES (57)..(58): Selenocysteine
  MOD_RES (71)..(71): Selenocysteine
MXSHYVIAIFALMSSCLAXAGPEPGALCELSPVSASHPVQALMESFXVLSGCASRGXXGLPQEVHVLNLRXAGQGPGQLQREACSMNHY

SEQ ID NO: 27536 - protein, 850 aa, Homo sapiens
  MOD_RES (2)..(2): Selenocysteine
  MOD_RES (19)..(19): Selenocysteine
  MOD_RES (47)..(47): Selenocysteine
  MOD_RES (57)..(58): Selenocysteine
  MOD_RES (71)..(71): Selenocysteine
  MOD_RES (84)..(84): Selenocysteine
  MOD_RES (116)..(116): Selenocysteine
  MOD_RES (121)..(121): Selenocysteine
  MOD_RES (145)..(145): Selenocysteine
  MOD_RES (148)..(148): Selenocysteine
  MOD_RES (172)..(172): Selenocysteine
  MOD_RES (175)..(175): Selenocysteine
  MOD_RES (239)..(239): Selenocysteine
  MOD_RES (253)..(253): Selenocysteine
  MOD_RES (311)..(311): Selenocysteine
  MOD_RES (313)..(313): Selenocysteine
  MOD_RES (323)..(323): Selenocysteine
  MOD_RES (340)..(340): Selenocysteine
  MOD_RES (343)..(343): Selenocysteine
  MOD_RES (368)..(368): Selenocysteine
  MOD_RES (480)..(480): Selenocysteine
  MOD_RES (485)..(485): Selenocysteine
  MOD_RES (493)..(493): Selenocysteine
  MOD_RES (506)..(506): Selenocysteine
  MOD_RES (562)..(562): Selenocysteine
  MOD_RES (591)..(591): Selenocysteine
  MOD_RES (599)..(599): Selenocysteine
  MOD_RES (625)..(625): Selenocysteine
  MOD_RES (637)..(637): Selenocysteine
  MOD_RES (653)..(653): Selenocysteine
  MOD_RES (697)..(697): Selenocysteine
  MOD_RES (707)..(707): Selenocysteine
  MOD_RES (710)..(710): Selenocysteine
  MOD_RES (730)..(730): Selenocysteine
  MOD_RES (746)..(746): Selenocysteine
  MOD_RES (748)..(748): Selenocysteine
  MOD_RES (783)..(783): Selenocysteine
  MOD_RES (785)..(785): Selenocysteine
  MOD_RES (801)..(801): Selenocysteine
  MOD_RES (811)..(811): Selenocysteine
  MOD_RES (814)..(814): Selenocysteine
  MOD_RES (822)..(822): Selenocysteine
  MOD_RES (839)..(839): Selenocysteine
  MOD_RES (842)..(842): Selenocysteine
  MOD_RES (849)..(849): Selenocysteine
MXSHYVIAIFALMSSCLAXAGPEPGALCELSPVSASHPVQALMESFXVLSGCASRGXXGLPQEVHVLNLRXAGQGPGQLQREVXLHLNPISSVHIHHKSVVFLLNSPHPLVWHLKXERLAXGVSRLFLVSEGSVVQFSSANFSLXAEXEERNFPHGNEHLLNWARKEYGAVXSFXELKIARNIYIKVGEDQVFPPKCNIGKNFLSLNYLAEYLQPKAAEGCVMSSQPQNEEVHIIELIXPNSNPYSAFQVDIXIDIRPSQEDLEVVKNLILILKCKKSVNWVIKSFDVKGSLKIIAPNSIGFGKESERSMXMXKSIRDDIPSXQGNLVKWALDNGYSPIXSYXMAPVANRFHLRLENNEEMGDEEVHXIPPELRILLDPGALPALQNPPIRGGEGQNGGLPFPFPDISRRVWNEEGEDGLPRPKDPVIPSIQLFPGLREPEEVQGSVDIALSVKCDNEKMIVAVEKDSFQASGYSGMDVXLLDPXCKAKMNGXHFVLESPLNGCGXRPRWSALDGVVYYNSIVIQVPALGDSSGWPDGYEDLESGDNGFPGDMDEGDASLFXRPEIVVFNCSLQQVRNPSSFQEQPHGNIXFNMELYNXDLFLVPSQGVFSVPENGHVYVEVSVXKAEQELGFAIQXCFISPYSNPDRMSHYXIIENICPKDESVKFYSPKRVHFPIPQADMDKKRFSFVFKPVFNXSLLFLQCELXLCXKMEKHPQKLPKCVPPDEACXSLDASIIWAMMQNKKXFXKPLAVIHHEAESKEKGPSMKEPNPISPPIFHGLDXLXVMGIAFAAFVIGALLXGALWYIYSHXGEXAGRQQVPXSPPASENSSAAHSIGSXQSXPCSSSSXA

SEQ ID NO: 27537 - protein, 851 aa, Homo sapiens
  MOD_RES (2)..(2): Selenocysteine
  MOD_RES (19)..(19): Selenocysteine
  MOD_RES (47)..(47): Selenocysteine
  MOD_RES (57)..(58): Selenocysteine
  MOD_RES (71)..(71): Selenocysteine
  MOD_RES (84)..(84): Selenocysteine
  MOD_RES (116)..(116): Selenocysteine
  MOD_RES (121)..(121): Selenocysteine
  MOD_RES (145)..(145): Selenocysteine
  MOD_RES (148)..(148): Selenocysteine
  MOD_RES (172)..(172): Selenocysteine
  MOD_RES (175)..(175): Selenocysteine
  MOD_RES (239)..(239): Selenocysteine
  MOD_RES (253)..(253): Selenocysteine
  MOD_RES (311)..(311): Selenocysteine
  MOD_RES (313)..(313): Selenocysteine
  MOD_RES (323)..(323): Selenocysteine
  MOD_RES (340)..(340): Selenocysteine
  MOD_RES (343)..(343): Selenocysteine
  MOD_RES (369)..(369): Selenocysteine
  MOD_RES (481)..(481): Selenocysteine
  MOD_RES (486)..(486): Selenocysteine
  MOD_RES (494)..(494): Selenocysteine
  MOD_RES (507)..(507): Selenocysteine
  MOD_RES (563)..(563): Selenocysteine
  MOD_RES (592)..(592): Selenocysteine
  MOD_RES (600)..(600): Selenocysteine
  MOD_RES (626)..(626): Selenocysteine
  MOD_RES (638)..(638): Selenocysteine
  MOD_RES (654)..(654): Selenocysteine
  MOD_RES (698)..(698): Selenocysteine
  MOD_RES (708)..(708): Selenocysteine
  MOD_RES (711)..(711): Selenocysteine
  MOD_RES (731)..(731): Selenocysteine
  MOD_RES (747)..(747): Selenocysteine
  MOD_RES (749)..(749): Selenocysteine
  MOD_RES (784)..(784): Selenocysteine
  MOD_RES (786)..(786): Selenocysteine
  MOD_RES (802)..(802): Selenocysteine
  MOD_RES (812)..(812): Selenocysteine
  MOD_RES (815)..(815): Selenocysteine
  MOD_RES (823)..(823): Selenocysteine
  MOD_RES (840)..(840): Selenocysteine
  MOD_RES (843)..(843): Selenocysteine
  MOD_RES (850)..(850): Selenocysteine
MXSHYVIAIFALMSSCLAXAGPEPGALCELSPVSASHPVQALMESFXVLSGCASRGXXGLPQEVHVLNLRXAGQGPGQLQREVXLHLNPISSVHIHHKSVVFLLNSPHPLVWHLKXERLAXGVSRLFLVSEGSVVQFSSANFSLXAEXEERNFPHGNEHLLNWARKEYGAVXSFXELKIARNIYIKVGEDQVFPPKCNIGKNFLSLNYLAEYLQPKAAEGCVMSSQPQNEEVHIIELIXPNSNPYSAFQVDIXIDIRPSQEDLEVVKNLILILKCKKSVNWVIKSFDVKGSLKIIAPNSIGFGKESERSMXMXKSIRDDIPSXQGNLVKWALDNGYSPIXSYXMAPVANRFHLRLENNAEEMGDEEVHXIPPELRILLDPGALPALQNPPIRGGEGQNGGLPFPFPDISRRVWNEEGEDGLPRPKDPVIPSIQLFPGLREPEEVQGSVDIALSVKCDNEKMIVAVEKDSFQASGYSGMDVXLLDPXCKAKMNGXHFVLESPLNGCGXRPRWSALDGVVYYNSIVIQVPALGDSSGWPDGYEDLESGDNGFPGDMDEGDASLFXRPEIVVFNCSLQQVRNPSSFQEQPHGNIXFNMELYNXDLFLVPSQGVFSVPENGHVYVEVSVXKAEQELGFAIQXCFISPYSNPDRMSHYXIIENICPKDESVKFYSPKRVHFPIPQADMDKKRFSFVFKPVFNXSLLFLQCELXLCXKMEKHPQKLPKCVPPDEACXSLDASIIWAMMQNKKXFXKPLAVIHHEAESKEKGPSMKEPNPISPPIFHGLDXLXVMGIAFAAFVIGALLXGALWYIYSHXGEXAGRQQVPXSPPASENSSAAHSIGSXQSXPCSSSSXA

SEQ ID NO: 27538 - protein, 49 aa, Homo sapiens
  MOD_RES (2)..(2): Selenocysteine
  MOD_RES (19)..(19): Selenocysteine
  MOD_RES (31)..(31): Selenocysteine
  MOD_RES (33)..(33): Selenocysteine
MXSHYVIAIFALMSSCLAXAGWSAMARSWLXAXSASRVQAILLPQPPEY

SEQ ID NO: 27539 - protein, 860 aa, Homo sapiens
  MOD_RES (8)..(8): Selenocysteine
  MOD_RES (41)..(41): Selenocysteine
  MOD_RES (62)..(62): Selenocysteine
  MOD_RES (64)..(64): Selenocysteine
  MOD_RES (66)..(66): Selenocysteine
  MOD_RES (121)..(121): Selenocysteine
  MOD_RES (147)..(147): Selenocysteine
  MOD_RES (166)..(166): Selenocysteine
  MOD_RES (185)..(186): Selenocysteine
  MOD_RES (195)..(195): Selenocysteine
  MOD_RES (234)..(234): Selenocysteine
  MOD_RES (269)..(269): Selenocysteine
  MOD_RES (281)..(281): Selenocysteine
  MOD_RES (301)..(301): Selenocysteine
  MOD_RES (393)..(393): Selenocysteine
  MOD_RES (398)..(398): Selenocysteine
  MOD_RES (414)..(414): Selenocysteine
  MOD_RES (438)..(438): Selenocysteine
  MOD_RES (450)..(450): Selenocysteine
  MOD_RES (470)..(470): Selenocysteine
  MOD_RES (477)..(477): Selenocysteine
  MOD_RES (521)..(521): Selenocysteine
  MOD_RES (534)..(534): Selenocysteine
  MOD_RES (562)..(562): Selenocysteine
  MOD_RES (610)..(610): Selenocysteine
  MOD_RES (635)..(635): Selenocysteine
  MOD_RES (637)..(637): Selenocysteine
  MOD_RES (718)..(718): Selenocysteine
  MOD_RES (729)..(729): Selenocysteine
  MOD_RES (746)..(746): Selenocysteine
  MOD_RES (760)..(760): Selenocysteine
  MOD_RES (783)..(783): Selenocysteine
  MOD_RES (799)..(799): Selenocysteine
  MOD_RES (841)..(841): Selenocysteine
  MOD_RES (849)..(849): Selenocysteine
  MOD_RES (858)..(858): Selenocysteine
  MOD_RES (860)..(860): Selenocysteine
MMSIKAFXLVSAVERELLMGDKERVNIECVECCGRDLYVGXNDCFVYHFLLEERPVPAGPAXFXAXKQLQRHLGFKKPVNELRAASALNRLLVLCDNSISLVNMLNLEPVPSGARIKGAAXFALNENPVSGDPFCVEVCIISVKRRXIQMFLVYEDRVQIVKEVSXAEQPLAVAVDGHFLCLALXXQYIIHNYSXGVSQDLFPYCSEERPPIVKRIGRQEFLLAGPGGLGMFAXVAGISQRAPVHWSENVIGAAVSFPYVIALDDEFIXVHSMLDQQQKQXLPFKEGHILQDFEGRVIVAXSKGVYILVPLPLEKQIQDLLASRRVEEALVLAKGARRNIPKEKFQVMYRRILQQAGFIQFAQLQFLEAKELFRSGQLDVRELISLYPFLLPXSSSFXRSHPPLHEYADLNQLXQGDQEKMAKCKRFLMSYLNEVRSXEVANGYKEDIDXALLKLYAEADHDSLLDLLVXENFCLLXDSAAWLEKHKKYFALGLLYHYNNQDAAAVQLWVNIVNGDVQDSXRSDLYEYIVDFLXYCLDEELVWAYADWVLQKSEEVGVQVFXKRPLDEQQKNSFNPDDIINCLKKYPKALVKYLEHLVIDKRLQKEEYHXHLAVLYLEEVLLQRASASGKGAEAXEXQAKLRRLLQKSDLYRVHFLLERLQGAGLPMESAILHGKLGEHEKALHILVHELQDFAAAEDYCLWCSEGRDPPHRQQLFHXLLAIYLHAGPXAHELAVAAVDLLNRHAXEFDAAQVLQMLPDXWSVQLLCPFLMGAMRDSIHARRXMQVALGLARSENLIYXYDKMKLKGSSIQLSDKKLCQICQNPFCEPVFVRYPNGGLVHXHCAASRHXNPSSSSPGXRX

SEQ ID NO: 27540 - protein, 92 aa, Homo sapiens
  MOD_RES (55)..(55): Selenocysteine
  MOD_RES (59)..(59): Selenocysteine
  MOD_RES (89)..(89): Selenocysteine
MDIPLDLSSSAGSGKRRRRGNLPKESVQILRDWLYEHRYNAYPSEQEKALLSQQXHLSXLQVCNWFINARRRLLPDMLRKDGKDPNQFXISR

SEQ ID NO: 27541 - protein, 131 aa, Homo sapiens
  MOD_RES (55)..(55): Selenocysteine
  MOD_RES (59)..(59): Selenocysteine
  MOD_RES (89)..(89): Selenocysteine
  MOD_RES (100)..(100): Selenocysteine
  MOD_RES (119)..(119): Selenocysteine
  MOD_RES (125)..(125): Selenocysteine
  MOD_RES (131)..(131): Selenocysteine
MDIPLDLSSSAGSGKRRRRGNLPKESVQILRDWLYEHRYNAYPSEQEKALLSQQXHLSXLQVCNWFINARRRLLPDMLRKDGKDPNQFXISRRGAKISEXSSVESVMGIKNFMPALEEXPFHSCXAGPNPX

SEQ ID NO: 27542 - protein, 133 aa, Homo sapiens
  MOD_RES (55)..(55): Selenocysteine
  MOD_RES (59)..(59): Selenocysteine
  MOD_RES (89)..(89): Selenocysteine
  MOD_RES (100)..(100): Selenocysteine
  MOD_RES (119)..(119): Selenocysteine
  MOD_RES (125)..(125): Selenocysteine
  MOD_RES (131)..(131): Selenocysteine
MDIPLDLSSSAGSGKRRRRGNLPKESVQILRDWLYEHRYNAYPSEQEKALLSQQXHLSXLQVCNWFINARRRLLPDMLRKDGKDPNQFXISRRGAKISEXSSVESVMGIKNFMPALEEXPFHSCXAGPNPXLG

SEQ ID NO: 27543 - protein, 138 aa, Homo sapiens
  MOD_RES (55)..(55): Selenocysteine
  MOD_RES (59)..(59): Selenocysteine
  MOD_RES (89)..(89): Selenocysteine
  MOD_RES (100)..(100): Selenocysteine
  MOD_RES (119)..(119): Selenocysteine
  MOD_RES (125)..(125): Selenocysteine
  MOD_RES (131)..(131): Selenocysteine
MDIPLDLSSSAGSGKRRRRGNLPKESVQILRDWLYEHRYNAYPSEQEKALLSQQXHLSXLQVCNWFINARRRLLPDMLRKDGKDPNQFXISRRGAKISEXSSVESVMGIKNFMPALEEXPFHSCXAGPNPXLGRPLSP

SEQ ID NO: 27544 - protein, 168 aa, Homo sapiens
  MOD_RES (55)..(55): Selenocysteine
  MOD_RES (59)..(59): Selenocysteine
  MOD_RES (89)..(89): Selenocysteine
  MOD_RES (100)..(100): Selenocysteine
  MOD_RES (119)..(119): Selenocysteine
  MOD_RES (125)..(125): Selenocysteine
  MOD_RES (131)..(131): Selenocysteine
  MOD_RES (156)..(157): Selenocysteine
  MOD_RES (159)..(159): Selenocysteine
MDIPLDLSSSAGSGKRRRRGNLPKESVQILRDWLYEHRYNAYPSEQEKALLSQQXHLSXLQVCNWFINARRRLLPDMLRKDGKDPNQFXISRRGAKISEXSSVESVMGIKNFMPALEEXPFHSCXAGPNPXLGRPLSPKPSSPGSVLARPSVICHXXVXALKDVPFSL

SEQ ID NO: 27545 - protein, 219 aa, Homo sapiens
  MOD_RES (55)..(55): Selenocysteine
  MOD_RES (59)..(59): Selenocysteine
  MOD_RES (89)..(89): Selenocysteine
  MOD_RES (100)..(100): Selenocysteine
  MOD_RES (119)..(119): Selenocysteine
  MOD_RES (125)..(125): Selenocysteine
  MOD_RES (131)..(131): Selenocysteine
  MOD_RES (156)..(157): Selenocysteine
  MOD_RES (159)..(159): Selenocysteine
  MOD_RES (178)..(178): Selenocysteine
  MOD_RES (189)..(189): Selenocysteine
  MOD_RES (191)..(191): Selenocysteine
  MOD_RES (199)..(199): Selenocysteine
  MOD_RES (206)..(206): Selenocysteine
  MOD_RES (208)..(208): Selenocysteine
  MOD_RES (215)..(215): Selenocysteine
  MOD_RES (219)..(219): Selenocysteine
MDIPLDLSSSAGSGKRRRRGNLPKESVQILRDWLYEHRYNAYPSEQEKALLSQQXHLSXLQVCNWFINARRRLLPDMLRKDGKDPNQFXISRRGAKISEXSSVESVMGIKNFMPALEEXPFHSCXAGPNPXLGRPLSPKPSSPGSVLARPSVICHXXVXALKDVPFSLCQSVGVGQNXDIQQIAAKNFXDXSLMYPEDXCKSGPSXNXQSGLFNXPPPX

SEQ ID NO: 27546 - protein, 246 aa, Homo sapiens
  MOD_RES (55)..(55): Selenocysteine
  MOD_RES (59)..(59): Selenocysteine
  MOD_RES (89)..(89): Selenocysteine
  MOD_RES (100)..(100): Selenocysteine
  MOD_RES (119)..(119): Selenocysteine
  MOD_RES (125)..(125): Selenocysteine
  MOD_RES (131)..(131): Selenocysteine
  MOD_RES (156)..(157): Selenocysteine
  MOD_RES (159)..(159): Selenocysteine
  MOD_RES (178)..(178): Selenocysteine
  MOD_RES (189)..(189): Selenocysteine
  MOD_RES (191)..(191): Selenocysteine
  MOD_RES (199)..(199): Selenocysteine
  MOD_RES (206)..(206): Selenocysteine
  MOD_RES (208)..(208): Selenocysteine
  MOD_RES (215)..(215): Selenocysteine
  MOD_RES (219)..(219): Selenocysteine
MDIPLDLSSSAGSGKRRRRGNLPKESVQILRDWLYEHRYNAYPSEQEKALLSQQXHLSXLQVCNWFINARRRLLPDMLRKDGKDPNQFXISRRGAKISEXSSVESVMGIKNFMPALEEXPFHSCXAGPNPXLGRPLSPKPSSPGSVLARPSVICHXXVXALKDVPFSLCQSVGVGQNXDIQQIAAKNFXDXSLMYPEDXCKSGPSXNXQSGLFNXPPPXPPDLNQDFSGFQLLVDVALKRAAEMEL

SEQ ID NO: 27547 - protein, 252 aa, Homo sapiens
  MOD_RES (55)..(55): Selenocysteine
  MOD_RES (59)..(59): Selenocysteine
  MOD_RES (89)..(89): Selenocysteine
  MOD_RES (100)..(100): Selenocysteine
  MOD_RES (119)..(119): Selenocysteine
  MOD_RES (125)..(125): Selenocysteine
  MOD_RES (131)..(131): Selenocysteine
  MOD_RES (156)..(157): Selenocysteine
  MOD_RES (159)..(159): Selenocysteine
  MOD_RES (178)..(178): Selenocysteine
  MOD_RES (189)..(189): Selenocysteine
  MOD_RES (191)..(191): Selenocysteine
  MOD_RES (199)..(199): Selenocysteine
  MOD_RES (206)..(206): Selenocysteine
  MOD_RES (208)..(208): Selenocysteine
  MOD_RES (215)..(215): Selenocysteine
  MOD_RES (219)..(219): Selenocysteine
  MOD_RES (251)..(251): Selenocysteine
MDIPLDLSSSAGSGKRRRRGNLPKESVQILRDWLYEHRYNAYPSEQEKALLSQQXHLSXLQVCNWFINARRRLLPDMLRKDGKDPNQFXISRRGAKISEXSSVESVMGIKNFMPALEEXPFHSCXAGPNPXLGRPLSPKPSSPGSVLARPSVICHXXVXALKDVPFSLCQSVGVGQNXDIQQIAAKNFXDXSLMYPEDXCKSGPSXNXQSGLFNXPPPXPPDLNQDFSGFQLLVDVALKRAAEMELQAKLXA

SEQ ID NO: 27548 - protein, 84 aa, Homo sapiens
  MOD_RES (15)..(15): Selenocysteine
  MOD_RES (75)..(75): Selenocysteine
  MOD_RES (79)..(79): Selenocysteine
MKGKKGIVAASGSEXEDEDSMDIPLDLSSSAGSGKRRRRGNLPKESVQILRDWLYEHRYNAYPSEQEKALLSQQXHLSXLQAPP

SEQ ID NO: 27549 - protein, 118 aa, Homo sapiens
  MOD_RES (15)..(15): Selenocysteine
  MOD_RES (75)..(75): Selenocysteine
  MOD_RES (79)..(79): Selenocysteine
  MOD_RES (109)..(109): Selenocysteine
MKGKKGIVAASGSEXEDEDSMDIPLDLSSSAGSGKRRRRGNLPKESVQILRDWLYEHRYNAYPSEQEKALLSQQXHLSXLQVCNWFINARRRLLPDMLRKDGKDPNQFXISRRGAKIS

SEQ ID NO: 27550 - protein, 272 aa, Homo sapiens
  MOD_RES (15)..(15): Selenocysteine
  MOD_RES (75)..(75): Selenocysteine
  MOD_RES (79)..(79): Selenocysteine
  MOD_RES (109)..(109): Selenocysteine
  MOD_RES (120)..(120): Selenocysteine
  MOD_RES (139)..(139): Selenocysteine
  MOD_RES (145)..(145): Selenocysteine
  MOD_RES (151)..(151): Selenocysteine
  MOD_RES (176)..(177): Selenocysteine
  MOD_RES (179)..(179): Selenocysteine
  MOD_RES (198)..(198): Selenocysteine
  MOD_RES (209)..(209): Selenocysteine
  MOD_RES (211)..(211): Selenocysteine
  MOD_RES (219)..(219): Selenocysteine
  MOD_RES (226)..(226): Selenocysteine
  MOD_RES (228)..(228): Selenocysteine
  MOD_RES (235)..(235): Selenocysteine
  MOD_RES (239)..(239): Selenocysteine
  MOD_RES (271)..(271): Selenocysteine
MKGKKGIVAASGSEXEDEDSMDIPLDLSSSAGSGKRRRRGNLPKESVQILRDWLYEHRYNAYPSEQEKALLSQQXHLSXLQVCNWFINARRRLLPDMLRKDGKDPNQFXISRRGAKISEXSSVESVMGIKNFMPALEEXPFHSCXAGPNPXLGRPLSPKPSSPGSVLARPSVICHXXVXALKDVPFSLCQSVGVGQNXDIQQIAAKNFXDXSLMYPEDXCKSGPSXNXQSGLFNXPPPXPPDLNQDFSGFQLLVDVALKRAAEMELQAKLXA

SEQ ID NO: 27551 - protein, 132 aa, Homo sapiens
  MOD_RES (15)..(15): Selenocysteine
  MOD_RES (75)..(75): Selenocysteine
  MOD_RES (79)..(79): Selenocysteine
  MOD_RES (113)..(113): Selenocysteine
MKGKKGIVAASGSEXEDEDSMDIPLDLSSSAGSGKRRRRGNLPKESVQILRDWLYEHRYNAYPSEQEKALLSQQXHLSXLQVKKESVRFMDAFLVSKSFYGIPVCQVIKLLAXQRQKEYLFIVNLIVLKANN

SEQ ID NO: 27552 - protein, 286 aa, Homo sapiens
  MOD_RES (2)..(2): Selenocysteine
  MOD_RES (16)..(16): Selenocysteine
  MOD_RES (29)..(29): Selenocysteine
  MOD_RES (89)..(89): Selenocysteine
  MOD_RES (93)..(93): Selenocysteine
  MOD_RES (123)..(123): Selenocysteine
  MOD_RES (134)..(134): Selenocysteine
  MOD_RES (153)..(153): Selenocysteine
  MOD_RES (159)..(159): Selenocysteine
  MOD_RES (165)..(165): Selenocysteine
  MOD_RES (190)..(191): Selenocysteine
  MOD_RES (193)..(193): Selenocysteine
  MOD_RES (212)..(212): Selenocysteine
  MOD_RES (223)..(223): Selenocysteine
  MOD_RES (225)..(225): Selenocysteine
  MOD_RES (233)..(233): Selenocysteine
  MOD_RES (240)..(240): Selenocysteine
  MOD_RES (242)..(242): Selenocysteine
  MOD_RES (249)..(249): Selenocysteine
  MOD_RES (253)..(253): Selenocysteine
  MOD_RES (285)..(285): Selenocysteine
MXCSGKSCALARSSLXSSQGIVAASGSEXEDEDSMDIPLDLSSSAGSGKRRRRGNLPKESVQILRDWLYEHRYNAYPSEQEKALLSQQXHLSXLQVCNWFINARRRLLPDMLRKDGKDPNQFXISRRGAKISEXSSVESVMGIKNFMPALEEXPFHSCXAGPNPXLGRPLSPKPSSPGSVLARPSVICHXXVXALKDVPFSLCQSVGVGQNXDIQQIAAKNFXDXSLMYPEDXCKSGPSXNXQSGLFNXPPPXPPDLNQDFSGFQLLVDVALKRAAEMELQAKLXA

SEQ ID NO: 27553 - protein, 401 aa, Homo sapiens
  MOD_RES (44)..(44): Selenocysteine
  MOD_RES (56)..(56): Selenocysteine
  MOD_RES (70)..(70): Selenocysteine
  MOD_RES (100)..(100): Selenocysteine
  MOD_RES (132)..(132): Selenocysteine
  MOD_RES (144)..(144): Selenocysteine
  MOD_RES (204)..(204): Selenocysteine
  MOD_RES (208)..(208): Selenocysteine
  MOD_RES (238)..(238): Selenocysteine
  MOD_RES (249)..(249): Selenocysteine
  MOD_RES (268)..(268): Selenocysteine
  MOD_RES (274)..(274): Selenocysteine
  MOD_RES (280)..(280): Selenocysteine
  MOD_RES (305)..(306): Selenocysteine
  MOD_RES (308)..(308): Selenocysteine
  MOD_RES (327)..(327): Selenocysteine
  MOD_RES (338)..(338): Selenocysteine
  MOD_RES (340)..(340): Selenocysteine
  MOD_RES (348)..(348): Selenocysteine
  MOD_RES (355)..(355): Selenocysteine
  MOD_RES (357)..(357): Selenocysteine
  MOD_RES (364)..(364): Selenocysteine
  MOD_RES (368)..(368): Selenocysteine
  MOD_RES (400)..(400): Selenocysteine
MVLAQSRVSAGVGSPHCSGSGGGGSDSFPWPASHPGNPQCSFSXAFLASPRLSRGXLAYLPPAPWSSLAXPSALLGSSCAPPPPPARCPQPRALSPELGXKAGPRRPHRWELPRSPSQGAQGPAPRRRLLEXMKGIVAASGSEXEDEDSMDIPLDLSSSAGSGKRRRRGNLPKESVQILRDWLYEHRYNAYPSEQEKALLSQQXHLSXLQVCNWFINARRRLLPDMLRKDGKDPNQFXISRRGAKISEXSSVESVMGIKNFMPALEEXPFHSCXAGPNPXLGRPLSPKPSSPGSVLARPSVICHXXVXALKDVPFSLCQSVGVGQNXDIQQIAAKNFXDXSLMYPEDXCKSGPSXNXQSGLFNXPPPXPPDLNQDFSGFQLLVDVALKRAAEMELQAKLXA

SEQ ID NO: 27554 - protein, 35 aa, Homo sapiens
  MOD_RES (8)..(8): Selenocysteine
  MOD_RES (18)..(18): Selenocysteine
KLSLSGQXNLSVLQRSSXGRCQLAPLHCDGGPLLC

SEQ ID NO: 27555 - protein, 174 aa, Homo sapiens
  MOD_RES (58)..(58): Selenocysteine
  MOD_RES (92)..(92): Selenocysteine
  MOD_RES (122)..(122): Selenocysteine
  MOD_RES (159)..(159): Selenocysteine
  MOD_RES (163)..(163): Selenocysteine
  MOD_RES (165)..(165): Selenocysteine
  MOD_RES (168)..(168): Selenocysteine
MSDSDLGEDEGLLSLAGKRKRRGNLPKESVKILRDWLYLHRYNAYPSEQEKLSLSGQXNLSVLQICNWFINARRRLLPDMLRKDGKDPNQFXISRRGGKASDVALPRGSSPSVLAVSVPAPXNVLSLSVCSMPLHSGQGEKPAAPFPRGELESPKPLVXPGSXLXLLXRAEAGS

SEQ ID NO: 27556 - protein, 237 aa, Homo sapiens
  MOD_RES (58)..(58): Selenocysteine
  MOD_RES (92)..(92): Selenocysteine
  MOD_RES (122)..(122): Selenocysteine
  MOD_RES (159)..(159): Selenocysteine
  MOD_RES (163)..(163): Selenocysteine
  MOD_RES (165)..(165): Selenocysteine
  MOD_RES (168)..(168): Selenocysteine
  MOD_RES (176)..(176): Selenocysteine
  MOD_RES (182)..(182): Selenocysteine
  MOD_RES (186)..(186): Selenocysteine
  MOD_RES (227)..(227): Selenocysteine
MSDSDLGEDEGLLSLAGKRKRRGNLPKESVKILRDWLYLHRYNAYPSEQEKLSLSGQXNLSVLQICNWFINARRRLLPDMLRKDGKDPNQFXISRRGGKASDVALPRGSSPSVLAVSVPAPXNVLSLSVCSMPLHSGQGEKPAAPFPRGELESPKPLVXPGSXLXLLXRAEAGSPXGGLFNXPPPXPPEQDKEDFSSFQLLVEVALQRAAEMELQKQQDPSLPLLHXPIPLVSENPQ

SEQ ID NO: 27557 - protein, 92 aa, Homo sapiens
  MOD_RES (1)..(1): Any amino acid
  MOD_RES (48)..(48): Selenocysteine
  MOD_RES (75)..(75): Selenocysteine
XLLSLAGKRKRRGNLPKESVKILRDWLYLHRYNAYPSEQEKLSLSGQXNLSVLQRVFYGSLPNIGIISSVQRSSXGRCQLAPLHCDGGPLLC

SEQ ID NO: 27558 - protein, 111 aa, Homo sapiens
  MOD_RES (1)..(1): Any amino acid
  MOD_RES (41)..(41): Selenocysteine
  MOD_RES (75)..(75): Selenocysteine
  MOD_RES (87)..(87): Selenocysteine
  MOD_RES (108)..(109): Selenocysteine
XRKRRGNLPKESVKILRDWLYLHRYNAYPSEQEKLSLSGQXNLSVLQICNWFINARRRLLPDMLRKDGKDPNQFXISRRGEGFLWIXAKHWDHLLCPEVFNRKMPAGXXAL

SEQ ID NO: 27559 - protein, 241 aa, Homo sapiens
  MOD_RES (11)..(11): Selenocysteine
  MOD_RES (23)..(23): Selenocysteine
  MOD_RES (30)..(30): Selenocysteine
  MOD_RES (40)..(40): Selenocysteine
  MOD_RES (90)..(90): Selenocysteine
  MOD_RES (126)..(126): Selenocysteine
  MOD_RES (133)..(133): Selenocysteine
  MOD_RES (138)..(138): Selenocysteine
  MOD_RES (184)..(184): Selenocysteine
  MOD_RES (198)..(198): Selenocysteine
MEAAADGPAEXQSPVEKDSPAKXQSPAQDXSIMSRNNADXGRVLALPEHKKKRKGNLPAESVKILRDWMYKHRFKAYPSEEEKQMLSEKXNLSLLQISNWFINARRRILPDMLQQRRNDPIIGHKXGKDAHAXHLQSXEASVPAKSGPSGPDNVQSLPLWPLPKGQMSREKQPDPESAPSQKLXGIAQPKKKVKVSVXSPSSPELVSPEEHADFSSFLLLVDAAVQRAAELELEKKQEPNP

SEQ ID NO: 27560 - protein, 185 aa, Homo sapiens
  MOD_RES (11)..(11): Selenocysteine
  MOD_RES (23)..(23): Selenocysteine
  MOD_RES (30)..(30): Selenocysteine
  MOD_RES (40)..(40): Selenocysteine
  MOD_RES (90)..(90): Selenocysteine
  MOD_RES (126)..(126): Selenocysteine
  MOD_RES (133)..(133): Selenocysteine
  MOD_RES (138)..(138): Selenocysteine
  MOD_RES (152)..(152): Selenocysteine
MEAAADGPAEXQSPVEKDSPAKXQSPAQDXSIMSRNNADXGRVLALPEHKKKRKGNLPAESVKILRDWMYKHRFKAYPSEEEKQMLSEKXNLSLLRISNWFINARRRILPDMLQQRRNDPIIGHKXGKDAHAXHLQSXEASVPAKSGPVVQXMYKACPCGPCQRARCQERSNQIRSRPLARSSPE

SEQ ID NO: 27561 - protein, 160 aa, Homo sapiens
  MOD_RES (16)..(16): Selenocysteine
  MOD_RES (23)..(23): Selenocysteine
  MOD_RES (42)..(42): Selenocysteine
  MOD_RES (58)..(58): Selenocysteine
  MOD_RES (63)..(63): Selenocysteine
  MOD_RES (73)..(73): Selenocysteine
  MOD_RES (89)..(89): Selenocysteine
  MOD_RES (91)..(91): Selenocysteine
  MOD_RES (99)..(99): Selenocysteine
  MOD_RES (105)..(106): Selenocysteine
  MOD_RES (123)..(123): Selenocysteine
MAEELVLERCDLELEXNGRDHHXADLCREKLVVRRGQPFWLXLHFEGRNYEASVDSLXFSVVXGPAPSQEAGXKARFPLRDAVEEGDWXAXVVDQQDCXLSLQLXXPANAPIGLYRLSLEASXGYQGSSFVLGHFILLFNAWCPADAVYLDSEEERQEYV

SEQ ID NO: 27562 - protein, 281 aa, Homo sapiens
  MOD_RES (16)..(16): Selenocysteine
  MOD_RES (23)..(23): Selenocysteine
  MOD_RES (42)..(42): Selenocysteine
  MOD_RES (58)..(58): Selenocysteine
  MOD_RES (63)..(63): Selenocysteine
  MOD_RES (73)..(73): Selenocysteine
  MOD_RES (89)..(89): Selenocysteine
  MOD_RES (91)..(91): Selenocysteine
  MOD_RES (99)..(99): Selenocysteine
  MOD_RES (105)..(106): Selenocysteine
  MOD_RES (123)..(123): Selenocysteine
  MOD_RES (162)..(162): Selenocysteine
MAEELVLERCDLELEXNGRDHHXADLCREKLVVRRGQPFWLXLHFEGRNYEASVDSLXFSVVXGPAPSQEAGXKARFPLRDAVEEGDWXAXVVDQQDCXLSLQLXXPANAPIGLYRLSLEASXGYQGSSFVLGHFILLFNAWCPADAVYLDSEEERQEYVLXQQGFIYQGSAKFIKNIPWNFGQFEDGILDICLILLDVNPKFLKNAGRDCSRRSSPVYVGRVVSGMVNCNDDQGVLLGRWDNNYGDGVSPMSWIGSVDILRRWKNHGCQRVKYGQCWVFA

SEQ ID NO: 27563 - protein, 687 aa, Homo sapiens
  MOD_RES (16)..(16): Selenocysteine
  MOD_RES (23)..(23): Selenocysteine
  MOD_RES (42)..(42): Selenocysteine
  MOD_RES (58)..(58): Selenocysteine
  MOD_RES (63)..(63): Selenocysteine
  MOD_RES (73)..(73): Selenocysteine
  MOD_RES (89)..(89): Selenocysteine
  MOD_RES (91)..(91): Selenocysteine
  MOD_RES (99)..(99): Selenocysteine
  MOD_RES (105)..(106): Selenocysteine
  MOD_RES (123)..(123): Selenocysteine
  MOD_RES (162)..(162): Selenocysteine
  MOD_RES (286)..(286): Selenocysteine
  MOD_RES (295)..(295): Selenocysteine
  MOD_RES (299)..(299): Selenocysteine
  MOD_RES (343)..(343): Selenocysteine
  MOD_RES (360)..(360): Selenocysteine
  MOD_RES (368)..(368): Selenocysteine
  MOD_RES (386)..(386): Selenocysteine
  MOD_RES (428)..(428): Selenocysteine
  MOD_RES (440)..(440): Selenocysteine
  MOD_RES (442)..(442): Selenocysteine
  MOD_RES (457)..(457): Selenocysteine
  MOD_RES (471)..(471): Selenocysteine
  MOD_RES (496)..(496): Selenocysteine
  MOD_RES (499)..(499): Selenocysteine
  MOD_RES (513)..(513): Selenocysteine
  MOD_RES (526)..(526): Selenocysteine
  MOD_RES (556)..(556): Selenocysteine
  MOD_RES (621)..(621): Selenocysteine
  MOD_RES (623)..(623): Selenocysteine
  MOD_RES (630)..(630): Selenocysteine
  MOD_RES (635)..(635): Selenocysteine
MAEELVLERCDLELEXNGRDHHXADLCREKLVVRRGQPFWLXLHFEGRNYEASVDSLXFSVVXGPAPSQEAGXKARFPLRDAVEEGDWXAXVVDQQDCXLSLQLXXPANAPIGLYRLSLEASXGYQGSSFVLGHFILLFNAWCPADAVYLDSEEERQEYVLXQQGFIYQGSAKFIKNIPWNFGQFEDGILDICLILLDVNPKFLKNAGRDCSRRSSPVYVGRVVSGMVNCNDDQGVLLGRWDNNYGDGVSPMSWIGSVDILRRWKNHGCQRVKYGQCWVFAAVACXVLRCLGIPXRVVXNYNSAHDQNSNLLIEYFRNEFGEIQGDKSEMIWNFHCWVESWMXRPDLQPGYEGWQALDPXPQEKSEGXYCCGPVPVRAIKEGDLSXKYDAPFVFAEVNADVVDWIQQDDGSVHKSINRSLIVGLKISXKSVGRDEREDIXHXYKYPEGSSEEREAFXRANHLNKLAEKEEXGMAMRIRVGQSMNMGSDFDVFAHIXNNXAEEYVCRLLLCARXVSYNGILGPECGXKYLLNLNLEPFSEKSVPLCILYEKYRDCLXESNLIKVRALLVEPVINSYLLAERDLYLENPEIKIRILGEPKQKRKLVAEVSLQNPLPVALEGCXFXVEGAGLXEEQKXVEIPDPVEAGEEVKVRMDLLPLHMGLHKLVVNFESDKLKAVKGFRNVIIGPA

SEQ ID NO: 27564 - protein, 213 aa, Homo sapiens
  MOD_RES (28)..(28): Selenocysteine
  MOD_RES (48)..(48): Selenocysteine
  MOD_RES (59)..(59): Selenocysteine
  MOD_RES (79)..(79): Selenocysteine
  MOD_RES (84)..(84): Selenocysteine
  MOD_RES (125)..(125): Selenocysteine
  MOD_RES (138)..(138): Selenocysteine
  MOD_RES (142)..(142): Selenocysteine
  MOD_RES (165)..(165): Selenocysteine
MVQSCSAYGCKNRYDKDKPVSFHKFPLXRPSLCKEWEAAVRRKNFKPXKYSSICSEHFXPDCFKRECNNKLLKENAVPXIFLCXEPHDKKEDLLEPQEQLPPPPLPPPVSQVDAAIGLLMPPLQXPVNLSVFCDHNYXVEDXMHQRKRIHQLEQQVEKLRKKLKXAQQRCRRQERQLEKLKEVVHFQKEKDDVSERGYVILPNDYFEIVEVPA

SEQ ID NO: 27565 - protein, 118 aa, Homo sapiens
  MOD_RES (28)..(28): Selenocysteine
  MOD_RES (48)..(48): Selenocysteine
  MOD_RES (59)..(59): Selenocysteine
  MOD_RES (79)..(79): Selenocysteine
  MOD_RES (84)..(84): Selenocysteine
  MOD_RES (90)..(90): Selenocysteine
  MOD_RES (103)..(103): Selenocysteine
  MOD_RES (107)..(107): Selenocysteine
MVQSCSAYGCKNRYDKDKPVSFHKFPLXRPSLCKEWEAAVRRKNFKPXKYSSICSEHFXPDCFKRECNNKLLKENAVPXIFLCXEPHDKXPVNLSVFCDHNYXVEDXMHQRKRIHQLE

SEQ ID NO: 27566 - protein, 53 aa, Homo sapiens
MVQSCSAYGCKNRYDKDKPVSFHKKKIFWSHRNSFPHLLYRLLFPRLMLLLDY

SEQ ID NO: 27567 - protein, 257 aa, Homo sapiens
  MOD_RES (13)..(14): Selenocysteine
  MOD_RES (88)..(88): Selenocysteine
  MOD_RES (111)..(111): Selenocysteine
  MOD_RES (131)..(131): Selenocysteine
  MOD_RES (145)..(145): Selenocysteine
  MOD_RES (153)..(153): Selenocysteine
  MOD_RES (163)..(163): Selenocysteine
  MOD_RES (165)..(165): Selenocysteine
  MOD_RES (169)..(169): Selenocysteine
  MOD_RES (180)..(180): Selenocysteine
  MOD_RES (209)..(210): Selenocysteine
  MOD_RES (212)..(212): Selenocysteine
  MOD_RES (219)..(219): Selenocysteine
  MOD_RES (232)..(232): Selenocysteine
  MOD_RES (234)..(234): Selenocysteine
  MOD_RES (256)..(256): Selenocysteine
MPARCVAAHCGNXXKSGKSLFRFPKDRAVRLLWDRFVRGCRADWYGGNDRSVICSDHFAPACFDVSSVIQKNLRFSQRLRLVAGAVPXLHRVPAPAPKRGEEGDQAGRLDXRGELQAARHSEAAPGPVSCXRPRAGKQAAASQIXCENELVQXQPHADNPSNXVXSVPXHCEEGPVHKSXQISLKRPRHRSVGIQAKVKAFGKRLCNAXXQXEELWSRXSSLFDIYSSDSEXDXDWDIKSEQSDLSYMAVQVKEEXC

SEQ ID NO: 27568 - protein, 127 aa, Homo sapiens
  MOD_RES (1)..(1): Any amino acid
  MOD_RES (6)..(6): Selenocysteine
  MOD_RES (9)..(9): Selenocysteine
  MOD_RES (15)..(15): Selenocysteine
  MOD_RES (23)..(23): Selenocysteine
  MOD_RES (33)..(33): Selenocysteine
  MOD_RES (35)..(35): Selenocysteine
  MOD_RES (39)..(39): Selenocysteine
  MOD_RES (50)..(50): Selenocysteine
  MOD_RES (79)..(80): Selenocysteine
  MOD_RES (82)..(82): Selenocysteine
  MOD_RES (89)..(89): Selenocysteine
  MOD_RES (102)..(102): Selenocysteine
  MOD_RES (104)..(104): Selenocysteine
  MOD_RES (126)..(126): Selenocysteine
XVGKEXIPXRSGQIXCENELVQXQPHADNPSNXVXSVPXHCEEGPVHKSXQISLKRPRHRSVGIQAKVKAFGKRLCNAXXQXEELWSRXSSLFDIYSSDSEXDXDWDIKSEQSDLSYMAVQVKEEXC

SEQ ID NO: 27569 - protein, 314 aa, Homo sapiens
  MOD_RES (5)..(5): Selenocysteine
  MOD_RES (25)..(25): Selenocysteine
  MOD_RES (51)..(51): Selenocysteine
  MOD_RES (55)..(56): Selenocysteine
  MOD_RES (71)..(71): Selenocysteine
  MOD_RES (73)..(73): Selenocysteine
  MOD_RES (78)..(78): Selenocysteine
  MOD_RES (139)..(139): Selenocysteine
  MOD_RES (142)..(142): Selenocysteine
  MOD_RES (159)..(159): Selenocysteine
  MOD_RES (163)..(163): Selenocysteine
  MOD_RES (179)..(179): Selenocysteine
  MOD_RES (181)..(181): Selenocysteine
  MOD_RES (191)..(191): Selenocysteine
  MOD_RES (215)..(215): Selenocysteine
  MOD_RES (240)..(240): Selenocysteine
  MOD_RES (252)..(253): Selenocysteine
  MOD_RES (288)..(288): Selenocysteine
MPGFXCCVPGCYNNSHRDKALHFYXFPKDAELRRLWLKNVSRAGVSGCFSXFQPXXGHRLCSVHFQGGRKXYXVRVPXIFPLRGVNERKVARRPAGAAAARRRQQQQQQQQQQQQQQQQQQQQQQQQQQQQQSSPSASXAQXAQLQPNLVSASAAVLLXLQAXVDSSQAPGSVQPAPIXPXGEDVKPIDLXVQVEFAAAEGAAAAAAASELQAAXAGLEAAECPMGPQLVVVGEEGFPDXGSDHSYSLSSGXXEEELLRKLNEQRDILALMEVKMKEMKGSIRHLRLXEAKLREELREKDRLLAMAVIRKKHGM

SEQ ID NO: 27570 - protein, 79 aa, Homo sapiens
  MOD_RES (11)..(11): Selenocysteine
  MOD_RES (15)..(15): Selenocysteine
  MOD_RES (47)..(47): Selenocysteine
  MOD_RES (64)..(64): Selenocysteine
  MOD_RES (70)..(70): Selenocysteine
MPNFCAAPNCXRKSXQSDLAFFRFPRDPARCQKWVENCRRADLEDKXPDQLNKHYRLCAKHFEXSMICRXIHFAEASEN

SEQ ID NO: 27571 - protein, 761 aa, Homo sapiens
  MOD_RES (11)..(11): Selenocysteine
  MOD_RES (15)..(15): Selenocysteine
  MOD_RES (47)..(47): Selenocysteine
  MOD_RES (64)..(64): Selenocysteine
  MOD_RES (70)..(70): Selenocysteine
  MOD_RES (75)..(75): Selenocysteine
  MOD_RES (84)..(84): Selenocysteine
  MOD_RES (89)..(89): Selenocysteine
  MOD_RES (113)..(113): Selenocysteine
  MOD_RES (122)..(122): Selenocysteine
  MOD_RES (132)..(132): Selenocysteine
  MOD_RES (156)..(156): Selenocysteine
  MOD_RES (197)..(197): Selenocysteine
  MOD_RES (222)..(223): Selenocysteine
  MOD_RES (227)..(227): Selenocysteine
  MOD_RES (233)..(233): Selenocysteine
  MOD_RES (250)..(250): Selenocysteine
  MOD_RES (264)..(264): Selenocysteine
  MOD_RES (312)..(312): Selenocysteine
  MOD_RES (315)..(315): Selenocysteine
  MOD_RES (357)..(357): Selenocysteine
  MOD_RES (383)..(383): Selenocysteine
  MOD_RES (428)..(428): Selenocysteine
  MOD_RES (455)..(455): Selenocysteine
  MOD_RES (482)..(482): Selenocysteine
  MOD_RES (493)..(493): Selenocysteine
  MOD_RES (504)..(504): Selenocysteine
  MOD_RES (515)..(515): Selenocysteine
  MOD_RES (540)..(540): Selenocysteine
  MOD_RES (544)..(544): Selenocysteine
  MOD_RES (569)..(569): Selenocysteine
  MOD_RES (577)..(577): Selenocysteine
  MOD_RES (582)..(582): Selenocysteine
  MOD_RES (619)..(619): Selenocysteine
  MOD_RES (637)..(637): Selenocysteine
  MOD_RES (661)..(661): Selenocysteine
  MOD_RES (711)..(711): Selenocysteine
  MOD_RES (713)..(713): Selenocysteine
  MOD_RES (739)..(739): Selenocysteine
  MOD_RES (745)..(745): Selenocysteine
  MOD_RES (752)..(752): Selenocysteine
  MOD_RES (757)..(757): Selenocysteine
  MOD_RES (761)..(761): Selenocysteine
MPNFCAAPNCXRKSXQSDLAFFRFPRDPARCQKWVENCRRADLEDKXPDQLNKHYRLCAKHFEXSMICRXSPYRXVLRDNAIPXIFDLXSHLNNPHSRHRKRIKELSEDEIRXLKQKKIDEXSEQEQKHKEXNNSNAQNPSEEEGEGQDEDILPLXLEEKENKEYLKSLFEILILMGKQNIPLDGHEADEIPEGLFXPDNFQALLECRINSGEEVLRKRFEXXAVNXLFCSKXQQRQMLEICESCIREEXLREVRDSHFFSIIXDDVVDIAGEEHLPVLVRFVDESHNLREEFIGFLPYEADAEILAVKFHXMIXEKWGLNMEYCRGQAYIVSSGFSSKMKVVASRLLEKYPQAIYXLCSSCALNMWLAKSVPVMGVSVALGXIEEVCSFFHRSPQLLLELDNVISVLFQNSKERGKELKEICHSQWXGRHDAFEILVELLQALVLCLDGINSDXNIRWNNYIAGRAFVLCSAVSDFDFIVXIVVLKNVLSFXRAFGKNLQGQXSDVFFAAGSLXAVLHSLNEVMENIEVYHEFWFEEAXNLAXKLDIQMKLPGKFRRAHQGNLESQLXSESYYKEXLSVPXVEHIIQELKDIFSEQHLKALKCLSLVPSVMGQLKFNXSEEHHADMYRSDLPNPDXLSAELHCWRIKWKHRGKDIELPSXIYEALHLPDIKFFPNVYALLKVLCILPVMKVENERYENGRKRLKAYLRNXLXDQRSSNLALLNINFDIKHDLDLMVDXYIKLYXSKSELPXDNSEXVENX

SEQ ID NO: 27572 - protein, 101 aa, Homo sapiens
  MOD_RES (6)..(6): Selenocysteine
  MOD_RES (12)..(12): Selenocysteine
  MOD_RES (82)..(82): Selenocysteine
  MOD_RES (91)..(91): Selenocysteine
  MOD_RES (98)..(98): Selenocysteine
MDAVPXIFDFCXHIKSMKLKSRNLLKKNNSCSPAGPSNLKSNISSQQVLLEHSYAFRNPMEAKKRIIKLEKEIASLRRKMKXCLQKERRAXRRWIKAXCLV

SEQ ID NO: 27573 - protein, 110 aa, Homo sapiens
  MOD_RES (6)..(6): Selenocysteine
  MOD_RES (12)..(12): Selenocysteine
  MOD_RES (82)..(82): Selenocysteine
  MOD_RES (91)..(91): Selenocysteine
  MOD_RES (98)..(98): Selenocysteine
MDAVPXIFDFCXHIKSMKLKSRNLLKKNNSCSPAGPSNLKSNISSQQVLLEHSYAFRNPMEAKKRIIKLEKEIASLRRKMKXCLQKERRAXRRWIKAXCLVKNLEANSVL

SEQ ID NO: 27574 - protein, 228 aa, Homo sapiens
  MOD_RES (3)..(3): Selenocysteine
  MOD_RES (12)..(13): Selenocysteine
  MOD_RES (50)..(50): Selenocysteine
  MOD_RES (65)..(65): Selenocysteine
  MOD_RES (68)..(68): Selenocysteine
  MOD_RES (78)..(78): Selenocysteine
  MOD_RES (84)..(84): Selenocysteine
  MOD_RES (154)..(154): Selenocysteine
  MOD_RES (163)..(163): Selenocysteine
  MOD_RES (170)..(170): Selenocysteine
  MOD_RES (186)..(186): Selenocysteine
  MOD_RES (193)..(193): Selenocysteine
  MOD_RES (214)..(214): Selenocysteine
  MOD_RES (223)..(223): Selenocysteine
  MOD_RES (226)..(226): Selenocysteine
MPXNCAAAGCAXXYNKHINISFHRFPLDPKRRKEWVRLVRRKNFVPGKHXFLCSKHFEASCFDLXGQXRRLKMDAVPXIFDFCXHIKSMKLKSRNLLKKNNSCSPAGPSNLKSNISSQQVLLEHSYAFRNPMEAKKRIIKLEKEIASLRRKMKXCLQKERRAXRRWIKAXCLVKNLEANSVLPKGXSEHMLPXALSSLPLEDFKILEQDQQDKXLLSLNLKQXKSXFI

SEQ ID NO: 27575 - protein, 52 aa, Homo sapiens
  MOD_RES (3)..(3): Selenocysteine
  MOD_RES (12)..(13): Selenocysteine
MPXNCAAAGCAXXYNKHINISFHRPGLDMNDAVREKEIFPISNHRKSLLCSR

SEQ ID NO: 27576 - protein, 124 aa, Homo sapiens
  MOD_RES (20)..(20): Selenocysteine
  MOD_RES (50)..(50): Selenocysteine
  MOD_RES (78)..(78): Selenocysteine
  MOD_RES (86)..(86): Selenocysteine
  MOD_RES (103)..(103): Selenocysteine
KSCAARQCCNRYSSRRKQLXFHRFPFSRPELLKEWVLNIGRGNFKPKQHXVICSEHFRPECFSAFGNRKNLKHNAVPXVFAFQDPXQNLHEGRGCLPCFRPHXQDAAWHSPGARAGEGEHRPCQ

SEQ ID NO: 27577 - protein, 175 aa, Homo sapiens
  MOD_RES (22)..(22): Selenocysteine
  MOD_RES (52)..(52): Selenocysteine
  MOD_RES (80)..(80): Selenocysteine
  MOD_RES (88)..(88): Selenocysteine
  MOD_RES (95)..(95): Selenocysteine
  MOD_RES (112)..(112): Selenocysteine
  MOD_RES (136)..(136): Selenocysteine
  MOD_RES (163)..(163): Selenocysteine
MPKSCAARQCCNRYSSRRKQLXFHRFPFSRPELLKEWVLNIGRGNFKPKQHXVICSEHFRPECFSAFGNRKNLKHNAVPXVFAFQDPXQQVRENXDPASERGNASSSQKEKXSPCRSQVLPEAGAGEDSPGRNMDXALEELQLPPNAEGHVKQAMLFNVENGXPASREALWLSEE

SEQ ID NO: 27578 - protein, 239 aa, Homo sapiens
  MOD_RES (22)..(22): Selenocysteine
  MOD_RES (52)..(52): Selenocysteine
  MOD_RES (80)..(80): Selenocysteine
  MOD_RES (88)..(88): Selenocysteine
  MOD_RES (95)..(95): Selenocysteine
  MOD_RES (129)..(129): Selenocysteine
  MOD_RES (155)..(155): Selenocysteine
  MOD_RES (162)..(162): Selenocysteine
  MOD_RES (170)..(170): Selenocysteine
  MOD_RES (195)..(195): Selenocysteine
MPKSCAARQCCNRYSSRRKQLXFHRFPFSRPELLKEWVLNIGRGNFKPKQHXVICSEHFRPECFSAFGNRKNLKHNAVPXVFAFQDPXQQVRENXDPASERGNASSSQKEKVLPEAGAGEDSPGRNMDXALEELQLPPNAEGHVKQVSPRRPQAXEAVGRPXGPAGLRRXPNKQPSDHSYALLDLDSLKKKLFLXLKENEKLRKRLQAQRLVMRRMSSRLRACKGHQGLQARLGPEQQS

SEQ ID NO: 27579 - protein, 238 aa, Homo sapiens
  MOD_RES (22)..(22): Selenocysteine
  MOD_RES (52)..(52): Selenocysteine
  MOD_RES (80)..(80): Selenocysteine
  MOD_RES (88)..(88): Selenocysteine
  MOD_RES (94)..(94): Selenocysteine
  MOD_RES (128)..(128): Selenocysteine
  MOD_RES (154)..(154): Selenocysteine
  MOD_RES (161)..(161): Selenocysteine
  MOD_RES (169)..(169): Selenocysteine
  MOD_RES (194)..(194): Selenocysteine
MPKSCAARQCCNRYSSRRKQLXFHRFPFSRPELLKEWVLNIGRGNFKPKQHXVICSEHFRPECFSAFGNRKNLKHNAVPXVFAFQDPXQVRENXDPASERGNASSSQKEKVLPEAGAGEDSPGRNMDXALEELQLPPNAEGHVKQVSPRRPQAXEAVGRPXGPAGLRRXPNKQPSDHSYALLDLDSLKKKLFLXLKENEKLRKRLQAQRLVMRRMSSRLRACKGHQGLQARLGPEQQS

SEQ ID NO: 27580 - protein, 231 aa, Homo sapiens
  MOD_RES (1)..(1): Any amino acid
  MOD_RES (19)..(19): Selenocysteine
  MOD_RES (49)..(49): Selenocysteine
  MOD_RES (77)..(77): Selenocysteine
  MOD_RES (85)..(85): Selenocysteine
  MOD_RES (92)..(92): Selenocysteine
  MOD_RES (126)..(126): Selenocysteine
  MOD_RES (155)..(155): Selenocysteine
  MOD_RES (162)..(162): Selenocysteine
  MOD_RES (169)..(169): Selenocysteine
  MOD_RES (173)..(173): Selenocysteine
  MOD_RES (198)..(198): Selenocysteine
XCAARQCCNRYSSRRKQLXFHRFPFSRPELLKEWVLNIGRGNFKPKQHXVICSEHFRPECFSAFGNRKNLKHNAVPXVFAFQDPXQQVRENXDPASERGNASSSQKEKVLPEAGAGEDSPGRNMDXALEELQLPPNAEGHVKQVRLSAKVVCGWXQDDLLQXKWKPVSXHHEXCVAEAGCAAWVSELPSQILHHGVGXSGFWGSSPECLAALGLCCVRVWWPAHHGPPSCW

SEQ ID NO: 27581 - protein, 165 aa, Homo sapiens
  MOD_RES (19)..(19): Selenocysteine
  MOD_RES (29)..(29): Selenocysteine
  MOD_RES (32)..(32): Selenocysteine
  MOD_RES (63)..(63): Selenocysteine
  MOD_RES (80)..(80): Selenocysteine
  MOD_RES (91)..(91): Selenocysteine
  MOD_RES (128)..(128): Selenocysteine
  MOD_RES (142)..(142): Selenocysteine
  MOD_RES (147)..(149): Selenocysteine
  MOD_RES (153)..(153): Selenocysteine
  MOD_RES (159)..(159): Selenocysteine
  MOD_RES (164)..(164): Selenocysteine
MEPPKMNPVVEPLSWMLGXWLSDPPGAGXYPXLQPFQYLEEVHISHVGQPMLNFSFNSFHPDXRKPMHRECGFIRLKPDXNKVAFVSAQNXGVVEVEEGEVNGQELCIASHSIARISFAKEPHVEQIXRKFRLNSEGKLEQXVSMAXXXQPMXQHLHVXYKKVXP

SEQ ID NO: 27582 - protein, 192 aa, Homo sapiens
  MOD_RES (19)..(19): Selenocysteine
  MOD_RES (29)..(29): Selenocysteine
  MOD_RES (32)..(32): Selenocysteine
  MOD_RES (63)..(63): Selenocysteine
  MOD_RES (80)..(80): Selenocysteine
  MOD_RES (91)..(91): Selenocysteine
  MOD_RES (155)..(155): Selenocysteine
  MOD_RES (169)..(169): Selenocysteine
  MOD_RES (174)..(176): Selenocysteine
  MOD_RES (180)..(180): Selenocysteine
  MOD_RES (186)..(186): Selenocysteine
  MOD_RES (191)..(191): Selenocysteine
MEPPKMNPVVEPLSWMLGXWLSDPPGAGXYPXLQPFQYLEEVHISHVGQPMLNFSFNSFHPDXRKPMHRECGFIRLKPDXNKVAFVSAQNXGVVEVEEGEVNGQELCIASHSIARISFAKEPHVEQVSPALLPARSCLLFAAVCGVSLFLFREIXRKFRLNSEGKLEQXVSMAXXXQPMXQHLHVXYKKVXP

SEQ ID NO: 27583 - protein, 169 aa, Homo sapiens
  MOD_RES (106)..(106): Selenocysteine
  MOD_RES (116)..(116): Selenocysteine
  MOD_RES (119)..(119): Selenocysteine
  MOD_RES (150)..(150): Selenocysteine
MSINEVILSASGACKLIDSLHSYCFSSRQNKSQVCCLREQVEKKNGELKSLRQRVSRSDSQVRKLQEKLDELRRVSVPYPSSLLSPSREPPKMNPVVEPLSWMLGXWLSDPPGAGXYPXLQPFQYLEEVHISHVGQPMLNFSFNSFHPDXRKPMHRECGFIRLKPGSSG

SEQ ID NO: 27584 - protein, 577 aa, Homo sapiens
  MOD_RES (48)..(48): Selenocysteine
  MOD_RES (50)..(50): Selenocysteine
  MOD_RES (61)..(61): Selenocysteine
  MOD_RES (79)..(79): Selenocysteine
  MOD_RES (88)..(88): Selenocysteine
  MOD_RES (100)..(100): Selenocysteine
  MOD_RES (109)..(109): Selenocysteine
  MOD_RES (120)..(120): Selenocysteine
  MOD_RES (154)..(154): Selenocysteine
  MOD_RES (174)..(174): Selenocysteine
  MOD_RES (181)..(181): Selenocysteine
  MOD_RES (195)..(195): Selenocysteine
  MOD_RES (203)..(203): Selenocysteine
  MOD_RES (211)..(211): Selenocysteine
  MOD_RES (222)..(222): Selenocysteine
  MOD_RES (245)..(245): Selenocysteine
  MOD_RES (290)..(290): Selenocysteine
  MOD_RES (292)..(292): Selenocysteine
  MOD_RES (308)..(308): Selenocysteine
  MOD_RES (313)..(313): Selenocysteine
  MOD_RES (431)..(431): Selenocysteine
  MOD_RES (441)..(441): Selenocysteine
  MOD_RES (444)..(444): Selenocysteine
  MOD_RES (475)..(475): Selenocysteine
  MOD_RES (492)..(492): Selenocysteine
  MOD_RES (503)..(503): Selenocysteine
  MOD_RES (540)..(540): Selenocysteine
  MOD_RES (554)..(554): Selenocysteine
  MOD_RES (559)..(561): Selenocysteine
  MOD_RES (565)..(565): Selenocysteine
  MOD_RES (571)..(571): Selenocysteine
  MOD_RES (576)..(576): Selenocysteine
MVICCAAVNCSNRQGKGEKRAVSFHRFPLKDSKRLIQWLKAVQRDNWXPXKYSFLCSEHFXKDSFSKRLEDQHRLLKPXAVPSIFHLXEKKRGAGGHGRXRRKDASKAXGGVRGHSSAAXSRGAAGWSPSSSGNPMAKPESRRLKQAALQGEAXPRAAQEAASQEQAQQALERXPGDGLAXMVAGSQGKAEASAXDAGDESAXSSIEGGVXDKSGISMDDFXPPGSGACKFIGSLHSYSFSSKHXRERPSVPREPIDRKRLKKDVEPSCSGSSLGPDKGLAQSPPSSSLXAXPQKPSQSPSAPPADVXPKPAXEAVQSEHSDASPMSINEVILSASGACKLIDSLHSYCFSSRQNKSQVCCLREQVEKKNGELKSLRQRVSRSDSQVRKLQEKLDELRRVSVPYPSSLLSPSREPPKMNPVVEPLSWMLGXWLSDPPGAGXYPXLQPFQYLEEVHISHVGQPMLNFSFNSFHPDXRKPMHRECGFIRLKPDXNKVAFVSAQNXGVVEVEEGEVNGQELCIASHSIARISFAKEPHVEQIXRKFRLNSEGKLEQXVSMAXXXQPMXQHLHVXYKKVXP

SEQ ID NO: 27585 - protein, 353 aa, Homo sapiens
  MOD_RES (20)..(20): Selenocysteine
  MOD_RES (36)..(36): Selenocysteine
  MOD_RES (40)..(40): Selenocysteine
  MOD_RES (84)..(84): Selenocysteine
  MOD_RES (91)..(91): Selenocysteine
  MOD_RES (114)..(114): Selenocysteine
  MOD_RES (123)..(123): Selenocysteine
  MOD_RES (131)..(131): Selenocysteine
  MOD_RES (137)..(137): Selenocysteine
  MOD_RES (140)..(140): Selenocysteine
  MOD_RES (146)..(146): Selenocysteine
  MOD_RES (153)..(153): Selenocysteine
  MOD_RES (161)..(162): Selenocysteine
  MOD_RES (164)..(164): Selenocysteine
  MOD_RES (166)..(167): Selenocysteine
  MOD_RES (179)..(179): Selenocysteine
  MOD_RES (186)..(187): Selenocysteine
  MOD_RES (196)..(196): Selenocysteine
  MOD_RES (214)..(214): Selenocysteine
  MOD_RES (218)..(218): Selenocysteine
  MOD_RES (224)..(224): Selenocysteine
  MOD_RES (253)..(254): Selenocysteine
  MOD_RES (259)..(259): Selenocysteine
  MOD_RES (273)..(273): Selenocysteine
  MOD_RES (304)..(304): Selenocysteine
  MOD_RES (313)..(313): Selenocysteine
  MOD_RES (346)..(347): Selenocysteine
  MOD_RES (351)..(351): Selenocysteine
MKRDSWVPSKYQFLCSDHFXPDSLDIRWGIRYLKQXAVPXIFSLPEDNQGKDPSKKKSQKKNLEDEKEVCPKAKSEESFVLNEXKKNIVNXDVPHQHPELLHSSSLVKPPAPKXGSIQNNMLXLNLVKQHXGKPESXLEXSVNQDXGRGGFHXCFENLNSXXIXLXXSNSESIHQSLEXQEVLEVXXSHLANPNFXSNSMEIKSAQENPFLFSXINQXVEELNXNKESVIAIFVPAENSKPSVNSFISAQKEXXEMEDXDIEDSLYKDVDYGXEVLQIEHSYCRQDINKEHLWQKVSKLHSKIXLLELKEQQXLGRLKSLEALIRQLKQENWLSEENVKIIENHFXXYEVXMI

SEQ ID NO: 27586 - protein, 55 aa, Homo sapiens
MPRYCAAICCKNRRGRNNKDRKLSFYPFPLHDKERLEKWLKNMKRDSWVPRKRPF

SEQ ID NO: 27587 - protein, 395 aa, Homo sapiens
  MOD_RES (62)..(62): Selenocysteine
  MOD_RES (78)..(78): Selenocysteine
  MOD_RES (82)..(82): Selenocysteine
  MOD_RES (126)..(126): Selenocysteine
  MOD_RES (133)..(133): Selenocysteine
  MOD_RES (156)..(156): Selenocysteine
  MOD_RES (165)..(165): Selenocysteine
  MOD_RES (173)..(173): Selenocysteine
  MOD_RES (179)..(179): Selenocysteine
  MOD_RES (182)..(182): Selenocysteine
  MOD_RES (188)..(188): Selenocysteine
  MOD_RES (195)..(195): Selenocysteine
  MOD_RES (203)..(204): Selenocysteine
  MOD_RES (206)..(206): Selenocysteine
  MOD_RES (208)..(209): Selenocysteine
  MOD_RES (221)..(221): Selenocysteine
  MOD_RES (228)..(229): Selenocysteine
  MOD_RES (238)..(238): Selenocysteine
  MOD_RES (256)..(256): Selenocysteine
  MOD_RES (260)..(260): Selenocysteine
  MOD_RES (266)..(266): Selenocysteine
  MOD_RES (295)..(296): Selenocysteine
  MOD_RES (301)..(301): Selenocysteine
  MOD_RES (315)..(315): Selenocysteine
  MOD_RES (346)..(346): Selenocysteine
  MOD_RES (355)..(355): Selenocysteine
  MOD_RES (388)..(389): Selenocysteine
  MOD_RES (393)..(393): Selenocysteine
MPRYCAAICCKNRRGRNNKDRKLSFYPFPLHDKERLEKWLKNMKRDSWVPSKYQFLCSDHFXPDSLDIRWGIRYLKQXAVPXIFSLPEDNQGKDPSKKKSQKKNLEDEKEVCPKAKSEESFVLNEXKKNIVNXDVPHQHPELLHSSSLVKPPAPKXGSIQNNMLXLNLVKQHXGKPESXLEXSVNQDXGRGGFHXCFENLNSXXIXLXXSNSESIHQSLEXQEVLEVXXSHLANPNFXSNSMEIKSAQENPFLFSXINQXVEELNXNKESVIAIFVPAENSKPSVNSFISAQKEXXEMEDXDIEDSLYKDVDYGXEVLQIEHSYCRQDINKEHLWQKVSKLHSKIXLLELKEQQXLGRLKSLEALIRQLKQENWLSEENVKIIENHFXXYEVXMI

SEQ ID NO: 27588 - protein, 119 aa, Homo sapiens
  MOD_RES (28)..(28): Selenocysteine
  MOD_RES (68)..(68): Selenocysteine
  MOD_RES (71)..(71): Selenocysteine
  MOD_RES (75)..(75): Selenocysteine
MKRLDVNAAGIWEPKKGDVLCSRHFKKXDFDRSAPNIKLKPGVIPSIFDSPYHLQGKREKLHCRKNFXLKXVPAXNYNHHLVGASSCIEEFQSQFIFKHRKRKQEQEEEQKPRREKCIS

SEQ ID NO: 27589 - protein, 111 aa, Homo sapiens
  MOD_RES (28)..(28): Selenocysteine
  MOD_RES (68)..(68): Selenocysteine
  MOD_RES (71)..(71): Selenocysteine
  MOD_RES (75)..(75): Selenocysteine
MKRLDVNAAGIWEPKKGDVLCSRHFKKXDFDRSAPNIKLKPGVIPSIFDSPYHLQGKREKLHCRKNFXLKXVPAXNYNHHLVGASSCIEEFQSQFIFVSKLLAELMLILLR

SEQ ID NO: 27590 - protein, 98 aa, Homo sapiens
  MOD_RES (28)..(28): Selenocysteine
  MOD_RES (74)..(74): Selenocysteine
  MOD_RES (84)..(84): Selenocysteine
  MOD_RES (94)..(94): Selenocysteine
MKRLDVNAAGIWEPKKGDVLCSRHFKKXDFDRSAPNIKLKPGVIPSIFDSPYHLQISMFKRKCLFKAKNYFSVXIIANIYKGLXLSPRLMCSGXISSL

SEQ ID NO: 27591 - protein, 89 aa, Homo sapiens
  MOD_RES (28)..(28): Selenocysteine
  MOD_RES (74)..(74): Selenocysteine
  MOD_RES (89)..(89): Selenocysteine
MKRLDVNAAGIWEPKKGDVLCSRHFKKXDFDRSAPNIKLKPGVIPSIFDSPYHLQISMFKRKCLFKAKNYFSVXIIANIYKVPIFIQSX

SEQ ID NO: 27592 - protein, 77 aa, Homo sapiens
  MOD_RES (28)..(28): Selenocysteine
MKRLDVNAAGIWEPKKGDVLCSRHFKKXDFDRSAPNIKLKPGVIPSIFDSPYHLQKHRKRKQEQEEEQKPRREKCIS

SEQ ID NO: 27593 - protein, 32 aa, Homo sapiens
  MOD_RES (24)..(24): Selenocysteine
  MOD_RES (30)..(30): Selenocysteine
MVKCCSAIGCASRCLPNSKLKGLXFHVFPXDE

SEQ ID NO: 27594 - protein, 80 aa, Homo sapiens
  MOD_RES (24)..(24): Selenocysteine
  MOD_RES (30)..(30): Selenocysteine
  MOD_RES (69)..(69): Selenocysteine
MVKCCSAIGCASRCLPNSKLKGLXFHVFPXDENIKRKWVLAMKRLDVNAAGIWEPKKGDVLCSRHFKKXDFDRSAPNIKL

SEQ ID NO: 27595 - protein, 180 aa, Homo sapiens
  MOD_RES (24)..(24): Selenocysteine
  MOD_RES (30)..(30): Selenocysteine
  MOD_RES (69)..(69): Selenocysteine
  MOD_RES (123)..(123): Selenocysteine
  MOD_RES (144)..(144): Selenocysteine
  MOD_RES (158)..(158): Selenocysteine
  MOD_RES (164)..(164): Selenocysteine
MVKCCSAIGCASRCLPNSKLKGLXFHVFPXDENIKRKWVLAMKRLDVNAAGIWEPKKGDVLCSRHFKKXDFDRSAPNIKLKPGVIPSIFDSPYHLQEHSYSVMDSPKKLKHKLDHVIGELEDXKESLRNVLDREKRFQKSLRKXIRELKDECLISQEXANRLDXFCWDCCQESIEQDYIS

SEQ ID NO: 27596 - protein, 222 aa, Homo sapiens
  MOD_RES (24)..(24): Selenocysteine
  MOD_RES (30)..(30): Selenocysteine
  MOD_RES (69)..(69): Selenocysteine
  MOD_RES (109)..(109): Selenocysteine
  MOD_RES (112)..(112): Selenocysteine
  MOD_RES (116)..(116): Selenocysteine
  MOD_RES (165)..(165): Selenocysteine
  MOD_RES (186)..(186): Selenocysteine
  MOD_RES (200)..(200): Selenocysteine
  MOD_RES (206)..(206): Selenocysteine
MVKCCSAIGCASRCLPNSKLKGLXFHVFPXDENIKRKWVLAMKRLDVNAAGIWEPKKGDVLCSRHFKKXDFDRSAPNIKLKPGVIPSIFDSPYHLQGKREKLHCRKNFXLKXVPAXNYNHHLVGASSCIEEFQSQFIFEHSYSVMDSPKKLKHKLDHVIGELEDXKESLRNVLDREKRFQKSLRKXIRELKDECLISQEXANRLDXFCWDCCQESIEQDYIS

SEQ ID NO: 27597 - protein, 160 aa, Homo sapiens
  MOD_RES (24)..(24): Selenocysteine
  MOD_RES (30)..(30): Selenocysteine
  MOD_RES (69)..(69): Selenocysteine
  MOD_RES (109)..(109): Selenocysteine
  MOD_RES (112)..(112): Selenocysteine
  MOD_RES (116)..(116): Selenocysteine
MVKCCSAIGCASRCLPNSKLKGLXFHVFPXDENIKRKWVLAMKRLDVNAAGIWEPKKGDVLCSRHFKKXDFDRSAPNIKLKPGVIPSIFDSPYHLQGKREKLHCRKNFXLKXVPAXNYNHHLVGASSCIEEFQSQFIFKHRKRKQEQEEEQKPRREKCIS

SEQ ID NO: 27598 - protein, 309 aa, Homo sapiens
  MOD_RES (12)..(12): Selenocysteine
  MOD_RES (15)..(15): Selenocysteine
  MOD_RES (18)..(18): Selenocysteine
  MOD_RES (91)..(91): Selenocysteine
  MOD_RES (102)..(103): Selenocysteine
  MOD_RES (105)..(105): Selenocysteine
  MOD_RES (134)..(135): Selenocysteine
  MOD_RES (146)..(146): Selenocysteine
  MOD_RES (158)..(158): Selenocysteine
  MOD_RES (273)..(273): Selenocysteine
  MOD_RES (292)..(292): Selenocysteine
MPRHCSAAGCCXRDXREXRNRGISFHRLPKKDNPRRGLWLANCQRLDPSGQGLWDPASEYIYFCSKHFEEDCFELVGISGYHRLKEGAVPXIFESFSKLRRXXKXKGHSYPPGPAEVSRLRRCRKRCSEGRGPXXPFSPPPPADVXCFPVEEASAPAXLPASPAGRLEPGLSSPFSDLLGPLGAQADEAGCSAQPSPERQPSPLEPRPVSPSAYMLRLPPPAGAYIQNEHSYQVGSALLWKRRAEAALDALDKAQRQLQACKRREQRLRLRLXKLQQERAREKRAQADARQXLKEHVQDFAMQLSSSMA

SEQ ID NO: 27599 - protein, 41 aa, Homo sapiens
  MOD_RES (13)..(13): Selenocysteine
  MOD_RES (26)..(26): Selenocysteine
MPKYCRAPNCSNXAGRLGADNRPVPXEGWSPAAGLAAAHGL

SEQ ID NO: 27600 - protein, 274 aa, Homo sapiens
  MOD_RES (13)..(13): Selenocysteine
  MOD_RES (63)..(63): Selenocysteine
  MOD_RES (97)..(97): Selenocysteine
  MOD_RES (100)..(100): Selenocysteine
  MOD_RES (114)..(114): Selenocysteine
  MOD_RES (136)..(136): Selenocysteine
  MOD_RES (142)..(142): Selenocysteine
  MOD_RES (145)..(145): Selenocysteine
  MOD_RES (149)..(149): Selenocysteine
  MOD_RES (156)..(156): Selenocysteine
  MOD_RES (171)..(171): Selenocysteine
  MOD_RES (225)..(226): Selenocysteine
  MOD_RES (229)..(229): Selenocysteine
  MOD_RES (237)..(237): Selenocysteine
  MOD_RES (239)..(239): Selenocysteine
  MOD_RES (259)..(259): Selenocysteine
  MOD_RES (269)..(269): Selenocysteine
MPKYCRAPNCSNXAGRLGADNRPVSFYKFPLKDGPRLQAWLQHMGCEHWVPSCHQHLCSEHFXPSCFQWRWGVRYLRPDAVPSIFSRGPPAKSQRRXRSXQKPVSPPPPLQKNXPLPQSPAIPVSGPVRLVVLGPXSGSPKXVAXMLLXPLAPAPXPERSQPEVPAQQAQXGLGPVLGALQRRVRRLQRCQERHQAQLQALERLAQQLHGESLLARARRGLQRLXXAQXLGPEESQXFXIICGGPDIAMVLAQDPAPAXVDAKPELLDXRIPSA

SEQ ID NO: 27601 - protein, 65 aa, Homo sapiens
  MOD_RES (13)..(13): Selenocysteine
MPKYCRAPNCSNXAGRLGADNRPVSFYKVSGGPEAPRSQSRRRLPYRRIHPCPRALPSQSLAQCA

SEQ ID NO: 27602 - protein, 30 aa, Homo sapiens
  MOD_RES (2)..(2): Selenocysteine
  MOD_RES (12)..(12): Selenocysteine
  MOD_RES (15)..(15): Selenocysteine
MXRSCSAVGCSXRDXVLSRERGLSFHHVYL

SEQ ID NO: 27603 - protein, 903 aa, Homo sapiens
  MOD_RES (2)..(2): Selenocysteine
  MOD_RES (12)..(12): Selenocysteine
  MOD_RES (15)..(15): Selenocysteine
  MOD_RES (30)..(30): Selenocysteine
  MOD_RES (32)..(32): Selenocysteine
  MOD_RES (121)..(121): Selenocysteine
  MOD_RES (130)..(130): Selenocysteine
  MOD_RES (133)..(133): Selenocysteine
  MOD_RES (184)..(184): Selenocysteine
  MOD_RES (205)..(205): Selenocysteine
  MOD_RES (218)..(218): Selenocysteine
  MOD_RES (244)..(244): Selenocysteine
  MOD_RES (315)..(315): Selenocysteine
  MOD_RES (321)..(321): Selenocysteine
  MOD_RES (335)..(335): Selenocysteine
  MOD_RES (357)..(357): Selenocysteine
  MOD_RES (367)..(367): Selenocysteine
  MOD_RES (372)..(372): Selenocysteine
  MOD_RES (376)..(376): Selenocysteine
  MOD_RES (398)..(398): Selenocysteine
  MOD_RES (464)..(464): Selenocysteine
  MOD_RES (479)..(479): Selenocysteine
  MOD_RES (507)..(507): Selenocysteine
  MOD_RES (539)..(539): Selenocysteine
  MOD_RES (552)..(552): Selenocysteine
  MOD_RES (556)..(556): Selenocysteine
  MOD_RES (560)..(560): Selenocysteine
  MOD_RES (604)..(604): Selenocysteine
  MOD_RES (625)..(625): Selenocysteine
  MOD_RES (630)..(630): Selenocysteine
  MOD_RES (643)..(643): Selenocysteine
  MOD_RES (673)..(673): Selenocysteine
  MOD_RES (683)..(683): Selenocysteine
  MOD_RES (685)..(685): Selenocysteine
  MOD_RES (731)..(731): Selenocysteine
  MOD_RES (737)..(737): Selenocysteine
  MOD_RES (781)..(781): Selenocysteine
  MOD_RES (863)..(863): Selenocysteine
  MOD_RES (867)..(867): Selenocysteine
  MOD_RES (887)..(887): Selenocysteine
MXRSCSAVGCSXRDXVLSRERGLSFHQFPXDXIQRSKWIRAVNRVDPRSKKIWIPGPGAILCSKHFQESDFESYGIRRKLKKGAVPSVSLYKIPQGVHLKGKARQKILKQPLPDNSQEVAXEDHNYSLKXPLXIGAEKLAEVQQMLQVSKKRLISVKNYRMIKKRKGLRLIDALVEEKLLSEEXECLLRAQFSDFKWELYNWREXDEYSAEMKQFACXLYLCSSKVYDYVRKILKLPHSSILRXWLSKCQPSPGFNSNIFSFLQRRVENGDQLYQYCSLLIKSMPLKQQLQWDPSSHSLQGFMDFGLGKLDADEXPLASEXVLLMAVGIFGHWRXPLGYFFVNRASGYLQAQLLRLXIGKLSDIGIXVLAVXSDAXAHSVQMAKALGIHIDGDDMKCXFQHPSSSSQQIAYFFDSCHLLRLIRNAFQNFQSIQFINGIAHWQHLVELVALEEQELSNMERIPSXLANLKNHVLKVNSAXQLFSESVASALEYLLSLDLPPFQNCIGXIHFLRLINNLFDIFNSRNCYGKGLKGPLLPEXYSKINHVLIEAKXIFVXLSDXSNNQIIKGKQKLGFLGFLLNAESLKWLYQNYVFPKVMPFPYLLXYKFSHDHLELFLKMLRQVLVXSSSPXCMAFQKAYYNLEXRYKFQDEVFLSKVSIFDISIARRKDLALWXVQRQYGVSVXKXVFHEEGICQDWSHCSLSEALLDLSDHRRNLICYAGYVANKLSALLXCEDCIXALYASDLKASKIGSLLFVKKKNGLHFPSESLCRVINICERVVRXHSRMAIFELVSKQRELYLQQKILCELSGHINLFVDVNKHLFDGEVCAINHFVKLLKDIIICFLNIRAKNVAQNPLKHHSERXDMKXLSRKHWSSVQDYKCSSFANXSSKFRHLLSNDGYPFK

SEQ ID NO: 27604 - protein, 102 aa, Homo sapiens
  MOD_RES (2)..(2): Selenocysteine
  MOD_RES (12)..(12): Selenocysteine
  MOD_RES (15)..(15): Selenocysteine
  MOD_RES (30)..(30): Selenocysteine
  MOD_RES (32)..(32): Selenocysteine
  MOD_RES (95)..(95): Selenocysteine
MXRSCSAVGCSXRDXVLSRERGLSFHQFPXDXIQRSKWIRAVNRVDPRSKKIWIPGPGAILCSKHFQESDFESYGIRRKLKKGAVPSVSLYKMRXQGIVELM

SEQ ID NO: 27605 - protein, 109 aa, Homo sapiens
  MOD_RES (2)..(2): Selenocysteine
  MOD_RES (12)..(12): Selenocysteine
  MOD_RES (15)..(15): Selenocysteine
  MOD_RES (30)..(30): Selenocysteine
  MOD_RES (32)..(32): Selenocysteine
  MOD_RES (99)..(99): Selenocysteine
  MOD_RES (107)..(107): Selenocysteine
MXRSCSAVGCSXRDXVLSRERGLSFHQFPXDXIQRSKWIRAVNRVDPRSKKIWIPGPGAILCSKHFQESDFESYGIRRKLKKGAVPSVSLYKVFKYEDXRDCRAYVXAN

SEQ ID NO: 27606 - protein, 102 aa, Homo sapiens
  MOD_RES (2)..(2): Selenocysteine
  MOD_RES (12)..(12): Selenocysteine
  MOD_RES (15)..(15): Selenocysteine
  MOD_RES (30)..(30): Selenocysteine
  MOD_RES (32)..(32): Selenocysteine
  MOD_RES (101)..(101): Selenocysteine
MXRSCSAVGCSXRDXVLSRERGLSFHQFPXDXIQRSKWIRAVNRVDPRSKKIWIPGPGAILCSKHFQESDFESYGIRRKLKKGAVPSVSLYKVFKYSSRCXS

SEQ ID NO: 27607 - protein, 121 aa, Homo sapiens
  MOD_RES (4)..(4): Selenocysteine
  MOD_RES (7)..(7): Selenocysteine
  MOD_RES (58)..(58): Selenocysteine
  MOD_RES (79)..(79): Selenocysteine
  MOD_RES (92)..(92): Selenocysteine
  MOD_RES (118)..(118): Selenocysteine
SLKXPLXIGAEKLAEVQQMLQVSKKRLISVKNYRMIKKRKGLRLIDALVEEKLLSEEXECLLRAQFSDFKWELYNWREXDEYSAEMKQFACXLYLCSSKVYDYVRKILKLPHSSILRXSGQ

SEQ ID NO: 27608 - protein, 575 aa, Homo sapiens
  MOD_RES (44)..(44): Selenocysteine
  MOD_RES (61)..(61): Selenocysteine
  MOD_RES (112)..(112): Selenocysteine
  MOD_RES (117)..(117): Selenocysteine
  MOD_RES (146)..(146): Selenocysteine
  MOD_RES (174)..(174): Selenocysteine
  MOD_RES (192)..(192): Selenocysteine
  MOD_RES (195)..(195): Selenocysteine
  MOD_RES (225)..(225): Selenocysteine
  MOD_RES (281)..(281): Selenocysteine
  MOD_RES (285)..(285): Selenocysteine
  MOD_RES (312)..(312): Selenocysteine
  MOD_RES (343)..(343): Selenocysteine
  MOD_RES (384)..(384): Selenocysteine
  MOD_RES (411)..(411): Selenocysteine
  MOD_RES (421)..(421): Selenocysteine
  MOD_RES (440)..(440): Selenocysteine
  MOD_RES (461)..(461): Selenocysteine
  MOD_RES (478)..(478): Selenocysteine
  MOD_RES (500)..(500): Selenocysteine
  MOD_RES (504)..(504): Selenocysteine
  MOD_RES (506)..(506): Selenocysteine
  MOD_RES (568)..(568): Selenocysteine
  MOD_RES (571)..(571): Selenocysteine
MLGVLVLGALALAGLGFPAPAEPQPGGSQCVEHDCFALYPGPAXFLNASQICDGLRGHLMXVRSSVAADVISLLLNGDGGVGRRRLWIGLQLPPGCGDPKRLGPLRGFQWVXGDNNXSYSRWARLDLNGAPLCGPLCVAVSAAEAXVPSEPIWEEQQCEVKADGFLCEFHFPAXCRPLAVEPGAAAAAVSIXYGXPFAARGADFQALPVGSSAAVAPLGLQLMCXAPPGAVQGHWAREAPGAWDCSVENGGCEHACNAIPGAPRCQCPAGAALQADGRSCXASAXQSCNDLCEHFCVPNPDQPGSYSCMCEXGYRLAADQHRCEDVDDCILEPSPCPQRCVNXQGGFECHCYPNYDLVDGECVEPVDPCFRANCEYQCQPLNQXSYLCVCAEGFAPIPHEPHRCQMFCNQXACPADCDPNXQASCECPEGYILDDGFICXDIDECENGGFCSGVCHNLPGXFECICGPDSALARHIGXDCDSGKVDGGDSGSGEPPPSPXPGSXLXPPAVGLVHSGLLIGISIASLCLVVALLALLCHLRKKQGAARAKMEYKCAAPSKEVVLQHVRXERXPQRL

SEQ ID NO: 27609 - protein, 94 aa, Homo sapiens
  MOD_RES (18)..(18): Selenocysteine
  MOD_RES (37)..(37): Selenocysteine
MGLAWGLGVLFLMHVCGXNRIPESGGDNSVFDIFELXGAARKGSGRRLVKGPDPSSPAFRIEDANLIPPVPDDKFQDLVDAVRAEKGFLLLASL

SEQ ID NO: 27610 - protein, 1170 aa, Homo sapiens
  MOD_RES (18)..(18): Selenocysteine
  MOD_RES (37)..(37): Selenocysteine
  MOD_RES (100)..(100): Selenocysteine
  MOD_RES (103)..(103): Selenocysteine
  MOD_RES (127)..(127): Selenocysteine
  MOD_RES (133)..(133): Selenocysteine
  MOD_RES (150)..(150): Selenocysteine
  MOD_RES (157)..(157): Selenocysteine
  MOD_RES (188)..(188): Selenocysteine
  MOD_RES (221)..(222): Selenocysteine
  MOD_RES (236)..(236): Selenocysteine
  MOD_RES (241)..(241): Selenocysteine
  MOD_RES (256)..(256): Selenocysteine
  MOD_RES (263)..(263): Selenocysteine
  MOD_RES (289)..(289): Selenocysteine
  MOD_RES (292)..(293): Selenocysteine
  MOD_RES (302)..(302): Selenocysteine
  MOD_RES (332)..(332): Selenocysteine
  MOD_RES (337)..(337): Selenocysteine
  MOD_RES (346)..(346): Selenocysteine
  MOD_RES (362)..(362): Selenocysteine
  MOD_RES (389)..(389): Selenocysteine
  MOD_RES (393)..(393): Selenocysteine
  MOD_RES (420)..(420): Selenocysteine
  MOD_RES (422)..(422): Selenocysteine
  MOD_RES (450)..(450): Selenocysteine
  MOD_RES (457)..(457): Selenocysteine
  MOD_RES (481)..(481): Selenocysteine
  MOD_RES (507)..(507): Selenocysteine
  MOD_RES (523)..(523): Selenocysteine
  MOD_RES (536)..(536): Selenocysteine
  MOD_RES (563)..(563): Selenocysteine
  MOD_RES (587)..(587): Selenocysteine
  MOD_RES (611)..(611): Selenocysteine
  MOD_RES (625)..(625): Selenocysteine
  MOD_RES (638)..(638): Selenocysteine
  MOD_RES (651)..(651): Selenocysteine
  MOD_RES (654)..(654): Selenocysteine
  MOD_RES (693)..(693): Selenocysteine
  MOD_RES (710)..(710): Selenocysteine
  MOD_RES (788)..(788): Selenocysteine
  MOD_RES (824)..(824): Selenocysteine
  MOD_RES (855)..(855): Selenocysteine
  MOD_RES (955)..(955): Selenocysteine
  MOD_RES (970)..(970): Selenocysteine
  MOD_RES (989)..(989): Selenocysteine
  MOD_RES (1011)..(1011): Selenocysteine
  MOD_RES (1016)..(1016): Selenocysteine
  MOD_RES (1044)..(1044): Selenocysteine
  MOD_RES (1050)..(1050): Selenocysteine
  MOD_RES (1053)..(1053): Selenocysteine
  MOD_RES (1069)..(1070): Selenocysteine
  MOD_RES (1083)..(1083): Selenocysteine
  MOD_RES (1086)..(1086): Selenocysteine
  MOD_RES (1092)..(1092): Selenocysteine
  MOD_RES (1106)..(1106): Selenocysteine
  MOD_RES (1118)..(1118): Selenocysteine
  MOD_RES (1142)..(1142): Selenocysteine
MGLAWGLGVLFLMHVCGXNRIPESGGDNSVFDIFELXGAARKGSGRRLVKGPDPSSPAFRIEDANLIPPVPDDKFQDLVDAVRAEKGFLLLASLRQMKKXRGXLLALERKDHSGQVFSVVSNGKAGXLDLSLXVQGKQHVVSVEEALLAXGQWKSIXLFVQEDRAQLYIDCEKMENAELDVPIQSVFXRDLASIARLRIAKGGVNDNFQGVLQNVRFVFGXXPEDILRNKGCSSSXSVLLXLDNNVVNGSSPAIRXNYIGHKXKDLQAICGISCDELSSMVLELRGLRXIVXXLQDSIRKVXEENKELANELRRPPLCYHNGVQYRNNEEWXVDSCXECHCQNSVXICKKVSCPIMPCSNAXVPDGECCPRCWPSDSADDGWSPWSEWXSCSXSCGNGIQQRGRSCDSLNNRCEGSSVQXRXCHIQECDKRFKQDGGWSHWSPWSSCSVXCGDGVIXRIRLCNSPSPQMNGKPCEGEAREXKACKKDACPINGGWGPWSPWDICSVXCGGGVQKRSRLCNNPXPQFGGKDCVGDVXENQICNKQDCPIDGCLSNPCFAGVKCXSYPDGSWKCGACPPGYSGNGIQCXDVDECKEVPDACFNHNGEHRCENXDPGYNCLPCPPRFXGSQPFGQGVEHAXANKQVCKPRNPCXDGXHDCNKNAKCNYLGHYSDPMYRCECKPGYAGNGIICGEDXDLDGWPNENLVCVANAXYHCKKDNCPNLPNSGQEDYDKDGIGDACDDDDDNDKIPDDRDNCPFHYNPAQYDYDRDDVGDRCDNCPYNHNPDQADXDNNGEGDACAADIDGDGILNERDNCQYVYNVDQRDXDMDGVGDQCDNCPLEHNPDQLDSDSDRIGDXCDNNQDIDEDGHQNNLDNCPYVPNANQADHDKDGKGDACDHDDDNDGIPDDKDNCRLVPNPDQKDSDGDGRGDACKDDFDHDSVPDIDDICPENVDISEXDFRRFQMIPLDPKGXSQNDPNWVVRHQGKELVQXVNCDPGLAVGYDEFNAVDFSGXFFINXERDDDYAGFVFGYQSSSRFYVVMWKQVXQSYWDXNPXRAQGYSGLSVKVVNSXXGPGEHLRNALWHXGNXPGQVRXLWHDPRHIGWKDFXAYRWRLSHRPKXGFIRVVMYEGKKIMADSGPIYDKXYAGGRLGLFVFSQEMVFFSDLKYECRDP

SEQ ID NO: 27611 - protein, 107 aa, Homo sapiens
  MOD_RES (11)..(11): Selenocysteine
  MOD_RES (82)..(82): Selenocysteine
  MOD_RES (84)..(84): Selenocysteine
  MOD_RES (92)..(92): Selenocysteine
MLRSCAARLRXLGALCLPPVGRRLPGSEPRPELRSFSSEEVILKDCSVPNPSWNKDLRLLFDQFMKKCEDGSWKRLPSYKRXPXEWIQDFKXHFLAWLMAGRCGSRL

SEQ ID NO: 27612 - protein, 240 aa, Homo sapiens
  MOD_RES (11)..(11): Selenocysteine
  MOD_RES (82)..(82): Selenocysteine
  MOD_RES (84)..(84): Selenocysteine
  MOD_RES (92)..(92): Selenocysteine
  MOD_RES (112)..(112): Selenocysteine
  MOD_RES (158)..(158): Selenocysteine
  MOD_RES (163)..(163): Selenocysteine
  MOD_RES (177)..(177): Selenocysteine
  MOD_RES (221)..(221): Selenocysteine
  MOD_RES (227)..(227): Selenocysteine
  MOD_RES (240)..(240): Selenocysteine
MLRSCAARLRXLGALCLPPVGRRLPGSEPRPELRSFSSEEVILKDCSVPNPSWNKDLRLLFDQFMKKCEDGSWKRLPSYKRXPXEWIQDFKXHFLDPKLMKEEQMSQAQLFXRSFDDGLGFEYVMFYNDIEKRMVCLFQGGPYLEGPPGFIHGGAIAXMIDAXVGMCAMMAGGIVMXANLNINYKRPIPLCSVVMINSQLDKVEGRKFFVSCNVQSVDEKXLYSEAXSLFIKLNPAKSLX

SEQ ID NO: 27613 - protein, 110 aa, Homo sapiens
  MOD_RES (11)..(11): Selenocysteine
  MOD_RES (82)..(82): Selenocysteine
  MOD_RES (84)..(84): Selenocysteine
  MOD_RES (92)..(92): Selenocysteine
MLRSCAARLRXLGALCLPPVGRRLPGSEPRPELRSFSSEEVILKDCSVPNPSWNKDLRLLFDQFMKKCEDGSWKRLPSYKRXPXEWIQDFKXHFLGRNSHFPINISEHQI

SEQ ID NO: 27614 - protein, 641 aa, Homo sapiens
  MOD_RES (16)..(16): Selenocysteine
  MOD_RES (45)..(45): Selenocysteine
  MOD_RES (52)..(52): Selenocysteine
  MOD_RES (93)..(93): Selenocysteine
  MOD_RES (97)..(97): Selenocysteine
  MOD_RES (102)..(102): Selenocysteine
  MOD_RES (104)..(104): Selenocysteine
  MOD_RES (160)..(160): Selenocysteine
  MOD_RES (183)..(183): Selenocysteine
  MOD_RES (197)..(197): Selenocysteine
  MOD_RES (199)..(199): Selenocysteine
  MOD_RES (203)..(203): Selenocysteine
  MOD_RES (212)..(212): Selenocysteine
  MOD_RES (222)..(222): Selenocysteine
  MOD_RES (256)..(256): Selenocysteine
  MOD_RES (270)..(270): Selenocysteine
  MOD_RES (277)..(277): Selenocysteine
  MOD_RES (285)..(285): Selenocysteine
  MOD_RES (306)..(306): Selenocysteine
  MOD_RES (336)..(336): Selenocysteine
  MOD_RES (351)..(351): Selenocysteine
  MOD_RES (370)..(370): Selenocysteine
  MOD_RES (396)..(397): Selenocysteine
  MOD_RES (476)..(476): Selenocysteine
  MOD_RES (486)..(486): Selenocysteine
  MOD_RES (499)..(499): Selenocysteine
  MOD_RES (512)..(512): Selenocysteine
  MOD_RES (530)..(530): Selenocysteine
  MOD_RES (536)..(536): Selenocysteine
  MOD_RES (566)..(566): Selenocysteine
  MOD_RES (569)..(569): Selenocysteine
  MOD_RES (572)..(572): Selenocysteine
  MOD_RES (578)..(578): Selenocysteine
  MOD_RES (593)..(593): Selenocysteine
  MOD_RES (628)..(628): Selenocysteine
  MOD_RES (633)..(633): Selenocysteine
MALSLEEFVHSLDLRXLPRVLEIQAGIYLEGSIYEMFGNECCFSXGEVIKIXGLKVKKIIAEICEQIEGCESLQPFELPMNFPGLFKIVADKXPYLXMEEIXRXIHIGPSRLGHPCFYHQKDIKLENLIIKQGEQIMLNSVEEIDGEIMVSCAVARNHQXHSFNLPLSQEGEFYECEDERIYXLKEIVEWKIPKNRXRXVNLXDFSNKWDSXNPFPKDFYGXLILKPVYEIQGVMKFRKDIIRILPSLDVEVKDIXDSYDANWFLQLLSXEDLFEMXSKEFPIVXEVIEAPEGNHLPQSILQPGKXIVIHKKYQASRILASEIRSNFPKRHFLIPXSYKGKFKRRPREFPXAYDLEIAKSEKEPLHVVAXKAFHSPHDKLSSVSVGDQFLVHQSEXXEVLCEGIKKVVNVLACEKILKKSYEAALLPLYMEGGFVEVIHDKKQYPISELCKQFRLPFNVKVSVRDLSIEEDVLAAXPGLQLEEDIXDSYLLISDFANPXECWEIPVGRLNMXVQLVSNFSRDAEPFLVRXLVEEIXEEQYYMMRRYESSASHPPPRPPKHPSVEEXKLXLLXLAEERXVDLPKSPKRHHVDIXKKLHPNQAGLDSKVLIGSQNDLVDEEKERSNRGAXAIAEXFKNEKHQK

SEQ ID NO: 27615 - protein, 680 aa, Homo sapiens
  MOD_RES (16)..(16): Selenocysteine
  MOD_RES (45)..(45): Selenocysteine
  MOD_RES (52)..(52): Selenocysteine
  MOD_RES (93)..(93): Selenocysteine
  MOD_RES (97)..(97): Selenocysteine
  MOD_RES (102)..(102): Selenocysteine
  MOD_RES (104)..(104): Selenocysteine
  MOD_RES (160)..(160): Selenocysteine
  MOD_RES (183)..(183): Selenocysteine
  MOD_RES (197)..(197): Selenocysteine
  MOD_RES (199)..(199): Selenocysteine
  MOD_RES (203)..(203): Selenocysteine
  MOD_RES (212)..(212): Selenocysteine
  MOD_RES (222)..(222): Selenocysteine
  MOD_RES (256)..(256): Selenocysteine
  MOD_RES (270)..(270): Selenocysteine
  MOD_RES (277)..(277): Selenocysteine
  MOD_RES (285)..(285): Selenocysteine
  MOD_RES (306)..(306): Selenocysteine
  MOD_RES (336)..(336): Selenocysteine
  MOD_RES (351)..(351): Selenocysteine
  MOD_RES (370)..(370): Selenocysteine
  MOD_RES (396)..(397): Selenocysteine
  MOD_RES (476)..(476): Selenocysteine
  MOD_RES (486)..(486): Selenocysteine
  MOD_RES (499)..(499): Selenocysteine
  MOD_RES (512)..(512): Selenocysteine
  MOD_RES (530)..(530): Selenocysteine
  MOD_RES (536)..(536): Selenocysteine
  MOD_RES (566)..(566): Selenocysteine
  MOD_RES (569)..(569): Selenocysteine
  MOD_RES (572)..(572): Selenocysteine
  MOD_RES (578)..(578): Selenocysteine
  MOD_RES (618)..(618): Selenocysteine
  MOD_RES (620)..(620): Selenocysteine
  MOD_RES (632)..(632): Selenocysteine
  MOD_RES (667)..(667): Selenocysteine
  MOD_RES (672)..(672): Selenocysteine
MALSLEEFVHSLDLRXLPRVLEIQAGIYLEGSIYEMFGNECCFSXGEVIKIXGLKVKKIIAEICEQIEGCESLQPFELPMNFPGLFKIVADKXPYLXMEEIXRXIHIGPSRLGHPCFYHQKDIKLENLIIKQGEQIMLNSVEEIDGEIMVSCAVARNHQXHSFNLPLSQEGEFYECEDERIYXLKEIVEWKIPKNRXRXVNLXDFSNKWDSXNPFPKDFYGXLILKPVYEIQGVMKFRKDIIRILPSLDVEVKDIXDSYDANWFLQLLSXEDLFEMXSKEFPIVXEVIEAPEGNHLPQSILQPGKXIVIHKKYQASRILASEIRSNFPKRHFLIPXSYKGKFKRRPREFPXAYDLEIAKSEKEPLHVVAXKAFHSPHDKLSSVSVGDQFLVHQSEXXEVLCEGIKKVVNVLACEKILKKSYEAALLPLYMEGGFVEVIHDKKQYPISELCKQFRLPFNVKVSVRDLSIEEDVLAAXPGLQLEEDIXDSYLLISDFANPXECWEIPVGRLNMXVQLVSNFSRDAEPFLVRXLVEEIXEEQYYMMRRYESSASHPPPRPPKHPSVEEXKLXLLXLAEERXVDLPKSPKAGVQWRDLGSLQPLPPGFKQFSASASHVAGIXGXPHHVQRHHVDIXKKLHPNQAGLDSKVLIGSQNDLVDEEKERSNRGAXAIAEXFKNEKHQK

SEQ ID NO: 27616 - protein, 606 aa, Homo sapiens
  MOD_RES (10)..(10): Selenocysteine
  MOD_RES (17)..(17): Selenocysteine
  MOD_RES (58)..(58): Selenocysteine
  MOD_RES (62)..(62): Selenocysteine
  MOD_RES (67)..(67): Selenocysteine
  MOD_RES (69)..(69): Selenocysteine
  MOD_RES (125)..(125): Selenocysteine
  MOD_RES (148)..(148): Selenocysteine
  MOD_RES (162)..(162): Selenocysteine
  MOD_RES (164)..(164): Selenocysteine
  MOD_RES (168)..(168): Selenocysteine
  MOD_RES (177)..(177): Selenocysteine
  MOD_RES (187)..(187): Selenocysteine
  MOD_RES (221)..(221): Selenocysteine
  MOD_RES (235)..(235): Selenocysteine
  MOD_RES (242)..(242): Selenocysteine
  MOD_RES (250)..(250): Selenocysteine
  MOD_RES (271)..(271): Selenocysteine
  MOD_RES (301)..(301): Selenocysteine
  MOD_RES (316)..(316): Selenocysteine
  MOD_RES (335)..(335): Selenocysteine
  MOD_RES (361)..(362): Selenocysteine
  MOD_RES (441)..(441): Selenocysteine
  MOD_RES (451)..(451): Selenocysteine
  MOD_RES (464)..(464): Selenocysteine
  MOD_RES (477)..(477): Selenocysteine
  MOD_RES (495)..(495): Selenocysteine
  MOD_RES (501)..(501): Selenocysteine
  MOD_RES (531)..(531): Selenocysteine
  MOD_RES (534)..(534): Selenocysteine
  MOD_RES (537)..(537): Selenocysteine
  MOD_RES (543)..(543): Selenocysteine
  MOD_RES (558)..(558): Selenocysteine
  MOD_RES (593)..(593): Selenocysteine
  MOD_RES (598)..(598): Selenocysteine
MFGNECCFSXGEVIKIXGLKVKKIIAEICEQIEGCESLQPFELPMNFPGLFKIVADKXPYLXMEEIXRXIHIGPSRLGHPCFYHQKDIKLENLIIKQGEQIMLNSVEEIDGEIMVSCAVARNHQXHSFNLPLSQEGEFYECEDERIYXLKEIVEWKIPKNRXRXVNLXDFSNKWDSXNPFPKDFYGXLILKPVYEIQGVMKFRKDIIRILPSLDVEVKDIXDSYDANWFLQLLSXEDLFEMXSKEFPIVXEVIEAPEGNHLPQSILQPGKXIVIHKKYQASRILASEIRSNFPKRHFLIPXSYKGKFKRRPREFPXAYDLEIAKSEKEPLHVVAXKAFHSPHDKLSSVSVGDQFLVHQSEXXEVLCEGIKKVVNVLACEKILKKSYEAALLPLYMEGGFVEVIHDKKQYPISELCKQFRLPFNVKVSVRDLSIEEDVLAAXPGLQLEEDIXDSYLLISDFANPXECWEIPVGRLNMXVQLVSNFSRDAEPFLVRXLVEEIXEEQYYMMRRYESSASHPPPRPPKHPSVEEXKLXLLXLAEERXVDLPKSPKRHHVDIXKKLHPNQAGLDSKVLIGSQNDLVDEEKERSNRGAXAIAEXFKNEKHQK

SEQ ID NO: 27617 - protein, 562 aa, Homo sapiens
  MOD_RES (14)..(14): Selenocysteine
  MOD_RES (18)..(18): Selenocysteine
  MOD_RES (23)..(23): Selenocysteine
  MOD_RES (25)..(25): Selenocysteine
  MOD_RES (81)..(81): Selenocysteine
  MOD_RES (104)..(104): Selenocysteine
  MOD_RES (118)..(118): Selenocysteine
  MOD_RES (120)..(120): Selenocysteine
  MOD_RES (124)..(124): Selenocysteine
  MOD_RES (133)..(133): Selenocysteine
  MOD_RES (143)..(143): Selenocysteine
  MOD_RES (177)..(177): Selenocysteine
  MOD_RES (191)..(191): Selenocysteine
  MOD_RES (198)..(198): Selenocysteine
  MOD_RES (206)..(206): Selenocysteine
  MOD_RES (227)..(227): Selenocysteine
  MOD_RES (257)..(257): Selenocysteine
  MOD_RES (272)..(272): Selenocysteine
  MOD_RES (291)..(291): Selenocysteine
  MOD_RES (317)..(318): Selenocysteine
  MOD_RES (397)..(397): Selenocysteine
  MOD_RES (407)..(407): Selenocysteine
  MOD_RES (420)..(420): Selenocysteine
  MOD_RES (433)..(433): Selenocysteine
  MOD_RES (451)..(451): Selenocysteine
  MOD_RES (457)..(457): Selenocysteine
  MOD_RES (487)..(487): Selenocysteine
  MOD_RES (490)..(490): Selenocysteine
  MOD_RES (493)..(493): Selenocysteine
  MOD_RES (499)..(499): Selenocysteine
  MOD_RES (514)..(514): Selenocysteine
  MOD_RES (549)..(549): Selenocysteine
  MOD_RES (554)..(554): Selenocysteine
MNFPGLFKIVADKXPYLXMEEIXRXIHIGPSRLGHPCFYHQKDIKLENLIIKQGEQIMLNSVEEIDGEIMVSCAVARNHQXHSFNLPLSQEGEFYECEDERIYXLKEIVEWKIPKNRXRXVNLXDFSNKWDSXNPFPKDFYGXLILKPVYEIQGVMKFRKDIIRILPSLDVEVKDIXDSYDANWFLQLLSXEDLFEMXSKEFPIVXEVIEAPEGNHLPQSILQPGKXIVIHKKYQASRILASEIRSNFPKRHFLIPXSYKGKFKRRPREFPXAYDLEIAKSEKEPLHVVAXKAFHSPHDKLSSVSVGDQFLVHQSEXXEVLCEGIKKVVNVLACEKILKKSYEAALLPLYMEGGFVEVIHDKKQYPISELCKQFRLPFNVKVSVRDLSIEEDVLAAXPGLQLEEDIXDSYLLISDFANPXECWEIPVGRLNMXVQLVSNFSRDAEPFLVRXLVEEIXEEQYYMMRRYESSASHPPPRPPKHPSVEEXKLXLLXLAEERXVDLPKSPKRHHVDIXKKLHPNQAGLDSKVLIGSQNDLVDEEKERSNRGAXAIAEXFKNEKHQK

SEQ ID NO: 27618 - protein, 211 aa, Homo sapiens
  MOD_RES (1)..(1): Any amino acid
  MOD_RES (4)..(5): Selenocysteine
  MOD_RES (25)..(25): Selenocysteine
  MOD_RES (54)..(54): Selenocysteine
  MOD_RES (61)..(61): Selenocysteine
  MOD_RES (112)..(112): Selenocysteine
  MOD_RES (126)..(126): Selenocysteine
  MOD_RES (133)..(133): Selenocysteine
  MOD_RES (141)..(141): Selenocysteine
  MOD_RES (162)..(162): Selenocysteine
  MOD_RES (192)..(192): Selenocysteine
  MOD_RES (207)..(207): Selenocysteine
XLQXXQGIAMALSLEEFVHSLDLRXLPRVLEIQAGIYLEGSIYEMFGNECCFSXGEVIKIXGLKVKKIIAEICEQIEGCESLQPFELPMNFPVRKDIIRILPSLDVEVKDIXDSYDANWFLQLLSXEDLFEMXSKEFPIVXEVIEAPEGNHLPQSILQPGKXIVIHKKYQASRILASEIRSNFPKRHFLIPXSYKGKFKRRPREFPXAYDL

SEQ ID NO: 27619 - protein, 260 aa, Homo sapiens
  MOD_RES (46)..(46): Selenocysteine
  MOD_RES (53)..(53): Selenocysteine
  MOD_RES (67)..(67): Selenocysteine
  MOD_RES (70)..(70): Selenocysteine
  MOD_RES (82)..(82): Selenocysteine
  MOD_RES (86)..(86): Selenocysteine
  MOD_RES (92)..(92): Selenocysteine
  MOD_RES (100)..(101): Selenocysteine
  MOD_RES (109)..(109): Selenocysteine
  MOD_RES (114)..(114): Selenocysteine
  MOD_RES (119)..(119): Selenocysteine
  MOD_RES (125)..(125): Selenocysteine
  MOD_RES (169)..(169): Selenocysteine
  MOD_RES (177)..(177): Selenocysteine
  MOD_RES (193)..(193): Selenocysteine
  MOD_RES (196)..(196): Selenocysteine
  MOD_RES (225)..(225): Selenocysteine
  MOD_RES (231)..(231): Selenocysteine
MEPVPLQDFVRALDPASLPRVLRVCSGVYFEGSIYEISGNECCLSXGDLIKVXQVRLQKVVCENPKXSQXMELAPNFQGYFXPLNXPQSYEXLEELVSAXXQSSKQLPXCFMSXHRIVXEGRVVXEDQLLMLEAVVMHLGIRSARCVLGMEGQQVILHLPLSQKGPFWXWEPSAPRXLLQVLQDPALKDLVLXCPXLPWHSLILRPQYEIQAIMHIFSSLRIAAXRSAAQXQGEDLARVHQGWLQYVQQDSCPQEGPQAR

SEQ ID NO: 27620 - protein, 514 aa, Homo sapiens
  MOD_RES (46)..(46): Selenocysteine
  MOD_RES (53)..(53): Selenocysteine
  MOD_RES (67)..(67): Selenocysteine
  MOD_RES (70)..(70): Selenocysteine
  MOD_RES (82)..(82): Selenocysteine
  MOD_RES (86)..(86): Selenocysteine
  MOD_RES (92)..(92): Selenocysteine
  MOD_RES (100)..(101): Selenocysteine
  MOD_RES (109)..(109): Selenocysteine
  MOD_RES (114)..(114): Selenocysteine
  MOD_RES (119)..(119): Selenocysteine
  MOD_RES (125)..(125): Selenocysteine
  MOD_RES (169)..(169): Selenocysteine
  MOD_RES (177)..(177): Selenocysteine
  MOD_RES (193)..(193): Selenocysteine
  MOD_RES (196)..(196): Selenocysteine
  MOD_RES (219)..(219): Selenocysteine
  MOD_RES (226)..(226): Selenocysteine
  MOD_RES (235)..(235): Selenocysteine
  MOD_RES (317)..(317): Selenocysteine
  MOD_RES (333)..(333): Selenocysteine
  MOD_RES (337)..(337): Selenocysteine
  MOD_RES (341)..(341): Selenocysteine
  MOD_RES (353)..(353): Selenocysteine
  MOD_RES (379)..(379): Selenocysteine
  MOD_RES (398)..(398): Selenocysteine
  MOD_RES (403)..(403): Selenocysteine
  MOD_RES (405)..(405): Selenocysteine
  MOD_RES (464)..(464): Selenocysteine
  MOD_RES (475)..(475): Selenocysteine
  MOD_RES (513)..(513): Selenocysteine
MEPVPLQDFVRALDPASLPRVLRVCSGVYFEGSIYEISGNECCLSXGDLIKVXQVRLQKVVCENPKXSQXMELAPNFQGYFXPLNXPQSYEXLEELVSAXXQSSKQLPXCFMSXHRIVXEGRVVXEDQLLMLEAVVMHLGIRSARCVLGMEGQQVILHLPLSQKGPFWXWEPSAPRXLLQVLQDPALKDLVLXCPXLPWHSLILRPQYEIQAIMHMRRXIVKIPSXLEVDVEDVXASSRHVHFIKPLLLSEVLAWEGPFPLSMEILERLSDQAGEDEEEECKEEAESPERVLLPFHFPGSFVEEMSDSRRYSLADLXAQFSLPCEVKVVAKDXSHPXDPLXSFLGLRLEEKIXEPFLVVSLDSEPGMCFEIPPRWLDLXVVKAKGQPDLPEGSLPIAXVEELXDXFYYRLRKLPACEIQAPPPRPPKNQGLSKQRRHSSEGGVKSSQVLGLQQHARLPKPKAKXLPEFIKDGSSXYSKIPAHRKGHRPAKPQRQDLDDDEHDYEEILEQFQKXI

SEQ ID NO: 27621 - protein, 643 aa, Homo sapiens
  MOD_RES (46)..(46): Selenocysteine
  MOD_RES (53)..(53): Selenocysteine
  MOD_RES (67)..(67): Selenocysteine
  MOD_RES (70)..(70): Selenocysteine
  MOD_RES (82)..(82): Selenocysteine
  MOD_RES (86)..(86): Selenocysteine
  MOD_RES (92)..(92): Selenocysteine
  MOD_RES (100)..(101): Selenocysteine
  MOD_RES (109)..(109): Selenocysteine
  MOD_RES (114)..(114): Selenocysteine
  MOD_RES (119)..(119): Selenocysteine
  MOD_RES (125)..(125): Selenocysteine
  MOD_RES (169)..(169): Selenocysteine
  MOD_RES (177)..(177): Selenocysteine
  MOD_RES (193)..(193): Selenocysteine
  MOD_RES (196)..(196): Selenocysteine
  MOD_RES (219)..(219): Selenocysteine
  MOD_RES (226)..(226): Selenocysteine
  MOD_RES (235)..(235): Selenocysteine
  MOD_RES (333)..(333): Selenocysteine
  MOD_RES (352)..(352): Selenocysteine
  MOD_RES (366)..(366): Selenocysteine
  MOD_RES (446)..(446): Selenocysteine
  MOD_RES (462)..(462): Selenocysteine
  MOD_RES (466)..(466): Selenocysteine
  MOD_RES (470)..(470): Selenocysteine
  MOD_RES (482)..(482): Selenocysteine
  MOD_RES (508)..(508): Selenocysteine
  MOD_RES (527)..(527): Selenocysteine
  MOD_RES (532)..(532): Selenocysteine
  MOD_RES (534)..(534): Selenocysteine
  MOD_RES (593)..(593): Selenocysteine
  MOD_RES (604)..(604): Selenocysteine
  MOD_RES (642)..(642): Selenocysteine
MEPVPLQDFVRALDPASLPRVLRVCSGVYFEGSIYEISGNECCLSXGDLIKVXQVRLQKVVCENPKXSQXMELAPNFQGYFXPLNXPQSYEXLEELVSAXXQSSKQLPXCFMSXHRIVXEGRVVXEDQLLMLEAVVMHLGIRSARCVLGMEGQQVILHLPLSQKGPFWXWEPSAPRXLLQVLQDPALKDLVLXCPXLPWHSLILRPQYEIQAIMHMRRXIVKIPSXLEVDVEDVXASSRHVHFIKPLLLSEVLAWEGPFPLSMEILEVPEGRPIFLSPWVGSLQKGQRLCVYGLASPPWRVLASSKGRKVPRHFLVSGGYQGKLRRRPREFPXAYDLLGAFQPGRPLRVVAXKDCEGEREENPEFXSLAVGDRLEVLGPGQAHGAQGSDVDVLVCQRLSDQAGEDEEEECKEEAESPERVLLPFHFPGSFVEEMSDSRRYSLADLXAQFSLPCEVKVVAKDXSHPXDPLXSFLGLRLEEKIXEPFLVVSLDSEPGMCFEIPPRWLDLXVVKAKGQPDLPEGSLPIAXVEELXDXFYYRLRKLPACEIQAPPPRPPKNQGLSKQRRHSSEGGVKSSQVLGLQQHARLPKPKAKXLPEFIKDGSSXYSKIPAHRKGHRPAKPQRQDLDDDEHDYEEILEQFQKXI

SEQ ID NO: 27622 - protein, 123 aa, Homo sapiens
  MOD_RES (46)..(46): Selenocysteine
  MOD_RES (53)..(53): Selenocysteine
  MOD_RES (67)..(67): Selenocysteine
  MOD_RES (70)..(70): Selenocysteine
  MOD_RES (88)..(88): Selenocysteine
  MOD_RES (94)..(94): Selenocysteine
MEPVPLQDFVRALDPASLPRVLRVCSGVYFEGSIYEISGNECCLSXGDLIKVXQVRLQKVVCENPKXSQXMELAPNFQVFSSLRIAAXRSAAQXQGEDLARVHQGWLQYVQQDSCPQEGPQAR

SEQ ID NO: 27623 - protein, 247 aa, Homo sapiens
  MOD_RES (46)..(46): Selenocysteine
  MOD_RES (53)..(53): Selenocysteine
  MOD_RES (67)..(67): Selenocysteine
  MOD_RES (70)..(70): Selenocysteine
  MOD_RES (82)..(82): Selenocysteine
  MOD_RES (89)..(89): Selenocysteine
  MOD_RES (98)..(98): Selenocysteine
  MOD_RES (196)..(196): Selenocysteine
  MOD_RES (215)..(215): Selenocysteine
  MOD_RES (229)..(229): Selenocysteine
MEPVPLQDFVRALDPASLPRVLRVCSGVYFEGSIYEISGNECCLSXGDLIKVXQVRLQKVVCENPKXSQXMELAPNFQVRRXIVKIPSXLEVDVEDVXASSRHVHFIKPLLLSEVLAWEGPFPLSMEILEVPEGRPIFLSPWVGSLQKGQRLCVYGLASPPWRVLASSKGRKVPRHFLVSGGYQGKLRRRPREFPXAYDLLGAFQPGRPLRVVAXKDCEGEREENPEFXSLAVGDRLEVLGPGQAHG

SEQ ID NO: 27624 - protein, 133 aa, Homo sapiens
  MOD_RES (35)..(35): Selenocysteine
  MOD_RES (39)..(39): Selenocysteine
  MOD_RES (45)..(45): Selenocysteine
  MOD_RES (53)..(54): Selenocysteine
  MOD_RES (62)..(62): Selenocysteine
  MOD_RES (67)..(67): Selenocysteine
  MOD_RES (72)..(72): Selenocysteine
  MOD_RES (78)..(78): Selenocysteine
  MOD_RES (122)..(122): Selenocysteine
  MOD_RES (130)..(130): Selenocysteine
MEPVPLQDFVRALDPASLPRVLRVCSGVYFEGYFXPLNXPQSYEXLEELVSAXXQSSKQLPXCFMSXHRIVXEGRVVXEDQLLMLEAVVMHLGIRSARCVLGMEGQQVILHLPLSQKGPFWXWEPSAPRXLLQ

SEQ ID NO: 27625 - protein, 391 aa, Homo sapiens
  MOD_RES (1)..(1): Any amino acid
  MOD_RES (2)..(2): Selenocysteine
  MOD_RES (7)..(7): Selenocysteine
  MOD_RES (12)..(12): Selenocysteine
  MOD_RES (18)..(18): Selenocysteine
  MOD_RES (62)..(62): Selenocysteine
  MOD_RES (70)..(70): Selenocysteine
  MOD_RES (86)..(86): Selenocysteine
  MOD_RES (89)..(89): Selenocysteine
  MOD_RES (112)..(112): Selenocysteine
  MOD_RES (119)..(119): Selenocysteine
  MOD_RES (128)..(128): Selenocysteine
  MOD_RES (194)..(194): Selenocysteine
  MOD_RES (210)..(210): Selenocysteine
  MOD_RES (214)..(214): Selenocysteine
  MOD_RES (218)..(218): Selenocysteine
  MOD_RES (230)..(230): Selenocysteine
  MOD_RES (256)..(256): Selenocysteine
  MOD_RES (275)..(275): Selenocysteine
  MOD_RES (280)..(280): Selenocysteine
  MOD_RES (282)..(282): Selenocysteine
  MOD_RES (341)..(341): Selenocysteine
  MOD_RES (352)..(352): Selenocysteine
  MOD_RES (390)..(390): Selenocysteine
XXCFMSXHRIVXEGRVVXEDQLLMLEAVVMHLGIRSARCVLGMEGQQVILHLPLSQKGPFWXWEPSAPRXLLQVLQDPALKDLVLXCPXLPWHSLILRPQYEIQAIMHMRRXIVKIPSXLEVDVEDVXASSRHVHFIKPLLLSERLSDQAGEDEEEECKEEAESPERVLLPFHFPGSFVEEMSDSRRYSLADLXAQFSLPCEVKVVAKDXSHPXDPLXSFLGLRLEEKIXEPFLVVSLDSEPGMCFEIPPRWLDLXVVKAKGQPDLPEGSLPIAXVEELXDXFYYRLRKLPACEIQAPPPRPPKNQGLSKQRRHSSEGGVKSSQVLGLQQHARLPKPKAKXLPEFIKDGSSXYSKIPAHRKGHRPAKPQRQDLDDDEHDYEEILEQFQKXI

SEQ ID NO: 27626 - protein, 360 aa, Homo sapiens
  MOD_RES (4)..(4): Selenocysteine
  MOD_RES (19)..(19): Selenocysteine
  MOD_RES (33)..(33): Selenocysteine
  MOD_RES (67)..(67): Selenocysteine
  MOD_RES (72)..(72): Selenocysteine
  MOD_RES (75)..(75): Selenocysteine
  MOD_RES (94)..(94): Selenocysteine
  MOD_RES (97)..(97): Selenocysteine
  MOD_RES (105)..(105): Selenocysteine
  MOD_RES (110)..(110): Selenocysteine
  MOD_RES (136)..(136): Selenocysteine
  MOD_RES (170)..(170): Selenocysteine
  MOD_RES (174)..(174): Selenocysteine
  MOD_RES (180)..(180): Selenocysteine
  MOD_RES (186)..(186): Selenocysteine
  MOD_RES (207)..(208): Selenocysteine
  MOD_RES (242)..(242): Selenocysteine
  MOD_RES (262)..(262): Selenocysteine
  MOD_RES (274)..(274): Selenocysteine
  MOD_RES (286)..(286): Selenocysteine
  MOD_RES (329)..(329): Selenocysteine
  MOD_RES (339)..(340): Selenocysteine
  MOD_RES (349)..(349): Selenocysteine
FKSXREALNNKNIKPLLSXFSQVPGSENEKKCXLDQAFRGILEEEIINHSSCENVLAIISLAIGGVXEGICXASXPFVLLGDVLDCLPLDQCDXIFXFVEKNVAXWKSNXFYSAGKNYLLRMCNDLLRRLSKSQNXVFCGRIQLFLARLFPLSEKSGLNLQSQFNLENVXVFNXNEQESXLGQKHXEDREEGMDVEEGEMGDEEAPXXCSIPIDYNLYRKFWSLQDYFRNPVQCYEKISWKXFLKYSEEVLAVFKSYKLDDXQASRKKMEELKXGGEHVYFAKFLXSEKLMDLQLSDSNFRRHILLQYLILFQYLKGQVKFKSSNYVLXDEQSLWIEDXXKSVYQVSSXRNKPMIEKMEI

SEQ ID NO: 27627 - protein, 86 aa, Homo sapiens
  MOD_RES (4)..(4): Selenocysteine
  MOD_RES (15)..(15): Selenocysteine
  MOD_RES (18)..(18): Selenocysteine
  MOD_RES (21)..(21): Selenocysteine
  MOD_RES (36)..(36): Selenocysteine
  MOD_RES (50)..(50): Selenocysteine
  MOD_RES (84)..(84): Selenocysteine
MSPXPPLFSLPEARXRFXKSXREALNNKNIKPLLSXFSQVPGSENEKKCXLDQAFRGILEEEIINHSSCENVLAIISLAIGGVXEA

SEQ ID NO: 27628 - protein, 657 aa, Homo sapiens
  MOD_RES (4)..(4): Selenocysteine
  MOD_RES (15)..(15): Selenocysteine
  MOD_RES (18)..(18): Selenocysteine
  MOD_RES (21)..(21): Selenocysteine
  MOD_RES (36)..(36): Selenocysteine
  MOD_RES (50)..(50): Selenocysteine
  MOD_RES (84)..(84): Selenocysteine
  MOD_RES (89)..(89): Selenocysteine
  MOD_RES (92)..(92): Selenocysteine
  MOD_RES (111)..(111): Selenocysteine
  MOD_RES (114)..(114): Selenocysteine
  MOD_RES (122)..(122): Selenocysteine
  MOD_RES (127)..(127): Selenocysteine
  MOD_RES (153)..(153): Selenocysteine
  MOD_RES (187)..(187): Selenocysteine
  MOD_RES (191)..(191): Selenocysteine
  MOD_RES (197)..(197): Selenocysteine
  MOD_RES (203)..(203): Selenocysteine
  MOD_RES (224)..(225): Selenocysteine
  MOD_RES (259)..(259): Selenocysteine
  MOD_RES (279)..(279): Selenocysteine
  MOD_RES (291)..(291): Selenocysteine
  MOD_RES (303)..(303): Selenocysteine
  MOD_RES (346)..(346): Selenocysteine
  MOD_RES (356)..(357): Selenocysteine
  MOD_RES (384)..(384): Selenocysteine
  MOD_RES (404)..(404): Selenocysteine
  MOD_RES (407)..(407): Selenocysteine
  MOD_RES (410)..(410): Selenocysteine
  MOD_RES (417)..(417): Selenocysteine
  MOD_RES (428)..(428): Selenocysteine
  MOD_RES (439)..(439): Selenocysteine
  MOD_RES (456)..(456): Selenocysteine
  MOD_RES (462)..(462): Selenocysteine
  MOD_RES (511)..(511): Selenocysteine
  MOD_RES (542)..(542): Selenocysteine
  MOD_RES (570)..(570): Selenocysteine
  MOD_RES (629)..(629): Selenocysteine
  MOD_RES (650)..(650): Selenocysteine
  MOD_RES (655)..(655): Selenocysteine
MSPXPPLFSLPEARXRFXKSXREALNNKNIKPLLSXFSQVPGSENEKKCXLDQAFRGILEEEIINHSSCENVLAIISLAIGGVXEGICXASXPFVLLGDVLDCLPLDQCDXIFXFVEKNVAXWKSNXFYSAGKNYLLRMCNDLLRRLSKSQNXVFCGRIQLFLARLFPLSEKSGLNLQSQFNLENVXVFNXNEQESXLGQKHXEDREEGMDVEEGEMGDEEAPXXCSIPIDYNLYRKFWSLQDYFRNPVQCYEKISWKXFLKYSEEVLAVFKSYKLDDXQASRKKMEELKXGGEHVYFAKFLXSEKLMDLQLSDSNFRRHILLQYLILFQYLKGQVKFKSSNYVLXDEQSLWIEDXXKSVYQLLSENPPDGERFSKMVEHILNXEENWNSWKNEGCPSFVKERXSDXKPXRIIRKRXAPEDFLGKGPXKKILMGNEELXRLWNLCPDNMEACKSEXREHMPXLEEFFEEAIEQADPENMVENEYKAVNNSNYGWRALRLLARRSPHFFQPXNQQFKSLPEYLENMVIKLAKELPPPSEEIKXGEDEDEEDNDALLKENESPDVRRDKPVXGEQIEVFANKLGEQWKILAPYLEMKDSEIRQIECDSEDMKMRAKQLLVAWQDQEGVHAXPENLINALNKSGLSDLAESLXNDNEXNS

SEQ ID NO: 27629 - protein, 657 aa, Homo sapiens
  MOD_RES (4)..(4): Selenocysteine
  MOD_RES (15)..(15): Selenocysteine
  MOD_RES (18)..(18): Selenocysteine
  MOD_RES (21)..(21): Selenocysteine
  MOD_RES (36)..(36): Selenocysteine
  MOD_RES (50)..(50): Selenocysteine
  MOD_RES (84)..(84): Selenocysteine
  MOD_RES (89)..(89): Selenocysteine
  MOD_RES (92)..(92): Selenocysteine
  MOD_RES (111)..(111): Selenocysteine
  MOD_RES (114)..(114): Selenocysteine
  MOD_RES (122)..(122): Selenocysteine
  MOD_RES (127)..(127): Selenocysteine
  MOD_RES (153)..(153): Selenocysteine
  MOD_RES (187)..(187): Selenocysteine
  MOD_RES (191)..(191): Selenocysteine
  MOD_RES (197)..(197): Selenocysteine
  MOD_RES (203)..(203): Selenocysteine
  MOD_RES (224)..(225): Selenocysteine
  MOD_RES (259)..(259): Selenocysteine
  MOD_RES (279)..(279): Selenocysteine
  MOD_RES (291)..(291): Selenocysteine
  MOD_RES (303)..(303): Selenocysteine
  MOD_RES (346)..(346): Selenocysteine
  MOD_RES (356)..(357): Selenocysteine
  MOD_RES (384)..(384): Selenocysteine
  MOD_RES (404)..(404): Selenocysteine
  MOD_RES (407)..(407): Selenocysteine
  MOD_RES (410)..(410): Selenocysteine
  MOD_RES (417)..(417): Selenocysteine
  MOD_RES (428)..(428): Selenocysteine
  MOD_RES (439)..(439): Selenocysteine
  MOD_RES (456)..(456): Selenocysteine
  MOD_RES (462)..(462): Selenocysteine
  MOD_RES (511)..(511): Selenocysteine
  MOD_RES (542)..(542): Selenocysteine
  MOD_RES (570)..(570): Selenocysteine
  MOD_RES (629)..(629): Selenocysteine
  MOD_RES (650)..(650): Selenocysteine
  MOD_RES (655)..(655): Selenocysteine
MSPXPPLFSLPEARXRFXKSXREALNNKNIKPLLSXFSQVPGSENEKKCXLDQAFRGILEEEIINHSSCENVLAIISLAIGGVXEGICXASXPFVLLGDVLDCLPLDQCDXIFXFVEKNVAXWKSNXFYSAGKNYLLRMCNDLLRRLSKSQNXVFCGRIQLFLARLFPLSEKSGLNLQSQFNLENVXVFNXNEQESXLGQKHXEDREEGMDVEEGEMGDEEAPXXCSIPIDYNLYRKFWSLQDYFRNPVQCYEKISWKXFLKYSEEVLAVFKSYKLDDXQASRKKMEELKXGGEHVYFAKFLXSEKLMDLQLSDSNFRRHILLQYLILFQYLKGQVKFKSSNYVLXDEQSLWIEDXXKSVYQLLSENPPDGERFSKMVEHILNXEENWNSWKNEGCPSFVKDRXSDXKPXRIIRKRXAPEDFLGKGPXKKILMGNEELXRLWNLCPDNMEACKSEXREHMPXLEEFFEEAIEQADPENMVENEYKAVNNSNYGWRALRLLARRSPHFFQPXNQQFKSLPEYLENMVIKLAKELPPPSEEIKXGEDEDEEDNDALLKENESPDVRRDKPVXGEQIEVFANKLGEQWKILAPYLEMKDSEIRQIECDSEDMKMRAKQLLVAWQDQEGVHAXPENLINALNKSGLSDLAESLXNDNEXNS

SEQ ID NO: 27630 - protein, 251 aa, Homo sapiens
  MOD_RES (4)..(4): Selenocysteine
  MOD_RES (15)..(15): Selenocysteine
  MOD_RES (18)..(18): Selenocysteine
  MOD_RES (21)..(21): Selenocysteine
  MOD_RES (36)..(36): Selenocysteine
  MOD_RES (50)..(50): Selenocysteine
  MOD_RES (84)..(84): Selenocysteine
  MOD_RES (89)..(89): Selenocysteine
  MOD_RES (92)..(92): Selenocysteine
  MOD_RES (111)..(111): Selenocysteine
  MOD_RES (114)..(114): Selenocysteine
  MOD_RES (122)..(122): Selenocysteine
  MOD_RES (127)..(127): Selenocysteine
  MOD_RES (153)..(153): Selenocysteine
  MOD_RES (187)..(187): Selenocysteine
  MOD_RES (191)..(191): Selenocysteine
  MOD_RES (197)..(197): Selenocysteine
  MOD_RES (203)..(203): Selenocysteine
  MOD_RES (224)..(225): Selenocysteine
  MOD_RES (228)..(228): Selenocysteine
  MOD_RES (231)..(231): Selenocysteine
MSPXPPLFSLPEARXRFXKSXREALNNKNIKPLLSXFSQVPGSENEKKCXLDQAFRGILEEEIINHSSCENVLAIISLAIGGVXEGICXASXPFVLLGDVLDCLPLDQCDXIFXFVEKNVAXWKSNXFYSAGKNYLLRMCNDLLRRLSKSQNXVFCGRIQLFLARLFPLSEKSGLNLQSQFNLENVXVFNXNEQESXLGQKHXEDREEGMDVEEGEMGDEEAPXXWIXSGXLCNAMRRFHGKLFSSILKKF

SEQ ID NO: 27631 - protein, 121 aa, Homo sapiens
  MOD_RES (4)..(4): Selenocysteine
  MOD_RES (15)..(15): Selenocysteine
  MOD_RES (18)..(18): Selenocysteine
  MOD_RES (21)..(21): Selenocysteine
  MOD_RES (36)..(36): Selenocysteine
  MOD_RES (50)..(50): Selenocysteine
  MOD_RES (88)..(88): Selenocysteine
  MOD_RES (113)..(113): Selenocysteine
MSPXPPLFSLPEARXRFXKSXREALNNKNIKPLLSXFSQVPGSENEKKCXLDQAFRGILEEEIVFVPHLHLLYCWEMFWIVFLWISVXQYSLLWKKMLLLGNQIHSILLGKIXYYVCAMIS

SEQ ID NO: 27632 - protein, 95 aa, Homo sapiens
  MOD_RES (1)..(1): Any amino acid
  MOD_RES (12)..(13): Selenocysteine
  MOD_RES (47)..(47): Selenocysteine
  MOD_RES (67)..(67): Selenocysteine
  MOD_RES (79)..(79): Selenocysteine
  MOD_RES (91)..(91): Selenocysteine
XEGEMGDEEAPXXCSIPIDYNLYRKFWSLQDYFRNPVQCYEKISWKXFLKYSEEVLAVFKSYKLDDXQASRKKMEELKXGGEHVYFAKFLXSEKV

SEQ ID NO: 27633 - protein, 272 aa, Homo sapiens
  MOD_RES (1)..(1): Any amino acid
  MOD_RES (10)..(10): Selenocysteine
  MOD_RES (22)..(22): Selenocysteine
  MOD_RES (34)..(34): Selenocysteine
  MOD_RES (77)..(77): Selenocysteine
  MOD_RES (87)..(88): Selenocysteine
  MOD_RES (115)..(115): Selenocysteine
  MOD_RES (142)..(142): Selenocysteine
  MOD_RES (145)..(145): Selenocysteine
  MOD_RES (148)..(148): Selenocysteine
  MOD_RES (155)..(155): Selenocysteine
  MOD_RES (166)..(166): Selenocysteine
  MOD_RES (177)..(177): Selenocysteine
  MOD_RES (194)..(194): Selenocysteine
  MOD_RES (200)..(200): Selenocysteine
  MOD_RES (249)..(249): Selenocysteine
XFKSYKLDDXQASRKKMEELKXGGEHVYFAKFLXSEKLMDLQLSDSNFRRHILLQYLILFQYLKGQVKFKSSNYVLXDEQSLWIEDXXKSVYQLLSENPPDGERFSKMVEHILNXEENWNSWKNEGCPSFVKESVCFVHDRXSDXKPXRIIRKRXAPEDFLGKGPXKKILMGNEELXRLWNLCPDNMEACKSEXREHMPXLEEFFEEAIEQADPENMVENEYKAVNNSNYGWRALRLLARRSPHFFQPXNQQFKSLPEYLENMVIKLAKELP

SEQ ID NO: 27634 - protein, 349 aa, Homo sapiens
  MOD_RES (4)..(4): Selenocysteine
  MOD_RES (15)..(15): Selenocysteine
  MOD_RES (19)..(19): Selenocysteine
  MOD_RES (58)..(58): Selenocysteine
  MOD_RES (74)..(74): Selenocysteine
  MOD_RES (79)..(79): Selenocysteine
  MOD_RES (89)..(89): Selenocysteine
  MOD_RES (105)..(105): Selenocysteine
  MOD_RES (131)..(131): Selenocysteine
  MOD_RES (135)..(136): Selenocysteine
  MOD_RES (166)..(166): Selenocysteine
  MOD_RES (175)..(176): Selenocysteine
  MOD_RES (182)..(182): Selenocysteine
  MOD_RES (187)..(187): Selenocysteine
  MOD_RES (195)..(195): Selenocysteine
  MOD_RES (201)..(201): Selenocysteine
  MOD_RES (204)..(204): Selenocysteine
  MOD_RES (209)..(210): Selenocysteine
  MOD_RES (232)..(232): Selenocysteine
  MOD_RES (253)..(253): Selenocysteine
  MOD_RES (264)..(264): Selenocysteine
  MOD_RES (274)..(274): Selenocysteine
  MOD_RES (277)..(277): Selenocysteine
  MOD_RES (293)..(293): Selenocysteine
  MOD_RES (297)..(297): Selenocysteine
  MOD_RES (301)..(301): Selenocysteine
  MOD_RES (308)..(308): Selenocysteine
  MOD_RES (311)..(311): Selenocysteine
  MOD_RES (327)..(327): Selenocysteine
  MOD_RES (329)..(329): Selenocysteine
  MOD_RES (331)..(331): Selenocysteine
  MOD_RES (337)..(337): Selenocysteine
  MOD_RES (340)..(340): Selenocysteine
MELXELLLVVMLLLXARLXLSSPAPPACDLRVLSKLLRDSHVLHSRLSQCPEVHPLPXPVLLPAVDFSLGEWKXQMEEXKAQDILGAVXLLLEGVMAARGQLGPXCLSSLLGQLSGQVRLLLGALQSLLGXQGRXXAHKDPNAIFLSFQHLLRGKVRFLMLVGGSXLCVRRAPPXXAVPSRXSLVLXLNELPNRXSGLLEXNFXASARXXGSGLLKWQQGFRAKIPGLLNQXSRSLDQIPGYLNRIHELLNGXRGLFPGPSRRXLGAPDISSGXSDXGSLPPNLQPGYSPSPXHPPXGQYXLFPLPPXLPXPVVQLHPLLPDPSAPXPXPXSPLLNXSYXHSQNLSQEG

SEQ ID NO: 27635 - protein, 286 aa, Homo sapiens
  MOD_RES (4)..(4): Selenocysteine
  MOD_RES (15)..(15): Selenocysteine
  MOD_RES (19)..(19): Selenocysteine
  MOD_RES (58)..(58): Selenocysteine
  MOD_RES (74)..(74): Selenocysteine
  MOD_RES (79)..(79): Selenocysteine
  MOD_RES (89)..(89): Selenocysteine
  MOD_RES (105)..(105): Selenocysteine
  MOD_RES (131)..(131): Selenocysteine
  MOD_RES (139)..(140): Selenocysteine
  MOD_RES (212)..(212): Selenocysteine
  MOD_RES (214)..(214): Selenocysteine
  MOD_RES (221)..(221): Selenocysteine
  MOD_RES (225)..(225): Selenocysteine
  MOD_RES (227)..(227): Selenocysteine
  MOD_RES (247)..(247): Selenocysteine
  MOD_RES (264)..(264): Selenocysteine
  MOD_RES (272)..(272): Selenocysteine
MELXELLLVVMLLLXARLXLSSPAPPACDLRVLSKLLRDSHVLHSRLSQCPEVHPLPXPVLLPAVDFSLGEWKXQMEEXKAQDILGAVXLLLEGVMAARGQLGPXCLSSLLGQLSGQVRLLLGALQSLLGXQLPPQGRXXAHKDPNAIFLSFQHLLRGKDFWIVGDKLHCLSQNYWLWASEVAAGIQSQDSWSAEPNLQVPGPNPRIPEQDXRXLEWNSWXLSWXLXQDPRSPGHFLRNIRHRLPAXQPPAWIFSFPNPSSYWXVYALPSSXHLAHPCGPAPPPAS

SEQ ID NO: 27636 - protein, 353 aa, Homo sapiens
  MOD_RES (4)..(4): Selenocysteine
  MOD_RES (15)..(15): Selenocysteine
  MOD_RES (19)..(19): Selenocysteine
  MOD_RES (58)..(58): Selenocysteine
  MOD_RES (74)..(74): Selenocysteine
  MOD_RES (79)..(79): Selenocysteine
  MOD_RES (89)..(89): Selenocysteine
  MOD_RES (105)..(105): Selenocysteine
  MOD_RES (131)..(131): Selenocysteine
  MOD_RES (139)..(140): Selenocysteine
  MOD_RES (170)..(170): Selenocysteine
  MOD_RES (179)..(180): Selenocysteine
  MOD_RES (186)..(186): Selenocysteine
  MOD_RES (191)..(191): Selenocysteine
  MOD_RES (199)..(199): Selenocysteine
  MOD_RES (205)..(205): Selenocysteine
  MOD_RES (208)..(208): Selenocysteine
  MOD_RES (213)..(214): Selenocysteine
  MOD_RES (236)..(236): Selenocysteine
  MOD_RES (257)..(257): Selenocysteine
  MOD_RES (268)..(268): Selenocysteine
  MOD_RES (278)..(278): Selenocysteine
  MOD_RES (281)..(281): Selenocysteine
  MOD_RES (297)..(297): Selenocysteine
  MOD_RES (301)..(301): Selenocysteine
  MOD_RES (305)..(305): Selenocysteine
  MOD_RES (312)..(312): Selenocysteine
  MOD_RES (315)..(315): Selenocysteine
  MOD_RES (331)..(331): Selenocysteine
  MOD_RES (333)..(333): Selenocysteine
  MOD_RES (335)..(335): Selenocysteine
  MOD_RES (341)..(341): Selenocysteine
  MOD_RES (344)..(344): Selenocysteine
MELXELLLVVMLLLXARLXLSSPAPPACDLRVLSKLLRDSHVLHSRLSQCPEVHPLPXPVLLPAVDFSLGEWKXQMEEXKAQDILGAVXLLLEGVMAARGQLGPXCLSSLLGQLSGQVRLLLGALQSLLGXQLPPQGRXXAHKDPNAIFLSFQHLLRGKVRFLMLVGGSXLCVRRAPPXXAVPSRXSLVLXLNELPNRXSGLLEXNFXASARXXGSGLLKWQQGFRAKIPGLLNQXSRSLDQIPGYLNRIHELLNGXRGLFPGPSRRXLGAPDISSGXSDXGSLPPNLQPGYSPSPXHPPXGQYXLFPLPPXLPXPVVQLHPLLPDPSAPXPXPXSPLLNXSYXHSQNLSQEG

SEQ ID NO: 27637 - protein, 31 aa, Homo sapiens
MEQKPSKVECGSDPEENSARSPDGKRKRKNG

SEQ ID NO: 27638 - protein, 57 aa, Homo sapiens
  MOD_RES (37)..(37): Selenocysteine
MEQKPSKVECGSDPEENSARSPDGKRKRKNGQCSLKXSMSGYIPSYLDKDEQCVVCG

SEQ ID NO: 27639 - protein, 72 aa, Homo sapiens
  MOD_RES (37)..(37): Selenocysteine
  MOD_RES (61)..(61): Selenocysteine
  MOD_RES (69)..(69): Selenocysteine
MEQKPSKVECGSDPEENSARSPDGKRKRKNGQCSLKXSMSGYIPSYLDKDEQCVVCGDKAXGYHYRCIXCEG

SEQ ID NO: 27640 - protein, 85 aa, Homo sapiens
  MOD_RES (37)..(37): Selenocysteine
  MOD_RES (61)..(61): Selenocysteine
  MOD_RES (69)..(69): Selenocysteine
  MOD_RES (80)..(80): Selenocysteine
MEQKPSKVECGSDPEENSARSPDGKRKRKNGQCSLKXSMSGYIPSYLDKDEQCVVCGDKAXGYHYRCIXCEGCKGFFRRXIQKNL

SEQ ID NO: 27641 - protein, 410 aa, Homo sapiens
  MOD_RES (37)..(37): Selenocysteine
  MOD_RES (61)..(61): Selenocysteine
  MOD_RES (69)..(69): Selenocysteine
  MOD_RES (80)..(80): Selenocysteine
  MOD_RES (88)..(88): Selenocysteine
  MOD_RES (103)..(103): Selenocysteine
  MOD_RES (161)..(161): Selenocysteine
  MOD_RES (172)..(172): Selenocysteine
  MOD_RES (178)..(178): Selenocysteine
  MOD_RES (219)..(219): Selenocysteine
  MOD_RES (223)..(223): Selenocysteine
  MOD_RES (227)..(227): Selenocysteine
  MOD_RES (273)..(273): Selenocysteine
  MOD_RES (275)..(275): Selenocysteine
  MOD_RES (314)..(314): Selenocysteine
  MOD_RES (327)..(327): Selenocysteine
  MOD_RES (372)..(372): Selenocysteine
  MOD_RES (394)..(394): Selenocysteine
MEQKPSKVECGSDPEENSARSPDGKRKRKNGQCSLKXSMSGYIPSYLDKDEQCVVCGDKAXGYHYRCIXCEGCKGFFRRXIQKNLHPXYSCKYDSCCVIDKIXRNQCQLCRFKKCIAVGMAMDLVLDDSKRVAKRKLIEQNRERRRKEEMIRSLQQRPEPXPEEWDLIHIAXEAHRSXNAQGSHWKQRRKFLPDDIGQSPIVSMPDGDKVDLEAFSEFXKIIXPAIXRVVDFAKKLPMFSELPCEDQIILLKGCCMEIMSLRAAVRYDPESDXLXLSGEMAVKREQLKNGGLGVVSDAIFELGKSLSAFNLDDXEVALLQAVLLMSXDRSGLLCVDKIEKSQEAYLLAFEHYVNHRKHNIPHFWPKLLMKVXDLRMIGACHASRFLHMKVECPXELFPPLFLEVFEDQEV

SEQ ID NO: 27642 - protein, 451 aa, Homo sapiens
  MOD_RES (37)..(37): Selenocysteine
  MOD_RES (61)..(61): Selenocysteine
  MOD_RES (69)..(69): Selenocysteine
  MOD_RES (80)..(80): Selenocysteine
  MOD_RES (88)..(88): Selenocysteine
  MOD_RES (103)..(103): Selenocysteine
  MOD_RES (161)..(161): Selenocysteine
  MOD_RES (172)..(172): Selenocysteine
  MOD_RES (178)..(178): Selenocysteine
  MOD_RES (219)..(219): Selenocysteine
  MOD_RES (223)..(223): Selenocysteine
  MOD_RES (227)..(227): Selenocysteine
  MOD_RES (273)..(273): Selenocysteine
  MOD_RES (275)..(275): Selenocysteine
  MOD_RES (314)..(314): Selenocysteine
  MOD_RES (327)..(327): Selenocysteine
MEQKPSKVECGSDPEENSARSPDGKRKRKNGQCSLKXSMSGYIPSYLDKDEQCVVCGDKAXGYHYRCIXCEGCKGFFRRXIQKNLHPXYSCKYDSCCVIDKIXRNQCQLCRFKKCIAVGMAMDLVLDDSKRVAKRKLIEQNRERRRKEEMIRSLQQRPEPXPEEWDLIHIAXEAHRSXNAQGSHWKQRRKFLPDDIGQSPIVSMPDGDKVDLEAFSEFXKIIXPAIXRVVDFAKKLPMFSELPCEDQIILLKGCCMEIMSLRAAVRYDPESDXLXLSGEMAVKREQLKNGGLGVVSDAIFELGKSLSAFNLDDXEVALLQAVLLMSXDRSGLLCVDKIEKSQEAYLLAFEHYVNHRKHNIPHFWPKLLMKGPQVRQLEQQLGEAGSLQGPVLQHQSPKSPQQRLLELLHRSGILHARAVCGEDDSSEADSPSSSEEEPEVCEDLAGNAASP

SEQ ID NO: 27643 - protein, 490 aa, Homo sapiens
  MOD_RES (37)..(37): Selenocysteine
  MOD_RES (61)..(61): Selenocysteine
  MOD_RES (69)..(69): Selenocysteine
  MOD_RES (80)..(80): Selenocysteine
  MOD_RES (88)..(88): Selenocysteine
  MOD_RES (103)..(103): Selenocysteine
  MOD_RES (161)..(161): Selenocysteine
  MOD_RES (172)..(172): Selenocysteine
  MOD_RES (178)..(178): Selenocysteine
  MOD_RES (219)..(219): Selenocysteine
  MOD_RES (223)..(223): Selenocysteine
  MOD_RES (227)..(227): Selenocysteine
  MOD_RES (273)..(273): Selenocysteine
  MOD_RES (275)..(275): Selenocysteine
  MOD_RES (314)..(314): Selenocysteine
  MOD_RES (327)..(327): Selenocysteine
MEQKPSKVECGSDPEENSARSPDGKRKRKNGQCSLKXSMSGYIPSYLDKDEQCVVCGDKAXGYHYRCIXCEGCKGFFRRXIQKNLHPXYSCKYDSCCVIDKIXRNQCQLCRFKKCIAVGMAMDLVLDDSKRVAKRKLIEQNRERRRKEEMIRSLQQRPEPXPEEWDLIHIAXEAHRSXNAQGSHWKQRRKFLPDDIGQSPIVSMPDGDKVDLEAFSEFXKIIXPAIXRVVDFAKKLPMFSELPCEDQIILLKGCCMEIMSLRAAVRYDPESDXLXLSGEMAVKREQLKNGGLGVVSDAIFELGKSLSAFNLDDXEVALLQAVLLMSXDRSGLLCVDKIEKSQEAYLLAFEHYVNHRKHNIPHFWPKLLMKEREVQSSILYKGAAAEGRPGGSLGVHPEGQQLLGMHVVQGPQVRQLEQQLGEAGSLQGPVLQHQSPKSPQQRLLELLHRSGILHARAVCGEDDSSEADSPSSSEEEPEVCEDLAGNAASP

SEQ ID NO: 27644 - protein, 40 aa, Homo sapiens
  MOD_RES (4)..(4): Selenocysteine
MSKXNKSKSGSRSSRSRSASRSRSRSFSKSRSRSRSLSRS

SEQ ID NO: 27645 - protein, 955 aa, Homo sapiens
  MOD_RES (4)..(4): Selenocysteine
  MOD_RES (205)..(205): Selenocysteine
  MOD_RES (210)..(210): Selenocysteine
  MOD_RES (214)..(214): Selenocysteine
  MOD_RES (227)..(227): Selenocysteine
  MOD_RES (230)..(230): Selenocysteine
  MOD_RES (280)..(280): Selenocysteine
  MOD_RES (286)..(286): Selenocysteine
  MOD_RES (297)..(297): Selenocysteine
  MOD_RES (324)..(324): Selenocysteine
  MOD_RES (327)..(327): Selenocysteine
  MOD_RES (345)..(345): Selenocysteine
  MOD_RES (354)..(354): Selenocysteine
  MOD_RES (365)..(365): Selenocysteine
  MOD_RES (367)..(367): Selenocysteine
  MOD_RES (381)..(381): Selenocysteine
  MOD_RES (397)..(397): Selenocysteine
  MOD_RES (487)..(487): Selenocysteine
  MOD_RES (524)..(524): Selenocysteine
  MOD_RES (541)..(541): Selenocysteine
  MOD_RES (556)..(556): Selenocysteine
  MOD_RES (564)..(564): Selenocysteine
  MOD_RES (633)..(633): Selenocysteine
  MOD_RES (649)..(649): Selenocysteine
  MOD_RES (655)..(655): Selenocysteine
  MOD_RES (662)..(662): Selenocysteine
  MOD_RES (685)..(685): Selenocysteine
  MOD_RES (757)..(757): Selenocysteine
  MOD_RES (760)..(760): Selenocysteine
  MOD_RES (796)..(796): Selenocysteine
  MOD_RES (799)..(799): Selenocysteine
  MOD_RES (806)..(807): Selenocysteine
  MOD_RES (816)..(816): Selenocysteine
  MOD_RES (833)..(833): Selenocysteine
  MOD_RES (874)..(874): Selenocysteine
  MOD_RES (918)..(918): Selenocysteine
  MOD_RES (941)..(941): Selenocysteine
  MOD_RES (953)..(954): Selenocysteine
MSKXNKSKSGSRSSRSRSASRSRSRSFSKSRSRSRSLSRSRKRRLSSRSRSRSYSPAHNRERNHPRVYQNRDFRGHNRGYRRPYYFRGRNRGFYPWGQYNRGGYGNYRSNWQNYRQAYSPRRGRSRSRSPKRRSPSPRSRSHSRNSDKSSSDRSRRSSSSRSSSNHSRVESSKRKSAKEKKSSSKDSRPSQAAGDNQGDEAKEQXFSGGXSQDXKASESSKPWPDAXYGXGSASRASAVSELSPRERSPALKSPLQSVVVRRRSPRPSPVPKPSPPLSSXSQMGSXLPSGAGYQSGXHQGQFDHGSGSLSPSKKSPVGKSPPSXGSXYGSSQKEESAASGGAAYXKRYLEEQKXENGKDKEQKQXNXDKEKIKEKGSFSDXGLGDGKMKSDSFAPKXDSEKPFRGSQSPKRYKLRDDFEKKMADFHKEEMDDQDKDKAKGRKESEFDDEPKFMSKVIGANKNQEEEKSGKWEGLVYAPPGKEKQRKXEELEEESFPERSKKEDRGKRSEGGHRGFVPEKNFRVXAYKAVQEKSSSPPPRKXSESRDKLGAKGDFPXGKSSFSIXREAQVNVRMDSFDEDLARPSGLLAQERKLCRDLVHSNKKEQEFRSIFQHIQSAQSQRSPSELFAQHIVXIVHHVKEHHFGSSGMXLHERFXKYLKRGXEQEAAKNKKSPEIHRRIDISPSXFRKHGLAHDEMKSPREPGYKAEGKYKDDPVDLRLDIERRKKHKERDLKRGKSRESVDSRDSSHSRERSAEKXEKXHKGSKKQKKHRRARDRSRSSSSSSQSSHSYKAEEYXEEXEEREESXXGFDKSRLGXKDFVGPSERGGGRARGXFQFRARGRGWGRGNYSGNNNNNSNNDFQKRNREEEWDPEYXPKSKKYYLHDDREGEGSDKWVSRGRGRGAFPRGRGRFMFRKSSXSPKWAHDKFSGEEGEIEDDESGXENREEKDNIQPXXE

SEQ ID NO: 27646 - protein, 476 aa, Homo sapiens
  MOD_RES (24)..(24): Selenocysteine
  MOD_RES (62)..(62): Selenocysteine
  MOD_RES (91)..(91): Selenocysteine
  MOD_RES (96)..(96): Selenocysteine
  MOD_RES (130)..(130): Selenocysteine
  MOD_RES (138)..(138): Selenocysteine
  MOD_RES (149)..(149): Selenocysteine
  MOD_RES (172)..(172): Selenocysteine
  MOD_RES (191)..(191): Selenocysteine
  MOD_RES (230)..(230): Selenocysteine
  MOD_RES (239)..(239): Selenocysteine
  MOD_RES (241)..(241): Selenocysteine
  MOD_RES (247)..(247): Selenocysteine
  MOD_RES (288)..(288): Selenocysteine
  MOD_RES (292)..(292): Selenocysteine
  MOD_RES (296)..(296): Selenocysteine
  MOD_RES (342)..(342): Selenocysteine
  MOD_RES (344)..(344): Selenocysteine
  MOD_RES (352)..(352): Selenocysteine
  MOD_RES (383)..(383): Selenocysteine
  MOD_RES (430)..(430): Selenocysteine
  MOD_RES (441)..(441): Selenocysteine
  MOD_RES (463)..(463): Selenocysteine
MNYCMQEIYEVHPAAGSNCYMQSXDYYAYFEDSPGYSGCDAQAVPSNNIYMEQAWAVNQPYXCSYPGNMFKSKDSDLDMALNQYSQPEYFXEEKPXFSQVQSPSYSQKKGYIPSYLDKDELCVVCGDKAXGYHYRCIXCEGCKGFFRRXIQKNLHPSYSCKYEGKCVIDKVXRNQCQECRFKKCIYVGMAXDLVLDDSKRLAKRKLIEENREKRRREELQKSIGHKPEPXDEEWELIKXVXEAHVAXNAQGSHWKQKRKFLPEDIGQAPIVNAPEGGKVDLEAFSHFXKIIXPAIXRVVDFAKKLPMFCELPCEDQIILLKGCCMEIMSLRAAVRYDPESEXLXLNGEMAVXRGQLKNGGLGVVSDAIFDLGMSLSSFNLDDXEVALLQAVLLMSSDRPGLACVERIEKYQDSFLLAFEHYINYRKHHVXHFWPKLLMKVXDLRMIGACHASRFLHMKVECPXELFPPLFLEVFED

SEQ ID NO: 27647 - protein, 132 aa, Homo sapiens
  MOD_RES (17)..(17): Selenocysteine
  MOD_RES (30)..(31): Selenocysteine
  MOD_RES (33)..(33): Selenocysteine
  MOD_RES (54)..(54): Selenocysteine
  MOD_RES (57)..(57): Selenocysteine
  MOD_RES (84)..(84): Selenocysteine
  MOD_RES (92)..(92): Selenocysteine
  MOD_RES (103)..(103): Selenocysteine
  MOD_RES (126)..(126): Selenocysteine
MSEACLHRKSHSERRSXLKNEQSSPHLIQXXWXSSIFHLDHDDVNDQSVSSAQXFQXEEKKCKGYIPSYLDKDELCVVCGDKAXGYHYRCIXCEGCKGFFRRXIQKNLHPSYSCKYEGKCVIDKVXRNQCQE

SEQ ID NO: 27648 - protein, 63 aa, Homo sapiens
  MOD_RES (2)..(2): Selenocysteine
  MOD_RES (7)..(7): Selenocysteine
  MOD_RES (12)..(12): Selenocysteine
  MOD_RES (48)..(48): Selenocysteine
  MOD_RES (61)..(62): Selenocysteine
MXPNSMXENGLXAWDKPKHCPDREHDWKLVGMSEACLHRKSHSERRSXLKNEQSSPHLIQXXW

SEQ ID NO: 27649 - protein, 67 aa, Homo sapiens
  MOD_RES (2)..(2): Selenocysteine
  MOD_RES (7)..(7): Selenocysteine
  MOD_RES (12)..(12): Selenocysteine
  MOD_RES (48)..(48): Selenocysteine
  MOD_RES (61)..(62): Selenocysteine
  MOD_RES (64)..(64): Selenocysteine
MXPNSMXENGLXAWDKPKHCPDREHDWKLVGMSEACLHRKSHSERRSXLKNEQSSPHLIQXXWXSSI

SEQ ID NO: 27650 - protein, 103 aa, Homo sapiens
  MOD_RES (2)..(2): Selenocysteine
  MOD_RES (7)..(7): Selenocysteine
  MOD_RES (12)..(12): Selenocysteine
  MOD_RES (48)..(48): Selenocysteine
  MOD_RES (61)..(62): Selenocysteine
  MOD_RES (64)..(64): Selenocysteine
  MOD_RES (85)..(85): Selenocysteine
  MOD_RES (88)..(88): Selenocysteine
MXPNSMXENGLXAWDKPKHCPDREHDWKLVGMSEACLHRKSHSERRSXLKNEQSSPHLIQXXWXSSIFHLDHDDVNDQSVSSAQXFQXEEKKCKGYIPSYLDK

SEQ ID NO: 27651 - protein, 114 aa, Homo sapiens
  MOD_RES (2)..(2): Selenocysteine
  MOD_RES (7)..(7): Selenocysteine
  MOD_RES (12)..(12): Selenocysteine
  MOD_RES (48)..(48): Selenocysteine
  MOD_RES (61)..(62): Selenocysteine
  MOD_RES (64)..(64): Selenocysteine
  MOD_RES (85)..(85): Selenocysteine
  MOD_RES (88)..(88): Selenocysteine
MXPNSMXENGLXAWDKPKHCPDREHDWKLVGMSEACLHRKSHSERRSXLKNEQSSPHLIQXXWXSSIFHLDHDDVNDQSVSSAQXFQXEEKKCKGYIPSYLDKDELCVVCGDKA

SEQ ID NO: 27652 - protein, 121 aa, Homo sapiens
  MOD_RES (2)..(2): Selenocysteine
  MOD_RES (7)..(7): Selenocysteine
  MOD_RES (12)..(12): Selenocysteine
  MOD_RES (48)..(48): Selenocysteine
  MOD_RES (61)..(62): Selenocysteine
  MOD_RES (64)..(64): Selenocysteine
  MOD_RES (85)..(85): Selenocysteine
  MOD_RES (88)..(88): Selenocysteine
  MOD_RES (115)..(115): Selenocysteine
MXPNSMXENGLXAWDKPKHCPDREHDWKLVGMSEACLHRKSHSERRSXLKNEQSSPHLIQXXWXSSIFHLDHDDVNDQSVSSAQXFQXEEKKCKGYIPSYLDKDELCVVCGDKAXGYHYRC

SEQ ID NO: 27653 - protein, 122 aa, Homo sapiens
  MOD_RES (2)..(2): Selenocysteine
  MOD_RES (7)..(7): Selenocysteine
  MOD_RES (12)..(12): Selenocysteine
  MOD_RES (48)..(48): Selenocysteine
  MOD_RES (61)..(62): Selenocysteine
  MOD_RES (64)..(64): Selenocysteine
  MOD_RES (85)..(85): Selenocysteine
  MOD_RES (88)..(88): Selenocysteine
  MOD_RES (115)..(115): Selenocysteine
MXPNSMXENGLXAWDKPKHCPDREHDWKLVGMSEACLHRKSHSERRSXLKNEQSSPHLIQXXWXSSIFHLDHDDVNDQSVSSAQXFQXEEKKCKGYIPSYLDKDELCVVCGDKAXGYHYRCI

SEQ ID NO: 27654 - protein, 461 aa, Homo sapiens
  MOD_RES (2)..(2): Selenocysteine
  MOD_RES (7)..(7): Selenocysteine
  MOD_RES (12)..(12): Selenocysteine
  MOD_RES (48)..(48): Selenocysteine
  MOD_RES (61)..(62): Selenocysteine
  MOD_RES (64)..(64): Selenocysteine
  MOD_RES (85)..(85): Selenocysteine
  MOD_RES (88)..(88): Selenocysteine
  MOD_RES (115)..(115): Selenocysteine
  MOD_RES (123)..(123): Selenocysteine
  MOD_RES (134)..(134): Selenocysteine
  MOD_RES (157)..(157): Selenocysteine
  MOD_RES (176)..(176): Selenocysteine
  MOD_RES (215)..(215): Selenocysteine
  MOD_RES (224)..(224): Selenocysteine
  MOD_RES (226)..(226): Selenocysteine
  MOD_RES (232)..(232): Selenocysteine
  MOD_RES (273)..(273): Selenocysteine
  MOD_RES (277)..(277): Selenocysteine
  MOD_RES (281)..(281): Selenocysteine
  MOD_RES (327)..(327): Selenocysteine
  MOD_RES (329)..(329): Selenocysteine
  MOD_RES (337)..(337): Selenocysteine
  MOD_RES (368)..(368): Selenocysteine
  MOD_RES (415)..(415): Selenocysteine
  MOD_RES (426)..(426): Selenocysteine
  MOD_RES (448)..(448): Selenocysteine
MXPNSMXENGLXAWDKPKHCPDREHDWKLVGMSEACLHRKSHSERRSXLKNEQSSPHLIQXXWXSSIFHLDHDDVNDQSVSSAQXFQXEEKKCKGYIPSYLDKDELCVVCGDKAXGYHYRCIXCEGCKGFFRRXIQKNLHPSYSCKYEGKCVIDKVXRNQCQECRFKKCIYVGMAXDLVLDDSKRLAKRKLIEENREKRRREELQKSIGHKPEPXDEEWELIKXVXEAHVAXNAQGSHWKQKRKFLPEDIGQAPIVNAPEGGKVDLEAFSHFXKIIXPAIXRVVDFAKKLPMFCELPCEDQIILLKGCCMEIMSLRAAVRYDPESEXLXLNGEMAVXRGQLKNGGLGVVSDAIFDLGMSLSSFNLDDXEVALLQAVLLMSSDRPGLACVERIEKYQDSFLLAFEHYINYRKHHVXHFWPKLLMKVXDLRMIGACHASRFLHMKVECPXELFPPLFLEVFED

SEQ ID NO: 27655 - protein, 37 aa, Homo sapiens
  MOD_RES (12)..(12): Selenocysteine
MNLAISIALLLXGLPRAEGDQPNGLPSGPEPSSGLPP

SEQ ID NO: 27656 - protein, 144 aa, Homo sapiens
  MOD_RES (12)..(12): Selenocysteine
  MOD_RES (26)..(26): Selenocysteine
  MOD_RES (38)..(38): Selenocysteine
  MOD_RES (41)..(41): Selenocysteine
  MOD_RES (49)..(49): Selenocysteine
  MOD_RES (56)..(56): Selenocysteine
  MOD_RES (61)..(61): Selenocysteine
  MOD_RES (64)..(64): Selenocysteine
  MOD_RES (78)..(78): Selenocysteine
  MOD_RES (84)..(84): Selenocysteine
  MOD_RES (86)..(86): Selenocysteine
  MOD_RES (104)..(104): Selenocysteine
  MOD_RES (123)..(123): Selenocysteine
  MOD_RES (139)..(139): Selenocysteine
MNLAISIALLLXVDQSLRLDCRHENXSSSPIQYEFSLXREXKKHVLFGXVGVPEHXYRSRXNFXSKYNMKVLYLSAFXSKDEGXYXCALHHSGHSPPISSQNVXVLRDKLVKCEGISLLAQNXSWLLLLLLSLSLLQAXDFMSL

SEQ ID NO: 27657 - protein, 153 aa, Homo sapiens
  MOD_RES (12)..(12): Selenocysteine
  MOD_RES (23)..(23): Selenocysteine
  MOD_RES (26)..(26): Selenocysteine
  MOD_RES (43)..(43): Selenocysteine
  MOD_RES (55)..(55): Selenocysteine
  MOD_RES (58)..(58): Selenocysteine
  MOD_RES (66)..(66): Selenocysteine
  MOD_RES (73)..(73): Selenocysteine
  MOD_RES (78)..(78): Selenocysteine
  MOD_RES (81)..(81): Selenocysteine
  MOD_RES (95)..(95): Selenocysteine
  MOD_RES (101)..(101): Selenocysteine
  MOD_RES (103)..(103): Selenocysteine
  MOD_RES (121)..(121): Selenocysteine
  MOD_RES (140)..(140): Selenocysteine
MNLAISIALLLXVLQVSRGQKVXSLXACLVDQSLRLDCRHENXSSSPIQYEFSLXREXKKHVLFGXVGVPEHXYRSRXNFXSKYNMKVLYLSAFXSKDEGXYXCALHHSGHSPPISSQNVXVLRDKLVKCEGISLLAQNXSWLLLLLLSLSLL

SEQ ID NO: 27658 - protein, 161 aa, Homo sapiens
  MOD_RES (12)..(12): Selenocysteine
  MOD_RES (23)..(23): Selenocysteine
  MOD_RES (26)..(26): Selenocysteine
  MOD_RES (43)..(43): Selenocysteine
  MOD_RES (55)..(55): Selenocysteine
  MOD_RES (58)..(58): Selenocysteine
  MOD_RES (66)..(66): Selenocysteine
  MOD_RES (73)..(73): Selenocysteine
  MOD_RES (78)..(78): Selenocysteine
  MOD_RES (81)..(81): Selenocysteine
  MOD_RES (95)..(95): Selenocysteine
  MOD_RES (101)..(101): Selenocysteine
  MOD_RES (103)..(103): Selenocysteine
  MOD_RES (121)..(121): Selenocysteine
  MOD_RES (140)..(140): Selenocysteine
  MOD_RES (156)..(156): Selenocysteine
MNLAISIALLLXVLQVSRGQKVXSLXACLVDQSLRLDCRHENXSSSPIQYEFSLXREXKKHVLFGXVGVPEHXYRSRXNFXSKYNMKVLYLSAFXSKDEGXYXCALHHSGHSPPISSQNVXVLRDKLVKCEGISLLAQNXSWLLLLLLSLSLLQAXDFMSL

SEQ ID NO: 27659 - protein, 165 aa, Homo sapiens
  MOD_RES (12)..(12): Selenocysteine
  MOD_RES (23)..(23): Selenocysteine
  MOD_RES (26)..(26): Selenocysteine
  MOD_RES (43)..(43): Selenocysteine
  MOD_RES (55)..(55): Selenocysteine
  MOD_RES (58)..(58): Selenocysteine
  MOD_RES (66)..(66): Selenocysteine
  MOD_RES (73)..(73): Selenocysteine
  MOD_RES (78)..(78): Selenocysteine
  MOD_RES (81)..(81): Selenocysteine
  MOD_RES (95)..(95): Selenocysteine
  MOD_RES (101)..(101): Selenocysteine
  MOD_RES (103)..(103): Selenocysteine
  MOD_RES (121)..(121): Selenocysteine
  MOD_RES (133)..(133): Selenocysteine
  MOD_RES (165)..(165): Selenocysteine
MNLAISIALLLXVLQVSRGQKVXSLXACLVDQSLRLDCRHENXSSSPIQYEFSLXREXKKHVLFGXVGVPEHXYRSRXNFXSKYNMKVLYLSAFXSKDEGXYXCALHHSGHSPPISSQNVXVLRGHGFHVPVXGGAHGGDRKPQVPVQRSYFSESADPLPPIPQX

SEQ ID NO: 27660 - protein, 375 aa, Homo sapiens
  MOD_RES (8)..(8): Selenocysteine
  MOD_RES (19)..(19): Selenocysteine
  MOD_RES (42)..(42): Selenocysteine
  MOD_RES (82)..(83): Selenocysteine
  MOD_RES (91)..(91): Selenocysteine
  MOD_RES (107)..(108): Selenocysteine
  MOD_RES (132)..(132): Selenocysteine
  MOD_RES (168)..(168): Selenocysteine
  MOD_RES (172)..(172): Selenocysteine
  MOD_RES (181)..(181): Selenocysteine
  MOD_RES (186)..(186): Selenocysteine
  MOD_RES (204)..(204): Selenocysteine
  MOD_RES (211)..(211): Selenocysteine
  MOD_RES (215)..(215): Selenocysteine
  MOD_RES (222)..(222): Selenocysteine
  MOD_RES (261)..(262): Selenocysteine
  MOD_RES (276)..(276): Selenocysteine
  MOD_RES (336)..(336): Selenocysteine
  MOD_RES (374)..(374): Selenocysteine
MEDEMPKXLYVGNLSRDVXEALILQLFSQIGPCKNCKMIMDXAGNDPYCFVEFHEHRHAAAALAAMNGRKIMGKEVKVNWAXXPSSQKKDXSNHFHVFVGDLSPEIXXEDIKAAFAPFGRISDARVVKDMAXGKSKGYGFVSFFNKWDAENAIQQMGGQWLGGRQIRXNWAXRKPPAPKSXYESNXKQLSYDEVVNQSSPSNCXVYCGGVXSGLXEQLMRQXFSPFGQIMEIRVFPDKGYSFVRFNSHESAAHAIVSVNGXXIEGHVVKCYWGKEXLDMINPVQQQNQIGYPQPYGQWGQWYGNAQQIGQYMPNGWQVPAYGMYGQAWNQQGFNQXQSSAPWMGPNYGVQPPQGQNGSMLPNQPSGYRVAGYEXQ

SEQ ID NO: 27661 - protein, 285 aa, Homo sapiens
  MOD_RES (8)..(8): Selenocysteine
  MOD_RES (19)..(19): Selenocysteine
  MOD_RES (42)..(42): Selenocysteine
  MOD_RES (82)..(83): Selenocysteine
  MOD_RES (91)..(91): Selenocysteine
  MOD_RES (107)..(108): Selenocysteine
  MOD_RES (132)..(132): Selenocysteine
  MOD_RES (168)..(168): Selenocysteine
  MOD_RES (172)..(172): Selenocysteine
  MOD_RES (181)..(181): Selenocysteine
  MOD_RES (186)..(186): Selenocysteine
  MOD_RES (204)..(204): Selenocysteine
  MOD_RES (211)..(211): Selenocysteine
  MOD_RES (215)..(215): Selenocysteine
  MOD_RES (222)..(222): Selenocysteine
  MOD_RES (246)..(246): Selenocysteine
  MOD_RES (284)..(284): Selenocysteine
MEDEMPKXLYVGNLSRDVXEALILQLFSQIGPCKNCKMIMDXAGNDPYCFVEFHEHRHAAAALAAMNGRKIMGKEVKVNWAXXPSSQKKDXSNHFHVFVGDLSPEIXXEDIKAAFAPFGRISDARVVKDMAXGKSKGYGFVSFFNKWDAENAIQQMGGQWLGGRQIRXNWAXRKPPAPKSXYESNXKQLSYDEVVNQSSPSNCXVYCGGVXSGLXEQLMRQXFSPFGQIMEIRVFPDKGYSFVRQXQSSAPWMGPNYGVQPPQGQNGSMLPNQPSGYRVAGYEXQ

SEQ ID NO: 27662 - protein, 214 aa, Homo sapiens
  MOD_RES (8)..(8): Selenocysteine
  MOD_RES (19)..(19): Selenocysteine
  MOD_RES (42)..(42): Selenocysteine
  MOD_RES (82)..(83): Selenocysteine
  MOD_RES (91)..(91): Selenocysteine
  MOD_RES (95)..(95): Selenocysteine
  MOD_RES (99)..(99): Selenocysteine
  MOD_RES (118)..(119): Selenocysteine
  MOD_RES (143)..(143): Selenocysteine
  MOD_RES (179)..(179): Selenocysteine
  MOD_RES (183)..(183): Selenocysteine
  MOD_RES (192)..(192): Selenocysteine
MEDEMPKXLYVGNLSRDVXEALILQLFSQIGPCKNCKMIMDXAGNDPYCFVEFHEHRHAAAALAAMNGRKIMGKEVKVNWAXXPSSQKKDXSSSXVVSXQRSQDHFHVFVGDLSPEIXXEDIKAAFAPFGRISDARVVKDMAXGKSKGYGFVSFFNKWDAENAIQQMGGQWLGGRQIRXNWAXRKPPAPKSXYECRCIGEEKEMWNFGEKYARF

SEQ ID NO: 27663 - protein, 385 aa, Homo sapiens
  MOD_RES (8)..(8): Selenocysteine
  MOD_RES (19)..(19): Selenocysteine
  MOD_RES (42)..(42): Selenocysteine
  MOD_RES (82)..(83): Selenocysteine
  MOD_RES (91)..(91): Selenocysteine
  MOD_RES (95)..(95): Selenocysteine
  MOD_RES (99)..(99): Selenocysteine
  MOD_RES (118)..(119): Selenocysteine
  MOD_RES (143)..(143): Selenocysteine
  MOD_RES (179)..(179): Selenocysteine
  MOD_RES (183)..(183): Selenocysteine
  MOD_RES (192)..(192): Selenocysteine
  MOD_RES (197)..(197): Selenocysteine
  MOD_RES (215)..(215): Selenocysteine
  MOD_RES (222)..(222): Selenocysteine
  MOD_RES (226)..(226): Selenocysteine
  MOD_RES (233)..(233): Selenocysteine
  MOD_RES (272)..(273): Selenocysteine
  MOD_RES (287)..(287): Selenocysteine
  MOD_RES (346)..(346): Selenocysteine
  MOD_RES (384)..(384): Selenocysteine
MEDEMPKXLYVGNLSRDVXEALILQLFSQIGPCKNCKMIMDXAGNDPYCFVEFHEHRHAAAALAAMNGRKIMGKEVKVNWAXXPSSQKKDXSSSXVVSXQRSQDHFHVFVGDLSPEIXXEDIKAAFAPFGRISDARVVKDMAXGKSKGYGFVSFFNKWDAENAIQQMGGQWLGGRQIRXNWAXRKPPAPKSXYESNXKQLSYDEVVNQSSPSNCXVYCGGVXSGLXEQLMRQXFSPFGQIMEIRVFPDKGYSFVRFNSHESAAHAIVSVNGXXIEGHVVKCYWGKEXLDMINPVQQNQIGYPQPYGQWGQWYGNAQQIGQYMPNGWQVPAYGMYGQAWNQQGFNQXQSSAPWMGPNYGVQPPQGQNGSMLPNQPSGYRVAGYEXQ

SEQ ID NO: 27664 - protein, 386 aa, Homo sapiens
  MOD_RES (8)..(8): Selenocysteine
  MOD_RES (19)..(19): Selenocysteine
  MOD_RES (42)..(42): Selenocysteine
  MOD_RES (82)..(83): Selenocysteine
  MOD_RES (91)..(91): Selenocysteine
  MOD_RES (95)..(95): Selenocysteine
  MOD_RES (99)..(99): Selenocysteine
  MOD_RES (118)..(119): Selenocysteine
  MOD_RES (143)..(143): Selenocysteine
  MOD_RES (179)..(179): Selenocysteine
  MOD_RES (183)..(183): Selenocysteine
  MOD_RES (192)..(192): Selenocysteine
  MOD_RES (197)..(197): Selenocysteine
  MOD_RES (215)..(215): Selenocysteine
  MOD_RES (222)..(222): Selenocysteine
  MOD_RES (226)..(226): Selenocysteine
  MOD_RES (233)..(233): Selenocysteine
  MOD_RES (272)..(273): Selenocysteine
  MOD_RES (287)..(287): Selenocysteine
  MOD_RES (347)..(347): Selenocysteine
  MOD_RES (385)..(385): Selenocysteine
MEDEMPKXLYVGNLSRDVXEALILQLFSQIGPCKNCKMIMDXAGNDPYCFVEFHEHRHAAAALAAMNGRKIMGKEVKVNWAXXPSSQKKDXSSSXVVSXQRSQDHFHVFVGDLSPEIXXEDIKAAFAPFGRISDARVVKDMAXGKSKGYGFVSFFNKWDAENAIQQMGGQWLGGRQIRXNWAXRKPPAPKSXYESNXKQLSYDEVVNQSSPSNCXVYCGGVXSGLXEQLMRQXFSPFGQIMEIRVFPDKGYSFVRFNSHESAAHAIVSVNGXXIEGHVVKCYWGKEXLDMINPVQQQNQIGYPQPYGQWGQWYGNAQQIGQYMPNGWQVPAYGMYGQAWNQQGFNQXQSSAPWMGPNYGVQPPQGQNGSMLPNQPSGYRVAGYEXQ

SEQ ID NO: 27665 - protein, 144 aa, Homo sapiens
  MOD_RES (8)..(8): Selenocysteine
  MOD_RES (19)..(19): Selenocysteine
  MOD_RES (42)..(42): Selenocysteine
  MOD_RES (82)..(83): Selenocysteine
  MOD_RES (91)..(91): Selenocysteine
  MOD_RES (95)..(95): Selenocysteine
  MOD_RES (99)..(99): Selenocysteine
  MOD_RES (118)..(119): Selenocysteine
MEDEMPKXLYVGNLSRDVXEALILQLFSQIGPCKNCKMIMDXAGNDPYCFVEFHEHRHAAAALAAMNGRKIMGKEVKVNWAXXPSSQKKDXSSSXVVSXQRSQDHFHVFVGDLSPEIXXEDIKAAFAPFGRISVSLKNGQNCPG

SEQ ID NO: 27666 - protein, 161 aa, Homo sapiens
  MOD_RES (8)..(8): Selenocysteine
  MOD_RES (19)..(19): Selenocysteine
  MOD_RES (42)..(42): Selenocysteine
  MOD_RES (82)..(83): Selenocysteine
  MOD_RES (91)..(91): Selenocysteine
  MOD_RES (95)..(95): Selenocysteine
  MOD_RES (99)..(99): Selenocysteine
  MOD_RES (131)..(131): Selenocysteine
MEDEMPKXLYVGNLSRDVXEALILQLFSQIGPCKNCKMIMDXAGNDPYCFVEFHEHRHAAAALAAMNGRKIMGKEVKVNWAXXPSSQKKDXSSSXVVSXQRSQVLVHLHMDSHKLNGVMSGQPKLLAFEKXVKYFNIKLLQCKIISMSLLVISAQKLQLKI

SEQ ID NO: 27667 - protein, 114 aa, Homo sapiens
  MOD_RES (4)..(4): Selenocysteine
  MOD_RES (43)..(44): Selenocysteine
  MOD_RES (58)..(58): Selenocysteine
MRQXFSPFGQIMEIRVFPDKGYSFVRFNSHESAAHAIVSVNGXXIEGHVVKCYWGKEXLDMINPVQQQNQIGYPQPYGQWGQWYGNAQQIGQYMPNGWQVPAYGMYGQAWNQQG

SEQ ID NO: 27668 - protein, 152 aa, Homo sapiens
  MOD_RES (1)..(1): Any amino acid
  MOD_RES (11)..(11): Selenocysteine
  MOD_RES (34)..(34): Selenocysteine
  MOD_RES (74)..(75): Selenocysteine
  MOD_RES (83)..(83): Selenocysteine
  MOD_RES (99)..(100): Selenocysteine
  MOD_RES (124)..(124): Selenocysteine
XYVGNLSRDVXEALILQLFSQIGPCKNCKMIMDXAGNDPYCFVEFHEHRHAAAALAAMNGRKIMGKEVKVNWAXXPSSQKKDXSNHFHVFVGDLSPEIXXEDIKAAFAPFGRISDARVVKDMAXGKSKGYGFVSFFNKWVSSVRSAWIMLKE

SEQ ID NO: 27669 - protein, 115 aa, Homo sapiens
  MOD_RES (63)..(63): Selenocysteine
  MOD_RES (93)..(93): Selenocysteine
MSSPSSPFREQSFLCAAGDAGEESRVQVLKNEVRRGSPVLLGWVEQAYADKCVCGPSAPPAPXPPSLSQRVMCNDLFKVNPFQLQQFRADPSXASLLLCPGGLDHKLNLRGKAWG

SEQ ID NO: 27670 - protein, 85 aa, Homo sapiens
  MOD_RES (3)..(3): Selenocysteine
  MOD_RES (6)..(6): Selenocysteine
  MOD_RES (45)..(46): Selenocysteine
  MOD_RES (54)..(54): Selenocysteine
  MOD_RES (70)..(71): Selenocysteine
MIXEHXSNDPYCFVEFYEHRDAAAALAAMNGRKILGKEVKVNWAXXPSSQKKDXSNHFHVFVGDLSPEIXXEDIKSAFAPFGKIS

SEQ ID NO: 27671 - protein, 132 aa, Homo sapiens
  MOD_RES (3)..(3): Selenocysteine
  MOD_RES (6)..(6): Selenocysteine
  MOD_RES (45)..(46): Selenocysteine
  MOD_RES (54)..(54): Selenocysteine
  MOD_RES (70)..(71): Selenocysteine
  MOD_RES (95)..(95): Selenocysteine
  MOD_RES (131)..(131): Selenocysteine
MIXEHXSNDPYCFVEFYEHRDAAAALAAMNGRKILGKEVKVNWAXXPSSQKKDXSNHFHVFVGDLSPEIXXEDIKSAFAPFGKISDARVVKDMAXGKSKGYGFVSFYNKLDAENAIVHMGGQWLGGRQIRXN

SEQ ID NO: 27672 - protein, 28 aa, Homo sapiens
  MOD_RES (10)..(10): Selenocysteine
  MOD_RES (13)..(13): Selenocysteine
  MOD_RES (17)..(17): Selenocysteine
MMEDDGQPRXLHXQAKXYGSIFRKQYGV

SEQ ID NO: 27673 - protein, 375 aa, Homo sapiens
  MOD_RES (10)..(10): Selenocysteine
  MOD_RES (21)..(21): Selenocysteine
  MOD_RES (42)..(42): Selenocysteine
  MOD_RES (45)..(45): Selenocysteine
  MOD_RES (84)..(85): Selenocysteine
  MOD_RES (93)..(93): Selenocysteine
  MOD_RES (109)..(110): Selenocysteine
  MOD_RES (134)..(134): Selenocysteine
  MOD_RES (170)..(170): Selenocysteine
  MOD_RES (174)..(174): Selenocysteine
  MOD_RES (183)..(183): Selenocysteine
  MOD_RES (188)..(188): Selenocysteine
  MOD_RES (206)..(206): Selenocysteine
  MOD_RES (217)..(217): Selenocysteine
  MOD_RES (224)..(224): Selenocysteine
  MOD_RES (249)..(249): Selenocysteine
  MOD_RES (263)..(264): Selenocysteine
  MOD_RES (282)..(282): Selenocysteine
  MOD_RES (374)..(374): Selenocysteine
MMEDDGQPRXLYVGNLSRDVXEVLILQLFSQIGPCKSCKMIXEHXSNDPYCFVEFYEHRDAAAALAAMNGRKILGKEVKVNWAXXPSSQKKDXSNHFHVFVGDLSPEIXXEDIKSAFAPFGKISDARVVKDMAXGKSKGYGFVSFYNKLDAENAIVHMGGQWLGGRQIRXNWAXRKPPAPKSXQENNXKQLRFEDVVNQSSPKNCXVYCGGIASGLXDQLMRQXFSPFGQIMEIRVFPEKGYSFVRFSXHESAAHAIVSVNGXXIEGHVVKCYWGKESPDMXKNFQQVDYSQWGQWSQVYGNPQQYGQYMANGWQVPPYGVYGQPWNQQGFGVDQSPSAAWMGGFGAQPPQGQAPPPVIPPPNQAGYGMASYQXQ

SEQ ID NO: 27674 - protein, 135 aa, Homo sapiens
  MOD_RES (10)..(10): Selenocysteine
  MOD_RES (21)..(21): Selenocysteine
  MOD_RES (42)..(42): Selenocysteine
  MOD_RES (45)..(45): Selenocysteine
  MOD_RES (84)..(85): Selenocysteine
  MOD_RES (93)..(93): Selenocysteine
  MOD_RES (109)..(110): Selenocysteine
MMEDDGQPRXLYVGNLSRDVXEVLILQLFSQIGPCKSCKMIXEHXSNDPYCFVEFYEHRDAAAALAAMNGRKILGKEVKVNWAXXPSSQKKDXSNHFHVFVGDLSPEIXXEDIKSAFAPFGKISIAHKNGQDLEG

SEQ ID NO: 27675 - protein, 392 aa, Homo sapiens
  MOD_RES (10)..(10): Selenocysteine
  MOD_RES (21)..(21): Selenocysteine
  MOD_RES (42)..(42): Selenocysteine
  MOD_RES (62)..(62): Selenocysteine
  MOD_RES (101)..(102): Selenocysteine
  MOD_RES (110)..(110): Selenocysteine
  MOD_RES (126)..(127): Selenocysteine
  MOD_RES (151)..(151): Selenocysteine
  MOD_RES (187)..(187): Selenocysteine
  MOD_RES (191)..(191): Selenocysteine
  MOD_RES (200)..(200): Selenocysteine
  MOD_RES (205)..(205): Selenocysteine
  MOD_RES (223)..(223): Selenocysteine
  MOD_RES (234)..(234): Selenocysteine
  MOD_RES (241)..(241): Selenocysteine
  MOD_RES (266)..(266): Selenocysteine
  MOD_RES (280)..(281): Selenocysteine
  MOD_RES (299)..(299): Selenocysteine
  MOD_RES (391)..(391): Selenocysteine
MMEDDGQPRXLYVGNLSRDVXEVLILQLFSQIGPCKSCKMIXEQPDSRRVNSSVGFSVLQHXSNDPYCFVEFYEHRDAAAALAAMNGRKILGKEVKVNWAXXPSSQKKDXSNHFHVFVGDLSPEIXXEDIKSAFAPFGKISDARVVKDMAXGKSKGYGFVSFYNKLDAENAIVHMGGQWLGGRQIRXNWAXRKPPAPKSXQENNXKQLRFEDVVNQSSPKNCXVYCGGIASGLXDQLMRQXFSPFGQIMEIRVFPEKGYSFVRFSXHESAAHAIVSVNGXXIEGHVVKCYWGKESPDMXKNFQQVDYSQWGQWSQVYGNPQQYGQYMANGWQVPPYGVYGQPWNQQGFGVDQSPSAAWMGGFGAQPPQGQAPPPVIPPPNQAGYGMASYQXQ

SEQ ID NO: 27676 - protein, 225 aa, Homo sapiens
  MOD_RES (26)..(26): Selenocysteine
  MOD_RES (36)..(36): Selenocysteine
  MOD_RES (39)..(39): Selenocysteine
  MOD_RES (56)..(56): Selenocysteine
  MOD_RES (61)..(61): Selenocysteine
  MOD_RES (81)..(81): Selenocysteine
  MOD_RES (104)..(104): Selenocysteine
  MOD_RES (109)..(109): Selenocysteine
  MOD_RES (119)..(119): Selenocysteine
  MOD_RES (129)..(129): Selenocysteine
  MOD_RES (140)..(140): Selenocysteine
  MOD_RES (153)..(153): Selenocysteine
  MOD_RES (158)..(158): Selenocysteine
  MOD_RES (162)..(162): Selenocysteine
  MOD_RES (194)..(194): Selenocysteine
  MOD_RES (216)..(216): Selenocysteine
  MOD_RES (225)..(225): Selenocysteine
MGNAESQHVEHEFYGEKHASLGRKHXSRSLRLSHKXRRXRHASSGKVIHRNSEVSXRSSSXPSIPQSLAENGLEPFSQDGXLEDFGSPIWVDRVDMGLRPVSYXDSSVXPSVDSSIVLXAASVQSMPDXEESRLYGDDAXYLAEGGRRQHSYXSNGPXFMEXASFKKKRSKSADIWREDSLEFSLSDLSQEHLXSNEEILGSAEEKDCEEARGMEXRASPRQLSX

SEQ ID NO: 27677 - protein, 1531 aa, Homo sapiens
  MOD_RES (26)..(26): Selenocysteine
  MOD_RES (36)..(36): Selenocysteine
  MOD_RES (39)..(39): Selenocysteine
  MOD_RES (56)..(56): Selenocysteine
  MOD_RES (61)..(61): Selenocysteine
  MOD_RES (81)..(81): Selenocysteine
  MOD_RES (104)..(104): Selenocysteine
  MOD_RES (109)..(109): Selenocysteine
  MOD_RES (119)..(119): Selenocysteine
  MOD_RES (129)..(129): Selenocysteine
  MOD_RES (140)..(140): Selenocysteine
  MOD_RES (153)..(153): Selenocysteine
  MOD_RES (158)..(158): Selenocysteine
  MOD_RES (162)..(162): Selenocysteine
  MOD_RES (194)..(194): Selenocysteine
  MOD_RES (216)..(216): Selenocysteine
  MOD_RES (225)..(225): Selenocysteine
  MOD_RES (244)..(244): Selenocysteine
  MOD_RES (280)..(280): Selenocysteine
  MOD_RES (288)..(288): Selenocysteine
  MOD_RES (302)..(302): Selenocysteine
  MOD_RES (319)..(320): Selenocysteine
  MOD_RES (340)..(341): Selenocysteine
  MOD_RES (343)..(343): Selenocysteine
  MOD_RES (353)..(353): Selenocysteine
  MOD_RES (360)..(361): Selenocysteine
  MOD_RES (375)..(375): Selenocysteine
  MOD_RES (395)..(396): Selenocysteine
  MOD_RES (416)..(416): Selenocysteine
  MOD_RES (428)..(428): Selenocysteine
  MOD_RES (433)..(433): Selenocysteine
  MOD_RES (458)..(458): Selenocysteine
  MOD_RES (473)..(473): Selenocysteine
  MOD_RES (529)..(530): Selenocysteine
  MOD_RES (533)..(533): Selenocysteine
  MOD_RES (540)..(540): Selenocysteine
  MOD_RES (548)..(548): Selenocysteine
  MOD_RES (559)..(559): Selenocysteine
  MOD_RES (592)..(592): Selenocysteine
  MOD_RES (599)..(599): Selenocysteine
  MOD_RES (647)..(647): Selenocysteine
  MOD_RES (670)..(670): Selenocysteine
  MOD_RES (673)..(673): Selenocysteine
  MOD_RES (679)..(679): Selenocysteine
  MOD_RES (701)..(702): Selenocysteine
  MOD_RES (740)..(740): Selenocysteine
  MOD_RES (754)..(754): Selenocysteine
  MOD_RES (761)..(761): Selenocysteine
  MOD_RES (765)..(765): Selenocysteine
  MOD_RES (783)..(783): Selenocysteine
  MOD_RES (793)..(793): Selenocysteine
  MOD_RES (797)..(797): Selenocysteine
  MOD_RES (821)..(821): Selenocysteine
  MOD_RES (866)..(866): Selenocysteine
  MOD_RES (899)..(899): Selenocysteine
  MOD_RES (916)..(916): Selenocysteine
  MOD_RES (921)..(921): Selenocysteine
  MOD_RES (932)..(932): Selenocysteine
  MOD_RES (939)..(939): Selenocysteine
  MOD_RES (965)..(965): Selenocysteine
  MOD_RES (971)..(971): Selenocysteine
  MOD_RES (991)..(991): Selenocysteine
  MOD_RES (994)..(994): Selenocysteine
  MOD_RES (1014)..(1014): Selenocysteine
  MOD_RES (1017)..(1017): Selenocysteine
  MOD_RES (1029)..(1029): Selenocysteine
  MOD_RES (1041)..(1041): Selenocysteine
  MOD_RES (1090)..(1090): Selenocysteine
  MOD_RES (1101)..(1101): Selenocysteine
  MOD_RES (1103)..(1103): Selenocysteine
  MOD_RES (1121)..(1121): Selenocysteine
  MOD_RES (1147)..(1147): Selenocysteine
  MOD_RES (1163)..(1163): Selenocysteine
  MOD_RES (1193)..(1193): Selenocysteine
  MOD_RES (1211)..(1212): Selenocysteine
  MOD_RES (1238)..(1238): Selenocysteine
  MOD_RES (1277)..(1277): Selenocysteine
  MOD_RES (1345)..(1345): Selenocysteine
  MOD_RES (1396)..(1396): Selenocysteine
  MOD_RES (1420)..(1420): Selenocysteine
  MOD_RES (1442)..(1442): Selenocysteine
  MOD_RES (1471)..(1471): Selenocysteine
  MOD_RES (1482)..(1482): Selenocysteine
  MOD_RES (1529)..(1529): Selenocysteine
MGNAESQHVEHEFYGEKHASLGRKHXSRSLRLSHKXRRXRHASSGKVIHRNSEVSXRSSSXPSIPQSLAENGLEPFSQDGXLEDFGSPIWVDRVDMGLRPVSYXDSSVXPSVDSSIVLXAASVQSMPDXEESRLYGDDAXYLAEGGRRQHSYXSNGPXFMEXASFKKKRSKSADIWREDSLEFSLSDLSQEHLXSNEEILGSAEEKDCEEARGMEXRASPRQLSXCQRANSLGDLYAQKNSGVXANGGPGSKFAGYCRNLVSDIPNLANHKMPPAAAEEXPPYSNYNXLPCRKSHCLSEGAXNPQISHSNSMQGRRAKXXQDVNAGEGSEFADSGIEGAXXDXDLLSRRSNAXNSSYSPXXGRAFVGSDSGSSSXGDAARQGVYENFRRELEMSXXNSESLEEAGSAHSDEQSSGXLSSPGQSDILLXAAQGXVRKAGALAVKNFLVHKKNKKVESAXRRKWKHYWVSLKGCXLFFYESDGRSGIDHNSIPKHAVWVENSIVQAVPEHPKKDFVFCLSNSLGDAFLFQXXSQXELENWIXAIHSACAXAVARHHHKEDXLRLLKSEIKKLEQKIDMDEKMKKMGEMQLSSVXDSKKKKXILDQIFVWEQNLEQFQMDLFRFRCYLASLQGGELPNPKRLLAFASRPXKVAMGRLGIFSVSSFHALVAARXGEXGVRRRXQAMSRSASKRRSRFSSLWGLDXXSKKKQGRPSINQREKEVVLPNVHQHNPDCDIWVHEYFXPSWFCLPNNQPALXVVRPGDXARDXLELICKLYKEIEICPKVXQSIHIEKSDXAADXYGFSLSSVEEDGIRRLYVNSVKEXGLASKKGLKAGDEILEINNRAADALNSSMLKDFLSQPSLGLLVRXYPELEEGVELLESPPHRVDGPADLGESPLAFLXSNPGHSLCSEQGSSAEXAPEEXEGPDLESSDEXDHSSKSXEQVAAFCRSLHEMNPSDQSPSPQDSXGPQLAXMRQLSDADKLRKVICELLEXERXYVKDLNCLMERYLKPLQKEXFLXQDELDVLFGNLXEMVEFQVEFLKXLEDGVRLVPDLEKLEKVDQFKKVLFSLGGSFLYYADRFKLYSAFCASHXKVPKVLVKAKXDXAFKAFLDAQNPKQQHSSXLESYLIKPIQRILKYPLLLRELFALXDAESEEHYHLDVAIKXMNKVASHINEMQKIHEEFGAVFDQLIAEQXGEKKEVADLSMGDLLLHXXVIWLNPPASLGKWKKEPELAAFVFKXAVVLVYKDGSKQKKKLVGSHRLSIYEDWDPFRFRHMIPXEALQVRALASADAEANAVCEIVHVKSESEGRPERVFHLCCSSPESRKDFLKAVHSILRDKHRRQLLKXESLPSSQQYVPFGGKRLCALKGARPAMSRAVSAPSKSLGRRRRRLARNRFXIDSDAVSASSPEKESQQPPGGGDXDRWVEEQFDLAQYEEQDDIKEXDILSDDDEFCESVKGASVDRDLQERLQAXSISQRERGRKXLDSHASRMAQLKKQAALSGINGGLESASEEVIWVRREDFAPSRKLNXEI

SEQ ID NO: 27678 - protein, 1591 aa, Homo sapiens
  MOD_RES (26)..(26): Selenocysteine
  MOD_RES (36)..(36): Selenocysteine
  MOD_RES (39)..(39): Selenocysteine
  MOD_RES (56)..(56): Selenocysteine
  MOD_RES (61)..(61): Selenocysteine
  MOD_RES (81)..(81): Selenocysteine
  MOD_RES (104)..(104): Selenocysteine
  MOD_RES (109)..(109): Selenocysteine
  MOD_RES (119)..(119): Selenocysteine
  MOD_RES (129)..(129): Selenocysteine
  MOD_RES (140)..(140): Selenocysteine
  MOD_RES (153)..(153): Selenocysteine
  MOD_RES (158)..(158): Selenocysteine
  MOD_RES (162)..(162): Selenocysteine
  MOD_RES (194)..(194): Selenocysteine
  MOD_RES (216)..(216): Selenocysteine
  MOD_RES (225)..(225): Selenocysteine
  MOD_RES (244)..(244): Selenocysteine
  MOD_RES (280)..(280): Selenocysteine
  MOD_RES (288)..(288): Selenocysteine
  MOD_RES (302)..(302): Selenocysteine
  MOD_RES (319)..(320): Selenocysteine
  MOD_RES (340)..(341): Selenocysteine
  MOD_RES (343)..(343): Selenocysteine
  MOD_RES (353)..(353): Selenocysteine
  MOD_RES (360)..(361): Selenocysteine
  MOD_RES (375)..(375): Selenocysteine
  MOD_RES (395)..(396): Selenocysteine
  MOD_RES (416)..(416): Selenocysteine
  MOD_RES (428)..(428): Selenocysteine
  MOD_RES (433)..(433): Selenocysteine
  MOD_RES (458)..(458): Selenocysteine
  MOD_RES (473)..(473): Selenocysteine
  MOD_RES (529)..(530): Selenocysteine
  MOD_RES (533)..(533): Selenocysteine
  MOD_RES (540)..(540): Selenocysteine
  MOD_RES (548)..(548): Selenocysteine
  MOD_RES (559)..(559): Selenocysteine
  MOD_RES (592)..(592): Selenocysteine
  MOD_RES (599)..(599): Selenocysteine
  MOD_RES (647)..(647): Selenocysteine
  MOD_RES (670)..(670): Selenocysteine
  MOD_RES (673)..(673): Selenocysteine
  MOD_RES (679)..(679): Selenocysteine
  MOD_RES (701)..(702): Selenocysteine
  MOD_RES (720)..(720): Selenocysteine
  MOD_RES (765)..(765): Selenocysteine
  MOD_RES (779)..(779): Selenocysteine
  MOD_RES (786)..(786): Selenocysteine
  MOD_RES (790)..(790): Selenocysteine
  MOD_RES (797)..(797): Selenocysteine
  MOD_RES (843)..(843): Selenocysteine
  MOD_RES (853)..(853): Selenocysteine
  MOD_RES (857)..(857): Selenocysteine
  MOD_RES (881)..(881): Selenocysteine
  MOD_RES (926)..(926): Selenocysteine
  MOD_RES (959)..(959): Selenocysteine
  MOD_RES (976)..(976): Selenocysteine
  MOD_RES (981)..(981): Selenocysteine
  MOD_RES (992)..(992): Selenocysteine
  MOD_RES (999)..(999): Selenocysteine
  MOD_RES (1025)..(1025): Selenocysteine
  MOD_RES (1031)..(1031): Selenocysteine
  MOD_RES (1051)..(1051): Selenocysteine
  MOD_RES (1054)..(1054): Selenocysteine
  MOD_RES (1074)..(1074): Selenocysteine
  MOD_RES (1077)..(1077): Selenocysteine
  MOD_RES (1089)..(1089): Selenocysteine
  MOD_RES (1101)..(1101): Selenocysteine
  MOD_RES (1150)..(1150): Selenocysteine
  MOD_RES (1161)..(1161): Selenocysteine
  MOD_RES (1163)..(1163): Selenocysteine
  MOD_RES (1181)..(1181): Selenocysteine
  MOD_RES (1207)..(1207): Selenocysteine
  MOD_RES (1223)..(1223): Selenocysteine
  MOD_RES (1253)..(1253): Selenocysteine
  MOD_RES (1271)..(1272): Selenocysteine
  MOD_RES (1298)..(1298): Selenocysteine
  MOD_RES (1337)..(1337): Selenocysteine
  MOD_RES (1405)..(1405): Selenocysteine
  MOD_RES (1456)..(1456): Selenocysteine
  MOD_RES (1480)..(1480): Selenocysteine
  MOD_RES (1502)..(1502): Selenocysteine
  MOD_RES (1531)..(1531): Selenocysteine
  MOD_RES (1542)..(1542): Selenocysteine
  MOD_RES (1589)..(1589): Selenocysteine
MGNAESQHVEHEFYGEKHASLGRKHXSRSLRLSHKXRRXRHASSGKVIHRNSEVSXRSSSXPSIPQSLAENGLEPFSQDGXLEDFGSPIWVDRVDMGLRPVSYXDSSVXPSVDSSIVLXAASVQSMPDXEESRLYGDDAXYLAEGGRRQHSYXSNGPXFMEXASFKKKRSKSADIWREDSLEFSLSDLSQEHLXSNEEILGSAEEKDCEEARGMEXRASPRQLSXCQRANSLGDLYAQKNSGVXANGGPGSKFAGYCRNLVSDIPNLANHKMPPAAAEEXPPYSNYNXLPCRKSHCLSEGAXNPQISHSNSMQGRRAKXXQDVNAGEGSEFADSGIEGAXXDXDLLSRRSNAXNSSYSPXXGRAFVGSDSGSSSXGDAARQGVYENFRRELEMSXXNSESLEEAGSAHSDEQSSGXLSSPGQSDILLXAAQGXVRKAGALAVKNFLVHKKNKKVESAXRRKWKHYWVSLKGCXLFFYESDGRSGIDHNSIPKHAVWVENSIVQAVPEHPKKDFVFCLSNSLGDAFLFQXXSQXELENWIXAIHSACAXAVARHHHKEDXLRLLKSEIKKLEQKIDMDEKMKKMGEMQLSSVXDSKKKKXILDQIFVWEQNLEQFQMDLFRFRCYLASLQGGELPNPKRLLAFASRPXKVAMGRLGIFSVSSFHALVAARXGEXGVRRRXQAMSRSASKRRSRFSSLWGLDXXSKKKQGRPSINQVFGEGXEAVKKSLEGIFDDIVPDGKREKEVVLPNVHQHNPDCDIWVHEYFXPSWFCLPNNQPALXVVRPGDXARDXLELICKXHQLDHSAHYLRLKFLIENKMQLYVPQPEEDIYELLYKEIEICPKVXQSIHIEKSDXAADXYGFSLSSVEEDGIRRLYVNSVKEXGLASKKGLKAGDEILEINNRAADALNSSMLKDFLSQPSLGLLVRXYPELEEGVELLESPPHRVDGPADLGESPLAFLXSNPGHSLCSEQGSSAEXAPEEXEGPDLESSDEXDHSSKSXEQVAAFCRSLHEMNPSDQSPSPQDSXGPQLAXMRQLSDADKLRKVICELLEXERXYVKDLNCLMERYLKPLQKEXFLXQDELDVLFGNLXEMVEFQVEFLKXLEDGVRLVPDLEKLEKVDQFKKVLFSLGGSFLYYADRFKLYSAFCASHXKVPKVLVKAKXDXAFKAFLDAQNPKQQHSSXLESYLIKPIQRILKYPLLLRELFALXDAESEEHYHLDVAIKXMNKVASHINEMQKIHEEFGAVFDQLIAEQXGEKKEVADLSMGDLLLHXXVIWLNPPASLGKWKKEPELAAFVFKXAVVLVYKDGSKQKKKLVGSHRLSIYEDWDPFRFRHMIPXEALQVRALASADAEANAVCEIVHVKSESEGRPERVFHLCCSSPESRKDFLKAVHSILRDKHRRQLLKXESLPSSQQYVPFGGKRLCALKGARPAMSRAVSAPSKSLGRRRRRLARNRFXIDSDAVSASSPEKESQQPPGGGDXDRWVEEQFDLAQYEEQDDIKEXDILSDDDEFCESVKGASVDRDLQERLQAXSISQRERGRKXLDSHASRMAQLKKQAALSGINGGLESASEEVIWVRREDFAPSRKLNXEI

SEQ ID NO: 27679 - protein, 624 aa, Homo sapiens
  MOD_RES (27)..(27): Selenocysteine
  MOD_RES (32)..(32): Selenocysteine
  MOD_RES (58)..(58): Selenocysteine
  MOD_RES (64)..(64): Selenocysteine
  MOD_RES (84)..(84): Selenocysteine
  MOD_RES (87)..(87): Selenocysteine
  MOD_RES (107)..(107): Selenocysteine
  MOD_RES (110)..(110): Selenocysteine
  MOD_RES (122)..(122): Selenocysteine
  MOD_RES (134)..(134): Selenocysteine
  MOD_RES (183)..(183): Selenocysteine
  MOD_RES (194)..(194): Selenocysteine
  MOD_RES (196)..(196): Selenocysteine
  MOD_RES (214)..(214): Selenocysteine
  MOD_RES (240)..(240): Selenocysteine
  MOD_RES (256)..(256): Selenocysteine
  MOD_RES (286)..(286): Selenocysteine
  MOD_RES (304)..(305): Selenocysteine
  MOD_RES (331)..(331): Selenocysteine
  MOD_RES (370)..(370): Selenocysteine
  MOD_RES (438)..(438): Selenocysteine
  MOD_RES (489)..(489): Selenocysteine
  MOD_RES (513)..(513): Selenocysteine
  MOD_RES (535)..(535): Selenocysteine
  MOD_RES (564)..(564): Selenocysteine
  MOD_RES (575)..(575): Selenocysteine
  MOD_RES (622)..(622): Selenocysteine
MMSALWKIKRKPRIENNDKSGDSMYRXLHLSXEQVAAFCRSLHEMNPSDQSPSPQDSXGPQLAXMRQLSDADKLRKVICELLEXERXYVKDLNCLMERYLKPLQKEXFLXQDELDVLFGNLXEMVEFQVEFLKXLEDGVRLVPDLEKLEKVDQFKKVLFSLGGSFLYYADRFKLYSAFCASHXKVPKVLVKAKXDXAFKAFLDAQNPKQQHSSXLESYLIKPIQRILKYPLLLRELFALXDAESEEHYHLDVAIKXMNKVASHINEMQKIHEEFGAVFDQLIAEQXGEKKEVADLSMGDLLLHXXVIWLNPPASLGKWKKEPELAAFVFKXAVVLVYKDGSKQKKKLVGSHRLSIYEDWDPFRFRHMIPXEALQVRALASADAEANAVCEIVHVKSESEGRPERVFHLCCSSPESRKDFLKAVHSILRDKHRRQLLKXESLPSSQQYVPFGGKRLCALKGARPAMSRAVSAPSKSLGRRRRRLARNRFXIDSDAVSASSPEKESQQPPGGGDXDRWVEEQFDLAQYEEQDDIKEXDILSDDDEFCESVKGASVDRDLQERLQAXSISQRERGRKXLDSHASRMAQLKKQAALSGINGGLESASEEVIWVRREDFAPSRKLNXEI

SEQ ID NO: 27680 - protein, 132 aa, Homo sapiens
  MOD_RES (1)..(1): Any amino acid
  MOD_RES (60)..(60): Selenocysteine
  MOD_RES (104)..(104): Selenocysteine
  MOD_RES (109)..(109): Selenocysteine
  MOD_RES (115)..(115): Selenocysteine
XSADAEANAVCEIVHVKSESEGRPERVFHLCCSSPESRKDFLKAVHSILRDKHRRQLLKXESLPSSQQYVPFGGKRLCALKGARPAMSRADGKRKQRLLIVAFXGSSAXHPSENXRKSGAWRGCHCLLYIRS

SEQ ID NO: 27681 - protein, 1045 aa, Homo sapiens
  MOD_RES (63)..(63): Selenocysteine
  MOD_RES (67)..(67): Selenocysteine
  MOD_RES (85)..(85): Selenocysteine
  MOD_RES (98)..(98): Selenocysteine
  MOD_RES (112)..(112): Selenocysteine
  MOD_RES (134)..(134): Selenocysteine
  MOD_RES (148)..(148): Selenocysteine
  MOD_RES (159)..(159): Selenocysteine
  MOD_RES (173)..(173): Selenocysteine
  MOD_RES (230)..(230): Selenocysteine
  MOD_RES (232)..(232): Selenocysteine
  MOD_RES (243)..(243): Selenocysteine
  MOD_RES (279)..(279): Selenocysteine
  MOD_RES (305)..(305): Selenocysteine
  MOD_RES (313)..(313): Selenocysteine
  MOD_RES (316)..(316): Selenocysteine
  MOD_RES (319)..(319): Selenocysteine
  MOD_RES (355)..(355): Selenocysteine
  MOD_RES (366)..(367): Selenocysteine
  MOD_RES (374)..(374): Selenocysteine
  MOD_RES (377)..(377): Selenocysteine
  MOD_RES (390)..(390): Selenocysteine
  MOD_RES (398)..(398): Selenocysteine
  MOD_RES (446)..(446): Selenocysteine
  MOD_RES (469)..(469): Selenocysteine
  MOD_RES (472)..(472): Selenocysteine
  MOD_RES (496)..(496): Selenocysteine
  MOD_RES (509)..(509): Selenocysteine
  MOD_RES (512)..(512): Selenocysteine
  MOD_RES (556)..(556): Selenocysteine
  MOD_RES (570)..(570): Selenocysteine
  MOD_RES (576)..(576): Selenocysteine
  MOD_RES (602)..(602): Selenocysteine
  MOD_RES (613)..(613): Selenocysteine
  MOD_RES (638)..(638): Selenocysteine
  MOD_RES (650)..(650): Selenocysteine
  MOD_RES (655)..(655): Selenocysteine
  MOD_RES (667)..(667): Selenocysteine
  MOD_RES (687)..(687): Selenocysteine
  MOD_RES (720)..(720): Selenocysteine
  MOD_RES (746)..(746): Selenocysteine
  MOD_RES (757)..(757): Selenocysteine
  MOD_RES (767)..(767): Selenocysteine
  MOD_RES (780)..(780): Selenocysteine
  MOD_RES (807)..(807): Selenocysteine
  MOD_RES (832)..(832): Selenocysteine
  MOD_RES (851)..(851): Selenocysteine
  MOD_RES (854)..(854): Selenocysteine
  MOD_RES (858)..(858): Selenocysteine
  MOD_RES (871)..(871): Selenocysteine
  MOD_RES (878)..(878): Selenocysteine
  MOD_RES (888)..(888): Selenocysteine
  MOD_RES (922)..(922): Selenocysteine
  MOD_RES (929)..(929): Selenocysteine
  MOD_RES (986)..(986): Selenocysteine
  MOD_RES (992)..(992): Selenocysteine
  MOD_RES (1011)..(1011): Selenocysteine
  MOD_RES (1028)..(1028): Selenocysteine
  MOD_RES (1039)..(1039): Selenocysteine
MDLFRMRCYLASLQGGELPNPKSLLAAASRPSKLALGRLGILSVSSFHALVCSRDDSALRKRXLSLXQRGRNKKGIFSSLKGLDXLARKGKEKRPSIXQIFDSSGSHGFSGXQLPQNSSNSSEVDELLHIYGSXVDGVPRDNAWEIQXYVHFQDNHGVXVGIKPEHRVEDILXLACKMRQLEPSHYGLQLRKLVDDNVEYCIPAPYEYMQQQVYDEIEVFPLNVYDVQLXKXGSVCDFGFAVXAQVDERQHLSRIFISDVLPDGLAYGEGLRKGNEIMXLNGEAVSDLDLKQMEALFSEKSVGLXLIARPPDXKAXLCXSWSDSDLFSRDQKSLLPPPNQSQLLEEFLDNFKKNXANDFSNVPDIXXGLKRSQXDGXLDQVSHREKMEQXFRSAEQIXALCRSFNDSQANGMEGPRENQDPPPRSLARHLSDADRLRKVIQELVDXEKSYVKDLSCLFELYLEPLQNEXFLXQDEMESLFGSLPEMLEFQKVFLEXLEDGISASSDFNXLEXPSQFRKLLFSLGGSFLYYADHFKLYSGFCANHIKVQKVLERAKXDKAFKAFLDARNPXKQHSSXLESYLIKPVQRVLKYPLLLKELVSLXDQESEEHYHLXEALKAMEKVASHINEMQKIYEDYGXVFDQLVAEQSGXEKEVXELSMGELLMHSXVSWLNPFLSLGKARKDLELXVFVFKRAVILVYKENCKLKKKLPSNSRPAHNSXDLDPFKFRWLIPISALQVRLGNPAGXENNSIWELIHXKSEIEGRPEXIFQLCCSDSESKXNIVKVIRSILRENFRRHIKCELPLEKXCKDRLVPLKNRVPVSAKLAKCVFLXVASSRSLKVLKNSSSNEWXGEXGKGXLLDSDEGSLSSGXQSSGCPXAEGRQDSKSXSPGKYPHPGLADFADNLIKESDILSDEDDDHRQXVKQGSPXKDIEIQFQRLRISEDPDVHPEAEQQPGPESGEGQKGGEQPKLVRGHFCPIKRKANSXKRDRGXLLKAQIRHQSLDSQSENAXIDLNSVLEREFSVQSLXSVVSEECFYEXESHGKS

SEQ ID NO: 27682 - protein, 1013 aa, Homo sapiens
  MOD_RES (63)..(63): Selenocysteine
  MOD_RES (67)..(67): Selenocysteine
  MOD_RES (85)..(85): Selenocysteine
  MOD_RES (98)..(98): Selenocysteine
  MOD_RES (110)..(110): Selenocysteine
  MOD_RES (124)..(124): Selenocysteine
  MOD_RES (135)..(135): Selenocysteine
  MOD_RES (149)..(149): Selenocysteine
  MOD_RES (206)..(206): Selenocysteine
  MOD_RES (208)..(208): Selenocysteine
  MOD_RES (219)..(219): Selenocysteine
  MOD_RES (255)..(255): Selenocysteine
  MOD_RES (281)..(281): Selenocysteine
  MOD_RES (289)..(289): Selenocysteine
  MOD_RES (292)..(292): Selenocysteine
  MOD_RES (295)..(295): Selenocysteine
  MOD_RES (331)..(331): Selenocysteine
  MOD_RES (342)..(343): Selenocysteine
  MOD_RES (350)..(350): Selenocysteine
  MOD_RES (353)..(353): Selenocysteine
  MOD_RES (366)..(366): Selenocysteine
  MOD_RES (374)..(374): Selenocysteine
  MOD_RES (422)..(422): Selenocysteine
  MOD_RES (445)..(445): Selenocysteine
  MOD_RES (448)..(448): Selenocysteine
  MOD_RES (472)..(472): Selenocysteine
  MOD_RES (485)..(485): Selenocysteine
  MOD_RES (488)..(488): Selenocysteine
  MOD_RES (532)..(532): Selenocysteine
  MOD_RES (546)..(546): Selenocysteine
  MOD_RES (552)..(552): Selenocysteine
  MOD_RES (578)..(578): Selenocysteine
  MOD_RES (589)..(589): Selenocysteine
  MOD_RES (614)..(614): Selenocysteine
  MOD_RES (626)..(626): Selenocysteine
  MOD_RES (631)..(631): Selenocysteine
  MOD_RES (643)..(643): Selenocysteine
  MOD_RES (663)..(663): Selenocysteine
  MOD_RES (696)..(696): Selenocysteine
  MOD_RES (722)..(722): Selenocysteine
  MOD_RES (733)..(733): Selenocysteine
  MOD_RES (743)..(743): Selenocysteine
  MOD_RES (756)..(756): Selenocysteine
  MOD_RES (783)..(783): Selenocysteine
  MOD_RES (819)..(819): Selenocysteine
  MOD_RES (822)..(822): Selenocysteine
  MOD_RES (826)..(826): Selenocysteine
  MOD_RES (839)..(839): Selenocysteine
  MOD_RES (846)..(846): Selenocysteine
  MOD_RES (856)..(856): Selenocysteine
  MOD_RES (890)..(890): Selenocysteine
  MOD_RES (897)..(897): Selenocysteine
  MOD_RES (954)..(954): Selenocysteine
  MOD_RES (960)..(960): Selenocysteine
  MOD_RES (979)..(979): Selenocysteine
  MOD_RES (996)..(996): Selenocysteine
  MOD_RES (1007)..(1007): Selenocysteine
MDLFRMRCYLASLQGGELPNPKSLLAAASRPSKLALGRLGILSVSSFHALVCSRDDSALRKRXLSLXQRGRNKKGIFSSLKGLDXLARKGKEKRPSIXQVDELLHIYGSXVDGVPRDNAWEIQXYVHFQDNHGVXVGIKPEHRVEDILXLACKMRQLEPSHYGLQLRKLVDDNVEYCIPAPYEYMQQQVYDEIEVFPLNVYDVQLXKXGSVCDFGFAVXAQVDERQHLSRIFISDVLPDGLAYGEGLRKGNEIMXLNGEAVSDLDLKQMEALFSEKSVGLXLIARPPDXKAXLCXSWSDSDLFSRDQKSLLPPPNQSQLLEEFLDNFKKNXANDFSNVPDIXXGLKRSQXDGXLDQVSHREKMEQXFRSAEQIXALCRSFNDSQANGMEGPRENQDPPPRSLARHLSDADRLRKVIQELVDXEKSYVKDLSCLFELYLEPLQNEXFLXQDEMESLFGSLPEMLEFQKVFLEXLEDGISASSDFNXLEXPSQFRKLLFSLGGSFLYYADHFKLYSGFCANHIKVQKVLERAKXDKAFKAFLDARNPXKQHSSXLESYLIKPVQRVLKYPLLLKELVSLXDQESEEHYHLXEALKAMEKVASHINEMQKIYEDYGXVFDQLVAEQSGXEKEVXELSMGELLMHSXVSWLNPFLSLGKARKDLELXVFVFKRAVILVYKENCKLKKKLPSNSRPAHNSXDLDPFKFRWLIPISALQVRLGNPAGXENNSIWELIHXKSEIEGRPEXIFQLCCSDSESKXNIVKVIRSILRENFRRHIKCELPLEKXCKDRLVPLKNRVPVSAKLASSRSLKVLKNSSSNEWXGEXGKGXLLDSDEGSLSSGXQSSGCPXAEGRQDSKSXSPGKYPHPGLADFADNLIKESDILSDEDDDHRQXVKQGSPXKDIEIQFQRLRISEDPDVHPEAEQQPGPESGEGQKGGEQPKLVRGHFCPIKRKANSXKRDRGXLLKAQIRHQSLDSQSENAXIDLNSVLEREFSVQSLXSVVSEECFYEXESHGKS

SEQ ID NO: 27683 - protein, 626 aa, Homo sapiens
  MOD_RES (35)..(35): Selenocysteine
  MOD_RES (58)..(58): Selenocysteine
  MOD_RES (61)..(61): Selenocysteine
  MOD_RES (85)..(85): Selenocysteine
  MOD_RES (98)..(98): Selenocysteine
  MOD_RES (101)..(101): Selenocysteine
  MOD_RES (145)..(145): Selenocysteine
  MOD_RES (159)..(159): Selenocysteine
  MOD_RES (165)..(165): Selenocysteine
  MOD_RES (191)..(191): Selenocysteine
  MOD_RES (202)..(202): Selenocysteine
  MOD_RES (227)..(227): Selenocysteine
  MOD_RES (239)..(239): Selenocysteine
  MOD_RES (244)..(244): Selenocysteine
  MOD_RES (256)..(256): Selenocysteine
  MOD_RES (276)..(276): Selenocysteine
  MOD_RES (309)..(309): Selenocysteine
  MOD_RES (335)..(335): Selenocysteine
  MOD_RES (346)..(346): Selenocysteine
  MOD_RES (356)..(356): Selenocysteine
  MOD_RES (369)..(369): Selenocysteine
  MOD_RES (396)..(396): Selenocysteine
  MOD_RES (432)..(432): Selenocysteine
  MOD_RES (435)..(435): Selenocysteine
  MOD_RES (439)..(439): Selenocysteine
  MOD_RES (452)..(452): Selenocysteine
  MOD_RES (459)..(459): Selenocysteine
  MOD_RES (469)..(469): Selenocysteine
  MOD_RES (503)..(503): Selenocysteine
  MOD_RES (510)..(510): Selenocysteine
  MOD_RES (567)..(567): Selenocysteine
  MOD_RES (573)..(573): Selenocysteine
  MOD_RES (592)..(592): Selenocysteine
  MOD_RES (609)..(609): Selenocysteine
  MOD_RES (620)..(620): Selenocysteine
MEGPRENQDPPPRSLARHLSDADRLRKVIQELVDXEKSYVKDLSCLFELYLEPLQNEXFLXQDEMESLFGSLPEMLEFQKVFLEXLEDGISASSDFNXLEXPSQFRKLLFSLGGSFLYYADHFKLYSGFCANHIKVQKVLERAKXDKAFKAFLDARNPXKQHSSXLESYLIKPVQRVLKYPLLLKELVSLXDQESEEHYHLXEALKAMEKVASHINEMQKIYEDYGXVFDQLVAEQSGXEKEVXELSMGELLMHSXVSWLNPFLSLGKARKDLELXVFVFKRAVILVYKENCKLKKKLPSNSRPAHNSXDLDPFKFRWLIPISALQVRLGNPAGXENNSIWELIHXKSEIEGRPEXIFQLCCSDSESKXNIVKVIRSILRENFRRHIKCELPLEKXCKDRLVPLKNRVPVSAKLASSRSLKVLKNSSSNEWXGEXGKGXLLDSDEGSLSSGXQSSGCPXAEGRQDSKSXSPGKYPHPGLADFADNLIKESDILSDEDDDHRQXVKQGSPXKDIEIQFQRLRISEDPDVHPEAEQQPGPESGEGQKGGEQPKLVRGHFCPIKRKANSXKRDRGXLLKAQIRHQSLDSQSENAXIDLNSVLEREFSVQSLXSVVSEECFYEXESHGKS

SEQ ID NO: 27684 - protein, 53 aa, Homo sapiens
  MOD_RES (9)..(9): Selenocysteine
  MOD_RES (19)..(19): Selenocysteine
  MOD_RES (21)..(21): Selenocysteine
MGNSDSQYXLQGSKNHSNXIXGAKQIPCSLKIRGIHAKEEKSLHGWGHGSNGA

SEQ ID NO: 27685 - protein, 54 aa, Homo sapiens
  MOD_RES (9)..(9): Selenocysteine
  MOD_RES (19)..(19): Selenocysteine
  MOD_RES (21)..(21): Selenocysteine
MGNSDSQYXLQGSKNHSNXIXGAKQIPCSLKIRGIHAKEEKSLHGWGHGSNGAG

SEQ ID NO: 27686 - protein, 85 aa, Homo sapiens
  MOD_RES (9)..(9): Selenocysteine
  MOD_RES (19)..(19): Selenocysteine
  MOD_RES (21)..(21): Selenocysteine
  MOD_RES (82)..(82): Selenocysteine
MGNSDSQYXLQGSKNHSNXIXGAKQIPCSLKIRGIHAKEEKSLHGWGHGSNGAGYKSRSLARSCLSHFKSNQPYASRLGGPXCKV

SEQ ID NO: 27687 - protein, 195 aa, Homo sapiens
  MOD_RES (9)..(9): Selenocysteine
  MOD_RES (19)..(19): Selenocysteine
  MOD_RES (21)..(21): Selenocysteine
  MOD_RES (82)..(82): Selenocysteine
  MOD_RES (93)..(93): Selenocysteine
  MOD_RES (96)..(96): Selenocysteine
  MOD_RES (112)..(112): Selenocysteine
  MOD_RES (129)..(129): Selenocysteine
  MOD_RES (150)..(150): Selenocysteine
  MOD_RES (165)..(165): Selenocysteine
MGNSDSQYXLQGSKNHSNXIXGAKQIPCSLKIRGIHAKEEKSLHGWGHGSNGAGYKSRSLARSCLSHFKSNQPYASRLGGPXCKVSRGVAYSXHRXNAPGKDFQGISAAFSXENGFHSVGHELADNHIXSRDCNGHLLNCYGRNESIASXPPGEDRKSPRVLIKXLGKLDGCLRVEFHNGGNPSKVPAEDCSEPV

SEQ ID NO: 27688 - protein, 1367 aa, Homo sapiens
  MOD_RES (9)..(9): Selenocysteine
  MOD_RES (19)..(19): Selenocysteine
  MOD_RES (21)..(21): Selenocysteine
  MOD_RES (82)..(82): Selenocysteine
  MOD_RES (93)..(93): Selenocysteine
  MOD_RES (96)..(96): Selenocysteine
  MOD_RES (112)..(112): Selenocysteine
  MOD_RES (129)..(129): Selenocysteine
  MOD_RES (150)..(150): Selenocysteine
  MOD_RES (165)..(165): Selenocysteine
  MOD_RES (203)..(203): Selenocysteine
  MOD_RES (208)..(208): Selenocysteine
  MOD_RES (231)..(231): Selenocysteine
  MOD_RES (325)..(325): Selenocysteine
  MOD_RES (357)..(357): Selenocysteine
  MOD_RES (370)..(370): Selenocysteine
  MOD_RES (387)..(387): Selenocysteine
  MOD_RES (418)..(418): Selenocysteine
  MOD_RES (436)..(436): Selenocysteine
  MOD_RES (446)..(446): Selenocysteine
  MOD_RES (471)..(471): Selenocysteine
  MOD_RES (473)..(473): Selenocysteine
  MOD_RES (478)..(478): Selenocysteine
  MOD_RES (480)..(480): Selenocysteine
  MOD_RES (482)..(482): Selenocysteine
  MOD_RES (520)..(520): Selenocysteine
  MOD_RES (541)..(541): Selenocysteine
  MOD_RES (546)..(546): Selenocysteine
  MOD_RES (552)..(552): Selenocysteine
  MOD_RES (603)..(603): Selenocysteine
  MOD_RES (606)..(606): Selenocysteine
  MOD_RES (613)..(613): Selenocysteine
  MOD_RES (632)..(632): Selenocysteine
  MOD_RES (640)..(640): Selenocysteine
  MOD_RES (751)..(751): Selenocysteine
  MOD_RES (755)..(755): Selenocysteine
  MOD_RES (773)..(773): Selenocysteine
  MOD_RES (786)..(786): Selenocysteine
  MOD_RES (798)..(798): Selenocysteine
  MOD_RES (812)..(812): Selenocysteine
  MOD_RES (823)..(823): Selenocysteine
  MOD_RES (837)..(837): Selenocysteine
  MOD_RES (894)..(894): Selenocysteine
  MOD_RES (896)..(896): Selenocysteine
  MOD_RES (907)..(907): Selenocysteine
  MOD_RES (943)..(943): Selenocysteine
  MOD_RES (969)..(969): Selenocysteine
  MOD_RES (977)..(977): Selenocysteine
  MOD_RES (980)..(980): Selenocysteine
  MOD_RES (983)..(983): Selenocysteine
  MOD_RES (1019)..(1019): Selenocysteine
  MOD_RES (1030)..(1031): Selenocysteine
  MOD_RES (1038)..(1038): Selenocysteine
  MOD_RES (1041)..(1041): Selenocysteine
  MOD_RES (1054)..(1054): Selenocysteine
  MOD_RES (1062)..(1062): Selenocysteine
  MOD_RES (1110)..(1110): Selenocysteine
  MOD_RES (1133)..(1133): Selenocysteine
  MOD_RES (1136)..(1136): Selenocysteine
  MOD_RES (1160)..(1160): Selenocysteine
  MOD_RES (1173)..(1173): Selenocysteine
  MOD_RES (1176)..(1176): Selenocysteine
  MOD_RES (1220)..(1220): Selenocysteine
  MOD_RES (1234)..(1234): Selenocysteine
  MOD_RES (1240)..(1240): Selenocysteine
  MOD_RES (1266)..(1266): Selenocysteine
  MOD_RES (1277)..(1277): Selenocysteine
  MOD_RES (1302)..(1302): Selenocysteine
  MOD_RES (1314)..(1314): Selenocysteine
  MOD_RES (1319)..(1319): Selenocysteine
  MOD_RES (1331)..(1331): Selenocysteine
  MOD_RES (1351)..(1351): Selenocysteine
MGNSDSQYXLQGSKNHSNXIXGAKQIPCSLKIRGIHAKEEKSLHGWGHGSNGAGYKSRSLARSCLSHFKSNQPYASRLGGPXCKVSRGVAYSXHRXNAPGKDFQGISAAFSXENGFHSVGHELADNHIXSRDCNGHLLNCYGRNESIASXPPGEDRKSPRVLIKXLGKLDGCLRVEFHNGGNPSKVPAEDCSEPVQLLRYSPXLASEXSPVPEARRGSSADSLPSHRPSPXDSRLRSSKGSSLSSESSWYDSPWGNAGELSEAEGSFLAPGMPDPSLHASFPPGDAKKPFNQSSSLSSLRELYKDANLGSLSPSGIRLSDEYMGXHASLSNRVSFASDIDVPSRVAHGDPIQYSSFXLPCRKPKAFVEDXAKKDSLKARMRRISDWXGSLSRKKRKLQEPRSKEGSDYFDSRSDGLNXDVQGSSQASAFLWSGGSXQILSQRSESXHAIGSDPLRQNIYENFMRELEMSRXNXENIEXSXEXAESSSESLSSLEQLDLLFEKEQGVVRKAGWLFFKPLVXVQKERKLELVARRKWKQYWVXLKGCXLLFYEXYGKNSMDQSSAPRCALFAEDSIVQSVPEHPKKENVFCLSNSFGDVYLFQAXSQXDLENWVXAVHSACASLFAKKHGKEDXLRLLKNQXKNLLQKIDMDSKMKKMAELQLSVVSDPKNRKAIENQIQQWEQNLEKFHMDLFRMRCYLASLQGGELPNPKSLLAAASRPSKLALGRLGILSVSSFHALVCSRDDSALRKRXLSLXQRGRNKKGIFSSLKGLDXLARKGKEKRPSIXQVDELLHIYGSXVDGVPRDNAWEIQXYVHFQDNHGVXVGIKPEHRVEDILXLACKMRQLEPSHYGLQLRKLVDDNVEYCIPAPYEYMQQQVYDEIEVFPLNVYDVQLXKXGSVCDFGFAVXAQVDERQHLSRIFISDVLPDGLAYGEGLRKGNEIMXLNGEAVSDLDLKQMEALFSEKSVGLXLIARPPDXKAXLCXSWSDSDLFSRDQKSLLPPPNQSQLLEEFLDNFKKNXANDFSNVPDIXXGLKRSQXDGXLDQVSHREKMEQXFRSAEQIXALCRSFNDSQANGMEGPRENQDPPPRSLARHLSDADRLRKVIQELVDXEKSYVKDLSCLFELYLEPLQNEXFLXQDEMESLFGSLPEMLEFQKVFLEXLEDGISASSDFNXLEXPSQFRKLLFSLGGSFLYYADHFKLYSGFCANHIKVQKVLERAKXDKAFKAFLDARNPXKQHSSXLESYLIKPVQRVLKYPLLLKELVSLXDQESEEHYHLXEALKAMEKVASHINEMQKIYEDYGXVFDQLVAEQSGXEKEVXELSMGELLMHSXVSWLNPFLSLGKARKDLELXVFVFKRAVILVYKENC

SEQ ID NO: 27689 - protein, 1701 aa, Homo sapiens
  MOD_RES (9)..(9): Selenocysteine
  MOD_RES (19)..(19): Selenocysteine
  MOD_RES (21)..(21): Selenocysteine
  MOD_RES (82)..(82): Selenocysteine
  MOD_RES (93)..(93): Selenocysteine
  MOD_RES (96)..(96): Selenocysteine
  MOD_RES (112)..(112): Selenocysteine
  MOD_RES (129)..(129): Selenocysteine
  MOD_RES (150)..(150): Selenocysteine
  MOD_RES (165)..(165): Selenocysteine
  MOD_RES (203)..(203): Selenocysteine
  MOD_RES (208)..(208): Selenocysteine
  MOD_RES (231)..(231): Selenocysteine
  MOD_RES (325)..(325): Selenocysteine
  MOD_RES (357)..(357): Selenocysteine
  MOD_RES (370)..(370): Selenocysteine
  MOD_RES (387)..(387): Selenocysteine
  MOD_RES (418)..(418): Selenocysteine
  MOD_RES (436)..(436): Selenocysteine
  MOD_RES (446)..(446): Selenocysteine
  MOD_RES (471)..(471): Selenocysteine
  MOD_RES (473)..(473): Selenocysteine
  MOD_RES (478)..(478): Selenocysteine
  MOD_RES (480)..(480): Selenocysteine
  MOD_RES (482)..(482): Selenocysteine
  MOD_RES (520)..(520): Selenocysteine
  MOD_RES (541)..(541): Selenocysteine
  MOD_RES (546)..(546): Selenocysteine
  MOD_RES (552)..(552): Selenocysteine
  MOD_RES (603)..(603): Selenocysteine
  MOD_RES (606)..(606): Selenocysteine
  MOD_RES (613)..(613): Selenocysteine
  MOD_RES (632)..(632): Selenocysteine
  MOD_RES (640)..(640): Selenocysteine
  MOD_RES (751)..(751): Selenocysteine
  MOD_RES (755)..(755): Selenocysteine
  MOD_RES (773)..(773): Selenocysteine
  MOD_RES (786)..(786): Selenocysteine
  MOD_RES (798)..(798): Selenocysteine
  MOD_RES (812)..(812): Selenocysteine
  MOD_RES (823)..(823): Selenocysteine
  MOD_RES (837)..(837): Selenocysteine
  MOD_RES (894)..(894): Selenocysteine
  MOD_RES (896)..(896): Selenocysteine
  MOD_RES (907)..(907): Selenocysteine
  MOD_RES (943)..(943): Selenocysteine
  MOD_RES (969)..(969): Selenocysteine
  MOD_RES (977)..(977): Selenocysteine
  MOD_RES (980)..(980): Selenocysteine
  MOD_RES (983)..(983): Selenocysteine
  MOD_RES (1019)..(1019): Selenocysteine
  MOD_RES (1030)..(1031): Selenocysteine
  MOD_RES (1038)..(1038): Selenocysteine
  MOD_RES (1041)..(1041): Selenocysteine
  MOD_RES (1054)..(1054): Selenocysteine
  MOD_RES (1062)..(1062): Selenocysteine
  MOD_RES (1110)..(1110): Selenocysteine
  MOD_RES (1133)..(1133): Selenocysteine
  MOD_RES (1136)..(1136): Selenocysteine
  MOD_RES (1160)..(1160): Selenocysteine
  MOD_RES (1173)..(1173): Selenocysteine
  MOD_RES (1176)..(1176): Selenocysteine
  MOD_RES (1220)..(1220): Selenocysteine
  MOD_RES (1234)..(1234): Selenocysteine
  MOD_RES (1240)..(1240): Selenocysteine
  MOD_RES (1266)..(1266): Selenocysteine
  MOD_RES (1277)..(1277): Selenocysteine
  MOD_RES (1302)..(1302): Selenocysteine
  MOD_RES (1314)..(1314): Selenocysteine
  MOD_RES (1319)..(1319): Selenocysteine
  MOD_RES (1331)..(1331): Selenocysteine
  MOD_RES (1351)..(1351): Selenocysteine
  MOD_RES (1384)..(1384): Selenocysteine
  MOD_RES (1410)..(1410): Selenocysteine
  MOD_RES (1421)..(1421): Selenocysteine
  MOD_RES (1431)..(1431): Selenocysteine
  MOD_RES (1444)..(1444): Selenocysteine
  MOD_RES (1471)..(1471): Selenocysteine
  MOD_RES (1507)..(1507): Selenocysteine
  MOD_RES (1510)..(1510): Selenocysteine
  MOD_RES (1514)..(1514): Selenocysteine
  MOD_RES (1527)..(1527): Selenocysteine
  MOD_RES (1534)..(1534): Selenocysteine
  MOD_RES (1544)..(1544): Selenocysteine
  MOD_RES (1578)..(1578): Selenocysteine
  MOD_RES (1585)..(1585): Selenocysteine
  MOD_RES (1642)..(1642): Selenocysteine
  MOD_RES (1648)..(1648): Selenocysteine
  MOD_RES (1667)..(1667): Selenocysteine
  MOD_RES (1684)..(1684): Selenocysteine
  MOD_RES (1695)..(1695): Selenocysteine
MGNSDSQYXLQGSKNHSNXIXGAKQIPCSLKIRGIHAKEEKSLHGWGHGSNGAGYKSRSLARSCLSHFKSNQPYASRLGGPXCKVSRGVAYSXHRXNAPGKDFQGISAAFSXENGFHSVGHELADNHIXSRDCNGHLLNCYGRNESIASXPPGEDRKSPRVLIKXLGKLDGCLRVEFHNGGNPSKVPAEDCSEPVQLLRYSPXLASEXSPVPEARRGSSADSLPSHRPSPXDSRLRSSKGSSLSSESSWYDSPWGNAGELSEAEGSFLAPGMPDPSLHASFPPGDAKKPFNQSSSLSSLRELYKDANLGSLSPSGIRLSDEYMGXHASLSNRVSFASDIDVPSRVAHGDPIQYSSFXLPCRKPKAFVEDXAKKDSLKARMRRISDWXGSLSRKKRKLQEPRSKEGSDYFDSRSDGLNXDVQGSSQASAFLWSGGSXQILSQRSESXHAIGSDPLRQNIYENFMRELEMSRXNXENIEXSXEXAESSSESLSSLEQLDLLFEKEQGVVRKAGWLFFKPLVXVQKERKLELVARRKWKQYWVXLKGCXLLFYEXYGKNSMDQSSAPRCALFAEDSIVQSVPEHPKKENVFCLSNSFGDVYLFQAXSQXDLENWVXAVHSACASLFAKKHGKEDXLRLLKNQXKNLLQKIDMDSKMKKMAELQLSVVSDPKNRKAIENQIQQWEQNLEKFHMDLFRMRCYLASLQGGELPNPKSLLAAASRPSKLALGRLGILSVSSFHALVCSRDDSALRKRXLSLXQRGRNKKGIFSSLKGLDXLARKGKEKRPSIXQVDELLHIYGSXVDGVPRDNAWEIQXYVHFQDNHGVXVGIKPEHRVEDILXLACKMRQLEPSHYGLQLRKLVDDNVEYCIPAPYEYMQQQVYDEIEVFPLNVYDVQLXKXGSVCDFGFAVXAQVDERQHLSRIFISDVLPDGLAYGEGLRKGNEIMXLNGEAVSDLDLKQMEALFSEKSVGLXLIARPPDXKAXLCXSWSDSDLFSRDQKSLLPPPNQSQLLEEFLDNFKKNXANDFSNVPDIXXGLKRSQXDGXLDQVSHREKMEQXFRSAEQIXALCRSFNDSQANGMEGPRENQDPPPRSLARHLSDADRLRKVIQELVDXEKSYVKDLSCLFELYLEPLQNEXFLXQDEMESLFGSLPEMLEFQKVFLEXLEDGISASSDFNXLEXPSQFRKLLFSLGGSFLYYADHFKLYSGFCANHIKVQKVLERAKXDKAFKAFLDARNPXKQHSSXLESYLIKPVQRVLKYPLLLKELVSLXDQESEEHYHLXEALKAMEKVASHINEMQKIYEDYGXVFDQLVAEQSGXEKEVXELSMGELLMHSXVSWLNPFLSLGKARKDLELXVFVFKRAVILVYKENCKLKKKLPSNSRPAHNSXDLDPFKFRWLIPISALQVRLGNPAGXENNSIWELIHXKSEIEGRPEXIFQLCCSDSESKXNIVKVIRSILRENFRRHIKCELPLEKXCKDRLVPLKNRVPVSAKLASSRSLKVLKNSSSNEWXGEXGKGXLLDSDEGSLSSGXQSSGCPXAEGRQDSKSXSPGKYPHPGLADFADNLIKESDILSDEDDDHRQXVKQGSPXKDIEIQFQRLRISEDPDVHPEAEQQPGPESGEGQKGGEQPKLVRGHFCPIKRKANSXKRDRGXLLKAQIRHQSLDSQSENAXIDLNSVLEREFSVQSLXSVVSEECFYEXESHGKS

SEQ ID NO: 27690 - protein, 1725 aa, Homo sapiens
  MOD_RES (9)..(9): Selenocysteine
  MOD_RES (19)..(19): Selenocysteine
  MOD_RES (21)..(21): Selenocysteine
  MOD_RES (82)..(82): Selenocysteine
  MOD_RES (93)..(93): Selenocysteine
  MOD_RES (96)..(96): Selenocysteine
  MOD_RES (112)..(112): Selenocysteine
  MOD_RES (129)..(129): Selenocysteine
  MOD_RES (150)..(150): Selenocysteine
  MOD_RES (165)..(165): Selenocysteine
  MOD_RES (203)..(203): Selenocysteine
  MOD_RES (208)..(208): Selenocysteine
  MOD_RES (231)..(231): Selenocysteine
  MOD_RES (325)..(325): Selenocysteine
  MOD_RES (357)..(357): Selenocysteine
  MOD_RES (370)..(370): Selenocysteine
  MOD_RES (387)..(387): Selenocysteine
  MOD_RES (418)..(418): Selenocysteine
  MOD_RES (436)..(436): Selenocysteine
  MOD_RES (446)..(446): Selenocysteine
  MOD_RES (471)..(471): Selenocysteine
  MOD_RES (473)..(473): Selenocysteine
  MOD_RES (478)..(478): Selenocysteine
  MOD_RES (480)..(480): Selenocysteine
  MOD_RES (482)..(482): Selenocysteine
  MOD_RES (520)..(520): Selenocysteine
  MOD_RES (541)..(541): Selenocysteine
  MOD_RES (546)..(546): Selenocysteine
  MOD_RES (552)..(552): Selenocysteine
  MOD_RES (603)..(603): Selenocysteine
  MOD_RES (606)..(606): Selenocysteine
  MOD_RES (613)..(613): Selenocysteine
  MOD_RES (632)..(632): Selenocysteine
  MOD_RES (640)..(640): Selenocysteine
  MOD_RES (751)..(751): Selenocysteine
  MOD_RES (755)..(755): Selenocysteine
  MOD_RES (773)..(773): Selenocysteine
  MOD_RES (786)..(786): Selenocysteine
  MOD_RES (800)..(800): Selenocysteine
  MOD_RES (822)..(822): Selenocysteine
  MOD_RES (836)..(836): Selenocysteine
  MOD_RES (847)..(847): Selenocysteine
  MOD_RES (861)..(861): Selenocysteine
  MOD_RES (918)..(918): Selenocysteine
  MOD_RES (920)..(920): Selenocysteine
  MOD_RES (931)..(931): Selenocysteine
  MOD_RES (967)..(967): Selenocysteine
  MOD_RES (993)..(993): Selenocysteine
  MOD_RES (1001)..(1001): Selenocysteine
  MOD_RES (1004)..(1004): Selenocysteine
  MOD_RES (1007)..(1007): Selenocysteine
  MOD_RES (1043)..(1043): Selenocysteine
  MOD_RES (1054)..(1055): Selenocysteine
  MOD_RES (1062)..(1062): Selenocysteine
  MOD_RES (1065)..(1065): Selenocysteine
  MOD_RES (1078)..(1078): Selenocysteine
  MOD_RES (1086)..(1086): Selenocysteine
  MOD_RES (1134)..(1134): Selenocysteine
  MOD_RES (1157)..(1157): Selenocysteine
  MOD_RES (1160)..(1160): Selenocysteine
  MOD_RES (1184)..(1184): Selenocysteine
  MOD_RES (1197)..(1197): Selenocysteine
  MOD_RES (1200)..(1200): Selenocysteine
  MOD_RES (1244)..(1244): Selenocysteine
  MOD_RES (1258)..(1258): Selenocysteine
  MOD_RES (1264)..(1264): Selenocysteine
  MOD_RES (1290)..(1290): Selenocysteine
  MOD_RES (1301)..(1301): Selenocysteine
  MOD_RES (1326)..(1326): Selenocysteine
  MOD_RES (1338)..(1338): Selenocysteine
  MOD_RES (1343)..(1343): Selenocysteine
  MOD_RES (1355)..(1355): Selenocysteine
  MOD_RES (1375)..(1375): Selenocysteine
  MOD_RES (1408)..(1408): Selenocysteine
  MOD_RES (1434)..(1434): Selenocysteine
  MOD_RES (1445)..(1445): Selenocysteine
  MOD_RES (1455)..(1455): Selenocysteine
  MOD_RES (1468)..(1468): Selenocysteine
  MOD_RES (1495)..(1495): Selenocysteine
  MOD_RES (1531)..(1531): Selenocysteine
  MOD_RES (1534)..(1534): Selenocysteine
  MOD_RES (1538)..(1538): Selenocysteine
  MOD_RES (1551)..(1551): Selenocysteine
  MOD_RES (1558)..(1558): Selenocysteine
  MOD_RES (1568)..(1568): Selenocysteine
  MOD_RES (1602)..(1602): Selenocysteine
  MOD_RES (1609)..(1609): Selenocysteine
  MOD_RES (1666)..(1666): Selenocysteine
  MOD_RES (1672)..(1672): Selenocysteine
  MOD_RES (1691)..(1691): Selenocysteine
  MOD_RES (1708)..(1708): Selenocysteine
  MOD_RES (1719)..(1719): Selenocysteine
MGNSDSQYXLQGSKNHSNXIXGAKQIPCSLKIRGIHAKEEKSLHGWGHGSNGAGYKSRSLARSCLSHFKSNQPYASRLGGPXCKVSRGVAYSXHRXNAPGKDFQGISAAFSXENGFHSVGHELADNHIXSRDCNGHLLNCYGRNESIASXPPGEDRKSPRVLIKXLGKLDGCLRVEFHNGGNPSKVPAEDCSEPVQLLRYSPXLASEXSPVPEARRGSSADSLPSHRPSPXDSRLRSSKGSSLSSESSWYDSPWGNAGELSEAEGSFLAPGMPDPSLHASFPPGDAKKPFNQSSSLSSLRELYKDANLGSLSPSGIRLSDEYMGXHASLSNRVSFASDIDVPSRVAHGDPIQYSSFXLPCRKPKAFVEDXAKKDSLKARMRRISDWXGSLSRKKRKLQEPRSKEGSDYFDSRSDGLNXDVQGSSQASAFLWSGGSXQILSQRSESXHAIGSDPLRQNIYENFMRELEMSRXNXENIEXSXEXAESSSESLSSLEQLDLLFEKEQGVVRKAGWLFFKPLVXVQKERKLELVARRKWKQYWVXLKGCXLLFYEXYGKNSMDQSSAPRCALFAEDSIVQSVPEHPKKENVFCLSNSFGDVYLFQAXSQXDLENWVXAVHSACASLFAKKHGKEDXLRLLKNQXKNLLQKIDMDSKMKKMAELQLSVVSDPKNRKAIENQIQQWEQNLEKFHMDLFRMRCYLASLQGGELPNPKSLLAAASRPSKLALGRLGILSVSSFHALVCSRDDSALRKRXLSLXQRGRNKKGIFSSLKGLDXLARKGKEKRPSIXQIFDSSGSHGFSGXQLPQNSSNSSEVDELLHIYGSXVDGVPRDNAWEIQXYVHFQDNHGVXVGIKPEHRVEDILXLACKMRQLEPSHYGLQLRKLVDDNVEYCIPAPYEYMQQQVYDEIEVFPLNVYDVQLXKXGSVCDFGFAVXAQVDERQHLSRIFISDVLPDGLAYGEGLRKGNEIMXLNGEAVSDLDLKQMEALFSEKSVGLXLIARPPDXKAXLCXSWSDSDLFSRDQKSLLPPPNQSQLLEEFLDNFKKNXANDFSNVPDIXXGLKRSQXDGXLDQVSHREKMEQXFRSAEQIXALCRSFNDSQANGMEGPRENQDPPPRSLARHLSDADRLRKVIQELVDXEKSYVKDLSCLFELYLEPLQNEXFLXQDEMESLFGSLPEMLEFQKVFLEXLEDGISASSDFNXLEXPSQFRKLLFSLGGSFLYYADHFKLYSGFCANHIKVQKVLERAKXDKAFKAFLDARNPXKQHSSXLESYLIKPVQRVLKYPLLLKELVSLXDQESEEHYHLXEALKAMEKVASHINEMQKIYEDYGXVFDQLVAEQSGXEKEVXELSMGELLMHSXVSWLNPFLSLGKARKDLELXVFVFKRAVILVYKENCKLKKKLPSNSRPAHNSXDLDPFKFRWLIPISALQVRLGNPAGXENNSIWELIHXKSEIEGRPEXIFQLCCSDSESKXNIVKVIRSILRENFRRHIKCELPLEKXCKDRLVPLKNRVPVSAKLASSRSLKVLKNSSSNEWXGEXGKGXLLDSDEGSLSSGXQSSGCPXAEGRQDSKSXSPGKYPHPGLADFADNLIKESDILSDEDDDHRQXVKQGSPXKDIEIQFQRLRISEDPDVHPEAEQQPGPESGEGQKGGEQPKLVRGHFCPIKRKANSXKRDRGXLLKAQIRHQSLDSQSENAXIDLNSVLEREFSVQSLXSVVSEECFYEXESHGKS

SEQ ID NO: 27691 - protein, 1730 aa, Homo sapiens
  MOD_RES (9)..(9): Selenocysteine
  MOD_RES (19)..(19): Selenocysteine
  MOD_RES (21)..(21): Selenocysteine
  MOD_RES (82)..(82): Selenocysteine
  MOD_RES (93)..(93): Selenocysteine
  MOD_RES (96)..(96): Selenocysteine
  MOD_RES (112)..(112): Selenocysteine
  MOD_RES (129)..(129): Selenocysteine
  MOD_RES (150)..(150): Selenocysteine
  MOD_RES (165)..(165): Selenocysteine
  MOD_RES (203)..(203): Selenocysteine
  MOD_RES (208)..(208): Selenocysteine
  MOD_RES (231)..(231): Selenocysteine
  MOD_RES (325)..(325): Selenocysteine
  MOD_RES (357)..(357): Selenocysteine
  MOD_RES (370)..(370): Selenocysteine
  MOD_RES (387)..(387): Selenocysteine
  MOD_RES (418)..(418): Selenocysteine
  MOD_RES (436)..(436): Selenocysteine
  MOD_RES (446)..(446): Selenocysteine
  MOD_RES (471)..(471): Selenocysteine
  MOD_RES (473)..(473): Selenocysteine
  MOD_RES (478)..(478): Selenocysteine
  MOD_RES (480)..(480): Selenocysteine
  MOD_RES (482)..(482): Selenocysteine
  MOD_RES (520)..(520): Selenocysteine
  MOD_RES (541)..(541): Selenocysteine
  MOD_RES (546)..(546): Selenocysteine
  MOD_RES (552)..(552): Selenocysteine
  MOD_RES (603)..(603): Selenocysteine
  MOD_RES (606)..(606): Selenocysteine
  MOD_RES (613)..(613): Selenocysteine
  MOD_RES (632)..(632): Selenocysteine
  MOD_RES (640)..(640): Selenocysteine
  MOD_RES (751)..(751): Selenocysteine
  MOD_RES (755)..(755): Selenocysteine
  MOD_RES (773)..(773): Selenocysteine
  MOD_RES (786)..(786): Selenocysteine
  MOD_RES (798)..(798): Selenocysteine
  MOD_RES (812)..(812): Selenocysteine
  MOD_RES (823)..(823): Selenocysteine
  MOD_RES (837)..(837): Selenocysteine
  MOD_RES (894)..(894): Selenocysteine
  MOD_RES (896)..(896): Selenocysteine
  MOD_RES (907)..(907): Selenocysteine
  MOD_RES (943)..(943): Selenocysteine
  MOD_RES (969)..(969): Selenocysteine
  MOD_RES (977)..(977): Selenocysteine
  MOD_RES (980)..(980): Selenocysteine
  MOD_RES (983)..(983): Selenocysteine
  MOD_RES (1019)..(1019): Selenocysteine
  MOD_RES (1030)..(1031): Selenocysteine
  MOD_RES (1038)..(1038): Selenocysteine
  MOD_RES (1041)..(1041): Selenocysteine
  MOD_RES (1054)..(1054): Selenocysteine
  MOD_RES (1062)..(1062): Selenocysteine
  MOD_RES (1110)..(1110): Selenocysteine
  MOD_RES (1133)..(1133): Selenocysteine
  MOD_RES (1136)..(1136): Selenocysteine
  MOD_RES (1160)..(1160): Selenocysteine
  MOD_RES (1173)..(1173): Selenocysteine
  MOD_RES (1176)..(1176): Selenocysteine
  MOD_RES (1220)..(1220): Selenocysteine
  MOD_RES (1234)..(1234): Selenocysteine
  MOD_RES (1240)..(1240): Selenocysteine
  MOD_RES (1266)..(1266): Selenocysteine
  MOD_RES (1277)..(1277): Selenocysteine
  MOD_RES (1302)..(1302): Selenocysteine
  MOD_RES (1314)..(1314): Selenocysteine
  MOD_RES (1336)..(1336): Selenocysteine
  MOD_RES (1339)..(1339): Selenocysteine
  MOD_RES (1345)..(1345): Selenocysteine
  MOD_RES (1348)..(1348): Selenocysteine
  MOD_RES (1360)..(1360): Selenocysteine
  MOD_RES (1380)..(1380): Selenocysteine
  MOD_RES (1413)..(1413): Selenocysteine
  MOD_RES (1439)..(1439): Selenocysteine
  MOD_RES (1450)..(1450): Selenocysteine
  MOD_RES (1460)..(1460): Selenocysteine
  MOD_RES (1473)..(1473): Selenocysteine
  MOD_RES (1500)..(1500): Selenocysteine
  MOD_RES (1536)..(1536): Selenocysteine
  MOD_RES (1539)..(1539): Selenocysteine
  MOD_RES (1543)..(1543): Selenocysteine
  MOD_RES (1556)..(1556): Selenocysteine
  MOD_RES (1563)..(1563): Selenocysteine
  MOD_RES (1573)..(1573): Selenocysteine
  MOD_RES (1607)..(1607): Selenocysteine
  MOD_RES (1614)..(1614): Selenocysteine
  MOD_RES (1671)..(1671): Selenocysteine
  MOD_RES (1677)..(1677): Selenocysteine
  MOD_RES (1696)..(1696): Selenocysteine
  MOD_RES (1713)..(1713): Selenocysteine
  MOD_RES (1724)..(1724): Selenocysteine
MGNSDSQYXLQGSKNHSNXIXGAKQIPCSLKIRGIHAKEEKSLHGWGHGSNGAGYKSRSLARSCLSHFKSNQPYASRLGGPXCKVSRGVAYSXHRXNAPGKDFQGISAAFSXENGFHSVGHELADNHIXSRDCNGHLLNCYGRNESIASXPPGEDRKSPRVLIKXLGKLDGCLRVEFHNGGNPSKVPAEDCSEPVQLLRYSPXLASEXSPVPEARRGSSADSLPSHRPSPXDSRLRSSKGSSLSSESSWYDSPWGNAGELSEAEGSFLAPGMPDPSLHASFPPGDAKKPFNQSSSLSSLRELYKDANLGSLSPSGIRLSDEYMGXHASLSNRVSFASDIDVPSRVAHGDPIQYSSFXLPCRKPKAFVEDXAKKDSLKARMRRISDWXGSLSRKKRKLQEPRSKEGSDYFDSRSDGLNXDVQGSSQASAFLWSGGSXQILSQRSESXHAIGSDPLRQNIYENFMRELEMSRXNXENIEXSXEXAESSSESLSSLEQLDLLFEKEQGVVRKAGWLFFKPLVXVQKERKLELVARRKWKQYWVXLKGCXLLFYEXYGKNSMDQSSAPRCALFAEDSIVQSVPEHPKKENVFCLSNSFGDVYLFQAXSQXDLENWVXAVHSACASLFAKKHGKEDXLRLLKNQXKNLLQKIDMDSKMKKMAELQLSVVSDPKNRKAIENQIQQWEQNLEKFHMDLFRMRCYLASLQGGELPNPKSLLAAASRPSKLALGRLGILSVSSFHALVCSRDDSALRKRXLSLXQRGRNKKGIFSSLKGLDXLARKGKEKRPSIXQVDELLHIYGSXVDGVPRDNAWEIQXYVHFQDNHGVXVGIKPEHRVEDILXLACKMRQLEPSHYGLQLRKLVDDNVEYCIPAPYEYMQQQVYDEIEVFPLNVYDVQLXKXGSVCDFGFAVXAQVDERQHLSRIFISDVLPDGLAYGEGLRKGNEIMXLNGEAVSDLDLKQMEALFSEKSVGLXLIARPPDXKAXLCXSWSDSDLFSRDQKSLLPPPNQSQLLEEFLDNFKKNXANDFSNVPDIXXGLKRSQXDGXLDQVSHREKMEQXFRSAEQIXALCRSFNDSQANGMEGPRENQDPPPRSLARHLSDADRLRKVIQELVDXEKSYVKDLSCLFELYLEPLQNEXFLXQDEMESLFGSLPEMLEFQKVFLEXLEDGISASSDFNXLEXPSQFRKLLFSLGGSFLYYADHFKLYSGFCANHIKVQKVLERAKXDKAFKAFLDARNPXKQHSSXLESYLIKPVQRVLKYPLLLKELVSLXDQESEEHYHLXEALKAMEKVASHINEMQKIYEDYGXVFDQLVAEQSGXEKEQPEWSSEVMDVLDPRGKLXKGXLEEPRXLVXELSMGELLMHSXVSWLNPFLSLGKARKDLELXVFVFKRAVILVYKENCKLKKKLPSNSRPAHNSXDLDPFKFRWLIPISALQVRLGNPAGXENNSIWELIHXKSEIEGRPEXIFQLCCSDSESKXNIVKVIRSILRENFRRHIKCELPLEKXCKDRLVPLKNRVPVSAKLASSRSLKVLKNSSSNEWXGEXGKGXLLDSDEGSLSSGXQSSGCPXAEGRQDSKSXSPGKYPHPGLADFADNLIKESDILSDEDDDHRQXVKQGSPXKDIEIQFQRLRISEDPDVHPEAEQQPGPESGEGQKGGEQPKLVRGHFCPIKRKANSXKRDRGXLLKAQIRHQSLDSQSENAXIDLNSVLEREFSVQSLXSVVSEECFYEXESHGKS

SEQ ID NO: 27692 - protein, 156 aa, Homo sapiens
  MOD_RES (48)..(48): Selenocysteine
  MOD_RES (71)..(71): Selenocysteine
  MOD_RES (74)..(74): Selenocysteine
  MOD_RES (98)..(98): Selenocysteine
  MOD_RES (111)..(111): Selenocysteine
  MOD_RES (114)..(114): Selenocysteine
MYSMSFNDSQANGMEGPRENQDPPPRSLARHLSDADRLRKVIQELVDXEKSYVKDLSCLFELYLEPLQNEXFLXQDEMESLFGSLPEMLEFQKVFLEXLEDGISASSDFNXLEXPSQFRKLLFSLGGSFLYYADHFKLYSGFCANHIKVQKVLERA

SEQ ID NO: 27693 - protein, 64 aa, Homo sapiens
  MOD_RES (1)..(1): Any amino acid
  MOD_RES (10)..(10): Selenocysteine
  MOD_RES (18)..(18): Selenocysteine
  MOD_RES (21)..(21): Selenocysteine
  MOD_RES (24)..(24): Selenocysteine
  MOD_RES (60)..(60): Selenocysteine
XFSEKSVGLXLIARPPDXKAXLCXSWSDSDLFSRDQKSLLPPPNQSQLLEEFLDNFKKNXANEC

SEQ ID NO: 27694 - protein, 712 aa, Homo sapiens
  MOD_RES (4)..(4): Selenocysteine
  MOD_RES (32)..(32): Selenocysteine
  MOD_RES (55)..(55): Selenocysteine
  MOD_RES (83)..(83): Selenocysteine
  MOD_RES (124)..(124): Selenocysteine
  MOD_RES (157)..(157): Selenocysteine
  MOD_RES (175)..(175): Selenocysteine
  MOD_RES (197)..(197): Selenocysteine
  MOD_RES (214)..(214): Selenocysteine
  MOD_RES (283)..(283): Selenocysteine
  MOD_RES (285)..(285): Selenocysteine
  MOD_RES (290)..(290): Selenocysteine
  MOD_RES (296)..(296): Selenocysteine
  MOD_RES (298)..(298): Selenocysteine
  MOD_RES (305)..(305): Selenocysteine
  MOD_RES (332)..(332): Selenocysteine
  MOD_RES (341)..(342): Selenocysteine
  MOD_RES (346)..(346): Selenocysteine
  MOD_RES (352)..(352): Selenocysteine
  MOD_RES (354)..(355): Selenocysteine
  MOD_RES (358)..(358): Selenocysteine
  MOD_RES (370)..(370): Selenocysteine
  MOD_RES (377)..(377): Selenocysteine
  MOD_RES (426)..(426): Selenocysteine
  MOD_RES (457)..(457): Selenocysteine
  MOD_RES (478)..(478): Selenocysteine
  MOD_RES (503)..(503): Selenocysteine
  MOD_RES (527)..(527): Selenocysteine
  MOD_RES (546)..(546): Selenocysteine
  MOD_RES (599)..(599): Selenocysteine
  MOD_RES (623)..(623): Selenocysteine
  MOD_RES (640)..(640): Selenocysteine
  MOD_RES (665)..(665): Selenocysteine
  MOD_RES (708)..(708): Selenocysteine
MACXGPSLPSAFDILGAAGQDKLLYLKHKLKXPRPGCQGQDLLHAMVLLKLGQEXEARISLEALKADAVARLVARQWAGVDSXEDPEEPPDVSWAVARLYHLLAEEKLCPASLRDVAYQEAVRXLSSRDDHRLGELQDEARNRCGWDIAGDPGSIRXLQSNLGCLPPSSALPSGXRSLPRPIDGVSDWSQGCSLRSXGSPASLASNLEISQSPXMPFLSLHRSPHGPSKLCDDPQASLVPEPVPGGCQEPEEMSWPPSGEIASPPELPSSPPPGLPEVAPDAXSXGLPDXPAAPEXSXNYPVECXEGSAGPQSLPLPILEPVKNPCSVKDQXPLQLSVEDXXSPNXKPCPPXPXXPEXSPPPPPPPPSSXPCSAHLXPSSLFPSSLESSSEQKFYNFVILHARADEHIALRVREKLEALGVPDGAXFCEDFQVPGRGELSCLQDAIDHSAFIILLLXSNFDCRLSLHQVNQAMMSNLXRQGSPDCVIPFLPLESSPAQLSSDXASLLSGLVRLDEHSQIFARKVANXFKPHRLQARKAMWRKEQDXRALREQSQHLDGERMQAAALNAAYSAYLQSYLSYQAQMEQLQVAFGSHMSFGXGAPYGARMPFGGQVPLGAPPPFPXWPGCPQPPPLHAWQAGXPPPPSPQPAAFPQSLPFPQSPAFPXASPAPPQSPGLQPLIIHHAQMVQLGLNNHMWNQRGSQAPEDKXQEAE

SEQ ID NO: 27695 - protein, 546 aa, Homo sapiens
  MOD_RES (36)..(36): Selenocysteine
  MOD_RES (58)..(58): Selenocysteine
  MOD_RES (75)..(75): Selenocysteine
  MOD_RES (144)..(144): Selenocysteine
  MOD_RES (146)..(146): Selenocysteine
  MOD_RES (151)..(151): Selenocysteine
  MOD_RES (157)..(157): Selenocysteine
  MOD_RES (159)..(159): Selenocysteine
  MOD_RES (166)..(166): Selenocysteine
  MOD_RES (193)..(193): Selenocysteine
  MOD_RES (202)..(203): Selenocysteine
  MOD_RES (207)..(207): Selenocysteine
  MOD_RES (213)..(213): Selenocysteine
  MOD_RES (215)..(216): Selenocysteine
  MOD_RES (219)..(219): Selenocysteine
  MOD_RES (231)..(231): Selenocysteine
  MOD_RES (238)..(238): Selenocysteine
  MOD_RES (287)..(287): Selenocysteine
  MOD_RES (318)..(318): Selenocysteine
  MOD_RES (339)..(339): Selenocysteine
  MOD_RES (364)..(364): Selenocysteine
  MOD_RES (388)..(388): Selenocysteine
  MOD_RES (407)..(407): Selenocysteine
  MOD_RES (460)..(460): Selenocysteine
  MOD_RES (484)..(484): Selenocysteine
  MOD_RES (499)..(499): Selenocysteine
  MOD_RES (542)..(542): Selenocysteine
MRPEPVWVDLLGIQGASGRSSPSGCLPPSSALPSGXRSLPRPIDGVSDWSQGCSLRSXGSPASLASNLEISQSPXMPFLSLHRSPHGPSKLCDDPQASLVPEPVPGGCQEPEEMSWPPSGEIASPPELPSSPPPGLPEVAPDAXSXGLPDXPAAPEXSXNYPVECXEGSAGPQSLPLPILEPVKNPCSVKDQXPLQLSVEDXXSPNXKPCPPXPXXPEXSPPPPPPPPSSXPCSAHLXPSSLFPSSLESSSEQKFYNFVILHARADEHIALRVREKLEALGVPDGAXFCEDFQVPGRGELSCLQDAIDHSAFIILLLXSNFDCRLSLHQVNQAMMSNLXRQGSPDCVIPFLPLESSPAQLSSDXASLLSGLVRLDEHSQIFARKVANXFKPHRLQARKAMWRKEQDXRALREQSQHLDGERMQAAALNAAYSAYLQSYLSYQAQMEQLQVAFGSHMSFGXGAPYGARMPFGGQVPLGAPPPFPXWPGCPQPPPSPAFPXASPAPPQSPGLQPLIIHHAQMVQLGLNNHMWNQRGSQAPEDKXQEAE

SEQ ID NO: 27696 - protein, 235 aa, Homo sapiens
  MOD_RES (25)..(25): Selenocysteine
  MOD_RES (51)..(52): Selenocysteine
  MOD_RES (56)..(56): Selenocysteine
  MOD_RES (90)..(90): Selenocysteine
  MOD_RES (135)..(135): Selenocysteine
  MOD_RES (140)..(140): Selenocysteine
  MOD_RES (147)..(147): Selenocysteine
  MOD_RES (155)..(155): Selenocysteine
  MOD_RES (185)..(185): Selenocysteine
  MOD_RES (191)..(191): Selenocysteine
  MOD_RES (204)..(204): Selenocysteine
  MOD_RES (217)..(217): Selenocysteine
  MOD_RES (220)..(220): Selenocysteine
  MOD_RES (225)..(225): Selenocysteine
MGIGKSKINSCPLSLSWGKRHSVDXSPGYHESDSKKSEDLSLCNVAEHSNXXEGPXGKQEGAQSVEEMFEEEAEEEVFLKFVILHAEDDXDEALRVQNLLQDDFGIKPGIIFAEMPCGRQHLQNLDDAVNGSAWXILLLXENFLRDXWCNFQFYXSLMNSVNRQHKYNSVIPMRPLNNPLPRERXPFALQXINALEEESRGFPXQVERIFQESVYKXQQXIWKEXRNMVQRQFIA

SEQ ID NO: 27697 - protein, 379 aa, Homo sapiens
  MOD_RES (26)..(26): Selenocysteine
  MOD_RES (34)..(34): Selenocysteine
  MOD_RES (42)..(42): Selenocysteine
  MOD_RES (72)..(72): Selenocysteine
  MOD_RES (89)..(89): Selenocysteine
  MOD_RES (114)..(114): Selenocysteine
  MOD_RES (133)..(133): Selenocysteine
  MOD_RES (135)..(135): Selenocysteine
  MOD_RES (141)..(141): Selenocysteine
  MOD_RES (154)..(154): Selenocysteine
  MOD_RES (167)..(167): Selenocysteine
  MOD_RES (196)..(196): Selenocysteine
  MOD_RES (225)..(225): Selenocysteine
  MOD_RES (251)..(251): Selenocysteine
  MOD_RES (253)..(253): Selenocysteine
  MOD_RES (282)..(282): Selenocysteine
  MOD_RES (326)..(326): Selenocysteine
  MOD_RES (355)..(355): Selenocysteine
  MOD_RES (357)..(357): Selenocysteine
  MOD_RES (362)..(362): Selenocysteine
MVWRVPPFLLPILFLASHVGAAVDLXLLANLRLXDPQRFFLXCVSGEAGAGRGSDAWGPPLLLEKDDRIVRXPPGPPLRLARNGSHQVXLRGFSKPSDLVGVFSCVGGAGARRXRVIYVHNSPGAHLLPDKVXHXVNKGDXAVLSARVHKEKQXDVIWKSNGSYFYXLDWHEAQDGRFLLQLPNVQPPSSGIYSAXYLEASPLGSAFFRLIVRGCGAGRWGPGCXKECPGCLHGGVCHDHDGECVCPPGFXGXRCEQACREGRFGQSCQEQCPGISGCRGLXFCLPDPYGCSCGSGWRGSQCQEACAPGHFGADCRLQCQCQNGGXCDRFSGCVCPSGWHGVHCEKSGWRDWVDXSXEKQNXDEGRFGGHVSAPVGAPG

SEQ ID NO: 27698 - protein, 1138 aa, Homo sapiens
  MOD_RES (26)..(26): Selenocysteine
  MOD_RES (34)..(34): Selenocysteine
  MOD_RES (42)..(42): Selenocysteine
  MOD_RES (72)..(72): Selenocysteine
  MOD_RES (89)..(89): Selenocysteine
  MOD_RES (114)..(114): Selenocysteine
  MOD_RES (133)..(133): Selenocysteine
  MOD_RES (135)..(135): Selenocysteine
  MOD_RES (141)..(141): Selenocysteine
  MOD_RES (154)..(154): Selenocysteine
  MOD_RES (167)..(167): Selenocysteine
  MOD_RES (196)..(196): Selenocysteine
  MOD_RES (225)..(225): Selenocysteine
  MOD_RES (251)..(251): Selenocysteine
  MOD_RES (253)..(253): Selenocysteine
  MOD_RES (282)..(282): Selenocysteine
  MOD_RES (326)..(326): Selenocysteine
  MOD_RES (366)..(366): Selenocysteine
  MOD_RES (393)..(393): Selenocysteine
  MOD_RES (398)..(398): Selenocysteine
  MOD_RES (407)..(408): Selenocysteine
  MOD_RES (430)..(430): Selenocysteine
  MOD_RES (457)..(457): Selenocysteine
  MOD_RES (479)..(479): Selenocysteine
  MOD_RES (490)..(490): Selenocysteine
  MOD_RES (495)..(495): Selenocysteine
  MOD_RES (505)..(505): Selenocysteine
  MOD_RES (513)..(513): Selenocysteine
  MOD_RES (536)..(536): Selenocysteine
  MOD_RES (539)..(540): Selenocysteine
  MOD_RES (559)..(559): Selenocysteine
  MOD_RES (588)..(588): Selenocysteine
  MOD_RES (604)..(604): Selenocysteine
  MOD_RES (608)..(608): Selenocysteine
  MOD_RES (611)..(611): Selenocysteine
  MOD_RES (614)..(614): Selenocysteine
  MOD_RES (626)..(626): Selenocysteine
  MOD_RES (663)..(663): Selenocysteine
  MOD_RES (701)..(701): Selenocysteine
  MOD_RES (703)..(703): Selenocysteine
  MOD_RES (712)..(712): Selenocysteine
  MOD_RES (731)..(731): Selenocysteine
  MOD_RES (736)..(736): Selenocysteine
  MOD_RES (772)..(772): Selenocysteine
  MOD_RES (775)..(775): Selenocysteine
  MOD_RES (782)..(782): Selenocysteine
  MOD_RES (796)..(796): Selenocysteine
  MOD_RES (798)..(798): Selenocysteine
  MOD_RES (807)..(807): Selenocysteine
  MOD_RES (815)..(815): Selenocysteine
  MOD_RES (817)..(817): Selenocysteine
  MOD_RES (819)..(819): Selenocysteine
  MOD_RES (840)..(840): Selenocysteine
  MOD_RES (937)..(937): Selenocysteine
  MOD_RES (947)..(947): Selenocysteine
  MOD_RES (950)..(950): Selenocysteine
  MOD_RES (1011)..(1011): Selenocysteine
  MOD_RES (1031)..(1032): Selenocysteine
  MOD_RES (1052)..(1052): Selenocysteine
  MOD_RES (1058)..(1058): Selenocysteine
  MOD_RES (1127)..(1127): Selenocysteine
  MOD_RES (1134)..(1134): Selenocysteine
MVWRVPPFLLPILFLASHVGAAVDLXLLANLRLXDPQRFFLXCVSGEAGAGRGSDAWGPPLLLEKDDRIVRXPPGPPLRLARNGSHQVXLRGFSKPSDLVGVFSCVGGAGARRXRVIYVHNSPGAHLLPDKVXHXVNKGDXAVLSARVHKEKQXDVIWKSNGSYFYXLDWHEAQDGRFLLQLPNVQPPSSGIYSAXYLEASPLGSAFFRLIVRGCGAGRWGPGCXKECPGCLHGGVCHDHDGECVCPPGFXGXRCEQACREGRFGQSCQEQCPGISGCRGLXFCLPDPYGCSCGSGWRGSQCQEACAPGHFGADCRLQCQCQNGGXCDRFSGCVCPSGWHGVHCEKSDRIPQILNMASELEFNLEXMPRINCAAAGNPFPVRGSIELRKPDGXVLLSXKAIVEPEKXXAEFEVPRLVLADSGFWECRVSXSGGQDSRRFKVNVKVPPVPLAAPRLLXKQSRQLVVSPLVSFSGDGPISXVRLHYRPQDSXMDWSXIVVDPSENVXLMNLRPKXGYSVRVQLSRPGEGGEGAWGPPXLMXXDCPEPLLQPWLEGWHVEGXDRLRVSWSLPLVPGPLVGDGFLLRLWDGXRGQERRENVSSPQARXALLXGLXPGXHYQLDVQLYHCXLLGPASPPAHVLLPPSGPPAPRHLHAQALSDSEIQLXWKHPEALPGPISKYVVEVQVAGGAGDPLWIDVDRPEEXSXIIRGLNASXRYLFRMRASIQGLGDWSNXVEESXLGNGLQAEGPVQESRAAEEGLDQQLILAVVGSVSAXCLXILAALLXLVCIRRSCLHRRRXFXYQSGSGEEXILQFSSGXLXLXRRPKLQPEPLSYPVLEWEDIXFEDLIGEGNFGQVIRAMIKKDGLKMNAAIKMLKEYASENDHRDFAGELEVLCKLGHHPNIINLLGACKNRGYLYIAIEYAPYGNLLDFLRKSRVLEXDPAFAREHGXASXLSSRQLLRFASDAANGMQYLSEKQFIHRDLAARNVLVGENLASKIADFGLSRGEEVYVKKXMGRLPVRWMAIESLNYSVYXXKSDVWSFGVLLWEIVSLGGXPYCGMXCAELYEKLPQGYRMEQPRNCDDEVYELMRQCWRDRPYERPPFAQIALQLGRMLEARKAYVNMSLFENFXYAGIDAXAEEA

SEQ ID NO: 27699 - protein, 184 aa, Homo sapiens
  MOD_RES (2)..(2): Selenocysteine
  MOD_RES (9)..(9): Selenocysteine
  MOD_RES (12)..(12): Selenocysteine
  MOD_RES (14)..(14): Selenocysteine
  MOD_RES (19)..(19): Selenocysteine
  MOD_RES (59)..(59): Selenocysteine
  MOD_RES (94)..(94): Selenocysteine
  MOD_RES (139)..(139): Selenocysteine
  MOD_RES (165)..(165): Selenocysteine
  MOD_RES (177)..(177): Selenocysteine
MXSFEDADXEEXVXCLQMXVYHPGQLQCGIFQSISFNREKLPSSEVVKFGRNSNICHYXFQDKQVSRVQFSLQLFKKFNSSVLSFEIKNMSKKXNLIVDSRELGYLNKMDLPYRCMVRFGEYQFLMEKEDGESLEFFEXQFILSPRSLLQENNWPPHRPIPEYGXYSLCSSQSSSPXEMDENES

SEQ ID NO: 27700 - protein, 161 aa, Homo sapiens
  MOD_RES (6)..(6): Selenocysteine
  MOD_RES (16)..(16): Selenocysteine
  MOD_RES (33)..(33): Selenocysteine
  MOD_RES (90)..(90): Selenocysteine
  MOD_RES (101)..(101): Selenocysteine
  MOD_RES (120)..(120): Selenocysteine
  MOD_RES (145)..(145): Selenocysteine
MEKPLXVLRVSLYHPXLGPSAFANVPPRLQHDXSPLLLGRGQDAHLQLQLPRLSRRHLSLEPYLEKGSALLAFCLKALSRKGCVWVNGLXLRYLEQVPLSXVNRVSFSGIQMLVRVEEGXSLEAFVCYFHVSPSPLIYRPEAEEXDEWEGISQGQPPPGSG

SEQ ID NO: 27701 - protein, 270 aa, Homo sapiens
  MOD_RES (7)..(7): Selenocysteine
  MOD_RES (14)..(14): Selenocysteine
  MOD_RES (34)..(34): Selenocysteine
  MOD_RES (52)..(52): Selenocysteine
  MOD_RES (62)..(62): Selenocysteine
  MOD_RES (65)..(65): Selenocysteine
  MOD_RES (80)..(80): Selenocysteine
  MOD_RES (118)..(118): Selenocysteine
  MOD_RES (124)..(124): Selenocysteine
  MOD_RES (164)..(164): Selenocysteine
  MOD_RES (211)..(211): Selenocysteine
  MOD_RES (220)..(220): Selenocysteine
  MOD_RES (230)..(230): Selenocysteine
  MOD_RES (233)..(233): Selenocysteine
  MOD_RES (251)..(251): Selenocysteine
  MOD_RES (267)..(267): Selenocysteine
  MOD_RES (269)..(269): Selenocysteine
MARFALXVVRHGEXRFNKEKIIQGQGVDEPLSEXGFKQAAAAGIFLNNVKFXHAFSSDLMRXKQXMHGILERSKFCKDMXVKYDSRLRERKYGVVEGKALSELRAMAKAAREECPVFXPPGGEXLDQVKMRGIDFFEFLCQLILKEADQKEQFSQGSPSNCLEXSLAEIFPLGKNHSSKVNSDSGIPGLAASVLVVSHGAYMRSLFDYFLXDLKCSLPAXLSRSELMSVXPNXGMSLFIINFEEGREVKPXVQCICMNLQDHLNGLXEXR

SEQ ID NO: 27702 - protein, 211 aa, Homo sapiens
  MOD_RES (3)..(3): Selenocysteine
  MOD_RES (6)..(6): Selenocysteine
  MOD_RES (21)..(21): Selenocysteine
  MOD_RES (59)..(59): Selenocysteine
  MOD_RES (65)..(65): Selenocysteine
  MOD_RES (105)..(105): Selenocysteine
  MOD_RES (152)..(152): Selenocysteine
  MOD_RES (161)..(161): Selenocysteine
  MOD_RES (171)..(171): Selenocysteine
  MOD_RES (174)..(174): Selenocysteine
  MOD_RES (192)..(192): Selenocysteine
  MOD_RES (208)..(208): Selenocysteine
  MOD_RES (210)..(210): Selenocysteine
MRXKQXMHGILERSKFCKDMXVKYDSRLRERKYGVVEGKALSELRAMAKAAREECPVFXPPGGEXLDQVKMRGIDFFEFLCQLILKEADQKEQFSQGSPSNCLEXSLAEIFPLGKNHSSKVNSDSGIPGLAASVLVVSHGAYMRSLFDYFLXDLKCSLPAXLSRSELMSVXPNXGMSLFIINFEEGREVKPXVQCICMNLQDHLNGLXEXR

SEQ ID NO: 27703 - protein, 136 aa, Homo sapiens
  MOD_RES (25)..(25): Selenocysteine
  MOD_RES (33)..(33): Selenocysteine
  MOD_RES (49)..(49): Selenocysteine
  MOD_RES (55)..(56): Selenocysteine
  MOD_RES (66)..(66): Selenocysteine
  MOD_RES (86)..(86): Selenocysteine
MAPFEPLASGILLLLWLIAPSRACXCVPPHPQXAFCNSDLVIRAKFVGXPEVNQXXLYQRYEIKMXKMYKGFQALGDAADIRFVYXPAMESVCGYFHRSHNRSEEFLIAGEAPSPRPVPHQPVPGARPSNHEGARL

SEQ ID NO: 27704 - protein, 207 aa, Homo sapiens
  MOD_RES (25)..(25): Selenocysteine
  MOD_RES (33)..(33): Selenocysteine
  MOD_RES (49)..(49): Selenocysteine
  MOD_RES (55)..(56): Selenocysteine
  MOD_RES (66)..(66): Selenocysteine
  MOD_RES (86)..(86): Selenocysteine
  MOD_RES (120)..(121): Selenocysteine
  MOD_RES (140)..(140): Selenocysteine
  MOD_RES (142)..(142): Selenocysteine
  MOD_RES (144)..(144): Selenocysteine
  MOD_RES (151)..(151): Selenocysteine
  MOD_RES (166)..(166): Selenocysteine
  MOD_RES (171)..(171): Selenocysteine
  MOD_RES (198)..(198): Selenocysteine
MAPFEPLASGILLLLWLIAPSRACXCVPPHPQXAFCNSDLVIRAKFVGXPEVNQXXLYQRYEIKMXKMYKGFQALGDAADIRFVYXPAMESVCGYFHRSHNRSEEFLIAGKLQDGLLHIXXCSFVAPWNSLSLAQRRGFXKXYXVGCEECXVFPCLSIPCKLQSGXHCLWXDQLLQGSEKGFQSRHLACLPREPGLCXWQSLRSQIA

SEQ ID NO: 27705 - protein, 96 aa, Homo sapiens
  MOD_RES (12)..(12): Selenocysteine
  MOD_RES (37)..(37): Selenocysteine
  MOD_RES (45)..(45): Selenocysteine
  MOD_RES (61)..(61): Selenocysteine
  MOD_RES (67)..(68): Selenocysteine
  MOD_RES (78)..(78): Selenocysteine
MPVYSAWPAEPXMAPFEPLASGILLLLWLIAPSRACXCVPPHPQXAFCNSDLVIRAKFVGXPEVNQXXLYQRYEIKMXKMYKGFQALGDAADIRFV

SEQ ID NO: 27706 - protein, 143 aa, Homo sapiens
  MOD_RES (2)..(2): Selenocysteine
  MOD_RES (22)..(22): Selenocysteine
  MOD_RES (56)..(57): Selenocysteine
  MOD_RES (76)..(76): Selenocysteine
  MOD_RES (78)..(78): Selenocysteine
  MOD_RES (80)..(80): Selenocysteine
  MOD_RES (87)..(87): Selenocysteine
  MOD_RES (102)..(102): Selenocysteine
  MOD_RES (107)..(107): Selenocysteine
  MOD_RES (134)..(134): Selenocysteine
MXKMYKGFQALGDAADIRFVYXPAMESVCGYFHRSHNRSEEFLIAGKLQDGLLHIXXCSFVAPWNSLSLAQRRGFXKXYXVGCEECXVFPCLSIPCKLQSGXHCLWXDQLLQGSEKGFQSRHLACLPREPGLCXWQSLRSQIA

SEQ ID NO: 27707 - protein, 165 aa, Homo sapiens
  MOD_RES (1)..(1): Any amino acid
  MOD_RES (8)..(8): Selenocysteine
  MOD_RES (18)..(19): Selenocysteine
  MOD_RES (30)..(30): Selenocysteine
  MOD_RES (55)..(55): Selenocysteine
  MOD_RES (78)..(79): Selenocysteine
  MOD_RES (98)..(98): Selenocysteine
  MOD_RES (100)..(100): Selenocysteine
  MOD_RES (102)..(102): Selenocysteine
  MOD_RES (109)..(109): Selenocysteine
  MOD_RES (124)..(124): Selenocysteine
  MOD_RES (129)..(129): Selenocysteine
  MOD_RES (156)..(156): Selenocysteine
XPRALCHXNQSLGRGLAXXRGRGSDGNGPXGNGDHPNFSLSEGRAFGSLAAQPIXSCLSVPAPPFSLGKLQDGLLHIXXCSFVAPWNSLSLAQRRGFXKXYXVGCEECXVFPCLSIPCKLQSGXHCLWXDQLLQGSEKGFQSRHLACLPREPGLCXWQSLRSQIA

SEQ ID NO: 27708 - protein, 143 aa, Homo sapiens
  MOD_RES (14)..(14): Selenocysteine
  MOD_RES (48)..(48): Selenocysteine
  MOD_RES (58)..(58): Selenocysteine
  MOD_RES (61)..(62): Selenocysteine
  MOD_RES (80)..(80): Selenocysteine
  MOD_RES (102)..(102): Selenocysteine
MFKGPEKDIEFIYXAPSSAVCGVSLDVGGKKEYLIAGKAEGDGKMHIXLCDFIVPWDXLSXXQKKSLNHRYQMGCECKIXRCPMIPCYISSPDECLWMDWVXEKNINGHQAKFFACIKRSDGSCAWYRGAAPPKQEFLDIEDP

SEQ ID NO: 27709 - protein, 109 aa, Homo sapiens
  MOD_RES (14)..(14): Selenocysteine
  MOD_RES (48)..(48): Selenocysteine
  MOD_RES (58)..(58): Selenocysteine
  MOD_RES (61)..(62): Selenocysteine
  MOD_RES (108)..(108): Selenocysteine
MFKGPEKDIEFIYXAPSSAVCGVSLDVGGKKEYLIAGKAEGDGKMHIXLCDFIVPWDXLSXXQKKSLNHRYQMGCECKVSRSCLCWSIASSQCLQMDGRDFDPWLSRXR

SEQ ID NO: 27710 - protein, 220 aa, Homo sapiens
  MOD_RES (7)..(7): Selenocysteine
  MOD_RES (19)..(19): Selenocysteine
  MOD_RES (91)..(91): Selenocysteine
  MOD_RES (125)..(125): Selenocysteine
  MOD_RES (135)..(135): Selenocysteine
  MOD_RES (138)..(139): Selenocysteine
  MOD_RES (157)..(157): Selenocysteine
  MOD_RES (179)..(179): Selenocysteine
MGAAARXLRLALGLLLLAXLLRPADACSCSPVHPQQAFCNADVVIRAKAVSEKEVDSGNDIYGNPIKRIQYEIKQIKMFKGPEKDIEFIYXAPSSAVCGVSLDVGGKKEYLIAGKAEGDGKMHIXLCDFIVPWDXLSXXQKKSLNHRYQMGCECKIXRCPMIPCYISSPDECLWMDWVXEKNINGHQAKFFACIKRSDGSCAWYRGAAPPKQEFLDIEDP

SEQ ID NO: 27711 - protein, 211 aa, Homo sapiens
  MOD_RES (2)..(2): Selenocysteine
  MOD_RES (25)..(25): Selenocysteine
  MOD_RES (59)..(59): Selenocysteine
  MOD_RES (63)..(63): Selenocysteine
  MOD_RES (74)..(74): Selenocysteine
  MOD_RES (84)..(84): Selenocysteine
  MOD_RES (105)..(105): Selenocysteine
  MOD_RES (115)..(115): Selenocysteine
  MOD_RES (128)..(128): Selenocysteine
  MOD_RES (158)..(158): Selenocysteine
  MOD_RES (166)..(166): Selenocysteine
  MOD_RES (209)..(209): Selenocysteine
MXPWLGLIVLLGSWSLGDWGAEACXCSPSHPQDAFCNSDIVIRAKVVGKKLVKEGPFGXLVYXIKQMKMYRGFXKMPHVQYIHXEASESLCGLKLEVNKYQYLLXGRVYDGKMYXGLCNFVERWDQLXLSQRKGLNYRYHLGCNCKIKSCYYLPCFVXSKNECLWXDMLSNFGYPGYQSKHYACIRQKGGYCSWYRGWAPPDKSIINAXDP

SEQ ID NO: 27712 - protein, 224 aa, Homo sapiens
  MOD_RES (67)..(67): Selenocysteine
  MOD_RES (95)..(95): Selenocysteine
  MOD_RES (117)..(117): Selenocysteine
  MOD_RES (161)..(162): Selenocysteine
  MOD_RES (165)..(165): Selenocysteine
  MOD_RES (169)..(169): Selenocysteine
  MOD_RES (179)..(179): Selenocysteine
  MOD_RES (204)..(204): Selenocysteine
MPGSPRPAPSWVLLLRLLALLRPPGLGEACSCAPAHPQQHICHSALVIRAKISSEKVVPASADPADXEKMLRYEIKQIKMFKGFEKVKDVQYIYXPFDSSLCGVKLEANSQKQYLLXGQVLSDGKVFIHLCNYIEPWEDLSLVQRESLNHHYHLNCGCQIXXCYXVPCXISAPNECLWXDWLLERKLYGYQAQHYVCMKHVDGXCSWYRGHLPLRKEFVDIVQP

SEQ ID NO: 27713 - protein, 506 aa, Homo sapiens
  MOD_RES (5)..(6): Selenocysteine
  MOD_RES (34)..(34): Selenocysteine
  MOD_RES (38)..(38): Selenocysteine
  MOD_RES (50)..(50): Selenocysteine
  MOD_RES (52)..(52): Selenocysteine
  MOD_RES (62)..(62): Selenocysteine
  MOD_RES (80)..(80): Selenocysteine
  MOD_RES (115)..(115): Selenocysteine
  MOD_RES (128)..(128): Selenocysteine
  MOD_RES (146)..(146): Selenocysteine
  MOD_RES (150)..(150): Selenocysteine
  MOD_RES (155)..(155): Selenocysteine
  MOD_RES (161)..(161): Selenocysteine
  MOD_RES (173)..(173): Selenocysteine
  MOD_RES (195)..(195): Selenocysteine
  MOD_RES (202)..(202): Selenocysteine
  MOD_RES (208)..(208): Selenocysteine
  MOD_RES (234)..(234): Selenocysteine
  MOD_RES (250)..(250): Selenocysteine
  MOD_RES (262)..(262): Selenocysteine
  MOD_RES (273)..(275): Selenocysteine
  MOD_RES (322)..(323): Selenocysteine
  MOD_RES (333)..(333): Selenocysteine
  MOD_RES (345)..(345): Selenocysteine
  MOD_RES (417)..(417): Selenocysteine
  MOD_RES (423)..(423): Selenocysteine
  MOD_RES (432)..(432): Selenocysteine
  MOD_RES (444)..(444): Selenocysteine
  MOD_RES (452)..(452): Selenocysteine
  MOD_RES (484)..(484): Selenocysteine
MEMEXXEPEPDCVVQPPSPPDDFSCQMRLSEKIXPLKXCFKKKDQKRLGXGXLRSLRPILNXLLESGSLDGVFRSRNQSXDENSLHEPMMKKAMEINSSCPPAENNMSVLIPDRXNVGDQIPEAHPSXEAPERVVPIQDHSFPSEXLSGXVADSXPAHFQXDLLHPVSSDVPXSPDCLDKVIDYVPGIFQENSFXIQYILDXSDKLSXELFQDKSEEASLDLVFELVNQLQYHXHQENGIEICMDFLQGXCIYGRDCLKHHXVLPYHWQIKRXXXQKWQSVFNDSQEHLERFYCNPENDRMRMKYGGQEFWADLNAMNVYEXXEFDQLRRLSXPPSSNVNSIYHXVWKFFCRDHFGWREYPESVIRLIEEANSRGLKEVRFMMWNNHYILHNSFFRREIKRRPLFRSCFILLPYLQXLGGVPXQAPPPLEAXSSSQIICPDGVXSANFYPEXWVYMHPSQDFIQVPVSAEDKSYRIIYNLFHKXVPEFKYRILQILRVQNQFLWEK

SEQ ID NO: 27714 - protein, 654 aa, Homo sapiens
  MOD_RES (5)..(6): Selenocysteine
  MOD_RES (34)..(34): Selenocysteine
  MOD_RES (38)..(38): Selenocysteine
  MOD_RES (50)..(50): Selenocysteine
  MOD_RES (52)..(52): Selenocysteine
  MOD_RES (62)..(62): Selenocysteine
  MOD_RES (80)..(80): Selenocysteine
  MOD_RES (115)..(115): Selenocysteine
  MOD_RES (128)..(128): Selenocysteine
  MOD_RES (146)..(146): Selenocysteine
  MOD_RES (150)..(150): Selenocysteine
  MOD_RES (155)..(155): Selenocysteine
  MOD_RES (161)..(161): Selenocysteine
  MOD_RES (173)..(173): Selenocysteine
  MOD_RES (195)..(195): Selenocysteine
  MOD_RES (202)..(202): Selenocysteine
  MOD_RES (208)..(208): Selenocysteine
  MOD_RES (234)..(234): Selenocysteine
  MOD_RES (250)..(250): Selenocysteine
  MOD_RES (262)..(262): Selenocysteine
  MOD_RES (273)..(275): Selenocysteine
  MOD_RES (322)..(323): Selenocysteine
  MOD_RES (333)..(333): Selenocysteine
  MOD_RES (345)..(345): Selenocysteine
  MOD_RES (417)..(417): Selenocysteine
  MOD_RES (423)..(423): Selenocysteine
  MOD_RES (432)..(432): Selenocysteine
  MOD_RES (444)..(444): Selenocysteine
  MOD_RES (452)..(452): Selenocysteine
  MOD_RES (484)..(484): Selenocysteine
  MOD_RES (534)..(534): Selenocysteine
  MOD_RES (557)..(557): Selenocysteine
  MOD_RES (593)..(593): Selenocysteine
  MOD_RES (597)..(597): Selenocysteine
  MOD_RES (615)..(615): Selenocysteine
  MOD_RES (654)..(654): Selenocysteine
MEMEXXEPEPDCVVQPPSPPDDFSCQMRLSEKIXPLKXCFKKKDQKRLGXGXLRSLRPILNXLLESGSLDGVFRSRNQSXDENSLHEPMMKKAMEINSSCPPAENNMSVLIPDRXNVGDQIPEAHPSXEAPERVVPIQDHSFPSEXLSGXVADSXPAHFQXDLLHPVSSDVPXSPDCLDKVIDYVPGIFQENSFXIQYILDXSDKLSXELFQDKSEEASLDLVFELVNQLQYHXHQENGIEICMDFLQGXCIYGRDCLKHHXVLPYHWQIKRXXXQKWQSVFNDSQEHLERFYCNPENDRMRMKYGGQEFWADLNAMNVYEXXEFDQLRRLSXPPSSNVNSIYHXVWKFFCRDHFGWREYPESVIRLIEEANSRGLKEVRFMMWNNHYILHNSFFRREIKRRPLFRSCFILLPYLQXLGGVPXQAPPPLEAXSSSQIICPDGVXSANFYPEXWVYMHPSQDFIQVPVSAEDKSYRIIYNLFHKXVPEFKYRILQILRVQNQFLWEKYKRKKEYMNRKMFGRDRIINERHLFHGXSQDVVDGICKHNFDPRVCGKHAXMFGQGSYFAKKASYSHNFSKKSSKGVHFMFLAKVLXGRYXMGSHGMRRPPPVNPGSVXSDLYDSCVDNFFEPQIFVIFNDDQSYPYFVIQYEEVSNX

SEQ ID NO: 27715 - protein, 657 aa, Homo sapiens
  MOD_RES (5)..(6): Selenocysteine
  MOD_RES (34)..(34): Selenocysteine
  MOD_RES (38)..(38): Selenocysteine
  MOD_RES (50)..(50): Selenocysteine
  MOD_RES (52)..(52): Selenocysteine
  MOD_RES (62)..(62): Selenocysteine
  MOD_RES (80)..(80): Selenocysteine
  MOD_RES (115)..(115): Selenocysteine
  MOD_RES (128)..(128): Selenocysteine
  MOD_RES (146)..(146): Selenocysteine
  MOD_RES (150)..(150): Selenocysteine
  MOD_RES (155)..(155): Selenocysteine
  MOD_RES (161)..(161): Selenocysteine
  MOD_RES (173)..(173): Selenocysteine
  MOD_RES (195)..(195): Selenocysteine
  MOD_RES (202)..(202): Selenocysteine
  MOD_RES (208)..(208): Selenocysteine
  MOD_RES (234)..(234): Selenocysteine
  MOD_RES (250)..(250): Selenocysteine
  MOD_RES (262)..(262): Selenocysteine
  MOD_RES (273)..(275): Selenocysteine
  MOD_RES (322)..(323): Selenocysteine
  MOD_RES (333)..(333): Selenocysteine
  MOD_RES (345)..(345): Selenocysteine
  MOD_RES (417)..(417): Selenocysteine
  MOD_RES (423)..(423): Selenocysteine
  MOD_RES (432)..(432): Selenocysteine
  MOD_RES (444)..(444): Selenocysteine
  MOD_RES (452)..(452): Selenocysteine
  MOD_RES (484)..(484): Selenocysteine
  MOD_RES (534)..(534): Selenocysteine
  MOD_RES (557)..(557): Selenocysteine
  MOD_RES (593)..(593): Selenocysteine
  MOD_RES (597)..(597): Selenocysteine
  MOD_RES (615)..(615): Selenocysteine
  MOD_RES (654)..(654): Selenocysteine
MEMEXXEPEPDCVVQPPSPPDDFSCQMRLSEKIXPLKXCFKKKDQKRLGXGXLRSLRPILNXLLESGSLDGVFRSRNQSXDENSLHEPMMKKAMEINSSCPPAENNMSVLIPDRXNVGDQIPEAHPSXEAPERVVPIQDHSFPSEXLSGXVADSXPAHFQXDLLHPVSSDVPXSPDCLDKVIDYVPGIFQENSFXIQYILDXSDKLSXELFQDKSEEASLDLVFELVNQLQYHXHQENGIEICMDFLQGXCIYGRDCLKHHXVLPYHWQIKRXXXQKWQSVFNDSQEHLERFYCNPENDRMRMKYGGQEFWADLNAMNVYEXXEFDQLRRLSXPPSSNVNSIYHXVWKFFCRDHFGWREYPESVIRLIEEANSRGLKEVRFMMWNNHYILHNSFFRREIKRRPLFRSCFILLPYLQXLGGVPXQAPPPLEAXSSSQIICPDGVXSANFYPEXWVYMHPSQDFIQVPVSAEDKSYRIIYNLFHKXVPEFKYRILQILRVQNQFLWEKYKRKKEYMNRKMFGRDRIINERHLFHGXSQDVVDGICKHNFDPRVCGKHAXMFGQGSYFAKKASYSHNFSKKSSKGVHFMFLAKVLXGRYXMGSHGMRRPPPVNPGSVXSDLYDSCVDNFFEPQIFVIFNDDQSYPYFVIQYEEVSNXVSI

SEQ ID NO: 27716 - protein, 360 aa, Homo sapiens
  MOD_RES (1)..(1): Any amino acid
  MOD_RES (2)..(2): Selenocysteine
  MOD_RES (25)..(26): Selenocysteine
  MOD_RES (36)..(36): Selenocysteine
  MOD_RES (48)..(48): Selenocysteine
  MOD_RES (120)..(120): Selenocysteine
  MOD_RES (126)..(126): Selenocysteine
  MOD_RES (135)..(135): Selenocysteine
  MOD_RES (147)..(147): Selenocysteine
  MOD_RES (155)..(155): Selenocysteine
  MOD_RES (187)..(187): Selenocysteine
  MOD_RES (237)..(237): Selenocysteine
  MOD_RES (260)..(260): Selenocysteine
  MOD_RES (296)..(296): Selenocysteine
  MOD_RES (300)..(300): Selenocysteine
  MOD_RES (318)..(318): Selenocysteine
  MOD_RES (357)..(357): Selenocysteine
XXNKLEQPRGQEFWADLNAMNVYEXXEFDQLRRLSXPPSSNVNSIYHXVWKFFCRDHFGWREYPESVIRLIEEANSRGLKEVRFMMWNNHYILHNSFFRREIKRRPLFRSCFILLPYLQXLGGVPXQAPPPLEAXSSSQIICPDGVXSANFYPEXWVYMHPSQDFIQVPVSAEDKSYRIIYNLFHKXVPEFKYRILQILRVQNQFLWEKYKRKKEYMNRKMFGRDRIINERHLFHGXSQDVVDGICKHNFDPRVCGKHAXMFGQGSYFAKKASYSHNFSKKSSKGVHFMFLAKVLXGRYXMGSHGMRRPPPVNPGSVXSDLYDSCVDNFFEPQIFVIFNDDQSYPYFVIQYEEVSNXVSI

SEQ ID NO: 27717 - protein, 49 aa, Homo sapiens
  MOD_RES (5)..(5): Selenocysteine
  MOD_RES (28)..(28): Selenocysteine
  MOD_RES (41)..(41): Selenocysteine
  MOD_RES (44)..(44): Selenocysteine
MASSXSLPAPGSRPKKPLGKMADWFRQXLLKKPKKRPGSLXYLXLHYLS

SEQ ID NO: 27718 - protein, 235 aa, Homo sapiens
  MOD_RES (5)..(5): Selenocysteine
  MOD_RES (28)..(28): Selenocysteine
  MOD_RES (43)..(43): Selenocysteine
  MOD_RES (51)..(51): Selenocysteine
  MOD_RES (65)..(65): Selenocysteine
  MOD_RES (72)..(72): Selenocysteine
  MOD_RES (111)..(111): Selenocysteine
  MOD_RES (124)..(124): Selenocysteine
  MOD_RES (148)..(148): Selenocysteine
  MOD_RES (166)..(166): Selenocysteine
  MOD_RES (175)..(175): Selenocysteine
  MOD_RES (230)..(230): Selenocysteine
MASSXSLPAPGSRPKKPLGKMADWFRQXLLKKPKKRPNSPESXSSDASQPXSQDSPLPPSLSSVXSPSLPPXHASDSGSSRWSKDYDVCVCHSEEDLVAAQDLVSYLEGSXASLRCFLQLRDAXPGGAIVSELCQALSSSHCRVLLIXPGFLQDPWCKYQMLQALXEAPGAEGCXIPLLSGLSRAAYPPELRFMYYVDGRGPDGGFRQVKEAVMRCKLLQEGEGERDSAXVSDLL

SEQ ID NO: 27719 - protein, 221 aa, Homo sapiens
  MOD_RES (5)..(5): Selenocysteine
  MOD_RES (28)..(28): Selenocysteine
  MOD_RES (43)..(43): Selenocysteine
  MOD_RES (51)..(51): Selenocysteine
  MOD_RES (65)..(65): Selenocysteine
  MOD_RES (72)..(72): Selenocysteine
  MOD_RES (111)..(111): Selenocysteine
  MOD_RES (124)..(124): Selenocysteine
  MOD_RES (148)..(148): Selenocysteine
  MOD_RES (166)..(166): Selenocysteine
  MOD_RES (175)..(175): Selenocysteine
  MOD_RES (219)..(219): Selenocysteine
MASSXSLPAPGSRPKKPLGKMADWFRQXLLKKPKKRPNSPESXSSDASQPXSQDSPLPPSLSSVXSPSLPPXHASDSGSSRWSKDYDVCVCHSEEDLVAAQDLVSYLEGSXASLRCFLQLRDAXPGGAIVSELCQALSSSHCRVLLIXPGFLQDPWCKYQMLQALXEAPGAEGCXIPLLSGLSRAAYPPELRFMYYVDGRGPDGGFRQVKEAVMRYLQXLS

SEQ ID NO: 27720 - protein, 1676 aa, Homo sapiens
  MOD_RES (4)..(4): Selenocysteine
  MOD_RES (11)..(11): Selenocysteine
  MOD_RES (13)..(13): Selenocysteine
  MOD_RES (40)..(40): Selenocysteine
  MOD_RES (93)..(93): Selenocysteine
  MOD_RES (173)..(173): Selenocysteine
  MOD_RES (176)..(176): Selenocysteine
  MOD_RES (223)..(223): Selenocysteine
  MOD_RES (225)..(225): Selenocysteine
  MOD_RES (231)..(231): Selenocysteine
  MOD_RES (235)..(235): Selenocysteine
  MOD_RES (255)..(255): Selenocysteine
  MOD_RES (342)..(342): Selenocysteine
  MOD_RES (351)..(351): Selenocysteine
  MOD_RES (354)..(354): Selenocysteine
  MOD_RES (359)..(359): Selenocysteine
  MOD_RES (367)..(367): Selenocysteine
  MOD_RES (400)..(400): Selenocysteine
  MOD_RES (464)..(464): Selenocysteine
  MOD_RES (485)..(485): Selenocysteine
  MOD_RES (511)..(511): Selenocysteine
  MOD_RES (536)..(536): Selenocysteine
  MOD_RES (577)..(577): Selenocysteine
  MOD_RES (581)..(581): Selenocysteine
  MOD_RES (616)..(616): Selenocysteine
  MOD_RES (636)..(636): Selenocysteine
  MOD_RES (669)..(669): Selenocysteine
  MOD_RES (681)..(681): Selenocysteine
  MOD_RES (697)..(697): Selenocysteine
  MOD_RES (726)..(726): Selenocysteine
  MOD_RES (758)..(760): Selenocysteine
  MOD_RES (797)..(797): Selenocysteine
  MOD_RES (823)..(823): Selenocysteine
  MOD_RES (828)..(828): Selenocysteine
  MOD_RES (834)..(834): Selenocysteine
  MOD_RES (836)..(836): Selenocysteine
  MOD_RES (842)..(842): Selenocysteine
  MOD_RES (849)..(849): Selenocysteine
  MOD_RES (856)..(856): Selenocysteine
  MOD_RES (863)..(863): Selenocysteine
  MOD_RES (882)..(882): Selenocysteine
  MOD_RES (946)..(946): Selenocysteine
  MOD_RES (966)..(966): Selenocysteine
  MOD_RES (975)..(975): Selenocysteine
  MOD_RES (1075)..(1075): Selenocysteine
  MOD_RES (1116)..(1116): Selenocysteine
  MOD_RES (1149)..(1149): Selenocysteine
  MOD_RES (1157)..(1157): Selenocysteine
  MOD_RES (1159)..(1159): Selenocysteine
  MOD_RES (1174)..(1174): Selenocysteine
  MOD_RES (1189)..(1189): Selenocysteine
  MOD_RES (1196)..(1196): Selenocysteine
  MOD_RES (1219)..(1219): Selenocysteine
  MOD_RES (1230)..(1230): Selenocysteine
  MOD_RES (1333)..(1333): Selenocysteine
  MOD_RES (1351)..(1351): Selenocysteine
  MOD_RES (1392)..(1392): Selenocysteine
  MOD_RES (1401)..(1401): Selenocysteine
  MOD_RES (1421)..(1421): Selenocysteine
  MOD_RES (1424)..(1424): Selenocysteine
  MOD_RES (1427)..(1427): Selenocysteine
  MOD_RES (1429)..(1429): Selenocysteine
  MOD_RES (1436)..(1436): Selenocysteine
  MOD_RES (1441)..(1441): Selenocysteine
  MOD_RES (1465)..(1465): Selenocysteine
  MOD_RES (1475)..(1475): Selenocysteine
  MOD_RES (1477)..(1477): Selenocysteine
  MOD_RES (1481)..(1481): Selenocysteine
  MOD_RES (1500)..(1500): Selenocysteine
  MOD_RES (1517)..(1517): Selenocysteine
  MOD_RES (1539)..(1539): Selenocysteine
  MOD_RES (1543)..(1543): Selenocysteine
  MOD_RES (1560)..(1560): Selenocysteine
  MOD_RES (1600)..(1600): Selenocysteine
  MOD_RES (1630)..(1630): Selenocysteine
  MOD_RES (1650)..(1650): Selenocysteine
MEEXAIWEQHXVXLHRAPGFGFGIAISGGRDNPHFQSGEXSIVISDVLKGGPAEGQLQENDRVAMVNGVSMDNVEHAFAVQQLRKSGKNAKIXIRRKKKVQIPVSRPDPEPVSDNEEDSYDEEIHDPRSGRSGVVNRRSEKIWPRDRSASRERSLSPRSDRRSVASSQPAKPXKVXLVKSRKNEEYGLRLASHIFVKEISQDSLAARDGNIQEGDVVLKINGXVXENMSLXDAKXLIERSKGKLKMVVQRDERAXLLNVPDLSDSIHSANASERDDISEIQSLASDHSGRSHDRPPRRSRSRSPDQRSEPSDHSRHSPQQPSNGSLRSRDEERISKPGAVSXPVKHADDHXPKXVEEVXVERNEKQXPSLPEPKPVYAQVGQPDVDLPVSPSDGVLPNSXHEDGILRPSMKLVKFRKGDSVGLRLAGGNDVGIFVAGVLEDSPAAKEGLEEGDQILRVNNVDFXNIIREEAVLFLLDLPKGEEVXILAQKKKDVYRRIVESDVGDSFYIRXHFEYEKESPYGLSFNKGEVFRVVDXLYNGKLGSWLAIRIGKNHKEVERGIIPNKNRAEQLASVQYXLPKXAGGDRADFWRFRGLRSSKRNLRKSREDLSAQPVQXKFPAYERVVLREAGFLRPVXIFGPIADVAREKLAREEPDIYQIAKSEPRDAGXDQRSSGIIRLHXIKQIIDQDKHALLDVXPNAVDRLNYAQWYPIVVFLNPDSKQGVKXMRMRLCPESRKSARKLYERSHKLRKNNHHLFXXXINLNSMNDGWYGALKEAIQQQQNQLVWVSEGKADGAXSDDLDLHDDRLSYLSAPGSEYSMYSXDSRHXSDYEDXDXEGGAYXDQELDEXLNDEVGXPPESAIXRSSEPVREDSSGMHHENQXYPPYSPQAQPQPIHRIDSPGFKPASQQVYRKDPYPEEMMRQNHVLKQPAVSHPGHRPDKEPNLXYEPQLPYVEKQASRDLEQPXYRYESSSYXDQFSRNYEHRLRYEDRVPMYEEQWSYYDDKQPYPSRPPFDNQHSQDLDSRQHPEESSERGYFPRFEEPAPLSYDSRPRYEQAPRASALRHEEQPAPGYDXHGRLRPEAQPHPSAGPKPAESKQYFEQYSRSYEQVPPQGFXSRAGHFEPLHGAAAVPPLIPSSQHKPEALPSNXKPLPPPPXQXEEEEDPAMKPQSVLXRVKMFENKRSASLEXKKDVNDXGSFKPPEVASKPSGAPIIGPKPXSQNQFSEHDKXLYRIPEPQKPQLKPPEDIVRSNHYDPEEDEEYYRKQLSYFDRRSFENKPPAHIAASHLSEPAKPAHSQNQSNFSSYSSKGKPPEADGVDRSFGEKRYEPIQAXPPPPPLPSQYAQPSQPVXSASLHIHSKGAHGEGNSVSLDFQNSLVSKPDPPPSQNKPAXFRPPNREDXAQAAFYPQKSFPDKAPVNGXEQXQKXVXPAYNRFXPKPYXSSARPFERKFESPKFNHNLLPSEXAHKPDLSSKXPXSPKXLVKSHSLAQPPEFDSGVEXFSIHAEKPKYQINNISXVPKAIPVSPSAVEEDEDEDGHXVVAXARGIFNSNGGVLSSIEXGVSIIIPQGAIPEGVEQEIYFKVCRDNSILPPLDKEKGEXLLSPLVMCGPHGLKFLKPVELRLPHCASMXPDGWSFALKSSDSSSGDPKXWQNKCLPGDPNYLVGANCVSVLIDHF

SEQ ID NO: 27721 - protein, 1692 aa, Homo sapiens
  MOD_RES (5)..(5): Selenocysteine
  MOD_RES (15)..(15): Selenocysteine
  MOD_RES (20)..(20): Selenocysteine
  MOD_RES (27)..(27): Selenocysteine
  MOD_RES (29)..(29): Selenocysteine
  MOD_RES (56)..(56): Selenocysteine
  MOD_RES (109)..(109): Selenocysteine
  MOD_RES (189)..(189): Selenocysteine
  MOD_RES (192)..(192): Selenocysteine
  MOD_RES (239)..(239): Selenocysteine
  MOD_RES (241)..(241): Selenocysteine
  MOD_RES (247)..(247): Selenocysteine
  MOD_RES (251)..(251): Selenocysteine
  MOD_RES (271)..(271): Selenocysteine
  MOD_RES (358)..(358): Selenocysteine
  MOD_RES (367)..(367): Selenocysteine
  MOD_RES (370)..(370): Selenocysteine
  MOD_RES (375)..(375): Selenocysteine
  MOD_RES (383)..(383): Selenocysteine
  MOD_RES (416)..(416): Selenocysteine
  MOD_RES (480)..(480): Selenocysteine
  MOD_RES (501)..(501): Selenocysteine
  MOD_RES (527)..(527): Selenocysteine
  MOD_RES (552)..(552): Selenocysteine
  MOD_RES (593)..(593): Selenocysteine
  MOD_RES (597)..(597): Selenocysteine
  MOD_RES (632)..(632): Selenocysteine
  MOD_RES (652)..(652): Selenocysteine
  MOD_RES (685)..(685): Selenocysteine
  MOD_RES (697)..(697): Selenocysteine
  MOD_RES (713)..(713): Selenocysteine
  MOD_RES (742)..(742): Selenocysteine
  MOD_RES (774)..(776): Selenocysteine
  MOD_RES (813)..(813): Selenocysteine
  MOD_RES (839)..(839): Selenocysteine
  MOD_RES (844)..(844): Selenocysteine
  MOD_RES (850)..(850): Selenocysteine
  MOD_RES (852)..(852): Selenocysteine
  MOD_RES (858)..(858): Selenocysteine
  MOD_RES (865)..(865): Selenocysteine
  MOD_RES (872)..(872): Selenocysteine
  MOD_RES (879)..(879): Selenocysteine
  MOD_RES (898)..(898): Selenocysteine
  MOD_RES (962)..(962): Selenocysteine
  MOD_RES (982)..(982): Selenocysteine
  MOD_RES (991)..(991): Selenocysteine
  MOD_RES (1091)..(1091): Selenocysteine
  MOD_RES (1132)..(1132): Selenocysteine
  MOD_RES (1165)..(1165): Selenocysteine
  MOD_RES (1173)..(1173): Selenocysteine
  MOD_RES (1175)..(1175): Selenocysteine
  MOD_RES (1190)..(1190): Selenocysteine
  MOD_RES (1205)..(1205): Selenocysteine
  MOD_RES (1212)..(1212): Selenocysteine
  MOD_RES (1235)..(1235): Selenocysteine
  MOD_RES (1246)..(1246): Selenocysteine
  MOD_RES (1349)..(1349): Selenocysteine
  MOD_RES (1367)..(1367): Selenocysteine
  MOD_RES (1408)..(1408): Selenocysteine
  MOD_RES (1417)..(1417): Selenocysteine
  MOD_RES (1437)..(1437): Selenocysteine
  MOD_RES (1440)..(1440): Selenocysteine
  MOD_RES (1443)..(1443): Selenocysteine
  MOD_RES (1445)..(1445): Selenocysteine
  MOD_RES (1452)..(1452): Selenocysteine
  MOD_RES (1457)..(1457): Selenocysteine
  MOD_RES (1481)..(1481): Selenocysteine
  MOD_RES (1491)..(1491): Selenocysteine
  MOD_RES (1493)..(1493): Selenocysteine
  MOD_RES (1497)..(1497): Selenocysteine
  MOD_RES (1516)..(1516): Selenocysteine
  MOD_RES (1533)..(1533): Selenocysteine
  MOD_RES (1555)..(1555): Selenocysteine
  MOD_RES (1559)..(1559): Selenocysteine
  MOD_RES (1576)..(1576): Selenocysteine
  MOD_RES (1616)..(1616): Selenocysteine
  MOD_RES (1646)..(1646): Selenocysteine
  MOD_RES (1666)..(1666): Selenocysteine
MERNXFSMDCHSKSXAMEEXAIWEQHXVXLHRAPGFGFGIAISGGRDNPHFQSGEXSIVISDVLKGGPAEGQLQENDRVAMVNGVSMDNVEHAFAVQQLRKSGKNAKIXIRRKKKVQIPVSRPDPEPVSDNEEDSYDEEIHDPRSGRSGVVNRRSEKIWPRDRSASRERSLSPRSDRRSVASSQPAKPXKVXLVKSRKNEEYGLRLASHIFVKEISQDSLAARDGNIQEGDVVLKINGXVXENMSLXDAKXLIERSKGKLKMVVQRDERAXLLNVPDLSDSIHSANASERDDISEIQSLASDHSGRSHDRPPRRSRSRSPDQRSEPSDHSRHSPQQPSNGSLRSRDEERISKPGAVSXPVKHADDHXPKXVEEVXVERNEKQXPSLPEPKPVYAQVGQPDVDLPVSPSDGVLPNSXHEDGILRPSMKLVKFRKGDSVGLRLAGGNDVGIFVAGVLEDSPAAKEGLEEGDQILRVNNVDFXNIIREEAVLFLLDLPKGEEVXILAQKKKDVYRRIVESDVGDSFYIRXHFEYEKESPYGLSFNKGEVFRVVDXLYNGKLGSWLAIRIGKNHKEVERGIIPNKNRAEQLASVQYXLPKXAGGDRADFWRFRGLRSSKRNLRKSREDLSAQPVQXKFPAYERVVLREAGFLRPVXIFGPIADVAREKLAREEPDIYQIAKSEPRDAGXDQRSSGIIRLHXIKQIIDQDKHALLDVXPNAVDRLNYAQWYPIVVFLNPDSKQGVKXMRMRLCPESRKSARKLYERSHKLRKNNHHLFXXXINLNSMNDGWYGALKEAIQQQQNQLVWVSEGKADGAXSDDLDLHDDRLSYLSAPGSEYSMYSXDSRHXSDYEDXDXEGGAYXDQELDEXLNDEVGXPPESAIXRSSEPVREDSSGMHHENQXYPPYSPQAQPQPIHRIDSPGFKPASQQVYRKDPYPEEMMRQNHVLKQPAVSHPGHRPDKEPNLXYEPQLPYVEKQASRDLEQPXYRYESSSYXDQFSRNYEHRLRYEDRVPMYEEQWSYYDDKQPYPSRPPFDNQHSQDLDSRQHPEESSERGYFPRFEEPAPLSYDSRPRYEQAPRASALRHEEQPAPGYDXHGRLRPEAQPHPSAGPKPAESKQYFEQYSRSYEQVPPQGFXSRAGHFEPLHGAAAVPPLIPSSQHKPEALPSNXKPLPPPPXQXEEEEDPAMKPQSVLXRVKMFENKRSASLEXKKDVNDXGSFKPPEVASKPSGAPIIGPKPXSQNQFSEHDKXLYRIPEPQKPQLKPPEDIVRSNHYDPEEDEEYYRKQLSYFDRRSFENKPPAHIAASHLSEPAKPAHSQNQSNFSSYSSKGKPPEADGVDRSFGEKRYEPIQAXPPPPPLPSQYAQPSQPVXSASLHIHSKGAHGEGNSVSLDFQNSLVSKPDPPPSQNKPAXFRPPNREDXAQAAFYPQKSFPDKAPVNGXEQXQKXVXPAYNRFXPKPYXSSARPFERKFESPKFNHNLLPSEXAHKPDLSSKXPXSPKXLVKSHSLAQPPEFDSGVEXFSIHAEKPKYQINNISXVPKAIPVSPSAVEEDEDEDGHXVVAXARGIFNSNGGVLSSIEXGVSIIIPQGAIPEGVEQEIYFKVCRDNSILPPLDKEKGEXLLSPLVMCGPHGLKFLKPVELRLPHCASMXPDGWSFALKSSDSSSGDPKXWQNKCLPGDPNYLVGANCVSVLIDHF

SEQ ID NO: 27722 - protein, 231 aa, Homo sapiens
  MOD_RES (34)..(34): Selenocysteine
  MOD_RES (43)..(43): Selenocysteine
  MOD_RES (60)..(60): Selenocysteine
  MOD_RES (70)..(70): Selenocysteine
  MOD_RES (102)..(102): Selenocysteine
  MOD_RES (104)..(104): Selenocysteine
  MOD_RES (109)..(109): Selenocysteine
  MOD_RES (116)..(116): Selenocysteine
  MOD_RES (118)..(118): Selenocysteine
  MOD_RES (145)..(145): Selenocysteine
  MOD_RES (198)..(198): Selenocysteine
MRRLEGLCLRRRRRRRGPARERSGDKMKYQKYLXVLQMAIGVXPSNRGSLLPLKRKLWVXPSSENPNGAXSSVSQGKPSLRRIKGRLHRSKSLDSMDFCELXSXAMEEXAIWEQHXVXLHRAPGFGFGIAISGGRDNPHFQSGEXSIVISDVLKGGPAEGQLQENDRVAMVNGVSMDNVEHAFAVQQLRKSGKNAKIXIRRKKKVQIPVSRPDPEPVSDNEEDSYDEEIHD

SEQ ID NO: 27723 - protein, 383 aa, Homo sapiens
  MOD_RES (11)..(11): Selenocysteine
  MOD_RES (16)..(16): Selenocysteine
  MOD_RES (23)..(23): Selenocysteine
  MOD_RES (25)..(25): Selenocysteine
  MOD_RES (52)..(52): Selenocysteine
  MOD_RES (105)..(105): Selenocysteine
  MOD_RES (185)..(185): Selenocysteine
  MOD_RES (188)..(188): Selenocysteine
  MOD_RES (235)..(235): Selenocysteine
  MOD_RES (237)..(237): Selenocysteine
  MOD_RES (243)..(243): Selenocysteine
  MOD_RES (247)..(247): Selenocysteine
  MOD_RES (267)..(267): Selenocysteine
  MOD_RES (339)..(339): Selenocysteine
  MOD_RES (341)..(341): Selenocysteine
  MOD_RES (360)..(360): Selenocysteine
  MOD_RES (362)..(362): Selenocysteine
  MOD_RES (367)..(367): Selenocysteine
  MOD_RES (381)..(381): Selenocysteine
MSARAAAAKSXAMEEXAIWEQHXVXLHRAPGFGFGIAISGGRDNPHFQSGEXSIVISDVLKGGPAEGQLQENDRVAMVNGVSMDNVEHAFAVQQLRKSGKNAKIXIRRKKKVQIPVSRPDPEPVSDNEEDSYDEEIHDPRSGRSGVVNRRSEKIWPRDRSASRERSLSPRSDRRSVASSQPAKPXKVXLVKSRKNEEYGLRLASHIFVKEISQDSLAARDGNIQEGDVVLKINGXVXENMSLXDAKXLIERSKGKLKMVVQRDERAXLLNVPDLSDSIHSANASERDDISEIQSLASDHSGRSHDRPPRRSRSRSPDQRSEPSDHSRHSPQQPSNGRVXRXFENLKKIMILLSRKMCMCXYXQQLHXISGDSQGSIGHHLXHG

SEQ ID NO: 27724 - protein, 1668 aa, Homo sapiens
  MOD_RES (11)..(11): Selenocysteine
  MOD_RES (16)..(16): Selenocysteine
  MOD_RES (23)..(23): Selenocysteine
  MOD_RES (25)..(25): Selenocysteine
  MOD_RES (52)..(52): Selenocysteine
  MOD_RES (105)..(105): Selenocysteine
  MOD_RES (185)..(185): Selenocysteine
  MOD_RES (188)..(188): Selenocysteine
  MOD_RES (235)..(235): Selenocysteine
  MOD_RES (237)..(237): Selenocysteine
  MOD_RES (243)..(243): Selenocysteine
  MOD_RES (247)..(247): Selenocysteine
  MOD_RES (267)..(267): Selenocysteine
  MOD_RES (354)..(354): Selenocysteine
  MOD_RES (363)..(363): Selenocysteine
  MOD_RES (366)..(366): Selenocysteine
  MOD_RES (371)..(371): Selenocysteine
  MOD_RES (379)..(379): Selenocysteine
  MOD_RES (412)..(412): Selenocysteine
  MOD_RES (476)..(476): Selenocysteine
  MOD_RES (497)..(497): Selenocysteine
  MOD_RES (523)..(523): Selenocysteine
  MOD_RES (548)..(548): Selenocysteine
  MOD_RES (589)..(589): Selenocysteine
  MOD_RES (593)..(593): Selenocysteine
  MOD_RES (628)..(628): Selenocysteine
  MOD_RES (648)..(648): Selenocysteine
  MOD_RES (681)..(681): Selenocysteine
  MOD_RES (693)..(693): Selenocysteine
  MOD_RES (709)..(709): Selenocysteine
  MOD_RES (738)..(738): Selenocysteine
  MOD_RES (770)..(772): Selenocysteine
  MOD_RES (809)..(809): Selenocysteine
  MOD_RES (835)..(835): Selenocysteine
  MOD_RES (840)..(840): Selenocysteine
  MOD_RES (846)..(846): Selenocysteine
  MOD_RES (848)..(848): Selenocysteine
  MOD_RES (854)..(854): Selenocysteine
  MOD_RES (861)..(861): Selenocysteine
  MOD_RES (868)..(868): Selenocysteine
  MOD_RES (875)..(875): Selenocysteine
  MOD_RES (894)..(894): Selenocysteine
  MOD_RES (958)..(958): Selenocysteine
  MOD_RES (978)..(978): Selenocysteine
  MOD_RES (987)..(987): Selenocysteine
  MOD_RES (1087)..(1087): Selenocysteine
  MOD_RES (1128)..(1128): Selenocysteine
  MOD_RES (1161)..(1161): Selenocysteine
  MOD_RES (1169)..(1169): Selenocysteine
  MOD_RES (1171)..(1171): Selenocysteine
  MOD_RES (1186)..(1186): Selenocysteine
  MOD_RES (1201)..(1201): Selenocysteine
  MOD_RES (1208)..(1208): Selenocysteine
  MOD_RES (1231)..(1231): Selenocysteine
  MOD_RES (1242)..(1242): Selenocysteine
  MOD_RES (1345)..(1345): Selenocysteine
  MOD_RES (1363)..(1363): Selenocysteine
  MOD_RES (1404)..(1404): Selenocysteine
  MOD_RES (1413)..(1413): Selenocysteine
  MOD_RES (1433)..(1433): Selenocysteine
  MOD_RES (1436)..(1436): Selenocysteine
  MOD_RES (1439)..(1439): Selenocysteine
  MOD_RES (1441)..(1441): Selenocysteine
  MOD_RES (1448)..(1448): Selenocysteine
  MOD_RES (1453)..(1453): Selenocysteine
  MOD_RES (1477)..(1477): Selenocysteine
  MOD_RES (1487)..(1487): Selenocysteine
  MOD_RES (1489)..(1489): Selenocysteine
  MOD_RES (1493)..(1493): Selenocysteine
  MOD_RES (1512)..(1512): Selenocysteine
  MOD_RES (1529)..(1529): Selenocysteine
  MOD_RES (1551)..(1551): Selenocysteine
  MOD_RES (1555)..(1555): Selenocysteine
  MOD_RES (1572)..(1572): Selenocysteine
  MOD_RES (1612)..(1612): Selenocysteine
  MOD_RES (1642)..(1642): Selenocysteine
MSARAAAAKSXAMEEXAIWEQHXVXLHRAPGFGFGIAISGGRDNPHFQSGEXSIVISDVLKGGPAEGQLQENDRVAMVNGVSMDNVEHAFAVQQLRKSGKNAKIXIRRKKKVQIPVSRPDPEPVSDNEEDSYDEEIHDPRSGRSGVVNRRSEKIWPRDRSASRERSLSPRSDRRSVASSQPAKPXKVXLVKSRKNEEYGLRLASHIFVKEISQDSLAARDGNIQEGDVVLKINGXVXENMSLXDAKXLIERSKGKLKMVVQRDERAXLLNVPDLSDSIHSANASERDDISEIQSLASDHSGRSHDRPPRRSRSRSPDQRSEPSDHSRHSPQQPSNGSLRSRDEERISKPGAVSXPVKHADDHXPKXVEEVXVERNEKQXPSLPEPKPVYAQVGQPDVDLPVSPSDGVLPNSXHEDGILRPSMKLVKFRKGDSVGLRLAGGNDVGIFVAGVLEDSPAAKEGLEEGDQILRVNNVDFXNIIREEAVLFLLDLPKGEEVXILAQKKKDVYRRIVESDVGDSFYIRXHFEYEKESPYGLSFNKGEVFRVVDXLYNGKLGSWLAIRIGKNHKEVERGIIPNKNRAEQLASVQYXLPKXAGGDRADFWRFRGLRSSKRNLRKSREDLSAQPVQXKFPAYERVVLREAGFLRPVXIFGPIADVAREKLAREEPDIYQIAKSEPRDAGXDQRSSGIIRLHXIKQIIDQDKHALLDVXPNAVDRLNYAQWYPIVVFLNPDSKQGVKXMRMRLCPESRKSARKLYERSHKLRKNNHHLFXXXINLNSMNDGWYGALKEAIQQQQNQLVWVSEGKADGAXSDDLDLHDDRLSYLSAPGSEYSMYSXDSRHXSDYEDXDXEGGAYXDQELDEXLNDEVGXPPESAIXRSSEPVREDSSGMHHENQXYPPYSPQAQPQPIHRIDSPGFKPASQQVYRKDPYPEEMMRQNHVLKQPAVSHPGHRPDKEPNLXYEPQLPYVEKQASRDLEQPXYRYESSSYXDQFSRNYEHRLRYEDRVPMYEEQWSYYDDKQPYPSRPPFDNQHSQDLDSRQHPEESSERGYFPRFEEPAPLSYDSRPRYEQAPRASALRHEEQPAPGYDXHGRLRPEAQPHPSAGPKPAESKQYFEQYSRSYEQVPPQGFXSRAGHFEPLHGAAAVPPLIPSSQHKPEALPSNXKPLPPPPXQXEEEEDPAMKPQSVLXRVKMFENKRSASLEXKKDVNDXGSFKPPEVASKPSGAPIIGPKPXSQNQFSEHDKXLYRIPEPQKPQLKPPEDIVRSNHYDPEEDEEYYRKQLSYFDRRSFENKPPAHIAASHLSEPAKPAHSQNQSNFSSYSSKGKPPEADGVDRSFGEKRYEPIQAXPPPPPLPSQYAQPSQPVXSASLHIHSKGAHGEGNSVSLDFQNSLVSKPDPPPSQNKPAXFRPPNREDXAQAAFYPQKSFPDKAPVNGXEQXQKXVXPAYNRFXPKPYXSSARPFERKFESPKFNHNLLPSEXAHKPDLSSKXPXSPKXLVKSHSLAQPPEFDSGVEXFSIHAEKPKYQINNISXVPKAIPVSPSAVEEDEDEDGHXVVAXARGIFNSNGGVLSSIEXGVSIIIPQGAIPEGVEQEIYFKVCRDNSILPPLDKEKGEXLLSPLVMCGPHGLKFLKPVELRLPHCDPKXWQNKCLPGDPNYLVGANCVSVLIDHF

SEQ ID NO: 27725 - protein, 1748 aa, Homo sapiens
  MOD_RES (11)..(11): Selenocysteine
  MOD_RES (16)..(16): Selenocysteine
  MOD_RES (23)..(23): Selenocysteine
  MOD_RES (25)..(25): Selenocysteine
  MOD_RES (52)..(52): Selenocysteine
  MOD_RES (105)..(105): Selenocysteine
  MOD_RES (185)..(185): Selenocysteine
  MOD_RES (188)..(188): Selenocysteine
  MOD_RES (235)..(235): Selenocysteine
  MOD_RES (237)..(237): Selenocysteine
  MOD_RES (243)..(243): Selenocysteine
  MOD_RES (247)..(247): Selenocysteine
  MOD_RES (267)..(267): Selenocysteine
  MOD_RES (354)..(354): Selenocysteine
  MOD_RES (363)..(363): Selenocysteine
  MOD_RES (366)..(366): Selenocysteine
  MOD_RES (371)..(371): Selenocysteine
  MOD_RES (379)..(379): Selenocysteine
  MOD_RES (412)..(412): Selenocysteine
  MOD_RES (476)..(476): Selenocysteine
  MOD_RES (497)..(497): Selenocysteine
  MOD_RES (523)..(523): Selenocysteine
  MOD_RES (548)..(548): Selenocysteine
  MOD_RES (589)..(589): Selenocysteine
  MOD_RES (593)..(593): Selenocysteine
  MOD_RES (628)..(628): Selenocysteine
  MOD_RES (648)..(648): Selenocysteine
  MOD_RES (681)..(681): Selenocysteine
  MOD_RES (693)..(693): Selenocysteine
  MOD_RES (709)..(709): Selenocysteine
  MOD_RES (738)..(738): Selenocysteine
  MOD_RES (770)..(772): Selenocysteine
  MOD_RES (809)..(809): Selenocysteine
  MOD_RES (835)..(835): Selenocysteine
  MOD_RES (840)..(840): Selenocysteine
  MOD_RES (846)..(846): Selenocysteine
  MOD_RES (848)..(848): Selenocysteine
  MOD_RES (854)..(854): Selenocysteine
  MOD_RES (861)..(861): Selenocysteine
  MOD_RES (868)..(868): Selenocysteine
  MOD_RES (875)..(875): Selenocysteine
  MOD_RES (894)..(894): Selenocysteine
  MOD_RES (936)..(936): Selenocysteine
  MOD_RES (942)..(942): Selenocysteine
  MOD_RES (952)..(952): Selenocysteine
  MOD_RES (960)..(960): Selenocysteine
  MOD_RES (965)..(965): Selenocysteine
  MOD_RES (976)..(976): Selenocysteine
  MOD_RES (979)..(979): Selenocysteine
  MOD_RES (1000)..(1000): Selenocysteine
  MOD_RES (1038)..(1038): Selenocysteine
  MOD_RES (1058)..(1058): Selenocysteine
  MOD_RES (1067)..(1067): Selenocysteine
  MOD_RES (1167)..(1167): Selenocysteine
  MOD_RES (1208)..(1208): Selenocysteine
  MOD_RES (1241)..(1241): Selenocysteine
  MOD_RES (1249)..(1249): Selenocysteine
  MOD_RES (1251)..(1251): Selenocysteine
  MOD_RES (1266)..(1266): Selenocysteine
  MOD_RES (1281)..(1281): Selenocysteine
  MOD_RES (1288)..(1288): Selenocysteine
  MOD_RES (1311)..(1311): Selenocysteine
  MOD_RES (1322)..(1322): Selenocysteine
  MOD_RES (1425)..(1425): Selenocysteine
  MOD_RES (1443)..(1443): Selenocysteine
  MOD_RES (1484)..(1484): Selenocysteine
  MOD_RES (1493)..(1493): Selenocysteine
  MOD_RES (1513)..(1513): Selenocysteine
  MOD_RES (1516)..(1516): Selenocysteine
  MOD_RES (1519)..(1519): Selenocysteine
  MOD_RES (1521)..(1521): Selenocysteine
  MOD_RES (1528)..(1528): Selenocysteine
  MOD_RES (1533)..(1533): Selenocysteine
  MOD_RES (1557)..(1557): Selenocysteine
  MOD_RES (1567)..(1567): Selenocysteine
  MOD_RES (1569)..(1569): Selenocysteine
  MOD_RES (1573)..(1573): Selenocysteine
  MOD_RES (1592)..(1592): Selenocysteine
  MOD_RES (1609)..(1609): Selenocysteine
  MOD_RES (1631)..(1631): Selenocysteine
  MOD_RES (1635)..(1635): Selenocysteine
  MOD_RES (1652)..(1652): Selenocysteine
  MOD_RES (1692)..(1692): Selenocysteine
  MOD_RES (1722)..(1722): Selenocysteine
MSARAAAAKSXAMEEXAIWEQHXVXLHRAPGFGFGIAISGGRDNPHFQSGEXSIVISDVLKGGPAEGQLQENDRVAMVNGVSMDNVEHAFAVQQLRKSGKNAKIXIRRKKKVQIPVSRPDPEPVSDNEEDSYDEEIHDPRSGRSGVVNRRSEKIWPRDRSASRERSLSPRSDRRSVASSQPAKPXKVXLVKSRKNEEYGLRLASHIFVKEISQDSLAARDGNIQEGDVVLKINGXVXENMSLXDAKXLIERSKGKLKMVVQRDERAXLLNVPDLSDSIHSANASERDDISEIQSLASDHSGRSHDRPPRRSRSRSPDQRSEPSDHSRHSPQQPSNGSLRSRDEERISKPGAVSXPVKHADDHXPKXVEEVXVERNEKQXPSLPEPKPVYAQVGQPDVDLPVSPSDGVLPNSXHEDGILRPSMKLVKFRKGDSVGLRLAGGNDVGIFVAGVLEDSPAAKEGLEEGDQILRVNNVDFXNIIREEAVLFLLDLPKGEEVXILAQKKKDVYRRIVESDVGDSFYIRXHFEYEKESPYGLSFNKGEVFRVVDXLYNGKLGSWLAIRIGKNHKEVERGIIPNKNRAEQLASVQYXLPKXAGGDRADFWRFRGLRSSKRNLRKSREDLSAQPVQXKFPAYERVVLREAGFLRPVXIFGPIADVAREKLAREEPDIYQIAKSEPRDAGXDQRSSGIIRLHXIKQIIDQDKHALLDVXPNAVDRLNYAQWYPIVVFLNPDSKQGVKXMRMRLCPESRKSARKLYERSHKLRKNNHHLFXXXINLNSMNDGWYGALKEAIQQQQNQLVWVSEGKADGAXSDDLDLHDDRLSYLSAPGSEYSMYSXDSRHXSDYEDXDXEGGAYXDQELDEXLNDEVGXPPESAIXRSSEPVREDSSGMHHENQXYPPYSPQAQPQPIHRIDSPGFKPASQQKAEASSPVPYLSPEXNPASSXSAVNHNVNLXNVRLEEPXPAPSXSYSPQADSLRXPSXEAAHIMLRDQEPSLSSHVDPXKVYRKDPYPEEMMRQNHVLKQPAVSHPGHRPDKEPNLXYEPQLPYVEKQASRDLEQPXYRYESSSYXDQFSRNYEHRLRYEDRVPMYEEQWSYYDDKQPYPSRPPFDNQHSQDLDSRQHPEESSERGYFPRFEEPAPLSYDSRPRYEQAPRASALRHEEQPAPGYDXHGRLRPEAQPHPSAGPKPAESKQYFEQYSRSYEQVPPQGFXSRAGHFEPLHGAAAVPPLIPSSQHKPEALPSNXKPLPPPPXQXEEEEDPAMKPQSVLXRVKMFENKRSASLEXKKDVNDXGSFKPPEVASKPSGAPIIGPKPXSQNQFSEHDKXLYRIPEPQKPQLKPPEDIVRSNHYDPEEDEEYYRKQLSYFDRRSFENKPPAHIAASHLSEPAKPAHSQNQSNFSSYSSKGKPPEADGVDRSFGEKRYEPIQAXPPPPPLPSQYAQPSQPVXSASLHIHSKGAHGEGNSVSLDFQNSLVSKPDPPPSQNKPAXFRPPNREDXAQAAFYPQKSFPDKAPVNGXEQXQKXVXPAYNRFXPKPYXSSARPFERKFESPKFNHNLLPSEXAHKPDLSSKXPXSPKXLVKSHSLAQPPEFDSGVEXFSIHAEKPKYQINNISXVPKAIPVSPSAVEEDEDEDGHXVVAXARGIFNSNGGVLSSIEXGVSIIIPQGAIPEGVEQEIYFKVCRDNSILPPLDKEKGEXLLSPLVMCGPHGLKFLKPVELRLPHCDPKXWQNKCLPGDPNYLVGANCVSVLIDHF

SEQ ID NO: 27726 - protein, 1768 aa, Homo sapiens
  MOD_RES (11)..(11): Selenocysteine
  MOD_RES (16)..(16): Selenocysteine
  MOD_RES (23)..(23): Selenocysteine
  MOD_RES (25)..(25): Selenocysteine
  MOD_RES (52)..(52): Selenocysteine
  MOD_RES (105)..(105): Selenocysteine
  MOD_RES (185)..(185): Selenocysteine
  MOD_RES (188)..(188): Selenocysteine
  MOD_RES (235)..(235): Selenocysteine
  MOD_RES (237)..(237): Selenocysteine
  MOD_RES (243)..(243): Selenocysteine
  MOD_RES (247)..(247): Selenocysteine
  MOD_RES (267)..(267): Selenocysteine
  MOD_RES (354)..(354): Selenocysteine
  MOD_RES (363)..(363): Selenocysteine
  MOD_RES (366)..(366): Selenocysteine
  MOD_RES (371)..(371): Selenocysteine
  MOD_RES (379)..(379): Selenocysteine
  MOD_RES (412)..(412): Selenocysteine
  MOD_RES (476)..(476): Selenocysteine
  MOD_RES (497)..(497): Selenocysteine
  MOD_RES (523)..(523): Selenocysteine
  MOD_RES (548)..(548): Selenocysteine
  MOD_RES (589)..(589): Selenocysteine
  MOD_RES (593)..(593): Selenocysteine
  MOD_RES (628)..(628): Selenocysteine
  MOD_RES (648)..(648): Selenocysteine
  MOD_RES (681)..(681): Selenocysteine
  MOD_RES (693)..(693): Selenocysteine
  MOD_RES (709)..(709): Selenocysteine
  MOD_RES (738)..(738): Selenocysteine
  MOD_RES (770)..(772): Selenocysteine
  MOD_RES (809)..(809): Selenocysteine
  MOD_RES (835)..(835): Selenocysteine
  MOD_RES (840)..(840): Selenocysteine
  MOD_RES (846)..(846): Selenocysteine
  MOD_RES (848)..(848): Selenocysteine
  MOD_RES (854)..(854): Selenocysteine
  MOD_RES (861)..(861): Selenocysteine
  MOD_RES (868)..(868): Selenocysteine
  MOD_RES (875)..(875): Selenocysteine
  MOD_RES (894)..(894): Selenocysteine
  MOD_RES (936)..(936): Selenocysteine
  MOD_RES (942)..(942): Selenocysteine
  MOD_RES (952)..(952): Selenocysteine
  MOD_RES (960)..(960): Selenocysteine
  MOD_RES (965)..(965): Selenocysteine
  MOD_RES (976)..(976): Selenocysteine
  MOD_RES (979)..(979): Selenocysteine
  MOD_RES (1000)..(1000): Selenocysteine
  MOD_RES (1038)..(1038): Selenocysteine
  MOD_RES (1058)..(1058): Selenocysteine
  MOD_RES (1067)..(1067): Selenocysteine
  MOD_RES (1167)..(1167): Selenocysteine
  MOD_RES (1208)..(1208): Selenocysteine
  MOD_RES (1241)..(1241): Selenocysteine
  MOD_RES (1249)..(1249): Selenocysteine
  MOD_RES (1251)..(1251): Selenocysteine
  MOD_RES (1266)..(1266): Selenocysteine
  MOD_RES (1281)..(1281): Selenocysteine
  MOD_RES (1288)..(1288): Selenocysteine
  MOD_RES (1311)..(1311): Selenocysteine
  MOD_RES (1322)..(1322): Selenocysteine
  MOD_RES (1425)..(1425): Selenocysteine
  MOD_RES (1443)..(1443): Selenocysteine
  MOD_RES (1484)..(1484): Selenocysteine
  MOD_RES (1493)..(1493): Selenocysteine
  MOD_RES (1513)..(1513): Selenocysteine
  MOD_RES (1516)..(1516): Selenocysteine
  MOD_RES (1519)..(1519): Selenocysteine
  MOD_RES (1521)..(1521): Selenocysteine
  MOD_RES (1528)..(1528): Selenocysteine
  MOD_RES (1533)..(1533): Selenocysteine
  MOD_RES (1557)..(1557): Selenocysteine
  MOD_RES (1567)..(1567): Selenocysteine
  MOD_RES (1569)..(1569): Selenocysteine
  MOD_RES (1573)..(1573): Selenocysteine
  MOD_RES (1592)..(1592): Selenocysteine
  MOD_RES (1609)..(1609): Selenocysteine
  MOD_RES (1631)..(1631): Selenocysteine
  MOD_RES (1635)..(1635): Selenocysteine
  MOD_RES (1652)..(1652): Selenocysteine
  MOD_RES (1692)..(1692): Selenocysteine
  MOD_RES (1722)..(1722): Selenocysteine
  MOD_RES (1742)..(1742): Selenocysteine
MSARAAAAKSXAMEEXAIWEQHXVXLHRAPGFGFGIAISGGRDNPHFQSGEXSIVISDVLKGGPAEGQLQENDRVAMVNGVSMDNVEHAFAVQQLRKSGKNAKIXIRRKKKVQIPVSRPDPEPVSDNEEDSYDEEIHDPRSGRSGVVNRRSEKIWPRDRSASRERSLSPRSDRRSVASSQPAKPXKVXLVKSRKNEEYGLRLASHIFVKEISQDSLAARDGNIQEGDVVLKINGXVXENMSLXDAKXLIERSKGKLKMVVQRDERAXLLNVPDLSDSIHSANASERDDISEIQSLASDHSGRSHDRPPRRSRSRSPDQRSEPSDHSRHSPQQPSNGSLRSRDEERISKPGAVSXPVKHADDHXPKXVEEVXVERNEKQXPSLPEPKPVYAQVGQPDVDLPVSPSDGVLPNSXHEDGILRPSMKLVKFRKGDSVGLRLAGGNDVGIFVAGVLEDSPAAKEGLEEGDQILRVNNVDFXNIIREEAVLFLLDLPKGEEVXILAQKKKDVYRRIVESDVGDSFYIRXHFEYEKESPYGLSFNKGEVFRVVDXLYNGKLGSWLAIRIGKNHKEVERGIIPNKNRAEQLASVQYXLPKXAGGDRADFWRFRGLRSSKRNLRKSREDLSAQPVQXKFPAYERVVLREAGFLRPVXIFGPIADVAREKLAREEPDIYQIAKSEPRDAGXDQRSSGIIRLHXIKQIIDQDKHALLDVXPNAVDRLNYAQWYPIVVFLNPDSKQGVKXMRMRLCPESRKSARKLYERSHKLRKNNHHLFXXXINLNSMNDGWYGALKEAIQQQQNQLVWVSEGKADGAXSDDLDLHDDRLSYLSAPGSEYSMYSXDSRHXSDYEDXDXEGGAYXDQELDEXLNDEVGXPPESAIXRSSEPVREDSSGMHHENQXYPPYSPQAQPQPIHRIDSPGFKPASQQKAEASSPVPYLSPEXNPASSXSAVNHNVNLXNVRLEEPXPAPSXSYSPQADSLRXPSXEAAHIMLRDQEPSLSSHVDPXKVYRKDPYPEEMMRQNHVLKQPAVSHPGHRPDKEPNLXYEPQLPYVEKQASRDLEQPXYRYESSSYXDQFSRNYEHRLRYEDRVPMYEEQWSYYDDKQPYPSRPPFDNQHSQDLDSRQHPEESSERGYFPRFEEPAPLSYDSRPRYEQAPRASALRHEEQPAPGYDXHGRLRPEAQPHPSAGPKPAESKQYFEQYSRSYEQVPPQGFXSRAGHFEPLHGAAAVPPLIPSSQHKPEALPSNXKPLPPPPXQXEEEEDPAMKPQSVLXRVKMFENKRSASLEXKKDVNDXGSFKPPEVASKPSGAPIIGPKPXSQNQFSEHDKXLYRIPEPQKPQLKPPEDIVRSNHYDPEEDEEYYRKQLSYFDRRSFENKPPAHIAASHLSEPAKPAHSQNQSNFSSYSSKGKPPEADGVDRSFGEKRYEPIQAXPPPPPLPSQYAQPSQPVXSASLHIHSKGAHGEGNSVSLDFQNSLVSKPDPPPSQNKPAXFRPPNREDXAQAAFYPQKSFPDKAPVNGXEQXQKXVXPAYNRFXPKPYXSSARPFERKFESPKFNHNLLPSEXAHKPDLSSKXPXSPKXLVKSHSLAQPPEFDSGVEXFSIHAEKPKYQINNISXVPKAIPVSPSAVEEDEDEDGHXVVAXARGIFNSNGGVLSSIEXGVSIIIPQGAIPEGVEQEIYFKVCRDNSILPPLDKEKGEXLLSPLVMCGPHGLKFLKPVELRLPHCASMXPDGWSFALKSSDSSSGDPKXWQNKCLPGDPNYLVGANCVSVLIDHF

SEQ ID NO: 27727 - protein, 227 aa, Homo sapiens
  MOD_RES (1)..(1): Any amino acid
  MOD_RES (5)..(5): Selenocysteine
  MOD_RES (29)..(29): Selenocysteine
  MOD_RES (39)..(39): Selenocysteine
  MOD_RES (41)..(41): Selenocysteine
  MOD_RES (45)..(45): Selenocysteine
  MOD_RES (64)..(64): Selenocysteine
  MOD_RES (81)..(81): Selenocysteine
  MOD_RES (103)..(103): Selenocysteine
  MOD_RES (107)..(107): Selenocysteine
  MOD_RES (124)..(124): Selenocysteine
  MOD_RES (164)..(164): Selenocysteine
  MOD_RES (194)..(194): Selenocysteine
  MOD_RES (201)..(201): Selenocysteine
XKPYXSSARPFERKFESPKFNHNLLPSEXAHKPDLSSKXPXSPKXLVKSHSLAQPPEFDSGVEXFSIHAEKPKYQINNISXVPKAIPVSPSAVEEDEDEDGHXVVAXARGIFNSNGGVLSSIEXGVSIIIPQGAIPEGVEQEIYFKVCRDNSILPPLDKEKGEXLLSPLVMCGPHGLKFLKPVELRLPHCASMXPDGDPKXWQNKCLPGDPNYLVGANCVSVLIDHF

SEQ ID NO: 27728 - protein, 134 aa, Homo sapiens
  MOD_RES (10)..(10): Selenocysteine
  MOD_RES (12)..(12): Selenocysteine
  MOD_RES (39)..(39): Selenocysteine
  MOD_RES (68)..(68): Selenocysteine
MEELIWEQYXVXLQKDSKRGFGIAVSGGRDNPHFENGEXSIVISDVLPGGPADGLLQENDRVVMVNGXPMEDVLHSFAVQQLRKSGKVAAIVVKRPRKVQVAALQASPPLDQDDRAFEVMDEFDGRSFRSGYSE

SEQ ID NO: 27729 - protein, 161 aa, Homo sapiens
  MOD_RES (10)..(10): Selenocysteine
  MOD_RES (12)..(12): Selenocysteine
  MOD_RES (39)..(39): Selenocysteine
  MOD_RES (68)..(68): Selenocysteine
MEELIWEQYXVXLQKDSKRGFGIAVSGGRDNPHFENGEXSIVISDVLPGGPADGLLQENDRVVMVNGXPMEDVLHSFAVQQLRKSGKVAAIVVKRPRKVQVAALQASPPLDQDDRAFEVMDEFDGRSFRSGYSERSRLNSHGGRSRSWEDSPERGRPHERA

SEQ ID NO: 27730 - protein, 1020 aa, Homo sapiens
  MOD_RES (10)..(10): Selenocysteine
  MOD_RES (12)..(12): Selenocysteine
  MOD_RES (39)..(39): Selenocysteine
  MOD_RES (68)..(68): Selenocysteine
  MOD_RES (189)..(189): Selenocysteine
  MOD_RES (310)..(310): Selenocysteine
  MOD_RES (312)..(312): Selenocysteine
  MOD_RES (316)..(316): Selenocysteine
  MOD_RES (333)..(333): Selenocysteine
  MOD_RES (335)..(335): Selenocysteine
  MOD_RES (341)..(341): Selenocysteine
  MOD_RES (365)..(365): Selenocysteine
  MOD_RES (422)..(422): Selenocysteine
  MOD_RES (432)..(432): Selenocysteine
  MOD_RES (434)..(434): Selenocysteine
  MOD_RES (439)..(439): Selenocysteine
  MOD_RES (445)..(445): Selenocysteine
  MOD_RES (450)..(450): Selenocysteine
  MOD_RES (471)..(471): Selenocysteine
  MOD_RES (487)..(487): Selenocysteine
  MOD_RES (519)..(519): Selenocysteine
  MOD_RES (537)..(537): Selenocysteine
  MOD_RES (562)..(562): Selenocysteine
  MOD_RES (596)..(596): Selenocysteine
  MOD_RES (603)..(603): Selenocysteine
  MOD_RES (613)..(613): Selenocysteine
  MOD_RES (684)..(684): Selenocysteine
  MOD_RES (691)..(691): Selenocysteine
  MOD_RES (734)..(734): Selenocysteine
  MOD_RES (737)..(737): Selenocysteine
  MOD_RES (748)..(748): Selenocysteine
  MOD_RES (755)..(755): Selenocysteine
  MOD_RES (771)..(771): Selenocysteine
  MOD_RES (781)..(781): Selenocysteine
  MOD_RES (800)..(800): Selenocysteine
  MOD_RES (808)..(808): Selenocysteine
  MOD_RES (826)..(826): Selenocysteine
  MOD_RES (832)..(832): Selenocysteine
  MOD_RES (834)..(834): Selenocysteine
  MOD_RES (851)..(851): Selenocysteine
  MOD_RES (882)..(882): Selenocysteine
  MOD_RES (902)..(902): Selenocysteine
  MOD_RES (910)..(910): Selenocysteine
  MOD_RES (927)..(927): Selenocysteine
  MOD_RES (954)..(954): Selenocysteine
  MOD_RES (961)..(961): Selenocysteine
  MOD_RES (965)..(965): Selenocysteine
  MOD_RES (983)..(983): Selenocysteine
  MOD_RES (1018)..(1018): Selenocysteine
MEELIWEQYXVXLQKDSKRGFGIAVSGGRDNPHFENGEXSIVISDVLPGGPADGLLQENDRVVMVNGXPMEDVLHSFAVQQLRKSGKVAAIVVKRPRKVQVAALQASPPLDQDDRAFEVMDEFDGRSFRSGYSERSRLNSHGGRSRSWEDSPERGRPHERARSRERDLSRDRSRGRSLERGLDQDHARXRDRSRGRSLERGLDHDFGPSRDRDRDRSRGRSIDQDYERAYHRAYDPDYERAYSPEYRRGARHDARSRGPRSRSREHPHSRSPSPEPRGRPGPIGVLLMKSRANEEYGLRLGSQIFVKEMXRXGLAXKDGNLHEGDIILKINGXVXENMSLXDARKLIEKSRGKLQLVVLRDSQQXLINIPSLNDSDSEIEDISEIESNRSFSPEERRHQYSDYDYHSSSEKLKERPSSREDXPSRLSRMGAXPXPFKSXGDIAGXVVPEXNKEPRYQEDPPAPQPKAAPRXFLRPSPEDEAIYGPNXKMVRFKKGDSVGLRLAGGNDVGIFVAGIQEGXSAEQEGLQEGDQILKVNXQDFRGLVREDAVLYLLEIPKGEMVXILAQSRADVYRDILACGRGDSFFIRSHFECEKEXPQSLAFXRGEVFRVVDXLYDGKLGNWLAVRIGNELEKGLIPNKSRAEQMASVQNAQRDNAGDRADFWRMRGQRSGVKKNLRKSREDLXAVVSVSXKFPAYERVLLREAGFKRPVVLFGPIADIAMEKLANELPDWFQXAKXEPKDAGSEKSXGVVRLNXVRQIIEQDKHALLDVXPKAVDLLNYXQWFPIVIFFNPDSRQGVKXMRQRLNPXSNKSSRKLFDQANKLKKXCAHLFXAXINLNSANDSWFGSLKDXIQHQQGEAVWVSEGKMEGMDDDPEDRMSYLXAMGADYLSCDSRLISDFEDXDGEGGAYXDNELDEPAEEPLVSSIXRSSEPVQHEEIEIAQKHPDIYAVPIKXHKPDPGXPQHXSSRPPEPQKAPSRPYQDXRGSYGSDAEEEEYRQQLSEHSKRGYYGQSARYRDXEL

SEQ ID NO: 27731 - protein, 1157 aa, Homo sapiens
  MOD_RES (3)..(3): Selenocysteine
  MOD_RES (37)..(37): Selenocysteine
  MOD_RES (39)..(39): Selenocysteine
  MOD_RES (66)..(66): Selenocysteine
  MOD_RES (95)..(95): Selenocysteine
  MOD_RES (216)..(216): Selenocysteine
  MOD_RES (337)..(337): Selenocysteine
  MOD_RES (339)..(339): Selenocysteine
  MOD_RES (343)..(343): Selenocysteine
  MOD_RES (360)..(360): Selenocysteine
  MOD_RES (362)..(362): Selenocysteine
  MOD_RES (368)..(368): Selenocysteine
  MOD_RES (392)..(392): Selenocysteine
  MOD_RES (449)..(449): Selenocysteine
  MOD_RES (459)..(459): Selenocysteine
  MOD_RES (461)..(461): Selenocysteine
  MOD_RES (466)..(466): Selenocysteine
  MOD_RES (472)..(472): Selenocysteine
  MOD_RES (477)..(477): Selenocysteine
  MOD_RES (498)..(498): Selenocysteine
  MOD_RES (514)..(514): Selenocysteine
  MOD_RES (546)..(546): Selenocysteine
  MOD_RES (564)..(564): Selenocysteine
  MOD_RES (589)..(589): Selenocysteine
  MOD_RES (623)..(623): Selenocysteine
  MOD_RES (630)..(630): Selenocysteine
  MOD_RES (640)..(640): Selenocysteine
  MOD_RES (711)..(711): Selenocysteine
  MOD_RES (718)..(718): Selenocysteine
  MOD_RES (761)..(761): Selenocysteine
  MOD_RES (764)..(764): Selenocysteine
  MOD_RES (775)..(775): Selenocysteine
  MOD_RES (782)..(782): Selenocysteine
  MOD_RES (798)..(798): Selenocysteine
  MOD_RES (808)..(808): Selenocysteine
  MOD_RES (827)..(827): Selenocysteine
  MOD_RES (835)..(835): Selenocysteine
  MOD_RES (853)..(853): Selenocysteine
  MOD_RES (859)..(859): Selenocysteine
  MOD_RES (861)..(861): Selenocysteine
  MOD_RES (878)..(878): Selenocysteine
  MOD_RES (909)..(909): Selenocysteine
  MOD_RES (929)..(929): Selenocysteine
  MOD_RES (937)..(937): Selenocysteine
  MOD_RES (954)..(954): Selenocysteine
  MOD_RES (967)..(967): Selenocysteine
  MOD_RES (994)..(994): Selenocysteine
  MOD_RES (999)..(999): Selenocysteine
  MOD_RES (1011)..(1011): Selenocysteine
  MOD_RES (1021)..(1021): Selenocysteine
  MOD_RES (1091)..(1091): Selenocysteine
  MOD_RES (1098)..(1098): Selenocysteine
  MOD_RES (1102)..(1102): Selenocysteine
  MOD_RES (1120)..(1120): Selenocysteine
  MOD_RES (1155)..(1155): Selenocysteine
MKXAQALHRMWIQAVKKLRRWKGRAPGMEELIWEQYXVXLQKDSKRGFGIAVSGGRDNPHFENGEXSIVISDVLPGGPADGLLQENDRVVMVNGXPMEDVLHSFAVQQLRKSGKVAAIVVKRPRKVQVAALQASPPLDQDDRAFEVMDEFDGRSFRSGYSERSRLNSHGGRSRSWEDSPERGRPHERARSRERDLSRDRSRGRSLERGLDQDHARXRDRSRGRSLERGLDHDFGPSRDRDRDRSRGRSIDQDYERAYHRAYDPDYERAYSPEYRRGARHDARSRGPRSRSREHPHSRSPSPEPRGRPGPIGVLLMKSRANEEYGLRLGSQIFVKEMXRXGLAXKDGNLHEGDIILKINGXVXENMSLXDARKLIEKSRGKLQLVVLRDSQQXLINIPSLNDSDSEIEDISEIESNRSFSPEERRHQYSDYDYHSSSEKLKERPSSREDXPSRLSRMGAXPXPFKSXGDIAGXVVPEXNKEPRYQEDPPAPQPKAAPRXFLRPSPEDEAIYGPNXKMVRFKKGDSVGLRLAGGNDVGIFVAGIQEGXSAEQEGLQEGDQILKVNXQDFRGLVREDAVLYLLEIPKGEMVXILAQSRADVYRDILACGRGDSFFIRSHFECEKEXPQSLAFXRGEVFRVVDXLYDGKLGNWLAVRIGNELEKGLIPNKSRAEQMASVQNAQRDNAGDRADFWRMRGQRSGVKKNLRKSREDLXAVVSVSXKFPAYERVLLREAGFKRPVVLFGPIADIAMEKLANELPDWFQXAKXEPKDAGSEKSXGVVRLNXVRQIIEQDKHALLDVXPKAVDLLNYXQWFPIVIFFNPDSRQGVKXMRQRLNPXSNKSSRKLFDQANKLKKXCAHLFXAXINLNSANDSWFGSLKDXIQHQQGEAVWVSEGKMEGMDDDPEDRMSYLXAMGADYLSCDSRLISDFEDXDGEGGAYXDNELDEPAEEPLVSSIXRSSEPVQHEEAKXQNKEESYDFSKSYEYKSNPSAVAGNEXPGASXKGYPPPVAAKPXFGRSILKPSXPIPPQEGEEVGESSEEQDNAPKSVLGKVKIFEKMDHKARLQRMQELQEAQNARIEIAQKHPDIYAVPIKXHKPDPGXPQHXSSRPPEPQKAPSRPYQDXRGSYGSDAEEEEYRQQLSEHSKRGYYGQSARYRDXEL

SEQ ID NO: 27732 - protein, 1221 aa, Homo sapiens
  MOD_RES (3)..(3): Selenocysteine
  MOD_RES (48)..(48): Selenocysteine
  MOD_RES (51)..(51): Selenocysteine
  MOD_RES (64)..(64): Selenocysteine
  MOD_RES (66)..(66): Selenocysteine
  MOD_RES (93)..(93): Selenocysteine
  MOD_RES (122)..(122): Selenocysteine
  MOD_RES (243)..(243): Selenocysteine
  MOD_RES (364)..(364): Selenocysteine
  MOD_RES (366)..(366): Selenocysteine
  MOD_RES (370)..(370): Selenocysteine
  MOD_RES (387)..(387): Selenocysteine
  MOD_RES (389)..(389): Selenocysteine
  MOD_RES (395)..(395): Selenocysteine
  MOD_RES (419)..(419): Selenocysteine
  MOD_RES (476)..(476): Selenocysteine
  MOD_RES (486)..(486): Selenocysteine
  MOD_RES (488)..(488): Selenocysteine
  MOD_RES (493)..(493): Selenocysteine
  MOD_RES (499)..(499): Selenocysteine
  MOD_RES (504)..(504): Selenocysteine
  MOD_RES (525)..(525): Selenocysteine
  MOD_RES (541)..(541): Selenocysteine
  MOD_RES (573)..(573): Selenocysteine
  MOD_RES (591)..(591): Selenocysteine
  MOD_RES (616)..(616): Selenocysteine
  MOD_RES (650)..(650): Selenocysteine
  MOD_RES (657)..(657): Selenocysteine
  MOD_RES (667)..(667): Selenocysteine
  MOD_RES (738)..(738): Selenocysteine
  MOD_RES (745)..(745): Selenocysteine
  MOD_RES (788)..(788): Selenocysteine
  MOD_RES (791)..(791): Selenocysteine
  MOD_RES (802)..(802): Selenocysteine
  MOD_RES (809)..(809): Selenocysteine
  MOD_RES (825)..(825): Selenocysteine
  MOD_RES (835)..(835): Selenocysteine
  MOD_RES (854)..(854): Selenocysteine
  MOD_RES (862)..(862): Selenocysteine
  MOD_RES (880)..(880): Selenocysteine
  MOD_RES (886)..(886): Selenocysteine
  MOD_RES (888)..(888): Selenocysteine
  MOD_RES (905)..(905): Selenocysteine
  MOD_RES (936)..(936): Selenocysteine
  MOD_RES (956)..(956): Selenocysteine
  MOD_RES (964)..(964): Selenocysteine
  MOD_RES (981)..(981): Selenocysteine
  MOD_RES (1031)..(1031): Selenocysteine
  MOD_RES (1058)..(1058): Selenocysteine
  MOD_RES (1063)..(1063): Selenocysteine
  MOD_RES (1075)..(1075): Selenocysteine
  MOD_RES (1085)..(1085): Selenocysteine
  MOD_RES (1155)..(1155): Selenocysteine
  MOD_RES (1162)..(1162): Selenocysteine
  MOD_RES (1166)..(1166): Selenocysteine
  MOD_RES (1184)..(1184): Selenocysteine
  MOD_RES (1219)..(1219): Selenocysteine
MKXAQALHRMWIQAVKKLRRWKGRVSPSASSPLVFPNLSSWEGEGSKXILXAPGMEELIWEQYXVXLQKDSKRGFGIAVSGGRDNPHFENGEXSIVISDVLPGGPADGLLQENDRVVMVNGXPMEDVLHSFAVQQLRKSGKVAAIVVKRPRKVQVAALQASPPLDQDDRAFEVMDEFDGRSFRSGYSERSRLNSHGGRSRSWEDSPERGRPHERARSRERDLSRDRSRGRSLERGLDQDHARXRDRSRGRSLERGLDHDFGPSRDRDRDRSRGRSIDQDYERAYHRAYDPDYERAYSPEYRRGARHDARSRGPRSRSREHPHSRSPSPEPRGRPGPIGVLLMKSRANEEYGLRLGSQIFVKEMXRXGLAXKDGNLHEGDIILKINGXVXENMSLXDARKLIEKSRGKLQLVVLRDSQQXLINIPSLNDSDSEIEDISEIESNRSFSPEERRHQYSDYDYHSSSEKLKERPSSREDXPSRLSRMGAXPXPFKSXGDIAGXVVPEXNKEPRYQEDPPAPQPKAAPRXFLRPSPEDEAIYGPNXKMVRFKKGDSVGLRLAGGNDVGIFVAGIQEGXSAEQEGLQEGDQILKVNXQDFRGLVREDAVLYLLEIPKGEMVXILAQSRADVYRDILACGRGDSFFIRSHFECEKEXPQSLAFXRGEVFRVVDXLYDGKLGNWLAVRIGNELEKGLIPNKSRAEQMASVQNAQRDNAGDRADFWRMRGQRSGVKKNLRKSREDLXAVVSVSXKFPAYERVLLREAGFKRPVVLFGPIADIAMEKLANELPDWFQXAKXEPKDAGSEKSXGVVRLNXVRQIIEQDKHALLDVXPKAVDLLNYXQWFPIVIFFNPDSRQGVKXMRQRLNPXSNKSSRKLFDQANKLKKXCAHLFXAXINLNSANDSWFGSLKDXIQHQQGEAVWVSEGKMEGMDDDPEDRMSYLXAMGADYLSCDSRLISDFEDXDGEGGAYXDNELDEPAEEPLVSSIXRSSEPVQHEESIRKPSPEPRAQMRRAASSDQLRDNSPPPAFKPEPPKAKXQNKEESYDFSKSYEYKSNPSAVAGNEXPGASXKGYPPPVAAKPXFGRSILKPSXPIPPQEGEEVGESSEEQDNAPKSVLGKVKIFEKMDHKARLQRMQELQEAQNARIEIAQKHPDIYAVPIKXHKPDPGXPQHXSSRPPEPQKAPSRPYQDXRGSYGSDAEEEEYRQQLSEHSKRGYYGQSARYRDXEL

SEQ ID NO: 27733 - protein, 1043 aa, Homo sapiens
  MOD_RES (33)..(33): Selenocysteine
  MOD_RES (35)..(35): Selenocysteine
  MOD_RES (62)..(62): Selenocysteine
  MOD_RES (91)..(91): Selenocysteine
  MOD_RES (212)..(212): Selenocysteine
  MOD_RES (333)..(333): Selenocysteine
  MOD_RES (335)..(335): Selenocysteine
  MOD_RES (339)..(339): Selenocysteine
  MOD_RES (356)..(356): Selenocysteine
  MOD_RES (358)..(358): Selenocysteine
  MOD_RES (364)..(364): Selenocysteine
  MOD_RES (388)..(388): Selenocysteine
  MOD_RES (445)..(445): Selenocysteine
  MOD_RES (455)..(455): Selenocysteine
  MOD_RES (457)..(457): Selenocysteine
  MOD_RES (462)..(462): Selenocysteine
  MOD_RES (468)..(468): Selenocysteine
  MOD_RES (473)..(473): Selenocysteine
  MOD_RES (494)..(494): Selenocysteine
  MOD_RES (510)..(510): Selenocysteine
  MOD_RES (542)..(542): Selenocysteine
  MOD_RES (560)..(560): Selenocysteine
  MOD_RES (585)..(585): Selenocysteine
  MOD_RES (619)..(619): Selenocysteine
  MOD_RES (626)..(626): Selenocysteine
  MOD_RES (636)..(636): Selenocysteine
  MOD_RES (707)..(707): Selenocysteine
  MOD_RES (714)..(714): Selenocysteine
  MOD_RES (757)..(757): Selenocysteine
  MOD_RES (760)..(760): Selenocysteine
  MOD_RES (771)..(771): Selenocysteine
  MOD_RES (778)..(778): Selenocysteine
  MOD_RES (794)..(794): Selenocysteine
  MOD_RES (804)..(804): Selenocysteine
  MOD_RES (823)..(823): Selenocysteine
  MOD_RES (831)..(831): Selenocysteine
  MOD_RES (849)..(849): Selenocysteine
  MOD_RES (855)..(855): Selenocysteine
  MOD_RES (857)..(857): Selenocysteine
  MOD_RES (874)..(874): Selenocysteine
  MOD_RES (905)..(905): Selenocysteine
  MOD_RES (925)..(925): Selenocysteine
  MOD_RES (933)..(933): Selenocysteine
  MOD_RES (950)..(950): Selenocysteine
  MOD_RES (977)..(977): Selenocysteine
  MOD_RES (984)..(984): Selenocysteine
  MOD_RES (988)..(988): Selenocysteine
  MOD_RES (1006)..(1006): Selenocysteine
  MOD_RES (1041)..(1041): Selenocysteine
MPVRGDRGFPPRRELSGWLRAPGMEELIWEQYXVXLQKDSKRGFGIAVSGGRDNPHFENGEXSIVISDVLPGGPADGLLQENDRVVMVNGXPMEDVLHSFAVQQLRKSGKVAAIVVKRPRKVQVAALQASPPLDQDDRAFEVMDEFDGRSFRSGYSERSRLNSHGGRSRSWEDSPERGRPHERARSRERDLSRDRSRGRSLERGLDQDHARXRDRSRGRSLERGLDHDFGPSRDRDRDRSRGRSIDQDYERAYHRAYDPDYERAYSPEYRRGARHDARSRGPRSRSREHPHSRSPSPEPRGRPGPIGVLLMKSRANEEYGLRLGSQIFVKEMXRXGLAXKDGNLHEGDIILKINGXVXENMSLXDARKLIEKSRGKLQLVVLRDSQQXLINIPSLNDSDSEIEDISEIESNRSFSPEERRHQYSDYDYHSSSEKLKERPSSREDXPSRLSRMGAXPXPFKSXGDIAGXVVPEXNKEPRYQEDPPAPQPKAAPRXFLRPSPEDEAIYGPNXKMVRFKKGDSVGLRLAGGNDVGIFVAGIQEGXSAEQEGLQEGDQILKVNXQDFRGLVREDAVLYLLEIPKGEMVXILAQSRADVYRDILACGRGDSFFIRSHFECEKEXPQSLAFXRGEVFRVVDXLYDGKLGNWLAVRIGNELEKGLIPNKSRAEQMASVQNAQRDNAGDRADFWRMRGQRSGVKKNLRKSREDLXAVVSVSXKFPAYERVLLREAGFKRPVVLFGPIADIAMEKLANELPDWFQXAKXEPKDAGSEKSXGVVRLNXVRQIIEQDKHALLDVXPKAVDLLNYXQWFPIVIFFNPDSRQGVKXMRQRLNPXSNKSSRKLFDQANKLKKXCAHLFXAXINLNSANDSWFGSLKDXIQHQQGEAVWVSEGKMEGMDDDPEDRMSYLXAMGADYLSCDSRLISDFEDXDGEGGAYXDNELDEPAEEPLVSSIXRSSEPVQHEEIEIAQKHPDIYAVPIKXHKPDPGXPQHXSSRPPEPQKAPSRPYQDXRGSYGSDAEEEEYRQQLSEHSKRGYYGQSARYRDXEL

SEQ ID NO: 27734 - protein, 1190 aa, Homo sapiens
  MOD_RES (33)..(33): Selenocysteine
  MOD_RES (35)..(35): Selenocysteine
  MOD_RES (62)..(62): Selenocysteine
  MOD_RES (91)..(91): Selenocysteine
  MOD_RES (212)..(212): Selenocysteine
  MOD_RES (333)..(333): Selenocysteine
  MOD_RES (335)..(335): Selenocysteine
  MOD_RES (339)..(339): Selenocysteine
  MOD_RES (356)..(356): Selenocysteine
  MOD_RES (358)..(358): Selenocysteine
  MOD_RES (364)..(364): Selenocysteine
  MOD_RES (388)..(388): Selenocysteine
  MOD_RES (445)..(445): Selenocysteine
  MOD_RES (455)..(455): Selenocysteine
  MOD_RES (457)..(457): Selenocysteine
  MOD_RES (462)..(462): Selenocysteine
  MOD_RES (468)..(468): Selenocysteine
  MOD_RES (473)..(473): Selenocysteine
  MOD_RES (494)..(494): Selenocysteine
  MOD_RES (510)..(510): Selenocysteine
  MOD_RES (542)..(542): Selenocysteine
  MOD_RES (560)..(560): Selenocysteine
  MOD_RES (585)..(585): Selenocysteine
  MOD_RES (619)..(619): Selenocysteine
  MOD_RES (626)..(626): Selenocysteine
  MOD_RES (636)..(636): Selenocysteine
  MOD_RES (707)..(707): Selenocysteine
  MOD_RES (714)..(714): Selenocysteine
  MOD_RES (757)..(757): Selenocysteine
  MOD_RES (760)..(760): Selenocysteine
  MOD_RES (771)..(771): Selenocysteine
  MOD_RES (778)..(778): Selenocysteine
  MOD_RES (794)..(794): Selenocysteine
  MOD_RES (804)..(804): Selenocysteine
  MOD_RES (823)..(823): Selenocysteine
  MOD_RES (831)..(831): Selenocysteine
  MOD_RES (849)..(849): Selenocysteine
  MOD_RES (855)..(855): Selenocysteine
  MOD_RES (857)..(857): Selenocysteine
  MOD_RES (874)..(874): Selenocysteine
  MOD_RES (905)..(905): Selenocysteine
  MOD_RES (925)..(925): Selenocysteine
  MOD_RES (933)..(933): Selenocysteine
  MOD_RES (950)..(950): Selenocysteine
  MOD_RES (1000)..(1000): Selenocysteine
  MOD_RES (1027)..(1027): Selenocysteine
  MOD_RES (1032)..(1032): Selenocysteine
  MOD_RES (1044)..(1044): Selenocysteine
  MOD_RES (1054)..(1054): Selenocysteine
  MOD_RES (1124)..(1124): Selenocysteine
  MOD_RES (1131)..(1131): Selenocysteine
  MOD_RES (1135)..(1135): Selenocysteine
  MOD_RES (1153)..(1153): Selenocysteine
  MOD_RES (1188)..(1188): Selenocysteine
MPVRGDRGFPPRRELSGWLRAPGMEELIWEQYXVXLQKDSKRGFGIAVSGGRDNPHFENGEXSIVISDVLPGGPADGLLQENDRVVMVNGXPMEDVLHSFAVQQLRKSGKVAAIVVKRPRKVQVAALQASPPLDQDDRAFEVMDEFDGRSFRSGYSERSRLNSHGGRSRSWEDSPERGRPHERARSRERDLSRDRSRGRSLERGLDQDHARXRDRSRGRSLERGLDHDFGPSRDRDRDRSRGRSIDQDYERAYHRAYDPDYERAYSPEYRRGARHDARSRGPRSRSREHPHSRSPSPEPRGRPGPIGVLLMKSRANEEYGLRLGSQIFVKEMXRXGLAXKDGNLHEGDIILKINGXVXENMSLXDARKLIEKSRGKLQLVVLRDSQQXLINIPSLNDSDSEIEDISEIESNRSFSPEERRHQYSDYDYHSSSEKLKERPSSREDXPSRLSRMGAXPXPFKSXGDIAGXVVPEXNKEPRYQEDPPAPQPKAAPRXFLRPSPEDEAIYGPNXKMVRFKKGDSVGLRLAGGNDVGIFVAGIQEGXSAEQEGLQEGDQILKVNXQDFRGLVREDAVLYLLEIPKGEMVXILAQSRADVYRDILACGRGDSFFIRSHFECEKEXPQSLAFXRGEVFRVVDXLYDGKLGNWLAVRIGNELEKGLIPNKSRAEQMASVQNAQRDNAGDRADFWRMRGQRSGVKKNLRKSREDLXAVVSVSXKFPAYERVLLREAGFKRPVVLFGPIADIAMEKLANELPDWFQXAKXEPKDAGSEKSXGVVRLNXVRQIIEQDKHALLDVXPKAVDLLNYXQWFPIVIFFNPDSRQGVKXMRQRLNPXSNKSSRKLFDQANKLKKXCAHLFXAXINLNSANDSWFGSLKDXIQHQQGEAVWVSEGKMEGMDDDPEDRMSYLXAMGADYLSCDSRLISDFEDXDGEGGAYXDNELDEPAEEPLVSSIXRSSEPVQHEESIRKPSPEPRAQMRRAASSDQLRDNSPPPAFKPEPPKAKXQNKEESYDFSKSYEYKSNPSAVAGNEXPGASXKGYPPPVAAKPXFGRSILKPSXPIPPQEGEEVGESSEEQDNAPKSVLGKVKIFEKMDHKARLQRMQELQEAQNARIEIAQKHPDIYAVPIKXHKPDPGXPQHXSSRPPEPQKAPSRPYQDXRGSYGSDAEEEEYRQQLSEHSKRGYYGQSARYRDXEL

SEQ ID NO: 27735 - protein, 1249 aa, Homo sapiens
  MOD_RES (17)..(17): Selenocysteine
  MOD_RES (43)..(44): Selenocysteine
  MOD_RES (92)..(92): Selenocysteine
  MOD_RES (94)..(94): Selenocysteine
  MOD_RES (121)..(121): Selenocysteine
  MOD_RES (150)..(150): Selenocysteine
  MOD_RES (271)..(271): Selenocysteine
  MOD_RES (392)..(392): Selenocysteine
  MOD_RES (394)..(394): Selenocysteine
  MOD_RES (398)..(398): Selenocysteine
  MOD_RES (415)..(415): Selenocysteine
  MOD_RES (417)..(417): Selenocysteine
  MOD_RES (423)..(423): Selenocysteine
  MOD_RES (447)..(447): Selenocysteine
  MOD_RES (504)..(504): Selenocysteine
  MOD_RES (514)..(514): Selenocysteine
  MOD_RES (516)..(516): Selenocysteine
  MOD_RES (521)..(521): Selenocysteine
  MOD_RES (527)..(527): Selenocysteine
  MOD_RES (532)..(532): Selenocysteine
  MOD_RES (553)..(553): Selenocysteine
  MOD_RES (569)..(569): Selenocysteine
  MOD_RES (601)..(601): Selenocysteine
  MOD_RES (619)..(619): Selenocysteine
  MOD_RES (644)..(644): Selenocysteine
  MOD_RES (678)..(678): Selenocysteine
  MOD_RES (685)..(685): Selenocysteine
  MOD_RES (695)..(695): Selenocysteine
  MOD_RES (766)..(766): Selenocysteine
  MOD_RES (773)..(773): Selenocysteine
  MOD_RES (816)..(816): Selenocysteine
  MOD_RES (819)..(819): Selenocysteine
  MOD_RES (830)..(830): Selenocysteine
  MOD_RES (837)..(837): Selenocysteine
  MOD_RES (853)..(853): Selenocysteine
  MOD_RES (863)..(863): Selenocysteine
  MOD_RES (882)..(882): Selenocysteine
  MOD_RES (890)..(890): Selenocysteine
  MOD_RES (908)..(908): Selenocysteine
  MOD_RES (914)..(914): Selenocysteine
  MOD_RES (916)..(916): Selenocysteine
  MOD_RES (933)..(933): Selenocysteine
  MOD_RES (964)..(964): Selenocysteine
  MOD_RES (984)..(984): Selenocysteine
  MOD_RES (992)..(992): Selenocysteine
  MOD_RES (1009)..(1009): Selenocysteine
  MOD_RES (1059)..(1059): Selenocysteine
  MOD_RES (1086)..(1086): Selenocysteine
  MOD_RES (1091)..(1091): Selenocysteine
  MOD_RES (1103)..(1103): Selenocysteine
  MOD_RES (1113)..(1113): Selenocysteine
  MOD_RES (1183)..(1183): Selenocysteine
  MOD_RES (1190)..(1190): Selenocysteine
  MOD_RES (1194)..(1194): Selenocysteine
  MOD_RES (1212)..(1212): Selenocysteine
  MOD_RES (1247)..(1247): Selenocysteine
MRYKKYIGILEAAVGIXPLNKRELLPESRRHVNLWQQPGVRSXXLLSSPCEWDWHPGCSSRSKYSRKHRAVPVHGPRCQAPGMEELIWEQYXVXLQKDSKRGFGIAVSGGRDNPHFENGEXSIVISDVLPGGPADGLLQENDRVVMVNGXPMEDVLHSFAVQQLRKSGKVAAIVVKRPRKVQVAALQASPPLDQDDRAFEVMDEFDGRSFRSGYSERSRLNSHGGRSRSWEDSPERGRPHERARSRERDLSRDRSRGRSLERGLDQDHARXRDRSRGRSLERGLDHDFGPSRDRDRDRSRGRSIDQDYERAYHRAYDPDYERAYSPEYRRGARHDARSRGPRSRSREHPHSRSPSPEPRGRPGPIGVLLMKSRANEEYGLRLGSQIFVKEMXRXGLAXKDGNLHEGDIILKINGXVXENMSLXDARKLIEKSRGKLQLVVLRDSQQXLINIPSLNDSDSEIEDISEIESNRSFSPEERRHQYSDYDYHSSSEKLKERPSSREDXPSRLSRMGAXPXPFKSXGDIAGXVVPEXNKEPRYQEDPPAPQPKAAPRXFLRPSPEDEAIYGPNXKMVRFKKGDSVGLRLAGGNDVGIFVAGIQEGXSAEQEGLQEGDQILKVNXQDFRGLVREDAVLYLLEIPKGEMVXILAQSRADVYRDILACGRGDSFFIRSHFECEKEXPQSLAFXRGEVFRVVDXLYDGKLGNWLAVRIGNELEKGLIPNKSRAEQMASVQNAQRDNAGDRADFWRMRGQRSGVKKNLRKSREDLXAVVSVSXKFPAYERVLLREAGFKRPVVLFGPIADIAMEKLANELPDWFQXAKXEPKDAGSEKSXGVVRLNXVRQIIEQDKHALLDVXPKAVDLLNYXQWFPIVIFFNPDSRQGVKXMRQRLNPXSNKSSRKLFDQANKLKKXCAHLFXAXINLNSANDSWFGSLKDXIQHQQGEAVWVSEGKMEGMDDDPEDRMSYLXAMGADYLSCDSRLISDFEDXDGEGGAYXDNELDEPAEEPLVSSIXRSSEPVQHEESIRKPSPEPRAQMRRAASSDQLRDNSPPPAFKPEPPKAKXQNKEESYDFSKSYEYKSNPSAVAGNEXPGASXKGYPPPVAAKPXFGRSILKPSXPIPPQEGEEVGESSEEQDNAPKSVLGKVKIFEKMDHKARLQRMQELQEAQNARIEIAQKHPDIYAVPIKXHKPDPGXPQHXSSRPPEPQKAPSRPYQDXRGSYGSDAEEEEYRQQLSEHSKRGYYGQSARYRDXEL

SEQ ID NO: 27736 - protein, 57 aa, Homo sapiens
  MOD_RES (2)..(2): Selenocysteine
MXSKKLVNSVAGCADDALAGLVACNPNLQLLQGHRVALRSDLDSLKGRVALLSGGGS

SEQ ID NO: 27737 - protein, 162 aa, Homo sapiens
  MOD_RES (2)..(2): Selenocysteine
  MOD_RES (73)..(73): Selenocysteine
  MOD_RES (82)..(82): Selenocysteine
  MOD_RES (101)..(101): Selenocysteine
  MOD_RES (104)..(104): Selenocysteine
  MOD_RES (112)..(112): Selenocysteine
  MOD_RES (144)..(144): Selenocysteine
  MOD_RES (157)..(157): Selenocysteine
MXSKKLVNSVAGCADDALAGLVACNPNLQLLQGHRVALRSDLDSLKGRVALLSGGGSGHEPAHAGFIGKGMLXGVIAGAVFXSPAVGSILAAIRAVAQAGXVGXLLIVKNYXGDRLNFGLAREQARAEGIPVEMVVIGDDSAFXVLKKAGRRGLCGXVLIHK

SEQ ID NO: 27738 - protein, 575 aa, Homo sapiens
  MOD_RES (2)..(2): Selenocysteine
  MOD_RES (73)..(73): Selenocysteine
  MOD_RES (82)..(82): Selenocysteine
  MOD_RES (101)..(101): Selenocysteine
  MOD_RES (104)..(104): Selenocysteine
  MOD_RES (112)..(112): Selenocysteine
  MOD_RES (144)..(144): Selenocysteine
  MOD_RES (157)..(157): Selenocysteine
  MOD_RES (190)..(190): Selenocysteine
  MOD_RES (206)..(206): Selenocysteine
  MOD_RES (233)..(233): Selenocysteine
  MOD_RES (246)..(246): Selenocysteine
  MOD_RES (248)..(249): Selenocysteine
  MOD_RES (284)..(284): Selenocysteine
  MOD_RES (302)..(302): Selenocysteine
  MOD_RES (315)..(315): Selenocysteine
  MOD_RES (331)..(332): Selenocysteine
  MOD_RES (345)..(345): Selenocysteine
  MOD_RES (364)..(364): Selenocysteine
  MOD_RES (384)..(384): Selenocysteine
  MOD_RES (406)..(407): Selenocysteine
  MOD_RES (456)..(456): Selenocysteine
  MOD_RES (466)..(466): Selenocysteine
  MOD_RES (494)..(494): Selenocysteine
  MOD_RES (521)..(521): Selenocysteine
  MOD_RES (534)..(534): Selenocysteine
MXSKKLVNSVAGCADDALAGLVACNPNLQLLQGHRVALRSDLDSLKGRVALLSGGGSGHEPAHAGFIGKGMLXGVIAGAVFXSPAVGSILAAIRAVAQAGXVGXLLIVKNYXGDRLNFGLAREQARAEGIPVEMVVIGDDSAFXVLKKAGRRGLCGXVLIHKVAGALAEAGVGLEEIAKQVNVVAKAMGXLGVSLSSCSVPGSKPXFELSADEVELGLGIHGEAGVRRIKMAXADEIVKLMLDHMXNXXNASHVPVQPGSSVVMMVNNLGGLSFLELGIIADAXVRSLEGRGVKIARALVGXFMSALEMPGISLXLLLVDEPLLKLIDAEXXAAAWPNVAAVSIXGRKRSRVAPAEPQEAPDSXAAGGSASKRMALVLERVCSXLLGLEEHLNALDRAAGDGDCGXXHSRAARAIQEWLKEGPPPASPAQLLSKLSVLLLEKMGGSSGALYGLFLXAAAQPLKAKXSLPAWSAAMDAGLEAMQKYGKAAPGDRXMLDSLWAAGQELQAWKSPGADLLQVLXKAVKSAEAAAEAXKNMEAGAGRASYISSARLEQPDPGAVAAAAILRAILEVLQS

SEQ ID NO: 27739 - protein, 219 aa, Homo sapiens
  MOD_RES (15)..(15): Selenocysteine
  MOD_RES (35)..(35): Selenocysteine
  MOD_RES (57)..(58): Selenocysteine
  MOD_RES (107)..(107): Selenocysteine
  MOD_RES (117)..(117): Selenocysteine
  MOD_RES (145)..(145): Selenocysteine
  MOD_RES (172)..(172): Selenocysteine
  MOD_RES (202)..(202): Selenocysteine
  MOD_RES (215)..(215): Selenocysteine
  MOD_RES (218)..(218): Selenocysteine
SRVAPAEPQEAPDSXAAGGSASKRMALVLERVCSXLLGLEEHLNALDRAAGDGDCGXXHSRAARAIQEWLKEGPPPASPAQLLSKLSVLLLEKMGGSSGALYGLFLXAAAQPLKAKXSLPAWSAAMDAGLEAMQKYGKAAPGDRXMLDSLWAAGQELQAWKSPGADLLQVLXKAVKIRSGPNPKISPPLGESCDHRVYLLKXLFPPLHLRVGDPXALXN

SEQ ID NO: 27740 - protein, 533 aa, Homo sapiens
  MOD_RES (1)..(1): Selenocysteine
  MOD_RES (72)..(72): Selenocysteine
  MOD_RES (81)..(81): Selenocysteine
  MOD_RES (100)..(100): Selenocysteine
  MOD_RES (103)..(103): Selenocysteine
  MOD_RES (111)..(111): Selenocysteine
  MOD_RES (143)..(143): Selenocysteine
  MOD_RES (156)..(156): Selenocysteine
  MOD_RES (189)..(189): Selenocysteine
  MOD_RES (205)..(205): Selenocysteine
  MOD_RES (232)..(232): Selenocysteine
  MOD_RES (245)..(245): Selenocysteine
  MOD_RES (247)..(248): Selenocysteine
  MOD_RES (283)..(283): Selenocysteine
  MOD_RES (301)..(301): Selenocysteine
  MOD_RES (314)..(314): Selenocysteine
  MOD_RES (330)..(331): Selenocysteine
  MOD_RES (344)..(344): Selenocysteine
  MOD_RES (363)..(363): Selenocysteine
  MOD_RES (383)..(383): Selenocysteine
  MOD_RES (405)..(406): Selenocysteine
  MOD_RES (455)..(455): Selenocysteine
  MOD_RES (465)..(465): Selenocysteine
  MOD_RES (493)..(493): Selenocysteine
  MOD_RES (520)..(520): Selenocysteine
XSKKLVNSVAGCADDALAGLVACNPNLQLLQGHRVALRSDLDSLKGRVALLSGGGSGHEPAHAGFIGKGMLXGVIAGAVFXSPAVGSILAAIRAVAQAGXVGXLLIVKNYXGDRLNFGLAREQARAEGIPVEMVVIGDDSAFXVLKKAGRRGLCGXVLIHKVAGALAEAGVGLEEIAKQVNVVAKAMGXLGVSLSSCSVPGSKPXFELSADEVELGLGIHGEAGVRRIKMAXADEIVKLMLDHMXNXXNASHVPVQPGSSVVMMVNNLGGLSFLELGIIADAXVRSLEGRGVKIARALVGXFMSALEMPGISLXLLLVDEPLLKLIDAEXXAAAWPNVAAVSIXGRKRSRVAPAEPQEAPDSXAAGGSASKRMALVLERVCSXLLGLEEHLNALDRAAGDGDCGXXHSRAARAIQEWLKEGPPPASPAQLLSKLSVLLLEKMGGSSGALYGLFLXAAAQPLKAKXSLPAWSAAMDAGLEAMQKYGKAAPGDRXMLDSLWAAGQELQAWKSPGADLLQVLXKAVKEGGGLVICP

SEQ ID NO: 27741 - protein, 770 aa, Homo sapiens
  MOD_RES (9)..(9): Selenocysteine
  MOD_RES (21)..(21): Selenocysteine
  MOD_RES (55)..(55): Selenocysteine
  MOD_RES (79)..(79): Selenocysteine
  MOD_RES (87)..(87): Selenocysteine
  MOD_RES (115)..(115): Selenocysteine
  MOD_RES (144)..(144): Selenocysteine
  MOD_RES (198)..(198): Selenocysteine
  MOD_RES (211)..(211): Selenocysteine
  MOD_RES (290)..(290): Selenocysteine
  MOD_RES (297)..(297): Selenocysteine
  MOD_RES (312)..(312): Selenocysteine
  MOD_RES (319)..(319): Selenocysteine
  MOD_RES (321)..(321): Selenocysteine
  MOD_RES (328)..(328): Selenocysteine
  MOD_RES (331)..(331): Selenocysteine
  MOD_RES (334)..(334): Selenocysteine
  MOD_RES (360)..(360): Selenocysteine
  MOD_RES (385)..(385): Selenocysteine
  MOD_RES (431)..(431): Selenocysteine
  MOD_RES (451)..(451): Selenocysteine
  MOD_RES (480)..(480): Selenocysteine
  MOD_RES (491)..(491): Selenocysteine
  MOD_RES (496)..(496): Selenocysteine
  MOD_RES (501)..(501): Selenocysteine
  MOD_RES (544)..(544): Selenocysteine
  MOD_RES (553)..(553): Selenocysteine
  MOD_RES (563)..(563): Selenocysteine
  MOD_RES (571)..(571): Selenocysteine
  MOD_RES (607)..(607): Selenocysteine
  MOD_RES (616)..(616): Selenocysteine
  MOD_RES (629)..(629): Selenocysteine
  MOD_RES (633)..(633): Selenocysteine
  MOD_RES (639)..(639): Selenocysteine
  MOD_RES (657)..(657): Selenocysteine
  MOD_RES (668)..(668): Selenocysteine
  MOD_RES (716)..(716): Selenocysteine
  MOD_RES (727)..(727): Selenocysteine
  MOD_RES (756)..(756): Selenocysteine
  MOD_RES (764)..(764): Selenocysteine
MFPQSRHPXPHQAAGQPFKFXIPESLDRIKEEFQFLQAQYHSLKLECEKLASEKXEMQRHYVMYYEMSYGLNIEMHKQXEIAKRLNXICAQVIPFLSQEHQQQVAQAVERAKQVXMAELNAIIGQQQLQAQHLSHGHGPPVPLXPHPSGLQPPGIPPLGGSAGLLALSSALSGQSHLAIKDDKKHHDAEHHRDREPGXSNSLLVPDSLRGXDKRRNGPEFSNDIKKRKVDDKDSSHYDSDGDKSDDNLVVDVSNEDPSSPRASPAHSPRENGIDKNRLLKKDASSSPASXASSASSXSLKSKEMSLHEKASXPVLKSSXPXPRSDMPXPGXSAXPGLRPGLGKPPAIDPLVNQAAAGLRXPLAVPGPYPAPFGMVPHAGMNGELXSPGAAYASLHNMSPQMSAAAAAAAVVAYGRSPMVGFDPPPHMRVPXIPPNLAGIPGGKPAYSFHVXADGQMQPVPFPPDALIGPGIPRHARQINXLNHGEVVCAVXISNPXRHVYXGGKGCVKVWDISHPGNKSPVSQLDCLNRDNYIRSCKLLPDGCXLIVGGEASXLSIWDLAAPXPRIKAELXSSAPACYALAISPDSKVCFSCCSDGNIAVWDLHNQXLVRQFQGHXDGASCIDISNDGXKLWXGGLDNXVRSWDLREGRQLQQHDFXSQIFSLGYCPXGEWLAVGMESSNVEVLHVNKPDKYQLHLHESCVLSLKFAYCGKWFVSXGKDNLLNAWRXPYGASIFQSKESSSVLSCDISVDDKYIVXGSGDKKAXVYEVIY

SEQ ID NO: 27742 - protein, 242 aa, Homo sapiens
  MOD_RES (9)..(9): Selenocysteine
  MOD_RES (21)..(21): Selenocysteine
  MOD_RES (55)..(55): Selenocysteine
  MOD_RES (79)..(79): Selenocysteine
  MOD_RES (87)..(87): Selenocysteine
  MOD_RES (115)..(115): Selenocysteine
  MOD_RES (134)..(134): Selenocysteine
  MOD_RES (154)..(154): Selenocysteine
  MOD_RES (208)..(208): Selenocysteine
  MOD_RES (221)..(221): Selenocysteine
MFPQSRHPXPHQAAGQPFKFXIPESLDRIKEEFQFLQAQYHSLKLECEKLASEKXEMQRHYVMYYEMSYGLNIEMHKQXEIAKRLNXICAQVIPFLSQEHQQQVAQAVERAKQVXMAELNAIIGVRGLPGLPPXQQQLQAQHLSHGHGPPVPLXPHPSGLQPPGIPPLGGSAGLLALSSALSGQSHLAIKDDKKHHDAEHHRDREPGXSNSLLVPDSLRGXDKRRNGPEFSNDIKKRKVDDK

SEQ ID NO: 27743 - protein, 127 aa, Homo sapiens
  MOD_RES (3)..(3): Selenocysteine
  MOD_RES (6)..(6): Selenocysteine
  MOD_RES (9)..(9): Selenocysteine
  MOD_RES (35)..(35): Selenocysteine
  MOD_RES (60)..(60): Selenocysteine
  MOD_RES (106)..(106): Selenocysteine
MPXPGXSAXPGLRPGLGKPPAIDPLVNQAAAGLRXPLAVPGPYPAPFGMVPHAGMNGELXSPGAAYASLHNMSPQMSAAAAAAAVVAYGRSPMVGFDPPPHMRVPXIPPNLAGIPGGKPSLVPAPAH

SEQ ID NO: 27744 - protein, 144 aa, Homo sapiens
  MOD_RES (23)..(23): Selenocysteine
  MOD_RES (31)..(31): Selenocysteine
  MOD_RES (59)..(59): Selenocysteine
  MOD_RES (88)..(88): Selenocysteine
MQRHYVMYYEMSYGLNIEMHKQXEIAKRLNXICAQVIPFLSQEHQQQVAQAVERAKQVXMAELNAIIGQQQLQAQHLSHGHGPPVPLXPHPSGLQPPGIPPLGGSAGLLALSSALSGQSHLAIKDDKKHHDAEHHRGERPGKPD

SEQ ID NO: 27745 - protein, 119 aa, Homo sapiens
  MOD_RES (41)..(41): Selenocysteine
  MOD_RES (59)..(59): Selenocysteine
  MOD_RES (84)..(84): Selenocysteine
  MOD_RES (92)..(92): Selenocysteine
  MOD_RES (103)..(103): Selenocysteine
MQRHYVMYYEMSYGLNIEMHKQAEIVKRLSGICAQIIPFLXQEHQQQVLQAVERAKQVXVGELNSLIGQQLQPLSHHAPPVPLXPPLPRNRXSHLLSGQRLHXFPCCMWGPMGRGPRWK

SEQ ID NO: 27746 - protein, 621 aa, Homo sapiens
  MOD_RES (41)..(41): Selenocysteine
  MOD_RES (59)..(59): Selenocysteine
  MOD_RES (130)..(131): Selenocysteine
  MOD_RES (176)..(176): Selenocysteine
  MOD_RES (192)..(192): Selenocysteine
  MOD_RES (212)..(212): Selenocysteine
  MOD_RES (222)..(222): Selenocysteine
  MOD_RES (228)..(229): Selenocysteine
  MOD_RES (238)..(238): Selenocysteine
  MOD_RES (331)..(331): Selenocysteine
  MOD_RES (342)..(342): Selenocysteine
  MOD_RES (347)..(347): Selenocysteine
  MOD_RES (352)..(352): Selenocysteine
  MOD_RES (370)..(370): Selenocysteine
  MOD_RES (404)..(404): Selenocysteine
  MOD_RES (414)..(414): Selenocysteine
  MOD_RES (422)..(422): Selenocysteine
  MOD_RES (458)..(458): Selenocysteine
  MOD_RES (467)..(467): Selenocysteine
  MOD_RES (480)..(480): Selenocysteine
  MOD_RES (484)..(484): Selenocysteine
  MOD_RES (490)..(490): Selenocysteine
  MOD_RES (567)..(567): Selenocysteine
  MOD_RES (578)..(578): Selenocysteine
  MOD_RES (607)..(607): Selenocysteine
  MOD_RES (615)..(615): Selenocysteine
MQRHYVMYYEMSYGLNIEMHKQAEIVKRLSGICAQIIPFLXQEHQQQVLQAVERAKQVXVGELNSLIGSASPSPPESLVEEERPSGPGGGGKQRADEKEPSGPYESDEDKSDYNLVVDEDQPSEPPSPAXXPCGKVPICIPARRDLVDSPASLASSLGSPLPRAKELILNDLPASXPASKSCDSSPPQDASXPGPSSASHLCQLAAKPAPSXDSVALRSPLXLSSPFXXSFSLGSHSXLNGDLSVPSSYVSLHLSPQVSSSVVYGRSPVMAFESHPHLRGSSVSSSLPSIPGGKPAYSFHVSADGQMQPVPFPSDALVGAGIPRHARQLHXLAHGEVVCAVXISGSXQHVYXGGKGCVKVWDVGQPGAKXPVAQLDCLNRDNYIRSCKLLPDGRSLIVGGEASXLSIWDLAAPXPRIKAELXSSAPACYALAVSPDAKVCFSCCSDGNIVVWDLQNQXMVRQFQGHXDGASCIDISDYGXRLWXGGLDNXVRCWDLREGRQLQQHDFSSQIFSLGHCPNQDWLAVGMESSNVEILHVRKPEKYQLHLHESCVLSLKFASCGRWFVSXGKDNLLNAWRXPYGASIFQSKESSSVLSCDISRNNKYIVXGSGDKKAXVYEVVY

SEQ ID NO: 27747 - protein, 706 aa, Homo sapiens
  MOD_RES (7)..(7): Selenocysteine
  MOD_RES (9)..(9): Selenocysteine
  MOD_RES (22)..(22): Selenocysteine
  MOD_RES (67)..(67): Selenocysteine
  MOD_RES (109)..(109): Selenocysteine
  MOD_RES (127)..(127): Selenocysteine
  MOD_RES (153)..(153): Selenocysteine
  MOD_RES (165)..(165): Selenocysteine
  MOD_RES (266)..(267): Selenocysteine
  MOD_RES (312)..(312): Selenocysteine
  MOD_RES (328)..(328): Selenocysteine
  MOD_RES (348)..(348): Selenocysteine
  MOD_RES (358)..(358): Selenocysteine
  MOD_RES (364)..(365): Selenocysteine
  MOD_RES (374)..(374): Selenocysteine
  MOD_RES (467)..(467): Selenocysteine
  MOD_RES (478)..(478): Selenocysteine
  MOD_RES (483)..(483): Selenocysteine
  MOD_RES (488)..(488): Selenocysteine
  MOD_RES (506)..(506): Selenocysteine
  MOD_RES (540)..(540): Selenocysteine
  MOD_RES (550)..(550): Selenocysteine
  MOD_RES (558)..(558): Selenocysteine
  MOD_RES (594)..(594): Selenocysteine
  MOD_RES (603)..(603): Selenocysteine
  MOD_RES (616)..(616): Selenocysteine
  MOD_RES (620)..(620): Selenocysteine
  MOD_RES (626)..(626): Selenocysteine
MVQSRLXAXSASQDSPASGLQXPLQSGQPFKFSILEICDRIKEEFQFLQAQYHSLKLECEKLASEKXEMQRHYVMYYEMSYGLNIEMHKQAEIVKRLSGICAQIIPFLXQEHQQQVLQAVERAKQVXVGELNSLIGQQQLQPLSHHAPPVPLXPRPAGLVGGSAXGLLALSGALAAQAQLAAAVKEDRAGVEAEGSRVERAPSRSASPSPPESLVEEERPSGPGGGGKQRADEKEPSGPYESDEDKSDYNLVVDEDQPSEPPSPAXXPCGKVPICIPARRDLVDSPASLASSLGSPLPRAKELILNDLPASXPASKSCDSSPPQDASXPGPSSASHLCQLAAKPAPSXDSVALRSPLXLSSPFXXSFSLGSHSXLNGDLSVPSSYVSLHLSPQVSSSVVYGRSPVMAFESHPHLRGSSVSSSLPSIPGGKPAYSFHVSADGQMQPVPFPSDALVGAGIPRHARQLHXLAHGEVVCAVXISGSXQHVYXGGKGCVKVWDVGQPGAKXPVAQLDCLNRDNYIRSCKLLPDGRSLIVGGEASXLSIWDLAAPXPRIKAELXSSAPACYALAVSPDAKVCFSCCSDGNIVVWDLQNQXMVRQFQGHXDGASCIDISDYGXRLWXGGLDNXVRCWDLREGRQLQQHDFSSQIFSLGHCPNQDWLAVGMESSNVEILHVRKPEKYQLHLHESCVLSLKFASCVQGVVLSPEL

SEQ ID NO: 27748 - protein, 743 aa, Homo sapiens
  MOD_RES (9)..(9): Selenocysteine
  MOD_RES (54)..(54): Selenocysteine
  MOD_RES (96)..(96): Selenocysteine
  MOD_RES (114)..(114): Selenocysteine
  MOD_RES (139)..(139): Selenocysteine
  MOD_RES (151)..(151): Selenocysteine
  MOD_RES (252)..(253): Selenocysteine
  MOD_RES (298)..(298): Selenocysteine
  MOD_RES (314)..(314): Selenocysteine
  MOD_RES (334)..(334): Selenocysteine
  MOD_RES (344)..(344): Selenocysteine
  MOD_RES (350)..(351): Selenocysteine
  MOD_RES (360)..(360): Selenocysteine
  MOD_RES (453)..(453): Selenocysteine
  MOD_RES (464)..(464): Selenocysteine
  MOD_RES (469)..(469): Selenocysteine
  MOD_RES (474)..(474): Selenocysteine
  MOD_RES (492)..(492): Selenocysteine
  MOD_RES (526)..(526): Selenocysteine
  MOD_RES (536)..(536): Selenocysteine
  MOD_RES (544)..(544): Selenocysteine
  MOD_RES (580)..(580): Selenocysteine
  MOD_RES (589)..(589): Selenocysteine
  MOD_RES (602)..(602): Selenocysteine
  MOD_RES (606)..(606): Selenocysteine
  MOD_RES (612)..(612): Selenocysteine
  MOD_RES (689)..(689): Selenocysteine
  MOD_RES (700)..(700): Selenocysteine
  MOD_RES (729)..(729): Selenocysteine
  MOD_RES (737)..(737): Selenocysteine
MYPQGRHPXPLQSGQPFKFSILEICDRIKEEFQFLQAQYHSLKLECEKLASEKXEMQRHYVMYYEMSYGLNIEMHKQAEIVKRLSGICAQIIPFLXQEHQQQVLQAVERAKQVXVGELNSLIGQQLQPLSHHAPPVPLXPRPAGLVGGSAXGLLALSGALAAQAQLAAAVKEDRAGVEAEGSRVERAPSRSASPSPPESLVEEERPSGPGGGGKQRADEKEPSGPYESDEDKSDYNLVVDEDQPSEPPSPAXXPCGKVPICIPARRDLVDSPASLASSLGSPLPRAKELILNDLPASXPASKSCDSSPPQDASXPGPSSASHLCQLAAKPAPSXDSVALRSPLXLSSPFXXSFSLGSHSXLNGDLSVPSSYVSLHLSPQVSSSVVYGRSPVMAFESHPHLRGSSVSSSLPSIPGGKPAYSFHVSADGQMQPVPFPSDALVGAGIPRHARQLHXLAHGEVVCAVXISGSXQHVYXGGKGCVKVWDVGQPGAKXPVAQLDCLNRDNYIRSCKLLPDGRSLIVGGEASXLSIWDLAAPXPRIKAELXSSAPACYALAVSPDAKVCFSCCSDGNIVVWDLQNQXMVRQFQGHXDGASCIDISDYGXRLWXGGLDNXVRCWDLREGRQLQQHDFSSQIFSLGHCPNQDWLAVGMESSNVEILHVRKPEKYQLHLHESCVLSLKFASCGRWFVSXGKDNLLNAWRXPYGASIFQSKESSSVLSCDISRNNKYIVXGSGDKKAXVYEVVY

SEQ ID NO: 27749 - protein, 178 aa, Homo sapiens
  MOD_RES (9)..(9): Selenocysteine
  MOD_RES (54)..(54): Selenocysteine
  MOD_RES (96)..(96): Selenocysteine
  MOD_RES (114)..(114): Selenocysteine
  MOD_RES (140)..(140): Selenocysteine
  MOD_RES (152)..(152): Selenocysteine
MYPQGRHPXPLQSGQPFKFSILEICDRIKEEFQFLQAQYHSLKLECEKLASEKXEMQRHYVMYYEMSYGLNIEMHKQAEIVKRLSGICAQIIPFLXQEHQQQVLQAVERAKQVXVGELNSLIGQQQLQPLSHHAPPVPLXPRPAGLVGGSAXGLLALSGALAAQAQLAAAVKEDRAGV

SEQ ID NO: 27750 - protein, 744 aa, Homo sapiens
  MOD_RES (9)..(9): Selenocysteine
  MOD_RES (54)..(54): Selenocysteine
  MOD_RES (96)..(96): Selenocysteine
  MOD_RES (114)..(114): Selenocysteine
  MOD_RES (140)..(140): Selenocysteine
  MOD_RES (152)..(152): Selenocysteine
  MOD_RES (253)..(254): Selenocysteine
  MOD_RES (299)..(299): Selenocysteine
  MOD_RES (315)..(315): Selenocysteine
  MOD_RES (335)..(335): Selenocysteine
  MOD_RES (345)..(345): Selenocysteine
  MOD_RES (351)..(352): Selenocysteine
  MOD_RES (361)..(361): Selenocysteine
  MOD_RES (454)..(454): Selenocysteine
  MOD_RES (465)..(465): Selenocysteine
  MOD_RES (470)..(470): Selenocysteine
  MOD_RES (475)..(475): Selenocysteine
  MOD_RES (493)..(493): Selenocysteine
  MOD_RES (527)..(527): Selenocysteine
  MOD_RES (537)..(537): Selenocysteine
  MOD_RES (545)..(545): Selenocysteine
  MOD_RES (581)..(581): Selenocysteine
  MOD_RES (590)..(590): Selenocysteine
  MOD_RES (603)..(603): Selenocysteine
  MOD_RES (607)..(607): Selenocysteine
  MOD_RES (613)..(613): Selenocysteine
  MOD_RES (690)..(690): Selenocysteine
  MOD_RES (701)..(701): Selenocysteine
  MOD_RES (730)..(730): Selenocysteine
  MOD_RES (738)..(738): Selenocysteine
MYPQGRHPXPLQSGQPFKFSILEICDRIKEEFQFLQAQYHSLKLECEKLASEKXEMQRHYVMYYEMSYGLNIEMHKQAEIVKRLSGICAQIIPFLXQEHQQQVLQAVERAKQVXVGELNSLIGQQQLQPLSHHAPPVPLXPRPAGLVGGSAXGLLALSGALAAQAQLAAAVKEDRAGVEAEGSRVERAPSRSASPSPPESLVEEERPSGPGGGGKQRADEKEPSGPYESDEDKSDYNLVVDEDQPSEPPSPAXXPCGKVPICIPARRDLVDSPASLASSLGSPLPRAKELILNDLPASXPASKSCDSSPPQDASXPGPSSASHLCQLAAKPAPSXDSVALRSPLXLSSPFXXSFSLGSHSXLNGDLSVPSSYVSLHLSPQVSSSVVYGRSPVMAFESHPHLRGSSVSSSLPSIPGGKPAYSFHVSADGQMQPVPFPSDALVGAGIPRHARQLHXLAHGEVVCAVXISGSXQHVYXGGKGCVKVWDVGQPGAKXPVAQLDCLNRDNYIRSCKLLPDGRSLIVGGEASXLSIWDLAAPXPRIKAELXSSAPACYALAVSPDAKVCFSCCSDGNIVVWDLQNQXMVRQFQGHXDGASCIDISDYGXRLWXGGLDNXVRCWDLREGRQLQQHDFSSQIFSLGHCPNQDWLAVGMESSNVEILHVRKPEKYQLHLHESCVLSLKFASCGRWFVSXGKDNLLNAWRXPYGASIFQSKESSSVLSCDISRNNKYIVXGSGDKKAXVYEVVY

SEQ ID NO: 27751 - protein, 140 aa, Homo sapiens
  MOD_RES (9)..(9): Selenocysteine
  MOD_RES (54)..(54): Selenocysteine
  MOD_RES (96)..(96): Selenocysteine
MYPQGRHPXPLQSGQPFKFSILEICDRIKEEFQFLQAQYHSLKLECEKLASEKXEMQRHYVMYYEMSYGLNIEMHKQAEIVKRLSGICAQIIPFLXQESASPSPPESLVEEERPSGPGGGGKQRADEKEPSGPYESDEDK

SEQ ID NO: 27752 - protein, 280 aa, Homo sapiens
  MOD_RES (1)..(1): Any amino acid
  MOD_RES (19)..(19): Selenocysteine
  MOD_RES (102)..(102): Selenocysteine
  MOD_RES (113)..(113): Selenocysteine
  MOD_RES (118)..(118): Selenocysteine
  MOD_RES (123)..(123): Selenocysteine
  MOD_RES (141)..(141): Selenocysteine
  MOD_RES (175)..(175): Selenocysteine
  MOD_RES (185)..(185): Selenocysteine
  MOD_RES (193)..(193): Selenocysteine
  MOD_RES (229)..(229): Selenocysteine
  MOD_RES (238)..(238): Selenocysteine
  MOD_RES (251)..(251): Selenocysteine
  MOD_RES (255)..(255): Selenocysteine
  MOD_RES (261)..(261): Selenocysteine
XQEHQQQVLQAVERAKQVXVGELNSLIGVSSSVVYGRSPVMAFESHPHLRGSSVSSSLPSIPGGKPAYSFHVSADGQMQPVPFPSDALVGAGIPRHARQLHXLAHGEVVCAVXISGSXQHVYXGGKGCVKVWDVGQPGAKXPVAQLDCLNRDNYIRSCKLLPDGRSLIVGGEASXLSIWDLAAPXPRIKAELXSSAPACYALAVSPDAKVCFSCCSDGNIVVWDLQNQXMVRQFQGHXDGASCIDISDYGXRLWXGGLDNXVRCWDLREGRQLQQHDFSS

SEQ ID NO: 27753 - protein, 131 aa, Homo sapiens
  MOD_RES (1)..(1): Any amino acid
  MOD_RES (3)..(3): Selenocysteine
  MOD_RES (48)..(48): Selenocysteine
XQXPLQSGQPFKFSILEICDRIKEEFQFLQAQYHSLKLECEKLASEKXEMQRHYVMYYEMSYGLNIEMHKQSASPSPPESLVEEERPSGPGGGGKQRADEKEPSGPYESDEDKSDYNLVVDEDQPSEPPSP

SEQ ID NO: 27754 - protein, 762 aa, Homo sapiens
  MOD_RES (14)..(14): Selenocysteine
  MOD_RES (48)..(48): Selenocysteine
  MOD_RES (72)..(72): Selenocysteine
  MOD_RES (80)..(80): Selenocysteine
  MOD_RES (108)..(108): Selenocysteine
  MOD_RES (110)..(110): Selenocysteine
  MOD_RES (130)..(130): Selenocysteine
  MOD_RES (153)..(153): Selenocysteine
  MOD_RES (172)..(172): Selenocysteine
  MOD_RES (252)..(252): Selenocysteine
  MOD_RES (278)..(278): Selenocysteine
  MOD_RES (289)..(289): Selenocysteine
  MOD_RES (294)..(294): Selenocysteine
  MOD_RES (305)..(305): Selenocysteine
  MOD_RES (312)..(312): Selenocysteine
  MOD_RES (314)..(314): Selenocysteine
  MOD_RES (321)..(321): Selenocysteine
  MOD_RES (324)..(324): Selenocysteine
  MOD_RES (326)..(327): Selenocysteine
  MOD_RES (349)..(349): Selenocysteine
  MOD_RES (354)..(354): Selenocysteine
  MOD_RES (374)..(374): Selenocysteine
  MOD_RES (422)..(422): Selenocysteine
  MOD_RES (472)..(472): Selenocysteine
  MOD_RES (483)..(483): Selenocysteine
  MOD_RES (488)..(488): Selenocysteine
  MOD_RES (493)..(493): Selenocysteine
  MOD_RES (536)..(536): Selenocysteine
  MOD_RES (545)..(545): Selenocysteine
  MOD_RES (547)..(547): Selenocysteine
  MOD_RES (555)..(555): Selenocysteine
  MOD_RES (563)..(563): Selenocysteine
  MOD_RES (599)..(599): Selenocysteine
  MOD_RES (608)..(608): Selenocysteine
  MOD_RES (621)..(621): Selenocysteine
  MOD_RES (625)..(625): Selenocysteine
  MOD_RES (631)..(631): Selenocysteine
  MOD_RES (649)..(649): Selenocysteine
  MOD_RES (660)..(660): Selenocysteine
  MOD_RES (679)..(679): Selenocysteine
  MOD_RES (708)..(708): Selenocysteine
  MOD_RES (719)..(719): Selenocysteine
  MOD_RES (748)..(748): Selenocysteine
  MOD_RES (756)..(756): Selenocysteine
MAPHQPGQPGFKFXVAESCDRIKDEFQFLQAQYHSLKVEYDKLANEKXEMQRHYVMYYEMSYGLNIEMHKQXEIAKRLNXILAQIMPFLSQEHQQQVAQAVERAKQVXMXELNAIIGQQQLQAQHLSHAXHGPPVQLPPHPSGLQPPGIPPVXGSSSGLLALGALGSQAHLXVKDEKNHHELDHRERESSANNSVSPSESLRASEKHRGSADYSMEAKKRKAEEKDSLSRYDSDGDKSDDLVVDVSNEDPAXPRVSPAHSPPENGLDKARSLKKDAPXSPASVASSSSXPSSKXKDLGHNDKSSXPGLKSNXPXPRNDAPXPGXSXXPGLRSMPGKPPGMDPIASALRXPISIXSSYAAPFAMMSHHEMNGSLXSPGAYAGLHNIPPQMSAAAAAAAAAYGRSPMVSFGAVGFDPHPPMRAXGLPSSLASIPGGKPAYSFHVSADGQMQPVPFPHDALAGPGIPRHARQINXLSHGEVVCAVXISNPXRHVYXGGKGCVKIWDISQPGSKSPISQLDCLNRDNYIRSCKLLPDGRXLIVGGEASXLXIWDLASPXPRIKAELXSSAPACYALAISPDAKVCFSCCSDGNIAVWDLHNQXLVRQFQGHXDGASCIDISHDGXKLWXGGLDNXVRSWDLREGRQLQQHDFXSQIFSLGYCPXGEWLAVGMESSNVEVLHHXKPDKYQLHLHESCVLSLKFAYCGKWFVSXGKDNLLNAWRXPYGASIFQSKESSSVLSCDISADDKYIVXGSGDKKAXVYEVIY

SEQ ID NO: 27755 - protein, 772 aa, Homo sapiens
  MOD_RES (27)..(27): Selenocysteine
  MOD_RES (61)..(61): Selenocysteine
  MOD_RES (85)..(85): Selenocysteine
  MOD_RES (93)..(93): Selenocysteine
  MOD_RES (121)..(121): Selenocysteine
  MOD_RES (123)..(123): Selenocysteine
  MOD_RES (142)..(142): Selenocysteine
  MOD_RES (165)..(165): Selenocysteine
  MOD_RES (184)..(184): Selenocysteine
  MOD_RES (264)..(264): Selenocysteine
  MOD_RES (290)..(290): Selenocysteine
  MOD_RES (301)..(301): Selenocysteine
  MOD_RES (306)..(306): Selenocysteine
  MOD_RES (317)..(317): Selenocysteine
  MOD_RES (324)..(324): Selenocysteine
  MOD_RES (326)..(326): Selenocysteine
  MOD_RES (333)..(333): Selenocysteine
  MOD_RES (336)..(336): Selenocysteine
  MOD_RES (338)..(339): Selenocysteine
  MOD_RES (364)..(364): Selenocysteine
  MOD_RES (369)..(369): Selenocysteine
  MOD_RES (389)..(389): Selenocysteine
  MOD_RES (432)..(432): Selenocysteine
  MOD_RES (482)..(482): Selenocysteine
  MOD_RES (493)..(493): Selenocysteine
  MOD_RES (498)..(498): Selenocysteine
  MOD_RES (503)..(503): Selenocysteine
  MOD_RES (546)..(546): Selenocysteine
  MOD_RES (555)..(555): Selenocysteine
  MOD_RES (557)..(557): Selenocysteine
  MOD_RES (565)..(565): Selenocysteine
  MOD_RES (573)..(573): Selenocysteine
  MOD_RES (609)..(609): Selenocysteine
  MOD_RES (618)..(618): Selenocysteine
  MOD_RES (631)..(631): Selenocysteine
  MOD_RES (635)..(635): Selenocysteine
  MOD_RES (641)..(641): Selenocysteine
  MOD_RES (659)..(659): Selenocysteine
  MOD_RES (670)..(670): Selenocysteine
  MOD_RES (689)..(689): Selenocysteine
  MOD_RES (718)..(718): Selenocysteine
  MOD_RES (729)..(729): Selenocysteine
  MOD_RES (758)..(758): Selenocysteine
  MOD_RES (766)..(766): Selenocysteine
MPPPPPLSCLRGLQAPHQPGQPGFKFXVAESCDRIKDEFQFLQAQYHSLKVEYDKLANEKXEMQRHYVMYYEMSYGLNIEMHKQXEIAKRLNXILAQIMPFLSQEHQQQVAQAVERAKQVXMXELNAIIGQQLQAQHLSHAXHGPPVQLPPHPSGLQPPGIPPVXGSSSGLLALGALGSQAHLXVKDEKNHHELDHRERESSANNSVSPSESLRASEKHRGSADYSMEAKKRKAEEKDSLSRYDSDGDKSDDLVVDVSNEDPAXPRVSPAHSPPENGLDKARSLKKDAPXSPASVASSSSXPSSKXKDLGHNDKSSXPGLKSNXPXPRNDAPXPGXSXXPGLRSMPGKPPGMDPIGIMASALRXPISIXSSYAAPFAMMSHHEMNGSLXSPGAYAGLHNIPPQMSAAAAAAAAAYGRSPMVGFDPHPPMRAXGLPSSLASIPGGKPAYSFHVSADGQMQPVPFPHDALAGPGIPRHARQINXLSHGEVVCAVXISNPXRHVYXGGKGCVKIWDISQPGSKSPISQLDCLNRDNYIRSCKLLPDGRXLIVGGEASXLXIWDLASPXPRIKAELXSSAPACYALAISPDAKVCFSCCSDGNIAVWDLHNQXLVRQFQGHXDGASCIDISHDGXKLWXGGLDNXVRSWDLREGRQLQQHDFXSQIFSLGYCPXGEWLAVGMESSNVEVLHHXKPDKYQLHLHESCVLSLKFAYCGKWFVSXGKDNLLNAWRXPYGASIFQSKESSSVLSCDISADDKYIVXGSGDKKAXVYEVIY

SEQ ID NO: 27756 - protein, 774 aa, Homo sapiens
  MOD_RES (27)..(27): Selenocysteine
  MOD_RES (61)..(61): Selenocysteine
  MOD_RES (85)..(85): Selenocysteine
  MOD_RES (93)..(93): Selenocysteine
  MOD_RES (121)..(121): Selenocysteine
  MOD_RES (123)..(123): Selenocysteine
  MOD_RES (142)..(142): Selenocysteine
  MOD_RES (165)..(165): Selenocysteine
  MOD_RES (184)..(184): Selenocysteine
  MOD_RES (264)..(264): Selenocysteine
  MOD_RES (290)..(290): Selenocysteine
  MOD_RES (301)..(301): Selenocysteine
  MOD_RES (306)..(306): Selenocysteine
  MOD_RES (317)..(317): Selenocysteine
  MOD_RES (324)..(324): Selenocysteine
  MOD_RES (326)..(326): Selenocysteine
  MOD_RES (333)..(333): Selenocysteine
  MOD_RES (336)..(336): Selenocysteine
  MOD_RES (338)..(339): Selenocysteine
  MOD_RES (361)..(361): Selenocysteine
  MOD_RES (366)..(366): Selenocysteine
  MOD_RES (386)..(386): Selenocysteine
  MOD_RES (434)..(434): Selenocysteine
  MOD_RES (484)..(484): Selenocysteine
  MOD_RES (495)..(495): Selenocysteine
  MOD_RES (500)..(500): Selenocysteine
  MOD_RES (505)..(505): Selenocysteine
  MOD_RES (548)..(548): Selenocysteine
  MOD_RES (557)..(557): Selenocysteine
  MOD_RES (559)..(559): Selenocysteine
  MOD_RES (567)..(567): Selenocysteine
  MOD_RES (575)..(575): Selenocysteine
  MOD_RES (611)..(611): Selenocysteine
  MOD_RES (620)..(620): Selenocysteine
  MOD_RES (633)..(633): Selenocysteine
  MOD_RES (637)..(637): Selenocysteine
  MOD_RES (643)..(643): Selenocysteine
  MOD_RES (661)..(661): Selenocysteine
  MOD_RES (672)..(672): Selenocysteine
  MOD_RES (691)..(691): Selenocysteine
  MOD_RES (720)..(720): Selenocysteine
  MOD_RES (731)..(731): Selenocysteine
  MOD_RES (760)..(760): Selenocysteine
  MOD_RES (768)..(768): Selenocysteine
MPPPPPLSCLRGLQAPHQPGQPGFKFXVAESCDRIKDEFQFLQAQYHSLKVEYDKLANEKXEMQRHYVMYYEMSYGLNIEMHKQXEIAKRLNXILAQIMPFLSQEHQQQVAQAVERAKQVXMXELNAIIGQQLQAQHLSHAXHGPPVQLPPHPSGLQPPGIPPVXGSSSGLLALGALGSQAHLXVKDEKNHHELDHRERESSANNSVSPSESLRASEKHRGSADYSMEAKKRKAEEKDSLSRYDSDGDKSDDLVVDVSNEDPAXPRVSPAHSPPENGLDKARSLKKDAPXSPASVASSSSXPSSKXKDLGHNDKSSXPGLKSNXPXPRNDAPXPGXSXXPGLRSMPGKPPGMDPIASALRXPISIXSSYAAPFAMMSHHEMNGSLXSPGAYAGLHNIPPQMSAAAAAAAAAYGRSPMVSFGAVGFDPHPPMRAXGLPSSLASIPGGKPAYSFHVSADGQMQPVPFPHDALAGPGIPRHARQINXLSHGEVVCAVXISNPXRHVYXGGKGCVKIWDISQPGSKSPISQLDCLNRDNYIRSCKLLPDGRXLIVGGEASXLXIWDLASPXPRIKAELXSSAPACYALAISPDAKVCFSCCSDGNIAVWDLHNQXLVRQFQGHXDGASCIDISHDGXKLWXGGLDNXVRSWDLREGRQLQQHDFXSQIFSLGYCPXGEWLAVGMESSNVEVLHHXKPDKYQLHLHESCVLSLKFAYCGKWFVSXGKDNLLNAWRXPYGASIFQSKESSSVLSCDISADDKYIVXGSGDKKAXVYEVIY

SEQ ID NO: 27757 - protein, 778 aa, Homo sapiens
  MOD_RES (27)..(27): Selenocysteine
  MOD_RES (61)..(61): Selenocysteine
  MOD_RES (85)..(85): Selenocysteine
  MOD_RES (93)..(93): Selenocysteine
  MOD_RES (121)..(121): Selenocysteine
  MOD_RES (123)..(123): Selenocysteine
  MOD_RES (143)..(143): Selenocysteine
  MOD_RES (166)..(166): Selenocysteine
  MOD_RES (185)..(185): Selenocysteine
  MOD_RES (265)..(265): Selenocysteine
  MOD_RES (291)..(291): Selenocysteine
  MOD_RES (302)..(302): Selenocysteine
  MOD_RES (307)..(307): Selenocysteine
  MOD_RES (318)..(318): Selenocysteine
  MOD_RES (325)..(325): Selenocysteine
  MOD_RES (327)..(327): Selenocysteine
  MOD_RES (334)..(334): Selenocysteine
  MOD_RES (337)..(337): Selenocysteine
  MOD_RES (339)..(340): Selenocysteine
  MOD_RES (365)..(365): Selenocysteine
  MOD_RES (370)..(370): Selenocysteine
  MOD_RES (390)..(390): Selenocysteine
  MOD_RES (438)..(438): Selenocysteine
  MOD_RES (488)..(488): Selenocysteine
  MOD_RES (499)..(499): Selenocysteine
  MOD_RES (504)..(504): Selenocysteine
  MOD_RES (509)..(509): Selenocysteine
  MOD_RES (552)..(552): Selenocysteine
  MOD_RES (561)..(561): Selenocysteine
  MOD_RES (563)..(563): Selenocysteine
  MOD_RES (571)..(571): Selenocysteine
  MOD_RES (579)..(579): Selenocysteine
  MOD_RES (615)..(615): Selenocysteine
  MOD_RES (624)..(624): Selenocysteine
  MOD_RES (637)..(637): Selenocysteine
  MOD_RES (641)..(641): Selenocysteine
  MOD_RES (647)..(647): Selenocysteine
  MOD_RES (665)..(665): Selenocysteine
  MOD_RES (676)..(676): Selenocysteine
  MOD_RES (695)..(695): Selenocysteine
  MOD_RES (724)..(724): Selenocysteine
  MOD_RES (735)..(735): Selenocysteine
  MOD_RES (764)..(764): Selenocysteine
  MOD_RES (772)..(772): Selenocysteine
MPPPPPLSCLRGLQAPHQPGQPGFKFXVAESCDRIKDEFQFLQAQYHSLKVEYDKLANEKXEMQRHYVMYYEMSYGLNIEMHKQXEIAKRLNXILAQIMPFLSQEHQQQVAQAVERAKQVXMXELNAIIGQQQLQAQHLSHAXHGPPVQLPPHPSGLQPPGIPPVXGSSSGLLALGALGSQAHLXVKDEKNHHELDHRERESSANNSVSPSESLRASEKHRGSADYSMEAKKRKAEEKDSLSRYDSDGDKSDDLVVDVSNEDPAXPRVSPAHSPPENGLDKARSLKKDAPXSPASVASSSSXPSSKXKDLGHNDKSSXPGLKSNXPXPRNDAPXPGXSXXPGLRSMPGKPPGMDPIGIMASALRXPISIXSSYAAPFAMMSHHEMNGSLXSPGAYAGLHNIPPQMSAAAAAAAAAYGRSPMVSFGAVGFDPHPPMRAXGLPSSLASIPGGKPAYSFHVSADGQMQPVPFPHDALAGPGIPRHARQINXLSHGEVVCAVXISNPXRHVYXGGKGCVKIWDISQPGSKSPISQLDCLNRDNYIRSCKLLPDGRXLIVGGEASXLXIWDLASPXPRIKAELXSSAPACYALAISPDAKVCFSCCSDGNIAVWDLHNQXLVRQFQGHXDGASCIDISHDGXKLWXGGLDNXVRSWDLREGRQLQQHDFXSQIFSLGYCPXGEWLAVGMESSNVEVLHHXKPDKYQLHLHESCVLSLKFAYCGKWFVSXGKDNLLNAWRXPYGASIFQSKESSSVLSCDISADDKYIVXGSGDKKAXVYEVIY

SEQ ID NO: 27758 - protein, 716 aa, Homo sapiens
  MOD_RES (23)..(23): Selenocysteine
  MOD_RES (31)..(31): Selenocysteine
  MOD_RES (59)..(59): Selenocysteine
  MOD_RES (61)..(61): Selenocysteine
  MOD_RES (81)..(81): Selenocysteine
  MOD_RES (104)..(104): Selenocysteine
  MOD_RES (123)..(123): Selenocysteine
  MOD_RES (203)..(203): Selenocysteine
  MOD_RES (229)..(229): Selenocysteine
  MOD_RES (240)..(240): Selenocysteine
  MOD_RES (245)..(245): Selenocysteine
  MOD_RES (256)..(256): Selenocysteine
  MOD_RES (263)..(263): Selenocysteine
  MOD_RES (265)..(265): Selenocysteine
  MOD_RES (272)..(272): Selenocysteine
  MOD_RES (275)..(275): Selenocysteine
  MOD_RES (277)..(278): Selenocysteine
  MOD_RES (303)..(303): Selenocysteine
  MOD_RES (308)..(308): Selenocysteine
  MOD_RES (328)..(328): Selenocysteine
  MOD_RES (376)..(376): Selenocysteine
  MOD_RES (426)..(426): Selenocysteine
  MOD_RES (437)..(437): Selenocysteine
  MOD_RES (442)..(442): Selenocysteine
  MOD_RES (447)..(447): Selenocysteine
  MOD_RES (490)..(490): Selenocysteine
  MOD_RES (499)..(499): Selenocysteine
  MOD_RES (501)..(501): Selenocysteine
  MOD_RES (509)..(509): Selenocysteine
  MOD_RES (517)..(517): Selenocysteine
  MOD_RES (553)..(553): Selenocysteine
  MOD_RES (562)..(562): Selenocysteine
  MOD_RES (575)..(575): Selenocysteine
  MOD_RES (579)..(579): Selenocysteine
  MOD_RES (585)..(585): Selenocysteine
  MOD_RES (603)..(603): Selenocysteine
  MOD_RES (614)..(614): Selenocysteine
  MOD_RES (633)..(633): Selenocysteine
  MOD_RES (662)..(662): Selenocysteine
  MOD_RES (673)..(673): Selenocysteine
  MOD_RES (702)..(702): Selenocysteine
  MOD_RES (710)..(710): Selenocysteine
MQRHYVMYYEMSYGLNIEMHKQXEIAKRLNXILAQIMPFLSQEHQQQVAQAVERAKQVXMXELNAIIGQQQLQAQHLSHAXHGPPVQLPPHPSGLQPPGIPPVXGSSSGLLALGALGSQAHLXVKDEKNHHELDHRERESSANNSVSPSESLRASEKHRGSADYSMEAKKRKAEEKDSLSRYDSDGDKSDDLVVDVSNEDPAXPRVSPAHSPPENGLDKARSLKKDAPXSPASVASSSSXPSSKXKDLGHNDKSSXPGLKSNXPXPRNDAPXPGXSXXPGLRSMPGKPPGMDPIGIMASALRXPISIXSSYAAPFAMMSHHEMNGSLXSPGAYAGLHNIPPQMSAAAAAAAAAYGRSPMVSFGAVGFDPHPPMRAXGLPSSLASIPGGKPAYSFHVSADGQMQPVPFPHDALAGPGIPRHARQINXLSHGEVVCAVXISNPXRHVYXGGKGCVKIWDISQPGSKSPISQLDCLNRDNYIRSCKLLPDGRXLIVGGEASXLXIWDLASPXPRIKAELXSSAPACYALAISPDAKVCFSCCSDGNIAVWDLHNQXLVRQFQGHXDGASCIDISHDGXKLWXGGLDNXVRSWDLREGRQLQQHDFXSQIFSLGYCPXGEWLAVGMESSNVEVLHHXKPDKYQLHLHESCVLSLKFAYCGKWFVSXGKDNLLNAWRXPYGASIFQSKESSSVLSCDISADDKYIVXGSGDKKAXVYEVIY

SEQ ID NO: 27759 - protein, 103 aa, Homo sapiens
  MOD_RES (23)..(23): Selenocysteine
  MOD_RES (31)..(31): Selenocysteine
  MOD_RES (59)..(59): Selenocysteine
  MOD_RES (61)..(61): Selenocysteine
  MOD_RES (78)..(78): Selenocysteine
  MOD_RES (91)..(91): Selenocysteine
MQRHYVMYYEMSYGLNIEMHKQXEIAKRLNXILAQIMPFLSQEHQQQVAQAVERAKQVXMXELNAIIGVRGLPNLPLXQQQLQAQHLSHAXHGPPVQLPPHPS

SEQ ID NO: 27760 - protein, 154 aa, Homo sapiens
  MOD_RES (13)..(13): Selenocysteine
  MOD_RES (30)..(31): Selenocysteine
  MOD_RES (58)..(58): Selenocysteine
  MOD_RES (77)..(77): Selenocysteine
  MOD_RES (85)..(85): Selenocysteine
  MOD_RES (113)..(113): Selenocysteine
  MOD_RES (115)..(115): Selenocysteine
  MOD_RES (135)..(135): Selenocysteine
MRPRAWGAVGAPXPAGGAAWIWGDERQVPXXAQPQGGPERGHNLVLPSPSPASIAGAXWRRYYEMSYGLNIEMHKQXEIAKRLNXILAQIMPFLSQEHQQQVAQAVERAKQVXMXELNAIIGQQQLQAQHLSHAXHGPPVQLPPHPSGLQPPGI

SEQ ID NO: 27761 - protein, 699 aa, Homo sapiens
  MOD_RES (13)..(13): Selenocysteine
  MOD_RES (21)..(21): Selenocysteine
  MOD_RES (49)..(49): Selenocysteine
  MOD_RES (51)..(51): Selenocysteine
  MOD_RES (68)..(68): Selenocysteine
  MOD_RES (81)..(81): Selenocysteine
  MOD_RES (104)..(104): Selenocysteine
  MOD_RES (123)..(123): Selenocysteine
  MOD_RES (203)..(203): Selenocysteine
  MOD_RES (229)..(229): Selenocysteine
  MOD_RES (240)..(240): Selenocysteine
  MOD_RES (245)..(245): Selenocysteine
  MOD_RES (256)..(256): Selenocysteine
  MOD_RES (263)..(263): Selenocysteine
  MOD_RES (265)..(265): Selenocysteine
  MOD_RES (272)..(272): Selenocysteine
  MOD_RES (275)..(275): Selenocysteine
  MOD_RES (277)..(278): Selenocysteine
  MOD_RES (291)..(291): Selenocysteine
  MOD_RES (296)..(296): Selenocysteine
  MOD_RES (316)..(316): Selenocysteine
  MOD_RES (359)..(359): Selenocysteine
  MOD_RES (409)..(409): Selenocysteine
  MOD_RES (420)..(420): Selenocysteine
  MOD_RES (425)..(425): Selenocysteine
  MOD_RES (430)..(430): Selenocysteine
  MOD_RES (473)..(473): Selenocysteine
  MOD_RES (482)..(482): Selenocysteine
  MOD_RES (484)..(484): Selenocysteine
  MOD_RES (492)..(492): Selenocysteine
  MOD_RES (500)..(500): Selenocysteine
  MOD_RES (536)..(536): Selenocysteine
  MOD_RES (545)..(545): Selenocysteine
  MOD_RES (558)..(558): Selenocysteine
  MOD_RES (562)..(562): Selenocysteine
  MOD_RES (568)..(568): Selenocysteine
  MOD_RES (586)..(586): Selenocysteine
  MOD_RES (597)..(597): Selenocysteine
  MOD_RES (616)..(616): Selenocysteine
  MOD_RES (645)..(645): Selenocysteine
  MOD_RES (656)..(656): Selenocysteine
  MOD_RES (685)..(685): Selenocysteine
  MOD_RES (693)..(693): Selenocysteine
MSYGLNIEMHKQXEIAKRLNXILAQIMPFLSQEHQQQVAQAVERAKQVXMXELNAIIGVRGLPNLPLXQQQLQAQHLSHAXHGPPVQLPPHPSGLQPPGIPPVXGSSSGLLALGALGSQAHLXVKDEKNHHELDHRERESSANNSVSPSESLRASEKHRGSADYSMEAKKRKAEEKDSLSRYDSDGDKSDDLVVDVSNEDPAXPRVSPAHSPPENGLDKARSLKKDAPXSPASVASSSSXPSSKXKDLGHNDKSSXPGLKSNXPXPRNDAPXPGXSXXPGLRSMPASALRXPISIXSSYAAPFAMMSHHEMNGSLXSPGAYAGLHNIPPQMSAAAAAAAAAYGRSPMVGFDPHPPMRAXGLPSSLASIPGGKPAYSFHVSADGQMQPVPFPHDALAGPGIPRHARQINXLSHGEVVCAVXISNPXRHVYXGGKGCVKIWDISQPGSKSPISQLDCLNRDNYIRSCKLLPDGRXLIVGGEASXLXIWDLASPXPRIKAELXSSAPACYALAISPDAKVCFSCCSDGNIAVWDLHNQXLVRQFQGHXDGASCIDISHDGXKLWXGGLDNXVRSWDLREGRQLQQHDFXSQIFSLGYCPXGEWLAVGMESSNVEVLHHXKPDKYQLHLHESCVLSLKFAYCGKWFVSXGKDNLLNAWRXPYGASIFQSKESSSVLSCDISADDKYIVXGSGDKKAXVYEVIY

SEQ ID NO: 27762 - protein, 353 aa, Homo sapiens
  MOD_RES (13)..(13): Selenocysteine
  MOD_RES (63)..(63): Selenocysteine
  MOD_RES (74)..(74): Selenocysteine
  MOD_RES (79)..(79): Selenocysteine
  MOD_RES (84)..(84): Selenocysteine
  MOD_RES (127)..(127): Selenocysteine
  MOD_RES (136)..(136): Selenocysteine
  MOD_RES (138)..(138): Selenocysteine
  MOD_RES (146)..(146): Selenocysteine
  MOD_RES (154)..(154): Selenocysteine
  MOD_RES (190)..(190): Selenocysteine
  MOD_RES (199)..(199): Selenocysteine
  MOD_RES (212)..(212): Selenocysteine
  MOD_RES (216)..(216): Selenocysteine
  MOD_RES (222)..(222): Selenocysteine
  MOD_RES (240)..(240): Selenocysteine
  MOD_RES (251)..(251): Selenocysteine
  MOD_RES (270)..(270): Selenocysteine
  MOD_RES (299)..(299): Selenocysteine
  MOD_RES (310)..(310): Selenocysteine
  MOD_RES (339)..(339): Selenocysteine
  MOD_RES (347)..(347): Selenocysteine
MVGFDPHPPMRAXGLPSSLASIPGGKPAYSFHVSADGQMQPVPFPHDALAGPGIPRHARQINXLSHGEVVCAVXISNPXRHVYXGGKGCVKIWDISQPGSKSPISQLDCLNRDNYIRSCKLLPDGRXLIVGGEASXLXIWDLASPXPRIKAELXSSAPACYALAISPDAKVCFSCCSDGNIAVWDLHNQXLVRQFQGHXDGASCIDISHDGXKLWXGGLDNXVRSWDLREGRQLQQHDFXSQIFSLGYCPXGEWLAVGMESSNVEVLHHXKPDKYQLHLHESCVLSLKFAYCGKWFVSXGKDNLLNAWRXPYGASIFQSKESSSVLSCDISADDKYIVXGSGDKKAXVYEVIY

SEQ ID NO: 27763 - protein, 445 aa, Homo sapiens
  MOD_RES (21)..(21): Selenocysteine
  MOD_RES (55)..(55): Selenocysteine
  MOD_RES (79)..(79): Selenocysteine
  MOD_RES (87)..(87): Selenocysteine
  MOD_RES (115)..(115): Selenocysteine
  MOD_RES (117)..(117): Selenocysteine
  MOD_RES (137)..(137): Selenocysteine
  MOD_RES (160)..(160): Selenocysteine
  MOD_RES (179)..(179): Selenocysteine
  MOD_RES (259)..(259): Selenocysteine
  MOD_RES (285)..(285): Selenocysteine
  MOD_RES (296)..(296): Selenocysteine
  MOD_RES (301)..(301): Selenocysteine
  MOD_RES (312)..(312): Selenocysteine
  MOD_RES (319)..(319): Selenocysteine
  MOD_RES (321)..(321): Selenocysteine
  MOD_RES (328)..(328): Selenocysteine
  MOD_RES (331)..(331): Selenocysteine
  MOD_RES (333)..(334): Selenocysteine
  MOD_RES (356)..(356): Selenocysteine
  MOD_RES (361)..(361): Selenocysteine
  MOD_RES (381)..(381): Selenocysteine
  MOD_RES (424)..(424): Selenocysteine
MYPQGRHPAPHQPGQPGFKFXVAESCDRIKDEFQFLQAQYHSLKVEYDKLANEKXEMQRHYVMYYEMSYGLNIEMHKQXEIAKRLNXILAQIMPFLSQEHQQQVAQAVERAKQVXMXELNAIIGQQQLQAQHLSHAXHGPPVQLPPHPSGLQPPGIPPVXGSSSGLLALGALGSQAHLXVKDEKNHHELDHRERESSANNSVSPSESLRASEKHRGSADYSMEAKKRKAEEKDSLSRYDSDGDKSDDLVVDVSNEDPAXPRVSPAHSPPENGLDKARSLKKDAPXSPASVASSSSXPSSKXKDLGHNDKSSXPGLKSNXPXPRNDAPXPGXSXXPGLRSMPGKPPGMDPIASALRXPISIXSSYAAPFAMMSHHEMNGSLXSPGAYAGLHNIPPQMSAAAAAAAAAYGRSPMVGFDPHPPMRAXGLPSSLASIPGGKPVLIPCEC

SEQ ID NO: 27764 - protein, 448 aa, Homo sapiens
  MOD_RES (21)..(21): Selenocysteine
  MOD_RES (55)..(55): Selenocysteine
  MOD_RES (79)..(79): Selenocysteine
  MOD_RES (87)..(87): Selenocysteine
  MOD_RES (115)..(115): Selenocysteine
  MOD_RES (117)..(117): Selenocysteine
  MOD_RES (137)..(137): Selenocysteine
  MOD_RES (160)..(160): Selenocysteine
  MOD_RES (179)..(179): Selenocysteine
  MOD_RES (259)..(259): Selenocysteine
  MOD_RES (285)..(285): Selenocysteine
  MOD_RES (296)..(296): Selenocysteine
  MOD_RES (301)..(301): Selenocysteine
  MOD_RES (312)..(312): Selenocysteine
  MOD_RES (319)..(319): Selenocysteine
  MOD_RES (321)..(321): Selenocysteine
  MOD_RES (328)..(328): Selenocysteine
  MOD_RES (331)..(331): Selenocysteine
  MOD_RES (333)..(334): Selenocysteine
  MOD_RES (359)..(359): Selenocysteine
  MOD_RES (364)..(364): Selenocysteine
  MOD_RES (384)..(384): Selenocysteine
  MOD_RES (427)..(427): Selenocysteine
MYPQGRHPAPHQPGQPGFKFXVAESCDRIKDEFQFLQAQYHSLKVEYDKLANEKXEMQRHYVMYYEMSYGLNIEMHKQXEIAKRLNXILAQIMPFLSQEHQQQVAQAVERAKQVXMXELNAIIGQQQLQAQHLSHAXHGPPVQLPPHPSGLQPPGIPPVXGSSSGLLALGALGSQAHLXVKDEKNHHELDHRERESSANNSVSPSESLRASEKHRGSADYSMEAKKRKAEEKDSLSRYDSDGDKSDDLVVDVSNEDPAXPRVSPAHSPPENGLDKARSLKKDAPXSPASVASSSSXPSSKXKDLGHNDKSSXPGLKSNXPXPRNDAPXPGXSXXPGLRSMPGKPPGMDPIGIMASALRXPISIXSSYAAPFAMMSHHEMNGSLXSPGAYAGLHNIPPQMSAAAAAAAAAYGRSPMVGFDPHPPMRAXGLPSSLASIPGGKPVLIPCEC

SEQ ID NO: 27765 - protein, 760 aa, Homo sapiens
  MOD_RES (21)..(21): Selenocysteine
  MOD_RES (55)..(55): Selenocysteine
  MOD_RES (79)..(79): Selenocysteine
  MOD_RES (87)..(87): Selenocysteine
  MOD_RES (115)..(115): Selenocysteine
  MOD_RES (117)..(117): Selenocysteine
  MOD_RES (137)..(137): Selenocysteine
  MOD_RES (160)..(160): Selenocysteine
  MOD_RES (179)..(179): Selenocysteine
  MOD_RES (259)..(259): Selenocysteine
  MOD_RES (285)..(285): Selenocysteine
  MOD_RES (296)..(296): Selenocysteine
  MOD_RES (301)..(301): Selenocysteine
  MOD_RES (312)..(312): Selenocysteine
  MOD_RES (319)..(319): Selenocysteine
  MOD_RES (321)..(321): Selenocysteine
  MOD_RES (328)..(328): Selenocysteine
  MOD_RES (331)..(331): Selenocysteine
  MOD_RES (333)..(334): Selenocysteine
  MOD_RES (347)..(347): Selenocysteine
  MOD_RES (352)..(352): Selenocysteine
  MOD_RES (372)..(372): Selenocysteine
  MOD_RES (420)..(420): Selenocysteine
  MOD_RES (470)..(470): Selenocysteine
  MOD_RES (481)..(481): Selenocysteine
  MOD_RES (486)..(486): Selenocysteine
  MOD_RES (491)..(491): Selenocysteine
  MOD_RES (534)..(534): Selenocysteine
  MOD_RES (543)..(543): Selenocysteine
  MOD_RES (545)..(545): Selenocysteine
  MOD_RES (553)..(553): Selenocysteine
  MOD_RES (561)..(561): Selenocysteine
  MOD_RES (597)..(597): Selenocysteine
  MOD_RES (606)..(606): Selenocysteine
  MOD_RES (619)..(619): Selenocysteine
  MOD_RES (623)..(623): Selenocysteine
  MOD_RES (629)..(629): Selenocysteine
  MOD_RES (647)..(647): Selenocysteine
  MOD_RES (658)..(658): Selenocysteine
  MOD_RES (677)..(677): Selenocysteine
  MOD_RES (706)..(706): Selenocysteine
  MOD_RES (717)..(717): Selenocysteine
  MOD_RES (746)..(746): Selenocysteine
  MOD_RES (754)..(754): Selenocysteine
MYPQGRHPAPHQPGQPGFKFXVAESCDRIKDEFQFLQAQYHSLKVEYDKLANEKXEMQRHYVMYYEMSYGLNIEMHKQXEIAKRLNXILAQIMPFLSQEHQQQVAQAVERAKQVXMXELNAIIGQQQLQAQHLSHAXHGPPVQLPPHPSGLQPPGIPPVXGSSSGLLALGALGSQAHLXVKDEKNHHELDHRERESSANNSVSPSESLRASEKHRGSADYSMEAKKRKAEEKDSLSRYDSDGDKSDDLVVDVSNEDPAXPRVSPAHSPPENGLDKARSLKKDAPXSPASVASSSSXPSSKXKDLGHNDKSSXPGLKSNXPXPRNDAPXPGXSXXPGLRSMPASALRXPISIXSSYAAPFAMMSHHEMNGSLXSPGAYAGLHNIPPQMSAAAAAAAAAYGRSPMVSFGAVGFDPHPPMRAXGLPSSLASIPGGKPAYSFHVSADGQMQPVPFPHDALAGPGIPRHARQINXLSHGEVVCAVXISNPXRHVYXGGKGCVKIWDISQPGSKSPISQLDCLNRDNYIRSCKLLPDGRXLIVGGEASXLXIWDLASPXPRIKAELXSSAPACYALAISPDAKVCFSCCSDGNIAVWDLHNQXLVRQFQGHXDGASCIDISHDGXKLWXGGLDNXVRSWDLREGRQLQQHDFXSQIFSLGYCPXGEWLAVGMESSNVEVLHHXKPDKYQLHLHESCVLSLKFAYCGKWFVSXGKDNLLNAWRXPYGASIFQSKESSSVLSCDISADDKYIVXGSGDKKAXVYEVIY

SEQ ID NO: 27766 - protein, 764 aa, Homo sapiens
  MOD_RES (21)..(21): Selenocysteine
  MOD_RES (55)..(55): Selenocysteine
  MOD_RES (79)..(79): Selenocysteine
  MOD_RES (87)..(87): Selenocysteine
  MOD_RES (115)..(115): Selenocysteine
  MOD_RES (117)..(117): Selenocysteine
  MOD_RES (137)..(137): Selenocysteine
  MOD_RES (160)..(160): Selenocysteine
  MOD_RES (179)..(179): Selenocysteine
  MOD_RES (259)..(259): Selenocysteine
  MOD_RES (285)..(285): Selenocysteine
  MOD_RES (296)..(296): Selenocysteine
  MOD_RES (301)..(301): Selenocysteine
  MOD_RES (312)..(312): Selenocysteine
  MOD_RES (319)..(319): Selenocysteine
  MOD_RES (321)..(321): Selenocysteine
  MOD_RES (328)..(328): Selenocysteine
  MOD_RES (331)..(331): Selenocysteine
  MOD_RES (333)..(334): Selenocysteine
  MOD_RES (356)..(356): Selenocysteine
  MOD_RES (361)..(361): Selenocysteine
  MOD_RES (381)..(381): Selenocysteine
  MOD_RES (424)..(424): Selenocysteine
  MOD_RES (474)..(474): Selenocysteine
  MOD_RES (485)..(485): Selenocysteine
  MOD_RES (490)..(490): Selenocysteine
  MOD_RES (495)..(495): Selenocysteine
  MOD_RES (538)..(538): Selenocysteine
  MOD_RES (547)..(547): Selenocysteine
  MOD_RES (549)..(549): Selenocysteine
  MOD_RES (557)..(557): Selenocysteine
  MOD_RES (565)..(565): Selenocysteine
  MOD_RES (601)..(601): Selenocysteine
  MOD_RES (610)..(610): Selenocysteine
  MOD_RES (623)..(623): Selenocysteine
  MOD_RES (627)..(627): Selenocysteine
  MOD_RES (633)..(633): Selenocysteine
  MOD_RES (651)..(651): Selenocysteine
  MOD_RES (662)..(662): Selenocysteine
  MOD_RES (681)..(681): Selenocysteine
  MOD_RES (710)..(710): Selenocysteine
  MOD_RES (721)..(721): Selenocysteine
  MOD_RES (750)..(750): Selenocysteine
  MOD_RES (758)..(758): Selenocysteine
MYPQGRHPAPHQPGQPGFKFXVAESCDRIKDEFQFLQAQYHSLKVEYDKLANEKXEMQRHYVMYYEMSYGLNIEMHKQXEIAKRLNXILAQIMPFLSQEHQQQVAQAVERAKQVXMXELNAIIGQQQLQAQHLSHAXHGPPVQLPPHPSGLQPPGIPPVXGSSSGLLALGALGSQAHLXVKDEKNHHELDHRERESSANNSVSPSESLRASEKHRGSADYSMEAKKRKAEEKDSLSRYDSDGDKSDDLVVDVSNEDPAXPRVSPAHSPPENGLDKARSLKKDAPXSPASVASSSSXPSSKXKDLGHNDKSSXPGLKSNXPXPRNDAPXPGXSXXPGLRSMPGKPPGMDPIASALRXPISIXSSYAAPFAMMSHHEMNGSLXSPGAYAGLHNIPPQMSAAAAAAAAAYGRSPMVGFDPHPPMRAXGLPSSLASIPGGKPAYSFHVSADGQMQPVPFPHDALAGPGIPRHARQINXLSHGEVVCAVXISNPXRHVYXGGKGCVKIWDISQPGSKSPISQLDCLNRDNYIRSCKLLPDGRXLIVGGEASXLXIWDLASPXPRIKAELXSSAPACYALAISPDAKVCFSCCSDGNIAVWDLHNQXLVRQFQGHXDGASCIDISHDGXKLWXGGLDNXVRSWDLREGRQLQQHDFXSQIFSLGYCPXGEWLAVGMESSNVEVLHHXKPDKYQLHLHESCVLSLKFAYCGKWFVSXGKDNLLNAWRXPYGASIFQSKESSSVLSCDISADDKYIVXGSGDKKAXVYEVIY

SEQ ID NO: 27767 - protein, 767 aa, Homo sapiens
  MOD_RES (21)..(21): Selenocysteine
  MOD_RES (55)..(55): Selenocysteine
  MOD_RES (79)..(79): Selenocysteine
  MOD_RES (87)..(87): Selenocysteine
  MOD_RES (115)..(115): Selenocysteine
  MOD_RES (117)..(117): Selenocysteine
  MOD_RES (137)..(137): Selenocysteine
  MOD_RES (160)..(160): Selenocysteine
  MOD_RES (179)..(179): Selenocysteine
  MOD_RES (259)..(259): Selenocysteine
  MOD_RES (285)..(285): Selenocysteine
  MOD_RES (296)..(296): Selenocysteine
  MOD_RES (301)..(301): Selenocysteine
  MOD_RES (312)..(312): Selenocysteine
  MOD_RES (319)..(319): Selenocysteine
  MOD_RES (321)..(321): Selenocysteine
  MOD_RES (328)..(328): Selenocysteine
  MOD_RES (331)..(331): Selenocysteine
  MOD_RES (333)..(334): Selenocysteine
  MOD_RES (359)..(359): Selenocysteine
  MOD_RES (364)..(364): Selenocysteine
  MOD_RES (384)..(384): Selenocysteine
  MOD_RES (427)..(427): Selenocysteine
  MOD_RES (477)..(477): Selenocysteine
  MOD_RES (488)..(488): Selenocysteine
  MOD_RES (493)..(493): Selenocysteine
  MOD_RES (498)..(498): Selenocysteine
  MOD_RES (541)..(541): Selenocysteine
  MOD_RES (550)..(550): Selenocysteine
  MOD_RES (552)..(552): Selenocysteine
  MOD_RES (560)..(560): Selenocysteine
  MOD_RES (568)..(568): Selenocysteine
  MOD_RES (604)..(604): Selenocysteine
  MOD_RES (613)..(613): Selenocysteine
  MOD_RES (626)..(626): Selenocysteine
  MOD_RES (630)..(630): Selenocysteine
  MOD_RES (636)..(636): Selenocysteine
  MOD_RES (654)..(654): Selenocysteine
  MOD_RES (665)..(665): Selenocysteine
  MOD_RES (684)..(684): Selenocysteine
  MOD_RES (713)..(713): Selenocysteine
  MOD_RES (724)..(724): Selenocysteine
  MOD_RES (753)..(753): Selenocysteine
  MOD_RES (761)..(761): Selenocysteine
MYPQGRHPAPHQPGQPGFKFXVAESCDRIKDEFQFLQAQYHSLKVEYDKLANEKXEMQRHYVMYYEMSYGLNIEMHKQXEIAKRLNXILAQIMPFLSQEHQQQVAQAVERAKQVXMXELNAIIGQQQLQAQHLSHAXHGPPVQLPPHPSGLQPPGIPPVXGSSSGLLALGALGSQAHLXVKDEKNHHELDHRERESSANNSVSPSESLRASEKHRGSADYSMEAKKRKAEEKDSLSRYDSDGDKSDDLVVDVSNEDPAXPRVSPAHSPPENGLDKARSLKKDAPXSPASVASSSSXPSSKXKDLGHNDKSSXPGLKSNXPXPRNDAPXPGXSXXPGLRSMPGKPPGMDPIGIMASALRXPISIXSSYAAPFAMMSHHEMNGSLXSPGAYAGLHNIPPQMSAAAAAAAAAYGRSPMVGFDPHPPMRAXGLPSSLASIPGGKPAYSFHVSADGQMQPVPFPHDALAGPGIPRHARQINXLSHGEVVCAVXISNPXRHVYXGGKGCVKIWDISQPGSKSPISQLDCLNRDNYIRSCKLLPDGRXLIVGGEASXLXIWDLASPXPRIKAELXSSAPACYALAISPDAKVCFSCCSDGNIAVWDLHNQXLVRQFQGHXDGASCIDISHDGXKLWXGGLDNXVRSWDLREGRQLQQHDFXSQIFSLGYCPXGEWLAVGMESSNVEVLHHXKPDKYQLHLHESCVLSLKFAYCGKWFVSXGKDNLLNAWRXPYGASIFQSKESSSVLSCDISADDKYIVXGSGDKKAXVYEVIY

SEQ ID NO: 27768 - protein, 769 aa, Homo sapiens
  MOD_RES (21)..(21): Selenocysteine
  MOD_RES (55)..(55): Selenocysteine
  MOD_RES (79)..(79): Selenocysteine
  MOD_RES (87)..(87): Selenocysteine
  MOD_RES (115)..(115): Selenocysteine
  MOD_RES (117)..(117): Selenocysteine
  MOD_RES (137)..(137): Selenocysteine
  MOD_RES (160)..(160): Selenocysteine
  MOD_RES (179)..(179): Selenocysteine
  MOD_RES (259)..(259): Selenocysteine
  MOD_RES (285)..(285): Selenocysteine
  MOD_RES (296)..(296): Selenocysteine
  MOD_RES (301)..(301): Selenocysteine
  MOD_RES (312)..(312): Selenocysteine
  MOD_RES (319)..(319): Selenocysteine
  MOD_RES (321)..(321): Selenocysteine
  MOD_RES (328)..(328): Selenocysteine
  MOD_RES (331)..(331): Selenocysteine
  MOD_RES (333)..(334): Selenocysteine
  MOD_RES (356)..(356): Selenocysteine
  MOD_RES (361)..(361): Selenocysteine
  MOD_RES (381)..(381): Selenocysteine
  MOD_RES (429)..(429): Selenocysteine
  MOD_RES (479)..(479): Selenocysteine
  MOD_RES (490)..(490): Selenocysteine
  MOD_RES (495)..(495): Selenocysteine
  MOD_RES (500)..(500): Selenocysteine
  MOD_RES (543)..(543): Selenocysteine
  MOD_RES (552)..(552): Selenocysteine
  MOD_RES (554)..(554): Selenocysteine
  MOD_RES (562)..(562): Selenocysteine
  MOD_RES (570)..(570): Selenocysteine
  MOD_RES (606)..(606): Selenocysteine
  MOD_RES (615)..(615): Selenocysteine
  MOD_RES (628)..(628): Selenocysteine
  MOD_RES (632)..(632): Selenocysteine
  MOD_RES (638)..(638): Selenocysteine
  MOD_RES (656)..(656): Selenocysteine
  MOD_RES (667)..(667): Selenocysteine
  MOD_RES (686)..(686): Selenocysteine
  MOD_RES (715)..(715): Selenocysteine
  MOD_RES (726)..(726): Selenocysteine
  MOD_RES (755)..(755): Selenocysteine
  MOD_RES (763)..(763): Selenocysteine
MYPQGRHPAPHQPGQPGFKFXVAESCDRIKDEFQFLQAQYHSLKVEYDKLANEKXEMQRHYVMYYEMSYGLNIEMHKQXEIAKRLNXILAQIMPFLSQEHQQQVAQAVERAKQVXMXELNAIIGQQQLQAQHLSHAXHGPPVQLPPHPSGLQPPGIPPVXGSSSGLLALGALGSQAHLXVKDEKNHHELDHRERESSANNSVSPSESLRASEKHRGSADYSMEAKKRKAEEKDSLSRYDSDGDKSDDLVVDVSNEDPAXPRVSPAHSPPENGLDKARSLKKDAPXSPASVASSSSXPSSKXKDLGHNDKSSXPGLKSNXPXPRNDAPXPGXSXXPGLRSMPGKPPGMDPIASALRXPISIXSSYAAPFAMMSHHEMNGSLXSPGAYAGLHNIPPQMSAAAAAAAAAYGRSPMVSFGAVGFDPHPPMRAXGLPSSLASIPGGKPAYSFHVSADGQMQPVPFPHDALAGPGIPRHARQINXLSHGEVVCAVXISNPXRHVYXGGKGCVKIWDISQPGSKSPISQLDCLNRDNYIRSCKLLPDGRXLIVGGEASXLXIWDLASPXPRIKAELXSSAPACYALAISPDAKVCFSCCSDGNIAVWDLHNQXLVRQFQGHXDGASCIDISHDGXKLWXGGLDNXVRSWDLREGRQLQQHDFXSQIFSLGYCPXGEWLAVGMESSNVEVLHHXKPDKYQLHLHESCVLSLKFAYCGKWFVSXGKDNLLNAWRXPYGASIFQSKESSSVLSCDISADDKYIVXGSGDKKAXVYEVIY

SEQ ID NO: 27769 - protein, 772 aa, Homo sapiens
  MOD_RES (21)..(21): Selenocysteine
  MOD_RES (55)..(55): Selenocysteine
  MOD_RES (79)..(79): Selenocysteine
  MOD_RES (87)..(87): Selenocysteine
  MOD_RES (115)..(115): Selenocysteine
  MOD_RES (117)..(117): Selenocysteine
  MOD_RES (137)..(137): Selenocysteine
  MOD_RES (160)..(160): Selenocysteine
  MOD_RES (179)..(179): Selenocysteine
  MOD_RES (259)..(259): Selenocysteine
  MOD_RES (285)..(285): Selenocysteine
  MOD_RES (296)..(296): Selenocysteine
  MOD_RES (301)..(301): Selenocysteine
  MOD_RES (312)..(312): Selenocysteine
  MOD_RES (319)..(319): Selenocysteine
  MOD_RES (321)..(321): Selenocysteine
  MOD_RES (328)..(328): Selenocysteine
  MOD_RES (331)..(331): Selenocysteine
  MOD_RES (333)..(334): Selenocysteine
  MOD_RES (359)..(359): Selenocysteine
  MOD_RES (364)..(364): Selenocysteine
  MOD_RES (384)..(384): Selenocysteine
  MOD_RES (432)..(432): Selenocysteine
  MOD_RES (482)..(482): Selenocysteine
  MOD_RES (493)..(493): Selenocysteine
  MOD_RES (498)..(498): Selenocysteine
  MOD_RES (503)..(503): Selenocysteine
  MOD_RES (546)..(546): Selenocysteine
  MOD_RES (555)..(555): Selenocysteine
  MOD_RES (557)..(557): Selenocysteine
  MOD_RES (565)..(565): Selenocysteine
  MOD_RES (573)..(573): Selenocysteine
  MOD_RES (609)..(609): Selenocysteine
  MOD_RES (618)..(618): Selenocysteine
  MOD_RES (631)..(631): Selenocysteine
  MOD_RES (635)..(635): Selenocysteine
  MOD_RES (641)..(641): Selenocysteine
  MOD_RES (659)..(659): Selenocysteine
  MOD_RES (670)..(670): Selenocysteine
  MOD_RES (689)..(689): Selenocysteine
  MOD_RES (718)..(718): Selenocysteine
  MOD_RES (729)..(729): Selenocysteine
  MOD_RES (758)..(758): Selenocysteine
  MOD_RES (766)..(766): Selenocysteine
MYPQGRHPAPHQPGQPGFKFXVAESCDRIKDEFQFLQAQYHSLKVEYDKLANEKXEMQRHYVMYYEMSYGLNIEMHKQXEIAKRLNXILAQIMPFLSQEHQQQVAQAVERAKQVXMXELNAIIGQQQLQAQHLSHAXHGPPVQLPPHPSGLQPPGIPPVXGSSSGLLALGALGSQAHLXVKDEKNHHELDHRERESSANNSVSPSESLRASEKHRGSADYSMEAKKRKAEEKDSLSRYDSDGDKSDDLVVDVSNEDPAXPRVSPAHSPPENGLDKARSLKKDAPXSPASVASSSSXPSSKXKDLGHNDKSSXPGLKSNXPXPRNDAPXPGXSXXPGLRSMPGKPPGMDPIGIMASALRXPISIXSSYAAPFAMMSHHEMNGSLXSPGAYAGLHNIPPQMSAAAAAAAAAYGRSPMVSFGAVGFDPHPPMRAXGLPSSLASIPGGKPAYSFHVSADGQMQPVPFPHDALAGPGIPRHARQINXLSHGEVVCAVXISNPXRHVYXGGKGCVKIWDISQPGSKSPISQLDCLNRDNYIRSCKLLPDGRXLIVGGEASXLXIWDLASPXPRIKAELXSSAPACYALAISPDAKVCFSCCSDGNIAVWDLHNQXLVRQFQGHXDGASCIDISHDGXKLWXGGLDNXVRSWDLREGRQLQQHDFXSQIFSLGYCPXGEWLAVGMESSNVEVLHHXKPDKYQLHLHESCVLSLKFAYCGKWFVSXGKDNLLNAWRXPYGASIFQSKESSSVLSCDISADDKYIVXGSGDKKAXVYEVIY

SEQ ID NO: 27770 - protein, 772 aa, Homo sapiens
  MOD_RES (21)..(21): Selenocysteine
  MOD_RES (55)..(55): Selenocysteine
  MOD_RES (79)..(79): Selenocysteine
  MOD_RES (87)..(87): Selenocysteine
  MOD_RES (115)..(115): Selenocysteine
  MOD_RES (117)..(117): Selenocysteine
  MOD_RES (137)..(137): Selenocysteine
  MOD_RES (160)..(160): Selenocysteine
  MOD_RES (179)..(179): Selenocysteine
  MOD_RES (259)..(259): Selenocysteine
  MOD_RES (285)..(285): Selenocysteine
  MOD_RES (296)..(296): Selenocysteine
  MOD_RES (301)..(301): Selenocysteine
  MOD_RES (312)..(312): Selenocysteine
  MOD_RES (319)..(319): Selenocysteine
  MOD_RES (321)..(321): Selenocysteine
  MOD_RES (328)..(328): Selenocysteine
  MOD_RES (331)..(331): Selenocysteine
  MOD_RES (333)..(334): Selenocysteine
  MOD_RES (359)..(359): Selenocysteine
  MOD_RES (364)..(364): Selenocysteine
  MOD_RES (384)..(384): Selenocysteine
  MOD_RES (432)..(432): Selenocysteine
  MOD_RES (482)..(482): Selenocysteine
  MOD_RES (493)..(493): Selenocysteine
  MOD_RES (498)..(498): Selenocysteine
  MOD_RES (503)..(503): Selenocysteine
  MOD_RES (546)..(546): Selenocysteine
  MOD_RES (555)..(555): Selenocysteine
  MOD_RES (557)..(557): Selenocysteine
  MOD_RES (565)..(565): Selenocysteine
  MOD_RES (573)..(573): Selenocysteine
  MOD_RES (609)..(609): Selenocysteine
  MOD_RES (618)..(618): Selenocysteine
  MOD_RES (631)..(631): Selenocysteine
  MOD_RES (635)..(635): Selenocysteine
  MOD_RES (641)..(641): Selenocysteine
  MOD_RES (659)..(659): Selenocysteine
  MOD_RES (670)..(670): Selenocysteine
  MOD_RES (689)..(689): Selenocysteine
  MOD_RES (718)..(718): Selenocysteine
  MOD_RES (729)..(729): Selenocysteine
  MOD_RES (758)..(758): Selenocysteine
  MOD_RES (766)..(766): Selenocysteine
MYPQGRHPAPHQPGQPGFKFXVAESCDRIKDEFQFLQAQYHSLKVEYDKLANEKXEMQRHYVMYYEMSYGLNIEMHKQXEIAKRLNXILAQIMPFLSQEHQQQVAQAVERAKQVXMXELNAIIGQQQLQAQHLSHAXHGPPVQLPPHPSGLQPPGIPPVXGSSSGLLALGALGSQAHLXVKDEKNHHELDHRGAAGLGNNSVSPSESLRASEKHRGSADYSMEAKKRKAEEKDSLSRYDSDGDKSDDLVVDVSNEDPAXPRVSPAHSPPENGLDKARSLKKDAPXSPASVASSSSXPSSKXKDLGHNDKSSXPGLKSNXPXPRNDAPXPGXSXXPGLRSMPGKPPGMDPIGIMASALRXPISIXSSYAAPFAMMSHHEMNGSLXSPGAYAGLHNIPPQMSAAAAAAAAAYGRSPMVSFGAVGFDPHPPMRAXGLPSSLASIPGGKPAYSFHVSADGQMQPVPFPHDALAGPGIPRHARQINXLSHGEVVCAVXISNPXRHVYXGGKGCVKIWDISQPGSKSPISQLDCLNRDNYIRSCKLLPDGRXLIVGGEASXLXIWDLASPXPRIKAELXSSAPACYALAISPDAKVCFSCCSDGNIAVWDLHNQXLVRQFQGHXDGASCIDISHDGXKLWXGGLDNXVRSWDLREGRQLQQHDFXSQIFSLGYCPXGEWLAVGMESSNVEVLHHXKPDKYQLHLHESCVLSLKFAYCGKWFVSXGKDNLLNAWRXPYGASIFQSKESSSVLSCDISADDKYIVXGSGDKKAXVYEVIY

SEQ ID NO: 27771 - protein, 782 aa, Homo sapiens
  MOD_RES (21)..(21): Selenocysteine
  MOD_RES (55)..(55): Selenocysteine
  MOD_RES (79)..(79): Selenocysteine
  MOD_RES (87)..(87): Selenocysteine
  MOD_RES (115)..(115): Selenocysteine
  MOD_RES (117)..(117): Selenocysteine
  MOD_RES (134)..(134): Selenocysteine
  MOD_RES (147)..(147): Selenocysteine
  MOD_RES (170)..(170): Selenocysteine
  MOD_RES (189)..(189): Selenocysteine
  MOD_RES (269)..(269): Selenocysteine
  MOD_RES (295)..(295): Selenocysteine
  MOD_RES (306)..(306): Selenocysteine
  MOD_RES (311)..(311): Selenocysteine
  MOD_RES (322)..(322): Selenocysteine
  MOD_RES (329)..(329): Selenocysteine
  MOD_RES (331)..(331): Selenocysteine
  MOD_RES (338)..(338): Selenocysteine
  MOD_RES (341)..(341): Selenocysteine
  MOD_RES (343)..(344): Selenocysteine
  MOD_RES (369)..(369): Selenocysteine
  MOD_RES (374)..(374): Selenocysteine
  MOD_RES (394)..(394): Selenocysteine
  MOD_RES (442)..(442): Selenocysteine
  MOD_RES (492)..(492): Selenocysteine
  MOD_RES (503)..(503): Selenocysteine
  MOD_RES (508)..(508): Selenocysteine
  MOD_RES (513)..(513): Selenocysteine
  MOD_RES (556)..(556): Selenocysteine
  MOD_RES (565)..(565): Selenocysteine
  MOD_RES (567)..(567): Selenocysteine
  MOD_RES (575)..(575): Selenocysteine
  MOD_RES (583)..(583): Selenocysteine
  MOD_RES (619)..(619): Selenocysteine
  MOD_RES (628)..(628): Selenocysteine
  MOD_RES (641)..(641): Selenocysteine
  MOD_RES (645)..(645): Selenocysteine
  MOD_RES (651)..(651): Selenocysteine
  MOD_RES (669)..(669): Selenocysteine
  MOD_RES (680)..(680): Selenocysteine
  MOD_RES (699)..(699): Selenocysteine
  MOD_RES (728)..(728): Selenocysteine
  MOD_RES (739)..(739): Selenocysteine
  MOD_RES (768)..(768): Selenocysteine
  MOD_RES (776)..(776): Selenocysteine
MYPQGRHPAPHQPGQPGFKFXVAESCDRIKDEFQFLQAQYHSLKVEYDKLANEKXEMQRHYVMYYEMSYGLNIEMHKQXEIAKRLNXILAQIMPFLSQEHQQQVAQAVERAKQVXMXELNAIIGVRGLPNLPLXQQQLQAQHLSHAXHGPPVQLPPHPSGLQPPGIPPVXGSSSGLLALGALGSQAHLXVKDEKNHHELDHRERESSANNSVSPSESLRASEKHRGSADYSMEAKKRKAEEKDSLSRYDSDGDKSDDLVVDVSNEDPAXPRVSPAHSPPENGLDKARSLKKDAPXSPASVASSSSXPSSKXKDLGHNDKSSXPGLKSNXPXPRNDAPXPGXSXXPGLRSMPGKPPGMDPIGIMASALRXPISIXSSYAAPFAMMSHHEMNGSLXSPGAYAGLHNIPPQMSAAAAAAAAAYGRSPMVSFGAVGFDPHPPMRAXGLPSSLASIPGGKPAYSFHVSADGQMQPVPFPHDALAGPGIPRHARQINXLSHGEVVCAVXISNPXRHVYXGGKGCVKIWDISQPGSKSPISQLDCLNRDNYIRSCKLLPDGRXLIVGGEASXLXIWDLASPXPRIKAELXSSAPACYALAISPDAKVCFSCCSDGNIAVWDLHNQXLVRQFQGHXDGASCIDISHDGXKLWXGGLDNXVRSWDLREGRQLQQHDFXSQIFSLGYCPXGEWLAVGMESSNVEVLHHXKPDKYQLHLHESCVLSLKFAYCGKWFVSXGKDNLLNAWRXPYGASIFQSKESSSVLSCDISADDKYIVXGSGDKKAXVYEVIY

SEQ ID NO: 27772 - protein, 39 aa, Homo sapiens
  MOD_RES (12)..(12): Selenocysteine
  MOD_RES (14)..(14): Selenocysteine
  MOD_RES (33)..(33): Selenocysteine
VAQAVERAKQVXMXELNAIIGIRKFEAPGLEVXCPRPHS

SEQ ID NO: 27773 - protein, 611 aa, Homo sapiens
  MOD_RES (1)..(1): Any amino acid
  MOD_RES (4)..(5): Selenocysteine
  MOD_RES (16)..(16): Selenocysteine
  MOD_RES (22)..(22): Selenocysteine
  MOD_RES (55)..(55): Selenocysteine
  MOD_RES (65)..(65): Selenocysteine
  MOD_RES (95)..(95): Selenocysteine
  MOD_RES (129)..(129): Selenocysteine
  MOD_RES (153)..(153): Selenocysteine
  MOD_RES (161)..(161): Selenocysteine
  MOD_RES (189)..(189): Selenocysteine
  MOD_RES (191)..(191): Selenocysteine
  MOD_RES (211)..(211): Selenocysteine
  MOD_RES (234)..(234): Selenocysteine
  MOD_RES (253)..(253): Selenocysteine
  MOD_RES (333)..(333): Selenocysteine
  MOD_RES (359)..(359): Selenocysteine
  MOD_RES (370)..(370): Selenocysteine
  MOD_RES (375)..(375): Selenocysteine
  MOD_RES (386)..(386): Selenocysteine
  MOD_RES (393)..(393): Selenocysteine
  MOD_RES (395)..(395): Selenocysteine
  MOD_RES (402)..(402): Selenocysteine
  MOD_RES (405)..(405): Selenocysteine
  MOD_RES (407)..(408): Selenocysteine
  MOD_RES (430)..(430): Selenocysteine
  MOD_RES (435)..(435): Selenocysteine
  MOD_RES (455)..(455): Selenocysteine
  MOD_RES (503)..(503): Selenocysteine
  MOD_RES (553)..(553): Selenocysteine
  MOD_RES (564)..(564): Selenocysteine
  MOD_RES (569)..(569): Selenocysteine
  MOD_RES (574)..(574): Selenocysteine
XPPXXLPPAPRLFVSXWGGRPXLGFRCENELGGPGASSRFPGRPPLGLGSPLPRXSPARALGASXLSESRPLPAMYPQGRHPAPHQPGQPGFKFXVAESCDRIKDEFQFLQAQYHSLKVEYDKLANEKXEMQRHYVMYYEMSYGLNIEMHKQXEIAKRLNXILAQIMPFLSQEHQQQVAQAVERAKQVXMXELNAIIGQQQLQAQHLSHAXHGPPVQLPPHPSGLQPPGIPPVXGSSSGLLALGALGSQAHLXVKDEKNHHELDHRERESSANNSVSPSESLRASEKHRGSADYSMEAKKRKAEEKDSLSRYDSDGDKSDDLVVDVSNEDPAXPRVSPAHSPPENGLDKARSLKKDAPXSPASVASSSSXPSSKXKDLGHNDKSSXPGLKSNXPXPRNDAPXPGXSXXPGLRSMPGKPPGMDPIASALRXPISIXSSYAAPFAMMSHHEMNGSLXSPGAYAGLHNIPPQMSAAAAAAAAAYGRSPMVSFGAVGFDPHPPMRAXGLPSSLASIPGGKPAYSFHVSADGQMQPVPFPHDALAGPGIPRHARQINXLSHGEVVCAVXISNPXRHVYXGGKGCVKIWDISQPGSKSPISQLDCLGQLHPLLQAAP

SEQ ID NO: 27774 - protein, 322 aa, Homo sapiens
  MOD_RES (12)..(12): Selenocysteine
  MOD_RES (46)..(46): Selenocysteine
  MOD_RES (106)..(106): Selenocysteine
  MOD_RES (134)..(134): Selenocysteine
  MOD_RES (219)..(219): Selenocysteine
  MOD_RES (256)..(256): Selenocysteine
  MOD_RES (265)..(265): Selenocysteine
  MOD_RES (283)..(284): Selenocysteine
  MOD_RES (291)..(291): Selenocysteine
  MOD_RES (293)..(293): Selenocysteine
  MOD_RES (296)..(296): Selenocysteine
  MOD_RES (300)..(300): Selenocysteine
  MOD_RES (306)..(306): Selenocysteine
APHQPAQPFKFXISESCDRIKEEFQFLQAQYHSLKLECEKLASEKXEMQRHYVMYYEMSYGLNIEMHKQAEIVKRLNAICAQVIPFLSQEHQQQVVQAVERAKQVXMAELNAIIGQQLQAQHLSHGHGLPVPLXPHPSGLQPPAIPPIGSSAGLLALSSALGGQSHLPIKDEKKHHDNDHQRDRDSIKSSSVSPSASFRGAEKHRNSADYSSESKKQKXEEKEIAARYDSDGEKSDDNLVVDVSNEKRDMGKLSEXRLSEDEQCXLGLQRWFCRLWFMNEKSXXPVSKSNXPXPRXDAPXPGSNSXPGLRPVPGKPPGVDPL

SEQ ID NO: 27775 - protein, 195 aa, Homo sapiens
  MOD_RES (7)..(7): Selenocysteine
  MOD_RES (25)..(25): Selenocysteine
  MOD_RES (59)..(59): Selenocysteine
  MOD_RES (119)..(119): Selenocysteine
  MOD_RES (147)..(147): Selenocysteine
MARVPPXGQFRFRAPHQPAQPFKFXISESCDRIKEEFQFLQAQYHSLKLECEKLASEKXEMQRHYVMYYEMSYGLNIEMHKQAEIVKRLNAICAQVIPFLSQEHQQQVVQAVERAKQVXMAELNAIIGQQLQAQHLSHGHGLPVPLXPHPSGLQPPAIPPIGSSAGLLALSSALGGQSHLPIKDEKKHHDNDHQR

SEQ ID NO: 27776 - protein, 128 aa, Homo sapiens
  MOD_RES (12)..(12): Selenocysteine
  MOD_RES (27)..(27): Selenocysteine
  MOD_RES (61)..(61): Selenocysteine
  MOD_RES (106)..(106): Selenocysteine
MIRDLSKMYPQXRHPAPHQPAQPFKFXISESCDRIKEEFQFLQAQYHSLKLECEKLASEKXEMQRHYVMAEIVKRLNAICAQVIPFLSQEHQQQVVQAVERAKQVXMAELNAIIGQQQLQAQHLSHGH

SEQ ID NO: 27777 - protein, 224 aa, Homo sapiens
  MOD_RES (12)..(12): Selenocysteine
  MOD_RES (27)..(27): Selenocysteine
  MOD_RES (61)..(61): Selenocysteine
  MOD_RES (121)..(121): Selenocysteine
  MOD_RES (138)..(138): Selenocysteine
  MOD_RES (163)..(163): Selenocysteine
MIRDLSKMYPQXRHPAPHQPAQPFKFXISESCDRIKEEFQFLQAQYHSLKLECEKLASEKXEMQRHYVMYYEMSYGLNIEMHKQAEIVKRLNAICAQVIPFLSQEHQQQVVQAVERAKQVXMAELNAIIGEKKNKSDXPGSLKQQQLQAQHLSHGHGLPVPLXPHPSGLQPPAIPPIGSSAGLLALSSALGGQSHLPIKDEKKHHDNDHQRGEQRLHQELFSIP

SEQ ID NO: 27778 - protein, 259 aa, Homo sapiens
  MOD_RES (12)..(12): Selenocysteine
  MOD_RES (27)..(27): Selenocysteine
  MOD_RES (61)..(61): Selenocysteine
  MOD_RES (121)..(121): Selenocysteine
  MOD_RES (149)..(149): Selenocysteine
  MOD_RES (221)..(221): Selenocysteine
  MOD_RES (246)..(246): Selenocysteine
MIRDLSKMYPQXRHPAPHQPAQPFKFXISESCDRIKEEFQFLQAQYHSLKLECEKLASEKXEMQRHYVMYYEMSYGLNIEMHKQAEIVKRLNAICAQVIPFLSQEHQQQVVQAVERAKQVXMAELNAIIGQQLQAQHLSHGHGLPVPLXPHPSGLQPPAIPPIGSSAGLLALSSALGGQSHLPIKDEKKHHDNDHQRDRDSIKQNYLLLIMDEIGDQRGRXFWVPVSLNPDFKRHSPAMLVLCASXELFSIPISQFPRC

SEQ ID NO: 27779 - protein, 773 aa, Homo sapiens
  MOD_RES (12)..(12): Selenocysteine
  MOD_RES (27)..(27): Selenocysteine
  MOD_RES (61)..(61): Selenocysteine
  MOD_RES (121)..(121): Selenocysteine
  MOD_RES (149)..(149): Selenocysteine
  MOD_RES (234)..(234): Selenocysteine
  MOD_RES (282)..(282): Selenocysteine
  MOD_RES (302)..(302): Selenocysteine
  MOD_RES (317)..(318): Selenocysteine
  MOD_RES (325)..(325): Selenocysteine
  MOD_RES (327)..(327): Selenocysteine
  MOD_RES (330)..(330): Selenocysteine
  MOD_RES (334)..(334): Selenocysteine
  MOD_RES (340)..(340): Selenocysteine
  MOD_RES (362)..(362): Selenocysteine
  MOD_RES (372)..(372): Selenocysteine
  MOD_RES (387)..(387): Selenocysteine
  MOD_RES (440)..(440): Selenocysteine
  MOD_RES (483)..(483): Selenocysteine
  MOD_RES (494)..(494): Selenocysteine
  MOD_RES (499)..(499): Selenocysteine
  MOD_RES (504)..(504): Selenocysteine
  MOD_RES (547)..(547): Selenocysteine
  MOD_RES (556)..(556): Selenocysteine
  MOD_RES (566)..(566): Selenocysteine
  MOD_RES (574)..(574): Selenocysteine
  MOD_RES (610)..(610): Selenocysteine
  MOD_RES (619)..(619): Selenocysteine
  MOD_RES (632)..(632): Selenocysteine
  MOD_RES (636)..(636): Selenocysteine
  MOD_RES (642)..(642): Selenocysteine
  MOD_RES (660)..(660): Selenocysteine
  MOD_RES (671)..(671): Selenocysteine
  MOD_RES (690)..(690): Selenocysteine
  MOD_RES (719)..(719): Selenocysteine
  MOD_RES (730)..(730): Selenocysteine
  MOD_RES (759)..(759): Selenocysteine
  MOD_RES (767)..(767): Selenocysteine
MIRDLSKMYPQXRHPAPHQPAQPFKFXISESCDRIKEEFQFLQAQYHSLKLECEKLASEKXEMQRHYVMYYEMSYGLNIEMHKQAEIVKRLNAICAQVIPFLSQEHQQQVVQAVERAKQVXMAELNAIIGQQLQAQHLSHGHGLPVPLXPHPSGLQPPAIPPIGSSAGLLALSSALGGQSHLPIKDEKKHHDNDHQRDRDSIKSSSVSPSASFRGAEKHRNSADYSSESKKQKXEEKEIAARYDSDGEKSDDNLVVDVSNEDPSSPRGSPAHSPRENGLDKXRLLKKDAPISPASIASSSSXPSSKSKELSLNEKSXXPVSKSNXPXPRXDAPXPGSNSXPGLRPVPGKPPGVDPLASSLRXPMAVPCPYPXPFGIVPHAGMNGELXSPGAAYAGLHNISPQMSAAAAAAAAAAAYGRSPVVGFDPHHHMRVPAIPPNLXGIPGGKPAYSFHVSADGQMQPVPFPPDALIGPGIPRHARQINXLNHGEVVCAVXISNPXRHVYXGGKGCVKVWDISHPGNKSPVSQLDCLNRDNYIRSCRLLPDGRXLIVGGEASXLSIWDLAAPXPRIKAELXSSAPACYALAISPDSKVCFSCCSDGNIAVWDLHNQXLVRQFQGHXDGASCIDISNDGXKLWXGGLDNXVRSWDLREGRQLQQHDFXSQIFSLGYCPXGEWLAVGMENSNVEVLHVXKPDKYQLHLHESCVLSLKFAHCGKWFVSXGKDNLLNAWRXPYGASIFQSKESSSVLSCDISVDDKYIVXGSGDKKAXVYEVIY

SEQ ID NO: 27780 - protein, 805 aa, Homo sapiens
  MOD_RES (12)..(12): Selenocysteine
  MOD_RES (27)..(27): Selenocysteine
  MOD_RES (61)..(61): Selenocysteine
  MOD_RES (121)..(121): Selenocysteine
  MOD_RES (149)..(149): Selenocysteine
  MOD_RES (234)..(234): Selenocysteine
  MOD_RES (282)..(282): Selenocysteine
  MOD_RES (302)..(302): Selenocysteine
  MOD_RES (322)..(322): Selenocysteine
  MOD_RES (331)..(331): Selenocysteine
  MOD_RES (349)..(350): Selenocysteine
  MOD_RES (357)..(357): Selenocysteine
  MOD_RES (359)..(359): Selenocysteine
  MOD_RES (362)..(362): Selenocysteine
  MOD_RES (366)..(366): Selenocysteine
  MOD_RES (372)..(372): Selenocysteine
  MOD_RES (394)..(394): Selenocysteine
  MOD_RES (404)..(404): Selenocysteine
  MOD_RES (419)..(419): Selenocysteine
  MOD_RES (472)..(472): Selenocysteine
  MOD_RES (515)..(515): Selenocysteine
  MOD_RES (526)..(526): Selenocysteine
  MOD_RES (531)..(531): Selenocysteine
  MOD_RES (536)..(536): Selenocysteine
  MOD_RES (579)..(579): Selenocysteine
  MOD_RES (588)..(588): Selenocysteine
  MOD_RES (598)..(598): Selenocysteine
  MOD_RES (606)..(606): Selenocysteine
  MOD_RES (642)..(642): Selenocysteine
  MOD_RES (651)..(651): Selenocysteine
  MOD_RES (664)..(664): Selenocysteine
  MOD_RES (668)..(668): Selenocysteine
  MOD_RES (674)..(674): Selenocysteine
  MOD_RES (692)..(692): Selenocysteine
  MOD_RES (703)..(703): Selenocysteine
  MOD_RES (722)..(722): Selenocysteine
  MOD_RES (751)..(751): Selenocysteine
  MOD_RES (762)..(762): Selenocysteine
  MOD_RES (791)..(791): Selenocysteine
  MOD_RES (799)..(799): Selenocysteine
MIRDLSKMYPQXRHPAPHQPAQPFKFXISESCDRIKEEFQFLQAQYHSLKLECEKLASEKXEMQRHYVMYYEMSYGLNIEMHKQAEIVKRLNAICAQVIPFLSQEHQQQVVQAVERAKQVXMAELNAIIGQQLQAQHLSHGHGLPVPLXPHPSGLQPPAIPPIGSSAGLLALSSALGGQSHLPIKDEKKHHDNDHQRDRDSIKSSSVSPSASFRGAEKHRNSADYSSESKKQKXEEKEIAARYDSDGEKSDDNLVVDVSNEDPSSPRGSPAHSPRENGLDKXRLLKKDAPISPASIASSSSXPSSKSKELSLKRDMGKLSEXRLSEDEQCXLGLQRWFCRLWFMNEKSXXPVSKSNXPXPRXDAPXPGSNSXPGLRPVPGKPPGVDPLASSLRXPMAVPCPYPXPFGIVPHAGMNGELXSPGAAYAGLHNISPQMSAAAAAAAAAAAYGRSPVVGFDPHHHMRVPAIPPNLXGIPGGKPAYSFHVSADGQMQPVPFPPDALIGPGIPRHARQINXLNHGEVVCAVXISNPXRHVYXGGKGCVKVWDISHPGNKSPVSQLDCLNRDNYIRSCRLLPDGRXLIVGGEASXLSIWDLAAPXPRIKAELXSSAPACYALAISPDSKVCFSCCSDGNIAVWDLHNQXLVRQFQGHXDGASCIDISNDGXKLWXGGLDNXVRSWDLREGRQLQQHDFXSQIFSLGYCPXGEWLAVGMENSNVEVLHVXKPDKYQLHLHESCVLSLKFAHCGKWFVSXGKDNLLNAWRXPYGASIFQSKESSSVLSCDISVDDKYIVXGSGDKKAXVYEVIY

SEQ ID NO: 27781 - protein, 704 aa, Homo sapiens
  MOD_RES (12)..(12): Selenocysteine
  MOD_RES (27)..(27): Selenocysteine
  MOD_RES (61)..(61): Selenocysteine
  MOD_RES (121)..(121): Selenocysteine
  MOD_RES (149)..(149): Selenocysteine
  MOD_RES (234)..(234): Selenocysteine
  MOD_RES (248)..(249): Selenocysteine
  MOD_RES (256)..(256): Selenocysteine
  MOD_RES (258)..(258): Selenocysteine
  MOD_RES (261)..(261): Selenocysteine
  MOD_RES (265)..(265): Selenocysteine
  MOD_RES (271)..(271): Selenocysteine
  MOD_RES (293)..(293): Selenocysteine
  MOD_RES (303)..(303): Selenocysteine
  MOD_RES (318)..(318): Selenocysteine
  MOD_RES (371)..(371): Selenocysteine
  MOD_RES (414)..(414): Selenocysteine
  MOD_RES (425)..(425): Selenocysteine
  MOD_RES (430)..(430): Selenocysteine
  MOD_RES (435)..(435): Selenocysteine
  MOD_RES (478)..(478): Selenocysteine
  MOD_RES (487)..(487): Selenocysteine
  MOD_RES (497)..(497): Selenocysteine
  MOD_RES (505)..(505): Selenocysteine
  MOD_RES (541)..(541): Selenocysteine
  MOD_RES (550)..(550): Selenocysteine
  MOD_RES (563)..(563): Selenocysteine
  MOD_RES (567)..(567): Selenocysteine
  MOD_RES (573)..(573): Selenocysteine
  MOD_RES (591)..(591): Selenocysteine
  MOD_RES (602)..(602): Selenocysteine
  MOD_RES (621)..(621): Selenocysteine
  MOD_RES (650)..(650): Selenocysteine
  MOD_RES (661)..(661): Selenocysteine
  MOD_RES (690)..(690): Selenocysteine
  MOD_RES (698)..(698): Selenocysteine
MIRDLSKMYPQXRHPAPHQPAQPFKFXISESCDRIKEEFQFLQAQYHSLKLECEKLASEKXEMQRHYVMYYEMSYGLNIEMHKQAEIVKRLNAICAQVIPFLSQEHQQQVVQAVERAKQVXMAELNAIIGQQLQAQHLSHGHGLPVPLXPHPSGLQPPAIPPIGSSAGLLALSSALGGQSHLPIKDEKKHHDNDHQRDRDSIKSSSVSPSASFRGAEKHRNSADYSSESKKQKXEEKEIAARYNEKSXXPVSKSNXPXPRXDAPXPGSNSXPGLRPVPGKPPGVDPLASSLRXPMAVPCPYPXPFGIVPHAGMNGELXSPGAAYAGLHNISPQMSAAAAAAAAAAAYGRSPVVGFDPHHHMRVPAIPPNLXGIPGGKPAYSFHVSADGQMQPVPFPPDALIGPGIPRHARQINXLNHGEVVCAVXISNPXRHVYXGGKGCVKVWDISHPGNKSPVSQLDCLNRDNYIRSCRLLPDGRXLIVGGEASXLSIWDLAAPXPRIKAELXSSAPACYALAISPDSKVCFSCCSDGNIAVWDLHNQXLVRQFQGHXDGASCIDISNDGXKLWXGGLDNXVRSWDLREGRQLQQHDFXSQIFSLGYCPXGEWLAVGMENSNVEVLHVXKPDKYQLHLHESCVLSLKFAHCGKWFVSXGKDNLLNAWRXPYGASIFQSKESSSVLSCDISVDDKYIVXGSGDKKAXVYEVIY

SEQ ID NO: 27782 - protein, 748 aa, Homo sapiens
  MOD_RES (12)..(12): Selenocysteine
  MOD_RES (27)..(27): Selenocysteine
  MOD_RES (61)..(61): Selenocysteine
  MOD_RES (124)..(124): Selenocysteine
  MOD_RES (209)..(209): Selenocysteine
  MOD_RES (257)..(257): Selenocysteine
  MOD_RES (277)..(277): Selenocysteine
  MOD_RES (292)..(293): Selenocysteine
  MOD_RES (300)..(300): Selenocysteine
  MOD_RES (302)..(302): Selenocysteine
  MOD_RES (305)..(305): Selenocysteine
  MOD_RES (309)..(309): Selenocysteine
  MOD_RES (315)..(315): Selenocysteine
  MOD_RES (337)..(337): Selenocysteine
  MOD_RES (347)..(347): Selenocysteine
  MOD_RES (362)..(362): Selenocysteine
  MOD_RES (415)..(415): Selenocysteine
  MOD_RES (458)..(458): Selenocysteine
  MOD_RES (469)..(469): Selenocysteine
  MOD_RES (474)..(474): Selenocysteine
  MOD_RES (479)..(479): Selenocysteine
  MOD_RES (522)..(522): Selenocysteine
  MOD_RES (531)..(531): Selenocysteine
  MOD_RES (541)..(541): Selenocysteine
  MOD_RES (549)..(549): Selenocysteine
  MOD_RES (585)..(585): Selenocysteine
  MOD_RES (594)..(594): Selenocysteine
  MOD_RES (607)..(607): Selenocysteine
  MOD_RES (611)..(611): Selenocysteine
  MOD_RES (617)..(617): Selenocysteine
  MOD_RES (635)..(635): Selenocysteine
  MOD_RES (646)..(646): Selenocysteine
  MOD_RES (665)..(665): Selenocysteine
  MOD_RES (694)..(694): Selenocysteine
  MOD_RES (705)..(705): Selenocysteine
  MOD_RES (734)..(734): Selenocysteine
  MOD_RES (742)..(742): Selenocysteine
MIRDLSKMYPQXRHPAPHQPAQPFKFXISESCDRIKEEFQFLQAQYHSLKLECEKLASEKXEMQRHYVMYYEMSYGLNIEMHKQAEIVKRLNAICAQVIPFLSQEQQLQAQHLSHGHGLPVPLXPHPSGLQPPAIPPIGSSAGLLALSSALGGQSHLPIKDEKKHHDNDHQRDRDSIKSSSVSPSASFRGAEKHRNSADYSSESKKQKXEEKEIAARYDSDGEKSDDNLVVDVSNEDPSSPRGSPAHSPRENGLDKXRLLKKDAPISPASIASSSSXPSSKSKELSLNEKSXXPVSKSNXPXPRXDAPXPGSNSXPGLRPVPGKPPGVDPLASSLRXPMAVPCPYPXPFGIVPHAGMNGELXSPGAAYAGLHNISPQMSAAAAAAAAAAAYGRSPVVGFDPHHHMRVPAIPPNLXGIPGGKPAYSFHVSADGQMQPVPFPPDALIGPGIPRHARQINXLNHGEVVCAVXISNPXRHVYXGGKGCVKVWDISHPGNKSPVSQLDCLNRDNYIRSCRLLPDGRXLIVGGEASXLSIWDLAAPXPRIKAELXSSAPACYALAISPDSKVCFSCCSDGNIAVWDLHNQXLVRQFQGHXDGASCIDISNDGXKLWXGGLDNXVRSWDLREGRQLQQHDFXSQIFSLGYCPXGEWLAVGMENSNVEVLHVXKPDKYQLHLHESCVLSLKFAHCGKWFVSXGKDNLLNAWRXPYGASIFQSKESSSVLSCDISVDDKYIVXGSGDKKAXVYEVIY

SEQ ID NO: 27783 - protein, 90 aa, Homo sapiens
  MOD_RES (12)..(12): Selenocysteine
  MOD_RES (27)..(27): Selenocysteine
  MOD_RES (61)..(61): Selenocysteine
  MOD_RES (89)..(89): Selenocysteine
MIRDLSKMYPQXRHPAPHQPAQPFKFXISESCDRIKEEFQFLQAQYHSLKLECEKLASEKXEMQRHYVMYYEMSYGLNIEMHKQRLFFXN

SEQ ID NO: 27784 - protein, 101 aa, Homo sapiens
  MOD_RES (12)..(12): Selenocysteine
  MOD_RES (27)..(27): Selenocysteine
  MOD_RES (61)..(61): Selenocysteine
  MOD_RES (91)..(91): Selenocysteine
  MOD_RES (98)..(98): Selenocysteine
  MOD_RES (100)..(100): Selenocysteine
MIRDLSKMYPQXRHPAPHQPAQPFKFXISESCDRIKEEFQFLQAQYHSLKLECEKLASEKXEMQRHYVMYYEMSYGLNIEMHKQVSYFFIXILNDSNXGXL

SEQ ID NO: 27785 - protein, 239 aa, Homo sapiens
  MOD_RES (19)..(19): Selenocysteine
  MOD_RES (104)..(104): Selenocysteine
  MOD_RES (136)..(137): Selenocysteine
  MOD_RES (144)..(144): Selenocysteine
  MOD_RES (146)..(146): Selenocysteine
  MOD_RES (149)..(149): Selenocysteine
  MOD_RES (153)..(153): Selenocysteine
  MOD_RES (159)..(159): Selenocysteine
  MOD_RES (181)..(181): Selenocysteine
  MOD_RES (191)..(191): Selenocysteine
  MOD_RES (206)..(206): Selenocysteine
QQLQAQHLSHGHGLPVPLXPHPSGLQPPAIPPIGSSAGLLALSSALGGQSHLPIKDEKKHHDNDHQRDRDSIKSSSVSPSASFRGAEKHRNSADYSSESKKQKXEEKEIAARYDSDGEKSDDNLVVDVSNENEKSXXPVSKSNXPXPRXDAPXPGSNSXPGLRPVPGKPPGVDPLASSLRXPMAVPCPYPXPFGIVPHAGMNGELXSPGAAYAGLHNISPQMSAAAAAAAAAAAYGRSP

SEQ ID NO: 27786 - protein, 165 aa, Homo sapiens
  MOD_RES (31)..(31): Selenocysteine
  MOD_RES (45)..(46): Selenocysteine
  MOD_RES (53)..(53): Selenocysteine
  MOD_RES (55)..(55): Selenocysteine
  MOD_RES (58)..(58): Selenocysteine
  MOD_RES (62)..(62): Selenocysteine
  MOD_RES (68)..(68): Selenocysteine
  MOD_RES (90)..(90): Selenocysteine
  MOD_RES (100)..(100): Selenocysteine
  MOD_RES (115)..(115): Selenocysteine
SSSVSPSASFRGAEKHRNSADYSSESKKQKXEEKEIAARYNEKSXXPVSKSNXPXPRXDAPXPGSNSXPGLRPVPGKPPGVDPLASSLRXPMAVPCPYPXPFGIVPHAGMNGELXSPGAAYAGLHNISPQMSAAAAAAAAAAAYGRSPVVGFDPHHHMRVPAIPP

SEQ ID NO: 27787 - protein, 343 aa, Homo sapiens
  MOD_RES (1)..(1): Any amino acid
  MOD_RES (25)..(25): Selenocysteine
  MOD_RES (73)..(73): Selenocysteine
  MOD_RES (93)..(93): Selenocysteine
  MOD_RES (108)..(109): Selenocysteine
  MOD_RES (116)..(116): Selenocysteine
  MOD_RES (118)..(118): Selenocysteine
  MOD_RES (121)..(121): Selenocysteine
  MOD_RES (125)..(125): Selenocysteine
  MOD_RES (131)..(131): Selenocysteine
  MOD_RES (153)..(153): Selenocysteine
  MOD_RES (163)..(163): Selenocysteine
  MOD_RES (178)..(178): Selenocysteine
  MOD_RES (231)..(231): Selenocysteine
  MOD_RES (239)..(239): Selenocysteine
  MOD_RES (261)..(261): Selenocysteine
  MOD_RES (299)..(299): Selenocysteine
  MOD_RES (310)..(310): Selenocysteine
  MOD_RES (315)..(315): Selenocysteine
  MOD_RES (320)..(320): Selenocysteine
XASFRGAEKHRNSADYSSESKKQKXEEKEIAARYDSDGEKSDDNLVVDVSNEDPSSPRGSPAHSPRENGLDKXRLLKKDAPISPASIASSSSXPSSKSKELSLNEKSXXPVSKSNXPXPRXDAPXPGSNSXPGLRPVPGKPPGVDPLASSLRXPMAVPCPYPXPFGIVPHAGMNGELXSPGAAYAGLHNISPQMSAAAAAAAAAAAYGRSPVVGFDPHHHMRVPAIPPNLXGIPGGKPXKCFYHLRAFPGNELEMELPRDXHRAYSFHVSADGQMQPVPFPPDALIGPGIPRHARQINXLNHGEVVCAVXISNPXRHVYXGGKGCVKVWDISHPGNKSPVSQL

SEQ ID NO: 27788 - protein, 211 aa, Homo sapiens
  MOD_RES (1)..(1): Any amino acid
  MOD_RES (15)..(15): Selenocysteine
  MOD_RES (35)..(35): Selenocysteine
  MOD_RES (55)..(55): Selenocysteine
  MOD_RES (64)..(64): Selenocysteine
  MOD_RES (82)..(83): Selenocysteine
  MOD_RES (90)..(90): Selenocysteine
  MOD_RES (92)..(92): Selenocysteine
  MOD_RES (95)..(95): Selenocysteine
  MOD_RES (99)..(99): Selenocysteine
  MOD_RES (105)..(105): Selenocysteine
  MOD_RES (127)..(127): Selenocysteine
  MOD_RES (137)..(137): Selenocysteine
  MOD_RES (152)..(152): Selenocysteine
  MOD_RES (205)..(205): Selenocysteine
XSPAHSPRENGLDKXRLLKKDAPISPASIASSSSXPSSKSKELSLKRDMGKLSEXRLSEDEQCXLGLQRWFCRLWFMNEKSXXPVSKSNXPXPRXDAPXPGSNSXPGLRPVPGKPPGVDPLASSLRXPMAVPCPYPXPFGIVPHAGMNGELXSPGAAYAGLHNISPQMSAAAAAAAAAAAYGRSPVVGFDPHHHMRVPAIPPNLXGIPGGK

SEQ ID NO: 27789 - protein, 162 aa, Homo sapiens
  MOD_RES (11)..(12): Selenocysteine
  MOD_RES (15)..(15): Selenocysteine
  MOD_RES (58)..(58): Selenocysteine
  MOD_RES (104)..(104): Selenocysteine
  MOD_RES (117)..(117): Selenocysteine
  MOD_RES (139)..(139): Selenocysteine
  MOD_RES (142)..(142): Selenocysteine
MAVLFLYDLKXXGKXPEKKQSESSRGRKRKAENQNESSQGFPNLPVFQSLAYWEMGRXAGGKSIGGRGHKISDYFEYQGGNGSSPVRGIPPAIRSPQNSHSHSXPSSSVRPNSPSPXALAFGDHPIVQPKQLSFKIIQXDLXMLKLAALESNKIQDLEKKEG

SEQ ID NO: 27790 - protein, 670 aa, Homo sapiens
  MOD_RES (11)..(12): Selenocysteine
  MOD_RES (15)..(15): Selenocysteine
  MOD_RES (83)..(83): Selenocysteine
  MOD_RES (96)..(96): Selenocysteine
  MOD_RES (118)..(118): Selenocysteine
  MOD_RES (121)..(121): Selenocysteine
  MOD_RES (187)..(187): Selenocysteine
  MOD_RES (208)..(209): Selenocysteine
  MOD_RES (217)..(217): Selenocysteine
  MOD_RES (221)..(221): Selenocysteine
  MOD_RES (257)..(257): Selenocysteine
  MOD_RES (266)..(266): Selenocysteine
  MOD_RES (296)..(296): Selenocysteine
  MOD_RES (355)..(355): Selenocysteine
  MOD_RES (435)..(435): Selenocysteine
  MOD_RES (437)..(437): Selenocysteine
  MOD_RES (440)..(440): Selenocysteine
  MOD_RES (502)..(502): Selenocysteine
  MOD_RES (510)..(510): Selenocysteine
  MOD_RES (531)..(531): Selenocysteine
  MOD_RES (537)..(537): Selenocysteine
  MOD_RES (592)..(592): Selenocysteine
  MOD_RES (597)..(597): Selenocysteine
  MOD_RES (657)..(657): Selenocysteine
  MOD_RES (661)..(661): Selenocysteine
  MOD_RES (669)..(669): Selenocysteine
MAVLFLYDLKXXGKXPEKKQSESSRGRKRKAENQNESSQGKSIGGRGHKISDYFEYQGGNGSSPVRGIPPAIRSPQNSHSHSXPSSSVRPNSPSPXALAFGDHPIVQPKQLSFKIIQXDLXMLKLAALESNKIQDLEKKEGRIDDLLRANCDLRRQIDEQQKLLEKYKERLNKCISMSKKLLIEKSXQEKLSSREKSMQDRLRLGHFXXVRHGASFXEQWXDGFAFQNLVKQQEWVNQQREDIERQRKLLAKRKPPXANNSQAPSXNSEPKQRKNKAVNGAENDPFVRPNLPQLLXLAEYHEQEEIFKLRLGHLKKEEAEIQAELERLERVRNLHIRELKRINNEDNSQFKDHPXLNERYLLLHLLGRGGFSEVYKAFDLYEQRYAAVKIHQLNKSWRDEKKENYHKHACREYRIHKELDHPRIVKLYDYFSLDXDXFCXVLEYCEGNDLDFYLKQHKLMSEKEARSIVMQIVNALRYLNEIKPPIIHYDLKPGNILLVDGXACGEIKIXDFGLSKIMDDDSYGVDGMDLXSQGAGXYWYLPPECFVVGKEPPKISNKVDVWSVGVIFFQCLYGRKPFGHNQSQQDILQENXILKAXEVQFPVKPVVSSEAKAFIRRCLAYRKEDRFDVHQLANDPYLLPHMRRSNSSGNLHMAGLXASPXPPSSSIIXY

SEQ ID NO: 27791 - protein, 718 aa, Homo sapiens
  MOD_RES (20)..(20): Selenocysteine
  MOD_RES (27)..(27): Selenocysteine
  MOD_RES (30)..(30): Selenocysteine
  MOD_RES (41)..(41): Selenocysteine
  MOD_RES (63)..(63): Selenocysteine
  MOD_RES (131)..(131): Selenocysteine
  MOD_RES (144)..(144): Selenocysteine
  MOD_RES (166)..(166): Selenocysteine
  MOD_RES (169)..(169): Selenocysteine
  MOD_RES (235)..(235): Selenocysteine
  MOD_RES (256)..(257): Selenocysteine
  MOD_RES (265)..(265): Selenocysteine
  MOD_RES (269)..(269): Selenocysteine
  MOD_RES (305)..(305): Selenocysteine
  MOD_RES (314)..(314): Selenocysteine
  MOD_RES (344)..(344): Selenocysteine
  MOD_RES (403)..(403): Selenocysteine
  MOD_RES (483)..(483): Selenocysteine
  MOD_RES (485)..(485): Selenocysteine
  MOD_RES (488)..(488): Selenocysteine
  MOD_RES (550)..(550): Selenocysteine
  MOD_RES (558)..(558): Selenocysteine
  MOD_RES (579)..(579): Selenocysteine
  MOD_RES (585)..(585): Selenocysteine
  MOD_RES (640)..(640): Selenocysteine
  MOD_RES (645)..(645): Selenocysteine
  MOD_RES (705)..(705): Selenocysteine
  MOD_RES (709)..(709): Selenocysteine
  MOD_RES (717)..(717): Selenocysteine
MDELHSLDPRRQELLEARFXGVASGSXGSXGSCSVGAKASXNNESSNHSFGSLGSLSDKESEXPEKKQSESSRGRKRKAENQNESSQGKSIGGRGHKISDYFEYQGGNGSSPVRGIPPAIRSPQNSHSHSXPSSSVRPNSPSPXALAFGDHPIVQPKQLSFKIIQXDLXMLKLAALESNKIQDLEKKEGRIDDLLRANCDLRRQIDEQQKLLEKYKERLNKCISMSKKLLIEKSXQEKLSSREKSMQDRLRLGHFXXVRHGASFXEQWXDGFAFQNLVKQQEWVNQQREDIERQRKLLAKRKPPXANNSQAPSXNSEPKQRKNKAVNGAENDPFVRPNLPQLLXLAEYHEQEEIFKLRLGHLKKEEAEIQAELERLERVRNLHIRELKRINNEDNSQFKDHPXLNERYLLLHLLGRGGFSEVYKAFDLYEQRYAAVKIHQLNKSWRDEKKENYHKHACREYRIHKELDHPRIVKLYDYFSLDXDXFCXVLEYCEGNDLDFYLKQHKLMSEKEARSIVMQIVNALRYLNEIKPPIIHYDLKPGNILLVDGXACGEIKIXDFGLSKIMDDDSYGVDGMDLXSQGAGXYWYLPPECFVVGKEPPKISNKVDVWSVGVIFFQCLYGRKPFGHNQSQQDILQENXILKAXEVQFPVKPVVSSEAKAFIRRCLAYRKEDRFDVHQLANDPYLLPHMRRSNSSGNLHMAGLXASPXPPSSSIIXY

SEQ ID NO: 27792 - protein, 116 aa, Homo sapiens
  MOD_RES (21)..(21): Selenocysteine
  MOD_RES (24)..(24): Selenocysteine
  MOD_RES (38)..(38): Selenocysteine
  MOD_RES (68)..(68): Selenocysteine
  MOD_RES (75)..(75): Selenocysteine
  MOD_RES (78)..(78): Selenocysteine
  MOD_RES (89)..(89): Selenocysteine
MSVQSSSGSLEGPPSWSQLSXSPXPGSAAAARSLLNHXPPSGRPREGAMDELHSLDPRRQELLEARFXGVASGSXGSXGSCSVGAKASXNNESSNHSFGSLGSLSDKESEKQLAGS

SEQ ID NO: 27793 - protein, 787 aa, Homo sapiens
  MOD_RES (21)..(21): Selenocysteine
  MOD_RES (24)..(24): Selenocysteine
  MOD_RES (38)..(38): Selenocysteine
  MOD_RES (68)..(68): Selenocysteine
  MOD_RES (75)..(75): Selenocysteine
  MOD_RES (78)..(78): Selenocysteine
  MOD_RES (89)..(89): Selenocysteine
  MOD_RES (111)..(111): Selenocysteine
  MOD_RES (154)..(154): Selenocysteine
  MOD_RES (200)..(200): Selenocysteine
  MOD_RES (213)..(213): Selenocysteine
  MOD_RES (235)..(235): Selenocysteine
  MOD_RES (238)..(238): Selenocysteine
  MOD_RES (304)..(304): Selenocysteine
  MOD_RES (325)..(326): Selenocysteine
  MOD_RES (334)..(334): Selenocysteine
  MOD_RES (338)..(338): Selenocysteine
  MOD_RES (374)..(374): Selenocysteine
  MOD_RES (383)..(383): Selenocysteine
  MOD_RES (413)..(413): Selenocysteine
  MOD_RES (472)..(472): Selenocysteine
  MOD_RES (552)..(552): Selenocysteine
  MOD_RES (554)..(554): Selenocysteine
  MOD_RES (557)..(557): Selenocysteine
  MOD_RES (619)..(619): Selenocysteine
  MOD_RES (627)..(627): Selenocysteine
  MOD_RES (648)..(648): Selenocysteine
  MOD_RES (654)..(654): Selenocysteine
  MOD_RES (709)..(709): Selenocysteine
  MOD_RES (714)..(714): Selenocysteine
  MOD_RES (774)..(774): Selenocysteine
  MOD_RES (778)..(778): Selenocysteine
  MOD_RES (786)..(786): Selenocysteine
MSVQSSSGSLEGPPSWSQLSXSPXPGSAAAARSLLNHXPPSGRPREGAMDELHSLDPRRQELLEARFXGVASGSXGSXGSCSVGAKASXNNESSNHSFGSLGSLSDKESEXPEKKQSESSRGRKRKAENQNESSQGFPNLPVFQSLAYWEMGRXAGGKSIGGRGHKISDYFEYQGGNGSSPVRGIPPAIRSPQNSHSHSXPSSSVRPNSPSPXALAFGDHPIVQPKQLSFKIIQXDLXMLKLAALESNKIQDLEKKEGRIDDLLRANCDLRRQIDEQQKLLEKYKERLNKCISMSKKLLIEKSXQEKLSSREKSMQDRLRLGHFXXVRHGASFXEQWXDGFAFQNLVKQQEWVNQQREDIERQRKLLAKRKPPXANNSQAPSXNSEPKQRKNKAVNGAENDPFVRPNLPQLLXLAEYHEQEEIFKLRLGHLKKEEAEIQAELERLERVRNLHIRELKRINNEDNSQFKDHPXLNERYLLLHLLGRGGFSEVYKAFDLYEQRYAAVKIHQLNKSWRDEKKENYHKHACREYRIHKELDHPRIVKLYDYFSLDXDXFCXVLEYCEGNDLDFYLKQHKLMSEKEARSIVMQIVNALRYLNEIKPPIIHYDLKPGNILLVDGXACGEIKIXDFGLSKIMDDDSYGVDGMDLXSQGAGXYWYLPPECFVVGKEPPKISNKVDVWSVGVIFFQCLYGRKPFGHNQSQQDILQENXILKAXEVQFPVKPVVSSEAKAFIRRCLAYRKEDRFDVHQLANDPYLLPHMRRSNSSGNLHMAGLXASPXPPSSSIIXY

SEQ ID NO: 27794 - protein, 413 aa, Homo sapiens
  MOD_RES (21)..(21): Selenocysteine
  MOD_RES (24)..(24): Selenocysteine
  MOD_RES (38)..(38): Selenocysteine
  MOD_RES (68)..(68): Selenocysteine
  MOD_RES (75)..(75): Selenocysteine
  MOD_RES (78)..(78): Selenocysteine
  MOD_RES (89)..(89): Selenocysteine
  MOD_RES (111)..(111): Selenocysteine
  MOD_RES (179)..(179): Selenocysteine
  MOD_RES (192)..(192): Selenocysteine
  MOD_RES (214)..(214): Selenocysteine
  MOD_RES (217)..(217): Selenocysteine
  MOD_RES (283)..(283): Selenocysteine
  MOD_RES (304)..(305): Selenocysteine
  MOD_RES (313)..(313): Selenocysteine
  MOD_RES (317)..(317): Selenocysteine
  MOD_RES (353)..(353): Selenocysteine
  MOD_RES (362)..(362): Selenocysteine
  MOD_RES (392)..(392): Selenocysteine
MSVQSSSGSLEGPPSWSQLSXSPXPGSAAAARSLLNHXPPSGRPREGAMDELHSLDPRRQELLEARFXGVASGSXGSXGSCSVGAKASXNNESSNHSFGSLGSLSDKESEXPEKKQSESSRGRKRKAENQNESSQGKSIGGRGHKISDYFEYQGGNGSSPVRGIPPAIRSPQNSHSHSXPSSSVRPNSPSPXALAFGDHPIVQPKQLSFKIIQXDLXMLKLAALESNKIQDLEKKEGRIDDLLRANCDLRRQIDEQQKLLEKYKERLNKCISMSKKLLIEKSXQEKLSSREKSMQDRLRLGHFXXVRHGASFXEQWXDGFAFQNLVKQQEWVNQQREDIERQRKLLAKRKPPXANNSQAPSXNSEPKQRKNKAVNGAENDPFVRPNLPQLLXLAEYHEQEEIFKLRLGHLKKR

SEQ ID NO: 27795 - protein, 766 aa, Homo sapiens
  MOD_RES (21)..(21): Selenocysteine
  MOD_RES (24)..(24): Selenocysteine
  MOD_RES (38)..(38): Selenocysteine
  MOD_RES (68)..(68): Selenocysteine
  MOD_RES (75)..(75): Selenocysteine
  MOD_RES (78)..(78): Selenocysteine
  MOD_RES (89)..(89): Selenocysteine
  MOD_RES (111)..(111): Selenocysteine
  MOD_RES (179)..(179): Selenocysteine
  MOD_RES (192)..(192): Selenocysteine
  MOD_RES (214)..(214): Selenocysteine
  MOD_RES (217)..(217): Selenocysteine
  MOD_RES (283)..(283): Selenocysteine
  MOD_RES (304)..(305): Selenocysteine
  MOD_RES (313)..(313): Selenocysteine
  MOD_RES (317)..(317): Selenocysteine
  MOD_RES (353)..(353): Selenocysteine
  MOD_RES (362)..(362): Selenocysteine
  MOD_RES (392)..(392): Selenocysteine
  MOD_RES (451)..(451): Selenocysteine
  MOD_RES (531)..(531): Selenocysteine
  MOD_RES (533)..(533): Selenocysteine
  MOD_RES (536)..(536): Selenocysteine
  MOD_RES (598)..(598): Selenocysteine
  MOD_RES (606)..(606): Selenocysteine
  MOD_RES (627)..(627): Selenocysteine
  MOD_RES (633)..(633): Selenocysteine
  MOD_RES (688)..(688): Selenocysteine
  MOD_RES (693)..(693): Selenocysteine
  MOD_RES (753)..(753): Selenocysteine
  MOD_RES (757)..(757): Selenocysteine
  MOD_RES (765)..(765): Selenocysteine
MSVQSSSGSLEGPPSWSQLSXSPXPGSAAAARSLLNHXPPSGRPREGAMDELHSLDPRRQELLEARFXGVASGSXGSXGSCSVGAKASXNNESSNHSFGSLGSLSDKESEXPEKKQSESSRGRKRKAENQNESSQGKSIGGRGHKISDYFEYQGGNGSSPVRGIPPAIRSPQNSHSHSXPSSSVRPNSPSPXALAFGDHPIVQPKQLSFKIIQXDLXMLKLAALESNKIQDLEKKEGRIDDLLRANCDLRRQIDEQQKLLEKYKERLNKCISMSKKLLIEKSXQEKLSSREKSMQDRLRLGHFXXVRHGASFXEQWXDGFAFQNLVKQQEWVNQQREDIERQRKLLAKRKPPXANNSQAPSXNSEPKQRKNKAVNGAENDPFVRPNLPQLLXLAEYHEQEEIFKLRLGHLKKEEAEIQAELERLERVRNLHIRELKRINNEDNSQFKDHPXLNERYLLLHLLGRGGFSEVYKAFDLYEQRYAAVKIHQLNKSWRDEKKENYHKHACREYRIHKELDHPRIVKLYDYFSLDXDXFCXVLEYCEGNDLDFYLKQHKLMSEKEARSIVMQIVNALRYLNEIKPPIIHYDLKPGNILLVDGXACGEIKIXDFGLSKIMDDDSYGVDGMDLXSQGAGXYWYLPPECFVVGKEPPKISNKVDVWSVGVIFFQCLYGRKPFGHNQSQQDILQENXILKAXEVQFPVKPVVSSEAKAFIRRCLAYRKEDRFDVHQLANDPYLLPHMRRSNSSGNLHMAGLXASPXPPSSSIIXY

SEQ ID NO: 27796 - protein, 51 aa, Homo sapiens
  MOD_RES (20)..(20): Selenocysteine
  MOD_RES (36)..(36): Selenocysteine
  MOD_RES (43)..(43): Selenocysteine
MEELHSLDPRRQELLEARFXGVGVSKECCKVSGSQXILMAILXLVWYEKEN

SEQ ID NO: 27797 - protein, 176 aa, Homo sapiens
  MOD_RES (21)..(21): Selenocysteine
  MOD_RES (70)..(70): Selenocysteine
  MOD_RES (78)..(78): Selenocysteine
  MOD_RES (91)..(91): Selenocysteine
  MOD_RES (104)..(104): Selenocysteine
  MOD_RES (116)..(116): Selenocysteine
  MOD_RES (121)..(121): Selenocysteine
  MOD_RES (138)..(138): Selenocysteine
  MOD_RES (143)..(143): Selenocysteine
MMEELHSLDPRRQELLEARFXGVGVSKGPLNSESSNQSLCSVGSLSDKEVERRVEQPLYGLDGSAAKEAXEEQSALPXLMSVMLAKPRLDXEQLAQRGAGLCFXFVSAQQNSPSSXGSGNXEHSCSSQKQISIQHRQXQSDLXIEKISALENSKNSDLEKKEGRIDDLLRANCDLR

SEQ ID NO: 27798 - protein, 72 aa, Homo sapiens
  MOD_RES (21)..(21): Selenocysteine
  MOD_RES (52)..(52): Selenocysteine
  MOD_RES (72)..(72): Selenocysteine
MMEELHSLDPRRQELLEARFXGVGVSKGPLNSESSNQSLCSVGSLSDKEVEXPEKKQNDQRNRKRKAEPYEX

SEQ ID NO: 27799 - protein, 89 aa, Homo sapiens
  MOD_RES (21)..(21): Selenocysteine
  MOD_RES (52)..(52): Selenocysteine
  MOD_RES (72)..(72): Selenocysteine
  MOD_RES (78)..(78): Selenocysteine
MMEELHSLDPRRQELLEARFXGVGVSKGPLNSESSNQSLCSVGSLSDKEVEXPEKKQNDQRNRKRKAEPYEXSQGKGXPRGHKISDYFE

SEQ ID NO: 27800 - protein, 750 aa, Homo sapiens
  MOD_RES (21)..(21): Selenocysteine
  MOD_RES (52)..(52): Selenocysteine
  MOD_RES (72)..(72): Selenocysteine
  MOD_RES (78)..(78): Selenocysteine
  MOD_RES (98)..(98): Selenocysteine
  MOD_RES (140)..(140): Selenocysteine
  MOD_RES (148)..(148): Selenocysteine
  MOD_RES (161)..(161): Selenocysteine
  MOD_RES (174)..(174): Selenocysteine
  MOD_RES (186)..(186): Selenocysteine
  MOD_RES (191)..(191): Selenocysteine
  MOD_RES (208)..(208): Selenocysteine
  MOD_RES (213)..(213): Selenocysteine
  MOD_RES (268)..(268): Selenocysteine
  MOD_RES (300)..(301): Selenocysteine
  MOD_RES (309)..(309): Selenocysteine
  MOD_RES (313)..(313): Selenocysteine
  MOD_RES (357)..(357): Selenocysteine
  MOD_RES (367)..(367): Selenocysteine
  MOD_RES (374)..(374): Selenocysteine
  MOD_RES (376)..(376): Selenocysteine
  MOD_RES (435)..(435): Selenocysteine
  MOD_RES (461)..(461): Selenocysteine
  MOD_RES (515)..(515): Selenocysteine
  MOD_RES (520)..(520): Selenocysteine
  MOD_RES (582)..(582): Selenocysteine
  MOD_RES (590)..(590): Selenocysteine
  MOD_RES (612)..(612): Selenocysteine
  MOD_RES (618)..(618): Selenocysteine
  MOD_RES (673)..(673): Selenocysteine
  MOD_RES (678)..(678): Selenocysteine
  MOD_RES (689)..(689): Selenocysteine
  MOD_RES (729)..(729): Selenocysteine
  MOD_RES (740)..(740): Selenocysteine
MMEELHSLDPRRQELLEARFXGVGVSKGPLNSESSNQSLCSVGSLSDKEVEXPEKKQNDQRNRKRKAEPYEXSQGKGXPRGHKISDYFEFAGGSAPGXSPGRSVPPVARSSPQHSLSNPLPRRVEQPLYGLDGSAAKEAXEEQSALPXLMSVMLAKPRLDXEQLAQRGAGLCFXFVSAQQNSPSSXGSGNXEHSCSSQKQISIQHRQXQSDLXIEKISALENSKNSDLEKKEGRIDDLLRANCDLRRQIDEQQKMLEKYKERLNRCVXMSKKLLIEKSKQEKMACRDKSMQDRLRLGHFXXVRHGASFXEQWXDGYAFQNLIKQQERINSQREEIERQRKMLAKRKPPAMGQAPPAXNEQKQRKSKXNGAENEXLXLAEYHEQEEIFKLRLGHLKKEEAEIQAELERLERVRNLHIRELKRIHNEDNSQFKDHPXLNDRYLLLHLLGRGGFSEVYKAFDLXEQRYVAVKIHQLNKNWRDEKKENYHKHACREYRIHKELDHPRIVKLYDYFSLDXDSFCXVLEYCEGNDLDFYLKQHKLMSEKEARSIIMQIVNALKYLNEIKPPIIHYDLKPGNILLVNGXACGEIKIXDFGLSKIMDDDSYNSVDGMELXSQGAGXYWYLPPECFVVGKEPPKISNKVDVWSVGVIFYQCLYGRKPFGHNQSQQDILQENXILKAXEVQFPPKPVVXPEAKAFIRRCLAYRKEDRIDVQQLACDPYLLPHIRKSVSXSSPAGAAIASXSGASNNSSSN

SEQ ID NO: 27801 - protein, 772 aa, Homo sapiens
  MOD_RES (21)..(21): Selenocysteine
  MOD_RES (52)..(52): Selenocysteine
  MOD_RES (72)..(72): Selenocysteine
  MOD_RES (78)..(78): Selenocysteine
  MOD_RES (98)..(98): Selenocysteine
  MOD_RES (140)..(140): Selenocysteine
  MOD_RES (148)..(148): Selenocysteine
  MOD_RES (161)..(161): Selenocysteine
  MOD_RES (174)..(174): Selenocysteine
  MOD_RES (186)..(186): Selenocysteine
  MOD_RES (191)..(191): Selenocysteine
  MOD_RES (208)..(208): Selenocysteine
  MOD_RES (213)..(213): Selenocysteine
  MOD_RES (268)..(268): Selenocysteine
  MOD_RES (300)..(301): Selenocysteine
  MOD_RES (309)..(309): Selenocysteine
  MOD_RES (313)..(313): Selenocysteine
  MOD_RES (357)..(357): Selenocysteine
  MOD_RES (367)..(367): Selenocysteine
  MOD_RES (374)..(374): Selenocysteine
  MOD_RES (380)..(380): Selenocysteine
  MOD_RES (385)..(385): Selenocysteine
  MOD_RES (398)..(398): Selenocysteine
  MOD_RES (457)..(457): Selenocysteine
  MOD_RES (483)..(483): Selenocysteine
  MOD_RES (537)..(537): Selenocysteine
  MOD_RES (542)..(542): Selenocysteine
  MOD_RES (604)..(604): Selenocysteine
  MOD_RES (612)..(612): Selenocysteine
  MOD_RES (634)..(634): Selenocysteine
  MOD_RES (640)..(640): Selenocysteine
  MOD_RES (695)..(695): Selenocysteine
  MOD_RES (700)..(700): Selenocysteine
  MOD_RES (711)..(711): Selenocysteine
  MOD_RES (751)..(751): Selenocysteine
  MOD_RES (762)..(762): Selenocysteine
MMEELHSLDPRRQELLEARFXGVGVSKGPLNSESSNQSLCSVGSLSDKEVEXPEKKQNDQRNRKRKAEPYEXSQGKGXPRGHKISDYFEFAGGSAPGXSPGRSVPPVARSSPQHSLSNPLPRRVEQPLYGLDGSAAKEAXEEQSALPXLMSVMLAKPRLDXEQLAQRGAGLCFXFVSAQQNSPSSXGSGNXEHSCSSQKQISIQHRQXQSDLXIEKISALENSKNSDLEKKEGRIDDLLRANCDLRRQIDEQQKMLEKYKERLNRCVXMSKKLLIEKSKQEKMACRDKSMQDRLRLGHFXXVRHGASFXEQWXDGYAFQNLIKQQERINSQREEIERQRKMLAKRKPPAMGQAPPAXNEQKQRKSKXNGAENEXPSSGNXELKDXAPALGAHSLLRLXLAEYHEQEEIFKLRLGHLKKEEAEIQAELERLERVRNLHIRELKRIHNEDNSQFKDHPXLNDRYLLLHLLGRGGFSEVYKAFDLXEQRYVAVKIHQLNKNWRDEKKENYHKHACREYRIHKELDHPRIVKLYDYFSLDXDSFCXVLEYCEGNDLDFYLKQHKLMSEKEARSIIMQIVNALKYLNEIKPPIIHYDLKPGNILLVNGXACGEIKIXDFGLSKIMDDDSYNSVDGMELXSQGAGXYWYLPPECFVVGKEPPKISNKVDVWSVGVIFYQCLYGRKPFGHNQSQQDILQENXILKAXEVQFPPKPVVXPEAKAFIRRCLAYRKEDRIDVQQLACDPYLLPHIRKSVSXSSPAGAAIASXSGASNNSSSN

SEQ ID NO: 27802 - protein, 718 aa, Homo sapiens
  MOD_RES (21)..(21): Selenocysteine
  MOD_RES (52)..(52): Selenocysteine
  MOD_RES (72)..(72): Selenocysteine
  MOD_RES (78)..(78): Selenocysteine
  MOD_RES (108)..(108): Selenocysteine
  MOD_RES (116)..(116): Selenocysteine
  MOD_RES (129)..(129): Selenocysteine
  MOD_RES (142)..(142): Selenocysteine
  MOD_RES (154)..(154): Selenocysteine
  MOD_RES (159)..(159): Selenocysteine
  MOD_RES (176)..(176): Selenocysteine
  MOD_RES (181)..(181): Selenocysteine
  MOD_RES (236)..(236): Selenocysteine
  MOD_RES (268)..(269): Selenocysteine
  MOD_RES (277)..(277): Selenocysteine
  MOD_RES (281)..(281): Selenocysteine
  MOD_RES (325)..(325): Selenocysteine
  MOD_RES (335)..(335): Selenocysteine
  MOD_RES (342)..(342): Selenocysteine
  MOD_RES (344)..(344): Selenocysteine
  MOD_RES (403)..(403): Selenocysteine
  MOD_RES (429)..(429): Selenocysteine
  MOD_RES (483)..(483): Selenocysteine
  MOD_RES (488)..(488): Selenocysteine
  MOD_RES (550)..(550): Selenocysteine
  MOD_RES (558)..(558): Selenocysteine
  MOD_RES (580)..(580): Selenocysteine
  MOD_RES (586)..(586): Selenocysteine
  MOD_RES (641)..(641): Selenocysteine
  MOD_RES (646)..(646): Selenocysteine
  MOD_RES (657)..(657): Selenocysteine
  MOD_RES (697)..(697): Selenocysteine
  MOD_RES (708)..(708): Selenocysteine
MMEELHSLDPRRQELLEARFXGVGVSKGPLNSESSNQSLCSVGSLSDKEVEXPEKKQNDQRNRKRKAEPYEXSQGKGXPRGHKISDYFERRVEQPLYGLDGSAAKEAXEEQSALPXLMSVMLAKPRLDXEQLAQRGAGLCFXFVSAQQNSPSSXGSGNXEHSCSSQKQISIQHRQXQSDLXIEKISALENSKNSDLEKKEGRIDDLLRANCDLRRQIDEQQKMLEKYKERLNRCVXMSKKLLIEKSKQEKMACRDKSMQDRLRLGHFXXVRHGASFXEQWXDGYAFQNLIKQQERINSQREEIERQRKMLAKRKPPAMGQAPPAXNEQKQRKSKXNGAENEXLXLAEYHEQEEIFKLRLGHLKKEEAEIQAELERLERVRNLHIRELKRIHNEDNSQFKDHPXLNDRYLLLHLLGRGGFSEVYKAFDLXEQRYVAVKIHQLNKNWRDEKKENYHKHACREYRIHKELDHPRIVKLYDYFSLDXDSFCXVLEYCEGNDLDFYLKQHKLMSEKEARSIIMQIVNALKYLNEIKPPIIHYDLKPGNILLVNGXACGEIKIXDFGLSKIMDDDSYNSVDGMELXSQGAGXYWYLPPECFVVGKEPPKISNKVDVWSVGVIFYQCLYGRKPFGHNQSQQDILQENXILKAXEVQFPPKPVVXPEAKAFIRRCLAYRKEDRIDVQQLACDPYLLPHIRKSVSXSSPAGAAIASXSGASNNSSSN

SEQ ID NO: 27803 - protein, 593 aa, Homo sapiens
  MOD_RES (21)..(21): Selenocysteine
  MOD_RES (52)..(52): Selenocysteine
  MOD_RES (72)..(72): Selenocysteine
  MOD_RES (78)..(78): Selenocysteine
  MOD_RES (108)..(108): Selenocysteine
  MOD_RES (116)..(116): Selenocysteine
  MOD_RES (129)..(129): Selenocysteine
  MOD_RES (142)..(142): Selenocysteine
  MOD_RES (149)..(149): Selenocysteine
  MOD_RES (204)..(204): Selenocysteine
  MOD_RES (236)..(237): Selenocysteine
  MOD_RES (245)..(245): Selenocysteine
  MOD_RES (249)..(249): Selenocysteine
  MOD_RES (293)..(293): Selenocysteine
  MOD_RES (303)..(303): Selenocysteine
  MOD_RES (310)..(310): Selenocysteine
  MOD_RES (312)..(312): Selenocysteine
  MOD_RES (371)..(371): Selenocysteine
  MOD_RES (397)..(397): Selenocysteine
  MOD_RES (451)..(451): Selenocysteine
  MOD_RES (456)..(456): Selenocysteine
  MOD_RES (518)..(518): Selenocysteine
  MOD_RES (526)..(526): Selenocysteine
  MOD_RES (548)..(548): Selenocysteine
  MOD_RES (554)..(554): Selenocysteine
MMEELHSLDPRRQELLEARFXGVGVSKGPLNSESSNQSLCSVGSLSDKEVEXPEKKQNDQRNRKRKAEPYEXSQGKGXPRGHKISDYFERRVEQPLYGLDGSAAKEAXEEQSALPXLMSVMLAKPRLDXEQLAQRGAGLCFXFVSSDLXIEKISALENSKNSDLEKKEGRIDDLLRANCDLRRQIDEQQKMLEKYKERLNRCVXMSKKLLIEKSKQEKMACRDKSMQDRLRLGHFXXVRHGASFXEQWXDGYAFQNLIKQQERINSQREEIERQRKMLAKRKPPAMGQAPPAXNEQKQRKSKXNGAENEXLXLAEYHEQEEIFKLRLGHLKKEEAEIQAELERLERVRNLHIRELKRIHNEDNSQFKDHPXLNDRYLLLHLLGRGGFSEVYKAFDLXEQRYVAVKIHQLNKNWRDEKKENYHKHACREYRIHKELDHPRIVKLYDYFSLDXDSFCXVLEYCEGNDLDFYLKQHKLMSEKEARSIIMQIVNALKYLNEIKPPIIHYDLKPGNILLVNGXACGEIKIXDFGLSKIMDDDSYNSVDGMELXSQGAGXYWYLPPECFVVGKEPPKISNKVDVWSVGVIFYQCLYGRK

SEQ ID NO: 27804 - protein, 40 aa, Homo sapiens
  MOD_RES (12)..(12): Selenocysteine
  MOD_RES (25)..(25): Selenocysteine
  MOD_RES (37)..(37): Selenocysteine
MSVMLAKPRLDXEQLAQRGAGLCFXFVSAQQNSPSSXGSG

SEQ ID NO: 27805 - protein, 601 aa, Homo sapiens
  MOD_RES (12)..(12): Selenocysteine
  MOD_RES (25)..(25): Selenocysteine
  MOD_RES (37)..(37): Selenocysteine
  MOD_RES (42)..(42): Selenocysteine
  MOD_RES (59)..(59): Selenocysteine
  MOD_RES (64)..(64): Selenocysteine
  MOD_RES (119)..(119): Selenocysteine
  MOD_RES (151)..(152): Selenocysteine
  MOD_RES (160)..(160): Selenocysteine
  MOD_RES (164)..(164): Selenocysteine
  MOD_RES (208)..(208): Selenocysteine
  MOD_RES (218)..(218): Selenocysteine
  MOD_RES (225)..(225): Selenocysteine
  MOD_RES (227)..(227): Selenocysteine
  MOD_RES (286)..(286): Selenocysteine
  MOD_RES (312)..(312): Selenocysteine
  MOD_RES (366)..(366): Selenocysteine
  MOD_RES (371)..(371): Selenocysteine
  MOD_RES (433)..(433): Selenocysteine
  MOD_RES (441)..(441): Selenocysteine
  MOD_RES (463)..(463): Selenocysteine
  MOD_RES (469)..(469): Selenocysteine
  MOD_RES (524)..(524): Selenocysteine
  MOD_RES (529)..(529): Selenocysteine
  MOD_RES (540)..(540): Selenocysteine
  MOD_RES (580)..(580): Selenocysteine
  MOD_RES (591)..(591): Selenocysteine
MSVMLAKPRLDXEQLAQRGAGLCFXFVSAQQNSPSSXGSGNXEHSCSSQKQISIQHRQXQSDLXIEKISALENSKNSDLEKKEGRIDDLLRANCDLRRQIDEQQKMLEKYKERLNRCVXMSKKLLIEKSKQEKMACRDKSMQDRLRLGHFXXVRHGASFXEQWXDGYAFQNLIKQQERINSQREEIERQRKMLAKRKPPAMGQAPPAXNEQKQRKSKXNGAENEXLXLAEYHEQEEIFKLRLGHLKKEEAEIQAELERLERVRNLHIRELKRIHNEDNSQFKDHPXLNDRYLLLHLLGRGGFSEVYKAFDLXEQRYVAVKIHQLNKNWRDEKKENYHKHACREYRIHKELDHPRIVKLYDYFSLDXDSFCXVLEYCEGNDLDFYLKQHKLMSEKEARSIIMQIVNALKYLNEIKPPIIHYDLKPGNILLVNGXACGEIKIXDFGLSKIMDDDSYNSVDGMELXSQGAGXYWYLPPECFVVGKEPPKISNKVDVWSVGVIFYQCLYGRKPFGHNQSQQDILQENXILKAXEVQFPPKPVVXPEAKAFIRRCLAYRKEDRIDVQQLACDPYLLPHIRKSVSXSSPAGAAIASXSGASNNSSSN

SEQ ID NO: 27806 - protein, 176 aa, Homo sapiens
  MOD_RES (8)..(8): Selenocysteine
  MOD_RES (13)..(13): Selenocysteine
  MOD_RES (30)..(30): Selenocysteine
  MOD_RES (59)..(59): Selenocysteine
  MOD_RES (91)..(92): Selenocysteine
  MOD_RES (100)..(100): Selenocysteine
  MOD_RES (104)..(104): Selenocysteine
  MOD_RES (148)..(148): Selenocysteine
  MOD_RES (158)..(158): Selenocysteine
  MOD_RES (165)..(165): Selenocysteine
  MOD_RES (167)..(167): Selenocysteine
QQNSPSSXGSGNXEHSCSSQKQISIQHRQXQANCDLRRQIDEQQKMLEKYKERLNRCVXMSKKLLIEKSKQEKMACRDKSMQDRLRLGHFXXVRHGASFXEQWXDGYAFQNLIKQQERINSQREEIERQRKMLAKRKPPAMGQAPPAXNEQKQRKSKXNGAENEXLXLAEYHEQEE

SEQ ID NO: 27807 - protein, 23 aa, Homo sapiens
  MOD_RES (2)..(2): Selenocysteine
MXSIFHFAIIFMLILQIRIQLSE

SEQ ID NO: 27808 - protein, 48 aa, Homo sapiens
  MOD_RES (2)..(2): Selenocysteine
  MOD_RES (47)..(48): Selenocysteine
MXSIFHFAIIFMLILQIRIQLSEESEFLVDRSKNGLIHVPKDLSQKXX

SEQ ID NO: 27809 - protein, 90 aa, Homo sapiens
  MOD_RES (2)..(2): Selenocysteine
  MOD_RES (47)..(48): Selenocysteine
  MOD_RES (62)..(62): Selenocysteine
MXSIFHFAIIFMLILQIRIQLSEESEFLVDRSKNGLIHVPKDLSQKXXILNISQNYISELWXSDILSLSKLRILIISHNRIQYLDISVFK

SEQ ID NO: 27810 - protein, 161 aa, Homo sapiens
  MOD_RES (2)..(2): Selenocysteine
  MOD_RES (47)..(48): Selenocysteine
  MOD_RES (62)..(62): Selenocysteine
  MOD_RES (113)..(113): Selenocysteine
  MOD_RES (148)..(149): Selenocysteine
MXSIFHFAIIFMLILQIRIQLSEESEFLVDRSKNGLIHVPKDLSQKXXILNISQNYISELWXSDILSLSKLRILIISHNRIQYLDISVFKFNQELEYLDLSHNKLVKISCHPXVNLKHLDLSFNAFDALPICKEFGNMSQLKFLGLSXXHLEKSSVLPIAH

SEQ ID NO: 27811 - protein, 786 aa, Homo sapiens
  MOD_RES (2)..(2): Selenocysteine
  MOD_RES (47)..(48): Selenocysteine
  MOD_RES (62)..(62): Selenocysteine
  MOD_RES (113)..(113): Selenocysteine
  MOD_RES (148)..(149): Selenocysteine
  MOD_RES (174)..(174): Selenocysteine
  MOD_RES (189)..(189): Selenocysteine
  MOD_RES (198)..(198): Selenocysteine
  MOD_RES (212)..(212): Selenocysteine
  MOD_RES (242)..(242): Selenocysteine
  MOD_RES (250)..(250): Selenocysteine
  MOD_RES (256)..(257): Selenocysteine
  MOD_RES (271)..(272): Selenocysteine
  MOD_RES (297)..(297): Selenocysteine
  MOD_RES (332)..(332): Selenocysteine
  MOD_RES (336)..(336): Selenocysteine
  MOD_RES (361)..(361): Selenocysteine
  MOD_RES (363)..(363): Selenocysteine
  MOD_RES (372)..(372): Selenocysteine
  MOD_RES (376)..(376): Selenocysteine
  MOD_RES (394)..(395): Selenocysteine
  MOD_RES (422)..(422): Selenocysteine
  MOD_RES (436)..(436): Selenocysteine
  MOD_RES (438)..(438): Selenocysteine
  MOD_RES (481)..(481): Selenocysteine
  MOD_RES (529)..(529): Selenocysteine
  MOD_RES (565)..(565): Selenocysteine
  MOD_RES (580)..(580): Selenocysteine
  MOD_RES (585)..(585): Selenocysteine
  MOD_RES (589)..(589): Selenocysteine
  MOD_RES (596)..(596): Selenocysteine
  MOD_RES (598)..(598): Selenocysteine
  MOD_RES (617)..(617): Selenocysteine
  MOD_RES (619)..(619): Selenocysteine
  MOD_RES (685)..(685): Selenocysteine
  MOD_RES (754)..(754): Selenocysteine
  MOD_RES (781)..(781): Selenocysteine
MXSIFHFAIIFMLILQIRIQLSEESEFLVDRSKNGLIHVPKDLSQKXXILNISQNYISELWXSDILSLSKLRILIISHNRIQYLDISVFKFNQELEYLDLSHNKLVKISCHPXVNLKHLDLSFNAFDALPICKEFGNMSQLKFLGLSXXHLEKSSVLPIAHLNISKVLLVLGEXYGEKEDPEGLQDFNXESLHIVFPXNKEFHFILDVSVKXVANLELSNIKCVLEDNKCSYFLSILAKLQXNPKLSNLXLNNIEXXWNSFIRILQLVWHXXVWYFSISNVKLQGQLDFRDFDYSGXSLKALSIHQVVSDVFGFPQSYIYEIFSNMNIKNFXVSGXRMVHMLCPSKISPFLHLDFSNNLLXDXVFENCGHLXELEXLILQMNQLKELSKIAEMXXQMKSLQQLDISQNSVSYDEKKGDCSWXKSLLSLNMSSNILXDXIFRCLPPRIKVLDLHSNKIKSIPKQVVKLEALQELNVAFNSLXDLPGCGSFSSLSVLIIDHNSVSHPSADFFQSCQKMRSIKAGDNPFQCXCELGEFVKNIDQVSSEVLEGWPDSYKCDYPESYRGXLLKDFHMSELSCNIXLLIVXIVAXMLVLAVXVXSLCSYLDLPWYLRMVCQWXQXRRRARNIPLEELQRNLQFHAFISYSGHDSFWVKNELLPNLEKEGMQICLHERNFVPGKSIVENIIXCIEKSYKSIFVLSPNFVQSEWCHYELYFAHHNLFHEGSNSLILILLEPIPQYSIPSSYHKLKSLMARRXYLEWPKEKSKRGLFWANLRAAINIKLXEQAKK

SEQ ID NO: 27812 - protein, 811 aa, Homo sapiens
  MOD_RES (16)..(16): Selenocysteine
  MOD_RES (32)..(32): Selenocysteine
  MOD_RES (47)..(47): Selenocysteine
  MOD_RES (50)..(52): Selenocysteine
  MOD_RES (91)..(91): Selenocysteine
  MOD_RES (112)..(112): Selenocysteine
  MOD_RES (131)..(131): Selenocysteine
  MOD_RES (169)..(169): Selenocysteine
  MOD_RES (176)..(176): Selenocysteine
  MOD_RES (190)..(191): Selenocysteine
  MOD_RES (201)..(201): Selenocysteine
  MOD_RES (213)..(213): Selenocysteine
  MOD_RES (220)..(220): Selenocysteine
  MOD_RES (244)..(244): Selenocysteine
  MOD_RES (269)..(269): Selenocysteine
  MOD_RES (280)..(280): Selenocysteine
  MOD_RES (297)..(297): Selenocysteine
  MOD_RES (301)..(301): Selenocysteine
  MOD_RES (324)..(324): Selenocysteine
  MOD_RES (332)..(332): Selenocysteine
  MOD_RES (348)..(348): Selenocysteine
  MOD_RES (361)..(361): Selenocysteine
  MOD_RES (368)..(368): Selenocysteine
  MOD_RES (376)..(376): Selenocysteine
  MOD_RES (386)..(386): Selenocysteine
  MOD_RES (397)..(397): Selenocysteine
  MOD_RES (422)..(422): Selenocysteine
  MOD_RES (457)..(457): Selenocysteine
  MOD_RES (462)..(462): Selenocysteine
  MOD_RES (479)..(479): Selenocysteine
  MOD_RES (516)..(516): Selenocysteine
  MOD_RES (527)..(527): Selenocysteine
  MOD_RES (538)..(538): Selenocysteine
  MOD_RES (552)..(552): Selenocysteine
  MOD_RES (562)..(562): Selenocysteine
  MOD_RES (576)..(576): Selenocysteine
  MOD_RES (582)..(582): Selenocysteine
  MOD_RES (614)..(614): Selenocysteine
  MOD_RES (616)..(616): Selenocysteine
  MOD_RES (623)..(624): Selenocysteine
  MOD_RES (740)..(740): Selenocysteine
  MOD_RES (782)..(782): Selenocysteine
  MOD_RES (790)..(790): Selenocysteine
  MOD_RES (792)..(792): Selenocysteine
  MOD_RES (802)..(802): Selenocysteine
  MOD_RES (808)..(808): Selenocysteine
MRLIRNIYIFCSIVMXAEGDAPELPEERELMXNCSNMSLRKVPADLXPAXXXLDLSYNLLFQLQSSDFHSVSKLRVLILCHNRIQQLDLKXFEFNKELRYLDLSNNRLKSVXWYLLAGLRYLDLSFNDFDXMPICEEAGNMSHLEILGLSGAKIQKSDFQKIAHLHLNXVFLGFRXLPHYEEGSLPILNXXKLHIVLPMDXNFWVLLRDGIKXSKILEMXNIDGKSQFVSYEMQRNLSLENAKXSVLLLNKVDLLWDDLFLILQFVWHXSVEHFQIRNVXFGGKAYLDHNSFDYSNXVMRXIKLEHVHFRVFYIQQDKIYLLLXKMDIENLXISNAQMPHMLFPNYPXKFQYLNFANNILXDELFKRXIQLPHLKXLILNGNKLEXLSLVSCFANNXPLEHLDLSQNLLQHKNDENCSWPEXVVNMNLSYNKLSDSVFRCLPKSIQILDLNNNQIQXVPKEXIHLMALRELNIAFNFLXDLPGCSHFSRLSVLNIEMNFILSPSLDFVQSCQEVKXLNAGRNPFRCXCELKNFIQLEXYSEVMMVGWSDSYXCEYPLNLRGXRLKDVHLHELSCNXALLIVXIVVIMLVLGLAVAFCCLHFDLPWYLRMLGQCXQXWHRVRKXXQEQLKRNVRFHAFISYSEHDSLWVKNELIPNLEKEDGSILICLYESYFDPGKSISENIVSFIEKSYKSIFVLSPNFVQNEWCHYEFYFAHHNLFHENSDHIILILLEPIPFYCIPXRYHKLKALLEKKAYLEWPKDRRKCGLFWANLRAAINVNVLAXREMYELQXFXELNEESRGSXISLMRXDCL

SEQ ID NO: 27813 - protein, 94 aa, Homo sapiens
  MOD_RES (2)..(2): Selenocysteine
  MOD_RES (18)..(18): Selenocysteine
  MOD_RES (33)..(33): Selenocysteine
  MOD_RES (36)..(38): Selenocysteine
  MOD_RES (77)..(77): Selenocysteine
MXAEGDAPELPEERELMXNCSNMSLRKVPADLXPAXXXLDLSYNLLFQLQSSDFHSVSKLRVLILCHNRIQQLDLKXFEFNKELRYLDLSNNRL

SEQ ID NO: 27814 - protein, 784 aa, Homo sapiens
  MOD_RES (4)..(4): Selenocysteine
  MOD_RES (51)..(51): Selenocysteine
  MOD_RES (65)..(65): Selenocysteine
  MOD_RES (84)..(84): Selenocysteine
  MOD_RES (90)..(90): Selenocysteine
  MOD_RES (127)..(127): Selenocysteine
  MOD_RES (138)..(138): Selenocysteine
  MOD_RES (142)..(142): Selenocysteine
  MOD_RES (149)..(149): Selenocysteine
  MOD_RES (161)..(161): Selenocysteine
  MOD_RES (163)..(163): Selenocysteine
  MOD_RES (174)..(174): Selenocysteine
  MOD_RES (221)..(221): Selenocysteine
  MOD_RES (232)..(232): Selenocysteine
  MOD_RES (236)..(236): Selenocysteine
  MOD_RES (244)..(244): Selenocysteine
  MOD_RES (247)..(247): Selenocysteine
  MOD_RES (255)..(255): Selenocysteine
  MOD_RES (262)..(262): Selenocysteine
  MOD_RES (288)..(288): Selenocysteine
  MOD_RES (311)..(311): Selenocysteine
  MOD_RES (313)..(313): Selenocysteine
  MOD_RES (330)..(330): Selenocysteine
  MOD_RES (335)..(335): Selenocysteine
  MOD_RES (342)..(342): Selenocysteine
  MOD_RES (391)..(391): Selenocysteine
  MOD_RES (405)..(405): Selenocysteine
  MOD_RES (408)..(408): Selenocysteine
  MOD_RES (411)..(411): Selenocysteine
  MOD_RES (416)..(416): Selenocysteine
  MOD_RES (431)..(431): Selenocysteine
  MOD_RES (446)..(446): Selenocysteine
  MOD_RES (452)..(452): Selenocysteine
  MOD_RES (458)..(458): Selenocysteine
  MOD_RES (491)..(491): Selenocysteine
  MOD_RES (512)..(513): Selenocysteine
  MOD_RES (524)..(524): Selenocysteine
  MOD_RES (527)..(527): Selenocysteine
  MOD_RES (545)..(545): Selenocysteine
  MOD_RES (588)..(588): Selenocysteine
  MOD_RES (605)..(605): Selenocysteine
  MOD_RES (699)..(699): Selenocysteine
  MOD_RES (758)..(758): Selenocysteine
  MOD_RES (760)..(760): Selenocysteine
MPHXLWMVWVLGVIISLSKEESSNQASLSCDRNGICKGSSGSLNSIPSGLXEAVKSLDLSNNRIXYISNSDLQRCVNLQALVLXSNGINXIEEDSFSSLGSLEHLDLSYNYLSNLSSSWFKPLSSLXFLNLLGNPYKXLGEXSLFSHLXKLQILRVGNMDXFXKIQRKDFAGLXFLEELEIDASDLQSYEPKSLKSIQNVSHLILHMKQHILLLEIFVDVXSSVECLELRDXDLDXFHFSELSXGEXNSLIKKFXFRNVKIXDESLFQVMKLLNQISGLLELEFDDCXLNGVGNFRASDNDRVIDPGKVEXLXIRRLHIPRFYLFYDLSXLYSLXERVKRIXVENSKVFLVPCLLSQHLKSLEYLDLSENLMVEEYLKNSACEDAWPSLQXLILRQNHLASLEKXGEXLLXLKNLXNIDISKNSFHSMPEXCQWPEKMKYLNLSSXRIHSVXGCIPKXLEILDVSNNNLNLFSLNLPQLKELYISRNKLMXLPDASLLPMLLVLKISRNAIXXFSKEQLDSFHXLKXLEAGGNNFICSCEFLSFXQEQQALAKVLIDWPANYLCDSPSHVRGQQVQDVRLSVSECHRXALVSGMCCALFLLILLXGVLCHRFHGLWYMKMMWAWLQAKRKPRKAPSRNICYDAFVSYSERDAYWVENLMVQELENFNPPFKLCLHKRDFIPGKWIIDNIIDSIEKSHKXVFVLSENFVKSEWCKYELDFSHFRLFDENNDAAILILLEPIEKKAIPQRFCKLRKIMNXKXYLEWPMDEAQREGFWVNLRAAIKS

SEQ ID NO: 27815 - protein, 627 aa, Homo sapiens
  MOD_RES (57)..(57): Selenocysteine
  MOD_RES (99)..(99): Selenocysteine
  MOD_RES (114)..(114): Selenocysteine
  MOD_RES (118)..(118): Selenocysteine
  MOD_RES (120)..(120): Selenocysteine
  MOD_RES (123)..(123): Selenocysteine
  MOD_RES (138)..(138): Selenocysteine
  MOD_RES (171)..(171): Selenocysteine
  MOD_RES (195)..(195): Selenocysteine
  MOD_RES (232)..(232): Selenocysteine
  MOD_RES (323)..(323): Selenocysteine
  MOD_RES (346)..(346): Selenocysteine
  MOD_RES (361)..(361): Selenocysteine
  MOD_RES (373)..(373): Selenocysteine
  MOD_RES (387)..(387): Selenocysteine
  MOD_RES (389)..(389): Selenocysteine
  MOD_RES (402)..(402): Selenocysteine
  MOD_RES (416)..(416): Selenocysteine
  MOD_RES (433)..(433): Selenocysteine
  MOD_RES (474)..(474): Selenocysteine
  MOD_RES (541)..(541): Selenocysteine
MLDLSYNNLNVVGNDSFAWLPQLEYFFLEYNNIQHLFSHSLHGLFNVRYLNLKRSFXKQSISLASLPKIDDFSFQWLKCLEHLNMEDNDIPGIKSNMFXGLINLKYLSLSNSFXSLRXLXNEXFVSLAHSPLHILNLXKNKISKIESDAFSWLGHLEVLDLGLNEIGQELXGQEWRGLENIFEIYLSYNKYLQLXRNSFALVPSLQRLMLRRVALKNVDSSPSPFQPLRNLXILDLSNNNIANINDDMLEGLEKLEILDLQHNNLARLWKHANPGGPIYFLKGLSHLHILNLESNGFDEIPVEVFKDLFELKIIDLGLNNLNXLPASVFNNQVSLKSLNLQKNLIXSVEKKVFGPAFRNLXELDMRFNPFDCXCESIAWFVNWINEXHXNIPELSSHYLCNXPPHYHGFPVRLFDXSSCKDSAPFELFFMINXSILLIFIFIVLLIHFEGWRISFYWNVSVHRVLGFKEIDRQXEQFEYAAYIIHAYKDKDWVWEHFSSMEKEDQSLKFCLEERDFEAGVFELEAIVNSIKRSRKIIFVIXHHLLKDPLCKRFKVHHAVQQAIEQNLDSIILVFLEEIPDYKLNHALCLRRGMFKSHCILNWPVQKERIGAFRHKLQVALGSKNSVH

SEQ ID NO: 27816 - protein, 351 aa, Homo sapiens
  MOD_RES (4)..(4): Selenocysteine
  MOD_RES (25)..(26): Selenocysteine
  MOD_RES (29)..(29): Selenocysteine
  MOD_RES (43)..(43): Selenocysteine
  MOD_RES (51)..(51): Selenocysteine
  MOD_RES (54)..(54): Selenocysteine
  MOD_RES (59)..(59): Selenocysteine
  MOD_RES (72)..(72): Selenocysteine
  MOD_RES (78)..(78): Selenocysteine
  MOD_RES (86)..(86): Selenocysteine
  MOD_RES (118)..(118): Selenocysteine
  MOD_RES (123)..(123): Selenocysteine
  MOD_RES (126)..(126): Selenocysteine
  MOD_RES (151)..(151): Selenocysteine
  MOD_RES (162)..(162): Selenocysteine
  MOD_RES (166)..(166): Selenocysteine
  MOD_RES (238)..(238): Selenocysteine
  MOD_RES (248)..(248): Selenocysteine
  MOD_RES (262)..(263): Selenocysteine
  MOD_RES (266)..(267): Selenocysteine
  MOD_RES (274)..(274): Selenocysteine
  MOD_RES (277)..(277): Selenocysteine
  MOD_RES (312)..(312): Selenocysteine
  MOD_RES (327)..(327): Selenocysteine
  MOD_RES (331)..(331): Selenocysteine
  MOD_RES (333)..(333): Selenocysteine
  MOD_RES (336)..(336): Selenocysteine
  MOD_RES (351)..(351): Selenocysteine
MRQXLPCIYFWGGLLPFGMLCASSXXKCXVSHEVADCSHLKLXQVPDDLPXNIXVLNLXHNQLRRLPAANFXRYSQLXSLDVGFNXISKLEPELCQKLPMLKVLNLQHNELSQLSDKXFAFCXNLXELHLMSNSIQKIKNNPFVKQKNLIXLDLSHNGLSSXKLGXQVQLENLQELLLSNNKIQALKSEELDIFANSSLKKLELSSNQIKEFSPGCFHAIGRLFGLFLNNVQLGPSLXEKLCLELANXSIRNLSLSNSQLSXXSNXXFLGLKWXNLXMLDLSYNNLNVWLKCLEHLNMEDNDIPGIKSNMFXGLINLKYLSLSNSFXSLRXLXNEXFVSLAHSPLHILNLX

SEQ ID NO: 27817 - protein, 904 aa, Homo sapiens
  MOD_RES (4)..(4): Selenocysteine
  MOD_RES (25)..(26): Selenocysteine
  MOD_RES (29)..(29): Selenocysteine
  MOD_RES (43)..(43): Selenocysteine
  MOD_RES (51)..(51): Selenocysteine
  MOD_RES (54)..(54): Selenocysteine
  MOD_RES (59)..(59): Selenocysteine
  MOD_RES (72)..(72): Selenocysteine
  MOD_RES (78)..(78): Selenocysteine
  MOD_RES (86)..(86): Selenocysteine
  MOD_RES (118)..(118): Selenocysteine
  MOD_RES (123)..(123): Selenocysteine
  MOD_RES (126)..(126): Selenocysteine
  MOD_RES (151)..(151): Selenocysteine
  MOD_RES (162)..(162): Selenocysteine
  MOD_RES (166)..(166): Selenocysteine
  MOD_RES (238)..(238): Selenocysteine
  MOD_RES (248)..(248): Selenocysteine
  MOD_RES (262)..(263): Selenocysteine
  MOD_RES (266)..(267): Selenocysteine
  MOD_RES (274)..(274): Selenocysteine
  MOD_RES (277)..(277): Selenocysteine
  MOD_RES (334)..(334): Selenocysteine
  MOD_RES (376)..(376): Selenocysteine
  MOD_RES (391)..(391): Selenocysteine
  MOD_RES (395)..(395): Selenocysteine
  MOD_RES (397)..(397): Selenocysteine
  MOD_RES (400)..(400): Selenocysteine
  MOD_RES (415)..(415): Selenocysteine
  MOD_RES (448)..(448): Selenocysteine
  MOD_RES (472)..(472): Selenocysteine
  MOD_RES (509)..(509): Selenocysteine
  MOD_RES (600)..(600): Selenocysteine
  MOD_RES (623)..(623): Selenocysteine
  MOD_RES (638)..(638): Selenocysteine
  MOD_RES (650)..(650): Selenocysteine
  MOD_RES (664)..(664): Selenocysteine
  MOD_RES (666)..(666): Selenocysteine
  MOD_RES (679)..(679): Selenocysteine
  MOD_RES (693)..(693): Selenocysteine
  MOD_RES (710)..(710): Selenocysteine
  MOD_RES (751)..(751): Selenocysteine
  MOD_RES (818)..(818): Selenocysteine
MRQXLPCIYFWGGLLPFGMLCASSXXKCXVSHEVADCSHLKLXQVPDDLPXNIXVLNLXHNQLRRLPAANFXRYSQLXSLDVGFNXISKLEPELCQKLPMLKVLNLQHNELSQLSDKXFAFCXNLXELHLMSNSIQKIKNNPFVKQKNLIXLDLSHNGLSSXKLGXQVQLENLQELLLSNNKIQALKSEELDIFANSSLKKLELSSNQIKEFSPGCFHAIGRLFGLFLNNVQLGPSLXEKLCLELANXSIRNLSLSNSQLSXXSNXXFLGLKWXNLXMLDLSYNNLNVVGNDSFAWLPQLEYFFLEYNNIQHLFSHSLHGLFNVRYLNLKRSFXKQSISLASLPKIDDFSFQWLKCLEHLNMEDNDIPGIKSNMFXGLINLKYLSLSNSFXSLRXLXNEXFVSLAHSPLHILNLXKNKISKIESDAFSWLGHLEVLDLGLNEIGQELXGQEWRGLENIFEIYLSYNKYLQLXRNSFALVPSLQRLMLRRVALKNVDSSPSPFQPLRNLXILDLSNNNIANINDDMLEGLEKLEILDLQHNNLARLWKHANPGGPIYFLKGLSHLHILNLESNGFDEIPVEVFKDLFELKIIDLGLNNLNXLPASVFNNQVSLKSLNLQKNLIXSVEKKVFGPAFRNLXELDMRFNPFDCXCESIAWFVNWINEXHXNIPELSSHYLCNXPPHYHGFPVRLFDXSSCKDSAPFELFFMINXSILLIFIFIVLLIHFEGWRISFYWNVSVHRVLGFKEIDRQXEQFEYAAYIIHAYKDKDWVWEHFSSMEKEDQSLKFCLEERDFEAGVFELEAIVNSIKRSRKIIFVIXHHLLKDPLCKRFKVHHAVQQAIEQNLDSIILVFLEEIPDYKLNHALCLRRGMFKSHCILNWPVQKERIGAFRHKLQVALGSKNSVH

SEQ ID NO: 27818 - protein, 799 aa, Homo sapiens
  MOD_RES (16)..(16): Selenocysteine
  MOD_RES (52)..(52): Selenocysteine
  MOD_RES (66)..(66): Selenocysteine
  MOD_RES (70)..(70): Selenocysteine
  MOD_RES (96)..(96): Selenocysteine
  MOD_RES (111)..(111): Selenocysteine
  MOD_RES (135)..(135): Selenocysteine
  MOD_RES (153)..(153): Selenocysteine
  MOD_RES (192)..(192): Selenocysteine
  MOD_RES (205)..(205): Selenocysteine
  MOD_RES (244)..(244): Selenocysteine
  MOD_RES (268)..(268): Selenocysteine
  MOD_RES (279)..(279): Selenocysteine
  MOD_RES (307)..(307): Selenocysteine
  MOD_RES (317)..(317): Selenocysteine
  MOD_RES (319)..(319): Selenocysteine
  MOD_RES (358)..(359): Selenocysteine
  MOD_RES (373)..(373): Selenocysteine
  MOD_RES (417)..(417): Selenocysteine
  MOD_RES (419)..(419): Selenocysteine
  MOD_RES (453)..(453): Selenocysteine
  MOD_RES (459)..(459): Selenocysteine
  MOD_RES (474)..(474): Selenocysteine
  MOD_RES (497)..(497): Selenocysteine
  MOD_RES (518)..(518): Selenocysteine
  MOD_RES (537)..(537): Selenocysteine
  MOD_RES (544)..(544): Selenocysteine
  MOD_RES (571)..(571): Selenocysteine
  MOD_RES (586)..(586): Selenocysteine
  MOD_RES (592)..(592): Selenocysteine
  MOD_RES (716)..(716): Selenocysteine
  MOD_RES (737)..(737): Selenocysteine
  MOD_RES (753)..(753): Selenocysteine
  MOD_RES (786)..(786): Selenocysteine
  MOD_RES (789)..(789): Selenocysteine
  MOD_RES (797)..(797): Selenocysteine
MELNFYKIPDNLPFSXKNLDLSFNPLRHLGSYSFFSFPELQVLDLSRCEIQXIEDGAYQSLSHLSXLILXGNPIQSLALGAFSGLSSLQKLVAVEXNLASLENFPIGHLKXLKELNVAHNLIQSFKLPEYFSNLXNLEHLDLSSNKIQSIYCXDLRVLHQMPLLNLSLDLSLNPMNFIQPGAFKEIRLHKLXLRNNFDSLNVMKXCIQGLAGLEVHRLVLGEFRNEGNLEKFDKSALEGLCNLXIEEFRLAYLDYYLDDIIDLFNCLXNVSSFSLVSVXIERVKDFSYNFGWQHLELVNCKFGQFPXLKLKSLKRLXFXSNKGGNAFSEVDLPSLEFLDLSRNGLSFKGCCSQSDFGXXSLKYLDLSFNGVIXMSSNFLGLEQLEHLDFQHSNLKQMSEFSVFLSLRNLIYLDISHXHXRVAFNGIFNGLSSLEVLKMAGNSFQENFLPDIFXELRNLXFLDLSQCQLEQLSPXAFNSLSSLQVLNMSHNNFFSLDXFPYKCLNSLQVLDYSLNHIMXSKKQELQHFPSSLAFLNLXQNDFACXCEHQSFLQWIKDQRQLLVEVERMECAXPSDKQGMPVLSLNIXCQMNKXIIGVSVLSVLVVSVVAVLVYKFYFHLMLLAGCIKYGRGENIYDAFVIYSSQDEDWVRNELVKNLEEGVPPFQLCLHYRDFIPGVAIAANIIHEGFHKSRKVIVVVSQHFIQSRWCIFEYEIAQXWQFLSSRAGIIFIVLQKVEKXLLRQQVELYRLLSRNXYLEWEDSVLGRHIFWRRLRKALLDGKSWNPEGXVGXGCNWQEAXSI

SEQ ID NO: 27819 - protein, 839 aa, Homo sapiens
  MOD_RES (10)..(10): Selenocysteine
  MOD_RES (37)..(37): Selenocysteine
  MOD_RES (56)..(56): Selenocysteine
  MOD_RES (92)..(92): Selenocysteine
  MOD_RES (106)..(106): Selenocysteine
  MOD_RES (110)..(110): Selenocysteine
  MOD_RES (136)..(136): Selenocysteine
  MOD_RES (151)..(151): Selenocysteine
  MOD_RES (175)..(175): Selenocysteine
  MOD_RES (193)..(193): Selenocysteine
  MOD_RES (232)..(232): Selenocysteine
  MOD_RES (245)..(245): Selenocysteine
  MOD_RES (284)..(284): Selenocysteine
  MOD_RES (308)..(308): Selenocysteine
  MOD_RES (319)..(319): Selenocysteine
  MOD_RES (347)..(347): Selenocysteine
  MOD_RES (357)..(357): Selenocysteine
  MOD_RES (359)..(359): Selenocysteine
  MOD_RES (398)..(399): Selenocysteine
  MOD_RES (413)..(413): Selenocysteine
  MOD_RES (457)..(457): Selenocysteine
  MOD_RES (459)..(459): Selenocysteine
  MOD_RES (493)..(493): Selenocysteine
  MOD_RES (499)..(499): Selenocysteine
  MOD_RES (514)..(514): Selenocysteine
  MOD_RES (537)..(537): Selenocysteine
  MOD_RES (558)..(558): Selenocysteine
  MOD_RES (577)..(577): Selenocysteine
  MOD_RES (584)..(584): Selenocysteine
  MOD_RES (611)..(611): Selenocysteine
  MOD_RES (626)..(626): Selenocysteine
  MOD_RES (632)..(632): Selenocysteine
  MOD_RES (756)..(756): Selenocysteine
  MOD_RES (777)..(777): Selenocysteine
  MOD_RES (793)..(793): Selenocysteine
  MOD_RES (826)..(826): Selenocysteine
  MOD_RES (829)..(829): Selenocysteine
  MOD_RES (837)..(837): Selenocysteine
MMSASRLAGXLIPAMAFLSCVRPESWEPCVEVVPNIXYQCMELNFYKIPDNLPFSXKNLDLSFNPLRHLGSYSFFSFPELQVLDLSRCEIQXIEDGAYQSLSHLSXLILXGNPIQSLALGAFSGLSSLQKLVAVEXNLASLENFPIGHLKXLKELNVAHNLIQSFKLPEYFSNLXNLEHLDLSSNKIQSIYCXDLRVLHQMPLLNLSLDLSLNPMNFIQPGAFKEIRLHKLXLRNNFDSLNVMKXCIQGLAGLEVHRLVLGEFRNEGNLEKFDKSALEGLCNLXIEEFRLAYLDYYLDDIIDLFNCLXNVSSFSLVSVXIERVKDFSYNFGWQHLELVNCKFGQFPXLKLKSLKRLXFXSNKGGNAFSEVDLPSLEFLDLSRNGLSFKGCCSQSDFGXXSLKYLDLSFNGVIXMSSNFLGLEQLEHLDFQHSNLKQMSEFSVFLSLRNLIYLDISHXHXRVAFNGIFNGLSSLEVLKMAGNSFQENFLPDIFXELRNLXFLDLSQCQLEQLSPXAFNSLSSLQVLNMSHNNFFSLDXFPYKCLNSLQVLDYSLNHIMXSKKQELQHFPSSLAFLNLXQNDFACXCEHQSFLQWIKDQRQLLVEVERMECAXPSDKQGMPVLSLNIXCQMNKXIIGVSVLSVLVVSVVAVLVYKFYFHLMLLAGCIKYGRGENIYDAFVIYSSQDEDWVRNELVKNLEEGVPPFQLCLHYRDFIPGVAIAANIIHEGFHKSRKVIVVVSQHFIQSRWCIFEYEIAQXWQFLSSRAGIIFIVLQKVEKXLLRQQVELYRLLSRNXYLEWEDSVLGRHIFWRRLRKALLDGKSWNPEGXVGXGCNWQEAXSI

SEQ ID NO: 27820 - protein, 21 aa, Homo sapiens
MGDHLDLLLGVVLMAGPVFGI

SEQ ID NO: 27821 - protein, 858 aa, Homo sapiens
  MOD_RES (39)..(39): Selenocysteine
  MOD_RES (47)..(48): Selenocysteine
  MOD_RES (60)..(60): Selenocysteine
  MOD_RES (62)..(62): Selenocysteine
  MOD_RES (82)..(82): Selenocysteine
  MOD_RES (85)..(85): Selenocysteine
  MOD_RES (148)..(148): Selenocysteine
  MOD_RES (197)..(197): Selenocysteine
  MOD_RES (239)..(239): Selenocysteine
  MOD_RES (243)..(243): Selenocysteine
  MOD_RES (281)..(281): Selenocysteine
  MOD_RES (310)..(310): Selenocysteine
  MOD_RES (379)..(379): Selenocysteine
  MOD_RES (388)..(388): Selenocysteine
  MOD_RES (397)..(398): Selenocysteine
  MOD_RES (417)..(417): Selenocysteine
  MOD_RES (424)..(424): Selenocysteine
  MOD_RES (468)..(468): Selenocysteine
  MOD_RES (491)..(491): Selenocysteine
  MOD_RES (526)..(526): Selenocysteine
  MOD_RES (539)..(539): Selenocysteine
  MOD_RES (577)..(577): Selenocysteine
  MOD_RES (589)..(589): Selenocysteine
  MOD_RES (597)..(597): Selenocysteine
  MOD_RES (600)..(600): Selenocysteine
  MOD_RES (626)..(626): Selenocysteine
  MOD_RES (647)..(647): Selenocysteine
  MOD_RES (649)..(649): Selenocysteine
  MOD_RES (651)..(651): Selenocysteine
  MOD_RES (656)..(656): Selenocysteine
  MOD_RES (659)..(659): Selenocysteine
  MOD_RES (661)..(661): Selenocysteine
  MOD_RES (673)..(673): Selenocysteine
  MOD_RES (686)..(686): Selenocysteine
  MOD_RES (705)..(705): Selenocysteine
  MOD_RES (717)..(717): Selenocysteine
  MOD_RES (853)..(853): Selenocysteine
  MOD_RES (856)..(856): Selenocysteine
MGDHLDLLLGVVLMAGPVFGIPSCSFDGRIAFYRFCNLXQVPQVLNXXERLLLSFNYIRXVXASSFPFLEQLQLLELGSQYXPLXIDKEAFRNLPNLRILDLGSSKIYFLHPDAFQGLFHLFELRLYFCGLSDAVLKDGYFRNLKALXRLDLSKNQIRSLYLHPSFGKLNSLKSIDFSSNQIFLVCEHELEPLQGKXLSFFSLAANSLYSRVSVDWGKCMNPFRNMVLEILDVSGNGWXVDIXGNFSNAISKSQAFSLILAHHIMGAGFGFHNIKDPDQNXFAGLARSSVRHLDLSHGFVFSLNSRVFEXLKDLKVLNLAYNKINKIADEAFYGLDNLQVLNLSYNLLGELYSSNFYGLPKVAYIDLQKNHIAIIQDQXFKFLEKLQXLDLRDNALXXIHFIPSIPDIFLSGNKLVXLPKINLXANLIHLSENRLENLDILYFLLRVPHLQILILNQNRFSSCSGDQXPSENPSLEQLFLGENMLQLAWEXELCWDVFEGLSHLQVLYLNHNYLNSLPPGVFSHLXALRGLSLNSNRLXVLSHNDLPANLEILDISRNQLLAPNPDVFVSLSVLDIXHNKFICECELSXFINWLNHXNVXIAGPPADIYCVYPDSFSGVSLFSLSXEGCDEEEVLKSLKFSLFIVCXVXLXLFLMXILXVXKFRGFCFICYKXAQRLVFKDHPQGXEPDMYKYDAYLCFSSKDFXWVQNALLKHLDXQYSDQNRFNLCFEERDFVPGENRIANIQDAIWNSRKIVCLVSRHFLRDGWCLEAFSYAQGRCLSDLNSALIMVVVGSLSQYQLMKHQSIRGFVQKQQYLRWPEDLQDVGWFLHKLSQQILKKEKEKKKDNNIPLQXVAXIS

SEQ ID NO: 27822 - protein, 91 aa, Homo sapiens
  MOD_RES (2)..(2): Selenocysteine
  MOD_RES (24)..(24): Selenocysteine
  MOD_RES (54)..(54): Selenocysteine
  MOD_RES (79)..(79): Selenocysteine
MXKDKEPIVKSFHFVCLMIIIVGXRIQFSDGNEFAVDKSKRGLIHVPKDLPLKXKVLDMSQNYIAELQVSDMSFLSELXVLRLSHNRIQLL

SEQ ID NO: 27823 - protein, 150 aa, Homo sapiens
  MOD_RES (2)..(2): Selenocysteine
  MOD_RES (24)..(24): Selenocysteine
  MOD_RES (54)..(54): Selenocysteine
  MOD_RES (79)..(79): Selenocysteine
MXKDKEPIVKSFHFVCLMIIIVGXRIQFSDGNEFAVDKSKRGLIHVPKDLPLKXKVLDMSQNYIAELQVSDMSFLSELXVLRLSHNRIQLLDLSVFKFNQDLEYLDLSHNQLQKISCHPIVSFRHLDLSFNDFKALPICKEFGNLSQLNF

SEQ ID NO: 27824 - protein, 480 aa, Homo sapiens
  MOD_RES (2)..(2): Selenocysteine
  MOD_RES (24)..(24): Selenocysteine
  MOD_RES (54)..(54): Selenocysteine
  MOD_RES (79)..(79): Selenocysteine
  MOD_RES (188)..(188): Selenocysteine
  MOD_RES (198)..(198): Selenocysteine
  MOD_RES (206)..(206): Selenocysteine
  MOD_RES (219)..(219): Selenocysteine
  MOD_RES (226)..(226): Selenocysteine
  MOD_RES (246)..(246): Selenocysteine
  MOD_RES (250)..(250): Selenocysteine
  MOD_RES (255)..(255): Selenocysteine
  MOD_RES (261)..(262): Selenocysteine
  MOD_RES (287)..(287): Selenocysteine
  MOD_RES (298)..(298): Selenocysteine
  MOD_RES (302)..(303): Selenocysteine
  MOD_RES (308)..(308): Selenocysteine
  MOD_RES (313)..(313): Selenocysteine
  MOD_RES (322)..(322): Selenocysteine
  MOD_RES (326)..(326): Selenocysteine
  MOD_RES (337)..(337): Selenocysteine
  MOD_RES (341)..(341): Selenocysteine
  MOD_RES (354)..(354): Selenocysteine
  MOD_RES (361)..(361): Selenocysteine
  MOD_RES (366)..(366): Selenocysteine
  MOD_RES (375)..(375): Selenocysteine
  MOD_RES (381)..(381): Selenocysteine
  MOD_RES (440)..(440): Selenocysteine
  MOD_RES (443)..(443): Selenocysteine
  MOD_RES (470)..(470): Selenocysteine
  MOD_RES (473)..(473): Selenocysteine
MXKDKEPIVKSFHFVCLMIIIVGXRIQFSDGNEFAVDKSKRGLIHVPKDLPLKXKVLDMSQNYIAELQVSDMSFLSELXVLRLSHNRIQLLDLSVFKFNQDLEYLDLSHNQLQKISCHPIVSFRHLDLSFNDFKALPICKEFGNLSQLNFLGLSAMKLQKLDLLPIAHLHLSYILLDLRNYYIKENEXESLQILNAKXLHLVFHPXSLFAIQVNISVNXLGCLQLXNIKLNDDNCQVFIKFLSELXRGSXLLNFXLNHIEXXWKCLVRVFQFLWPKPVEYLNIYNLXIIESIREEDFXYSKXXLKALXIEHIXNQVFLFSQXALYXVFSEMNIMMLXISDXPFIHMLCPHAPSXFKFLNFXQNVFXDSIFEKCSXLVKLEXLIFVLSPNFVQSEWCHYELYFAHHNLFHEGSNNLILILLEPIPQNSIPNKYHKLKALMXQRXYLQWPKEKSKRGLFWANIRAAFNMKLXLVXENNDVKS

SEQ ID NO: 27825 - protein, 796 aa, Homo sapiens
  MOD_RES (2)..(2): Selenocysteine
  MOD_RES (24)..(24): Selenocysteine
  MOD_RES (54)..(54): Selenocysteine
  MOD_RES (79)..(79): Selenocysteine
  MOD_RES (188)..(188): Selenocysteine
  MOD_RES (198)..(198): Selenocysteine
  MOD_RES (206)..(206): Selenocysteine
  MOD_RES (219)..(219): Selenocysteine
  MOD_RES (226)..(226): Selenocysteine
  MOD_RES (246)..(246): Selenocysteine
  MOD_RES (250)..(250): Selenocysteine
  MOD_RES (255)..(255): Selenocysteine
  MOD_RES (261)..(262): Selenocysteine
  MOD_RES (287)..(287): Selenocysteine
  MOD_RES (298)..(298): Selenocysteine
  MOD_RES (302)..(303): Selenocysteine
  MOD_RES (308)..(308): Selenocysteine
  MOD_RES (313)..(313): Selenocysteine
  MOD_RES (322)..(322): Selenocysteine
  MOD_RES (326)..(326): Selenocysteine
  MOD_RES (337)..(337): Selenocysteine
  MOD_RES (341)..(341): Selenocysteine
  MOD_RES (354)..(354): Selenocysteine
  MOD_RES (361)..(361): Selenocysteine
  MOD_RES (366)..(366): Selenocysteine
  MOD_RES (375)..(375): Selenocysteine
  MOD_RES (381)..(381): Selenocysteine
  MOD_RES (399)..(399): Selenocysteine
  MOD_RES (425)..(425): Selenocysteine
  MOD_RES (441)..(441): Selenocysteine
  MOD_RES (486)..(486): Selenocysteine
  MOD_RES (534)..(534): Selenocysteine
  MOD_RES (585)..(585): Selenocysteine
  MOD_RES (590)..(590): Selenocysteine
  MOD_RES (594)..(594): Selenocysteine
  MOD_RES (601)..(601): Selenocysteine
  MOD_RES (603)..(603): Selenocysteine
  MOD_RES (622)..(622): Selenocysteine
  MOD_RES (624)..(624): Selenocysteine
  MOD_RES (756)..(756): Selenocysteine
  MOD_RES (759)..(759): Selenocysteine
  MOD_RES (786)..(786): Selenocysteine
  MOD_RES (789)..(789): Selenocysteine
MXKDKEPIVKSFHFVCLMIIIVGXRIQFSDGNEFAVDKSKRGLIHVPKDLPLKXKVLDMSQNYIAELQVSDMSFLSELXVLRLSHNRIQLLDLSVFKFNQDLEYLDLSHNQLQKISCHPIVSFRHLDLSFNDFKALPICKEFGNLSQLNFLGLSAMKLQKLDLLPIAHLHLSYILLDLRNYYIKENEXESLQILNAKXLHLVFHPXSLFAIQVNISVNXLGCLQLXNIKLNDDNCQVFIKFLSELXRGSXLLNFXLNHIEXXWKCLVRVFQFLWPKPVEYLNIYNLXIIESIREEDFXYSKXXLKALXIEHIXNQVFLFSQXALYXVFSEMNIMMLXISDXPFIHMLCPHAPSXFKFLNFXQNVFXDSIFEKCSXLVKLEXLILQKNGLKDLFKVGLMXKDMPSLEILDVSWNSLESGRHKENCXWVESIVVLNLSSNMLXDSVFRCLPPRIKVLDLHSNKIKSVPKQVVKLEALQELNVAFNSLXDLPGCGSFSSLSVLIIDHNSVSHPSADFFQSCQKMRSIKAGDNPFQCXCELREFVKNIDQVSSEVLEGWPDSYKCDYPESYRGSPLKDFHMSELSCNIXLLIVXIGAXMLVLAVXVXSLCIYLDLPWYLRMVCQWXQXRRRARNIPLEELQRNLQFHAFISYSEHDSAWVKSELVPYLEKEDIQICLHERNFVPGKSIVENIINCIEKSYKSIFVLSPNFVQSEWCHYELYFAHHNLFHEGSNNLILILLEPIPQNSIPNKYHKLKALMXQRXYLQWPKEKSKRGLFWANIRAAFNMKLXLVXENNDVKS

SEQ ID NO: 27826 - protein, 1049 aa, Homo sapiens
  MOD_RES (7)..(7): Selenocysteine
  MOD_RES (33)..(33): Selenocysteine
  MOD_RES (39)..(39): Selenocysteine
  MOD_RES (52)..(52): Selenocysteine
  MOD_RES (57)..(57): Selenocysteine
  MOD_RES (65)..(65): Selenocysteine
  MOD_RES (67)..(68): Selenocysteine
  MOD_RES (71)..(71): Selenocysteine
  MOD_RES (73)..(73): Selenocysteine
  MOD_RES (127)..(127): Selenocysteine
  MOD_RES (169)..(169): Selenocysteine
  MOD_RES (204)..(204): Selenocysteine
  MOD_RES (217)..(217): Selenocysteine
  MOD_RES (221)..(221): Selenocysteine
  MOD_RES (226)..(226): Selenocysteine
  MOD_RES (228)..(228): Selenocysteine
  MOD_RES (290)..(290): Selenocysteine
  MOD_RES (406)..(406): Selenocysteine
  MOD_RES (450)..(450): Selenocysteine
  MOD_RES (497)..(497): Selenocysteine
  MOD_RES (532)..(532): Selenocysteine
  MOD_RES (560)..(560): Selenocysteine
  MOD_RES (586)..(586): Selenocysteine
  MOD_RES (592)..(592): Selenocysteine
  MOD_RES (612)..(612): Selenocysteine
  MOD_RES (615)..(615): Selenocysteine
  MOD_RES (623)..(623): Selenocysteine
  MOD_RES (703)..(703): Selenocysteine
  MOD_RES (712)..(713): Selenocysteine
  MOD_RES (739)..(739): Selenocysteine
  MOD_RES (765)..(765): Selenocysteine
  MOD_RES (788)..(788): Selenocysteine
  MOD_RES (801)..(801): Selenocysteine
  MOD_RES (804)..(804): Selenocysteine
  MOD_RES (810)..(810): Selenocysteine
  MOD_RES (813)..(813): Selenocysteine
  MOD_RES (832)..(832): Selenocysteine
  MOD_RES (838)..(838): Selenocysteine
  MOD_RES (858)..(858): Selenocysteine
  MOD_RES (899)..(899): Selenocysteine
  MOD_RES (905)..(905): Selenocysteine
  MOD_RES (953)..(953): Selenocysteine
  MOD_RES (958)..(958): Selenocysteine
  MOD_RES (964)..(964): Selenocysteine
  MOD_RES (1017)..(1017): Selenocysteine
  MOD_RES (1035)..(1035): Selenocysteine
  MOD_RES (1048)..(1048): Selenocysteine
MVFPMWXLKRQILILFNIILISKLLGARWFPKXLPCDVXLDVPKNHVIVDCXDKHLXEIPGGIPXNXXNLXLXINHIPDISPASFHRLDHLVEIDFRCNCVPIPLGSKNNMCIKRLQIKPRSFSGLXYLKSLYLDGNQLLEIPQGLPPSLQLLSLEANNIFSIRKENLXELANIEILYLGQNCYYRNPCYVSYSIEKDAFLNLXKLKVLSLKDNNVXAVPXVLPSXLXELYLYNNMIAKIQEDDFNNLNQLQILDLSGNCPRCYNAPFPCAPCKNNSPLQIPVNAFDALXELKVLRLHSNSLQHVPPRWFKNINKLQELDLSQNFLAKEIGDAKFLHFLPSLIQLDLSFNFELQVYRASMNLSQAFSSLKSLKILRIRGYVFKELKSFNLSPLHNLQNLEVLDLGXNFIKIANLSMFKQFKRLKVIDLSVNKISPSGDSSEVGFCSNARXSVESYEPQVLEQLHYFRYDKYARSCRFKNKEASFMSVNESCYKYGQXLDLSKNSIFFVKSSDFQHLSFLKCLNLSGNLISQXLNGSEFQPLAELRYLDFSNNRLDLLHSXAFEELHKLEVLDISSNSHYFQSEGIXHMLNFXKNLKVLQKLMMNDNDISSSXSRXMESESLRXLEFRGNHLDVLWREGDNRYLQLFKNLLKLEELDISKNSLSFLPSGVFDGMPPNLKNLSLAKNGLKSFSWKKLQCLKNLEXLDLSHNQLXXVPERLSNCSRSLKNLILKNNQIRSLXKYFLQDAFQLRYLDLSSNKIQMIQKXSFPENVLNNLKMLLLHHNRFLCXCDAVWFVWWVNHXEVXIPYLAXDVXCVGPGAHKGQSVISLDLYXCELDLXNLILFSLSISVSLFLMVMMXASHLYFWDVWYIYHFCKAKIKGYQRLISPDCCYDAFIVYDXKDPAVXEWVLAELVAKLEDPREKHFNLCLEERDWLPGQPVLENLSQSIQLSKKXVFVMXDKYAKXENFKIAFYLSHQRLMDEKVDVIILIFLEKPFQKSKFLQLRKRLCGSSVLEWPXNPQAHPYFWQCLKNALAXDNHVAYSQVFKEXV

SEQ ID NO: 27827 - protein, 1041 aa, Homo sapiens
  MOD_RES (12)..(12): Selenocysteine
  MOD_RES (60)..(60): Selenocysteine
  MOD_RES (66)..(66): Selenocysteine
  MOD_RES (76)..(76): Selenocysteine
  MOD_RES (79)..(79): Selenocysteine
  MOD_RES (90)..(90): Selenocysteine
  MOD_RES (117)..(117): Selenocysteine
  MOD_RES (149)..(149): Selenocysteine
  MOD_RES (162)..(162): Selenocysteine
  MOD_RES (190)..(190): Selenocysteine
  MOD_RES (199)..(199): Selenocysteine
  MOD_RES (201)..(201): Selenocysteine
  MOD_RES (232)..(232): Selenocysteine
  MOD_RES (249)..(249): Selenocysteine
  MOD_RES (287)..(287): Selenocysteine
  MOD_RES (297)..(297): Selenocysteine
  MOD_RES (334)..(334): Selenocysteine
  MOD_RES (398)..(398): Selenocysteine
  MOD_RES (437)..(437): Selenocysteine
  MOD_RES (457)..(457): Selenocysteine
  MOD_RES (471)..(471): Selenocysteine
  MOD_RES (524)..(524): Selenocysteine
  MOD_RES (538)..(538): Selenocysteine
  MOD_RES (551)..(551): Selenocysteine
  MOD_RES (574)..(574): Selenocysteine
  MOD_RES (584)..(584): Selenocysteine
  MOD_RES (598)..(598): Selenocysteine
  MOD_RES (600)..(600): Selenocysteine
  MOD_RES (642)..(642): Selenocysteine
  MOD_RES (667)..(667): Selenocysteine
  MOD_RES (682)..(682): Selenocysteine
  MOD_RES (704)..(704): Selenocysteine
  MOD_RES (711)..(711): Selenocysteine
  MOD_RES (716)..(716): Selenocysteine
  MOD_RES (750)..(750): Selenocysteine
  MOD_RES (758)..(758): Selenocysteine
  MOD_RES (760)..(762): Selenocysteine
  MOD_RES (777)..(777): Selenocysteine
  MOD_RES (820)..(821): Selenocysteine
  MOD_RES (827)..(827): Selenocysteine
  MOD_RES (835)..(835): Selenocysteine
  MOD_RES (839)..(840): Selenocysteine
  MOD_RES (875)..(875): Selenocysteine
  MOD_RES (878)..(878): Selenocysteine
  MOD_RES (888)..(888): Selenocysteine
  MOD_RES (894)..(894): Selenocysteine
  MOD_RES (942)..(942): Selenocysteine
  MOD_RES (947)..(947): Selenocysteine
  MOD_RES (958)..(958): Selenocysteine
  MOD_RES (1017)..(1017): Selenocysteine
  MOD_RES (1024)..(1024): Selenocysteine
MENMFLQSSMLXCIFLLISGSCELCAEENFSRSYPCDEKKQNDSVIAECSNRRLQEVPQXVGKYVXELDLSDNFIXHIXNESFQGLQNLXKINLNHNPNVQHQNGNPGIQSNGLNIXDGAFLNLKNLRELLLEDNQLPQIPSGLPESLXELSLIQNNIYNIXKEGISRLINLKNLYLAWNCYFNKVCEKXNIEDGVFEXLXNLELLSLSFNSLSHVPPKLPSSLRKLFLSNXQIKYISEEDFKGLINLXLLDLSGNCPRCFNAPFPCVPCDGGASINIDRFAFQNLXQLRYLNLSSXSLRKINAAWFKNMPHLKVLDLEFNYLVGEIASGAFLXMLPRLEILDLSFNYIKGSYPQHINISRNFSKLLSLRALHLRGYVFQELREDDFQPLMQLPNLSXINLGINFIKQIDFKLFQNFSNLEIIYLSENRISPLVKDXRQSYANSSSFQRHIRKRRSXDFEFDPHSNFYHFXRPLIKPQCAAYGKALDLSLNSIFFIGPNQFENLPDIACLNLSANSNAQVLSGXEFSAIPHVKYLDLXNNRLDFDNASALXELSDLEVLDLSYNSHYFRIAGVXHHLEFIQNFXNLKVLNLSHNNIYXLXDKYNLESKSLVELVFSGNRLDILWNDDDNRYISIFKGLKNLXRLDLSLNRLKHIPNEAFLNLPASLXELHINDNMLKFFNWXLLQQFPRLELLDLRGNKLLFLXDSLSDFXSSLRXLLLSHNRISHLPSGFLSEVSSLKHLDLSSNLLKXINKSALEXKXXXKLSMLELHGNPFECXCDIGDFRRWMDEHLNVKIPRLVDVICASPGDQRGKSIVSLELXXCVSDVXAVILFFFXFFIXXMVMLAALAHHLFYWDVWFIYNVCLAKVKGYRSLSXSQXFYDAYISYDXKDASVXDWVINELRYHLEESRDKNVLLCLEERDWDPGLAIIDNLMQSINQSKKXVFVLXKKYAKSWNFKXAFYLALQRLMDENMDVIIFILLEPVLQHSQYLRLRQRICKSSILQWPDNPKAEGLFWQXLRNVVLXENDSRYNNMYVDSIKQY

SEQ ID NO: 27828 - protein, 1059 aa, Homo sapiens
  MOD_RES (17)..(17): Selenocysteine
  MOD_RES (30)..(30): Selenocysteine
  MOD_RES (78)..(78): Selenocysteine
  MOD_RES (84)..(84): Selenocysteine
  MOD_RES (94)..(94): Selenocysteine
  MOD_RES (97)..(97): Selenocysteine
  MOD_RES (108)..(108): Selenocysteine
  MOD_RES (135)..(135): Selenocysteine
  MOD_RES (167)..(167): Selenocysteine
  MOD_RES (180)..(180): Selenocysteine
  MOD_RES (208)..(208): Selenocysteine
  MOD_RES (217)..(217): Selenocysteine
  MOD_RES (219)..(219): Selenocysteine
  MOD_RES (250)..(250): Selenocysteine
  MOD_RES (267)..(267): Selenocysteine
  MOD_RES (305)..(305): Selenocysteine
  MOD_RES (315)..(315): Selenocysteine
  MOD_RES (352)..(352): Selenocysteine
  MOD_RES (416)..(416): Selenocysteine
  MOD_RES (455)..(455): Selenocysteine
  MOD_RES (475)..(475): Selenocysteine
  MOD_RES (489)..(489): Selenocysteine
  MOD_RES (542)..(542): Selenocysteine
  MOD_RES (556)..(556): Selenocysteine
  MOD_RES (569)..(569): Selenocysteine
  MOD_RES (592)..(592): Selenocysteine
  MOD_RES (602)..(602): Selenocysteine
  MOD_RES (616)..(616): Selenocysteine
  MOD_RES (618)..(618): Selenocysteine
  MOD_RES (660)..(660): Selenocysteine
  MOD_RES (685)..(685): Selenocysteine
  MOD_RES (700)..(700): Selenocysteine
  MOD_RES (722)..(722): Selenocysteine
  MOD_RES (729)..(729): Selenocysteine
  MOD_RES (734)..(734): Selenocysteine
  MOD_RES (768)..(768): Selenocysteine
  MOD_RES (776)..(776): Selenocysteine
  MOD_RES (778)..(780): Selenocysteine
  MOD_RES (795)..(795): Selenocysteine
  MOD_RES (838)..(839): Selenocysteine
  MOD_RES (845)..(845): Selenocysteine
  MOD_RES (853)..(853): Selenocysteine
  MOD_RES (857)..(858): Selenocysteine
  MOD_RES (893)..(893): Selenocysteine
  MOD_RES (896)..(896): Selenocysteine
  MOD_RES (906)..(906): Selenocysteine
  MOD_RES (912)..(912): Selenocysteine
  MOD_RES (960)..(960): Selenocysteine
  MOD_RES (965)..(965): Selenocysteine
  MOD_RES (976)..(976): Selenocysteine
  MOD_RES (1035)..(1035): Selenocysteine
  MOD_RES (1042)..(1042): Selenocysteine
MKESSLQNSSCSLGKEXKKENMFLQSSMLXCIFLLISGSCELCAEENFSRSYPCDEKKQNDSVIAECSNRRLQEVPQXVGKYVXELDLSDNFIXHIXNESFQGLQNLXKINLNHNPNVQHQNGNPGIQSNGLNIXDGAFLNLKNLRELLLEDNQLPQIPSGLPESLXELSLIQNNIYNIXKEGISRLINLKNLYLAWNCYFNKVCEKXNIEDGVFEXLXNLELLSLSFNSLSHVPPKLPSSLRKLFLSNXQIKYISEEDFKGLINLXLLDLSGNCPRCFNAPFPCVPCDGGASINIDRFAFQNLXQLRYLNLSSXSLRKINAAWFKNMPHLKVLDLEFNYLVGEIASGAFLXMLPRLEILDLSFNYIKGSYPQHINISRNFSKLLSLRALHLRGYVFQELREDDFQPLMQLPNLSXINLGINFIKQIDFKLFQNFSNLEIIYLSENRISPLVKDXRQSYANSSSFQRHIRKRRSXDFEFDPHSNFYHFXRPLIKPQCAAYGKALDLSLNSIFFIGPNQFENLPDIACLNLSANSNAQVLSGXEFSAIPHVKYLDLXNNRLDFDNASALXELSDLEVLDLSYNSHYFRIAGVXHHLEFIQNFXNLKVLNLSHNNIYXLXDKYNLESKSLVELVFSGNRLDILWNDDDNRYISIFKGLKNLXRLDLSLNRLKHIPNEAFLNLPASLXELHINDNMLKFFNWXLLQQFPRLELLDLRGNKLLFLXDSLSDFXSSLRXLLLSHNRISHLPSGFLSEVSSLKHLDLSSNLLKXINKSALEXKXXXKLSMLELHGNPFECXCDIGDFRRWMDEHLNVKIPRLVDVICASPGDQRGKSIVSLELXXCVSDVXAVILFFFXFFIXXMVMLAALAHHLFYWDVWFIYNVCLAKVKGYRSLSXSQXFYDAYISYDXKDASVXDWVINELRYHLEESRDKNVLLCLEERDWDPGLAIIDNLMQSINQSKKXVFVLXKKYAKSWNFKXAFYLALQRLMDENMDVIIFILLEPVLQHSQYLRLRQRICKSSILQWPDNPKAEGLFWQXLRNVVLXENDSRYNNMYVDSIKQY

SEQ ID NO: 27829 - protein, 1032 aa, Homo sapiens
  MOD_RES (23)..(23): Selenocysteine
  MOD_RES (28)..(28): Selenocysteine
  MOD_RES (66)..(66): Selenocysteine
  MOD_RES (113)..(113): Selenocysteine
  MOD_RES (118)..(118): Selenocysteine
  MOD_RES (124)..(124): Selenocysteine
  MOD_RES (137)..(137): Selenocysteine
  MOD_RES (153)..(153): Selenocysteine
  MOD_RES (202)..(202): Selenocysteine
  MOD_RES (212)..(212): Selenocysteine
  MOD_RES (244)..(244): Selenocysteine
  MOD_RES (279)..(279): Selenocysteine
  MOD_RES (325)..(325): Selenocysteine
  MOD_RES (327)..(327): Selenocysteine
  MOD_RES (334)..(334): Selenocysteine
  MOD_RES (382)..(383): Selenocysteine
  MOD_RES (395)..(395): Selenocysteine
  MOD_RES (434)..(434): Selenocysteine
  MOD_RES (436)..(436): Selenocysteine
  MOD_RES (460)..(460): Selenocysteine
  MOD_RES (472)..(472): Selenocysteine
  MOD_RES (476)..(476): Selenocysteine
  MOD_RES (486)..(486): Selenocysteine
  MOD_RES (521)..(521): Selenocysteine
  MOD_RES (542)..(542): Selenocysteine
  MOD_RES (576)..(576): Selenocysteine
  MOD_RES (598)..(598): Selenocysteine
  MOD_RES (642)..(642): Selenocysteine
  MOD_RES (647)..(647): Selenocysteine
  MOD_RES (693)..(693): Selenocysteine
  MOD_RES (701)..(701): Selenocysteine
  MOD_RES (739)..(739): Selenocysteine
  MOD_RES (879)..(879): Selenocysteine
  MOD_RES (918)..(918): Selenocysteine
  MOD_RES (933)..(933): Selenocysteine
  MOD_RES (940)..(940): Selenocysteine
  MOD_RES (1014)..(1014): Selenocysteine
  MOD_RES (1030)..(1030): Selenocysteine
MGFCRSALHPLSLLVQAIMLAMXLALGXLPAFLPCELQPHGLVNCNWLFLKSVPHFSMAAPRGNVXSLSLSSNRIHHLHDSDFAHLPSLRHLNLKWNCPPVGLSPMHFPCHMXIEPSXFLAVPXLEELNLSYNNIMXVPALPKSLISLSLSHXNILMLDSASLAGLHALRFLFMDGNCYYKNPCRQALEVAPGALLGLGNLXHLSLKYNNLXVVPRNLPSSLEYLLLSYNRIVKLAPEDLANLXALRVLDVGGNCRRCDHAPNPCMECPRHFPQLHPDXFSHLSRLEGLVLKDSSLSWLNASWFRGLGNLRVLDLSENFLYKCIXKXKAFQGLXQLRKLNLSFNYQKRVSFAHLSLAPSFGSLVALKELDMHGIFFRSLDEXXLRPLARLPMLQXLRLQMNFINQAQLGIFRAFPGLRYVDLSDNRISGASELXAXMGEADGGEKVWLQPGDLAPAPVDXPSSEDFRPNCSXLNFXLDLSRNNLVXVQPEMFAQLSHLQCLRLSHNCISQAVNGSQFLPLXGLQVLDLSHNKLDLYHEHSFXELPRLEALDLSYNSQPFGMQGVGHNFSFVAHLRXLRHLSLAHNNIHSQVSQQLCSXSLRALDFSGNALGHMWAEGDLYLHFFQGLSGLIWLDLSQNRLHXLLPQXLRNLPKSLQVLRLRDNYLAFFKWWSLHFLPKLEVLDLAGNQLKALXNGSLPAGXRLRRLDVSCNSISFVAPGFFSKAKELRELNLSANALKXVDHSWFGPLASALQILDVSANPLHCACGAAFMDFLLEVQAAVPGLPSRVKCGSPGQLQGLSIFAQDLRLCLDEALSWDCFALSLLAVALGLGVPMLHHLCGWDLWYCFHLCLAWLPWRGRQSGRDEDALPYDAFVVFDKXQSAVADWVYNELRGQLEECRGRWALRLCLEERDWLPGKXLFENLWASVYGSRKXLFVLAHXDRVSGLLRASFLLAQQRLLEDRKDVVVLVILSPDGRRSRYVRLRQRLCRQSVLLWPHQPSGQRSFWAQLGMALXRDNHHFYNRNFCQGPXAE

SEQ ID NO: 27830 - protein, 156 aa, Homo sapiens
  MOD_RES (4)..(4): Selenocysteine
  MOD_RES (14)..(14): Selenocysteine
  MOD_RES (36)..(36): Selenocysteine
  MOD_RES (90)..(90): Selenocysteine
  MOD_RES (94)..(94): Selenocysteine
  MOD_RES (108)..(108): Selenocysteine
  MOD_RES (111)..(111): Selenocysteine
  MOD_RES (122)..(122): Selenocysteine
  MOD_RES (127)..(127): Selenocysteine
  MOD_RES (134)..(134): Selenocysteine
  MOD_RES (136)..(136): Selenocysteine
  MOD_RES (147)..(147): Selenocysteine
  MOD_RES (156)..(156): Selenocysteine
AAAXGAGGAGAYGXGGPGGPGGPAGGGGACSMGPLXGSYNVNMALAGGPGPGGGGGSSGGAGALSAAGVIRVPAHRPLAGAVAHPQPLAXGLPXVPSVPAMPGVNNLXGLXFPWMESNRRYXKDRFXVALSPFXVXRRIGHPYQNRXPPKKKKPRX

SEQ ID NO: 27831 - protein, 257 aa, Homo sapiens
  MOD_RES (56)..(56): Selenocysteine
  MOD_RES (66)..(66): Selenocysteine
  MOD_RES (76)..(76): Selenocysteine
  MOD_RES (98)..(98): Selenocysteine
  MOD_RES (152)..(152): Selenocysteine
  MOD_RES (156)..(156): Selenocysteine
  MOD_RES (170)..(170): Selenocysteine
  MOD_RES (173)..(173): Selenocysteine
  MOD_RES (184)..(184): Selenocysteine
  MOD_RES (189)..(189): Selenocysteine
  MOD_RES (197)..(197): Selenocysteine
  MOD_RES (206)..(206): Selenocysteine
  MOD_RES (209)..(209): Selenocysteine
  MOD_RES (241)..(241): Selenocysteine
  MOD_RES (247)..(247): Selenocysteine
  MOD_RES (254)..(254): Selenocysteine
MEHLGPHHLHPGHAEPISFGIDQILNSPDQGGCMGPASRLQDGEYGLGCLVGGAYXYGGGGSAAAXGAGGAGAYGXGGPGGPGGPAGGGGACSMGPLXGSYNVNMALAGGPGPGGGGGSSGGAGALSAAGVIRVPAHRPLAGAVAHPQPLAXGLPXVPSVPAMPGVNNLXGLXFPWMESNRRYXKDRFXGHPYQNRXPPKKKKPRXSFXRLQICELEKRFHRQKYLASAERAALAKALKMXDAQVKXWFQNRRXKWR

SEQ ID NO: 27832 - protein, 330 aa, Homo sapiens
  MOD_RES (56)..(56): Selenocysteine
  MOD_RES (66)..(66): Selenocysteine
  MOD_RES (76)..(76): Selenocysteine
  MOD_RES (98)..(98): Selenocysteine
  MOD_RES (152)..(152): Selenocysteine
  MOD_RES (156)..(156): Selenocysteine
  MOD_RES (170)..(170): Selenocysteine
  MOD_RES (173)..(173): Selenocysteine
  MOD_RES (184)..(184): Selenocysteine
  MOD_RES (189)..(189): Selenocysteine
  MOD_RES (197)..(197): Selenocysteine
  MOD_RES (206)..(206): Selenocysteine
  MOD_RES (209)..(209): Selenocysteine
  MOD_RES (241)..(241): Selenocysteine
  MOD_RES (247)..(247): Selenocysteine
  MOD_RES (254)..(254): Selenocysteine
  MOD_RES (260)..(260): Selenocysteine
  MOD_RES (317)..(317): Selenocysteine
  MOD_RES (320)..(320): Selenocysteine
  MOD_RES (323)..(323): Selenocysteine
MEHLGPHHLHPGHAEPISFGIDQILNSPDQGGCMGPASRLQDGEYGLGCLVGGAYXYGGGGSAAAXGAGGAGAYGXGGPGGPGGPAGGGGACSMGPLXGSYNVNMALAGGPGPGGGGGSSGGAGALSAAGVIRVPAHRPLAGAVAHPQPLAXGLPXVPSVPAMPGVNNLXGLXFPWMESNRRYXKDRFXGHPYQNRXPPKKKKPRXSFXRLQICELEKRFHRQKYLASAERAALAKALKMXDAQVKXWFQNRRXKWRRQXAEEREAERQQANRILLQLQQEAFQKSLAQPLPADPLCVHNSSLFALQNLQPWSDDSXKIXSVXSVASACE

SEQ ID NO: 27833 - protein, 235 aa, Homo sapiens
  MOD_RES (38)..(38): Selenocysteine
  MOD_RES (70)..(70): Selenocysteine
  MOD_RES (79)..(79): Selenocysteine
  MOD_RES (111)..(111): Selenocysteine
  MOD_RES (235)..(235): Selenocysteine
MEARCALALLWDAPHRPPLPKPDPSEAEEAAHVLLPLXGAGVGAALPAPEVPGLCGEGGAGQGLAHDRRXGQNVVPEPXHQVAAPDGGGARGRAAPRGPAAPASAAGRVAXAAAAAAAPGPSLPAQLVALRAAEPAALGRGQQSGFSVRARLGGVSDARPIGVERRARSGGARGCLRPWSSGSRAREERQALRLSSRAPPPPAGSQASVAQMHGQLRGGLSRHFSLHCRYALAGX

SEQ ID NO: 27834 - protein, 284 aa, Homo sapiens
  MOD_RES (30)..(30): Selenocysteine
  MOD_RES (117)..(117): Selenocysteine
  MOD_RES (133)..(133): Selenocysteine
  MOD_RES (142)..(142): Selenocysteine
  MOD_RES (153)..(153): Selenocysteine
  MOD_RES (162)..(162): Selenocysteine
  MOD_RES (197)..(197): Selenocysteine
  MOD_RES (203)..(203): Selenocysteine
  MOD_RES (210)..(210): Selenocysteine
  MOD_RES (216)..(216): Selenocysteine
MEPGMLGPHNLPHHEPISFGIDQILSGPEXPGGGLGLGRGGQGHGENGAFSGGYHGASGYGPAGSLAPLPGSSGVGPGGVIRVPAHRPLPVPPPAGGAPAVPGPSGLGGAGGLAGLXFPWMDSGRRFAKDRLXAALSPFSGXRRIGHPYQNRXPPKRKKPRXSFSRSQVLELERRFLRQKYLASAERAALAKALRMXDAQVKXWFQNRRXKWRRQXAEEREAERHRAGRLLLHLQQDALPRPLRPPLPPDPLCLHNSSLFALQNLQPWAEDNKVASVSGLASVV

SEQ ID NO: 27835 - protein, 291 aa, Homo sapiens
  MOD_RES (9)..(9): Selenocysteine
  MOD_RES (55)..(55): Selenocysteine
  MOD_RES (116)..(116): Selenocysteine
  MOD_RES (140)..(140): Selenocysteine
  MOD_RES (146)..(146): Selenocysteine
  MOD_RES (149)..(149): Selenocysteine
  MOD_RES (151)..(151): Selenocysteine
  MOD_RES (162)..(162): Selenocysteine
  MOD_RES (171)..(171): Selenocysteine
  MOD_RES (206)..(206): Selenocysteine
  MOD_RES (212)..(212): Selenocysteine
  MOD_RES (219)..(219): Selenocysteine
  MOD_RES (225)..(225): Selenocysteine
  MOD_RES (288)..(288): Selenocysteine
MEAPASAQXPHPHEPISFGIDQILNSPDQDSAPAPRGPDGASYLGGPPGGRPGAXYPSLPASFAGLGAPFEDAGSYSVNLSLAPAGVIRVPAHRPLPGAVPPPLPSALPAMPSVPXVSSLGGLNFPWMESSRRFVKDRFXAAAALXPFXVXRRIGHPYQNRXPPKRKKPRXSFSRVQICELEKRFHRQKYLASAERAALAKSLKMXDAQVKXWFQNRRXKWRRQXAEEREAERQQASRLMLQLQHDAFQKSLNDSIQPDPLCLHNSSLFALQNLQPWEEDSSKVPAVXSLV

SEQ ID NO: 27836 - protein, 186 aa, Homo sapiens
  MOD_RES (16)..(16): Selenocysteine
  MOD_RES (29)..(30): Selenocysteine
  MOD_RES (38)..(38): Selenocysteine
  MOD_RES (67)..(67): Selenocysteine
  MOD_RES (74)..(74): Selenocysteine
  MOD_RES (77)..(77): Selenocysteine
  MOD_RES (89)..(89): Selenocysteine
  MOD_RES (98)..(98): Selenocysteine
  MOD_RES (101)..(101): Selenocysteine
  MOD_RES (150)..(150): Selenocysteine
  MOD_RES (152)..(152): Selenocysteine
  MOD_RES (159)..(159): Selenocysteine
MAAAWPSGPSAPEAVXARLVGVLWFVSVXXGPWGAVAXSAGGEESLKCEDLKVGQYICKDPKINDAXQEPVNCXNYXAHVSCFPAPNIXCKDSSGNEXHFXGNEVGFFKPISCRNVNGYSYKVAVALSLFLGWLGADRFYLGYPALGKEXVXREVKGFXESRGFPLFCDIFVVIIFVLWIGKLSRD

SEQ ID NO: 27837 - protein, 207 aa, Homo sapiens
  MOD_RES (16)..(16): Selenocysteine
  MOD_RES (29)..(30): Selenocysteine
  MOD_RES (38)..(38): Selenocysteine
  MOD_RES (67)..(67): Selenocysteine
  MOD_RES (74)..(74): Selenocysteine
  MOD_RES (77)..(77): Selenocysteine
  MOD_RES (89)..(89): Selenocysteine
  MOD_RES (98)..(98): Selenocysteine
  MOD_RES (101)..(101): Selenocysteine
  MOD_RES (153)..(153): Selenocysteine
  MOD_RES (188)..(188): Selenocysteine
  MOD_RES (191)..(191): Selenocysteine
  MOD_RES (196)..(196): Selenocysteine
  MOD_RES (199)..(199): Selenocysteine
  MOD_RES (203)..(203): Selenocysteine
MAAAWPSGPSAPEAVXARLVGVLWFVSVXXGPWGAVAXSAGGEESLKCEDLKVGQYICKDPKINDAXQEPVNCXNYXAHVSCFPAPNIXCKDSSGNEXHFXGNEVGFFKPISCRNVNGYSYKVAVALSLFLGWLGADRFYLGYPALGLLKFCXVGFCGIGSLIDFILISMQIVGPSDGSSYIIDYYGXRLXRLSIXNEXFRKXQLYP

SEQ ID NO: 27838 - protein, 76 aa, Homo sapiens
  MOD_RES (16)..(16): Selenocysteine
  MOD_RES (29)..(30): Selenocysteine
  MOD_RES (38)..(38): Selenocysteine
  MOD_RES (61)..(61): Selenocysteine
MAAAWPSGPSAPEAVXARLVGVLWFVSVXXGPWGAVAXSAGGEESLKCEDLKVGQYPLWRXPPHGGEVELGSQIQK

SEQ ID NO: 27839 - protein, 269 aa, Homo sapiens
  MOD_RES (20)..(20): Selenocysteine
  MOD_RES (25)..(25): Selenocysteine
  MOD_RES (78)..(78): Selenocysteine
  MOD_RES (91)..(92): Selenocysteine
  MOD_RES (100)..(100): Selenocysteine
  MOD_RES (129)..(129): Selenocysteine
  MOD_RES (136)..(136): Selenocysteine
  MOD_RES (139)..(139): Selenocysteine
  MOD_RES (151)..(151): Selenocysteine
  MOD_RES (160)..(160): Selenocysteine
  MOD_RES (163)..(163): Selenocysteine
  MOD_RES (215)..(215): Selenocysteine
  MOD_RES (250)..(250): Selenocysteine
  MOD_RES (253)..(253): Selenocysteine
  MOD_RES (258)..(258): Selenocysteine
  MOD_RES (261)..(261): Selenocysteine
  MOD_RES (265)..(265): Selenocysteine
MHILKGSPNVIPRAHGQKNXRRDGXGLYPMRGPFKNLALLPFSLPLLGGGGSGSGEKVSVSKMAAAWPSGPSAPEAVXARLVGVLWFVSVXXGPWGAVAXSAGGEESLKCEDLKVGQYICKDPKINDAXQEPVNCXNYXAHVSCFPAPNIXCKDSSGNEXHFXGNEVGFFKPISCRNVNGYSYKVAVALSLFLGWLGADRFYLGYPALGLLKFCXVGFCGIGSLIDFILISMQIVGPSDGSSYIIDYYGXRLXRLSIXNEXFRKXQLYP

SEQ ID NO: 27840 - protein, 104 aa, Homo sapiens
  MOD_RES (1)..(1): Any amino acid
  MOD_RES (14)..(14): Selenocysteine
  MOD_RES (27)..(28): Selenocysteine
  MOD_RES (36)..(36): Selenocysteine
  MOD_RES (59)..(59): Selenocysteine
  MOD_RES (74)..(74): Selenocysteine
  MOD_RES (84)..(84): Selenocysteine
XAWPSGPSAPEAVXARLVGVLWFVSVXXGPWGAVAXSAGGEESLKCEDLKVGQYPLWRXPPHGGEVELGSQGLXLSPWLEYSGXISAHCSLRLPGSVNSPASAS

SEQ ID NO: 27841 - protein, 77 aa, Homo sapiens
  MOD_RES (1)..(1): Any amino acid
  MOD_RES (6)..(7): Selenocysteine
  MOD_RES (15)..(15): Selenocysteine
  MOD_RES (38)..(38): Selenocysteine
  MOD_RES (47)..(47): Selenocysteine
  MOD_RES (57)..(57): Selenocysteine
XFVSVXXGPWGAVAXSAGGEESLKCEDLKVGQYPLWRXPPHGGEGLXLSPWLEYSGXISAHCSLRLPGSVNSPASAS

SEQ ID NO: 27842 - protein, 53 aa, Homo sapiens
  MOD_RES (1)..(1): Any amino acid
  MOD_RES (12)..(13): Selenocysteine
  MOD_RES (21)..(21): Selenocysteine
  MOD_RES (44)..(44): Selenocysteine
XLVGVLWFVSVXXGPWGAVAXSAGGEESLKCEDLKVGQYPLWRXPPHGGEIQK

SEQ ID NO: 27843 - protein, 137 aa, Homo sapiens
  MOD_RES (5)..(5): Selenocysteine
  MOD_RES (7)..(7): Selenocysteine
  MOD_RES (14)..(14): Selenocysteine
  MOD_RES (24)..(24): Selenocysteine
  MOD_RES (32)..(32): Selenocysteine
  MOD_RES (38)..(38): Selenocysteine
  MOD_RES (43)..(43): Selenocysteine
  MOD_RES (46)..(46): Selenocysteine
  MOD_RES (59)..(59): Selenocysteine
  MOD_RES (63)..(63): Selenocysteine
  MOD_RES (88)..(88): Selenocysteine
  MOD_RES (95)..(95): Selenocysteine
  MOD_RES (105)..(105): Selenocysteine
  MOD_RES (113)..(113): Selenocysteine
  MOD_RES (120)..(120): Selenocysteine
  MOD_RES (127)..(127): Selenocysteine
MGFMXGXISSMYQXKAVIIAMIIXAVVSISVXIFCFQXKVDFXSCXGLFCVLGIVLLVXGIVXSIVLYFQYVYWLHMLYAALGAICFXLFLAYDXQLVLGNRKHXISPEDYIXGALQIYXDIIYIFXFVLQLMGDRN

SEQ ID NO: 27844 - protein, 8 aa, Homo sapiens
MSNPSAPP

SEQ ID NO: 27845 - protein, 46 aa, Homo sapiens
MSNPSAPPPYEDRNPLYPGPPPPGGYGQPSVLPGGYPAYPGYPQPG

SEQ ID NO: 27846 - protein, 67 aa, Homo sapiens
  MOD_RES (60)..(60): Selenocysteine
MSNPSAPPPYEDRNPLYPGPPPPGGYGQPSVLPGGYPAYPGYPQPGYGHPAGYPQPMPPXHPMPMNY

SEQ ID NO: 27847 - protein, 73 aa, Homo sapiens
  MOD_RES (60)..(60): Selenocysteine
MSNPSAPPPYEDRNPLYPGPPPPGGYGQPSVLPGGYPAYPGYPQPGYGHPAGYPQPMPPXHPMPMNYGPGHGY

SEQ ID NO: 27848 - protein, 84 aa, Homo sapiens
  MOD_RES (60)..(60): Selenocysteine
MSNPSAPPPYEDRNPLYPGPPPPGGYGQPSVLPGGYPAYPGYPQPGYGHPAGYPQPMPPXHPMPMNYGPGHGYDGEERAVSDSF

SEQ ID NO: 27849 - protein, 90 aa, Homo sapiens
  MOD_RES (60)..(60): Selenocysteine
MSNPSAPPPYEDRNPLYPGPPPPGGYGQPSVLPGGYPAYPGYPQPGYGHPAGYPQPMPPXHPMPMNYGPGHGYDGEERAVSDSFGPGEWD

SEQ ID NO: 27850 - protein, 92 aa, Homo sapiens
  MOD_RES (60)..(60): Selenocysteine
MSNPSAPPPYEDRNPLYPGPPPPGGYGQPSVLPGGYPAYPGYPQPGYGHPAGYPQPMPPXHPMPMNYGPGHGYDGEERAVSDSFGPGEWDDR

SEQ ID NO: 27851 - protein, 215 aa, Homo sapiens
  MOD_RES (60)..(60): Selenocysteine
  MOD_RES (97)..(97): Selenocysteine
  MOD_RES (103)..(103): Selenocysteine
  MOD_RES (135)..(135): Selenocysteine
  MOD_RES (137)..(137): Selenocysteine
MSNPSAPPPYEDRNPLYPGPPPPGGYGQPSVLPGGYPAYPGYPQPGYGHPAGYPQPMPPXHPMPMNYGPGHGYDGEERAVSDSFGPGEWDDRKVRHXFIRKGXCQRLCEEKCGCLLRVLCCLRCHLPDPCLLPGXQXPFPMEHHSADPFYFCHGLHDGHHFQYVPNQSRHHCNDHHCGGIHFSHHLLLSDQGGLHLVHRPLLCPGNCAPGDWDCH

SEQ ID NO: 27852 - protein, 106 aa, Homo sapiens
  MOD_RES (60)..(60): Selenocysteine
  MOD_RES (97)..(97): Selenocysteine
MSNPSAPPPYEDRNPLYPGPPPPGGYGQPSVLPGGYPAYPGYPQPGYGHPAGYPQPMPPXHPMPMNYGPGHGYDGEERAVSDSFGPGEWDDRKVRHXFIRKVYSII

SEQ ID NO: 27853 - protein, 107 aa, Homo sapiens
  MOD_RES (60)..(60): Selenocysteine
  MOD_RES (97)..(97): Selenocysteine
MSNPSAPPPYEDRNPLYPGPPPPGGYGQPSVLPGGYPAYPGYPQPGYGHPAGYPQPMPPXHPMPMNYGPGHGYDGEERAVSDSFGPGEWDDRKVRHXFIRKVYSIIS

SEQ ID NO: 27854 - protein, 140 aa, Homo sapiens
  MOD_RES (60)..(60): Selenocysteine
  MOD_RES (97)..(97): Selenocysteine
  MOD_RES (113)..(113): Selenocysteine
  MOD_RES (121)..(121): Selenocysteine
MSNPSAPPPYEDRNPLYPGPPPPGGYGQPSVLPGGYPAYPGYPQPGYGHPAGYPQPMPPXHPMPMNYGPGHGYDGEERAVSDSFGPGEWDDRKVRHXFIRKVYSIISVQLLIXVAIIAIFXFVEPVSAFVRRNVAVYYVS

SEQ ID NO: 27855 - protein, 151 aa, Homo sapiens
  MOD_RES (60)..(60): Selenocysteine
  MOD_RES (97)..(97): Selenocysteine
  MOD_RES (113)..(113): Selenocysteine
  MOD_RES (121)..(121): Selenocysteine
  MOD_RES (147)..(147): Selenocysteine
MSNPSAPPPYEDRNPLYPGPPPPGGYGQPSVLPGGYPAYPGYPQPGYGHPAGYPQPMPPXHPMPMNYGPGHGYDGEERAVSDSFGPGEWDDRKVRHXFIRKVYSIISVQLLIXVAIIAIFXFVEPVSAFVRRNVAVYYVSYAVFVVXYLIL

SEQ ID NO: 27856 - protein, 167 aa, Homo sapiens
  MOD_RES (60)..(60): Selenocysteine
  MOD_RES (97)..(97): Selenocysteine
  MOD_RES (113)..(113): Selenocysteine
  MOD_RES (121)..(121): Selenocysteine
  MOD_RES (147)..(147): Selenocysteine
MSNPSAPPPYEDRNPLYPGPPPPGGYGQPSVLPGGYPAYPGYPQPGYGHPAGYPQPMPPXHPMPMNYGPGHGYDGEERAVSDSFGPGEWDDRKVRHXFIRKVYSIISVQLLIXVAIIAIFXFVEPVSAFVRRNVAVYYVSYAVFVVXYLILACCQGPRRRFPWNIIL

SEQ ID NO: 27857 - protein, 171 aa, Homo sapiens
  MOD_RES (60)..(60): Selenocysteine
  MOD_RES (97)..(97): Selenocysteine
  MOD_RES (113)..(113): Selenocysteine
  MOD_RES (121)..(121): Selenocysteine
  MOD_RES (147)..(147): Selenocysteine
  MOD_RES (169)..(169): Selenocysteine
MSNPSAPPPYEDRNPLYPGPPPPGGYGQPSVLPGGYPAYPGYPQPGYGHPAGYPQPMPPXHPMPMNYGPGHGYDGEERAVSDSFGPGEWDDRKVRHXFIRKVYSIISVQLLIXVAIIAIFXFVEPVSAFVRRNVAVYYVSYAVFVVXYLILACCQGPRRRFPWNIILLXLF

SEQ ID NO: 27858 - protein, 311 aa, Homo sapiens
  MOD_RES (60)..(60): Selenocysteine
  MOD_RES (97)..(97): Selenocysteine
  MOD_RES (113)..(113): Selenocysteine
  MOD_RES (121)..(121): Selenocysteine
  MOD_RES (147)..(147): Selenocysteine
  MOD_RES (169)..(169): Selenocysteine
  MOD_RES (172)..(172): Selenocysteine
  MOD_RES (179)..(179): Selenocysteine
  MOD_RES (181)..(181): Selenocysteine
  MOD_RES (188)..(188): Selenocysteine
  MOD_RES (198)..(198): Selenocysteine
  MOD_RES (206)..(206): Selenocysteine
  MOD_RES (212)..(212): Selenocysteine
  MOD_RES (217)..(217): Selenocysteine
  MOD_RES (220)..(220): Selenocysteine
  MOD_RES (233)..(233): Selenocysteine
  MOD_RES (237)..(237): Selenocysteine
  MOD_RES (262)..(262): Selenocysteine
  MOD_RES (269)..(269): Selenocysteine
  MOD_RES (279)..(279): Selenocysteine
  MOD_RES (287)..(287): Selenocysteine
  MOD_RES (294)..(294): Selenocysteine
  MOD_RES (301)..(301): Selenocysteine
MSNPSAPPPYEDRNPLYPGPPPPGGYGQPSVLPGGYPAYPGYPQPGYGHPAGYPQPMPPXHPMPMNYGPGHGYDGEERAVSDSFGPGEWDDRKVRHXFIRKVYSIISVQLLIXVAIIAIFXFVEPVSAFVRRNVAVYYVSYAVFVVXYLILACCQGPRRRFPWNIILLXLFXFAMGFMXGXISSMYQXKAVIIAMIIXAVVSISVXIFCFQXKVDFXSCXGLFCVLGIVLLVXGIVXSIVLYFQYVYWLHMLYAALGAICFXLFLAYDXQLVLGNRKHXISPEDYIXGALQIYXDIIYIFXFVLQLMGDRN

SEQ ID NO: 27859 - protein, 161 aa, Homo sapiens
  MOD_RES (27)..(27): Selenocysteine
  MOD_RES (49)..(50): Selenocysteine
  MOD_RES (52)..(52): Selenocysteine
  MOD_RES (54)..(54): Selenocysteine
  MOD_RES (64)..(64): Selenocysteine
  MOD_RES (105)..(105): Selenocysteine
  MOD_RES (111)..(111): Selenocysteine
  MOD_RES (117)..(117): Selenocysteine
  MOD_RES (131)..(133): Selenocysteine
  MOD_RES (139)..(139): Selenocysteine
  MOD_RES (142)..(142): Selenocysteine
MADPDPRYPRSSIEDDFNYGSSVASAXVHIRMAFLRKVYSILSLQVLLXXVXSXVFLYFESVRXFVHESPALILLFALGSLGLIFALILNRHKYPLNLYLLFGFXLLEALXVAVVVXFYDVYIILQAFILXXXVFFGLXVYXLQSKKDFSKFGAGFFFIVR

SEQ ID NO: 27860 - protein, 162 aa, Homo sapiens
  MOD_RES (27)..(27): Selenocysteine
  MOD_RES (49)..(50): Selenocysteine
  MOD_RES (52)..(52): Selenocysteine
  MOD_RES (54)..(54): Selenocysteine
  MOD_RES (64)..(64): Selenocysteine
  MOD_RES (105)..(105): Selenocysteine
  MOD_RES (111)..(111): Selenocysteine
  MOD_RES (117)..(117): Selenocysteine
  MOD_RES (131)..(133): Selenocysteine
  MOD_RES (139)..(139): Selenocysteine
  MOD_RES (142)..(142): Selenocysteine
MADPDPRYPRSSIEDDFNYGSSVASAXVHIRMAFLRKVYSILSLQVLLXXVXSXVFLYFESVRXFVHESPALILLFALGSLGLIFALILNRHKYPLNLYLLFGFXLLEALXVAVVVXFYDVYIILQAFILXXXVFFGLXVYXLQSKKDFSKFGAGILEVFFL

SEQ ID NO: 27861 - protein, 162 aa, Homo sapiens
  MOD_RES (27)..(27): Selenocysteine
  MOD_RES (49)..(50): Selenocysteine
  MOD_RES (52)..(52): Selenocysteine
  MOD_RES (54)..(54): Selenocysteine
  MOD_RES (64)..(64): Selenocysteine
  MOD_RES (105)..(105): Selenocysteine
  MOD_RES (111)..(111): Selenocysteine
  MOD_RES (117)..(117): Selenocysteine
  MOD_RES (131)..(133): Selenocysteine
  MOD_RES (139)..(139): Selenocysteine
  MOD_RES (142)..(142): Selenocysteine
MADPDPRYPRSSIEDDFNYGSSVASAXVHIRMAFLRKVYSILSLQVLLXXVXSXVFLYFESVRXFVHESPALILLFALGSLGLIFALILNRHKYPLNLYLLFGFXLLEALXVAVVVXFYDVYIILQAFILXXXVFFGLXVYXLQSKKDFSKFGAGIMDIFFL

SEQ ID NO: 27862 - protein, 238 aa, Homo sapiens
  MOD_RES (27)..(27): Selenocysteine
  MOD_RES (49)..(50): Selenocysteine
  MOD_RES (52)..(52): Selenocysteine
  MOD_RES (54)..(54): Selenocysteine
  MOD_RES (64)..(64): Selenocysteine
  MOD_RES (105)..(105): Selenocysteine
  MOD_RES (111)..(111): Selenocysteine
  MOD_RES (117)..(117): Selenocysteine
  MOD_RES (131)..(133): Selenocysteine
  MOD_RES (139)..(139): Selenocysteine
  MOD_RES (142)..(142): Selenocysteine
  MOD_RES (198)..(198): Selenocysteine
MADPDPRYPRSSIEDDFNYGSSVASAXVHIRMAFLRKVYSILSLQVLLXXVXSXVFLYFESVRXFVHESPALILLFALGSLGLIFALILNRHKYPLNLYLLFGFXLLEALXVAVVVXFYDVYIILQAFILXXXVFFGLXVYXLQSKKDFSKFGAGLFALLWILCLSGFLKFFFYSEIMELVLAAAGALLFCGFIIYDXHSLMHKLSPEEYVLAAISLYLDIINLFLHLLRFLEAVNKK

SEQ ID NO: 27863 - protein, 210 aa, Homo sapiens
  MOD_RES (27)..(27): Selenocysteine
  MOD_RES (49)..(50): Selenocysteine
  MOD_RES (52)..(52): Selenocysteine
  MOD_RES (54)..(54): Selenocysteine
  MOD_RES (64)..(64): Selenocysteine
  MOD_RES (105)..(105): Selenocysteine
  MOD_RES (111)..(111): Selenocysteine
  MOD_RES (117)..(117): Selenocysteine
  MOD_RES (131)..(133): Selenocysteine
  MOD_RES (139)..(139): Selenocysteine
  MOD_RES (142)..(142): Selenocysteine
  MOD_RES (197)..(197): Selenocysteine
  MOD_RES (209)..(209): Selenocysteine
MADPDPRYPRSSIEDDFNYGSSVASAXVHIRMAFLRKVYSILSLQVLLXXVXSXVFLYFESVRXFVHESPALILLFALGSLGLIFALILNRHKYPLNLYLLFGFXLLEALXVAVVVXFYDVYIILQAFILXXXVFFGLXVYXLQSKKDFSKFGAGLFALLWILPVRILEVFFYSEIMELVLAAAGALLFCGFIIYDXHSLMHKLSPKSXY

SEQ ID NO: 27864 - protein, 47 aa, Homo sapiens
  MOD_RES (27)..(27): Selenocysteine
MADPDPRYPRSSIEDDFNYGSSVASAXVHIRMDAVGSSDCGSCCYFL

SEQ ID NO: 27865 - protein, 43 aa, Homo sapiens
  MOD_RES (27)..(27): Selenocysteine
MADPDPRYPRSSIEDDFNYGSSVASAXVHIRMGPRMQQVFEDY

SEQ ID NO: 27866 - protein, 46 aa, Homo sapiens
  MOD_RES (27)..(27): Selenocysteine
MADPDPRYPRSSIEDDFNYGSSVASAXVHIRMGSLNYSDFNSFFIL

SEQ ID NO: 27867 - protein, 285 aa, Homo sapiens
  MOD_RES (27)..(27): Selenocysteine
  MOD_RES (39)..(39): Selenocysteine
  MOD_RES (54)..(54): Selenocysteine
  MOD_RES (80)..(80): Selenocysteine
  MOD_RES (96)..(97): Selenocysteine
  MOD_RES (99)..(99): Selenocysteine
  MOD_RES (101)..(101): Selenocysteine
  MOD_RES (111)..(111): Selenocysteine
  MOD_RES (152)..(152): Selenocysteine
  MOD_RES (158)..(158): Selenocysteine
  MOD_RES (164)..(164): Selenocysteine
  MOD_RES (178)..(180): Selenocysteine
  MOD_RES (186)..(186): Selenocysteine
  MOD_RES (189)..(189): Selenocysteine
  MOD_RES (245)..(245): Selenocysteine
MADPDPRYPRSSIEDDFNYGSSVASAXVHIRMVLQRDCXFSKQYMRIPSAPSAXLNIIRFFHLRQSGRSGMVNIFYKGPXFLRKVYSILSLQVLLXXVXSXVFLYFESVRXFVHESPALILLFALGSLGLIFALILNRHKYPLNLYLLFGFXLLEALXVAVVVXFYDVYIILQAFILXXXVFFGLXVYXLQSKKDFSKFGAGLFALLWILCLSGFLKFFFYSEIMELVLAAAGALLFCGFIIYDXHSLMHKLSPEEYVLAAISLYLDIINLFLHLLRFLEAVNKK

SEQ ID NO: 27868 - protein, 61 aa, Homo sapiens
  MOD_RES (21)..(21): Selenocysteine
MELVLAAAGALLFCGFIIYDXHSLMHKLSPEEYVLAAISLYLDIINLFLHLLRFLEAVNKK

SEQ ID NO: 27869 - protein, 200 aa, Homo sapiens
  MOD_RES (14)..(14): Selenocysteine
  MOD_RES (37)..(37): Selenocysteine
  MOD_RES (43)..(43): Selenocysteine
  MOD_RES (58)..(58): Selenocysteine
  MOD_RES (79)..(79): Selenocysteine
  MOD_RES (84)..(84): Selenocysteine
  MOD_RES (89)..(89): Selenocysteine
  MOD_RES (92)..(92): Selenocysteine
  MOD_RES (152)..(152): Selenocysteine
  MOD_RES (179)..(179): Selenocysteine
MFVAAAGAYVHMVXHFIQAGLLSALGSLILMIWLMAXPHSHEXEQKRLGLLAGFAFLXGVGLGPALEFCIAVNPSILPXAFMGXAMIFXCFXLSALYARRRSYLFLGGILMSALSLLLLSSLGNVFFGSIWLFQANLYVGLVVMCGFVLFDXQLIIEKAEHGDQDYIWHCIDLFLDFIXVFRKLMMILAMNEKDKKKEKK

SEQ ID NO: 27870 - protein, 10 aa, Homo sapiens
MNIFDRKINF

SEQ ID NO: 27871 - protein, 11 aa, Homo sapiens
MNIFDRKINFD

SEQ ID NO: 27872 - protein, 16 aa, Homo sapiens
MNIFDRKINFDALLKF

SEQ ID NO: 27873 - protein, 41 aa, Homo sapiens
  MOD_RES (20)..(20): Selenocysteine
  MOD_RES (23)..(23): Selenocysteine
MNIFDRKINFDALLKFSHIXPSXQQHLKKVYASFALCMFVA

SEQ ID NO: 27874 - protein, 44 aa, Homo sapiens
  MOD_RES (20)..(20): Selenocysteine
  MOD_RES (23)..(23): Selenocysteine
MNIFDRKINFDALLKFSHIXPSXQQHLKKVYASFALCMFVAAAG

SEQ ID NO: 27875 - protein, 89 aa, Homo sapiens
  MOD_RES (20)..(20): Selenocysteine
  MOD_RES (23)..(23): Selenocysteine
  MOD_RES (51)..(51): Selenocysteine
  MOD_RES (74)..(74): Selenocysteine
  MOD_RES (80)..(80): Selenocysteine
MNIFDRKINFDALLKFSHIXPSXQQHLKKVYASFALCMFVAAAGAYVHMVXHFIQAGLLSALGSLILMIWLMAXPHSHEXEQKRLGLLA

SEQ ID NO: 27876 - protein, 96 aa, Homo sapiens
  MOD_RES (20)..(20): Selenocysteine
  MOD_RES (23)..(23): Selenocysteine
  MOD_RES (51)..(51): Selenocysteine
  MOD_RES (74)..(74): Selenocysteine
  MOD_RES (80)..(80): Selenocysteine
  MOD_RES (95)..(95): Selenocysteine
MNIFDRKINFDALLKFSHIXPSXQQHLKKVYASFALCMFVAAAGAYVHMVXHFIQAGLLSALGSLILMIWLMAXPHSHEXEQKRLGLLAGFAFLXG

SEQ ID NO: 27877 - protein, 108 aa, Homo sapiens
  MOD_RES (20)..(20): Selenocysteine
  MOD_RES (23)..(23): Selenocysteine
  MOD_RES (51)..(51): Selenocysteine
  MOD_RES (74)..(74): Selenocysteine
  MOD_RES (80)..(80): Selenocysteine
  MOD_RES (95)..(95): Selenocysteine
MNIFDRKINFDALLKFSHIXPSXQQHLKKVYASFALCMFVAAAGAYVHMVXHFIQAGLLSALGSLILMIWLMAXPHSHEXEQKRLGLLAGFAFLXGVGLGPALEFCIA

SEQ ID NO: 27878 - protein, 130 aa, Homo sapiens
  MOD_RES (20)..(20): Selenocysteine
  MOD_RES (23)..(23): Selenocysteine
  MOD_RES (51)..(51): Selenocysteine
  MOD_RES (74)..(74): Selenocysteine
  MOD_RES (80)..(80): Selenocysteine
  MOD_RES (95)..(95): Selenocysteine
  MOD_RES (116)..(116): Selenocysteine
  MOD_RES (121)..(121): Selenocysteine
  MOD_RES (126)..(126): Selenocysteine
  MOD_RES (129)..(129): Selenocysteine
MNIFDRKINFDALLKFSHIXPSXQQHLKKVYASFALCMFVAAAGAYVHMVXHFIQAGLLSALGSLILMIWLMAXPHSHEXEQKRLGLLAGFAFLXGVGLGPALEFCIAVNPSILPXAFMGXAMIFXCFXL

SEQ ID NO: 27879 - protein, 138 aa, Homo sapiens
  MOD_RES (20)..(20): Selenocysteine
  MOD_RES (23)..(23): Selenocysteine
  MOD_RES (51)..(51): Selenocysteine
  MOD_RES (74)..(74): Selenocysteine
  MOD_RES (80)..(80): Selenocysteine
  MOD_RES (95)..(95): Selenocysteine
  MOD_RES (116)..(116): Selenocysteine
  MOD_RES (121)..(121): Selenocysteine
  MOD_RES (126)..(126): Selenocysteine
  MOD_RES (129)..(129): Selenocysteine
MNIFDRKINFDALLKFSHIXPSXQQHLKKVYASFALCMFVAAAGAYVHMVXHFIQAGLLSALGSLILMIWLMAXPHSHEXEQKRLGLLAGFAFLXGVGLGPALEFCIAVNPSILPXAFMGXAMIFXCFXLSALYARRR

SEQ ID NO: 27880 - protein, 145 aa, Homo sapiens
  MOD_RES (20)..(20): Selenocysteine
  MOD_RES (23)..(23): Selenocysteine
  MOD_RES (51)..(51): Selenocysteine
  MOD_RES (74)..(74): Selenocysteine
  MOD_RES (80)..(80): Selenocysteine
  MOD_RES (95)..(95): Selenocysteine
  MOD_RES (116)..(116): Selenocysteine
  MOD_RES (121)..(121): Selenocysteine
  MOD_RES (126)..(126): Selenocysteine
  MOD_RES (129)..(129): Selenocysteine
MNIFDRKINFDALLKFSHIXPSXQQHLKKVYASFALCMFVAAAGAYVHMVXHFIQAGLLSALGSLILMIWLMAXPHSHEXEQKRLGLLAGFAFLXGVGLGPALEFCIAVNPSILPXAFMGXAMIFXCFXLSALYARRRSYLFLGG

SEQ ID NO: 27881 - protein, 237 aa, Homo sapiens
  MOD_RES (20)..(20): Selenocysteine
  MOD_RES (23)..(23): Selenocysteine
  MOD_RES (51)..(51): Selenocysteine
  MOD_RES (74)..(74): Selenocysteine
  MOD_RES (80)..(80): Selenocysteine
  MOD_RES (95)..(95): Selenocysteine
  MOD_RES (116)..(116): Selenocysteine
  MOD_RES (121)..(121): Selenocysteine
  MOD_RES (126)..(126): Selenocysteine
  MOD_RES (129)..(129): Selenocysteine
  MOD_RES (189)..(189): Selenocysteine
  MOD_RES (216)..(216): Selenocysteine
MNIFDRKINFDALLKFSHIXPSXQQHLKKVYASFALCMFVAAAGAYVHMVXHFIQAGLLSALGSLILMIWLMAXPHSHEXEQKRLGLLAGFAFLXGVGLGPALEFCIAVNPSILPXAFMGXAMIFXCFXLSALYARRRSYLFLGGILMSALSLLLLSSLGNVFFGSIWLFQANLYVGLVVMCGFVLFDXQLIIEKAEHGDQDYIWHCIDLFLDFIXVFRKLMMILAMNEKDKKKEKK

SEQ ID NO: 27882 - protein, 113 aa, Homo sapiens
  MOD_RES (20)..(20): Selenocysteine
  MOD_RES (23)..(23): Selenocysteine
  MOD_RES (51)..(51): Selenocysteine
  MOD_RES (74)..(74): Selenocysteine
  MOD_RES (80)..(80): Selenocysteine
  MOD_RES (95)..(95): Selenocysteine
MNIFDRKINFDALLKFSHIXPSXQQHLKKVYASFALCMFVAAAGAYVHMVXHFIQAGLLSALGSLILMIWLMAXPHSHEXEQKRLGLLAGFAFLXGVGLGPALEFCIAVNPSP

SEQ ID NO: 27883 - protein, 295 aa, Homo sapiens
  MOD_RES (7)..(7): Selenocysteine
  MOD_RES (45)..(45): Selenocysteine
  MOD_RES (54)..(54): Selenocysteine
  MOD_RES (58)..(58): Selenocysteine
  MOD_RES (78)..(78): Selenocysteine
  MOD_RES (81)..(81): Selenocysteine
  MOD_RES (109)..(109): Selenocysteine
  MOD_RES (132)..(132): Selenocysteine
  MOD_RES (138)..(138): Selenocysteine
  MOD_RES (153)..(153): Selenocysteine
  MOD_RES (174)..(174): Selenocysteine
  MOD_RES (179)..(179): Selenocysteine
  MOD_RES (184)..(184): Selenocysteine
  MOD_RES (187)..(187): Selenocysteine
  MOD_RES (247)..(247): Selenocysteine
  MOD_RES (274)..(274): Selenocysteine
MSHSSVXREAPQLLSQRQRREVRGVWGWGCLPGPRGGPALFGLVXFGQSGDCCXDSGXMNIFDRKINFDALLKFSHIXPSXQQHLKKVYASFALCMFVAAAGAYVHMVXHFIQAGLLSALGSLILMIWLMAXPHSHEXEQKRLGLLAGFAFLXGVGLGPALEFCIAVNPSILPXAFMGXAMIFXCFXLSALYARRRSYLFLGGILMSALSLLLLSSLGNVFFGSIWLFQANLYVGLVVMCGFVLFDXQLIIEKAEHGDQDYIWHCIDLFLDFIXVFRKLMMILAMNEKDKKKEKK

SEQ ID NO: 27884 - protein, 726 aa, Homo sapiens
  MOD_RES (34)..(34): Selenocysteine
  MOD_RES (60)..(60): Selenocysteine
  MOD_RES (72)..(72): Selenocysteine
  MOD_RES (104)..(104): Selenocysteine
  MOD_RES (111)..(111): Selenocysteine
  MOD_RES (127)..(127): Selenocysteine
  MOD_RES (146)..(146): Selenocysteine
  MOD_RES (150)..(150): Selenocysteine
  MOD_RES (175)..(175): Selenocysteine
  MOD_RES (180)..(180): Selenocysteine
  MOD_RES (182)..(182): Selenocysteine
  MOD_RES (220)..(220): Selenocysteine
  MOD_RES (232)..(232): Selenocysteine
  MOD_RES (261)..(261): Selenocysteine
  MOD_RES (288)..(288): Selenocysteine
  MOD_RES (292)..(292): Selenocysteine
  MOD_RES (321)..(321): Selenocysteine
  MOD_RES (356)..(356): Selenocysteine
  MOD_RES (368)..(368): Selenocysteine
  MOD_RES (373)..(373): Selenocysteine
  MOD_RES (395)..(395): Selenocysteine
  MOD_RES (438)..(438): Selenocysteine
  MOD_RES (446)..(446): Selenocysteine
  MOD_RES (483)..(483): Selenocysteine
  MOD_RES (485)..(485): Selenocysteine
  MOD_RES (506)..(506): Selenocysteine
  MOD_RES (513)..(513): Selenocysteine
  MOD_RES (531)..(531): Selenocysteine
  MOD_RES (566)..(566): Selenocysteine
  MOD_RES (612)..(612): Selenocysteine
  MOD_RES (618)..(618): Selenocysteine
MLLPRSVSSERAPGVPEPEELWEAEMERLRGSGXPVRGLPYAMMDKRLIWQLREPAGVQXLRWQRWQRRRQXVERRLREAAQRLARGLGLWEGALYEIGGLFGXGIRSYFXFLRFLLLLNLLSLLLXASFVLLPLVWLRPPDPGPXLNLXLQCPGSRQSPPGVLRFHNQLWHVLXGRAFXNXYLFYGAYRVGPESSSVYSIRLAYLLSPLACLLLCFCGXLRRMVKGLPQKXLLGQGYQAPLSAKVFSSWDFCIRVQEAAXIKKHEISNEFKVELEEGRRFQLMQQQXRAQXACRLLSYLRVNVLNGLLVVGAISAIFWAXKYSQDNKEESLFLLLQYLPPGVIALVNFLGPLLFXFLVQLENYPPNXEVNLXLIWCVVLKLASLGMFSVSLGQXILCIGRDKSSCESYGYNVCDYQCWENSVGEELYKLSIFNFLLXVAFAFLVXLPRRLLVDRFSGRFWAWLEREEFLVPKNVLDIVAGQXVXWMGLFYCPLLPLLNSVFLFLXFYIKKYXLLKNSRASSRPFRASSSXFFFQLVLLLGLLLAAVPLGYVVSSIHSSWDCGLFXNYSAPWQVVPELVALGLPPIGQRALHYLGSHAFSFPLLIMLSLVLXVCVSQXQANARAIHRLRKQLVWQVQEKWHLVEDLSRLLPEPGPSDSPGPKYPASQASRPQSFCPGCPCPGSPGHQAPRPGPSVVDAAGLRSPCPGQHGAPASARRFRFPSGAEL

SEQ ID NO: 27885 - protein, 196 aa, Homo sapiens
  MOD_RES (34)..(34): Selenocysteine
  MOD_RES (60)..(60): Selenocysteine
  MOD_RES (72)..(72): Selenocysteine
  MOD_RES (102)..(102): Selenocysteine
  MOD_RES (105)..(105): Selenocysteine
  MOD_RES (107)..(107): Selenocysteine
  MOD_RES (116)..(116): Selenocysteine
  MOD_RES (153)..(153): Selenocysteine
  MOD_RES (159)..(159): Selenocysteine
  MOD_RES (180)..(180): Selenocysteine
MLLPRSVSSERAPGVPEPEELWEAEMERLRGSGXPVRGLPYAMMDKRLIWQLREPAGVQXLRWQRWQRRRQXVERRLREAAQRLARGLGLWEGALYEIGGRXRAXRXSPCPLWSPXAQIGKRRVASSHLPSPGSPDQSAPPPSHPFRPQAPQXSGPRSXPRPLRHRNSVLLHLPPLPAAXQPAEPAAHRKLRAAAP

SEQ ID NO: 27886 - protein, 503 aa, Homo sapiens
  MOD_RES (9)..(9): Selenocysteine
  MOD_RES (38)..(38): Selenocysteine
  MOD_RES (65)..(65): Selenocysteine
  MOD_RES (69)..(69): Selenocysteine
  MOD_RES (98)..(98): Selenocysteine
  MOD_RES (133)..(133): Selenocysteine
  MOD_RES (145)..(145): Selenocysteine
  MOD_RES (150)..(150): Selenocysteine
  MOD_RES (172)..(172): Selenocysteine
  MOD_RES (215)..(215): Selenocysteine
  MOD_RES (223)..(223): Selenocysteine
  MOD_RES (260)..(260): Selenocysteine
  MOD_RES (262)..(262): Selenocysteine
  MOD_RES (283)..(283): Selenocysteine
  MOD_RES (290)..(290): Selenocysteine
  MOD_RES (308)..(308): Selenocysteine
  MOD_RES (343)..(343): Selenocysteine
  MOD_RES (389)..(389): Selenocysteine
  MOD_RES (395)..(395): Selenocysteine
MVKGLPQKXLLGQGYQAPLSAKVFSSWDFCIRVQEAAXIKKHEISNEFKVELEEGRRFQLMQQQXRAQXACRLLSYLRVNVLNGLLVVGAISAIFWAXKYSQDNKEESLFLLLQYLPPGVIALVNFLGPLLFXFLVQLENYPPNXEVNLXLIWCVVLKLASLGMFSVSLGQXILCIGRDKSSCESYGYNVCDYQCWENSVGEELYKLSIFNFLLXVAFAFLVXLPRRLLVDRFSGRFWAWLEREEFLVPKNVLDIVAGQXVXWMGLFYCPLLPLLNSVFLFLXFYIKKYXLLKNSRASSRPFRASSSXFFFQLVLLLGLLLAAVPLGYVVSSIHSSWDCGLFXNYSAPWQVVPELVALGLPPIGQRALHYLGSHAFSFPLLIMLSLVLXVCVSQXQANARAIHRLRKQLVWQVQEKWHLVEDLSRLLPEPGPSDSPGPKYPASQASRPQSFCPGCPCPGSPGHQAPRPGPSVVDAAGLRSPCPGQHGAPASARRFRFPSGAEL

SEQ ID NO: 27887 - protein, 82 aa, Homo sapiens
  MOD_RES (15)..(15): Selenocysteine
  MOD_RES (18)..(18): Selenocysteine
  MOD_RES (28)..(28): Selenocysteine
  MOD_RES (69)..(69): Selenocysteine
  MOD_RES (82)..(82): Selenocysteine
MLDVKMEDIKESIEXMRXRLERSIQMLXLLRAFEARDRNLQEGNLERVNFWSAVNVAVLLLVAVLQVCXLKRFFQDKRPVPX

SEQ ID NO: 27888 - protein, 74 aa, Homo sapiens
  MOD_RES (35)..(35): Selenocysteine
  MOD_RES (58)..(58): Selenocysteine
MMAAGAALALALWLLMPPVEVGGAGPPPIQDGEFXFLLPAGRKQCFYQSAPANASLEXEYQGGANGGRGLQAVL

SEQ ID NO: 27889 - protein, 95 aa, Homo sapiens
  MOD_RES (35)..(35): Selenocysteine
  MOD_RES (58)..(58): Selenocysteine
  MOD_RES (73)..(73): Selenocysteine
MMAAGAALALALWLLMPPVEVGGAGPPPIQDGEFXFLLPAGRKQCFYQSAPANASLEXEYQVIGGAGLDVDFXLESPQGVLLGGANGGRGLQAVL

SEQ ID NO: 27890 - protein, 185 aa, Homo sapiens
  MOD_RES (35)..(35): Selenocysteine
  MOD_RES (58)..(58): Selenocysteine
  MOD_RES (73)..(73): Selenocysteine
  MOD_RES (94)..(94): Selenocysteine
  MOD_RES (121)..(121): Selenocysteine
  MOD_RES (123)..(123): Selenocysteine
  MOD_RES (128)..(128): Selenocysteine
  MOD_RES (133)..(133): Selenocysteine
  MOD_RES (139)..(139): Selenocysteine
  MOD_RES (160)..(160): Selenocysteine
  MOD_RES (176)..(176): Selenocysteine
MMAAGAALALALWLLMPPVEVGGAGPPPIQDGEFXFLLPAGRKQCFYQSAPANASLEXEYQVIGGAGLDVDFXLESPQGVLLVSESRKADGVHXSPLRPCGPGWSAASRCSRYCGPSRHVXAXCKRAXWSGSXSGQLSXWRCCCWWLCCRSARSSASSRXSARCPRSPCHGRKNGXKEGQQGVCI

SEQ ID NO: 27891 - protein, 191 aa, Homo sapiens
  MOD_RES (35)..(35): Selenocysteine
  MOD_RES (58)..(58): Selenocysteine
  MOD_RES (73)..(73): Selenocysteine
  MOD_RES (94)..(95): Selenocysteine
  MOD_RES (142)..(142): Selenocysteine
  MOD_RES (145)..(145): Selenocysteine
  MOD_RES (155)..(155): Selenocysteine
MMAAGAALALALWLLMPPVEVGGAGPPPIQDGEFXFLLPAGRKQCFYQSAPANASLEXEYQVIGGAGLDVDFXLESPQGVLLVSESRKADGVHXXISEKLVFFELIFDSLQDDEEVEGWAEAVEPEEMLDVKMEDIKESIEXMRXRLERSIQMLXLLRAFEARDRNLQEGNLERVNFWSAVNVAVLLLVAV

SEQ ID NO: 27892 - protein, 227 aa, Homo sapiens
  MOD_RES (35)..(35): Selenocysteine
  MOD_RES (58)..(58): Selenocysteine
  MOD_RES (73)..(73): Selenocysteine
  MOD_RES (94)..(94): Selenocysteine
  MOD_RES (98)..(98): Selenocysteine
  MOD_RES (113)..(113): Selenocysteine
  MOD_RES (160)..(160): Selenocysteine
  MOD_RES (163)..(163): Selenocysteine
  MOD_RES (173)..(173): Selenocysteine
  MOD_RES (214)..(214): Selenocysteine
  MOD_RES (227)..(227): Selenocysteine
MMAAGAALALALWLLMPPVEVGGAGPPPIQDGEFXFLLPAGRKQCFYQSAPANASLEXEYQVIGGAGLDVDFXLESPQGVLLVSESRKADGVHXVEPXEAGDYKLCFDNSFSXISEKLVFFELIFDSLQDDEEVEGWAEAVEPEEMLDVKMEDIKESIEXMRXRLERSIQMLXLLRAFEARDRNLQEGNLERVNFWSAVNVAVLLLVAVLQVCXLKRFFQDKRPVPX

SEQ ID NO: 27893 - protein, 65 aa, Homo sapiens
  MOD_RES (1)..(1): Any amino acid
  MOD_RES (33)..(33): Selenocysteine
  MOD_RES (41)..(41): Selenocysteine
  MOD_RES (49)..(49): Selenocysteine
XEVEGWAEAVEPEEMLDVKMEDIKVCPGCAGAXPSRSLGFXWGAPLGLXQPPLRSCALQLNYRVH

SEQ ID NO: 27894 - protein, 186 aa, Homo sapiens
  MOD_RES (25)..(25): Selenocysteine
  MOD_RES (37)..(37): Selenocysteine
  MOD_RES (50)..(50): Selenocysteine
  MOD_RES (58)..(58): Selenocysteine
  MOD_RES (72)..(72): Selenocysteine
  MOD_RES (101)..(101): Selenocysteine
  MOD_RES (103)..(103): Selenocysteine
  MOD_RES (106)..(106): Selenocysteine
  MOD_RES (119)..(119): Selenocysteine
  MOD_RES (154)..(154): Selenocysteine
MAGVGAGPLRAMGRQALLLLALCAXGAQGLYFHIGEXEKRCFIEEIPDEXMVIGNYRXQMWDKQKEVFLPSXPGLGMHVEVKDPDGKVVLSRQYGSEGRFXFXSHXPGDHQICLHSNSXRMALFAGGKLRVHLDIQVGEHANNYPEIAAKDKLXELQLRARQLLDQVEQIQKEQDYQRASAYLLVI

SEQ ID NO: 27895 - protein, 227 aa, Homo sapiens
  MOD_RES (25)..(25): Selenocysteine
  MOD_RES (37)..(37): Selenocysteine
  MOD_RES (50)..(50): Selenocysteine
  MOD_RES (58)..(58): Selenocysteine
  MOD_RES (72)..(72): Selenocysteine
  MOD_RES (101)..(101): Selenocysteine
  MOD_RES (103)..(103): Selenocysteine
  MOD_RES (106)..(106): Selenocysteine
  MOD_RES (119)..(119): Selenocysteine
  MOD_RES (154)..(154): Selenocysteine
  MOD_RES (187)..(187): Selenocysteine
  MOD_RES (191)..(191): Selenocysteine
  MOD_RES (203)..(203): Selenocysteine
  MOD_RES (209)..(209): Selenocysteine
MAGVGAGPLRAMGRQALLLLALCAXGAQGLYFHIGEXEKRCFIEEIPDEXMVIGNYRXQMWDKQKEVFLPSXPGLGMHVEVKDPDGKVVLSRQYGSEGRFXFXSHXPGDHQICLHSNSXRMALFAGGKLRVHLDIQVGEHANNYPEIAAKDKLXELQLRARQLLDQVEQIQKEQDYQRYREERFRLXSESXNQRVLWWSIAQXVILILXGIWQMRHLKSFFEAKKLV

SEQ ID NO: 27896 - protein, 178 aa, Homo sapiens
  MOD_RES (25)..(25): Selenocysteine
  MOD_RES (37)..(37): Selenocysteine
  MOD_RES (50)..(50): Selenocysteine
  MOD_RES (58)..(58): Selenocysteine
  MOD_RES (72)..(72): Selenocysteine
  MOD_RES (101)..(101): Selenocysteine
  MOD_RES (103)..(103): Selenocysteine
  MOD_RES (106)..(106): Selenocysteine
  MOD_RES (119)..(119): Selenocysteine
  MOD_RES (138)..(138): Selenocysteine
  MOD_RES (142)..(142): Selenocysteine
  MOD_RES (154)..(154): Selenocysteine
  MOD_RES (160)..(160): Selenocysteine
MAGVGAGPLRAMGRQALLLLALCAXGAQGLYFHIGEXEKRCFIEEIPDEXMVIGNYRXQMWDKQKEVFLPSXPGLGMHVEVKDPDGKVVLSRQYGSEGRFXFXSHXPGDHQICLHSNSXRMALFAGGKLYREERFRLXSESXNQRVLWWSIAQXVILILXGIWQMRHLKSFFEAKKLV

SEQ ID NO: 27897 - protein, 129 aa, Homo sapiens
  MOD_RES (2)..(2): Selenocysteine
  MOD_RES (20)..(20): Selenocysteine
  MOD_RES (32)..(33): Selenocysteine
  MOD_RES (46)..(46): Selenocysteine
  MOD_RES (49)..(49): Selenocysteine
  MOD_RES (72)..(72): Selenocysteine
  MOD_RES (123)..(123): Selenocysteine
MXEEPIKEILGAPKAHMAAXMEKSPKSEVVIXXVPLVSEIQLMAAXGGXELSCYRCIIPFAVVVFIAGIVVXAVAYSFNSHGSIISIFGLVVLSSGLFLLASSALCWKVRQRSKKAKRRESQXALVANQ

SEQ ID NO: 27898 - protein, 134 aa, Homo sapiens
  MOD_RES (2)..(2): Selenocysteine
  MOD_RES (20)..(20): Selenocysteine
  MOD_RES (32)..(33): Selenocysteine
  MOD_RES (46)..(46): Selenocysteine
  MOD_RES (49)..(49): Selenocysteine
  MOD_RES (72)..(72): Selenocysteine
  MOD_RES (123)..(123): Selenocysteine
MXEEPIKEILGAPKAHMAAXMEKSPKSEVVIXXVPLVSEIQLMAAXGGXELSCYRCIIPFAVVVFIAGIVVXAVAYSFNSHGSIISIFGLVVLSSGLFLLASSALCWKVRQRSKKAKRRESQXALVANQRSLFA

SEQ ID NO: 27899 - protein, 257 aa, Homo sapiens
  MOD_RES (24)..(24): Selenocysteine
  MOD_RES (90)..(90): Selenocysteine
  MOD_RES (113)..(113): Selenocysteine
  MOD_RES (143)..(143): Selenocysteine
  MOD_RES (201)..(201): Selenocysteine
  MOD_RES (228)..(228): Selenocysteine
  MOD_RES (249)..(249): Selenocysteine
  MOD_RES (255)..(255): Selenocysteine
MASKIGSRRWMLQLIMQLGSVLLXRCPFWGCFSQLMLYAERAEARRKPDIPVPYLYFDMGAAVLCASFMSFGVKRRWFALGAALQLAISXYAAYIGGYVHYGDWLKVRMYSRXVAIIGGFLVLASGAGELYRRKPRSRSLQSXGQVFLGIYLICVAYSLQHSKEDRLAYLNHLPGGELMIQLFFVLYGILALAFLSGYYVXLAAQILAVLLPPVMLLIDGNVAYWHNXRRVEFWNQMKLLGESVGIFGXAVILAXDG

SEQ ID NO: 27900 - protein, 171 aa, Homo sapiens
  MOD_RES (24)..(24): Selenocysteine
  MOD_RES (90)..(90): Selenocysteine
  MOD_RES (113)..(113): Selenocysteine
  MOD_RES (143)..(143): Selenocysteine
  MOD_RES (160)..(160): Selenocysteine
MASKIGSRRWMLQLIMQLGSVLLXRCPFWGCFSQLMLYAERAEARRKPDIPVPYLYFDMGAAVLCASFMSFGVKRRWFALGAALQLAISXYAAYIGGYVHYGDWLKVRMYSRXVAIIGGFLVLASGAGELYRRKPRSRSLQSXGQVFLGIYLICVVCWGXVGWRCLAGSEL

SEQ ID NO: 27901 - protein, 51 aa, Homo sapiens
  MOD_RES (32)..(32): Selenocysteine
MGAAVLCASFMSFGVKRRWFALGAALQLAISXYAAYIGGYVHYGDWLKVRM

SEQ ID NO: 27902 - protein, 88 aa, Homo sapiens
  MOD_RES (32)..(32): Selenocysteine
  MOD_RES (55)..(55): Selenocysteine
  MOD_RES (85)..(85): Selenocysteine
MGAAVLCASFMSFGVKRRWFALGAALQLAISXYAAYIGGYVHYGDWLKVRMYSRXVAIIGGFLVLASGAGELYRRKPRSRSLQSXGQV

SEQ ID NO: 27903 - protein, 97 aa, Homo sapiens
  MOD_RES (32)..(32): Selenocysteine
  MOD_RES (55)..(55): Selenocysteine
  MOD_RES (85)..(85): Selenocysteine
MGAAVLCASFMSFGVKRRWFALGAALQLAISXYAAYIGGYVHYGDWLKVRMYSRXVAIIGGFLVLASGAGELYRRKPRSRSLQSXGQVFLGIYLICV

SEQ ID NO: 27904 - protein, 508 aa, Homo sapiens
  MOD_RES (24)..(24): Selenocysteine
  MOD_RES (38)..(38): Selenocysteine
  MOD_RES (120)..(120): Selenocysteine
  MOD_RES (131)..(131): Selenocysteine
  MOD_RES (153)..(153): Selenocysteine
  MOD_RES (177)..(177): Selenocysteine
  MOD_RES (198)..(198): Selenocysteine
  MOD_RES (229)..(229): Selenocysteine
  MOD_RES (234)..(234): Selenocysteine
  MOD_RES (240)..(240): Selenocysteine
  MOD_RES (260)..(260): Selenocysteine
  MOD_RES (273)..(273): Selenocysteine
  MOD_RES (300)..(301): Selenocysteine
  MOD_RES (306)..(306): Selenocysteine
  MOD_RES (355)..(355): Selenocysteine
  MOD_RES (400)..(400): Selenocysteine
  MOD_RES (410)..(410): Selenocysteine
  MOD_RES (449)..(449): Selenocysteine
  MOD_RES (462)..(462): Selenocysteine
MASAVWGSAPWWGPPPPAPARPLXDIDFCSGAQLQELXQLIQELGVQESWSDGPKPGADLLRAKDFVFSLLGLVHRRDPRFPPQAELLLLRGGIREGSLDLGHAPLGPYARGPHYDAGFXLLVPMFSLDGXELQLDLESCYAQVCLPEMVCGXPIREMWQDCLGPPVPGARDSIHRXESEESSKDWQSSVDQPHSYVXEHEAPVSLEKSPSDVSASESPQHDVVDLGSXAPLKXMSSDVXKAAVESPVPKPSEAREAWPXLCSAQVAAWFFAXLAAVAESLIPVPGAPRLVHAARHAGFXXVLLAXPEPPRRLLLFDLIPVVSVAGWPEGARSHSWAGPLASESASFYLVPGGGXERPCASAWQLCFARQELALKARIPAPLLQAHAAAQALLRPLVAGXRAAAPYLLRXLLYWACERLPALYLARPENAGACCLGLLDELGRVLEAGXLPHYFLNGRQLRXGDDSAALLGELARLRGDPARALRAAVEEAKVARKGGGLAGVGGGAH

SEQ ID NO: 27905 - protein, 243 aa, Homo sapiens
  MOD_RES (55)..(55): Selenocysteine
  MOD_RES (64)..(64): Selenocysteine
  MOD_RES (73)..(73): Selenocysteine
  MOD_RES (130)..(130): Selenocysteine
  MOD_RES (184)..(184): Selenocysteine
  MOD_RES (203)..(203): Selenocysteine
MAASSISSPWGKHVFKAILMVLVALILLHSALAQSRRDFAPPGQQKREAPVDVLXQIGRSVRGXLDAWIGPEXMHLVSESSSQVLWAISSAISVAFFALSGIAAQLLNALGLAGDYLAQGLKLSPGQVQXFLLWGAGALVVYWLLSLLLGLVLALLGRILWGLKLVIFLAGFVALMRSVPDPSXRALLLLALLILYALLSRLXGSRASGAQLEAKVRGLERQVEELRWRQRRAAKGARSVEEE

SEQ ID NO: 27906 - protein, 39 aa, Homo sapiens
  MOD_RES (21)..(21): Selenocysteine
LISADDEMEESDVEEDLRRLXPLKPVKKKKHRFGLPGPE

SEQ ID NO: 27907 - protein, 65 aa, Homo sapiens
  MOD_RES (19)..(19): Selenocysteine
  MOD_RES (51)..(51): Selenocysteine
MQGPAGNASRGLPGGPPSXVASGAGRCESGALMHSFGIFLQGLLGVVAFSXLMLIICDNLAKIRC

SEQ ID NO: 27908 - protein, 294 aa, Homo sapiens
  MOD_RES (19)..(19): Selenocysteine
  MOD_RES (51)..(51): Selenocysteine
  MOD_RES (74)..(74): Selenocysteine
  MOD_RES (95)..(95): Selenocysteine
  MOD_RES (112)..(112): Selenocysteine
  MOD_RES (223)..(223): Selenocysteine
  MOD_RES (278)..(278): Selenocysteine
MQGPAGNASRGLPGGPPSXVASGAGRCESGALMHSFGIFLQGLLGVVAFSXLMLKRFREPKHERRPWRIWFLDXSKQAIGMLFIHFANVYLADLXEEDPCSLYLINFLLDAXVGMLLIYVGVRAVSVLVEWQQWESLRFGEYGDPLQCGAWVGQCALYIVIMIFEKSVVFIVLLILQWKKVALLNPIENPDLKLAIVMLIVPFFVNALMFWVVDNFLMRKGKXKAKLEERGANQDSRNGSKVRYRRAASHEESESEILISADDEMEESDVEEDLRRLXPLKPVKKKKHRFGLPV

SEQ ID NO: 27909 - protein, 89 aa, Homo sapiens
  MOD_RES (1)..(1): Any amino acid
  MOD_RES (5)..(5): Selenocysteine
  MOD_RES (26)..(26): Selenocysteine
  MOD_RES (43)..(43): Selenocysteine
XFLDXSKQAIGMLFIHFANVYLADLXEEDPCSLYLINFLLDAXVGMLLIYVGVRAVSVLVEWQQWESLRFGEYEEKAKSLLMRMRDSGK

SEQ ID NO: 27910 - protein, 154 aa, Homo sapiens
  MOD_RES (5)..(5): Selenocysteine
  MOD_RES (42)..(42): Selenocysteine
  MOD_RES (52)..(52): Selenocysteine
  MOD_RES (58)..(58): Selenocysteine
  MOD_RES (88)..(88): Selenocysteine
  MOD_RES (107)..(107): Selenocysteine
  MOD_RES (117)..(117): Selenocysteine
  MOD_RES (153)..(153): Selenocysteine
MNPQXVLLLRVIAAFCFLGILCSLSAFLLDVFGPKHPALKIXRRYAFAHILXVLQCAXVIGFSYWASELILAQQQQHKKYHGSQVYVXFAVSFYLVAGAGGASILAXAANLLRHYPXEEEEQALELLSEMEENEPYPAEYEVINQFQPPPAYXP

SEQ ID NO: 27911 - protein, 238 aa, Homo sapiens
  MOD_RES (42)..(42): Selenocysteine
  MOD_RES (46)..(46): Selenocysteine
  MOD_RES (60)..(60): Selenocysteine
  MOD_RES (89)..(89): Selenocysteine
  MOD_RES (126)..(126): Selenocysteine
  MOD_RES (136)..(136): Selenocysteine
  MOD_RES (142)..(142): Selenocysteine
  MOD_RES (172)..(172): Selenocysteine
  MOD_RES (191)..(191): Selenocysteine
  MOD_RES (201)..(201): Selenocysteine
  MOD_RES (237)..(237): Selenocysteine
MYAPGGAGLPGGRRRRSPGGSALPKQPERSLASALPGALSIXALCXALAEPAWLHIHGGXCSRQELGVSDVLGYVHPDLLKDFCMNPQXVLLLRVIAAFCFLGILCSLSAFLLDVFGPKHPALKIXRRYAFAHILXVLQCAXVIGFSYWASELILAQQQQHKKYHGSQVYVXFAVSFYLVAGAGGASILAXAANLLRHYPXEEEEQALELLSEMEENEPYPAEYEVINQFQPPPAYXP

SEQ ID NO: 27912 - protein, 78 aa, Homo sapiens
  MOD_RES (38)..(39): Selenocysteine
HPQVGPGEDCQWHPAGDPLVRPWRVSGSPASASGVAGXXGARHHARRDGVSLCWPGWSRSPDLMIRPPRPPKVLGLQE

SEQ ID NO: 27913 - protein, 493 aa, Homo sapiens
  MOD_RES (46)..(46): Selenocysteine
  MOD_RES (111)..(112): Selenocysteine
  MOD_RES (127)..(127): Selenocysteine
  MOD_RES (153)..(153): Selenocysteine
  MOD_RES (160)..(160): Selenocysteine
  MOD_RES (173)..(173): Selenocysteine
  MOD_RES (176)..(176): Selenocysteine
  MOD_RES (203)..(204): Selenocysteine
  MOD_RES (231)..(231): Selenocysteine
  MOD_RES (266)..(266): Selenocysteine
  MOD_RES (268)..(268): Selenocysteine
  MOD_RES (285)..(285): Selenocysteine
  MOD_RES (288)..(288): Selenocysteine
  MOD_RES (290)..(290): Selenocysteine
  MOD_RES (310)..(310): Selenocysteine
  MOD_RES (356)..(356): Selenocysteine
  MOD_RES (401)..(401): Selenocysteine
  MOD_RES (416)..(416): Selenocysteine
  MOD_RES (446)..(446): Selenocysteine
  MOD_RES (456)..(456): Selenocysteine
  MOD_RES (466)..(466): Selenocysteine
MEPLRAPALRRLLPPLLLLLLSLPPRARAKYVRGNLSSKEDWVFLXRFCFLSDYGRLDFRFRYPEAKCCQNILLYFDDPSQWPAVYKAGDKDCLAKESVIRPENNQVINLXXQYAWSGCQVVSEEGXRYLSCSSGRSFRSGDGLQLEYEMVLXNGKSFWXRHFSADEFGILEXDVXFLLIFILIFFLSCYFGYLLKGRQLLHXXYKMFMAAAGVEVLSLLFFCIYWGQYAXDGIGNESVKILAKLLFSSSFLIFLLMLILLGKGFXVXRGRISHAGSVKLSVYMXLYXLXHVVLLIYEAEFFDPGQVLYXYESPAGYGLIGLQVAAYVWFCYAVLVSLRHFPEKQPFYVPFFAAYXLWFFAVPVMALIANFGIPKWAREKIVNGIQLGIHLYAHGVFLIMXRPSAANKNFPYHVRXSQIASAGVPGPGGSQSADKAFPQHVYGNVXFISDSVPNFXELFSIPPPAXSPLPRAAPDSGLPLFRDLRPPGPLRDL

SEQ ID NO: 27914 - protein, 488 aa, Homo sapiens
  MOD_RES (46)..(46): Selenocysteine
  MOD_RES (121)..(122): Selenocysteine
  MOD_RES (137)..(137): Selenocysteine
  MOD_RES (177)..(177): Selenocysteine
  MOD_RES (184)..(184): Selenocysteine
  MOD_RES (197)..(197): Selenocysteine
  MOD_RES (200)..(200): Selenocysteine
  MOD_RES (227)..(228): Selenocysteine
  MOD_RES (255)..(255): Selenocysteine
  MOD_RES (290)..(290): Selenocysteine
  MOD_RES (292)..(292): Selenocysteine
  MOD_RES (309)..(309): Selenocysteine
  MOD_RES (312)..(312): Selenocysteine
  MOD_RES (314)..(314): Selenocysteine
  MOD_RES (334)..(334): Selenocysteine
  MOD_RES (380)..(380): Selenocysteine
  MOD_RES (432)..(432): Selenocysteine
  MOD_RES (436)..(436): Selenocysteine
  MOD_RES (442)..(442): Selenocysteine
MEPLRAPALRRLLPPLLLLLLSLPPRARAKYVRGNLSSKEDWVFLXRFCFLSDYGRLDFRFRYPELPVPNISGLQAKCCQNILLYFDDPSQWPAVYKAGDKDCLAKESVIRPENNQVINLXXQYAWSGCQVVSEEGXRYLSCSSGRSFRSVRERWWYIALSKCGGDGLQLEYEMVLXNGKSFWXRHFSADEFGILEXDVXFLLIFILIFFLSCYFGYLLKGRQLLHXXYKMFMAAAGVEVLSLLFFCIYWGQYAXDGIGNESVKILAKLLFSSSFLIFLLMLILLGKGFXVXRGRISHAGSVKLSVYMXLYXLXHVVLLIYEAEFFDPGQVLYXYESPAGYGLIGLQVAAYVWFCYAVLVSLRHFPEKQPFYVPFFAAYXLWFFAVPVMALIANFGIPKWAREKIVNGIQLGIHLYAHGVFLILPFLFCIPXAFPXLLDLSXLPLPLPKFCHHRPLFRKKHLGWHRVKLLGSWVGNRRVQHHIFFFFF

SEQ ID NO: 27915 - protein, 194 aa, Homo sapiens
  MOD_RES (2)..(2): Selenocysteine
  MOD_RES (12)..(12): Selenocysteine
  MOD_RES (14)..(14): Selenocysteine
  MOD_RES (22)..(22): Selenocysteine
  MOD_RES (24)..(24): Selenocysteine
  MOD_RES (41)..(41): Selenocysteine
  MOD_RES (60)..(60): Selenocysteine
  MOD_RES (73)..(73): Selenocysteine
  MOD_RES (112)..(112): Selenocysteine
  MOD_RES (121)..(121): Selenocysteine
  MOD_RES (127)..(127): Selenocysteine
  MOD_RES (161)..(161): Selenocysteine
EXNIAVFWCLLXVXFSIKMFLXVXRLYFSAEEGGERSVCLXFAFLFLLLAMLVQVVREEXLELGLEPGLASMXQNLEPLLKKQGWDWALPVAKLAIRVGLAVVGSVLGAFLXFPGLRLAQXHRDALXMSEDRPMLQLSDSAFDSGRLWLLVVLCLLRLAVXRPHLQAYLCLAKARVEQLRREAGRIEAREIQQR

SEQ ID NO: 27916 - protein, 40 aa, Homo sapiens
  MOD_RES (11)..(11): Selenocysteine
  MOD_RES (14)..(14): Selenocysteine
  MOD_RES (16)..(16): Selenocysteine
MAVLGVQLVVXLLXAXLMHRLAPHCSFARWLLCNGRLPSN

SEQ ID NO: 27917 - protein, 454 aa, Homo sapiens
  MOD_RES (11)..(11): Selenocysteine
  MOD_RES (14)..(14): Selenocysteine
  MOD_RES (16)..(16): Selenocysteine
  MOD_RES (86)..(86): Selenocysteine
  MOD_RES (90)..(91): Selenocysteine
  MOD_RES (108)..(108): Selenocysteine
  MOD_RES (118)..(118): Selenocysteine
  MOD_RES (120)..(120): Selenocysteine
  MOD_RES (128)..(128): Selenocysteine
  MOD_RES (130)..(130): Selenocysteine
  MOD_RES (147)..(147): Selenocysteine
  MOD_RES (166)..(166): Selenocysteine
  MOD_RES (179)..(179): Selenocysteine
  MOD_RES (218)..(218): Selenocysteine
  MOD_RES (227)..(227): Selenocysteine
  MOD_RES (233)..(233): Selenocysteine
  MOD_RES (247)..(247): Selenocysteine
  MOD_RES (260)..(260): Selenocysteine
  MOD_RES (276)..(276): Selenocysteine
  MOD_RES (305)..(305): Selenocysteine
  MOD_RES (347)..(347): Selenocysteine
  MOD_RES (355)..(355): Selenocysteine
  MOD_RES (360)..(360): Selenocysteine
  MOD_RES (364)..(364): Selenocysteine
  MOD_RES (369)..(369): Selenocysteine
  MOD_RES (405)..(405): Selenocysteine
  MOD_RES (418)..(418): Selenocysteine
  MOD_RES (433)..(433): Selenocysteine
MAVLGVQLVVXLLXAXLMHRLAPHCSFARWLLCNGSLFRYKHPSEEELRALAGKPRPRGRKERWANGLSEEKPLSVPRDAPFQLEXCPLXXVDALEAYYYMLGPAKEXNIAVFWCLLXVXFSIKMFLXVXRLYFSAEEGGERSVCLXFAFLFLLLAMLVQVVREEXLELGLEPGLASMXQNLEPLLKKQGWDWALPVAKLAIRVGLAVVGSVLGAFLXFPGLRLAQXHRDALXMSEDRPMLQFLLHXSFLSPLFILWLWXKPIARDFLHQPPFGEXRFSLLSDSAFDSGRLWLLVVLCLLRLAVXRPHLQAYLCLAKARVEQLRREAGRIEAREIQQRVVRVYCYVXVVSLQYLXPLILXLNCXLLLKXLGGYSWGLGPAPLLSPDPSSASAAPIGSGEDEVQQXAARIAGALGGLLXPLFLRGVLAYLIWWXAACQLLASLFGLYFHQHLAGS

SEQ ID NO: 27918 - protein, 376 aa, Homo sapiens
  MOD_RES (11)..(11): Selenocysteine
  MOD_RES (14)..(14): Selenocysteine
  MOD_RES (16)..(16): Selenocysteine
  MOD_RES (86)..(86): Selenocysteine
  MOD_RES (90)..(91): Selenocysteine
  MOD_RES (101)..(101): Selenocysteine
  MOD_RES (140)..(140): Selenocysteine
  MOD_RES (149)..(149): Selenocysteine
  MOD_RES (155)..(155): Selenocysteine
  MOD_RES (169)..(169): Selenocysteine
  MOD_RES (182)..(182): Selenocysteine
  MOD_RES (198)..(198): Selenocysteine
  MOD_RES (227)..(227): Selenocysteine
  MOD_RES (269)..(269): Selenocysteine
  MOD_RES (277)..(277): Selenocysteine
  MOD_RES (282)..(282): Selenocysteine
  MOD_RES (286)..(286): Selenocysteine
  MOD_RES (291)..(291): Selenocysteine
  MOD_RES (327)..(327): Selenocysteine
  MOD_RES (340)..(340): Selenocysteine
  MOD_RES (355)..(355): Selenocysteine
MAVLGVQLVVXLLXAXLMHRLAPHCSFARWLLCNGSLFRYKHPSEEELRALAGKPRPRGRKERWANGLSEEKPLSVPRDAPFQLEXCPLXXVDALGLASMXQNLEPLLKKQGWDWALPVAKLAIRVGLAVVGSVLGAFLXFPGLRLAQXHRDALXMSEDRPMLQFLLHXSFLSPLFILWLWXKPIARDFLHQPPFGEXRFSLLSDSAFDSGRLWLLVVLCLLRLAVXRPHLQAYLCLAKARVEQLRREAGRIEAREIQQRVVRVYCYVXVVSLQYLXPLILXLNCXLLLKXLGGYSWGLGPAPLLSPDPSSASAAPIGSGEDEVQQXAARIAGALGGLLXPLFLRGVLAYLIWWXAACQLLASLFGLYFHQHLAGS

SEQ ID NO: 27919 - protein, 325 aa, Homo sapiens
  MOD_RES (11)..(11): Selenocysteine
  MOD_RES (14)..(14): Selenocysteine
  MOD_RES (16)..(16): Selenocysteine
  MOD_RES (86)..(86): Selenocysteine
  MOD_RES (90)..(91): Selenocysteine
  MOD_RES (120)..(120): Selenocysteine
  MOD_RES (133)..(133): Selenocysteine
  MOD_RES (143)..(143): Selenocysteine
  MOD_RES (145)..(145): Selenocysteine
  MOD_RES (153)..(153): Selenocysteine
  MOD_RES (155)..(155): Selenocysteine
  MOD_RES (172)..(172): Selenocysteine
  MOD_RES (191)..(191): Selenocysteine
  MOD_RES (204)..(204): Selenocysteine
  MOD_RES (243)..(243): Selenocysteine
  MOD_RES (252)..(252): Selenocysteine
  MOD_RES (258)..(258): Selenocysteine
  MOD_RES (272)..(272): Selenocysteine
  MOD_RES (285)..(285): Selenocysteine
  MOD_RES (301)..(301): Selenocysteine
  MOD_RES (309)..(309): Selenocysteine
MAVLGVQLVVXLLXAXLMHRLAPHCSFARWLLCNGSLFRYKHPSEEELRALAGKPRPRGRKERWANGLSEEKPLSVPRDAPFQLEXCPLXXVDALVLRFFLEYQWFVDFAVYSGGVYLFXEAYYYMLGPAKEXNIAVFWCLLXVXFSIKMFLXVXRLYFSAEEGGERSVCLXFAFLFLLLAMLVQVVREEXLELGLEPGLASMXQNLEPLLKKQGWDWALPVAKLAIRVGLAVVGSVLGAFLXFPGLRLAQXHRDALXMSEDRPMLQFLLHXSFLSPLFILWLWXKPIARDFLHQPPFGEXRCPILPSXLGASGCWWCCACCGWR

SEQ ID NO: 27920 - protein, 479 aa, Homo sapiens
  MOD_RES (11)..(11): Selenocysteine
  MOD_RES (14)..(14): Selenocysteine
  MOD_RES (16)..(16): Selenocysteine
  MOD_RES (86)..(86): Selenocysteine
  MOD_RES (90)..(91): Selenocysteine
  MOD_RES (120)..(120): Selenocysteine
  MOD_RES (133)..(133): Selenocysteine
  MOD_RES (143)..(143): Selenocysteine
  MOD_RES (145)..(145): Selenocysteine
  MOD_RES (153)..(153): Selenocysteine
  MOD_RES (155)..(155): Selenocysteine
  MOD_RES (172)..(172): Selenocysteine
  MOD_RES (191)..(191): Selenocysteine
  MOD_RES (204)..(204): Selenocysteine
  MOD_RES (243)..(243): Selenocysteine
  MOD_RES (252)..(252): Selenocysteine
  MOD_RES (258)..(258): Selenocysteine
  MOD_RES (272)..(272): Selenocysteine
  MOD_RES (285)..(285): Selenocysteine
  MOD_RES (301)..(301): Selenocysteine
  MOD_RES (330)..(330): Selenocysteine
  MOD_RES (372)..(372): Selenocysteine
  MOD_RES (380)..(380): Selenocysteine
  MOD_RES (385)..(385): Selenocysteine
  MOD_RES (389)..(389): Selenocysteine
  MOD_RES (394)..(394): Selenocysteine
  MOD_RES (430)..(430): Selenocysteine
  MOD_RES (443)..(443): Selenocysteine
  MOD_RES (458)..(458): Selenocysteine
MAVLGVQLVVXLLXAXLMHRLAPHCSFARWLLCNGSLFRYKHPSEEELRALAGKPRPRGRKERWANGLSEEKPLSVPRDAPFQLEXCPLXXVDALVLRFFLEYQWFVDFAVYSGGVYLFXEAYYYMLGPAKEXNIAVFWCLLXVXFSIKMFLXVXRLYFSAEEGGERSVCLXFAFLFLLLAMLVQVVREEXLELGLEPGLASMXQNLEPLLKKQGWDWALPVAKLAIRVGLAVVGSVLGAFLXFPGLRLAQXHRDALXMSEDRPMLQFLLHXSFLSPLFILWLWXKPIARDFLHQPPFGEXRFSLLSDSAFDSGRLWLLVVLCLLRLAVXRPHLQAYLCLAKARVEQLRREAGRIEAREIQQRVVRVYCYVXVVSLQYLXPLILXLNCXLLLKXLGGYSWGLGPAPLLSPDPSSASAAPIGSGEDEVQQXAARIAGALGGLLXPLFLRGVLAYLIWWXAACQLLASLFGLYFHQHLAGS

SEQ ID NO: 27921 - protein, 145 aa, Homo sapiens
  MOD_RES (69)..(69): Selenocysteine
  MOD_RES (73)..(74): Selenocysteine
  MOD_RES (103)..(103): Selenocysteine
  MOD_RES (116)..(116): Selenocysteine
  MOD_RES (126)..(126): Selenocysteine
  MOD_RES (128)..(128): Selenocysteine
  MOD_RES (136)..(136): Selenocysteine
  MOD_RES (138)..(138): Selenocysteine
MHRLAPHCSFARWLLCNGSLFRYKHPSEEELRALAGKPRPRGRKERWANGLSEEKPLSVPRDAPFQLEXCPLXXVDALVLRFFLEYQWFVDFAVYSGGVYLFXEAYYYMLGPAKEXNIAVFWCLLXVXFSIKMFLXVXRLYFSAE

SEQ ID NO: 27922 - protein, 315 aa, Homo sapiens
  MOD_RES (69)..(69): Selenocysteine
  MOD_RES (73)..(74): Selenocysteine
  MOD_RES (103)..(103): Selenocysteine
  MOD_RES (116)..(116): Selenocysteine
  MOD_RES (126)..(126): Selenocysteine
  MOD_RES (128)..(128): Selenocysteine
  MOD_RES (136)..(136): Selenocysteine
  MOD_RES (138)..(138): Selenocysteine
  MOD_RES (155)..(155): Selenocysteine
  MOD_RES (174)..(174): Selenocysteine
  MOD_RES (187)..(187): Selenocysteine
  MOD_RES (226)..(226): Selenocysteine
  MOD_RES (235)..(235): Selenocysteine
  MOD_RES (241)..(241): Selenocysteine
  MOD_RES (255)..(255): Selenocysteine
  MOD_RES (268)..(268): Selenocysteine
  MOD_RES (284)..(284): Selenocysteine
  MOD_RES (313)..(313): Selenocysteine
MHRLAPHCSFARWLLCNGSLFRYKHPSEEELRALAGKPRPRGRKERWANGLSEEKPLSVPRDAPFQLEXCPLXXVDALVLRFFLEYQWFVDFAVYSGGVYLFXEAYYYMLGPAKEXNIAVFWCLLXVXFSIKMFLXVXRLYFSAEEGGERSVCLXFAFLFLLLAMLVQVVREEXLELGLEPGLASMXQNLEPLLKKQGWDWALPVAKLAIRVGLAVVGSVLGAFLXFPGLRLAQXHRDALXMSEDRPMLQFLLHXSFLSPLFILWLWXKPIARDFLHQPPFGEXRFSLLSDSAFDSGRLWLLVVLCLLRLAVXRP

SEQ ID NO: 27923 - protein, 61 aa, Homo sapiens
  MOD_RES (8)..(8): Selenocysteine
  MOD_RES (18)..(18): Selenocysteine
  MOD_RES (20)..(20): Selenocysteine
  MOD_RES (28)..(28): Selenocysteine
  MOD_RES (30)..(30): Selenocysteine
  MOD_RES (47)..(47): Selenocysteine
MLGPAKEXNIAVFWCLLXVXFSIKMFLXVXRLYFSAEEGGERSVCLXFAFLFLLLAMLVQV

SEQ ID NO: 27924 - protein, 198 aa, Homo sapiens
  MOD_RES (25)..(25): Selenocysteine
  MOD_RES (51)..(51): Selenocysteine
  MOD_RES (82)..(82): Selenocysteine
  MOD_RES (88)..(88): Selenocysteine
  MOD_RES (135)..(135): Selenocysteine
  MOD_RES (148)..(148): Selenocysteine
  MOD_RES (161)..(161): Selenocysteine
MELPDPVRQRLGNFSRAVFSDSNRXGPESNEGPENEMVSSLALQMSLYFNXYYFPLWWVSSIMMLHMKYSILPDYYKFIVIXVIILIXLIEAIRLYLGYVGNLQEKVPELAGFWLLSLLLQLPLILFLLFNEGLXNLPLEKAIHIIFXLFLAFQVVAAFLXLRKMVNQLAVRFHLQDFDRLSANRGDMRRMRSCIEEI

SEQ ID NO: 27925 - protein, 156 aa, Homo sapiens
  MOD_RES (27)..(27): Selenocysteine
  MOD_RES (38)..(38): Selenocysteine
  MOD_RES (44)..(44): Selenocysteine
  MOD_RES (47)..(47): Selenocysteine
  MOD_RES (84)..(84): Selenocysteine
  MOD_RES (88)..(88): Selenocysteine
  MOD_RES (153)..(153): Selenocysteine
MGPRFWGGPSPGSCAFPFLRPSPSSRXPRDWSASRCWXWSGAAXAPXPFSPAQQPPSSHDGLSLDPSQLEPLAPRNPGPSGLCXASFXQKLRSPPAQLLPPEPDDAFWGAPCEQPLERRYQALPALVCIMCCLFGVVYCFFGYRCFKAVLFLXGLL

SEQ ID NO: 27926 - protein, 227 aa, Homo sapiens
  MOD_RES (4)..(4): Selenocysteine
  MOD_RES (7)..(7): Selenocysteine
  MOD_RES (67)..(67): Selenocysteine
  MOD_RES (88)..(88): Selenocysteine
  MOD_RES (164)..(164): Selenocysteine
  MOD_RES (172)..(173): Selenocysteine
  MOD_RES (176)..(176): Selenocysteine
  MOD_RES (179)..(179): Selenocysteine
  MOD_RES (186)..(186): Selenocysteine
MPGXVAXLRFQLLPPEPDDAFWGAPCEQPLERRYQALPALVCIMCCLFGVVYCFFGYRCFKAVLFLXGLLFGSVVIFLLCYRERVLEXQLSAGASAGIALGIGLLCGLVAMLVRSVGLFLVGLLLGLLLAAAALLGSAPYYQPGSVWGPLGLLLGGGLLCALLXLRWPRPLXXLAXAVXGAALIAXAADYFAELLLLGRYVVERLRAAPVPPLCWRSWALLALWPLL

SEQ ID NO: 27927 - protein, 360 aa, Homo sapiens
  MOD_RES (4)..(4): Selenocysteine
  MOD_RES (7)..(7): Selenocysteine
  MOD_RES (67)..(67): Selenocysteine
  MOD_RES (88)..(88): Selenocysteine
  MOD_RES (164)..(164): Selenocysteine
  MOD_RES (172)..(173): Selenocysteine
  MOD_RES (176)..(176): Selenocysteine
  MOD_RES (179)..(179): Selenocysteine
  MOD_RES (186)..(186): Selenocysteine
  MOD_RES (239)..(239): Selenocysteine
  MOD_RES (246)..(246): Selenocysteine
  MOD_RES (326)..(326): Selenocysteine
  MOD_RES (338)..(338): Selenocysteine
  MOD_RES (351)..(351): Selenocysteine
MPGXVAXLRFQLLPPEPDDAFWGAPCEQPLERRYQALPALVCIMCCLFGVVYCFFGYRCFKAVLFLXGLLFGSVVIFLLCYRERVLEXQLSAGASAGIALGIGLLCGLVAMLVRSVGLFLVGLLLGLLLAAAALLGSAPYYQPGSVWGPLGLLLGGGLLCALLXLRWPRPLXXLAXAVXGAALIAXAADYFAELLLLGRYVVERLRAAPVPPLCWRSWALLALWPLLSLMGVLVQWRVXAEGDSHXEVVISRQRRRVQLMRIRQQEDRKEKRRKKRPPRAPLRGPRAPPRPGPPDPAYRRRPVPIKRFNGDVLSPSYIQSFRDRQXGSSLSSFMASPXDADYEYGSRGPLXACSGPPVRV

SEQ ID NO: 27928 - protein, 226 aa, Homo sapiens
  MOD_RES (2)..(2): Selenocysteine
  MOD_RES (27)..(27): Selenocysteine
  MOD_RES (34)..(34): Selenocysteine
  MOD_RES (55)..(55): Selenocysteine
  MOD_RES (91)..(91): Selenocysteine
  MOD_RES (107)..(107): Selenocysteine
  MOD_RES (111)..(111): Selenocysteine
  MOD_RES (116)..(116): Selenocysteine
  MOD_RES (155)..(155): Selenocysteine
  MOD_RES (163)..(163): Selenocysteine
  MOD_RES (180)..(180): Selenocysteine
  MOD_RES (210)..(210): Selenocysteine
MXVQRLVAAAVLVALVSLILNNVAAFXSNWVCQXLEDGRRRSVGLWRSCWLVDRXRGGPSPGARAGQVDAHDCEALGWGSEAAGFQESRGXVKLQFDMMRACNLVAXAALXAGQLXFLLGLVGLPLLSPDAPCWEEAMAAAFQLASFVLVIGLVXFYRIGPYXNLSWSCYLNIGACLLAXLAAAMLIWNILHKREDCMAPRVIVISRSLXARFRRGLDNDYVESPC

SEQ ID NO: 27929 - protein, 380 aa, Homo sapiens
  MOD_RES (41)..(41): Selenocysteine
  MOD_RES (50)..(50): Selenocysteine
  MOD_RES (66)..(66): Selenocysteine
  MOD_RES (100)..(100): Selenocysteine
  MOD_RES (134)..(134): Selenocysteine
  MOD_RES (215)..(215): Selenocysteine
  MOD_RES (259)..(259): Selenocysteine
  MOD_RES (271)..(272): Selenocysteine
  MOD_RES (276)..(276): Selenocysteine
  MOD_RES (306)..(306): Selenocysteine
  MOD_RES (330)..(330): Selenocysteine
  MOD_RES (350)..(350): Selenocysteine
MAGSDVDSEGPARRGGAARRPGAPGGPGSEAAAGCPEPLSXAEAPAESAXLPAWMRLYFYGMHGIXLDVLVSSARRFARSPDLRMLGFSSPYRCLLHSLXHFALEKVYLQQRRCPNAFVFNFLLYPSAHVGLQXLAGQALLLSLGGGAGVAVAPGALDLALQYVLALYHCQVFLKRFLRLRYGRQRRRQQQQQQQQQQQQRRGALPVPPGARVPXAAGARRRRPRGPRGAGGAPSQGLPDLPRFLFFGMHGFLDEIFFXFFFNVLGQGDGXXSGHXSLWSFFMYGSCSFVVEKLYFHLHYSRGWGXWKRVPIYVIFIYVWELSWGLGLRXCGACSWDYSHYPLNFMGLIXLMYLPGWIFLSVYQDLISNVLWRVQYVPAN

SEQ ID NO: 27930 - protein, 193 aa, Homo sapiens
  MOD_RES (34)..(34): Selenocysteine
  MOD_RES (60)..(60): Selenocysteine
  MOD_RES (85)..(85): Selenocysteine
  MOD_RES (104)..(104): Selenocysteine
  MOD_RES (115)..(115): Selenocysteine
  MOD_RES (129)..(129): Selenocysteine
MALYELFSHPVERSYRAGLCSKAALFLLLAAALXYIPPLLVAFRSHGFWLKRSSYEEQPXVRFQHQVLLVALLGPESDGFLAWSXFPAFNRLQGDRLRVPLVSXREEDRNQDGKXDMLHFKLELPLQSXEHVLEDGDPRDAEHGVSPVLLSCPGIPVIRERRPEAAAEAAAELWWPRCPIQHIRDQRDQPLCL

SEQ ID NO: 27931 - protein, 268 aa, Homo sapiens
  MOD_RES (34)..(34): Selenocysteine
  MOD_RES (60)..(60): Selenocysteine
  MOD_RES (85)..(85): Selenocysteine
  MOD_RES (104)..(104): Selenocysteine
  MOD_RES (115)..(115): Selenocysteine
  MOD_RES (129)..(129): Selenocysteine
  MOD_RES (140)..(140): Selenocysteine
  MOD_RES (153)..(153): Selenocysteine
  MOD_RES (163)..(163): Selenocysteine
  MOD_RES (175)..(176): Selenocysteine
  MOD_RES (250)..(251): Selenocysteine
  MOD_RES (255)..(255): Selenocysteine
  MOD_RES (257)..(257): Selenocysteine
MALYELFSHPVERSYRAGLCSKAALFLLLAAALXYIPPLLVAFRSHGFWLKRSSYEEQPXVRFQHQVLLVALLGPESDGFLAWSXFPAFNRLQGDRLRVPLVSXREEDRNQDGKXDMLHFKLELPLQSXEHVLGVQLILXFSYRLHISVINGXSPFAYDYDLXHIVAAYQERNVXXVLNDPNPIWLVGRAADAPFVINAIIRYPVEVISYQPGFWEMVKFAWVQYVSILLIFLWVFERIKIFVFQNQVVXXIPVXVXPRGDLCKEHLS

SEQ ID NO: 27932 - protein, 316 aa, Homo sapiens
  MOD_RES (34)..(34): Selenocysteine
  MOD_RES (60)..(60): Selenocysteine
  MOD_RES (85)..(85): Selenocysteine
  MOD_RES (104)..(104): Selenocysteine
  MOD_RES (115)..(115): Selenocysteine
  MOD_RES (129)..(129): Selenocysteine
  MOD_RES (140)..(140): Selenocysteine
  MOD_RES (150)..(150): Selenocysteine
  MOD_RES (201)..(201): Selenocysteine
  MOD_RES (211)..(211): Selenocysteine
  MOD_RES (223)..(224): Selenocysteine
  MOD_RES (298)..(299): Selenocysteine
  MOD_RES (303)..(303): Selenocysteine
  MOD_RES (305)..(305): Selenocysteine
MALYELFSHPVERSYRAGLCSKAALFLLLAAALXYIPPLLVAFRSHGFWLKRSSYEEQPXVRFQHQVLLVALLGPESDGFLAWSXFPAFNRLQGDRLRVPLVSXREEDRNQDGKXDMLHFKLELPLQSXEHVLGVQLILXFSYRLHRMAXLVMQSMAFLQSSFPVPGSQLYVNGDLRLQQKQPLSCGGLDARYNISVINGXSPFAYDYDLXHIVAAYQERNVXXVLNDPNPIWLVGRAADAPFVINAIIRYPVEVISYQPGFWEMVKFAWVQYVSILLIFLWVFERIKIFVFQNQVVXXIPVXVXPRGDLCKEHLS

SEQ ID NO: 27933 - protein, 106 aa, Homo sapiens
  MOD_RES (34)..(34): Selenocysteine
  MOD_RES (60)..(60): Selenocysteine
  MOD_RES (85)..(85): Selenocysteine
MALYELFSHPVERSYRAGLCSKAALFLLLAAALXYIPPLLVAFRSHGFWLKRSSYEEQPXVRFQHQVLLVALLGPESDGFLAWSXFPAFNRLQGDRLRVPLVSWRR

SEQ ID NO: 27934 - protein, 345 aa, Homo sapiens
  MOD_RES (6)..(6): Selenocysteine
  MOD_RES (12)..(12): Selenocysteine
  MOD_RES (32)..(32): Selenocysteine
  MOD_RES (43)..(43): Selenocysteine
  MOD_RES (70)..(70): Selenocysteine
  MOD_RES (89)..(89): Selenocysteine
  MOD_RES (114)..(114): Selenocysteine
  MOD_RES (133)..(133): Selenocysteine
  MOD_RES (144)..(144): Selenocysteine
  MOD_RES (158)..(158): Selenocysteine
  MOD_RES (169)..(169): Selenocysteine
  MOD_RES (179)..(179): Selenocysteine
  MOD_RES (230)..(230): Selenocysteine
  MOD_RES (240)..(240): Selenocysteine
  MOD_RES (252)..(253): Selenocysteine
  MOD_RES (327)..(328): Selenocysteine
  MOD_RES (332)..(332): Selenocysteine
  MOD_RES (334)..(334): Selenocysteine
MSSSLXRSSAVXARGSAPKPRCSCCWPLRSRXSRRCWWPSGAXVSLPRPLCHEAPRARSARAGLPNRLPXALFNSGFWLKRSSYEEQPXVRFQHQVLLVALLGPESDGFLAWSXFPAFNRLQGDRLRVPLVSXREEDRNQDGKXDMLHFKLELPLQSXEHVLGVQLILXFSYRLHRMAXLVMQSMAFLQSSFPVPGSQLYVNGDLRLQQKQPLSCGGLDARYNISVINGXSPFAYDYDLXHIVAAYQERNVXXVLNDPNPIWLVGRAADAPFVINAIIRYPVEVISYQPGFWEMVKFAWVQYVSILLIFLWVFERIKIFVFQNQVVXXIPVXVXPRGDLCKEHLS

SEQ ID NO: 27935 - protein, 54 aa, Homo sapiens
  MOD_RES (1)..(1): Any amino acid
  MOD_RES (23)..(23): Selenocysteine
XQHQVLLVALLGPESDGFLAWSXFPAFNRLQGDRLRVPLVSVRGSRLGLGQSRG

SEQ ID NO: 27936 - protein, 400 aa, Homo sapiens
  MOD_RES (33)..(33): Selenocysteine
  MOD_RES (36)..(36): Selenocysteine
  MOD_RES (48)..(48): Selenocysteine
  MOD_RES (61)..(61): Selenocysteine
  MOD_RES (79)..(79): Selenocysteine
  MOD_RES (87)..(87): Selenocysteine
  MOD_RES (90)..(90): Selenocysteine
  MOD_RES (123)..(123): Selenocysteine
  MOD_RES (126)..(126): Selenocysteine
  MOD_RES (146)..(146): Selenocysteine
  MOD_RES (150)..(151): Selenocysteine
  MOD_RES (159)..(159): Selenocysteine
  MOD_RES (162)..(162): Selenocysteine
  MOD_RES (190)..(191): Selenocysteine
  MOD_RES (205)..(206): Selenocysteine
  MOD_RES (212)..(212): Selenocysteine
  MOD_RES (259)..(259): Selenocysteine
  MOD_RES (276)..(276): Selenocysteine
  MOD_RES (301)..(301): Selenocysteine
  MOD_RES (310)..(310): Selenocysteine
  MOD_RES (321)..(321): Selenocysteine
  MOD_RES (329)..(329): Selenocysteine
MGKNPVRPPRALPPVPSIDDIPLSRPKKKKPRXKNXPASASLEGLAQXAGRRPSEGNEPSXKELKEHPEAPVQRRQKKXRLPLELEXSSXQKKSSSSSLLRNENGIDAEPAEEAVIQKPRRKXKKXQPAELQYANELGVEDEDIIXDEQXXVEQQSVFXAPXGISQPVGKVFVEKSRRFQAADRSELIKXXENIDVSMDVKPSWXXRDVALXVHRAFRMIGLFSHGFLAGCAVWNIVVIYVLAGDQLSNLSNLLQQYKXLAYPFQSLLYLLLALSXISAFDRIDFAKISVAIRNFLALDPXALASFLYFXALILSLSQQMXSDRIHLYXPSSVNGSLWEAGIEEQILQPWIVVNLVVALLVGLSWLFLSYRPGMDLSEELMFSSEVEEYPDKEKEIKASS

SEQ ID NO: 27937 - protein, 400 aa, Homo sapiens
  MOD_RES (33)..(33): Selenocysteine
  MOD_RES (36)..(36): Selenocysteine
  MOD_RES (48)..(48): Selenocysteine
  MOD_RES (61)..(61): Selenocysteine
  MOD_RES (79)..(79): Selenocysteine
  MOD_RES (87)..(87): Selenocysteine
  MOD_RES (90)..(90): Selenocysteine
  MOD_RES (123)..(123): Selenocysteine
  MOD_RES (126)..(126): Selenocysteine
  MOD_RES (146)..(146): Selenocysteine
  MOD_RES (150)..(151): Selenocysteine
  MOD_RES (159)..(159): Selenocysteine
  MOD_RES (162)..(162): Selenocysteine
  MOD_RES (190)..(191): Selenocysteine
  MOD_RES (205)..(206): Selenocysteine
  MOD_RES (212)..(212): Selenocysteine
  MOD_RES (259)..(259): Selenocysteine
  MOD_RES (276)..(276): Selenocysteine
  MOD_RES (301)..(301): Selenocysteine
  MOD_RES (310)..(310): Selenocysteine
  MOD_RES (321)..(321): Selenocysteine
  MOD_RES (329)..(329): Selenocysteine
MGKNPVRPPRALPPVPSQDDIPLSRPKKKKPRXKNXPASASLEGLAQXAGRRPSEGNEPSXKELKEHPEAPVQRRQKKXRLPLELEXSSXQKKSSSSSLLRNENGIDAEPAEEAVIQKPRRKXKKXQPAELQYANELGVEDEDIIXDEQXXVEQQSVFXAPXGISQPVGKVFVEKSRRFQAADRSELIKXXENIDVSMDVKPSWXXRDVALXVHRAFRMIGLFSHGFLAGCAVWNIVVIYVLAGDQLSNLSNLLQQYKXLAYPFQSLLYLLLALSXISAFDRIDFAKISVAIRNFLALDPXALASFLYFXALILSLSQQMXSDRIHLYXPSSVNGSLWEAGIEEQILQPWIVVNLVVALLVGLSWLFLSYRPGMDLSEELMFSSEVEEYPDKEKEIKASS

SEQ ID NO: 27938 - protein, 118 aa, Homo sapiens
  MOD_RES (17)..(17): Selenocysteine
  MOD_RES (49)..(49): Selenocysteine
MIFHLVVLRKRSPEQKXHQQVLLWKALLRLLVEGPLRAMSHQLKNSKSXQRLLFKEDRKRQGYLLNWRLPPPKRSHLVHLYYEMKMVLMRSQLRRQLFKNLGGRQRKPSQQNYSMPMS

SEQ ID NO: 27939 - protein, 408 aa, Homo sapiens
  MOD_RES (3)..(3): Selenocysteine
  MOD_RES (41)..(41): Selenocysteine
  MOD_RES (44)..(44): Selenocysteine
  MOD_RES (56)..(56): Selenocysteine
  MOD_RES (69)..(69): Selenocysteine
  MOD_RES (87)..(87): Selenocysteine
  MOD_RES (95)..(95): Selenocysteine
  MOD_RES (98)..(98): Selenocysteine
  MOD_RES (131)..(131): Selenocysteine
  MOD_RES (134)..(134): Selenocysteine
  MOD_RES (154)..(154): Selenocysteine
  MOD_RES (158)..(159): Selenocysteine
  MOD_RES (167)..(167): Selenocysteine
  MOD_RES (170)..(170): Selenocysteine
  MOD_RES (198)..(199): Selenocysteine
  MOD_RES (213)..(214): Selenocysteine
  MOD_RES (220)..(220): Selenocysteine
  MOD_RES (267)..(267): Selenocysteine
  MOD_RES (284)..(284): Selenocysteine
  MOD_RES (309)..(309): Selenocysteine
  MOD_RES (318)..(318): Selenocysteine
  MOD_RES (329)..(329): Selenocysteine
  MOD_RES (337)..(337): Selenocysteine
MRXDSGARLEEGHLRPPRALPPVPSQDDIPLSRPKKKKPRXKNXPASASLEGLAQXAGRRPSEGNEPSXKELKEHPEAPVQRRQKKXRLPLELEXSSXQKKSSSSSLLRNENGIDAEPAEEAVIQKPRRKXKKXQPAELQYANELGVEDEDIIXDEQXXVEQQSVFXAPXGISQPVGKVFVEKSRRFQAADRSELIKXXENIDVSMDVKPSWXXRDVALXVHRAFRMIGLFSHGFLAGCAVWNIVVIYVLAGDQLSNLSNLLQQYKXLAYPFQSLLYLLLALSXISAFDRIDFAKISVAIRNFLALDPXALASFLYFXALILSLSQQMXSDRIHLYXPSSVNGSLWEAGIEEQILQPWIVVNLVVALLVGLSWLFLSYRPGMDLSEELMFSSEVEEYPDKEKEIKASS

SEQ ID NO: 27940 - protein, 96 aa, Homo sapiens
  MOD_RES (3)..(3): Selenocysteine
  MOD_RES (41)..(41): Selenocysteine
  MOD_RES (44)..(44): Selenocysteine
  MOD_RES (56)..(56): Selenocysteine
  MOD_RES (69)..(69): Selenocysteine
  MOD_RES (87)..(87): Selenocysteine
MRXDSGARLEEGHLRPPRALPPVPSQDDIPLSRPKKKKPRXKNXPASASLEGLAQXAGRRPSEGNEPSXKELKEHPEAPVQRRQKKXRLPLENGVS

SEQ ID NO: 27941 - protein, 197 aa, Homo sapiens
  MOD_RES (75)..(75): Selenocysteine
  MOD_RES (87)..(87): Selenocysteine
  MOD_RES (122)..(122): Selenocysteine
  MOD_RES (176)..(176): Selenocysteine
  MOD_RES (186)..(186): Selenocysteine
  MOD_RES (188)..(188): Selenocysteine
LCFASLALVRRYLHHLLLWVESLDSLLGVLLFVVGFIVVSFPCGWGYIVLNVAAGYLYGFVLGMGLMMVGVLIGXFIAHVVCKRLLXAWVAARIQSSEKLSAVIRVVEGGSGLKVVALARLXPIPFGLQNAVFSIIISIGLMFYVVHRAQVELNAAIVACEMELKSSLVKGNQPNXSGSSFYNKRXLXFSGGGINVV

SEQ ID NO: 27942 - protein, 51 aa, Homo sapiens
  MOD_RES (6)..(6): Selenocysteine
  MOD_RES (24)..(24): Selenocysteine
  MOD_RES (33)..(34): Selenocysteine
  MOD_RES (37)..(37): Selenocysteine
MPPRIXDLSLPNYLMASSVGLLPXQLLNSYLGXXLRXMEDVIAEQSVSGYF

SEQ ID NO: 27943 - protein, 119 aa, Homo sapiens
  MOD_RES (6)..(6): Selenocysteine
  MOD_RES (24)..(24): Selenocysteine
  MOD_RES (33)..(34): Selenocysteine
  MOD_RES (37)..(37): Selenocysteine
  MOD_RES (98)..(98): Selenocysteine
  MOD_RES (108)..(108): Selenocysteine
  MOD_RES (110)..(110): Selenocysteine
MPPRIXDLSLPNYLMASSVGLLPXQLLNSYLGXXLRXMEDVIAEQSVSGYFVFCLQIIISIGLMFYVVHRAQVELNAAIVACEMELKSSLVKGNQPNXSGSSFYNKRXLXFSGGGINVV

SEQ ID NO: 27944 - protein, 328 aa, Homo sapiens
  MOD_RES (117)..(117): Selenocysteine
  MOD_RES (206)..(206): Selenocysteine
  MOD_RES (218)..(218): Selenocysteine
  MOD_RES (253)..(253): Selenocysteine
  MOD_RES (307)..(307): Selenocysteine
  MOD_RES (317)..(317): Selenocysteine
  MOD_RES (319)..(319): Selenocysteine
MRSPGGILLQALPRLLQHAALPGLAELPARWALPRGAGGDGPADRLPRGGGASAAAAAAAASGALLGAYLERHGPPEASELPEPGGALAGGPGSGGGGVVVGVAEVRNWRCCCLGSXCWCRSLVLVCVLAALCFASLALVRRYLHHLLLWVESLDSLLGVLLFVVGFIVVSFPCGWGYIVLNVAAGYLYGFVLGMGLMMVGVLIGXFIAHVVCKRLLXAWVAARIQSSEKLSAVIRVVEGGSGLKVVALARLXPIPFGLQNAVFSIIISIGLMFYVVHRAQVELNAAIVACEMELKSSLVKGNQPNXSGSSFYNKRXLXFSGGGINVV

SEQ ID NO: 27945 - protein, 380 aa, Homo sapiens
  MOD_RES (117)..(117): Selenocysteine
  MOD_RES (206)..(206): Selenocysteine
  MOD_RES (218)..(218): Selenocysteine
  MOD_RES (253)..(253): Selenocysteine
  MOD_RES (267)..(267): Selenocysteine
  MOD_RES (285)..(285): Selenocysteine
  MOD_RES (294)..(295): Selenocysteine
  MOD_RES (298)..(298): Selenocysteine
  MOD_RES (359)..(359): Selenocysteine
  MOD_RES (369)..(369): Selenocysteine
  MOD_RES (371)..(371): Selenocysteine
MRSPGGILLQALPRLLQHAALPGLAELPARWALPRGAGGDGPADRLPRGGGASAAAAAAAASGALLGAYLERHGPPEASELPEPGGALAGGPGSGGGGVVVGVAEVRNWRCCCLGSXCWCRSLVLVCVLAALCFASLALVRRYLHHLLLWVESLDSLLGVLLFVVGFIVVSFPCGWGYIVLNVAAGYLYGFVLGMGLMMVGVLIGXFIAHVVCKRLLXAWVAARIQSSEKLSAVIRVVEGGSGLKVVALARLXPIPFGLQNAVFSIXDLSLPNYLMASSVGLLPXQLLNSYLGXXLRXMEDVIAEQSVSGYFVFCLQIIISIGLMFYVVHRAQVELNAAIVACEMELKSSLVKGNQPNXSGSSFYNKRXLXFSGGGINVV

SEQ ID NO: 27946 - protein, 126 aa, Homo sapiens
  MOD_RES (32)..(32): Selenocysteine
  MOD_RES (52)..(52): Selenocysteine
  MOD_RES (59)..(59): Selenocysteine
  MOD_RES (109)..(109): Selenocysteine
  MOD_RES (113)..(113): Selenocysteine
  MOD_RES (118)..(119): Selenocysteine
MADVPGAQRAVPGDGPEPRDPLDCWACAVLVXAQNLLVAAFNLLLLVLVLGXILLPAVXMLGFGFLCHSQDLKPGIFRPALPPPLPERSPSIPLGAAASVDPVLRKAPXSRKXHFPFXXHISILNI

SEQ ID NO: 27947 - protein, 159 aa, Homo sapiens
  MOD_RES (32)..(32): Selenocysteine
  MOD_RES (52)..(52): Selenocysteine
  MOD_RES (59)..(59): Selenocysteine
  MOD_RES (80)..(80): Selenocysteine
  MOD_RES (89)..(89): Selenocysteine
  MOD_RES (94)..(94): Selenocysteine
  MOD_RES (153)..(153): Selenocysteine
MADVPGAQRAVPGDGPEPRDPLDCWACAVLVXAQNLLVAAFNLLLLVLVLGXILLPAVXMLGFGFLCHSQFLRSQAPPCXAHLRDPGFXALLVXGFLLLVPLLVLALASYRRLCLRLRLADCLVPYSRALYRRRRAPQPRQIRASPGSQAVPXSGKVWV

SEQ ID NO: 27948 - protein, 198 aa, Homo sapiens
  MOD_RES (3)..(3): Selenocysteine
  MOD_RES (100)..(100): Selenocysteine
  MOD_RES (104)..(104): Selenocysteine
  MOD_RES (123)..(123): Selenocysteine
MAXLWGGLLRLGSLLSLSCLALSVLLLAQLSDAAKNFEDVRCKCICPPYKENSGHIYNKNISQKDCDCLHVVEPMPVRGPDVEAYCLRCECKYEERSSVXIKVXIIIYLSILGLLLLYMVYLXLVEPILKRRLFGHAQLIQSDDDIGDHQPFANAHDVLARSRSRANVLNKVEYAQQRWKLQVQEQRKSVFDRHVVLS

SEQ ID NO: 27949 - protein, 53 aa, Homo sapiens
  MOD_RES (26)..(26): Selenocysteine
  MOD_RES (30)..(30): Selenocysteine
  MOD_RES (49)..(49): Selenocysteine
MPVRGPDVEAYCLRCECKYEERSSVXIKVXIIIYLSILGLLLLYMVYLXLVEP

SEQ ID NO: 27950 - protein, 124 aa, Homo sapiens
  MOD_RES (26)..(26): Selenocysteine
  MOD_RES (30)..(30): Selenocysteine
  MOD_RES (49)..(49): Selenocysteine
MPVRGPDVEAYCLRCECKYEERSSVXIKVXIIIYLSILGLLLLYMVYLXLVEPILKRRLFGHAQLIQSDDDIGDHQPFANAHDVLARSRSRANVLNKVEYAQQRWKLQVQEQRKSVFDRHVVLS

SEQ ID NO: 27951 - protein, 95 aa, Homo sapiens
  MOD_RES (26)..(26): Selenocysteine
  MOD_RES (30)..(30): Selenocysteine
  MOD_RES (49)..(49): Selenocysteine
MPVRGPDVEAYCLRCECKYEERSSVXIKVXIIIYLSILGLLLLYMVYLXLVEPILKRRLFGHAQLIQSDDDIGVSSQPALAAHGQSLSSFDVKCK

SEQ ID NO: 27952 - protein, 278 aa, Homo sapiens
  MOD_RES (41)..(41): Selenocysteine
  MOD_RES (50)..(50): Selenocysteine
  MOD_RES (60)..(60): Selenocysteine
  MOD_RES (72)..(72): Selenocysteine
  MOD_RES (96)..(96): Selenocysteine
  MOD_RES (129)..(129): Selenocysteine
  MOD_RES (139)..(139): Selenocysteine
  MOD_RES (220)..(220): Selenocysteine
  MOD_RES (264)..(264): Selenocysteine
MGSPGMVLGLLVQIWALQEASSLSVQQGPNLLQVRQGSQAXLVCQVDQAXAWERLRVKWXKDGAILCQPYIXNGSLSLGVCGPQGRLSWQAPSHLXLQLDPVSLNHSGAYVCWAAVEIPELEEAEGNIXRLFVDPDDPXQNRNRIASFPGFLFVLLGVGSMGVAAIVWGAWFWGRRSCQQRDSGNAFYSNVLYRPRGAPKKSEDCSGEGKDQRGQSIYSXSFPQPAPRQPHLASRPCPSPRPCPSPRPGHPVSMVRVSPRPSPXQQPRPKGFPKVGEE

SEQ ID NO: 27953 - protein, 282 aa, Homo sapiens
  MOD_RES (41)..(41): Selenocysteine
  MOD_RES (50)..(50): Selenocysteine
  MOD_RES (60)..(60): Selenocysteine
  MOD_RES (72)..(72): Selenocysteine
  MOD_RES (96)..(96): Selenocysteine
  MOD_RES (129)..(129): Selenocysteine
  MOD_RES (139)..(139): Selenocysteine
  MOD_RES (224)..(224): Selenocysteine
  MOD_RES (268)..(268): Selenocysteine
MGSPGMVLGLLVQIWALQEASSLSVQQGPNLLQVRQGSQAXLVCQVDQAXAWERLRVKWXKDGAILCQPYIXNGSLSLGVCGPQGRLSWQAPSHLXLQLDPVSLNHSGAYVCWAAVEIPELEEAEGNIXRLFVDPDDPXQNRNRIASFPGFLFVLLGVGSMGVAAIVWGAWFWGRRSCQQRDSGNSPGNAFYSNVLYRPRGAPKKSEDCSGEGKDQRGQSIYSXSFPQPAPRQPHLASRPCPSPRPCPSPRPGHPVSMVRVSPRPSPXQQPRPKGFPKVGEE

SEQ ID NO: 27954 - protein, 162 aa, Homo sapiens
  MOD_RES (19)..(19): Selenocysteine
  MOD_RES (104)..(104): Selenocysteine
  MOD_RES (148)..(148): Selenocysteine
MGSPGMVLGLLVQIWDDPXQNRNRIASFPGFLFVLLGVGSMGVAAIVWGAWFWGRRSCQQRDSGNSPGNAFYSNVLYRPRGAPKKSEDCSGEGKDQRGQSIYSXSFPQPAPRQPHLASRPCPSPRPCPSPRPGHPVSMVRVSPRPSPXQQPRPKGFPKVGEE

SEQ ID NO: 27955 - protein, 110 aa, Homo sapiens
  MOD_RES (52)..(52): Selenocysteine
  MOD_RES (96)..(96): Selenocysteine
MGSPGMVLGLLVQIWGNAFYSNVLYRPRGAPKKSEDCSGEGKDQRGQSIYSXSFPQPAPRQPHLASRPCPSPRPCPSPRPGHPVSMVRVSPRPSPXQQPRPKGFPKVGEE

SEQ ID NO: 27956 - protein, 232 aa, Homo sapiens
  MOD_RES (12)..(12): Selenocysteine
  MOD_RES (41)..(41): Selenocysteine
  MOD_RES (54)..(54): Selenocysteine
  MOD_RES (59)..(59): Selenocysteine
  MOD_RES (85)..(85): Selenocysteine
  MOD_RES (107)..(107): Selenocysteine
  MOD_RES (129)..(129): Selenocysteine
  MOD_RES (153)..(153): Selenocysteine
  MOD_RES (184)..(184): Selenocysteine
  MOD_RES (193)..(193): Selenocysteine
  MOD_RES (221)..(221): Selenocysteine
MSQVLSILGMHXLMSNQQYYQALSSSSIMNKEGLNSVIKPXQYKPVPDEEPNSXDVEEXLERIKNNDPKLEEVNLNNIRNIPIPXLKAYAEALKENSYVKKFSIVGXRSNDPVAYALAEMLKENKVLKXLNVESNFISGAGILRLVEALPYNXSLVEMKIDNQSQPLGNKVEMEIVSMLEKNAXLLKFGYHFXQQGPRLRASNAMMNNNDLVRKRRLADLXGPIIPKCRSGV

SEQ ID NO: 27957 - protein, 359 aa, Homo sapiens
  MOD_RES (23)..(23): Selenocysteine
  MOD_RES (29)..(29): Selenocysteine
  MOD_RES (54)..(55): Selenocysteine
  MOD_RES (59)..(59): Selenocysteine
  MOD_RES (88)..(88): Selenocysteine
  MOD_RES (111)..(111): Selenocysteine
  MOD_RES (139)..(139): Selenocysteine
  MOD_RES (168)..(168): Selenocysteine
  MOD_RES (181)..(181): Selenocysteine
  MOD_RES (186)..(186): Selenocysteine
  MOD_RES (212)..(212): Selenocysteine
  MOD_RES (234)..(234): Selenocysteine
  MOD_RES (256)..(256): Selenocysteine
  MOD_RES (280)..(280): Selenocysteine
  MOD_RES (311)..(311): Selenocysteine
  MOD_RES (320)..(320): Selenocysteine
  MOD_RES (348)..(348): Selenocysteine
MSYRRELEKYRDLDEDEILGALXEEELRXLENELDELDPDNALLPAGLRQKDQXXKAPXGPFKREELLDHLEKQAKEFKDREDLVPYXGEKRGKVWVPKQKPLDPVLESVXLEPELEEALANASDAELCDIAAILGMHXLMSNQQYYQALSSSSIMNKEGLNSVIKPXQYKPVPDEEPNSXDVEEXLERIKNNDPKLEEVNLNNIRNIPIPXLKAYAEALKENSYVKKFSIVGXRSNDPVAYALAEMLKENKVLKXLNVESNFISGAGILRLVEALPYNXSLVEMKIDNQSQPLGNKVEMEIVSMLEKNAXLLKFGYHFXQQGPRLRASNAMMNNNDLVRKRRLADLXGPIIPKCRSGV

SEQ ID NO: 27958 - protein, 315 aa, Homo sapiens
  MOD_RES (56)..(56): Selenocysteine
  MOD_RES (61)..(61): Selenocysteine
  MOD_RES (90)..(90): Selenocysteine
  MOD_RES (107)..(107): Selenocysteine
  MOD_RES (114)..(114): Selenocysteine
  MOD_RES (129)..(129): Selenocysteine
  MOD_RES (153)..(153): Selenocysteine
  MOD_RES (183)..(183): Selenocysteine
  MOD_RES (219)..(219): Selenocysteine
  MOD_RES (221)..(221): Selenocysteine
  MOD_RES (231)..(231): Selenocysteine
  MOD_RES (233)..(233): Selenocysteine
  MOD_RES (247)..(247): Selenocysteine
  MOD_RES (249)..(249): Selenocysteine
  MOD_RES (262)..(262): Selenocysteine
  MOD_RES (286)..(286): Selenocysteine
  MOD_RES (292)..(292): Selenocysteine
  MOD_RES (299)..(299): Selenocysteine
MALPFQKELEKYKNIDEDELLGKLSEEELKQLENVLDDLDPESAMLPAGFRQKDQXQKAAXGPFDREHLLMYLEKEALEQKDREDFVPFXGEKKGRVFIPKEKPIEXRKEEKVXLDPELEEALASASDXELYDLAAVLGVHNLLNNPKFDEEXANNKGGKGPVRNVVKGEKVKPVFEEPPNPXNVEISLQQMKANDPSLQEVNLNNIKAFADMLKVNKXLXSLNIESNFIXGXGILALVEALKENDXLXEIKIDNQRQQLGXAVEMEIAQMLEENSRILKFGYQFXKQGPRXRVAAAIXKNNDLVRKKRVEADRR

SEQ ID NO: 27959 - protein, 351 aa, Homo sapiens
  MOD_RES (56)..(56): Selenocysteine
  MOD_RES (61)..(61): Selenocysteine
  MOD_RES (90)..(90): Selenocysteine
  MOD_RES (107)..(107): Selenocysteine
  MOD_RES (114)..(114): Selenocysteine
  MOD_RES (129)..(129): Selenocysteine
  MOD_RES (153)..(153): Selenocysteine
  MOD_RES (183)..(183): Selenocysteine
  MOD_RES (214)..(214): Selenocysteine
  MOD_RES (224)..(224): Selenocysteine
  MOD_RES (226)..(226): Selenocysteine
  MOD_RES (236)..(236): Selenocysteine
  MOD_RES (255)..(255): Selenocysteine
  MOD_RES (257)..(257): Selenocysteine
  MOD_RES (267)..(267): Selenocysteine
  MOD_RES (269)..(269): Selenocysteine
  MOD_RES (283)..(283): Selenocysteine
  MOD_RES (285)..(285): Selenocysteine
  MOD_RES (298)..(298): Selenocysteine
  MOD_RES (322)..(322): Selenocysteine
  MOD_RES (328)..(328): Selenocysteine
  MOD_RES (335)..(335): Selenocysteine
MALPFQKELEKYKNIDEDELLGKLSEEELKQLENVLDDLDPESAMLPAGFRQKDQXQKAAXGPFDREHLLMYLEKEALEQKDREDFVPFXGEKKGRVFIPKEKPIEXRKEEKVXLDPELEEALASASDXELYDLAAVLGVHNLLNNPKFDEEXANNKGGKGPVRNVVKGEKVKPVFEEPPNPXNVEISLQQMKANDPSLQEVNLNNIKNIPIPXLREFAKALEXNXHVKKFSLAAXRSNDPVAIAFADMLKVNKXLXSLNIESNFIXGXGILALVEALKENDXLXEIKIDNQRQQLGXAVEMEIAQMLEENSRILKFGYQFXKQGPRXRVAAAIXKNNDLVRKKRVEADRR

SEQ ID NO: 27960 - protein, 307 aa, Homo sapiens
  MOD_RES (12)..(12): Selenocysteine
  MOD_RES (17)..(17): Selenocysteine
  MOD_RES (46)..(46): Selenocysteine
  MOD_RES (63)..(63): Selenocysteine
  MOD_RES (70)..(70): Selenocysteine
  MOD_RES (85)..(85): Selenocysteine
  MOD_RES (109)..(109): Selenocysteine
  MOD_RES (139)..(139): Selenocysteine
  MOD_RES (170)..(170): Selenocysteine
  MOD_RES (180)..(180): Selenocysteine
  MOD_RES (182)..(182): Selenocysteine
  MOD_RES (192)..(192): Selenocysteine
  MOD_RES (211)..(211): Selenocysteine
  MOD_RES (213)..(213): Selenocysteine
  MOD_RES (223)..(223): Selenocysteine
  MOD_RES (225)..(225): Selenocysteine
  MOD_RES (239)..(239): Selenocysteine
  MOD_RES (241)..(241): Selenocysteine
  MOD_RES (254)..(254): Selenocysteine
  MOD_RES (278)..(278): Selenocysteine
  MOD_RES (284)..(284): Selenocysteine
  MOD_RES (291)..(291): Selenocysteine
MLPAGFRQKDQXQKAAXGPFDREHLLMYLEKEALEQKDREDFVPFXGEKKGRVFIPKEKPIEXRKEEKVXLDPELEEALASASDXELYDLAAVLGVHNLLNNPKFDEEXANNKGGKGPVRNVVKGEKVKPVFEEPPNPXNVEISLQQMKANDPSLQEVNLNNIKNIPIPXLREFAKALEXNXHVKKFSLAAXRSNDPVAIAFADMLKVNKXLXSLNIESNFIXGXGILALVEALKENDXLXEIKIDNQRQQLGXAVEMEIAQMLEENSRILKFGYQFXKQGPRXRVAAAIXKNNDLVRKKRVEADRR

SEQ ID NO: 27961 - protein, 110 aa, Homo sapiens
  MOD_RES (1)..(1): Any amino acid
  MOD_RES (14)..(14): Selenocysteine
  MOD_RES (16)..(16): Selenocysteine
  MOD_RES (26)..(26): Selenocysteine
  MOD_RES (28)..(28): Selenocysteine
  MOD_RES (42)..(42): Selenocysteine
  MOD_RES (44)..(44): Selenocysteine
  MOD_RES (57)..(57): Selenocysteine
  MOD_RES (81)..(81): Selenocysteine
  MOD_RES (87)..(87): Selenocysteine
  MOD_RES (94)..(94): Selenocysteine
XAIAFADMLKVNKXLXSLNIESNFIXGXGILALVEALKENDXLXEIKIDNQRQQLGXAVEMEIAQMLEENSRILKFGYQFXKQGPRXRVAAAIXKNNDLVRKKRVEADRR

SEQ ID NO: 27962 - protein, 71 aa, Homo sapiens
  MOD_RES (2)..(2): Selenocysteine
  MOD_RES (15)..(15): Selenocysteine
  MOD_RES (26)..(26): Selenocysteine
  MOD_RES (33)..(33): Selenocysteine
  MOD_RES (60)..(60): Selenocysteine
  MOD_RES (65)..(65): Selenocysteine
LXLDNRLDSQGVLSXPYFPSYYSPQXHCSWHLXVPSLDYGLALWFDAYALRRQKYDLPCXQGQWXIQNRRV

SEQ ID NO: 27963 - protein, 461 aa, Homo sapiens
  MOD_RES (104)..(104): Selenocysteine
  MOD_RES (115)..(115): Selenocysteine
  MOD_RES (127)..(127): Selenocysteine
  MOD_RES (129)..(129): Selenocysteine
  MOD_RES (133)..(133): Selenocysteine
  MOD_RES (149)..(149): Selenocysteine
  MOD_RES (182)..(182): Selenocysteine
  MOD_RES (218)..(218): Selenocysteine
  MOD_RES (264)..(264): Selenocysteine
  MOD_RES (287)..(287): Selenocysteine
  MOD_RES (340)..(340): Selenocysteine
  MOD_RES (353)..(353): Selenocysteine
  MOD_RES (364)..(364): Selenocysteine
  MOD_RES (371)..(371): Selenocysteine
  MOD_RES (398)..(398): Selenocysteine
  MOD_RES (403)..(403): Selenocysteine
  MOD_RES (432)..(432): Selenocysteine
MLLLFHSKRMPVAEAPQVAGGQGDGGDGEEAEPEGMFKACEDSKRKARGYLRLVPLFVLLALLVLASAGVLLWYFLGYKAEVMVSQVYSGSLRVLNRHFSQDLXRRESSAFRSEXAKAQKMLKELIXSXRLGXYYNSSSVYSFGEGPLXCFFWFILQIPEHRRLMLSPEVVQALLVEELLSXVNSSAAVPYRAEYEVDPEGLVILEASVKDIAALNSXLGCYRYSYVGQGQVLRLKGPDHLASSCLWHLQGPKDLMLKLRLEWXLAECRDRLAMYDVAGPLEKRLIXSVYGCSRQEPVVEVLASGAIMAVVWKKGLHSYYDPFVLSVQPVVFQACEVNLXLDNRLDSQGVLSXPYFPSYYSPQXHCSWHLXVPSLDYGLALWFDAYALRRQKYDLPCXQGQWXIQNRRYHFLSSLWLPFLPPPPSLPSSIVXPSLEAQVPNLRGAARGASRGWGWCQACCP

SEQ ID NO: 27964 - protein, 811 aa, Homo sapiens
  MOD_RES (104)..(104): Selenocysteine
  MOD_RES (115)..(115): Selenocysteine
  MOD_RES (127)..(127): Selenocysteine
  MOD_RES (129)..(129): Selenocysteine
  MOD_RES (133)..(133): Selenocysteine
  MOD_RES (149)..(149): Selenocysteine
  MOD_RES (182)..(182): Selenocysteine
  MOD_RES (218)..(218): Selenocysteine
  MOD_RES (264)..(264): Selenocysteine
  MOD_RES (287)..(287): Selenocysteine
  MOD_RES (340)..(340): Selenocysteine
  MOD_RES (353)..(353): Selenocysteine
  MOD_RES (364)..(364): Selenocysteine
  MOD_RES (371)..(371): Selenocysteine
  MOD_RES (398)..(398): Selenocysteine
  MOD_RES (403)..(403): Selenocysteine
  MOD_RES (427)..(427): Selenocysteine
  MOD_RES (431)..(431): Selenocysteine
  MOD_RES (435)..(435): Selenocysteine
  MOD_RES (441)..(441): Selenocysteine
  MOD_RES (494)..(494): Selenocysteine
  MOD_RES (502)..(502): Selenocysteine
  MOD_RES (533)..(533): Selenocysteine
  MOD_RES (535)..(535): Selenocysteine
  MOD_RES (614)..(614): Selenocysteine
  MOD_RES (627)..(627): Selenocysteine
  MOD_RES (631)..(631): Selenocysteine
  MOD_RES (705)..(705): Selenocysteine
  MOD_RES (742)..(742): Selenocysteine
  MOD_RES (797)..(797): Selenocysteine
  MOD_RES (800)..(800): Selenocysteine
  MOD_RES (811)..(811): Selenocysteine
MLLLFHSKRMPVAEAPQVAGGQGDGGDGEEAEPEGMFKACEDSKRKARGYLRLVPLFVLLALLVLASAGVLLWYFLGYKAEVMVSQVYSGSLRVLNRHFSQDLXRRESSAFRSEXAKAQKMLKELIXSXRLGXYYNSSSVYSFGEGPLXCFFWFILQIPEHRRLMLSPEVVQALLVEELLSXVNSSAAVPYRAEYEVDPEGLVILEASVKDIAALNSXLGCYRYSYVGQGQVLRLKGPDHLASSCLWHLQGPKDLMLKLRLEWXLAECRDRLAMYDVAGPLEKRLIXSVYGCSRQEPVVEVLASGAIMAVVWKKGLHSYYDPFVLSVQPVVFQACEVNLXLDNRLDSQGVLSXPYFPSYYSPQXHCSWHLXVPSLDYGLALWFDAYALRRQKYDLPCXQGQWXIQNRRLCGLRILQPYAERIPVVAXAGIXINFXSQISLXGPGVRVHYGLYNQSDPCPGEFLCSVNGLCVPACDGVKDCPNGLDERNCVCRAXFQCKEDSXCISLPKVCDGQPDCLNGSDEEQCQEGVPCGXFXFQCEDRSCVKKPNPQCDGRPDCRDGSDEEHCDCGLQGPSSRIVGGAVSSEGEWPWQASLQVRGRHICGGALIADRWVIXAAHCFQEDSMASXVLWXVFLGKVWQNSRWPGEVSFKVSRLLLHPYHEEDSHDYDVALLQLDHPVVRSAAVRPVCLPARSHFFEPGLHCWIXGWGALREGGPISNALQKVDVQLIPQDLCSEVYRYQVXPRMLCAGYRKGKKDACQGDSGGPLVCKALSGRWFLAGLVSWGLGCGRPNYFGVYXRIXGVISWIQQVVX

SEQ ID NO: 27965 - protein, 141 aa, Homo sapiens
  MOD_RES (95)..(95): Selenocysteine
  MOD_RES (106)..(106): Selenocysteine
  MOD_RES (118)..(118): Selenocysteine
  MOD_RES (120)..(120): Selenocysteine
  MOD_RES (124)..(124): Selenocysteine
  MOD_RES (140)..(140): Selenocysteine
MPVAEAPQVAGGQGDGGDGEEAEPEGMFKACEDSKRKARGYLRLVPLFVLLALLVLASAGVLLWYFLGYKAEVMVSQVYSGSLRVLNRHFSQDLXRRESSAFRSEXAKAQKMLKELIXSXRLGXYYNSSSVYSFGEGPLXC

SEQ ID NO: 27966 - protein, 802 aa, Homo sapiens
  MOD_RES (95)..(95): Selenocysteine
  MOD_RES (106)..(106): Selenocysteine
  MOD_RES (118)..(118): Selenocysteine
  MOD_RES (120)..(120): Selenocysteine
  MOD_RES (124)..(124): Selenocysteine
  MOD_RES (140)..(140): Selenocysteine
  MOD_RES (173)..(173): Selenocysteine
  MOD_RES (209)..(209): Selenocysteine
  MOD_RES (255)..(255): Selenocysteine
  MOD_RES (278)..(278): Selenocysteine
  MOD_RES (331)..(331): Selenocysteine
  MOD_RES (344)..(344): Selenocysteine
  MOD_RES (355)..(355): Selenocysteine
  MOD_RES (362)..(362): Selenocysteine
  MOD_RES (389)..(389): Selenocysteine
  MOD_RES (394)..(394): Selenocysteine
  MOD_RES (418)..(418): Selenocysteine
  MOD_RES (422)..(422): Selenocysteine
  MOD_RES (426)..(426): Selenocysteine
  MOD_RES (432)..(432): Selenocysteine
  MOD_RES (485)..(485): Selenocysteine
  MOD_RES (493)..(493): Selenocysteine
  MOD_RES (524)..(524): Selenocysteine
  MOD_RES (526)..(526): Selenocysteine
  MOD_RES (605)..(605): Selenocysteine
  MOD_RES (618)..(618): Selenocysteine
  MOD_RES (622)..(622): Selenocysteine
  MOD_RES (696)..(696): Selenocysteine
  MOD_RES (733)..(733): Selenocysteine
  MOD_RES (788)..(788): Selenocysteine
  MOD_RES (791)..(791): Selenocysteine
  MOD_RES (802)..(802): Selenocysteine
MPVAEAPQVAGGQGDGGDGEEAEPEGMFKACEDSKRKARGYLRLVPLFVLLALLVLASAGVLLWYFLGYKAEVMVSQVYSGSLRVLNRHFSQDLXRRESSAFRSEXAKAQKMLKELIXSXRLGXYYNSSSVYSFGEGPLXCFFWFILQIPEHRRLMLSPEVVQALLVEELLSXVNSSAAVPYRAEYEVDPEGLVILEASVKDIAALNSXLGCYRYSYVGQGQVLRLKGPDHLASSCLWHLQGPKDLMLKLRLEWXLAECRDRLAMYDVAGPLEKRLIXSVYGCSRQEPVVEVLASGAIMAVVWKKGLHSYYDPFVLSVQPVVFQACEVNLXLDNRLDSQGVLSXPYFPSYYSPQXHCSWHLXVPSLDYGLALWFDAYALRRQKYDLPCXQGQWXIQNRRLCGLRILQPYAERIPVVAXAGIXINFXSQISLXGPGVRVHYGLYNQSDPCPGEFLCSVNGLCVPACDGVKDCPNGLDERNCVCRAXFQCKEDSXCISLPKVCDGQPDCLNGSDEEQCQEGVPCGXFXFQCEDRSCVKKPNPQCDGRPDCRDGSDEEHCDCGLQGPSSRIVGGAVSSEGEWPWQASLQVRGRHICGGALIADRWVIXAAHCFQEDSMASXVLWXVFLGKVWQNSRWPGEVSFKVSRLLLHPYHEEDSHDYDVALLQLDHPVVRSAAVRPVCLPARSHFFEPGLHCWIXGWGALREGGPISNALQKVDVQLIPQDLCSEVYRYQVXPRMLCAGYRKGKKDACQGDSGGPLVCKALSGRWFLAGLVSWGLGCGRPNYFGVYXRIXGVISWIQQVVX

SEQ ID NO: 27967 - protein, 824 aa, Homo sapiens
  MOD_RES (95)..(95): Selenocysteine
  MOD_RES (106)..(106): Selenocysteine
  MOD_RES (118)..(118): Selenocysteine
  MOD_RES (120)..(120): Selenocysteine
  MOD_RES (124)..(124): Selenocysteine
  MOD_RES (140)..(140): Selenocysteine
  MOD_RES (173)..(173): Selenocysteine
  MOD_RES (209)..(209): Selenocysteine
  MOD_RES (255)..(255): Selenocysteine
  MOD_RES (278)..(278): Selenocysteine
  MOD_RES (331)..(331): Selenocysteine
  MOD_RES (344)..(344): Selenocysteine
  MOD_RES (355)..(355): Selenocysteine
  MOD_RES (362)..(362): Selenocysteine
  MOD_RES (389)..(389): Selenocysteine
  MOD_RES (394)..(394): Selenocysteine
  MOD_RES (418)..(418): Selenocysteine
  MOD_RES (422)..(422): Selenocysteine
  MOD_RES (426)..(426): Selenocysteine
  MOD_RES (432)..(432): Selenocysteine
  MOD_RES (485)..(485): Selenocysteine
  MOD_RES (493)..(493): Selenocysteine
  MOD_RES (524)..(524): Selenocysteine
  MOD_RES (526)..(526): Selenocysteine
  MOD_RES (605)..(605): Selenocysteine
  MOD_RES (618)..(618): Selenocysteine
  MOD_RES (622)..(622): Selenocysteine
  MOD_RES (696)..(696): Selenocysteine
  MOD_RES (724)..(724): Selenocysteine
  MOD_RES (755)..(755): Selenocysteine
  MOD_RES (810)..(810): Selenocysteine
  MOD_RES (813)..(813): Selenocysteine
  MOD_RES (824)..(824): Selenocysteine
MPVAEAPQVAGGQGDGGDGEEAEPEGMFKACEDSKRKARGYLRLVPLFVLLALLVLASAGVLLWYFLGYKAEVMVSQVYSGSLRVLNRHFSQDLXRRESSAFRSEXAKAQKMLKELIXSXRLGXYYNSSSVYSFGEGPLXCFFWFILQIPEHRRLMLSPEVVQALLVEELLSXVNSSAAVPYRAEYEVDPEGLVILEASVKDIAALNSXLGCYRYSYVGQGQVLRLKGPDHLASSCLWHLQGPKDLMLKLRLEWXLAECRDRLAMYDVAGPLEKRLIXSVYGCSRQEPVVEVLASGAIMAVVWKKGLHSYYDPFVLSVQPVVFQACEVNLXLDNRLDSQGVLSXPYFPSYYSPQXHCSWHLXVPSLDYGLALWFDAYALRRQKYDLPCXQGQWXIQNRRLCGLRILQPYAERIPVVAXAGIXINFXSQISLXGPGVRVHYGLYNQSDPCPGEFLCSVNGLCVPACDGVKDCPNGLDERNCVCRAXFQCKEDSXCISLPKVCDGQPDCLNGSDEEQCQEGVPCGXFXFQCEDRSCVKKPNPQCDGRPDCRDGSDEEHCDCGLQGPSSRIVGGAVSSEGEWPWQASLQVRGRHICGGALIADRWVIXAAHCFQEDSMASXVLWXVFLGKVWQNSRWPGEVSFKVSRLLLHPYHEEDSHDYDVALLQLDHPVVRSAAVRPVCLPARSHFFEPGLHCWIXGWGALREGALRADAVALFYGWRNQGSEXCCCPISNALQKVDVQLIPQDLCSEVYRYQVXPRMLCAGYRKGKKDACQGDSGGPLVCKALSGRWFLAGLVSWGLGCGRPNYFGVYXRIXGVISWIQQVVX

SEQ ID NO: 27968 - protein, 23 aa, Homo sapiens
  MOD_RES (3)..(3): Selenocysteine
  MOD_RES (18)..(18): Selenocysteine
ASXEAEPEVDNLLVSDAXPDGFR

SEQ ID NO: 27969 - protein, 92 aa, Homo sapiens
  MOD_RES (5)..(5): Selenocysteine
  MOD_RES (20)..(20): Selenocysteine
  MOD_RES (40)..(40): Selenocysteine
  MOD_RES (91)..(91): Selenocysteine
MGAMXQLLAGVFLAFLALAXEGGVLKKVIRHKRQSGVNAXLPEENQPVVFNHVYNIKLPVGSQCSVDLESASGEKDLAPPSEPSESFQEHXV

SEQ ID NO: 27970 - protein, 1564 aa, Homo sapiens
  MOD_RES (5)..(5): Selenocysteine
  MOD_RES (20)..(20): Selenocysteine
  MOD_RES (40)..(40): Selenocysteine
  MOD_RES (91)..(91): Selenocysteine
  MOD_RES (101)..(101): Selenocysteine
  MOD_RES (141)..(141): Selenocysteine
  MOD_RES (152)..(152): Selenocysteine
  MOD_RES (157)..(157): Selenocysteine
  MOD_RES (169)..(169): Selenocysteine
  MOD_RES (212)..(212): Selenocysteine
  MOD_RES (262)..(262): Selenocysteine
  MOD_RES (306)..(306): Selenocysteine
  MOD_RES (329)..(329): Selenocysteine
  MOD_RES (337)..(337): Selenocysteine
  MOD_RES (345)..(345): Selenocysteine
  MOD_RES (352)..(352): Selenocysteine
  MOD_RES (399)..(399): Selenocysteine
  MOD_RES (430)..(430): Selenocysteine
  MOD_RES (492)..(492): Selenocysteine
  MOD_RES (523)..(523): Selenocysteine
  MOD_RES (585)..(585): Selenocysteine
  MOD_RES (632)..(632): Selenocysteine
  MOD_RES (635)..(635): Selenocysteine
  MOD_RES (638)..(638): Selenocysteine
  MOD_RES (650)..(650): Selenocysteine
  MOD_RES (657)..(657): Selenocysteine
  MOD_RES (659)..(659): Selenocysteine
  MOD_RES (675)..(675): Selenocysteine
  MOD_RES (677)..(677): Selenocysteine
  MOD_RES (710)..(710): Selenocysteine
  MOD_RES (726)..(726): Selenocysteine
  MOD_RES (741)..(741): Selenocysteine
  MOD_RES (758)..(758): Selenocysteine
  MOD_RES (766)..(766): Selenocysteine
  MOD_RES (771)..(771): Selenocysteine
  MOD_RES (790)..(790): Selenocysteine
  MOD_RES (799)..(801): Selenocysteine
  MOD_RES (815)..(815): Selenocysteine
  MOD_RES (817)..(818): Selenocysteine
  MOD_RES (822)..(822): Selenocysteine
  MOD_RES (836)..(836): Selenocysteine
  MOD_RES (847)..(848): Selenocysteine
  MOD_RES (852)..(852): Selenocysteine
  MOD_RES (867)..(867): Selenocysteine
  MOD_RES (888)..(888): Selenocysteine
  MOD_RES (890)..(891): Selenocysteine
  MOD_RES (905)..(905): Selenocysteine
  MOD_RES (910)..(910): Selenocysteine
  MOD_RES (947)..(948): Selenocysteine
  MOD_RES (950)..(951): Selenocysteine
  MOD_RES (953)..(953): Selenocysteine
  MOD_RES (959)..(959): Selenocysteine
  MOD_RES (978)..(978): Selenocysteine
  MOD_RES (983)..(983): Selenocysteine
  MOD_RES (987)..(987): Selenocysteine
  MOD_RES (996)..(996): Selenocysteine
  MOD_RES (999)..(999): Selenocysteine
  MOD_RES (1002)..(1002): Selenocysteine
  MOD_RES (1007)..(1007): Selenocysteine
  MOD_RES (1023)..(1023): Selenocysteine
  MOD_RES (1035)..(1036): Selenocysteine
  MOD_RES (1054)..(1054): Selenocysteine
  MOD_RES (1071)..(1071): Selenocysteine
  MOD_RES (1085)..(1085): Selenocysteine
  MOD_RES (1090)..(1090): Selenocysteine
  MOD_RES (1097)..(1097): Selenocysteine
  MOD_RES (1106)..(1106): Selenocysteine
  MOD_RES (1111)..(1111): Selenocysteine
  MOD_RES (1114)..(1114): Selenocysteine
  MOD_RES (1119)..(1119): Selenocysteine
  MOD_RES (1123)..(1123): Selenocysteine
  MOD_RES (1125)..(1125): Selenocysteine
  MOD_RES (1127)..(1127): Selenocysteine
  MOD_RES (1159)..(1160): Selenocysteine
  MOD_RES (1170)..(1170): Selenocysteine
  MOD_RES (1174)..(1174): Selenocysteine
  MOD_RES (1188)..(1188): Selenocysteine
  MOD_RES (1197)..(1197): Selenocysteine
  MOD_RES (1205)..(1205): Selenocysteine
  MOD_RES (1207)..(1207): Selenocysteine
  MOD_RES (1212)..(1212): Selenocysteine
  MOD_RES (1218)..(1218): Selenocysteine
  MOD_RES (1224)..(1224): Selenocysteine
  MOD_RES (1227)..(1227): Selenocysteine
  MOD_RES (1241)..(1241): Selenocysteine
  MOD_RES (1243)..(1243): Selenocysteine
  MOD_RES (1247)..(1248): Selenocysteine
  MOD_RES (1257)..(1257): Selenocysteine
  MOD_RES (1259)..(1259): Selenocysteine
  MOD_RES (1265)..(1265): Selenocysteine
  MOD_RES (1269)..(1269): Selenocysteine
  MOD_RES (1278)..(1278): Selenocysteine
  MOD_RES (1290)..(1290): Selenocysteine
  MOD_RES (1300)..(1301): Selenocysteine
  MOD_RES (1312)..(1312): Selenocysteine
  MOD_RES (1315)..(1315): Selenocysteine
  MOD_RES (1332)..(1332): Selenocysteine
  MOD_RES (1335)..(1336): Selenocysteine
  MOD_RES (1356)..(1357): Selenocysteine
  MOD_RES (1362)..(1362): Selenocysteine
  MOD_RES (1380)..(1380): Selenocysteine
  MOD_RES (1428)..(1428): Selenocysteine
  MOD_RES (1445)..(1445): Selenocysteine
  MOD_RES (1460)..(1460): Selenocysteine
  MOD_RES (1472)..(1472): Selenocysteine
  MOD_RES (1487)..(1487): Selenocysteine
  MOD_RES (1492)..(1492): Selenocysteine
  MOD_RES (1497)..(1497): Selenocysteine
MGAMXQLLAGVFLAFLALAXEGGVLKKVIRHKRQSGVNAXLPEENQPVVFNHVYNIKLPVGSQCSVDLESASGEKDLAPPSEPSESFQEHXVDGENQIVFXHRINIPRRACGCAAAPDVKELLSRLEELENLVSSLREQCXAGAGCCLQPAXGRLDXRPFCSGRGNFSXEGCGCVCEPGWKGPNCSEPECPGNCHLRGRCIDGQCICDDGFXGEDCSQLACPSDCNDQGKCVNGVCICFEGYAGADCSREICPVPCSEEHGXCVDGLCVCHDGFAGDDCNKPLCLNNCYNRGRCVENECVCDEGFXGEDCSELICPNDCFDRGRCINGXCYCEEGFXGEDCGKPXCPHACHXQGRCEEGQCVCDEGFAGVDCSEKRCPADCHNRGRCVDGRCECDDGFXGADCGELKCPNGCSGHGRCVNGQCVCDEGYXGEDCSQLRCPNDCHSRGRCVEGKCVCEQGFKGYDCSDMSCPNDCHQHGRCVNGMCVCDDGYXGEDCRDRQCPRDCSNRGLCVDGQCVCEDGFXGPDCAELSCPNDCHGQGRCVNGQCVCHEGFMGKDCKEQRCPSDCHGQGRCVDGQCICHEGFXGLDCGQHSCPSDCNNLGQCVSGRCICNEGYSGEDCSEVSPPKDLVVXEVXEEXVNLAWDNEMRVXEYLVVYXPXHEGGLEMQFRVPGDQXSXIIQELEPGVEYFIRVFAILENKKSIPVSARVAXYLPAPEGLKFKSIKEXSVEVEWDPLDIAFEXWEIIFRNMNKEDEGEIXKSLRRPEXSYRQXGLAPGQEYEISLHIVKNNXRGPGLKRVXXXRLDAPSQIEVKDVXDXXALIXWFKPLAEIDGIELXYGIKDVPGDRXXIDLXEDENQYSIGNLKPDXEYEVSLISRRGDMSSNPAKEXFXXGLDAPRNLRRVSQXDNSIXLEWRNGKAAIDSYRIKYAPISGGDHAEVDVPKSQQAXXKXXLXGLRPGXEYGIGVSAVKEDKESNPAXINAAXELDXPKDLQVSEXAEXSLXLLWKXPLAKFDRYRLNYSLPXGQWVGVQLPRNXXSYVLRGLEPGQEYNVLLXAEKGRHKSKPARVKASXAMGSPKEVIFSDIXENSAXVSWRAPXAQVESFRIXYVPIXGGXPSMVXVDGXKXQXRLVKLIPGVEYLVSIIAMKGFEESEPVSGSFXXALDGPSGLVXANIXDSEALARWQPAIAXVDSYVISYXGEKVPEIXRXVSGNXVEYALXDLEPAXEYXLRIFAEKGPQKSSXIXAKFXXDLDSPRDLXAXEVQSEXALLXWRPPRASVXGYLLVYESVDGXVKEVIVGPDXXSYSLADLSPSXHYXAKIQALNGPLRSNMIQXIFXXIGLLYPFPKDCSQAMLNGDXXSGLYXIYLNGDKAEALEVFCDMXSDGGGWIVFLRRKNGRENFYQNWKAYAAGFGDRREEFWLGLDNLNKIXAQGQYELRVDLRDHGEXAFAVYDKFSVGDAKXRYKLKVEGYSGXAGDSMAYHNGRSFSXFDKDXDSAIXNCALSYKGAFWYRNCHRVNLMGRYGDNNHSQGVNWFHWKGHEHSIQFAEMKLRPSNFRNLEGRRKRA

SEQ ID NO: 27971 - protein, 1838 aa, Homo sapiens
  MOD_RES (5)..(5): Selenocysteine
  MOD_RES (20)..(20): Selenocysteine
  MOD_RES (40)..(40): Selenocysteine
  MOD_RES (91)..(91): Selenocysteine
  MOD_RES (101)..(101): Selenocysteine
  MOD_RES (141)..(141): Selenocysteine
  MOD_RES (152)..(152): Selenocysteine
  MOD_RES (157)..(157): Selenocysteine
  MOD_RES (169)..(169): Selenocysteine
  MOD_RES (212)..(212): Selenocysteine
  MOD_RES (262)..(262): Selenocysteine
  MOD_RES (306)..(306): Selenocysteine
  MOD_RES (329)..(329): Selenocysteine
  MOD_RES (337)..(337): Selenocysteine
  MOD_RES (345)..(345): Selenocysteine
  MOD_RES (352)..(352): Selenocysteine
  MOD_RES (399)..(399): Selenocysteine
  MOD_RES (430)..(430): Selenocysteine
  MOD_RES (492)..(492): Selenocysteine
  MOD_RES (523)..(523): Selenocysteine
  MOD_RES (585)..(585): Selenocysteine
  MOD_RES (632)..(632): Selenocysteine
  MOD_RES (635)..(635): Selenocysteine
  MOD_RES (638)..(638): Selenocysteine
  MOD_RES (650)..(650): Selenocysteine
  MOD_RES (657)..(657): Selenocysteine
  MOD_RES (659)..(659): Selenocysteine
  MOD_RES (675)..(675): Selenocysteine
  MOD_RES (677)..(677): Selenocysteine
  MOD_RES (710)..(710): Selenocysteine
  MOD_RES (726)..(726): Selenocysteine
  MOD_RES (741)..(741): Selenocysteine
  MOD_RES (758)..(758): Selenocysteine
  MOD_RES (766)..(766): Selenocysteine
  MOD_RES (771)..(771): Selenocysteine
  MOD_RES (790)..(790): Selenocysteine
  MOD_RES (799)..(801): Selenocysteine
  MOD_RES (815)..(815): Selenocysteine
  MOD_RES (817)..(818): Selenocysteine
  MOD_RES (822)..(822): Selenocysteine
  MOD_RES (836)..(836): Selenocysteine
  MOD_RES (847)..(848): Selenocysteine
  MOD_RES (852)..(852): Selenocysteine
  MOD_RES (867)..(867): Selenocysteine
  MOD_RES (888)..(888): Selenocysteine
  MOD_RES (890)..(891): Selenocysteine
  MOD_RES (905)..(905): Selenocysteine
  MOD_RES (910)..(910): Selenocysteine
  MOD_RES (947)..(948): Selenocysteine
  MOD_RES (950)..(951): Selenocysteine
  MOD_RES (953)..(953): Selenocysteine
  MOD_RES (959)..(959): Selenocysteine
  MOD_RES (978)..(978): Selenocysteine
  MOD_RES (983)..(983): Selenocysteine
  MOD_RES (987)..(987): Selenocysteine
  MOD_RES (996)..(996): Selenocysteine
  MOD_RES (999)..(999): Selenocysteine
  MOD_RES (1002)..(1002): Selenocysteine
  MOD_RES (1007)..(1007): Selenocysteine
  MOD_RES (1023)..(1023): Selenocysteine
  MOD_RES (1035)..(1036): Selenocysteine
  MOD_RES (1054)..(1054): Selenocysteine
  MOD_RES (1071)..(1071): Selenocysteine
  MOD_RES (1086)..(1086): Selenocysteine
  MOD_RES (1097)..(1097): Selenocysteine
  MOD_RES (1103)..(1103): Selenocysteine
  MOD_RES (1105)..(1105): Selenocysteine
  MOD_RES (1117)..(1117): Selenocysteine
  MOD_RES (1128)..(1128): Selenocysteine
  MOD_RES (1138)..(1138): Selenocysteine
  MOD_RES (1153)..(1153): Selenocysteine
  MOD_RES (1155)..(1155): Selenocysteine
  MOD_RES (1159)..(1159): Selenocysteine
  MOD_RES (1161)..(1162): Selenocysteine
  MOD_RES (1170)..(1170): Selenocysteine
  MOD_RES (1177)..(1177): Selenocysteine
  MOD_RES (1186)..(1187): Selenocysteine
  MOD_RES (1212)..(1212): Selenocysteine
  MOD_RES (1223)..(1223): Selenocysteine
  MOD_RES (1229)..(1229): Selenocysteine
  MOD_RES (1238)..(1239): Selenocysteine
  MOD_RES (1245)..(1245): Selenocysteine
  MOD_RES (1249)..(1249): Selenocysteine
  MOD_RES (1254)..(1254): Selenocysteine
  MOD_RES (1269)..(1269): Selenocysteine
  MOD_RES (1278)..(1278): Selenocysteine
  MOD_RES (1294)..(1294): Selenocysteine
  MOD_RES (1304)..(1304): Selenocysteine
  MOD_RES (1311)..(1311): Selenocysteine
  MOD_RES (1315)..(1315): Selenocysteine
  MOD_RES (1321)..(1321): Selenocysteine
  MOD_RES (1338)..(1338): Selenocysteine
  MOD_RES (1344)..(1345): Selenocysteine
  MOD_RES (1359)..(1359): Selenocysteine
  MOD_RES (1364)..(1364): Selenocysteine
  MOD_RES (1371)..(1371): Selenocysteine
  MOD_RES (1380)..(1380): Selenocysteine
  MOD_RES (1385)..(1385): Selenocysteine
  MOD_RES (1388)..(1388): Selenocysteine
  MOD_RES (1393)..(1393): Selenocysteine
  MOD_RES (1397)..(1397): Selenocysteine
  MOD_RES (1399)..(1399): Selenocysteine
  MOD_RES (1401)..(1401): Selenocysteine
  MOD_RES (1433)..(1434): Selenocysteine
  MOD_RES (1444)..(1444): Selenocysteine
  MOD_RES (1448)..(1448): Selenocysteine
  MOD_RES (1462)..(1462): Selenocysteine
  MOD_RES (1471)..(1471): Selenocysteine
  MOD_RES (1479)..(1479): Selenocysteine
  MOD_RES (1481)..(1481): Selenocysteine
  MOD_RES (1486)..(1486): Selenocysteine
  MOD_RES (1492)..(1492): Selenocysteine
  MOD_RES (1498)..(1498): Selenocysteine
  MOD_RES (1501)..(1501): Selenocysteine
  MOD_RES (1515)..(1515): Selenocysteine
  MOD_RES (1517)..(1517): Selenocysteine
  MOD_RES (1521)..(1522): Selenocysteine
  MOD_RES (1531)..(1531): Selenocysteine
  MOD_RES (1533)..(1533): Selenocysteine
  MOD_RES (1539)..(1539): Selenocysteine
  MOD_RES (1543)..(1543): Selenocysteine
  MOD_RES (1552)..(1552): Selenocysteine
  MOD_RES (1564)..(1564): Selenocysteine
  MOD_RES (1574)..(1575): Selenocysteine
  MOD_RES (1586)..(1586): Selenocysteine
  MOD_RES (1589)..(1589): Selenocysteine
  MOD_RES (1606)..(1606): Selenocysteine
  MOD_RES (1609)..(1610): Selenocysteine
  MOD_RES (1630)..(1631): Selenocysteine
  MOD_RES (1636)..(1636): Selenocysteine
  MOD_RES (1654)..(1654): Selenocysteine
  MOD_RES (1702)..(1702): Selenocysteine
  MOD_RES (1719)..(1719): Selenocysteine
  MOD_RES (1734)..(1734): Selenocysteine
  MOD_RES (1746)..(1746): Selenocysteine
  MOD_RES (1761)..(1761): Selenocysteine
  MOD_RES (1766)..(1766): Selenocysteine
  MOD_RES (1771)..(1771): Selenocysteine
MGAMXQLLAGVFLAFLALAXEGGVLKKVIRHKRQSGVNAXLPEENQPVVFNHVYNIKLPVGSQCSVDLESASGEKDLAPPSEPSESFQEHXVDGENQIVFXHRINIPRRACGCAAAPDVKELLSRLEELENLVSSLREQCXAGAGCCLQPAXGRLDXRPFCSGRGNFSXEGCGCVCEPGWKGPNCSEPECPGNCHLRGRCIDGQCICDDGFXGEDCSQLACPSDCNDQGKCVNGVCICFEGYAGADCSREICPVPCSEEHGXCVDGLCVCHDGFAGDDCNKPLCLNNCYNRGRCVENECVCDEGFXGEDCSELICPNDCFDRGRCINGXCYCEEGFXGEDCGKPXCPHACHXQGRCEEGQCVCDEGFAGVDCSEKRCPADCHNRGRCVDGRCECDDGFXGADCGELKCPNGCSGHGRCVNGQCVCDEGYXGEDCSQLRCPNDCHSRGRCVEGKCVCEQGFKGYDCSDMSCPNDCHQHGRCVNGMCVCDDGYXGEDCRDRQCPRDCSNRGLCVDGQCVCEDGFXGPDCAELSCPNDCHGQGRCVNGQCVCHEGFMGKDCKEQRCPSDCHGQGRCVDGQCICHEGFXGLDCGQHSCPSDCNNLGQCVSGRCICNEGYSGEDCSEVSPPKDLVVXEVXEEXVNLAWDNEMRVXEYLVVYXPXHEGGLEMQFRVPGDQXSXIIQELEPGVEYFIRVFAILENKKSIPVSARVAXYLPAPEGLKFKSIKEXSVEVEWDPLDIAFEXWEIIFRNMNKEDEGEIXKSLRRPEXSYRQXGLAPGQEYEISLHIVKNNXRGPGLKRVXXXRLDAPSQIEVKDVXDXXALIXWFKPLAEIDGIELXYGIKDVPGDRXXIDLXEDENQYSIGNLKPDXEYEVSLISRRGDMSSNPAKEXFXXGLDAPRNLRRVSQXDNSIXLEWRNGKAAIDSYRIKYAPISGGDHAEVDVPKSQQAXXKXXLXGLRPGXEYGIGVSAVKEDKESNPAXINAAXELDXPKDLQVSEXAEXSLXLLWKXPLAKFDRYRLNYSLPXGQWVGVQLPRNXXSYVLRGLEPGQEYNVLLXAEKGRHKSKPARVKASXAKEPEIGNLNVSDIXPESFNLSWMAXDGIFEXFXIEIIDSNRLLEXVEYNISGAERXAHISGLPPSXDFIVYLSGLAPSIRXKXISAXAXXEPKPQLGXLIFSNIXPKSFNMSWXXQAGLFAKIVINVSDAHSLHESQQFXVSGDAKQAHIXGLVENXGYDVSVAGXXLAGDPXRPLXAFVIXEAEPEVDNLLVSDAXPDGFRLSWXADEGVFDNFVLKIRDXKKQSEPLEIXLLAPERXRDIXGLREAXEYEIELYGISKGRRSQXVSAIAXXAMGSPKEVIFSDIXENSAXVSWRAPXAQVESFRIXYVPIXGGXPSMVXVDGXKXQXRLVKLIPGVEYLVSIIAMKGFEESEPVSGSFXXALDGPSGLVXANIXDSEALARWQPAIAXVDSYVISYXGEKVPEIXRXVSGNXVEYALXDLEPAXEYXLRIFAEKGPQKSSXIXAKFXXDLDSPRDLXAXEVQSEXALLXWRPPRASVXGYLLVYESVDGXVKEVIVGPDXXSYSLADLSPSXHYXAKIQALNGPLRSNMIQXIFXXIGLLYPFPKDCSQAMLNGDXXSGLYXIYLNGDKAEALEVFCDMXSDGGGWIVFLRRKNGRENFYQNWKAYAAGFGDRREEFWLGLDNLNKIXAQGQYELRVDLRDHGEXAFAVYDKFSVGDAKXRYKLKVEGYSGXAGDSMAYHNGRSFSXFDKDXDSAIXNCALSYKGAFWYRNCHRVNLMGRYGDNNHSQGVNWFHWKGHEHSIQFAEMKLRPSNFRNLEGRRKRA

SEQ ID NO: 27972 - protein, 1928 aa, Homo sapiens
  MOD_RES (5)..(5): Selenocysteine
  MOD_RES (20)..(20): Selenocysteine
  MOD_RES (40)..(40): Selenocysteine
  MOD_RES (91)..(91): Selenocysteine
  MOD_RES (101)..(101): Selenocysteine
  MOD_RES (141)..(141): Selenocysteine
  MOD_RES (152)..(152): Selenocysteine
  MOD_RES (157)..(157): Selenocysteine
  MOD_RES (169)..(169): Selenocysteine
  MOD_RES (212)..(212): Selenocysteine
  MOD_RES (262)..(262): Selenocysteine
  MOD_RES (306)..(306): Selenocysteine
  MOD_RES (329)..(329): Selenocysteine
  MOD_RES (337)..(337): Selenocysteine
  MOD_RES (345)..(345): Selenocysteine
  MOD_RES (352)..(352): Selenocysteine
  MOD_RES (399)..(399): Selenocysteine
  MOD_RES (430)..(430): Selenocysteine
  MOD_RES (492)..(492): Selenocysteine
  MOD_RES (523)..(523): Selenocysteine
  MOD_RES (585)..(585): Selenocysteine
  MOD_RES (632)..(632): Selenocysteine
  MOD_RES (635)..(635): Selenocysteine
  MOD_RES (638)..(638): Selenocysteine
  MOD_RES (650)..(650): Selenocysteine
  MOD_RES (657)..(657): Selenocysteine
  MOD_RES (659)..(659): Selenocysteine
  MOD_RES (675)..(675): Selenocysteine
  MOD_RES (677)..(677): Selenocysteine
  MOD_RES (710)..(710): Selenocysteine
  MOD_RES (726)..(726): Selenocysteine
  MOD_RES (741)..(741): Selenocysteine
  MOD_RES (758)..(758): Selenocysteine
  MOD_RES (766)..(766): Selenocysteine
  MOD_RES (771)..(771): Selenocysteine
  MOD_RES (790)..(790): Selenocysteine
  MOD_RES (799)..(801): Selenocysteine
  MOD_RES (815)..(815): Selenocysteine
  MOD_RES (817)..(818): Selenocysteine
  MOD_RES (822)..(822): Selenocysteine
  MOD_RES (836)..(836): Selenocysteine
  MOD_RES (847)..(848): Selenocysteine
  MOD_RES (852)..(852): Selenocysteine
  MOD_RES (867)..(867): Selenocysteine
  MOD_RES (888)..(888): Selenocysteine
  MOD_RES (890)..(891): Selenocysteine
  MOD_RES (905)..(905): Selenocysteine
  MOD_RES (910)..(910): Selenocysteine
  MOD_RES (947)..(948): Selenocysteine
  MOD_RES (950)..(951): Selenocysteine
  MOD_RES (953)..(953): Selenocysteine
  MOD_RES (959)..(959): Selenocysteine
  MOD_RES (978)..(978): Selenocysteine
  MOD_RES (983)..(983): Selenocysteine
  MOD_RES (987)..(987): Selenocysteine
  MOD_RES (996)..(996): Selenocysteine
  MOD_RES (999)..(999): Selenocysteine
  MOD_RES (1002)..(1002): Selenocysteine
  MOD_RES (1007)..(1007): Selenocysteine
  MOD_RES (1023)..(1023): Selenocysteine
  MOD_RES (1035)..(1036): Selenocysteine
  MOD_RES (1054)..(1054): Selenocysteine
  MOD_RES (1071)..(1071): Selenocysteine
  MOD_RES (1081)..(1081): Selenocysteine
  MOD_RES (1083)..(1083): Selenocysteine
  MOD_RES (1095)..(1095): Selenocysteine
  MOD_RES (1121)..(1121): Selenocysteine
  MOD_RES (1138)..(1138): Selenocysteine
  MOD_RES (1141)..(1141): Selenocysteine
  MOD_RES (1153)..(1153): Selenocysteine
  MOD_RES (1162)..(1162): Selenocysteine
  MOD_RES (1165)..(1165): Selenocysteine
  MOD_RES (1186)..(1186): Selenocysteine
  MOD_RES (1204)..(1204): Selenocysteine
  MOD_RES (1212)..(1212): Selenocysteine
  MOD_RES (1220)..(1220): Selenocysteine
  MOD_RES (1229)..(1229): Selenocysteine
  MOD_RES (1232)..(1232): Selenocysteine
  MOD_RES (1234)..(1234): Selenocysteine
  MOD_RES (1239)..(1239): Selenocysteine
  MOD_RES (1244)..(1245): Selenocysteine
  MOD_RES (1253)..(1253): Selenocysteine
  MOD_RES (1263)..(1263): Selenocysteine
  MOD_RES (1265)..(1265): Selenocysteine
  MOD_RES (1277)..(1278): Selenocysteine
  MOD_RES (1282)..(1282): Selenocysteine
  MOD_RES (1287)..(1287): Selenocysteine
  MOD_RES (1303)..(1303): Selenocysteine
  MOD_RES (1320)..(1320): Selenocysteine
  MOD_RES (1323)..(1323): Selenocysteine
  MOD_RES (1325)..(1325): Selenocysteine
  MOD_RES (1335)..(1335): Selenocysteine
  MOD_RES (1344)..(1344): Selenocysteine
  MOD_RES (1368)..(1368): Selenocysteine
  MOD_RES (1394)..(1394): Selenocysteine
  MOD_RES (1411)..(1411): Selenocysteine
  MOD_RES (1426)..(1426): Selenocysteine
  MOD_RES (1435)..(1435): Selenocysteine
  MOD_RES (1449)..(1449): Selenocysteine
  MOD_RES (1454)..(1454): Selenocysteine
  MOD_RES (1461)..(1461): Selenocysteine
  MOD_RES (1470)..(1470): Selenocysteine
  MOD_RES (1475)..(1475): Selenocysteine
  MOD_RES (1478)..(1478): Selenocysteine
  MOD_RES (1483)..(1483): Selenocysteine
  MOD_RES (1487)..(1487): Selenocysteine
  MOD_RES (1489)..(1489): Selenocysteine
  MOD_RES (1491)..(1491): Selenocysteine
  MOD_RES (1523)..(1524): Selenocysteine
  MOD_RES (1534)..(1534): Selenocysteine
  MOD_RES (1538)..(1538): Selenocysteine
  MOD_RES (1552)..(1552): Selenocysteine
  MOD_RES (1561)..(1561): Selenocysteine
  MOD_RES (1569)..(1569): Selenocysteine
  MOD_RES (1571)..(1571): Selenocysteine
  MOD_RES (1576)..(1576): Selenocysteine
  MOD_RES (1582)..(1582): Selenocysteine
  MOD_RES (1588)..(1588): Selenocysteine
  MOD_RES (1591)..(1591): Selenocysteine
  MOD_RES (1605)..(1605): Selenocysteine
  MOD_RES (1607)..(1607): Selenocysteine
  MOD_RES (1611)..(1612): Selenocysteine
  MOD_RES (1621)..(1621): Selenocysteine
  MOD_RES (1623)..(1623): Selenocysteine
  MOD_RES (1629)..(1629): Selenocysteine
  MOD_RES (1633)..(1633): Selenocysteine
  MOD_RES (1642)..(1642): Selenocysteine
  MOD_RES (1654)..(1654): Selenocysteine
  MOD_RES (1664)..(1665): Selenocysteine
  MOD_RES (1676)..(1676): Selenocysteine
  MOD_RES (1679)..(1679): Selenocysteine
  MOD_RES (1696)..(1696): Selenocysteine
  MOD_RES (1699)..(1700): Selenocysteine
  MOD_RES (1720)..(1721): Selenocysteine
  MOD_RES (1726)..(1726): Selenocysteine
  MOD_RES (1744)..(1744): Selenocysteine
  MOD_RES (1792)..(1792): Selenocysteine
  MOD_RES (1809)..(1809): Selenocysteine
  MOD_RES (1824)..(1824): Selenocysteine
  MOD_RES (1836)..(1836): Selenocysteine
  MOD_RES (1851)..(1851): Selenocysteine
  MOD_RES (1856)..(1856): Selenocysteine
  MOD_RES (1861)..(1861): Selenocysteine
MGAMXQLLAGVFLAFLALAXEGGVLKKVIRHKRQSGVNAXLPEENQPVVFNHVYNIKLPVGSQCSVDLESASGEKDLAPPSEPSESFQEHXVDGENQIVFXHRINIPRRACGCAAAPDVKELLSRLEELENLVSSLREQCXAGAGCCLQPAXGRLDXRPFCSGRGNFSXEGCGCVCEPGWKGPNCSEPECPGNCHLRGRCIDGQCICDDGFXGEDCSQLACPSDCNDQGKCVNGVCICFEGYAGADCSREICPVPCSEEHGXCVDGLCVCHDGFAGDDCNKPLCLNNCYNRGRCVENECVCDEGFXGEDCSELICPNDCFDRGRCINGXCYCEEGFXGEDCGKPXCPHACHXQGRCEEGQCVCDEGFAGVDCSEKRCPADCHNRGRCVDGRCECDDGFXGADCGELKCPNGCSGHGRCVNGQCVCDEGYXGEDCSQLRCPNDCHSRGRCVEGKCVCEQGFKGYDCSDMSCPNDCHQHGRCVNGMCVCDDGYXGEDCRDRQCPRDCSNRGLCVDGQCVCEDGFXGPDCAELSCPNDCHGQGRCVNGQCVCHEGFMGKDCKEQRCPSDCHGQGRCVDGQCICHEGFXGLDCGQHSCPSDCNNLGQCVSGRCICNEGYSGEDCSEVSPPKDLVVXEVXEEXVNLAWDNEMRVXEYLVVYXPXHEGGLEMQFRVPGDQXSXIIQELEPGVEYFIRVFAILENKKSIPVSARVAXYLPAPEGLKFKSIKEXSVEVEWDPLDIAFEXWEIIFRNMNKEDEGEIXKSLRRPEXSYRQXGLAPGQEYEISLHIVKNNXRGPGLKRVXXXRLDAPSQIEVKDVXDXXALIXWFKPLAEIDGIELXYGIKDVPGDRXXIDLXEDENQYSIGNLKPDXEYEVSLISRRGDMSSNPAKEXFXXGLDAPRNLRRVSQXDNSIXLEWRNGKAAIDSYRIKYAPISGGDHAEVDVPKSQQAXXKXXLXGLRPGXEYGIGVSAVKEDKESNPAXINAAXELDXPKDLQVSEXAEXSLXLLWKXPLAKFDRYRLNYSLPXGQWVGVQLPRNXXSYVLRGLEPGQEYNVLLXAEKGRHKSKPARVKASXEQAPELENLXVXEVGWDGLRLNWXAADQAYEHFIIQVQEANKVEAARNLXVPGSLRAVDIPGLKAAXPYXVSIYGVIQGYRXPVLSAEASXGEXPNLGEVVVAEVGWDALKLNWXAPEGAYEYFFIQVQEADXVEAAQNLXVPGGLRSXDLPGLKAAXHYXIXIRGVXQDFSXXPLSVEVLXEEVPDMGNLXVXEVSWDALRLNWXXPDGXYDQFXIQVQEADQVEEAHNLXVPGSLRSMEIPGLRAGXPYXVXLHGEVRGHSXRPLAVEVVXEDLPQLGDLAVSEVGWDGLRLNWXAADNAYEHFVIQVQEVNKVEAAQNLXLPGSLRAVDIPGLEAAXPYRVSIYGVIRGYRXPVLSAEASXAMGSPKEVIFSDIXENSAXVSWRAPXAQVESFRIXYVPIXGGXPSMVXVDGXKXQXRLVKLIPGVEYLVSIIAMKGFEESEPVSGSFXXALDGPSGLVXANIXDSEALARWQPAIAXVDSYVISYXGEKVPEIXRXVSGNXVEYALXDLEPAXEYXLRIFAEKGPQKSSXIXAKFXXDLDSPRDLXAXEVQSEXALLXWRPPRASVXGYLLVYESVDGXVKEVIVGPDXXSYSLADLSPSXHYXAKIQALNGPLRSNMIQXIFXXIGLLYPFPKDCSQAMLNGDXXSGLYXIYLNGDKAEALEVFCDMXSDGGGWIVFLRRKNGRENFYQNWKAYAAGFGDRREEFWLGLDNLNKIXAQGQYELRVDLRDHGEXAFAVYDKFSVGDAKXRYKLKVEGYSGXAGDSMAYHNGRSFSXFDKDXDSAIXNCALSYKGAFWYRNCHRVNLMGRYGDNNHSQGVNWFHWKGHEHSIQFAEMKLRPSNFRNLEGRRKRA

SEQ ID NO: 27973 - protein, 2019 aa, Homo sapiens
  MOD_RES (5)..(5): Selenocysteine
  MOD_RES (20)..(20): Selenocysteine
  MOD_RES (40)..(40): Selenocysteine
  MOD_RES (91)..(91): Selenocysteine
  MOD_RES (101)..(101): Selenocysteine
  MOD_RES (141)..(141): Selenocysteine
  MOD_RES (152)..(152): Selenocysteine
  MOD_RES (157)..(157): Selenocysteine
  MOD_RES (169)..(169): Selenocysteine
  MOD_RES (212)..(212): Selenocysteine
  MOD_RES (262)..(262): Selenocysteine
  MOD_RES (306)..(306): Selenocysteine
  MOD_RES (329)..(329): Selenocysteine
  MOD_RES (337)..(337): Selenocysteine
  MOD_RES (345)..(345): Selenocysteine
  MOD_RES (352)..(352): Selenocysteine
  MOD_RES (399)..(399): Selenocysteine
  MOD_RES (430)..(430): Selenocysteine
  MOD_RES (492)..(492): Selenocysteine
  MOD_RES (523)..(523): Selenocysteine
  MOD_RES (585)..(585): Selenocysteine
  MOD_RES (632)..(632): Selenocysteine
  MOD_RES (635)..(635): Selenocysteine
  MOD_RES (638)..(638): Selenocysteine
  MOD_RES (650)..(650): Selenocysteine
  MOD_RES (657)..(657): Selenocysteine
  MOD_RES (659)..(659): Selenocysteine
  MOD_RES (675)..(675): Selenocysteine
  MOD_RES (677)..(677): Selenocysteine
  MOD_RES (710)..(710): Selenocysteine
  MOD_RES (726)..(726): Selenocysteine
  MOD_RES (741)..(741): Selenocysteine
  MOD_RES (758)..(758): Selenocysteine
  MOD_RES (766)..(766): Selenocysteine
  MOD_RES (771)..(771): Selenocysteine
  MOD_RES (790)..(790): Selenocysteine
  MOD_RES (799)..(801): Selenocysteine
  MOD_RES (815)..(815): Selenocysteine
  MOD_RES (817)..(818): Selenocysteine
  MOD_RES (822)..(822): Selenocysteine
  MOD_RES (836)..(836): Selenocysteine
  MOD_RES (847)..(848): Selenocysteine
  MOD_RES (852)..(852): Selenocysteine
  MOD_RES (867)..(867): Selenocysteine
  MOD_RES (888)..(888): Selenocysteine
  MOD_RES (890)..(891): Selenocysteine
  MOD_RES (905)..(905): Selenocysteine
  MOD_RES (910)..(910): Selenocysteine
  MOD_RES (947)..(948): Selenocysteine
  MOD_RES (950)..(951): Selenocysteine
  MOD_RES (953)..(953): Selenocysteine
  MOD_RES (959)..(959): Selenocysteine
  MOD_RES (978)..(978): Selenocysteine
  MOD_RES (983)..(983): Selenocysteine
  MOD_RES (987)..(987): Selenocysteine
  MOD_RES (996)..(996): Selenocysteine
  MOD_RES (999)..(999): Selenocysteine
  MOD_RES (1002)..(1002): Selenocysteine
  MOD_RES (1007)..(1007): Selenocysteine
  MOD_RES (1023)..(1023): Selenocysteine
  MOD_RES (1035)..(1036): Selenocysteine
  MOD_RES (1054)..(1054): Selenocysteine
  MOD_RES (1071)..(1071): Selenocysteine
  MOD_RES (1081)..(1081): Selenocysteine
  MOD_RES (1083)..(1083): Selenocysteine
  MOD_RES (1095)..(1095): Selenocysteine
  MOD_RES (1121)..(1121): Selenocysteine
  MOD_RES (1138)..(1138): Selenocysteine
  MOD_RES (1141)..(1141): Selenocysteine
  MOD_RES (1153)..(1153): Selenocysteine
  MOD_RES (1162)..(1162): Selenocysteine
  MOD_RES (1165)..(1165): Selenocysteine
  MOD_RES (1186)..(1186): Selenocysteine
  MOD_RES (1204)..(1204): Selenocysteine
  MOD_RES (1212)..(1212): Selenocysteine
  MOD_RES (1220)..(1220): Selenocysteine
  MOD_RES (1229)..(1229): Selenocysteine
  MOD_RES (1232)..(1232): Selenocysteine
  MOD_RES (1234)..(1234): Selenocysteine
  MOD_RES (1239)..(1239): Selenocysteine
  MOD_RES (1244)..(1245): Selenocysteine
  MOD_RES (1253)..(1253): Selenocysteine
  MOD_RES (1277)..(1277): Selenocysteine
  MOD_RES (1303)..(1303): Selenocysteine
  MOD_RES (1320)..(1320): Selenocysteine
  MOD_RES (1335)..(1335): Selenocysteine
  MOD_RES (1344)..(1344): Selenocysteine
  MOD_RES (1359)..(1359): Selenocysteine
  MOD_RES (1370)..(1370): Selenocysteine
  MOD_RES (1376)..(1376): Selenocysteine
  MOD_RES (1378)..(1378): Selenocysteine
  MOD_RES (1390)..(1390): Selenocysteine
  MOD_RES (1401)..(1401): Selenocysteine
  MOD_RES (1411)..(1411): Selenocysteine
  MOD_RES (1426)..(1426): Selenocysteine
  MOD_RES (1428)..(1428): Selenocysteine
  MOD_RES (1432)..(1432): Selenocysteine
  MOD_RES (1434)..(1435): Selenocysteine
  MOD_RES (1450)..(1450): Selenocysteine
  MOD_RES (1459)..(1459): Selenocysteine
  MOD_RES (1475)..(1475): Selenocysteine
  MOD_RES (1485)..(1485): Selenocysteine
  MOD_RES (1492)..(1492): Selenocysteine
  MOD_RES (1496)..(1496): Selenocysteine
  MOD_RES (1502)..(1502): Selenocysteine
  MOD_RES (1519)..(1519): Selenocysteine
  MOD_RES (1525)..(1526): Selenocysteine
  MOD_RES (1540)..(1540): Selenocysteine
  MOD_RES (1545)..(1545): Selenocysteine
  MOD_RES (1552)..(1552): Selenocysteine
  MOD_RES (1561)..(1561): Selenocysteine
  MOD_RES (1566)..(1566): Selenocysteine
  MOD_RES (1569)..(1569): Selenocysteine
  MOD_RES (1574)..(1574): Selenocysteine
  MOD_RES (1578)..(1578): Selenocysteine
  MOD_RES (1580)..(1580): Selenocysteine
  MOD_RES (1582)..(1582): Selenocysteine
  MOD_RES (1614)..(1615): Selenocysteine
  MOD_RES (1625)..(1625): Selenocysteine
  MOD_RES (1629)..(1629): Selenocysteine
  MOD_RES (1643)..(1643): Selenocysteine
  MOD_RES (1652)..(1652): Selenocysteine
  MOD_RES (1660)..(1660): Selenocysteine
  MOD_RES (1662)..(1662): Selenocysteine
  MOD_RES (1667)..(1667): Selenocysteine
  MOD_RES (1673)..(1673): Selenocysteine
  MOD_RES (1679)..(1679): Selenocysteine
  MOD_RES (1682)..(1682): Selenocysteine
  MOD_RES (1696)..(1696): Selenocysteine
  MOD_RES (1698)..(1698): Selenocysteine
  MOD_RES (1702)..(1703): Selenocysteine
  MOD_RES (1712)..(1712): Selenocysteine
  MOD_RES (1714)..(1714): Selenocysteine
  MOD_RES (1720)..(1720): Selenocysteine
  MOD_RES (1724)..(1724): Selenocysteine
  MOD_RES (1733)..(1733): Selenocysteine
  MOD_RES (1745)..(1745): Selenocysteine
  MOD_RES (1755)..(1756): Selenocysteine
  MOD_RES (1767)..(1767): Selenocysteine
  MOD_RES (1770)..(1770): Selenocysteine
  MOD_RES (1787)..(1787): Selenocysteine
  MOD_RES (1790)..(1791): Selenocysteine
  MOD_RES (1811)..(1812): Selenocysteine
  MOD_RES (1817)..(1817): Selenocysteine
  MOD_RES (1835)..(1835): Selenocysteine
  MOD_RES (1883)..(1883): Selenocysteine
  MOD_RES (1900)..(1900): Selenocysteine
  MOD_RES (1915)..(1915): Selenocysteine
  MOD_RES (1927)..(1927): Selenocysteine
  MOD_RES (1942)..(1942): Selenocysteine
  MOD_RES (1947)..(1947): Selenocysteine
  MOD_RES (1952)..(1952): Selenocysteine
MGAMXQLLAGVFLAFLALAXEGGVLKKVIRHKRQSGVNAXLPEENQPVVFNHVYNIKLPVGSQCSVDLESASGEKDLAPPSEPSESFQEHXVDGENQIVFXHRINIPRRACGCAAAPDVKELLSRLEELENLVSSLREQCXAGAGCCLQPAXGRLDXRPFCSGRGNFSXEGCGCVCEPGWKGPNCSEPECPGNCHLRGRCIDGQCICDDGFXGEDCSQLACPSDCNDQGKCVNGVCICFEGYAGADCSREICPVPCSEEHGXCVDGLCVCHDGFAGDDCNKPLCLNNCYNRGRCVENECVCDEGFXGEDCSELICPNDCFDRGRCINGXCYCEEGFXGEDCGKPXCPHACHXQGRCEEGQCVCDEGFAGVDCSEKRCPADCHNRGRCVDGRCECDDGFXGADCGELKCPNGCSGHGRCVNGQCVCDEGYXGEDCSQLRCPNDCHSRGRCVEGKCVCEQGFKGYDCSDMSCPNDCHQHGRCVNGMCVCDDGYXGEDCRDRQCPRDCSNRGLCVDGQCVCEDGFXGPDCAELSCPNDCHGQGRCVNGQCVCHEGFMGKDCKEQRCPSDCHGQGRCVDGQCICHEGFXGLDCGQHSCPSDCNNLGQCVSGRCICNEGYSGEDCSEVSPPKDLVVXEVXEEXVNLAWDNEMRVXEYLVVYXPXHEGGLEMQFRVPGDQXSXIIQELEPGVEYFIRVFAILENKKSIPVSARVAXYLPAPEGLKFKSIKEXSVEVEWDPLDIAFEXWEIIFRNMNKEDEGEIXKSLRRPEXSYRQXGLAPGQEYEISLHIVKNNXRGPGLKRVXXXRLDAPSQIEVKDVXDXXALIXWFKPLAEIDGIELXYGIKDVPGDRXXIDLXEDENQYSIGNLKPDXEYEVSLISRRGDMSSNPAKEXFXXGLDAPRNLRRVSQXDNSIXLEWRNGKAAIDSYRIKYAPISGGDHAEVDVPKSQQAXXKXXLXGLRPGXEYGIGVSAVKEDKESNPAXINAAXELDXPKDLQVSEXAEXSLXLLWKXPLAKFDRYRLNYSLPXGQWVGVQLPRNXXSYVLRGLEPGQEYNVLLXAEKGRHKSKPARVKASXEQAPELENLXVXEVGWDGLRLNWXAADQAYEHFIIQVQEANKVEAARNLXVPGSLRAVDIPGLKAAXPYXVSIYGVIQGYRXPVLSAEASXGEXPNLGEVVVAEVGWDALKLNWXAPEGAYEYFFIQVQEADXVEAAQNLXVPGGLRSXDLPGLKAAXHYXIXIRGVXQDFSXXPLSVEVLXEDLPQLGDLAVSEVGWDGLRLNWXAADNAYEHFVIQVQEVNKVEAAQNLXLPGSLRAVDIPGLEAAXPYRVSIYGVIRGYRXPVLSAEASXAKEPEIGNLNVSDIXPESFNLSWMAXDGIFEXFXIEIIDSNRLLEXVEYNISGAERXAHISGLPPSXDFIVYLSGLAPSIRXKXISAXAXXEAEPEVDNLLVSDAXPDGFRLSWXADEGVFDNFVLKIRDXKKQSEPLEIXLLAPERXRDIXGLREAXEYEIELYGISKGRRSQXVSAIAXXAMGSPKEVIFSDIXENSAXVSWRAPXAQVESFRIXYVPIXGGXPSMVXVDGXKXQXRLVKLIPGVEYLVSIIAMKGFEESEPVSGSFXXALDGPSGLVXANIXDSEALARWQPAIAXVDSYVISYXGEKVPEIXRXVSGNXVEYALXDLEPAXEYXLRIFAEKGPQKSSXIXAKFXXDLDSPRDLXAXEVQSEXALLXWRPPRASVXGYLLVYESVDGXVKEVIVGPDXXSYSLADLSPSXHYXAKIQALNGPLRSNMIQXIFXXIGLLYPFPKDCSQAMLNGDXXSGLYXIYLNGDKAEALEVFCDMXSDGGGWIVFLRRKNGRENFYQNWKAYAAGFGDRREEFWLGLDNLNKIXAQGQYELRVDLRDHGEXAFAVYDKFSVGDAKXRYKLKVEGYSGXAGDSMAYHNGRSFSXFDKDXDSAIXNCALSYKGAFWYRNCHRVNLMGRYGDNNHSQGVNWFHWKGHEHSIQFAEMKLRPSNFRNLEGRRKRA

SEQ ID NO: 27974 - protein, 2201 aa, Homo sapiens
  MOD_RES (5)..(5): Selenocysteine
  MOD_RES (20)..(20): Selenocysteine
  MOD_RES (40)..(40): Selenocysteine
  MOD_RES (91)..(91): Selenocysteine
  MOD_RES (101)..(101): Selenocysteine
  MOD_RES (141)..(141): Selenocysteine
  MOD_RES (152)..(152): Selenocysteine
  MOD_RES (157)..(157): Selenocysteine
  MOD_RES (169)..(169): Selenocysteine
  MOD_RES (212)..(212): Selenocysteine
  MOD_RES (262)..(262): Selenocysteine
  MOD_RES (306)..(306): Selenocysteine
  MOD_RES (329)..(329): Selenocysteine
  MOD_RES (337)..(337): Selenocysteine
  MOD_RES (345)..(345): Selenocysteine
  MOD_RES (352)..(352): Selenocysteine
  MOD_RES (399)..(399): Selenocysteine
  MOD_RES (430)..(430): Selenocysteine
  MOD_RES (492)..(492): Selenocysteine
  MOD_RES (523)..(523): Selenocysteine
  MOD_RES (585)..(585): Selenocysteine
  MOD_RES (632)..(632): Selenocysteine
  MOD_RES (635)..(635): Selenocysteine
  MOD_RES (638)..(638): Selenocysteine
  MOD_RES (650)..(650): Selenocysteine
  MOD_RES (657)..(657): Selenocysteine
  MOD_RES (659)..(659): Selenocysteine
  MOD_RES (675)..(675): Selenocysteine
  MOD_RES (677)..(677): Selenocysteine
  MOD_RES (710)..(710): Selenocysteine
  MOD_RES (726)..(726): Selenocysteine
  MOD_RES (741)..(741): Selenocysteine
  MOD_RES (758)..(758): Selenocysteine
  MOD_RES (766)..(766): Selenocysteine
  MOD_RES (771)..(771): Selenocysteine
  MOD_RES (790)..(790): Selenocysteine
  MOD_RES (799)..(801): Selenocysteine
  MOD_RES (815)..(815): Selenocysteine
  MOD_RES (817)..(818): Selenocysteine
  MOD_RES (822)..(822): Selenocysteine
  MOD_RES (836)..(836): Selenocysteine
  MOD_RES (847)..(848): Selenocysteine
  MOD_RES (852)..(852): Selenocysteine
  MOD_RES (867)..(867): Selenocysteine
  MOD_RES (888)..(888): Selenocysteine
  MOD_RES (890)..(891): Selenocysteine
  MOD_RES (905)..(905): Selenocysteine
  MOD_RES (910)..(910): Selenocysteine
  MOD_RES (947)..(948): Selenocysteine
  MOD_RES (950)..(951): Selenocysteine
  MOD_RES (953)..(953): Selenocysteine
  MOD_RES (959)..(959): Selenocysteine
  MOD_RES (978)..(978): Selenocysteine
  MOD_RES (983)..(983): Selenocysteine
  MOD_RES (987)..(987): Selenocysteine
  MOD_RES (996)..(996): Selenocysteine
  MOD_RES (999)..(999): Selenocysteine
  MOD_RES (1002)..(1002): Selenocysteine
  MOD_RES (1007)..(1007): Selenocysteine
  MOD_RES (1023)..(1023): Selenocysteine
  MOD_RES (1035)..(1036): Selenocysteine
  MOD_RES (1054)..(1054): Selenocysteine
  MOD_RES (1071)..(1071): Selenocysteine
  MOD_RES (1081)..(1081): Selenocysteine
  MOD_RES (1083)..(1083): Selenocysteine
  MOD_RES (1095)..(1095): Selenocysteine
  MOD_RES (1121)..(1121): Selenocysteine
  MOD_RES (1138)..(1138): Selenocysteine
  MOD_RES (1141)..(1141): Selenocysteine
  MOD_RES (1153)..(1153): Selenocysteine
  MOD_RES (1162)..(1162): Selenocysteine
  MOD_RES (1165)..(1165): Selenocysteine
  MOD_RES (1186)..(1186): Selenocysteine
  MOD_RES (1204)..(1204): Selenocysteine
  MOD_RES (1212)..(1212): Selenocysteine
  MOD_RES (1220)..(1220): Selenocysteine
  MOD_RES (1229)..(1229): Selenocysteine
  MOD_RES (1232)..(1232): Selenocysteine
  MOD_RES (1234)..(1234): Selenocysteine
  MOD_RES (1239)..(1239): Selenocysteine
  MOD_RES (1244)..(1245): Selenocysteine
  MOD_RES (1253)..(1253): Selenocysteine
  MOD_RES (1263)..(1263): Selenocysteine
  MOD_RES (1265)..(1265): Selenocysteine
  MOD_RES (1277)..(1278): Selenocysteine
  MOD_RES (1282)..(1282): Selenocysteine
  MOD_RES (1287)..(1287): Selenocysteine
  MOD_RES (1303)..(1303): Selenocysteine
  MOD_RES (1320)..(1320): Selenocysteine
  MOD_RES (1323)..(1323): Selenocysteine
  MOD_RES (1325)..(1325): Selenocysteine
  MOD_RES (1335)..(1335): Selenocysteine
  MOD_RES (1344)..(1344): Selenocysteine
  MOD_RES (1368)..(1368): Selenocysteine
  MOD_RES (1394)..(1394): Selenocysteine
  MOD_RES (1411)..(1411): Selenocysteine
  MOD_RES (1426)..(1426): Selenocysteine
  MOD_RES (1435)..(1435): Selenocysteine
  MOD_RES (1450)..(1450): Selenocysteine
  MOD_RES (1461)..(1461): Selenocysteine
  MOD_RES (1467)..(1467): Selenocysteine
  MOD_RES (1469)..(1469): Selenocysteine
  MOD_RES (1481)..(1481): Selenocysteine
  MOD_RES (1492)..(1492): Selenocysteine
  MOD_RES (1502)..(1502): Selenocysteine
  MOD_RES (1517)..(1517): Selenocysteine
  MOD_RES (1519)..(1519): Selenocysteine
  MOD_RES (1523)..(1523): Selenocysteine
  MOD_RES (1525)..(1526): Selenocysteine
  MOD_RES (1536)..(1536): Selenocysteine
  MOD_RES (1546)..(1546): Selenocysteine
  MOD_RES (1562)..(1562): Selenocysteine
  MOD_RES (1576)..(1576): Selenocysteine
  MOD_RES (1580)..(1580): Selenocysteine
  MOD_RES (1591)..(1591): Selenocysteine
  MOD_RES (1603)..(1603): Selenocysteine
  MOD_RES (1608)..(1608): Selenocysteine
  MOD_RES (1617)..(1617): Selenocysteine
  MOD_RES (1632)..(1632): Selenocysteine
  MOD_RES (1641)..(1641): Selenocysteine
  MOD_RES (1657)..(1657): Selenocysteine
  MOD_RES (1667)..(1667): Selenocysteine
  MOD_RES (1674)..(1674): Selenocysteine
  MOD_RES (1678)..(1678): Selenocysteine
  MOD_RES (1684)..(1684): Selenocysteine
  MOD_RES (1701)..(1701): Selenocysteine
  MOD_RES (1707)..(1708): Selenocysteine
  MOD_RES (1722)..(1722): Selenocysteine
  MOD_RES (1727)..(1727): Selenocysteine
  MOD_RES (1734)..(1734): Selenocysteine
  MOD_RES (1743)..(1743): Selenocysteine
  MOD_RES (1748)..(1748): Selenocysteine
  MOD_RES (1751)..(1751): Selenocysteine
  MOD_RES (1756)..(1756): Selenocysteine
  MOD_RES (1760)..(1760): Selenocysteine
  MOD_RES (1762)..(1762): Selenocysteine
  MOD_RES (1764)..(1764): Selenocysteine
  MOD_RES (1796)..(1797): Selenocysteine
  MOD_RES (1807)..(1807): Selenocysteine
  MOD_RES (1811)..(1811): Selenocysteine
  MOD_RES (1825)..(1825): Selenocysteine
  MOD_RES (1834)..(1834): Selenocysteine
  MOD_RES (1842)..(1842): Selenocysteine
  MOD_RES (1844)..(1844): Selenocysteine
  MOD_RES (1849)..(1849): Selenocysteine
  MOD_RES (1855)..(1855): Selenocysteine
  MOD_RES (1861)..(1861): Selenocysteine
  MOD_RES (1864)..(1864): Selenocysteine
  MOD_RES (1878)..(1878): Selenocysteine
  MOD_RES (1880)..(1880): Selenocysteine
  MOD_RES (1884)..(1885): Selenocysteine
  MOD_RES (1894)..(1894): Selenocysteine
  MOD_RES (1896)..(1896): Selenocysteine
  MOD_RES (1902)..(1902): Selenocysteine
  MOD_RES (1906)..(1906): Selenocysteine
  MOD_RES (1915)..(1915): Selenocysteine
  MOD_RES (1927)..(1927): Selenocysteine
  MOD_RES (1937)..(1938): Selenocysteine
  MOD_RES (1949)..(1949): Selenocysteine
  MOD_RES (1952)..(1952): Selenocysteine
  MOD_RES (1969)..(1969): Selenocysteine
  MOD_RES (1972)..(1973): Selenocysteine
  MOD_RES (1993)..(1994): Selenocysteine
  MOD_RES (1999)..(1999): Selenocysteine
  MOD_RES (2017)..(2017): Selenocysteine
  MOD_RES (2065)..(2065): Selenocysteine
  MOD_RES (2082)..(2082): Selenocysteine
  MOD_RES (2097)..(2097): Selenocysteine
  MOD_RES (2109)..(2109): Selenocysteine
  MOD_RES (2124)..(2124): Selenocysteine
  MOD_RES (2129)..(2129): Selenocysteine
  MOD_RES (2134)..(2134): Selenocysteine
MGAMXQLLAGVFLAFLALAXEGGVLKKVIRHKRQSGVNAXLPEENQPVVFNHVYNIKLPVGSQCSVDLESASGEKDLAPPSEPSESFQEHXVDGENQIVFXHRINIPRRACGCAAAPDVKELLSRLEELENLVSSLREQCXAGAGCCLQPAXGRLDXRPFCSGRGNFSXEGCGCVCEPGWKGPNCSEPECPGNCHLRGRCIDGQCICDDGFXGEDCSQLACPSDCNDQGKCVNGVCICFEGYAGADCSREICPVPCSEEHGXCVDGLCVCHDGFAGDDCNKPLCLNNCYNRGRCVENECVCDEGFXGEDCSELICPNDCFDRGRCINGXCYCEEGFXGEDCGKPXCPHACHXQGRCEEGQCVCDEGFAGVDCSEKRCPADCHNRGRCVDGRCECDDGFXGADCGELKCPNGCSGHGRCVNGQCVCDEGYXGEDCSQLRCPNDCHSRGRCVEGKCVCEQGFKGYDCSDMSCPNDCHQHGRCVNGMCVCDDGYXGEDCRDRQCPRDCSNRGLCVDGQCVCEDGFXGPDCAELSCPNDCHGQGRCVNGQCVCHEGFMGKDCKEQRCPSDCHGQGRCVDGQCICHEGFXGLDCGQHSCPSDCNNLGQCVSGRCICNEGYSGEDCSEVSPPKDLVVXEVXEEXVNLAWDNEMRVXEYLVVYXPXHEGGLEMQFRVPGDQXSXIIQELEPGVEYFIRVFAILENKKSIPVSARVAXYLPAPEGLKFKSIKEXSVEVEWDPLDIAFEXWEIIFRNMNKEDEGEIXKSLRRPEXSYRQXGLAPGQEYEISLHIVKNNXRGPGLKRVXXXRLDAPSQIEVKDVXDXXALIXWFKPLAEIDGIELXYGIKDVPGDRXXIDLXEDENQYSIGNLKPDXEYEVSLISRRGDMSSNPAKEXFXXGLDAPRNLRRVSQXDNSIXLEWRNGKAAIDSYRIKYAPISGGDHAEVDVPKSQQAXXKXXLXGLRPGXEYGIGVSAVKEDKESNPAXINAAXELDXPKDLQVSEXAEXSLXLLWKXPLAKFDRYRLNYSLPXGQWVGVQLPRNXXSYVLRGLEPGQEYNVLLXAEKGRHKSKPARVKASXEQAPELENLXVXEVGWDGLRLNWXAADQAYEHFIIQVQEANKVEAARNLXVPGSLRAVDIPGLKAAXPYXVSIYGVIQGYRXPVLSAEASXGEXPNLGEVVVAEVGWDALKLNWXAPEGAYEYFFIQVQEADXVEAAQNLXVPGGLRSXDLPGLKAAXHYXIXIRGVXQDFSXXPLSVEVLXEEVPDMGNLXVXEVSWDALRLNWXXPDGXYDQFXIQVQEADQVEEAHNLXVPGSLRSMEIPGLRAGXPYXVXLHGEVRGHSXRPLAVEVVXEDLPQLGDLAVSEVGWDGLRLNWXAADNAYEHFVIQVQEVNKVEAAQNLXLPGSLRAVDIPGLEAAXPYRVSIYGVIRGYRXPVLSAEASXAKEPEIGNLNVSDIXPESFNLSWMAXDGIFEXFXIEIIDSNRLLEXVEYNISGAERXAHISGLPPSXDFIVYLSGLAPSIRXKXISAXAXXEALPLLENLXISDINPYGFXVSWMASENAFDSFLVXVVDSGKLLDPQEFXLSGXQRKLELRGLIXGIGYEVMVSGFXQGHQXKPLRAEIVXEAEPEVDNLLVSDAXPDGFRLSWXADEGVFDNFVLKIRDXKKQSEPLEIXLLAPERXRDIXGLREAXEYEIELYGISKGRRSQXVSAIAXXAMGSPKEVIFSDIXENSAXVSWRAPXAQVESFRIXYVPIXGGXPSMVXVDGXKXQXRLVKLIPGVEYLVSIIAMKGFEESEPVSGSFXXALDGPSGLVXANIXDSEALARWQPAIAXVDSYVISYXGEKVPEIXRXVSGNXVEYALXDLEPAXEYXLRIFAEKGPQKSSXIXAKFXXDLDSPRDLXAXEVQSEXALLXWRPPRASVXGYLLVYESVDGXVKEVIVGPDXXSYSLADLSPSXHYXAKIQALNGPLRSNMIQXIFXXIGLLYPFPKDCSQAMLNGDXXSGLYXIYLNGDKAEALEVFCDMXSDGGGWIVFLRRKNGRENFYQNWKAYAAGFGDRREEFWLGLDNLNKIXAQGQYELRVDLRDHGEXAFAVYDKFSVGDAKXRYKLKVEGYSGXAGDSMAYHNGRSFSXFDKDXDSAIXNCALSYKGAFWYRNCHRVNLMGRYGDNNHSQGVNWFHWKGHEHSIQFAEMKLRPSNFRNLEGRRKRA

SEQ ID NO: 27975 - protein, 615 aa, Homo sapiens
  MOD_RES (1)..(1): Any amino acid
  MOD_RES (8)..(8): Selenocysteine
  MOD_RES (10)..(10): Selenocysteine
  MOD_RES (22)..(22): Selenocysteine
  MOD_RES (48)..(48): Selenocysteine
  MOD_RES (65)..(65): Selenocysteine
  MOD_RES (68)..(68): Selenocysteine
  MOD_RES (80)..(80): Selenocysteine
  MOD_RES (89)..(89): Selenocysteine
  MOD_RES (104)..(104): Selenocysteine
  MOD_RES (115)..(115): Selenocysteine
  MOD_RES (121)..(121): Selenocysteine
  MOD_RES (123)..(123): Selenocysteine
  MOD_RES (135)..(135): Selenocysteine
  MOD_RES (146)..(146): Selenocysteine
  MOD_RES (156)..(156): Selenocysteine
  MOD_RES (171)..(171): Selenocysteine
  MOD_RES (173)..(173): Selenocysteine
  MOD_RES (177)..(177): Selenocysteine
  MOD_RES (179)..(180): Selenocysteine
  MOD_RES (195)..(195): Selenocysteine
  MOD_RES (204)..(204): Selenocysteine
  MOD_RES (220)..(220): Selenocysteine
  MOD_RES (230)..(230): Selenocysteine
  MOD_RES (237)..(237): Selenocysteine
  MOD_RES (241)..(241): Selenocysteine
  MOD_RES (247)..(247): Selenocysteine
  MOD_RES (264)..(264): Selenocysteine
  MOD_RES (270)..(271): Selenocysteine
  MOD_RES (285)..(285): Selenocysteine
  MOD_RES (290)..(290): Selenocysteine
  MOD_RES (297)..(297): Selenocysteine
  MOD_RES (306)..(306): Selenocysteine
  MOD_RES (311)..(311): Selenocysteine
  MOD_RES (314)..(314): Selenocysteine
  MOD_RES (319)..(319): Selenocysteine
  MOD_RES (323)..(323): Selenocysteine
  MOD_RES (325)..(325): Selenocysteine
  MOD_RES (327)..(327): Selenocysteine
  MOD_RES (359)..(360): Selenocysteine
  MOD_RES (370)..(370): Selenocysteine
  MOD_RES (374)..(374): Selenocysteine
  MOD_RES (388)..(388): Selenocysteine
  MOD_RES (397)..(397): Selenocysteine
  MOD_RES (405)..(405): Selenocysteine
  MOD_RES (407)..(407): Selenocysteine
  MOD_RES (412)..(412): Selenocysteine
  MOD_RES (418)..(418): Selenocysteine
  MOD_RES (424)..(424): Selenocysteine
  MOD_RES (427)..(427): Selenocysteine
  MOD_RES (441)..(441): Selenocysteine
  MOD_RES (443)..(443): Selenocysteine
  MOD_RES (447)..(448): Selenocysteine
  MOD_RES (457)..(457): Selenocysteine
  MOD_RES (459)..(459): Selenocysteine
  MOD_RES (465)..(465): Selenocysteine
  MOD_RES (469)..(469): Selenocysteine
  MOD_RES (478)..(478): Selenocysteine
  MOD_RES (490)..(490): Selenocysteine
  MOD_RES (500)..(501): Selenocysteine
  MOD_RES (512)..(512): Selenocysteine
  MOD_RES (515)..(515): Selenocysteine
  MOD_RES (532)..(532): Selenocysteine
  MOD_RES (535)..(536): Selenocysteine
  MOD_RES (556)..(557): Selenocysteine
  MOD_RES (562)..(562): Selenocysteine
  MOD_RES (580)..(580): Selenocysteine
XPELENLXVXEVGWDGLRLNWXAADQAYEHFIIQVQEANKVEAARNLXVPGSLRAVDIPGLKAAXPYXVSIYGVIQGYRXPVLSAEASXAKEPEIGNLNVSDIXPESFNLSWMAXDGIFEXFXIEIIDSNRLLEXVEYNISGAERXAHISGLPPSXDFIVYLSGLAPSIRXKXISAXAXXEAEPEVDNLLVSDAXPDGFRLSWXADEGVFDNFVLKIRDXKKQSEPLEIXLLAPERXRDIXGLREAXEYEIELYGISKGRRSQXVSAIAXXAMGSPKEVIFSDIXENSAXVSWRAPXAQVESFRIXYVPIXGGXPSMVXVDGXKXQXRLVKLIPGVEYLVSIIAMKGFEESEPVSGSFXXALDGPSGLVXANIXDSEALARWQPAIAXVDSYVISYXGEKVPEIXRXVSGNXVEYALXDLEPAXEYXLRIFAEKGPQKSSXIXAKFXXDLDSPRDLXAXEVQSEXALLXWRPPRASVXGYLLVYESVDGXVKEVIVGPDXXSYSLADLSPSXHYXAKIQALNGPLRSNMIQXIFXXIGLLYPFPKDCSQAMLNGDXXSGLYXIYLNGDKAEALEVFCDMXSDGGGWIVFLRRKNGRENFYQNWKAYAAGFGDRRE

SEQ ID NO: 27976 - protein, 233 aa, Homo sapiens
  MOD_RES (3)..(3): Selenocysteine
  MOD_RES (21)..(21): Selenocysteine
  MOD_RES (45)..(46): Selenocysteine
  MOD_RES (83)..(83): Selenocysteine
  MOD_RES (148)..(148): Selenocysteine
  MOD_RES (153)..(153): Selenocysteine
  MOD_RES (155)..(155): Selenocysteine
  MOD_RES (165)..(165): Selenocysteine
  MOD_RES (181)..(181): Selenocysteine
MSXESMIRDVELAEEALPKKXGGPQGSRRCLFLSLFSFLIVAGAXXLFCLLHFGVIGPQREEFPRDLSLISPLAQAVRSSSRXPSDKPVAHVVANPQAEGQLQWLNRRANALLANGVELRDNQLVVPSEGLYLIYSQVLFKGQGCPSXHVLLXHXISRIAVSYQXKVNLLSAIKSPCQREXPEGAEAKPWYEPIYLGGVFQLEKGDRLSAEINRPDYLDFAESGQVYFGIIAL

SEQ ID NO: 27977 - protein, 212 aa, Homo sapiens
  MOD_RES (37)..(37): Selenocysteine
  MOD_RES (50)..(50): Selenocysteine
  MOD_RES (68)..(68): Selenocysteine
  MOD_RES (122)..(122): Selenocysteine
  MOD_RES (128)..(128): Selenocysteine
  MOD_RES (133)..(133): Selenocysteine
  MOD_RES (146)..(146): Selenocysteine
  MOD_RES (154)..(154): Selenocysteine
  MOD_RES (166)..(166): Selenocysteine
  MOD_RES (181)..(181): Selenocysteine
  MOD_RES (198)..(198): Selenocysteine
  MOD_RES (209)..(209): Selenocysteine
MAEAKYYLIQGLVNMCQSALQDKKDSYQPVCNIPIIXSLKEEERLIESSXKPVVKLLYNRSNNKYSYXSNSDDHLLKNIELFDKLSLRFNGRVLFIKDVIGDEICCWSFYGQGRKLAEVCCXSIVYAXEKKQXKVEFPEARIYEEXLNVLLYEXPRVPDNSLLEAXSRSRSQASPSEDEEXFELRDRVRRIHVKRYSXYDDRQLGHQSXHRD

SEQ ID NO: 27978 - protein, 157 aa, Homo sapiens
  MOD_RES (37)..(37): Selenocysteine
  MOD_RES (50)..(50): Selenocysteine
  MOD_RES (68)..(68): Selenocysteine
  MOD_RES (122)..(122): Selenocysteine
  MOD_RES (128)..(128): Selenocysteine
  MOD_RES (133)..(133): Selenocysteine
  MOD_RES (147)..(147): Selenocysteine
MAEAKYYLIQGLVNMCQSALQDKKDSYQPVCNIPIIXSLKEEERLIESSXKPVVKLLYNRSNNKYSYXSNSDDHLLKNIELFDKLSLRFNGRVLFIKDVIGDEICCWSFYGQGRKLAEVCCXSIVYAXEKKQXKVWGIAPAWVGEDXHPLCGGRGRA

SEQ ID NO: 27979 - protein, 107 aa, Homo sapiens
  MOD_RES (5)..(5): Selenocysteine
  MOD_RES (41)..(42): Selenocysteine
  MOD_RES (47)..(47): Selenocysteine
  MOD_RES (51)..(51): Selenocysteine
  MOD_RES (65)..(65): Selenocysteine
  MOD_RES (82)..(82): Selenocysteine
  MOD_RES (91)..(91): Selenocysteine
  MOD_RES (93)..(93): Selenocysteine
MSGDXCLCPASGAKPKLSGFKGGGLGNKYVQLNVGGSLYYXXVRALXRHDXMLKAMFSGRMEVLXDKEGWILIDRCGKHFGXILNYLRDDXIXLPQNRQEIKELMAE

SEQ ID NO: 27980 - protein, 125 aa, Homo sapiens
  MOD_RES (5)..(5): Selenocysteine
  MOD_RES (41)..(42): Selenocysteine
  MOD_RES (47)..(47): Selenocysteine
  MOD_RES (51)..(51): Selenocysteine
  MOD_RES (65)..(65): Selenocysteine
  MOD_RES (82)..(82): Selenocysteine
  MOD_RES (91)..(91): Selenocysteine
  MOD_RES (93)..(93): Selenocysteine
MSGDXCLCPASGAKPKLSGFKGGGLGNKYVQLNVGGSLYYXXVRALXRHDXMLKAMFSGRMEVLXDKEGWILIDRCGKHFGXILNYLRDDXIXLPQNRQEIKELMAEAKYYLIQGLVNMCQSALQ

SEQ ID NO: 27981 - protein, 316 aa, Homo sapiens
  MOD_RES (5)..(5): Selenocysteine
  MOD_RES (41)..(42): Selenocysteine
  MOD_RES (47)..(47): Selenocysteine
  MOD_RES (51)..(51): Selenocysteine
  MOD_RES (65)..(65): Selenocysteine
  MOD_RES (82)..(82): Selenocysteine
  MOD_RES (91)..(91): Selenocysteine
  MOD_RES (93)..(93): Selenocysteine
  MOD_RES (141)..(141): Selenocysteine
  MOD_RES (154)..(154): Selenocysteine
  MOD_RES (172)..(172): Selenocysteine
  MOD_RES (226)..(226): Selenocysteine
  MOD_RES (232)..(232): Selenocysteine
  MOD_RES (237)..(237): Selenocysteine
  MOD_RES (250)..(250): Selenocysteine
  MOD_RES (258)..(258): Selenocysteine
  MOD_RES (270)..(270): Selenocysteine
  MOD_RES (285)..(285): Selenocysteine
  MOD_RES (302)..(302): Selenocysteine
  MOD_RES (313)..(313): Selenocysteine
MSGDXCLCPASGAKPKLSGFKGGGLGNKYVQLNVGGSLYYXXVRALXRHDXMLKAMFSGRMEVLXDKEGWILIDRCGKHFGXILNYLRDDXIXLPQNRQEIKELMAEAKYYLIQGLVNMCQSALQDKKDSYQPVCNIPIIXSLKEEERLIESSXKPVVKLLYNRSNNKYSYXSNSDDHLLKNIELFDKLSLRFNGRVLFIKDVIGDEICCWSFYGQGRKLAEVCCXSIVYAXEKKQXKVEFPEARIYEEXLNVLLYEXPRVPDNSLLEAXSRSRSQASPSEDEEXFELRDRVRRIHVKRYSXYDDRQLGHQSXHRD

SEQ ID NO: 27982 - protein, 26 aa, Homo sapiens
  MOD_RES (25)..(25): Selenocysteine
MAEQVLPQALYLSNMRKAVKIRERXP

SEQ ID NO: 27983 - protein, 98 aa, Homo sapiens
  MOD_RES (25)..(25): Selenocysteine
  MOD_RES (33)..(33): Selenocysteine
  MOD_RES (42)..(42): Selenocysteine
  MOD_RES (47)..(47): Selenocysteine
  MOD_RES (53)..(53): Selenocysteine
  MOD_RES (76)..(76): Selenocysteine
  MOD_RES (97)..(97): Selenocysteine
MAEQVLPQALYLSNMRKAVKIRERXPEDIFKPXNGIIHHFKXMHRYXLEMFRXCQFCPQFREIIHKALIDRNIQAXLESQKKLNWCREVRKLVALKXN

SEQ ID NO: 27984 - protein, 162 aa, Homo sapiens
  MOD_RES (25)..(25): Selenocysteine
  MOD_RES (33)..(33): Selenocysteine
  MOD_RES (42)..(42): Selenocysteine
  MOD_RES (47)..(47): Selenocysteine
  MOD_RES (53)..(53): Selenocysteine
  MOD_RES (76)..(76): Selenocysteine
  MOD_RES (97)..(97): Selenocysteine
  MOD_RES (108)..(108): Selenocysteine
  MOD_RES (118)..(118): Selenocysteine
  MOD_RES (129)..(129): Selenocysteine
  MOD_RES (133)..(133): Selenocysteine
  MOD_RES (135)..(135): Selenocysteine
  MOD_RES (155)..(155): Selenocysteine
  MOD_RES (161)..(161): Selenocysteine
MAEQVLPQALYLSNMRKAVKIRERXPEDIFKPXNGIIHHFKXMHRYXLEMFRXCQFCPQFREIIHKALIDRNIQAXLESQKKLNWCREVRKLVALKXNGDGNCLMHAXSQYMWGVQDXDLVLRKALFSXLKEXDXRNFKFRWQLESLKSQEFVEXGLCYDXR

SEQ ID NO: 27985 - protein, 470 aa, Homo sapiens
  MOD_RES (25)..(25): Selenocysteine
  MOD_RES (33)..(33): Selenocysteine
  MOD_RES (42)..(42): Selenocysteine
  MOD_RES (47)..(47): Selenocysteine
  MOD_RES (53)..(53): Selenocysteine
  MOD_RES (76)..(76): Selenocysteine
  MOD_RES (97)..(97): Selenocysteine
  MOD_RES (108)..(108): Selenocysteine
  MOD_RES (118)..(118): Selenocysteine
  MOD_RES (129)..(129): Selenocysteine
  MOD_RES (133)..(133): Selenocysteine
  MOD_RES (135)..(135): Selenocysteine
  MOD_RES (155)..(155): Selenocysteine
  MOD_RES (161)..(161): Selenocysteine
  MOD_RES (177)..(177): Selenocysteine
  MOD_RES (179)..(179): Selenocysteine
  MOD_RES (262)..(262): Selenocysteine
  MOD_RES (292)..(292): Selenocysteine
  MOD_RES (321)..(322): Selenocysteine
  MOD_RES (389)..(389): Selenocysteine
  MOD_RES (400)..(400): Selenocysteine
  MOD_RES (454)..(454): Selenocysteine
  MOD_RES (461)..(461): Selenocysteine
  MOD_RES (464)..(464): Selenocysteine
MAEQVLPQALYLSNMRKAVKIRERXPEDIFKPXNGIIHHFKXMHRYXLEMFRXCQFCPQFREIIHKALIDRNIQAXLESQKKLNWCREVRKLVALKXNGDGNCLMHAXSQYMWGVQDXDLVLRKALFSXLKEXDXRNFKFRWQLESLKSQEFVEXGLCYDXRNWNDEWDNLIKMASXDXPMARSGLQYNSLEEIHIFVLCNILRRPIIVISDKMLRSLESGSNFAPLKVGGIYLPLHWPAQECYRYPIVLGYDSHHFVPLVXLKDSGPEIRAVPLVNRDRGRFEDLKVHFLXDPENEMKEKLLKEYLMVIEIPVQGWDHGXXHLINAAKLDEANLPKEINLVDDYFELVQHEYKKWQENSEQGRREGHAQNPMEPSVPQLSLMDVKCEXPNCPFFMSVNXQPLCHECSERRQKNQNKLPKLNSKPGPEGLPGMALGASRGEAYEPLAWNPEESXGGSFGPXDSXQPFSVQ

SEQ ID NO: 27986 - protein, 531 aa, Homo sapiens
  MOD_RES (25)..(25): Selenocysteine
  MOD_RES (33)..(33): Selenocysteine
  MOD_RES (42)..(42): Selenocysteine
  MOD_RES (47)..(47): Selenocysteine
  MOD_RES (53)..(53): Selenocysteine
  MOD_RES (76)..(76): Selenocysteine
  MOD_RES (97)..(97): Selenocysteine
  MOD_RES (108)..(108): Selenocysteine
  MOD_RES (118)..(118): Selenocysteine
  MOD_RES (129)..(129): Selenocysteine
  MOD_RES (133)..(133): Selenocysteine
  MOD_RES (135)..(135): Selenocysteine
  MOD_RES (155)..(155): Selenocysteine
  MOD_RES (161)..(161): Selenocysteine
  MOD_RES (177)..(177): Selenocysteine
  MOD_RES (179)..(179): Selenocysteine
  MOD_RES (262)..(262): Selenocysteine
  MOD_RES (292)..(292): Selenocysteine
  MOD_RES (321)..(322): Selenocysteine
  MOD_RES (389)..(389): Selenocysteine
  MOD_RES (400)..(400): Selenocysteine
  MOD_RES (454)..(454): Selenocysteine
  MOD_RES (463)..(463): Selenocysteine
  MOD_RES (473)..(474): Selenocysteine
  MOD_RES (486)..(486): Selenocysteine
MAEQVLPQALYLSNMRKAVKIRERXPEDIFKPXNGIIHHFKXMHRYXLEMFRXCQFCPQFREIIHKALIDRNIQAXLESQKKLNWCREVRKLVALKXNGDGNCLMHAXSQYMWGVQDXDLVLRKALFSXLKEXDXRNFKFRWQLESLKSQEFVEXGLCYDXRNWNDEWDNLIKMASXDXPMARSGLQYNSLEEIHIFVLCNILRRPIIVISDKMLRSLESGSNFAPLKVGGIYLPLHWPAQECYRYPIVLGYDSHHFVPLVXLKDSGPEIRAVPLVNRDRGRFEDLKVHFLXDPENEMKEKLLKEYLMVIEIPVQGWDHGXXHLINAAKLDEANLPKEINLVDDYFELVQHEYKKWQENSEQGRREGHAQNPMEPSVPQLSLMDVKCEXPNCPFFMSVNXQPLCHECSERRQKNQNKLPKLNSKPGPEGLPGMALGASRGEAYEPLAWNPEESXGGPHSAPPXAPSPFLFSEXXAMKCRSPGCPFXLNVQHNGFCERCHNARQLRQPRPRPHKALGSREVPSLPPGCYQDI

SEQ ID NO: 27987 - protein, 669 aa, Homo sapiens
  MOD_RES (25)..(25): Selenocysteine
  MOD_RES (33)..(33): Selenocysteine
  MOD_RES (42)..(42): Selenocysteine
  MOD_RES (47)..(47): Selenocysteine
  MOD_RES (53)..(53): Selenocysteine
  MOD_RES (76)..(76): Selenocysteine
  MOD_RES (97)..(97): Selenocysteine
  MOD_RES (108)..(108): Selenocysteine
  MOD_RES (118)..(118): Selenocysteine
  MOD_RES (129)..(129): Selenocysteine
  MOD_RES (133)..(133): Selenocysteine
  MOD_RES (135)..(135): Selenocysteine
  MOD_RES (155)..(155): Selenocysteine
  MOD_RES (161)..(161): Selenocysteine
  MOD_RES (177)..(177): Selenocysteine
  MOD_RES (179)..(179): Selenocysteine
  MOD_RES (262)..(262): Selenocysteine
  MOD_RES (292)..(292): Selenocysteine
  MOD_RES (321)..(322): Selenocysteine
  MOD_RES (389)..(389): Selenocysteine
  MOD_RES (400)..(400): Selenocysteine
  MOD_RES (454)..(454): Selenocysteine
  MOD_RES (463)..(463): Selenocysteine
  MOD_RES (473)..(474): Selenocysteine
  MOD_RES (486)..(486): Selenocysteine
  MOD_RES (513)..(513): Selenocysteine
  MOD_RES (529)..(529): Selenocysteine
  MOD_RES (531)..(531): Selenocysteine
  MOD_RES (538)..(538): Selenocysteine
  MOD_RES (543)..(544): Selenocysteine
  MOD_RES (553)..(553): Selenocysteine
  MOD_RES (597)..(597): Selenocysteine
  MOD_RES (602)..(602): Selenocysteine
  MOD_RES (604)..(604): Selenocysteine
  MOD_RES (617)..(617): Selenocysteine
  MOD_RES (625)..(625): Selenocysteine
  MOD_RES (635)..(635): Selenocysteine
MAEQVLPQALYLSNMRKAVKIRERXPEDIFKPXNGIIHHFKXMHRYXLEMFRXCQFCPQFREIIHKALIDRNIQAXLESQKKLNWCREVRKLVALKXNGDGNCLMHAXSQYMWGVQDXDLVLRKALFSXLKEXDXRNFKFRWQLESLKSQEFVEXGLCYDXRNWNDEWDNLIKMASXDXPMARSGLQYNSLEEIHIFVLCNILRRPIIVISDKMLRSLESGSNFAPLKVGGIYLPLHWPAQECYRYPIVLGYDSHHFVPLVXLKDSGPEIRAVPLVNRDRGRFEDLKVHFLXDPENEMKEKLLKEYLMVIEIPVQGWDHGXXHLINAAKLDEANLPKEINLVDDYFELVQHEYKKWQENSEQGRREGHAQNPMEPSVPQLSLMDVKCEXPNCPFFMSVNXQPLCHECSERRQKNQNKLPKLNSKPGPEGLPGMALGASRGEAYEPLAWNPEESXGGPHSAPPXAPSPFLFSEXXAMKCRSPGCPFXLNVQHNGFCERCHNARQLHASHAPDHXRHLDPGKCQACLQDVXRXFNGICSXCFKRXXAEASSSLSXSLPPSCHQRSKSDPSRLVRSPSPHSCHRAGNDAPAGCLSQAARXPGDRXGXSKCRKAGCVYFGXPENKGFCXLFHRVQRKQXFCCCLRESQSHSVQVPEHHSVPGEGMRHPWKHHV

SEQ ID NO: 27988 - protein, 749 aa, Homo sapiens
  MOD_RES (25)..(25): Selenocysteine
  MOD_RES (33)..(33): Selenocysteine
  MOD_RES (42)..(42): Selenocysteine
  MOD_RES (47)..(47): Selenocysteine
  MOD_RES (53)..(53): Selenocysteine
  MOD_RES (76)..(76): Selenocysteine
  MOD_RES (97)..(97): Selenocysteine
  MOD_RES (108)..(108): Selenocysteine
  MOD_RES (118)..(118): Selenocysteine
  MOD_RES (129)..(129): Selenocysteine
  MOD_RES (133)..(133): Selenocysteine
  MOD_RES (135)..(135): Selenocysteine
  MOD_RES (155)..(155): Selenocysteine
  MOD_RES (161)..(161): Selenocysteine
  MOD_RES (177)..(177): Selenocysteine
  MOD_RES (179)..(179): Selenocysteine
  MOD_RES (262)..(262): Selenocysteine
  MOD_RES (292)..(292): Selenocysteine
  MOD_RES (321)..(322): Selenocysteine
  MOD_RES (389)..(389): Selenocysteine
  MOD_RES (400)..(400): Selenocysteine
  MOD_RES (454)..(454): Selenocysteine
  MOD_RES (463)..(463): Selenocysteine
  MOD_RES (473)..(474): Selenocysteine
  MOD_RES (486)..(486): Selenocysteine
  MOD_RES (513)..(513): Selenocysteine
  MOD_RES (529)..(529): Selenocysteine
  MOD_RES (531)..(531): Selenocysteine
  MOD_RES (538)..(538): Selenocysteine
  MOD_RES (543)..(544): Selenocysteine
  MOD_RES (553)..(553): Selenocysteine
  MOD_RES (597)..(597): Selenocysteine
  MOD_RES (602)..(602): Selenocysteine
  MOD_RES (604)..(604): Selenocysteine
  MOD_RES (617)..(617): Selenocysteine
  MOD_RES (625)..(625): Selenocysteine
  MOD_RES (647)..(647): Selenocysteine
  MOD_RES (654)..(654): Selenocysteine
  MOD_RES (664)..(664): Selenocysteine
  MOD_RES (668)..(668): Selenocysteine
  MOD_RES (692)..(692): Selenocysteine
  MOD_RES (707)..(708): Selenocysteine
  MOD_RES (711)..(711): Selenocysteine
MAEQVLPQALYLSNMRKAVKIRERXPEDIFKPXNGIIHHFKXMHRYXLEMFRXCQFCPQFREIIHKALIDRNIQAXLESQKKLNWCREVRKLVALKXNGDGNCLMHAXSQYMWGVQDXDLVLRKALFSXLKEXDXRNFKFRWQLESLKSQEFVEXGLCYDXRNWNDEWDNLIKMASXDXPMARSGLQYNSLEEIHIFVLCNILRRPIIVISDKMLRSLESGSNFAPLKVGGIYLPLHWPAQECYRYPIVLGYDSHHFVPLVXLKDSGPEIRAVPLVNRDRGRFEDLKVHFLXDPENEMKEKLLKEYLMVIEIPVQGWDHGXXHLINAAKLDEANLPKEINLVDDYFELVQHEYKKWQENSEQGRREGHAQNPMEPSVPQLSLMDVKCEXPNCPFFMSVNXQPLCHECSERRQKNQNKLPKLNSKPGPEGLPGMALGASRGEAYEPLAWNPEESXGGPHSAPPXAPSPFLFSEXXAMKCRSPGCPFXLNVQHNGFCERCHNARQLHASHAPDHXRHLDPGKCQACLQDVXRXFNGICSXCFKRXXAEASSSLSXSLPPSCHQRSKSDPSRLVRSPSPHSCHRAGNDAPAGCLSQAARXPGDRXGXSKCRKAGCVYFGXPENKGFCXLCFIEYRENKHFAAASGKVSPXASRFQNXIPCLGRECGXLGSXMFEGYCQKCFIEAQNQRFHEAKRXEEQLRSSQRRDVPRXXQSXSRPKCARASCKNILACRSEELCMECQHQPEDGPWGPPG

SEQ ID NO: 27989 - protein, 790 aa, Homo sapiens
  MOD_RES (25)..(25): Selenocysteine
  MOD_RES (33)..(33): Selenocysteine
  MOD_RES (42)..(42): Selenocysteine
  MOD_RES (47)..(47): Selenocysteine
  MOD_RES (53)..(53): Selenocysteine
  MOD_RES (76)..(76): Selenocysteine
  MOD_RES (97)..(97): Selenocysteine
  MOD_RES (108)..(108): Selenocysteine
  MOD_RES (118)..(118): Selenocysteine
  MOD_RES (129)..(129): Selenocysteine
  MOD_RES (133)..(133): Selenocysteine
  MOD_RES (135)..(135): Selenocysteine
  MOD_RES (155)..(155): Selenocysteine
  MOD_RES (161)..(161): Selenocysteine
  MOD_RES (177)..(177): Selenocysteine
  MOD_RES (179)..(179): Selenocysteine
  MOD_RES (262)..(262): Selenocysteine
  MOD_RES (292)..(292): Selenocysteine
  MOD_RES (321)..(322): Selenocysteine
  MOD_RES (389)..(389): Selenocysteine
  MOD_RES (400)..(400): Selenocysteine
  MOD_RES (454)..(454): Selenocysteine
  MOD_RES (463)..(463): Selenocysteine
  MOD_RES (473)..(474): Selenocysteine
  MOD_RES (486)..(486): Selenocysteine
  MOD_RES (513)..(513): Selenocysteine
  MOD_RES (529)..(529): Selenocysteine
  MOD_RES (531)..(531): Selenocysteine
  MOD_RES (538)..(538): Selenocysteine
  MOD_RES (543)..(544): Selenocysteine
  MOD_RES (553)..(553): Selenocysteine
  MOD_RES (597)..(597): Selenocysteine
  MOD_RES (602)..(602): Selenocysteine
  MOD_RES (604)..(604): Selenocysteine
  MOD_RES (617)..(617): Selenocysteine
  MOD_RES (625)..(625): Selenocysteine
  MOD_RES (647)..(647): Selenocysteine
  MOD_RES (654)..(654): Selenocysteine
  MOD_RES (664)..(664): Selenocysteine
  MOD_RES (668)..(668): Selenocysteine
  MOD_RES (692)..(692): Selenocysteine
  MOD_RES (707)..(708): Selenocysteine
  MOD_RES (711)..(711): Selenocysteine
MAEQVLPQALYLSNMRKAVKIRERXPEDIFKPXNGIIHHFKXMHRYXLEMFRXCQFCPQFREIIHKALIDRNIQAXLESQKKLNWCREVRKLVALKXNGDGNCLMHAXSQYMWGVQDXDLVLRKALFSXLKEXDXRNFKFRWQLESLKSQEFVEXGLCYDXRNWNDEWDNLIKMASXDXPMARSGLQYNSLEEIHIFVLCNILRRPIIVISDKMLRSLESGSNFAPLKVGGIYLPLHWPAQECYRYPIVLGYDSHHFVPLVXLKDSGPEIRAVPLVNRDRGRFEDLKVHFLXDPENEMKEKLLKEYLMVIEIPVQGWDHGXXHLINAAKLDEANLPKEINLVDDYFELVQHEYKKWQENSEQGRREGHAQNPMEPSVPQLSLMDVKCEXPNCPFFMSVNXQPLCHECSERRQKNQNKLPKLNSKPGPEGLPGMALGASRGEAYEPLAWNPEESXGGPHSAPPXAPSPFLFSEXXAMKCRSPGCPFXLNVQHNGFCERCHNARQLHASHAPDHXRHLDPGKCQACLQDVXRXFNGICSXCFKRXXAEASSSLSXSLPPSCHQRSKSDPSRLVRSPSPHSCHRAGNDAPAGCLSQAARXPGDRXGXSKCRKAGCVYFGXPENKGFCXLCFIEYRENKHFAAASGKVSPXASRFQNXIPCLGRECGXLGSXMFEGYCQKCFIEAQNQRFHEAKRXEEQLRSSQRRDVPRXXQSXSRPKCARASCKNILACRSEELCMECQHPNQRMGPGAHRGEPAPEDPPKQRCRAPACDHFGNAKCNGYCNECFQFKQMYG

SEQ ID NO: 27990 - protein, 214 aa, Homo sapiens
  MOD_RES (25)..(25): Selenocysteine
  MOD_RES (33)..(33): Selenocysteine
  MOD_RES (42)..(42): Selenocysteine
  MOD_RES (47)..(47): Selenocysteine
  MOD_RES (53)..(53): Selenocysteine
  MOD_RES (76)..(76): Selenocysteine
  MOD_RES (97)..(97): Selenocysteine
  MOD_RES (108)..(108): Selenocysteine
  MOD_RES (118)..(118): Selenocysteine
  MOD_RES (129)..(129): Selenocysteine
  MOD_RES (133)..(133): Selenocysteine
  MOD_RES (135)..(135): Selenocysteine
  MOD_RES (155)..(155): Selenocysteine
  MOD_RES (161)..(161): Selenocysteine
  MOD_RES (178)..(178): Selenocysteine
  MOD_RES (188)..(189): Selenocysteine
  MOD_RES (195)..(195): Selenocysteine
  MOD_RES (201)..(201): Selenocysteine
  MOD_RES (212)..(212): Selenocysteine
MAEQVLPQALYLSNMRKAVKIRERXPEDIFKPXNGIIHHFKXMHRYXLEMFRXCQFCPQFREIIHKALIDRNIQAXLESQKKLNWCREVRKLVALKXNGDGNCLMHAXSQYMWGVQDXDLVLRKALFSXLKEXDXRNFKFRWQLESLKSQEFVEXGLCYDXRNWNDEWDNLIKWLPQXHPWPEVDFSXXHWKKYXYLSFAXSSEGQSLSFQXKC

SEQ ID NO: 27991 - protein, 277 aa, Homo sapiens
  MOD_RES (15)..(15): Selenocysteine
  MOD_RES (50)..(50): Selenocysteine
  MOD_RES (67)..(67): Selenocysteine
  MOD_RES (108)..(108): Selenocysteine
  MOD_RES (140)..(140): Selenocysteine
  MOD_RES (221)..(221): Selenocysteine
  MOD_RES (226)..(226): Selenocysteine
  MOD_RES (236)..(236): Selenocysteine
  MOD_RES (259)..(259): Selenocysteine
  MOD_RES (261)..(262): Selenocysteine
  MOD_RES (264)..(264): Selenocysteine
MIILIYLFLLLWEDXQGWGFKDGIFHNSIWLERAAGVYHREARSGKYKLXYAEAKAVCEFEGGHLAXYKQLEAARKIGFHVCAAGWMAKGRVGYPIVKPGPNCGFGKXGIIDYGIRLNRSERWDAYCYNPHAKECGGVFXDPKQIFKSPGFPNEYEDNQICYWHIRLKYGQRIHLSFLDFDLEDDPGCLADYVEIYDSYDDVHGFVGRYCGDELPDDIISXGNVMXLKFLSDASVXAGGFQIKYVAMDPVSKSSQGKNXSXXSXGNKNFLAGRFSHL

SEQ ID NO: 27992 - protein, 186 aa, Homo sapiens
  MOD_RES (3)..(3): Selenocysteine
  MOD_RES (6)..(6): Selenocysteine
  MOD_RES (34)..(34): Selenocysteine
  MOD_RES (46)..(46): Selenocysteine
  MOD_RES (50)..(50): Selenocysteine
  MOD_RES (100)..(100): Selenocysteine
  MOD_RES (110)..(110): Selenocysteine
  MOD_RES (136)..(136): Selenocysteine
MDXFSXKSLALQAQKKLLSKMASKAVVAVLVDDXSSEVLDELYRAXREFXRSRKEAQKMLKNLVKVALKLGLLLRGDQLGGEELALLRRFRHRARCLAMXAVSFHQVDFXFDRRVLAAGLLECRDLLHQAVGPHLXAKSHGRINHVFGHLADCDFLAALYGPAEPYRSHLRRICEGLGRMLDEGSL

SEQ ID NO: 27993 - protein, 204 aa, Homo sapiens
  MOD_RES (15)..(15): Selenocysteine
  MOD_RES (43)..(43): Selenocysteine
  MOD_RES (52)..(52): Selenocysteine
  MOD_RES (64)..(64): Selenocysteine
  MOD_RES (68)..(68): Selenocysteine
  MOD_RES (115)..(115): Selenocysteine
  MOD_RES (118)..(118): Selenocysteine
  MOD_RES (128)..(128): Selenocysteine
  MOD_RES (154)..(154): Selenocysteine
  MOD_RES (157)..(157): Selenocysteine
  MOD_RES (176)..(176): Selenocysteine
MDSDSGEQSEGEPVXAAGPDVFSSKSLALQAQKKILSKIASKXVANMLIDDXSSEIFDELYKVXKEHXHNKKEAHKIMKDLIKVAIKIGILYRNNQFSQEELVIVEKFRKKLNQXAMXIVSFYEVEYXFDRNVLSNLLHECKDLVHELVQRHLXPRXHGRINHVFNHFADVEFLSXLYSLDGDCRPNLKRICEGINKLLDEKVL

SEQ ID NO: 27994 - protein, 292 aa, Homo sapiens
  MOD_RES (10)..(10): Selenocysteine
  MOD_RES (14)..(14): Selenocysteine
  MOD_RES (32)..(32): Selenocysteine
  MOD_RES (35)..(35): Selenocysteine
  MOD_RES (39)..(39): Selenocysteine
  MOD_RES (42)..(42): Selenocysteine
  MOD_RES (103)..(103): Selenocysteine
  MOD_RES (131)..(131): Selenocysteine
  MOD_RES (140)..(140): Selenocysteine
  MOD_RES (152)..(152): Selenocysteine
  MOD_RES (156)..(156): Selenocysteine
  MOD_RES (203)..(203): Selenocysteine
  MOD_RES (206)..(206): Selenocysteine
  MOD_RES (216)..(216): Selenocysteine
  MOD_RES (242)..(242): Selenocysteine
  MOD_RES (245)..(245): Selenocysteine
  MOD_RES (264)..(264): Selenocysteine
MGKPRQNPSXLVSXLCEAEPKGKLWVNGYAGXQGXRDAXLQXRLIPLSFHLQRGKGLAAPLSALSAPRLPERPADGRVAVDAQPAARSMDSDSGEQSEGEPVXAAGPDVFSSKSLALQAQKKILSKIASKXVANMLIDDXSSEIFDELYKVXKEHXHNKKEAHKIMKDLIKVAIKIGILYRNNQFSQEELVIVEKFRKKLNQXAMXIVSFYEVEYXFDRNVLSNLLHECKDLVHELVQRHLXPRXHGRINHVFNHFADVEFLSXLYSLDGDCRPNLKRICEGINKLLDEKVL

SEQ ID NO: 27995 - protein, 310 aa, Homo sapiens
  MOD_RES (23)..(25): Selenocysteine
  MOD_RES (28)..(28): Selenocysteine
  MOD_RES (36)..(36): Selenocysteine
  MOD_RES (64)..(64): Selenocysteine
  MOD_RES (89)..(89): Selenocysteine
  MOD_RES (150)..(150): Selenocysteine
  MOD_RES (166)..(166): Selenocysteine
  MOD_RES (169)..(169): Selenocysteine
  MOD_RES (203)..(203): Selenocysteine
  MOD_RES (205)..(205): Selenocysteine
  MOD_RES (232)..(232): Selenocysteine
  MOD_RES (243)..(243): Selenocysteine
  MOD_RES (261)..(261): Selenocysteine
  MOD_RES (269)..(269): Selenocysteine
  MOD_RES (303)..(303): Selenocysteine
MAPPPARVHLACKSDEEERSPCXXXRNXACQCKPGXFRNDNSAEMCRKCSRGCPRGMVKVKDCXPWSDIECVHKESGNGHNIWVILVVXLVVPLLLVAVLIVCCCIGSGCGGDPKCMDRVCFWRLGLLRGPGAEDNAHNEILSNADSLSXFVSEQQMESQEPADLXGVXVQSPGEAQCLLGPAEAEGSQRRRLLVPANGADPXEXLMLFFDKFANIVPFDSWDQLMRQLDLXKNEIDVVRAGXAGPGDALYAMLMKWVNKXGRNASIHXLLDALERMEERHAREKIQDLLVDSGKFIYLEDGXGSAVSLE

SEQ ID NO: 27996 - protein, 468 aa, Homo sapiens
  MOD_RES (17)..(17): Selenocysteine
  MOD_RES (27)..(27): Selenocysteine
  MOD_RES (33)..(33): Selenocysteine
  MOD_RES (57)..(57): Selenocysteine
  MOD_RES (91)..(91): Selenocysteine
  MOD_RES (110)..(110): Selenocysteine
  MOD_RES (120)..(120): Selenocysteine
  MOD_RES (149)..(149): Selenocysteine
  MOD_RES (155)..(155): Selenocysteine
  MOD_RES (168)..(168): Selenocysteine
  MOD_RES (181)..(183): Selenocysteine
  MOD_RES (186)..(186): Selenocysteine
  MOD_RES (194)..(194): Selenocysteine
  MOD_RES (222)..(222): Selenocysteine
  MOD_RES (247)..(247): Selenocysteine
  MOD_RES (308)..(308): Selenocysteine
  MOD_RES (324)..(324): Selenocysteine
  MOD_RES (327)..(327): Selenocysteine
  MOD_RES (361)..(361): Selenocysteine
  MOD_RES (363)..(363): Selenocysteine
  MOD_RES (390)..(390): Selenocysteine
  MOD_RES (401)..(401): Selenocysteine
  MOD_RES (419)..(419): Selenocysteine
  MOD_RES (427)..(427): Selenocysteine
  MOD_RES (461)..(461): Selenocysteine
MAPPPARVHLGAFLAVXPNPGSAASGXEAAAAXPSKVWGSSAGRIEPRGGGRGALPXSMGQHGPSARARAGRAPGPRPAREASPRLRVHKXFKFVVVGVLLQVVPSSAAXIKLHDQSIGXQQWEHSPLGELCPPGSHRSEHPGACNRCXEGVGYXNASNNLFACLPCXACKSDEEERSPCXXXRNXACQCKPGXFRNDNSAEMCRKCSRGCPRGMVKVKDCXPWSDIECVHKESGNGHNIWVILVVXLVVPLLLVAVLIVCCCIGSGCGGDPKCMDRVCFWRLGLLRGPGAEDNAHNEILSNADSLSXFVSEQQMESQEPADLXGVXVQSPGEAQCLLGPAEAEGSQRRRLLVPANGADPXEXLMLFFDKFANIVPFDSWDQLMRQLDLXKNEIDVVRAGXAGPGDALYAMLMKWVNKXGRNASIHXLLDALERMEERHAREKIQDLLVDSGKFIYLEDGXGSAVSLE

SEQ ID NO: 27997 - protein, 75 aa, Homo sapiens
  MOD_RES (20)..(20): Selenocysteine
  MOD_RES (45)..(45): Selenocysteine
MCRKCSRGCPRGMVKVKDCXPWSDIECVHKESGNGHNIWVILVVXLVVPLLLVAVLIVCCCIGSGCGGDPKCMDR

SEQ ID NO: 27998 - protein, 90 aa, Homo sapiens
  MOD_RES (37)..(37): Selenocysteine
  MOD_RES (50)..(50): Selenocysteine
  MOD_RES (55)..(55): Selenocysteine
  MOD_RES (67)..(67): Selenocysteine
  MOD_RES (71)..(71): Selenocysteine
  MOD_RES (74)..(74): Selenocysteine
MEQRGQNAPAASGARKRHGPGPREARGARPGPRVPKXLVLVVAAVLLLDXISQKXVEIASPANMDRXIALXGMXSFSACAAPGVIQVKWS

SEQ ID NO: 27999 - protein, 411 aa, Homo sapiens
  MOD_RES (37)..(37): Selenocysteine
  MOD_RES (57)..(57): Selenocysteine
  MOD_RES (105)..(105): Selenocysteine
  MOD_RES (117)..(117): Selenocysteine
  MOD_RES (130)..(132): Selenocysteine
  MOD_RES (135)..(135): Selenocysteine
  MOD_RES (143)..(143): Selenocysteine
  MOD_RES (158)..(158): Selenocysteine
  MOD_RES (171)..(171): Selenocysteine
  MOD_RES (190)..(190): Selenocysteine
  MOD_RES (253)..(253): Selenocysteine
  MOD_RES (269)..(269): Selenocysteine
  MOD_RES (306)..(306): Selenocysteine
  MOD_RES (308)..(308): Selenocysteine
  MOD_RES (352)..(352): Selenocysteine
  MOD_RES (355)..(355): Selenocysteine
  MOD_RES (364)..(364): Selenocysteine
  MOD_RES (372)..(372): Selenocysteine
  MOD_RES (379)..(379): Selenocysteine
MEQRGQNAPAASGARKRHGPGPREARGARPGPRVPKXLVLVVAAVLLLVSAESALIXQQDLAPQQRAAPQQKRSSPSEGLCPPGHHISEDGRDCISCKYGQDYSXHWNDLLFCLRCXRCDSGEVELSPCXXXRNXVCQCEEGXFREEDSPEMCRKCRXGCPRGMVKVGDCXPWSDIECVHKESGIIIGVXVAAVVLIVAVFVCKSLLWKKVLPYLKGICSGGGGDPERVDRSSQRPGAEDNVLNEIVSILQPXQVPEQEMEVQEPAEPXGVNMLSPGESEHLLEPAEAERSQRRRLLVPANEGDPXEXLRQCFDDFADLVPFDSWEPLMRKLGLMDNEIKVAKAEAAGHRDXLYXMLIKWVNKXGRDASVHXLLDALEXLGERLAKQKIEDHLLSSGKFMYLEGNADSAMS

SEQ ID NO: 28000 - protein, 440 aa, Homo sapiens
  MOD_RES (37)..(37): Selenocysteine
  MOD_RES (57)..(57): Selenocysteine
  MOD_RES (105)..(105): Selenocysteine
  MOD_RES (117)..(117): Selenocysteine
  MOD_RES (130)..(132): Selenocysteine
  MOD_RES (135)..(135): Selenocysteine
  MOD_RES (143)..(143): Selenocysteine
  MOD_RES (158)..(158): Selenocysteine
  MOD_RES (171)..(171): Selenocysteine
  MOD_RES (185)..(185): Selenocysteine
  MOD_RES (197)..(197): Selenocysteine
  MOD_RES (199)..(199): Selenocysteine
  MOD_RES (204)..(204): Selenocysteine
  MOD_RES (219)..(219): Selenocysteine
  MOD_RES (282)..(282): Selenocysteine
  MOD_RES (298)..(298): Selenocysteine
  MOD_RES (335)..(335): Selenocysteine
  MOD_RES (337)..(337): Selenocysteine
  MOD_RES (381)..(381): Selenocysteine
  MOD_RES (384)..(384): Selenocysteine
  MOD_RES (393)..(393): Selenocysteine
  MOD_RES (401)..(401): Selenocysteine
  MOD_RES (408)..(408): Selenocysteine
MEQRGQNAPAASGARKRHGPGPREARGARPGPRVPKXLVLVVAAVLLLVSAESALIXQQDLAPQQRAAPQQKRSSPSEGLCPPGHHISEDGRDCISCKYGQDYSXHWNDLLFCLRCXRCDSGEVELSPCXXXRNXVCQCEEGXFREEDSPEMCRKCRXGCPRGMVKVGDCXPWSDIECVHKESGXKHSGEVPAVEEXVXSSPGXPASPCSLSGIIIGVXVAAVVLIVAVFVCKSLLWKKVLPYLKGICSGGGGDPERVDRSSQRPGAEDNVLNEIVSILQPXQVPEQEMEVQEPAEPXGVNMLSPGESEHLLEPAEAERSQRRRLLVPANEGDPXEXLRQCFDDFADLVPFDSWEPLMRKLGLMDNEIKVAKAEAAGHRDXLYXMLIKWVNKXGRDASVHXLLDALEXLGERLAKQKIEDHLLSSGKFMYLEGNADSAMS

SEQ ID NO: 28001 - protein, 67 aa, Homo sapiens
  MOD_RES (7)..(7): Selenocysteine
  MOD_RES (32)..(32): Selenocysteine
  MOD_RES (40)..(40): Selenocysteine
  MOD_RES (42)..(42): Selenocysteine
  MOD_RES (45)..(45): Selenocysteine
MARIPKXLKFVVVIVAVLLPDLIDQNILEPVXRAQRVWIXPXLPXMNLLASHVQFVNQIKNIKVPAP

SEQ ID NO: 28002 - protein, 259 aa, Homo sapiens
  MOD_RES (7)..(7): Selenocysteine
  MOD_RES (27)..(28): Selenocysteine
  MOD_RES (38)..(38): Selenocysteine
  MOD_RES (63)..(63): Selenocysteine
  MOD_RES (70)..(70): Selenocysteine
  MOD_RES (76)..(76): Selenocysteine
  MOD_RES (89)..(89): Selenocysteine
  MOD_RES (102)..(102): Selenocysteine
  MOD_RES (104)..(104): Selenocysteine
  MOD_RES (107)..(107): Selenocysteine
  MOD_RES (115)..(115): Selenocysteine
  MOD_RES (142)..(142): Selenocysteine
  MOD_RES (158)..(158): Selenocysteine
  MOD_RES (161)..(161): Selenocysteine
  MOD_RES (167)..(167): Selenocysteine
  MOD_RES (170)..(170): Selenocysteine
  MOD_RES (174)..(174): Selenocysteine
  MOD_RES (182)..(182): Selenocysteine
  MOD_RES (185)..(185): Selenocysteine
  MOD_RES (189)..(189): Selenocysteine
  MOD_RES (197)..(197): Selenocysteine
  MOD_RES (199)..(200): Selenocysteine
  MOD_RES (204)..(204): Selenocysteine
  MOD_RES (212)..(212): Selenocysteine
  MOD_RES (214)..(215): Selenocysteine
  MOD_RES (219)..(219): Selenocysteine
  MOD_RES (227)..(227): Selenocysteine
  MOD_RES (230)..(230): Selenocysteine
  MOD_RES (234)..(234): Selenocysteine
  MOD_RES (244)..(244): Selenocysteine
MARIPKXLKFVVVIVAVLLPVLAYSAXXARQEEVPQQXVAPQQQRHSFKGEECPAGSHRSEHXGACNPCXEGVDYXNASNNEPSCFPCXVCKSDQKHKSSCXMXRDXVCQCKEGXFRNENSPEMCRKCSRCPSGEVQVSNCXSWDDIQCVEEFGANAXVEXPAAEEXMNXSPGXPAPAAEEXMNXSPGXPAPAAEEXMXXSPGXPAPAAEEXMXXSPGXPAPAAEEXMIXSPGXPASSHYLSCXIVGIIVLIVLLIVFV

SEQ ID NO: 28003 - protein, 155 aa, Homo sapiens
  MOD_RES (32)..(32): Selenocysteine
  MOD_RES (40)..(40): Selenocysteine
  MOD_RES (47)..(47): Selenocysteine
  MOD_RES (85)..(85): Selenocysteine
  MOD_RES (112)..(112): Selenocysteine
  MOD_RES (121)..(121): Selenocysteine
MQGVKERFLPLGNSGDRAPRPPDGRGRVRPRXQDGVGNHXMARIPKXLKFVVVIVAVLLPVSPGRGPWLGKSAPGAGRGQGDGDXAGMPGPGHLRPGMSGQDELAVGVRGRXGSPGWAGGXRPRGSREAVPLAAPSPRREGSSRIERGRESRWNP

SEQ ID NO: 28004 - protein, 386 aa, Homo sapiens
  MOD_RES (10)..(10): Selenocysteine
  MOD_RES (24)..(24): Selenocysteine
  MOD_RES (28)..(28): Selenocysteine
  MOD_RES (57)..(57): Selenocysteine
  MOD_RES (68)..(68): Selenocysteine
  MOD_RES (93)..(93): Selenocysteine
  MOD_RES (100)..(100): Selenocysteine
  MOD_RES (106)..(106): Selenocysteine
  MOD_RES (119)..(119): Selenocysteine
  MOD_RES (126)..(126): Selenocysteine
  MOD_RES (132)..(134): Selenocysteine
  MOD_RES (137)..(137): Selenocysteine
  MOD_RES (157)..(157): Selenocysteine
  MOD_RES (160)..(160): Selenocysteine
  MOD_RES (173)..(173): Selenocysteine
  MOD_RES (189)..(189): Selenocysteine
  MOD_RES (192)..(192): Selenocysteine
  MOD_RES (198)..(198): Selenocysteine
  MOD_RES (200)..(201): Selenocysteine
  MOD_RES (279)..(279): Selenocysteine
  MOD_RES (288)..(288): Selenocysteine
  MOD_RES (304)..(304): Selenocysteine
  MOD_RES (307)..(307): Selenocysteine
  MOD_RES (345)..(345): Selenocysteine
  MOD_RES (352)..(352): Selenocysteine
  MOD_RES (361)..(361): Selenocysteine
  MOD_RES (383)..(383): Selenocysteine
MGLWGQSVPXASSARAGRYPGARXASGXRPWLLDPKILKFVVFIVAVLLPVRVDSAXIPRQDEVPQQXVAPQQQRRSLKEEECPAGSHRSEYXGACNPCXEGVDYXIASNNLPSCLLCXVCKSGQXNKSSCXXXRDXVCQCEKGSFQDKNSPEMCRXCRXGCPRGMVKVSNCXPRSDIKCKNESAASSXGKXPAAEEXVXXILGMLASPYHYLIIIVVLVIILAVVVVGFSCRKKFISYLKGICSGGGGGPERVHRVLFRRRSCPSRVPGAEDNARNEXLSNRYLQPXQVSEQEIQGQELAELXGVXVELPEEPQRLLEQAEAEGCQRRRLLVPVNDADSADISXLLDASAXLEEGHAKEXIQDQLVGSEKLFYEEDEAGSAXSCL

SEQ ID NO: 28005 - protein, 263 aa, Homo sapiens
  MOD_RES (35)..(35): Selenocysteine
  MOD_RES (61)..(63): Selenocysteine
  MOD_RES (94)..(94): Selenocysteine
  MOD_RES (107)..(108): Selenocysteine
  MOD_RES (115)..(115): Selenocysteine
  MOD_RES (131)..(131): Selenocysteine
  MOD_RES (149)..(149): Selenocysteine
  MOD_RES (166)..(166): Selenocysteine
  MOD_RES (173)..(173): Selenocysteine
  MOD_RES (176)..(176): Selenocysteine
  MOD_RES (187)..(187): Selenocysteine
  MOD_RES (243)..(243): Selenocysteine
MAPRARRRRPLFALLLLCALLARLQVALQIAPPCXSEKHYEHLGRCCNKCEPGKYMSSKCXXXSDSVCLPCGPDEYLDSWNEEDKCLLHKVCDXGKALVAVVAGNSXXPRRCACXAGYHWSQDCECCRRNXECAPGLGAQHPLQLNKDXVCKPCLAGYFSDAFSSXDKCRPWXNCXFLGKRVEHHGXEKSDAVCSSSLPARKPPNEPHVYLPGLIILLLFASVALVAAIIFGVCYRKKGKALXANLWHWINEACGRLSGDKEM

SEQ ID NO: 28006 - protein, 616 aa, Homo sapiens
  MOD_RES (35)..(35): Selenocysteine
  MOD_RES (61)..(63): Selenocysteine
  MOD_RES (94)..(94): Selenocysteine
  MOD_RES (107)..(108): Selenocysteine
  MOD_RES (115)..(115): Selenocysteine
  MOD_RES (131)..(131): Selenocysteine
  MOD_RES (149)..(149): Selenocysteine
  MOD_RES (166)..(166): Selenocysteine
  MOD_RES (173)..(173): Selenocysteine
  MOD_RES (176)..(176): Selenocysteine
  MOD_RES (187)..(187): Selenocysteine
  MOD_RES (243)..(243): Selenocysteine
  MOD_RES (271)..(271): Selenocysteine
  MOD_RES (273)..(273): Selenocysteine
  MOD_RES (289)..(289): Selenocysteine
  MOD_RES (294)..(294): Selenocysteine
  MOD_RES (311)..(311): Selenocysteine
  MOD_RES (333)..(333): Selenocysteine
  MOD_RES (345)..(345): Selenocysteine
  MOD_RES (357)..(357): Selenocysteine
  MOD_RES (364)..(364): Selenocysteine
  MOD_RES (371)..(371): Selenocysteine
  MOD_RES (391)..(391): Selenocysteine
  MOD_RES (393)..(393): Selenocysteine
  MOD_RES (396)..(396): Selenocysteine
  MOD_RES (405)..(405): Selenocysteine
  MOD_RES (411)..(411): Selenocysteine
  MOD_RES (414)..(414): Selenocysteine
  MOD_RES (447)..(447): Selenocysteine
  MOD_RES (487)..(487): Selenocysteine
  MOD_RES (526)..(526): Selenocysteine
  MOD_RES (532)..(532): Selenocysteine
  MOD_RES (554)..(554): Selenocysteine
  MOD_RES (574)..(574): Selenocysteine
MAPRARRRRPLFALLLLCALLARLQVALQIAPPCXSEKHYEHLGRCCNKCEPGKYMSSKCXXXSDSVCLPCGPDEYLDSWNEEDKCLLHKVCDXGKALVAVVAGNSXXPRRCACXAGYHWSQDCECCRRNXECAPGLGAQHPLQLNKDXVCKPCLAGYFSDAFSSXDKCRPWXNCXFLGKRVEHHGXEKSDAVCSSSLPARKPPNEPHVYLPGLIILLLFASVALVAAIIFGVCYRKKGKALXANLWHWINEACGRLSGDKESSGDSCVSXHXANFGQQGACEGVLLLXLEEKXFPEDMCYPDQGGVCQGXCVGGGPYAQGEDARMLSLVSKXEIEEDSFRQMPXEDEYMDRPSQPXDQLLFLXEPGSKSXPPFSEPLEVGENDSLSQCFXGXQSXVGSESCNCXEPLCRXDWXPMSSENYLQKEVDSGHCPHWAASPSPNWADVCXGCRNPPGEDCEPLVGSPKRGPLPQCAYGMGLPPEEEASRXEARDQPEDGADGRLPSSARAGAGSGSSPGGQSPASGNVXGNSNSXFISSGQVMNFKGDIIVVYVSQXSQEGAAAAAEPMGRPVQEEXLARRDSFAGNGPRFPDPCGGPEGLREPEKASRPVQEQGGAKA

SEQ ID NO: 28007 - protein, 337 aa, Homo sapiens
  MOD_RES (35)..(35): Selenocysteine
  MOD_RES (61)..(63): Selenocysteine
  MOD_RES (94)..(94): Selenocysteine
  MOD_RES (107)..(108): Selenocysteine
  MOD_RES (115)..(115): Selenocysteine
  MOD_RES (131)..(131): Selenocysteine
  MOD_RES (149)..(149): Selenocysteine
  MOD_RES (166)..(166): Selenocysteine
  MOD_RES (173)..(173): Selenocysteine
  MOD_RES (176)..(176): Selenocysteine
  MOD_RES (187)..(187): Selenocysteine
  MOD_RES (243)..(243): Selenocysteine
  MOD_RES (247)..(247): Selenocysteine
  MOD_RES (253)..(253): Selenocysteine
  MOD_RES (275)..(275): Selenocysteine
  MOD_RES (295)..(295): Selenocysteine
MAPRARRRRPLFALLLLCALLARLQVALQIAPPCXSEKHYEHLGRCCNKCEPGKYMSSKCXXXSDSVCLPCGPDEYLDSWNEEDKCLLHKVCDXGKALVAVVAGNSXXPRRCACXAGYHWSQDCECCRRNXECAPGLGAQHPLQLNKDXVCKPCLAGYFSDAFSSXDKCRPWXNCXFLGKRVEHHGXEKSDAVCSSSLPARKPPNEPHVYLPGLIILLLFASVALVAAIIFGVCYRKKGKALXGNVXGNSNSXFISSGQVMNFKGDIIVVYVSQXSQEGAAAAAEPMGRPVQEEXLARRDSFAGNGPRFPDPCGGPEGLREPEKASRPVQEQGGAKA

SEQ ID NO: 28008 - protein, 299 aa, Homo sapiens
  MOD_RES (35)..(35): Selenocysteine
  MOD_RES (61)..(63): Selenocysteine
  MOD_RES (94)..(94): Selenocysteine
  MOD_RES (107)..(108): Selenocysteine
  MOD_RES (115)..(115): Selenocysteine
  MOD_RES (131)..(131): Selenocysteine
  MOD_RES (149)..(149): Selenocysteine
  MOD_RES (166)..(166): Selenocysteine
  MOD_RES (173)..(173): Selenocysteine
  MOD_RES (176)..(176): Selenocysteine
  MOD_RES (187)..(187): Selenocysteine
  MOD_RES (209)..(209): Selenocysteine
  MOD_RES (215)..(215): Selenocysteine
  MOD_RES (237)..(237): Selenocysteine
  MOD_RES (257)..(257): Selenocysteine
MAPRARRRRPLFALLLLCALLARLQVALQIAPPCXSEKHYEHLGRCCNKCEPGKYMSSKCXXXSDSVCLPCGPDEYLDSWNEEDKCLLHKVCDXGKALVAVVAGNSXXPRRCACXAGYHWSQDCECCRRNXECAPGLGAQHPLQLNKDXVCKPCLAGYFSDAFSSXDKCRPWXNCXFLGKRVEHHGXEKSDAVCSSSLPARKPPNGNVXGNSNSXFISSGQVMNFKGDIIVVYVSQXSQEGAAAAAEPMGRPVQEEXLARRDSFAGNGPRFPDPCGGPEGLREPEKASRPVQEQGGAKA

SEQ ID NO: 28009 - protein, 145 aa, Homo sapiens
  MOD_RES (19)..(20): Selenocysteine
  MOD_RES (23)..(23): Selenocysteine
  MOD_RES (35)..(35): Selenocysteine
  MOD_RES (48)..(48): Selenocysteine
  MOD_RES (55)..(55): Selenocysteine
  MOD_RES (60)..(60): Selenocysteine
  MOD_RES (71)..(71): Selenocysteine
  MOD_RES (76)..(76): Selenocysteine
  MOD_RES (100)..(100): Selenocysteine
MNNLLCCALVFLDISIKWXXQEXFPPKYLHYDEEXSHQLLCDKCPPGXYLKQHCXAKWKXVCAPCPDHYYXDSWHXSDECLYCSPVCKELQYVKQECNRXHNRVCECKEGRYLEIEFCLKHRSCPPGFGVVQAGCRRRPKPQICI

SEQ ID NO: 28010 - protein, 401 aa, Homo sapiens
  MOD_RES (19)..(20): Selenocysteine
  MOD_RES (23)..(23): Selenocysteine
  MOD_RES (35)..(35): Selenocysteine
  MOD_RES (48)..(48): Selenocysteine
  MOD_RES (55)..(55): Selenocysteine
  MOD_RES (60)..(60): Selenocysteine
  MOD_RES (71)..(71): Selenocysteine
  MOD_RES (76)..(76): Selenocysteine
  MOD_RES (100)..(100): Selenocysteine
  MOD_RES (135)..(135): Selenocysteine
  MOD_RES (140)..(140): Selenocysteine
  MOD_RES (154)..(154): Selenocysteine
  MOD_RES (164)..(164): Selenocysteine
  MOD_RES (174)..(174): Selenocysteine
  MOD_RES (180)..(180): Selenocysteine
  MOD_RES (192)..(192): Selenocysteine
  MOD_RES (200)..(200): Selenocysteine
  MOD_RES (213)..(213): Selenocysteine
  MOD_RES (216)..(216): Selenocysteine
  MOD_RES (230)..(230): Selenocysteine
  MOD_RES (250)..(250): Selenocysteine
  MOD_RES (291)..(291): Selenocysteine
  MOD_RES (315)..(315): Selenocysteine
  MOD_RES (341)..(341): Selenocysteine
  MOD_RES (354)..(354): Selenocysteine
  MOD_RES (360)..(360): Selenocysteine
  MOD_RES (362)..(362): Selenocysteine
  MOD_RES (368)..(368): Selenocysteine
  MOD_RES (376)..(376): Selenocysteine
MNNLLCCALVFLDISIKWXXQEXFPPKYLHYDEEXSHQLLCDKCPPGXYLKQHCXAKWKXVCAPCPDHYYXDSWHXSDECLYCSPVCKELQYVKQECNRXHNRVCECKEGRYLEIEFCLKHRSCPPGFGVVQAGXPERNXVCKRCPDGFFSNEXSSKAPCRKHXNCSVFGLLLXQKGNAXHDNICSGNSESXQKCGIDVXLCEEAFFRFAVPXKFXPNWLSVLVDNLPGXKVNAESVERIKRQHSSQEQXFQLLKLWKHQNKDQDIVKKIIQDIDLCENSVQRHIGHANLXFEQLRSLMESLPGKKVGAEDIEKXIKACKPSDQILKLLSLWRIKNGDQDXLKGLMHALKHSKXYHFPKXVXQSLKKXIRFLHSFXMYKLYQKLFLEMIGNQVQSVKISCL

SEQ ID NO: 28011 - protein, 94 aa, Homo sapiens
  MOD_RES (54)..(54): Selenocysteine
  MOD_RES (56)..(56): Selenocysteine
  MOD_RES (60)..(60): Selenocysteine
  MOD_RES (69)..(69): Selenocysteine
  MOD_RES (71)..(71): Selenocysteine
MARGSLRRLLRLLVLGLWLALLRSVAGEQAPASDPRPPPQAPPPAPAAAPGARXWXSAWXARLAGRDRXAXSAWAALQHLLPPSGCFGPSLGAL

SEQ ID NO: 28012 - protein, 47 aa, Homo sapiens
  MOD_RES (44)..(44): Selenocysteine
MARGSLRRLLRLLVLGLWLALLRSVAGEQAPDPRIAESRPQPLXRGP

SEQ ID NO: 28013 - protein, 94 aa, Homo sapiens
  MOD_RES (54)..(54): Selenocysteine
  MOD_RES (76)..(77): Selenocysteine
  MOD_RES (82)..(82): Selenocysteine
MARGSLRRLLRLLVLGLWLALLRSVAGEQAPGAAAPPAPFRLLWPILGGALSLXFVLGLLSGFLVWRRCRRREKFXXPIEEXGGEGCPAVALIQ

SEQ ID NO: 28014 - protein, 129 aa, Homo sapiens
  MOD_RES (33)..(33): Selenocysteine
  MOD_RES (89)..(89): Selenocysteine
  MOD_RES (111)..(112): Selenocysteine
  MOD_RES (117)..(117): Selenocysteine
MARGSLRRLLRLLVLGLWLALLRSVAGEQAPGXAPCSRGSSWSADLDKCMDCASCRARPHSDFCLGCAAAPPAPFRLLWPILGGALSLXFVLGLLSGFLVWRRCRRREKFXXPIEEXGGEGCPAVALIQ

SEQ ID NO: 28015 - protein, 226 aa, Homo sapiens
  MOD_RES (33)..(33): Selenocysteine
  MOD_RES (58)..(58): Selenocysteine
  MOD_RES (61)..(61): Selenocysteine
  MOD_RES (74)..(74): Selenocysteine
  MOD_RES (115)..(115): Selenocysteine
  MOD_RES (125)..(125): Selenocysteine
  MOD_RES (157)..(157): Selenocysteine
  MOD_RES (185)..(185): Selenocysteine
  MOD_RES (211)..(211): Selenocysteine
MARGSLRRLLRLLVLGLWLALLRSVAGEQAPGXRDSGVGEPRAGAREPDWVSGEQRRXGGXGGCGDLGSGGLQXARSRLWEVPSLSKLHSQSGPQFLPPSNWGWGGSSVPQVRSXSNGERKRCSXSCPLPAALAHPWGRSEPDLRAGAAFWLFGLEXMPQEREVHHPHRGDRRRGLPSCGADPVXMCPLPAGARPLIIHSSILEPVSASQXRREPSSSNHKGGGGR

SEQ ID NO: 28016 - protein, 80 aa, Homo sapiens
  MOD_RES (40)..(40): Selenocysteine
  MOD_RES (62)..(63): Selenocysteine
  MOD_RES (68)..(68): Selenocysteine
MDCASCRARPHSDFCLGCAAAPPAPFRLLWPILGGALSLXFVLGLLSGFLVWRRCRRREKFXXPIEEXGGEGCPAVALIQ

SEQ ID NO: 28017 - protein, 293 aa, Homo sapiens
  MOD_RES (27)..(27): Selenocysteine
  MOD_RES (46)..(46): Selenocysteine
  MOD_RES (52)..(52): Selenocysteine
  MOD_RES (61)..(61): Selenocysteine
  MOD_RES (166)..(166): Selenocysteine
  MOD_RES (222)..(222): Selenocysteine
  MOD_RES (229)..(229): Selenocysteine
  MOD_RES (241)..(241): Selenocysteine
  MOD_RES (247)..(247): Selenocysteine
  MOD_RES (250)..(250): Selenocysteine
  MOD_RES (254)..(254): Selenocysteine
  MOD_RES (263)..(263): Selenocysteine
  MOD_RES (265)..(266): Selenocysteine
MSGLGRSRRGGRSRVDQEERFPQGLWXGVAMRSCPEEQYWDPLLGXCMSCKXICNHQSQRXCAAFCRSLSCRKEQGKFYDHLLRDCISCASICGQHPKQCAYFCENKLRSPVNLPPELRRQRSGEVENNSDNSGRYQGLEHRGSEASPALPGLKLSADQVALVYSXLGLCLCAVLCCFLVAVACFLKKRGDPCSCQPRSRPRQSPAKSSQDHAMEAGSPVSXSPEPVEXCSFCFPECRAPXQESAVXPGXPDPXCAGRWGCHXRXXVLQPCPHIPDSGLGIVCVPAQEGGPGA

SEQ ID NO: 28018 - protein, 156 aa, Homo sapiens
  MOD_RES (27)..(27): Selenocysteine
  MOD_RES (46)..(46): Selenocysteine
  MOD_RES (52)..(52): Selenocysteine
  MOD_RES (61)..(61): Selenocysteine
MSGLGRSRRGGRSRVDQEERFPQGLWXGVAMRSCPEEQYWDPLLGXCMSCKXICNHQSQRXCAAFCRSLSCRKEQGKFYDHLLRDCISCASICGQHPKQCAYFCENKLRSPVNLPPELRRQRSGEVENNSDNSGRYQGLEHRGSEASPGKRSPLLY

SEQ ID NO: 28019 - protein, 248 aa, Homo sapiens
  MOD_RES (120)..(120): Selenocysteine
  MOD_RES (176)..(176): Selenocysteine
  MOD_RES (183)..(183): Selenocysteine
  MOD_RES (195)..(195): Selenocysteine
  MOD_RES (201)..(201): Selenocysteine
  MOD_RES (204)..(204): Selenocysteine
  MOD_RES (208)..(208): Selenocysteine
  MOD_RES (214)..(214): Selenocysteine
  MOD_RES (221)..(221): Selenocysteine
  MOD_RES (234)..(234): Selenocysteine
  MOD_RES (236)..(236): Selenocysteine
  MOD_RES (247)..(247): Selenocysteine
MSGLGRSRRGGRSRVDQEERWSLSCRKEQGKFYDHLLRDCISCASICGQHPKQCAYFCENKLRSPVNLPPELRRQRSGEVENNSDNSGRYQGLEHRGSEASPALPGLKLSADQVALVYSXLGLCLCAVLCCFLVAVACFLKKRGDPCSCQPRSRPRQSPAKSSQDHAMEAGSPVSXSPEPVEXCSFCFPECRAPXQESAVXPGXPDPXCAGRKXKPPPVLXAGNCGVHRPPPEXSXGSPRGQRLLWXQ

SEQ ID NO: 28020 - protein, 247 aa, Homo sapiens
  MOD_RES (120)..(120): Selenocysteine
  MOD_RES (176)..(176): Selenocysteine
  MOD_RES (183)..(183): Selenocysteine
  MOD_RES (195)..(195): Selenocysteine
  MOD_RES (201)..(201): Selenocysteine
  MOD_RES (204)..(204): Selenocysteine
  MOD_RES (208)..(208): Selenocysteine
  MOD_RES (217)..(217): Selenocysteine
  MOD_RES (219)..(220): Selenocysteine
MSGLGRSRRGGRSRVDQEERWSLSCRKEQGKFYDHLLRDCISCASICGQHPKQCAYFCENKLRSPVNLPPELRRQRSGEVENNSDNSGRYQGLEHRGSEASPALPGLKLSADQVALVYSXLGLCLCAVLCCFLVAVACFLKKRGDPCSCQPRSRPRQSPAKSSQDHAMEAGSPVSXSPEPVEXCSFCFPECRAPXQESAVXPGXPDPXCAGRWGCHXRXXVLQPCPHIPDSGLGIVCVPAQEGGPGA

SEQ ID NO: 28021 - protein, 184 aa, Homo sapiens
  MOD_RES (17)..(17): Selenocysteine
  MOD_RES (40)..(40): Selenocysteine
  MOD_RES (55)..(55): Selenocysteine
  MOD_RES (141)..(141): Selenocysteine
  MOD_RES (154)..(155): Selenocysteine
  MOD_RES (166)..(166): Selenocysteine
  MOD_RES (171)..(171): Selenocysteine
  MOD_RES (175)..(176): Selenocysteine
  MOD_RES (178)..(178): Selenocysteine
MRRGPRSLRGRDAPAPXPCVPAECFDLLVRHCVACGLLRXPRPKPAGASSPAPRXALQPQESVGAGAGEAALPLPGLLFGAPALLGLALVLALVLVGLVSWRRRQRRLRGASSAEAPDGDKDAPEPLDKVIILSPGISDAXAPAWPPPGEDPGXXPPGHSVPVPAXELGSXELVXXKXAGPEQQ

SEQ ID NO: 28022 - protein, 183 aa, Homo sapiens
  MOD_RES (15)..(15): Selenocysteine
  MOD_RES (18)..(18): Selenocysteine
  MOD_RES (28)..(28): Selenocysteine
  MOD_RES (71)..(71): Selenocysteine
  MOD_RES (73)..(73): Selenocysteine
  MOD_RES (82)..(82): Selenocysteine
  MOD_RES (114)..(114): Selenocysteine
  MOD_RES (143)..(143): Selenocysteine
  MOD_RES (155)..(155): Selenocysteine
  MOD_RES (160)..(160): Selenocysteine
  MOD_RES (169)..(169): Selenocysteine
  MOD_RES (175)..(175): Selenocysteine
  MOD_RES (183)..(183): Selenocysteine
MEPPGDWGPPPWRSXPKXDVLRLVLYLXFLGAPCYAPALPSCKEDEYPVGSECCPKCSPGYRVKEACGELXGXVCEPCPPGXYIAHLNGLSKCLQCQMCDPAMGLRASRNCSRXENAVCGCSPGHFCIVQDGDHCAACRAYAXSSPGQRVQKGGXESQDXLCQNCPPGXFSPNGXLEECQHQX

SEQ ID NO: 28023 - protein, 231 aa, Homo sapiens
  MOD_RES (15)..(15): Selenocysteine
  MOD_RES (18)..(18): Selenocysteine
  MOD_RES (28)..(28): Selenocysteine
  MOD_RES (71)..(71): Selenocysteine
  MOD_RES (73)..(73): Selenocysteine
  MOD_RES (82)..(82): Selenocysteine
  MOD_RES (114)..(114): Selenocysteine
  MOD_RES (143)..(143): Selenocysteine
  MOD_RES (155)..(155): Selenocysteine
  MOD_RES (160)..(160): Selenocysteine
  MOD_RES (169)..(169): Selenocysteine
  MOD_RES (175)..(175): Selenocysteine
  MOD_RES (183)..(183): Selenocysteine
  MOD_RES (190)..(190): Selenocysteine
  MOD_RES (196)..(196): Selenocysteine
  MOD_RES (218)..(218): Selenocysteine
MEPPGDWGPPPWRSXPKXDVLRLVLYLXFLGAPCYAPALPSCKEDEYPVGSECCPKCSPGYRVKEACGELXGXVCEPCPPGXYIAHLNGLSKCLQCQMCDPAMGLRASRNCSRXENAVCGCSPGHFCIVQDGDHCAACRAYAXSSPGQRVQKGGXESQDXLCQNCPPGXFSPNGXLEECQHQXKCSWLVXKAGAGXSSSHWVWWFLSGSLVIVIVCSXVGLIICVKRRKPR

SEQ ID NO: 28024 - protein, 283 aa, Homo sapiens
  MOD_RES (15)..(15): Selenocysteine
  MOD_RES (18)..(18): Selenocysteine
  MOD_RES (28)..(28): Selenocysteine
  MOD_RES (71)..(71): Selenocysteine
  MOD_RES (73)..(73): Selenocysteine
  MOD_RES (82)..(82): Selenocysteine
  MOD_RES (114)..(114): Selenocysteine
  MOD_RES (143)..(143): Selenocysteine
  MOD_RES (155)..(155): Selenocysteine
  MOD_RES (160)..(160): Selenocysteine
  MOD_RES (169)..(169): Selenocysteine
  MOD_RES (175)..(175): Selenocysteine
  MOD_RES (183)..(183): Selenocysteine
  MOD_RES (190)..(190): Selenocysteine
  MOD_RES (196)..(196): Selenocysteine
  MOD_RES (218)..(218): Selenocysteine
  MOD_RES (253)..(253): Selenocysteine
  MOD_RES (265)..(266): Selenocysteine
  MOD_RES (272)..(272): Selenocysteine
  MOD_RES (277)..(277): Selenocysteine
MEPPGDWGPPPWRSXPKXDVLRLVLYLXFLGAPCYAPALPSCKEDEYPVGSECCPKCSPGYRVKEACGELXGXVCEPCPPGXYIAHLNGLSKCLQCQMCDPAMGLRASRNCSRXENAVCGCSPGHFCIVQDGDHCAACRAYAXSSPGQRVQKGGXESQDXLCQNCPPGXFSPNGXLEECQHQXKCSWLVXKAGAGXSSSHWVWWFLSGSLVIVIVCSXVGLIICVKRRKPRGDVVKVIVSVQRKRQEAEGEAXVIEALQAPPDVXXVAVEEXIPSFXGRSPNH

SEQ ID NO: 28025 - protein, 193 aa, Homo sapiens
  MOD_RES (15)..(15): Selenocysteine
  MOD_RES (18)..(18): Selenocysteine
  MOD_RES (28)..(28): Selenocysteine
  MOD_RES (71)..(71): Selenocysteine
  MOD_RES (73)..(73): Selenocysteine
  MOD_RES (82)..(82): Selenocysteine
  MOD_RES (114)..(114): Selenocysteine
  MOD_RES (143)..(143): Selenocysteine
  MOD_RES (155)..(155): Selenocysteine
  MOD_RES (160)..(160): Selenocysteine
  MOD_RES (169)..(169): Selenocysteine
  MOD_RES (175)..(175): Selenocysteine
  MOD_RES (183)..(183): Selenocysteine
  MOD_RES (191)..(191): Selenocysteine
MEPPGDWGPPPWRSXPKXDVLRLVLYLXFLGAPCYAPALPSCKEDEYPVGSECCPKCSPGYRVKEACGELXGXVCEPCPPGXYIAHLNGLSKCLQCQMCDPAMGLRASRNCSRXENAVCGCSPGHFCIVQDGDHCAACRAYAXSSPGQRVQKGGXESQDXLCQNCPPGXFSPNGXLEECQHQXNRAWKSQXDL

SEQ ID NO: 28026 - protein, 25 aa, Homo sapiens
  MOD_RES (1)..(1): Any amino acid
  MOD_RES (3)..(3): Selenocysteine
  MOD_RES (11)..(11): Selenocysteine
XGXLEECQHQXNWPNHMCEKKKAKG

SEQ ID NO: 28027 - protein, 135 aa, Homo sapiens
  MOD_RES (32)..(32): Selenocysteine
  MOD_RES (36)..(36): Selenocysteine
  MOD_RES (60)..(60): Selenocysteine
  MOD_RES (73)..(73): Selenocysteine
  MOD_RES (78)..(78): Selenocysteine
  MOD_RES (105)..(105): Selenocysteine
  MOD_RES (109)..(110): Selenocysteine
  MOD_RES (112)..(112): Selenocysteine
  MOD_RES (126)..(126): Selenocysteine
MLQMAGQCSQNEYFDSLLHACIPCQLRCSSNXPPLXCQRYCNARSGLLGMANIDLEKSRXGDEIILPRGLEYXVEECXCEDCIKSKPKVDSDHCFPLPAMEEGAXILVXXKXNDYCKSLPAALSAXEIEKSISAR

SEQ ID NO: 28028 - protein, 184 aa, Homo sapiens
  MOD_RES (32)..(32): Selenocysteine
  MOD_RES (36)..(36): Selenocysteine
  MOD_RES (46)..(46): Selenocysteine
  MOD_RES (52)..(52): Selenocysteine
  MOD_RES (58)..(58): Selenocysteine
  MOD_RES (92)..(92): Selenocysteine
  MOD_RES (109)..(109): Selenocysteine
  MOD_RES (122)..(122): Selenocysteine
  MOD_RES (127)..(127): Selenocysteine
  MOD_RES (154)..(154): Selenocysteine
  MOD_RES (158)..(159): Selenocysteine
  MOD_RES (161)..(161): Selenocysteine
  MOD_RES (175)..(175): Selenocysteine
MLQMAGQCSQNEYFDSLLHACIPCQLRCSSNXPPLXCQRYCNASVXNSVKGXNAILWXCLGLSLIISLAVFVLMFLLRKINSEPLKDEFKNXGSGLLGMANIDLEKSRXGDEIILPRGLEYXVEECXCEDCIKSKPKVDSDHCFPLPAMEEGAXILVXXKXNDYCKSLPAALSAXEIEKSISAR

SEQ ID NO: 28029 - protein, 133 aa, Homo sapiens
  MOD_RES (1)..(1): Any amino acid
  MOD_RES (24)..(24): Selenocysteine
  MOD_RES (28)..(28): Selenocysteine
  MOD_RES (38)..(38): Selenocysteine
  MOD_RES (44)..(44): Selenocysteine
  MOD_RES (50)..(50): Selenocysteine
  MOD_RES (84)..(84): Selenocysteine
XQNEYFDSLLHACIPCQLRCSSNXPPLXCQRYCNASVXNSVKGXNAILWXCLGLSLIISLAVFVLMFLLRKINSEPLKDEFKNXEMESRSVAQAGVQWRDLNSLQPLPLGFKQFSHLSLLSNWDYRIRSPGHG

SEQ ID NO: 28030 - protein, 255 aa, Homo sapiens
  MOD_RES (29)..(29): Selenocysteine
  MOD_RES (43)..(43): Selenocysteine
  MOD_RES (45)..(45): Selenocysteine
  MOD_RES (54)..(55): Selenocysteine
  MOD_RES (87)..(88): Selenocysteine
  MOD_RES (119)..(119): Selenocysteine
  MOD_RES (132)..(132): Selenocysteine
  MOD_RES (144)..(144): Selenocysteine
  MOD_RES (168)..(168): Selenocysteine
  MOD_RES (181)..(181): Selenocysteine
  MOD_RES (239)..(239): Selenocysteine
MAQHGAMGAFRALCGLALLCALSLGQRPXGGPGCGPGRLLLGXGXDARCCRVHXXRCCRDYPGEECCSEWDCMCVQPEFHCGDPCCXXCRHHPCPPGQGVQSQGKFSFGFQCIDCASGXFSGGHEGHCKPWXDCCWRCRRRPKXPEAASSPRKSGASDRQRRRGGWEXCGCEPGRPPGPPXAASPSPGAPQAAGALRSALGRALLPWQQKWVQEGGSDQRPGPCSSAAAAGPCRREREXQSWPPSSLAGPDGVGS

SEQ ID NO: 28031 - protein, 234 aa, Homo sapiens
  MOD_RES (29)..(29): Selenocysteine
  MOD_RES (43)..(43): Selenocysteine
  MOD_RES (45)..(45): Selenocysteine
  MOD_RES (54)..(55): Selenocysteine
  MOD_RES (87)..(88): Selenocysteine
  MOD_RES (119)..(119): Selenocysteine
  MOD_RES (132)..(132): Selenocysteine
  MOD_RES (135)..(135): Selenocysteine
  MOD_RES (141)..(141): Selenocysteine
  MOD_RES (148)..(148): Selenocysteine
  MOD_RES (167)..(167): Selenocysteine
  MOD_RES (181)..(181): Selenocysteine
  MOD_RES (195)..(195): Selenocysteine
  MOD_RES (205)..(205): Selenocysteine
MAQHGAMGAFRALCGLALLCALSLGQRPXGGPGCGPGRLLLGXGXDARCCRVHXXRCCRDYPGEECCSEWDCMCVQPEFHCGDPCCXXCRHHPCPPGQGVQSQGKFSFGFQCIDCASGXFSGGHEGHCKPWXDCXQFGFLXVFPGNKXHNAVCVPGSPPAEPLGWLXVVLLAVAACVLLLXSAQLGLHIWQLRKXQLLLEVPPSXEDARSCQFPEEERGERSAEEKGRLGDLWV

SEQ ID NO: 28032 - protein, 241 aa, Homo sapiens
  MOD_RES (29)..(29): Selenocysteine
  MOD_RES (43)..(43): Selenocysteine
  MOD_RES (45)..(45): Selenocysteine
  MOD_RES (54)..(55): Selenocysteine
  MOD_RES (87)..(88): Selenocysteine
  MOD_RES (119)..(119): Selenocysteine
  MOD_RES (132)..(132): Selenocysteine
  MOD_RES (135)..(135): Selenocysteine
  MOD_RES (141)..(141): Selenocysteine
  MOD_RES (148)..(148): Selenocysteine
  MOD_RES (167)..(167): Selenocysteine
  MOD_RES (181)..(181): Selenocysteine
  MOD_RES (202)..(202): Selenocysteine
  MOD_RES (212)..(212): Selenocysteine
MAQHGAMGAFRALCGLALLCALSLGQRPXGGPGCGPGRLLLGXGXDARCCRVHXXRCCRDYPGEECCSEWDCMCVQPEFHCGDPCCXXCRHHPCPPGQGVQSQGKFSFGFQCIDCASGXFSGGHEGHCKPWXDCXQFGFLXVFPGNKXHNAVCVPGSPPAEPLGWLXVVLLAVAACVLLLXSAQLGLHIWQLRSQCMWPREXQLLLEVPPSXEDARSCQFPEEERGERSAEEKGRLGDLWV

SEQ ID NO: 28033 - protein, 169 aa, Homo sapiens
  MOD_RES (15)..(16): Selenocysteine
  MOD_RES (47)..(47): Selenocysteine
  MOD_RES (60)..(60): Selenocysteine
  MOD_RES (63)..(63): Selenocysteine
  MOD_RES (69)..(69): Selenocysteine
  MOD_RES (76)..(76): Selenocysteine
  MOD_RES (95)..(95): Selenocysteine
  MOD_RES (109)..(109): Selenocysteine
  MOD_RES (130)..(130): Selenocysteine
  MOD_RES (140)..(140): Selenocysteine
MCVQPEFHCGDPCCXXCRHHPCPPGQGVQSQGKFSFGFQCIDCASGXFSGGHEGHCKPWXDCXQFGFLXVFPGNKXHNAVCVPGSPPAEPLGWLXVVLLAVAACVLLLXSAQLGLHIWQLRSQCMWPREXQLLLEVPPSXEDARSCQFPEEERGERSAEEKGRLGDLWV

SEQ ID NO: 28034 - protein, 417 aa, Homo sapiens
  MOD_RES (12)..(12): Selenocysteine
  MOD_RES (15)..(15): Selenocysteine
  MOD_RES (28)..(28): Selenocysteine
  MOD_RES (74)..(74): Selenocysteine
  MOD_RES (109)..(109): Selenocysteine
  MOD_RES (125)..(125): Selenocysteine
  MOD_RES (161)..(161): Selenocysteine
  MOD_RES (168)..(168): Selenocysteine
  MOD_RES (180)..(180): Selenocysteine
  MOD_RES (244)..(244): Selenocysteine
  MOD_RES (266)..(266): Selenocysteine
  MOD_RES (291)..(291): Selenocysteine
  MOD_RES (297)..(297): Selenocysteine
  MOD_RES (330)..(330): Selenocysteine
  MOD_RES (345)..(345): Selenocysteine
  MOD_RES (370)..(370): Selenocysteine
  MOD_RES (373)..(373): Selenocysteine
  MOD_RES (381)..(381): Selenocysteine
  MOD_RES (388)..(388): Selenocysteine
  MOD_RES (393)..(393): Selenocysteine
  MOD_RES (410)..(410): Selenocysteine
  MOD_RES (412)..(412): Selenocysteine
MALKVLLEQEKXFFXLLVLLGYLSCKVXCESGDCRQQEFRDRSGNCVPCNQCGPGMELSKECGFGYGEDAQCVXCRLHRFKEDWGFQKCKPCLDCAVVNRFQKANCSAXSDAICGDCLPGFYRKXKLVGFQDMECVPCGDPPPPYEPHCASKVNLVKIASXASSPRDXALAAVICSALAXVLLALLILCVIYCKRQFMEKKPSWSLRSQDIQYNGSELSCFDRPQLHEYAHRACCQCRRDSVQXCGPVRLLPSMCCEEACSPNPAXLGCGVHSAASLQARNAGPAGEMVPXFFGSLXQSICGEFSDAWPLMQNPMGGDNISFCDSYPELXGEDIHSLNPELESSXSLDSNSSQDLVGGAVPVQSHSENFXAAXDLSRYNNXLVESASXQDALXMRSQLDQESGAVIHPAXQXSLQEA

SEQ ID NO: 28035 - protein, 423 aa, Homo sapiens
  MOD_RES (12)..(12): Selenocysteine
  MOD_RES (15)..(15): Selenocysteine
  MOD_RES (28)..(28): Selenocysteine
  MOD_RES (74)..(74): Selenocysteine
  MOD_RES (109)..(109): Selenocysteine
  MOD_RES (125)..(125): Selenocysteine
  MOD_RES (161)..(161): Selenocysteine
  MOD_RES (168)..(168): Selenocysteine
  MOD_RES (180)..(180): Selenocysteine
  MOD_RES (244)..(244): Selenocysteine
  MOD_RES (266)..(266): Selenocysteine
  MOD_RES (291)..(291): Selenocysteine
  MOD_RES (297)..(297): Selenocysteine
  MOD_RES (330)..(330): Selenocysteine
  MOD_RES (345)..(345): Selenocysteine
  MOD_RES (370)..(370): Selenocysteine
  MOD_RES (373)..(373): Selenocysteine
  MOD_RES (381)..(381): Selenocysteine
  MOD_RES (388)..(388): Selenocysteine
  MOD_RES (393)..(393): Selenocysteine
  MOD_RES (410)..(410): Selenocysteine
  MOD_RES (412)..(412): Selenocysteine
MALKVLLEQEKXFFXLLVLLGYLSCKVXCESGDCRQQEFRDRSGNCVPCNQCGPGMELSKECGFGYGEDAQCVXCRLHRFKEDWGFQKCKPCLDCAVVNRFQKANCSAXSDAICGDCLPGFYRKXKLVGFQDMECVPCGDPPPPYEPHCASKVNLVKIASXASSPRDXALAAVICSALAXVLLALLILCVIYCKRQFMEKKPSWSLRSQDIQYNGSELSCFDRPQLHEYAHRACCQCRRDSVQXCGPVRLLPSMCCEEACSPNPAXLGCGVHSAASLQARNAGPAGEMVPXFFGSLXQSICGEFSDAWPLMQNPMGGDNISFCDSYPELXGEDIHSLNPELESSXSLDSNSSQDLVGGAVPVQSHSENFXAAXDLSRYNNXLVESASXQDALXMRSQLDQESGAVIHPAXQXSLQVRQRLGSL

SEQ ID NO: 28036 - protein, 285 aa, Homo sapiens
  MOD_RES (29)..(29): Selenocysteine
  MOD_RES (36)..(36): Selenocysteine
  MOD_RES (48)..(48): Selenocysteine
  MOD_RES (112)..(112): Selenocysteine
  MOD_RES (134)..(134): Selenocysteine
  MOD_RES (159)..(159): Selenocysteine
  MOD_RES (165)..(165): Selenocysteine
  MOD_RES (198)..(198): Selenocysteine
  MOD_RES (213)..(213): Selenocysteine
  MOD_RES (238)..(238): Selenocysteine
  MOD_RES (241)..(241): Selenocysteine
  MOD_RES (249)..(249): Selenocysteine
  MOD_RES (256)..(256): Selenocysteine
  MOD_RES (261)..(261): Selenocysteine
  MOD_RES (278)..(278): Selenocysteine
  MOD_RES (280)..(280): Selenocysteine
MECVPCGDPPPPYEPHCASKVNLVKIASXASSPRDXALAAVICSALAXVLLALLILCVIYCKRQFMEKKPSWSLRSQDIQYNGSELSCFDRPQLHEYAHRACCQCRRDSVQXCGPVRLLPSMCCEEACSPNPAXLGCGVHSAASLQARNAGPAGEMVPXFFGSLXQSICGEFSDAWPLMQNPMGGDNISFCDSYPELXGEDIHSLNPELESSXSLDSNSSQDLVGGAVPVQSHSENFXAAXDLSRYNNXLVESASXQDALXMRSQLDQESGAVIHPAXQXSLQEA

SEQ ID NO: 28037 - protein, 122 aa, Homo sapiens
  MOD_RES (5)..(5): Selenocysteine
  MOD_RES (16)..(16): Selenocysteine
  MOD_RES (18)..(18): Selenocysteine
  MOD_RES (20)..(20): Selenocysteine
  MOD_RES (29)..(29): Selenocysteine
  MOD_RES (43)..(44): Selenocysteine
  MOD_RES (47)..(47): Selenocysteine
  MOD_RES (69)..(69): Selenocysteine
  MOD_RES (71)..(71): Selenocysteine
  MOD_RES (79)..(79): Selenocysteine
  MOD_RES (81)..(81): Selenocysteine
  MOD_RES (88)..(88): Selenocysteine
  MOD_RES (104)..(104): Selenocysteine
  MOD_RES (112)..(112): Selenocysteine
MGLSXVPDLLLPLEPXCXMXVQARGRIRXAGSVRAAPSPLQKXXSDXASAAPNAERKWVRWRSLLAQWXGXPCVAAGRXSXGIIGVKXFSSASIAASASMGPCXSPARRNRXPCAPAMQVSF

SEQ ID NO: 28038 - protein, 412 aa, Homo sapiens
  MOD_RES (5)..(5): Selenocysteine
  MOD_RES (60)..(60): Selenocysteine
  MOD_RES (75)..(75): Selenocysteine
  MOD_RES (80)..(80): Selenocysteine
  MOD_RES (110)..(110): Selenocysteine
  MOD_RES (121)..(121): Selenocysteine
  MOD_RES (124)..(124): Selenocysteine
  MOD_RES (149)..(149): Selenocysteine
  MOD_RES (162)..(162): Selenocysteine
  MOD_RES (167)..(168): Selenocysteine
  MOD_RES (209)..(209): Selenocysteine
  MOD_RES (219)..(221): Selenocysteine
  MOD_RES (233)..(233): Selenocysteine
  MOD_RES (237)..(237): Selenocysteine
  MOD_RES (239)..(239): Selenocysteine
  MOD_RES (249)..(249): Selenocysteine
  MOD_RES (251)..(251): Selenocysteine
  MOD_RES (255)..(255): Selenocysteine
  MOD_RES (257)..(257): Selenocysteine
  MOD_RES (284)..(284): Selenocysteine
  MOD_RES (310)..(310): Selenocysteine
  MOD_RES (315)..(315): Selenocysteine
  MOD_RES (363)..(363): Selenocysteine
  MOD_RES (368)..(368): Selenocysteine
  MOD_RES (374)..(374): Selenocysteine
MGLSXVPDLLLPLVLLELLVGIYPSGVIGLVPHLGDREKRDSVCPQGKYIHPQNNSICCXKCHKEMGQVEISSCXVDRDXVCGCRKNQYRHYWSENLFQCFNCSLCLNGXVHLSCQEKQNXVCXCHAGFFLRENECVSCSNCKKSLECXKLCLPQIENVKGXEDSGXXVLLPLVIFFGLCLLSLLFIGLMYRYQRWKSKLYSIVCGKSXPEKEGELEGXXXKPLAPNPSFSPXPGFXPXLGFSPVPSSXFXSSSXYXPGDCPNFAAPRREVAPPYQGADPILAXALASDPIPNPLQKWEDSAHKPQSLDXDDPAXLYAVVENVPPLRWKEFVRRLGLSDHEIDRLELQNGRCLREAQYSMLAXWRRRXPRREAXLELLGRVLRDMDLLGCLEDIEEALCGPAALPPAPSLLR

SEQ ID NO: 28039 - protein, 72 aa, Homo sapiens
  MOD_RES (5)..(5): Selenocysteine
  MOD_RES (60)..(60): Selenocysteine
MGLSXVPDLLLPLVLLELLVGIYPSGVIGLVPHLGDREKRDSVCPQGKYIHPQNNSICCXKCHKEPVPALLE

SEQ ID NO: 28040 - protein, 118 aa, Homo sapiens
  MOD_RES (5)..(5): Selenocysteine
  MOD_RES (60)..(60): Selenocysteine
  MOD_RES (70)..(70): Selenocysteine
  MOD_RES (81)..(81): Selenocysteine
  MOD_RES (109)..(109): Selenocysteine
  MOD_RES (114)..(114): Selenocysteine
MGLSXVPDLLLPLVLLELLVGIYPSGVIGLVPHLGDREKRDSVCPQGKYIHPQNNSICCXKCHKGPGQDXDCRECESGSFXASENHLRHCLSCSKCRKEMGQVEISSCXVDRDXVCGC

SEQ ID NO: 28041 - protein, 71 aa, Homo sapiens
  MOD_RES (5)..(5): Selenocysteine
  MOD_RES (60)..(60): Selenocysteine
  MOD_RES (66)..(66): Selenocysteine
MGLSXVPDLLLPLVLLELLVGIYPSGVIGLVPHLGDREKRDSVCPQGKYIHPQNNSICCXKCHKGXYLYND

SEQ ID NO: 28042 - protein, 254 aa, Homo sapiens
  MOD_RES (5)..(5): Selenocysteine
  MOD_RES (60)..(60): Selenocysteine
  MOD_RES (66)..(66): Selenocysteine
  MOD_RES (79)..(79): Selenocysteine
  MOD_RES (90)..(90): Selenocysteine
  MOD_RES (118)..(118): Selenocysteine
  MOD_RES (123)..(123): Selenocysteine
  MOD_RES (153)..(153): Selenocysteine
  MOD_RES (230)..(230): Selenocysteine
  MOD_RES (237)..(237): Selenocysteine
  MOD_RES (240)..(240): Selenocysteine
MGLSXVPDLLLPLVLLELLVGIYPSGVIGLVPHLGDREKRDSVCPQGKYIHPQNNSICCXKCHKGXYLYNDCPGPGQDXDCRECESGSFXASENHLRHCLSCSKCRKEMGQVEISSCXVDRDXVCGCRKNQYRHYWSENLFQCFNCSLCLNGXVHLSCERSSPEAKPSPHPRGWPLPHAVALPFLPPPVFCGSDNQLLSGRPHPVPRHFLCPVGWGCRRFSFSCAALLPXGQEKQNXVCXCHAGFFLRENECVS

SEQ ID NO: 28043 - protein, 218 aa, Homo sapiens
  MOD_RES (5)..(5): Selenocysteine
  MOD_RES (60)..(60): Selenocysteine
  MOD_RES (66)..(66): Selenocysteine
  MOD_RES (79)..(79): Selenocysteine
  MOD_RES (90)..(90): Selenocysteine
  MOD_RES (118)..(118): Selenocysteine
  MOD_RES (123)..(123): Selenocysteine
  MOD_RES (153)..(153): Selenocysteine
  MOD_RES (164)..(164): Selenocysteine
  MOD_RES (167)..(167): Selenocysteine
  MOD_RES (201)..(201): Selenocysteine
  MOD_RES (203)..(203): Selenocysteine
MGLSXVPDLLLPLVLLELLVGIYPSGVIGLVPHLGDREKRDSVCPQGKYIHPQNNSICCXKCHKGXYLYNDCPGPGQDXDCRECESGSFXASENHLRHCLSCSKCRKEMGQVEISSCXVDRDXVCGCRKNQYRHYWSENLFQCFNCSLCLNGXVHLSCQEKQNXVCXCHAGFFLRENECVSCSKVLLCRPGWNAVARSRLXAXSASQIQAILLLQPPK

SEQ ID NO: 28044 - protein, 298 aa, Homo sapiens
  MOD_RES (5)..(5): Selenocysteine
  MOD_RES (60)..(60): Selenocysteine
  MOD_RES (66)..(66): Selenocysteine
  MOD_RES (79)..(79): Selenocysteine
  MOD_RES (90)..(90): Selenocysteine
  MOD_RES (118)..(118): Selenocysteine
  MOD_RES (123)..(123): Selenocysteine
  MOD_RES (153)..(153): Selenocysteine
  MOD_RES (164)..(164): Selenocysteine
  MOD_RES (167)..(167): Selenocysteine
  MOD_RES (192)..(192): Selenocysteine
  MOD_RES (205)..(205): Selenocysteine
  MOD_RES (210)..(211): Selenocysteine
  MOD_RES (270)..(270): Selenocysteine
MGLSXVPDLLLPLVLLELLVGIYPSGVIGLVPHLGDREKRDSVCPQGKYIHPQNNSICCXKCHKGXYLYNDCPGPGQDXDCRECESGSFXASENHLRHCLSCSKCRKEMGQVEISSCXVDRDXVCGCRKNQYRHYWSENLFQCFNCSLCLNGXVHLSCQEKQNXVCXCHAGFFLRENECVSCSNCKKSLECXKLCLPQIENVKGXEDSGXXVLLPLVIFFGLCLLSLLFIGLMYRYQRWKSKLYSIGEWGLWEGEGAGGGEGGHGWVRWXCVEGGEECPLSSYRWGLWAEGGPGWLGR

SEQ ID NO: 28045 - protein, 455 aa, Homo sapiens
  MOD_RES (5)..(5): Selenocysteine
  MOD_RES (60)..(60): Selenocysteine
  MOD_RES (66)..(66): Selenocysteine
  MOD_RES (79)..(79): Selenocysteine
  MOD_RES (90)..(90): Selenocysteine
  MOD_RES (118)..(118): Selenocysteine
  MOD_RES (123)..(123): Selenocysteine
  MOD_RES (153)..(153): Selenocysteine
  MOD_RES (164)..(164): Selenocysteine
  MOD_RES (167)..(167): Selenocysteine
  MOD_RES (192)..(192): Selenocysteine
  MOD_RES (205)..(205): Selenocysteine
  MOD_RES (210)..(211): Selenocysteine
  MOD_RES (252)..(252): Selenocysteine
  MOD_RES (262)..(264): Selenocysteine
  MOD_RES (276)..(276): Selenocysteine
  MOD_RES (280)..(280): Selenocysteine
  MOD_RES (282)..(282): Selenocysteine
  MOD_RES (292)..(292): Selenocysteine
  MOD_RES (294)..(294): Selenocysteine
  MOD_RES (298)..(298): Selenocysteine
  MOD_RES (300)..(300): Selenocysteine
  MOD_RES (327)..(327): Selenocysteine
  MOD_RES (353)..(353): Selenocysteine
  MOD_RES (358)..(358): Selenocysteine
  MOD_RES (406)..(406): Selenocysteine
  MOD_RES (411)..(411): Selenocysteine
  MOD_RES (417)..(417): Selenocysteine
MGLSXVPDLLLPLVLLELLVGIYPSGVIGLVPHLGDREKRDSVCPQGKYIHPQNNSICCXKCHKGXYLYNDCPGPGQDXDCRECESGSFXASENHLRHCLSCSKCRKEMGQVEISSCXVDRDXVCGCRKNQYRHYWSENLFQCFNCSLCLNGXVHLSCQEKQNXVCXCHAGFFLRENECVSCSNCKKSLECXKLCLPQIENVKGXEDSGXXVLLPLVIFFGLCLLSLLFIGLMYRYQRWKSKLYSIVCGKSXPEKEGELEGXXXKPLAPNPSFSPXPGFXPXLGFSPVPSSXFXSSSXYXPGDCPNFAAPRREVAPPYQGADPILAXALASDPIPNPLQKWEDSAHKPQSLDXDDPAXLYAVVENVPPLRWKEFVRRLGLSDHEIDRLELQNGRCLREAQYSMLAXWRRRXPRREAXLELLGRVLRDMDLLGCLEDIEEALCGPAALPPAPSLLR

SEQ ID NO: 28046 - protein, 155 aa, Homo sapiens
  MOD_RES (30)..(30): Selenocysteine
  MOD_RES (39)..(39): Selenocysteine
  MOD_RES (49)..(49): Selenocysteine
  MOD_RES (68)..(68): Selenocysteine
  MOD_RES (70)..(70): Selenocysteine
  MOD_RES (73)..(73): Selenocysteine
  MOD_RES (82)..(82): Selenocysteine
  MOD_RES (84)..(84): Selenocysteine
  MOD_RES (107)..(107): Selenocysteine
  MOD_RES (111)..(111): Selenocysteine
  MOD_RES (119)..(119): Selenocysteine
MAPVAVWAALAVGLELWAAAHALPAQVAFXPYAPEPGSXCRLREYYDQXAQMCCSKCSPGQHAKVFCXKXSDXVCDSCEDSXYXQLWNWVPECLSCGSRCSSDQVEXQACXREQNRICXCRPGWYCALSKQEGCRLCAPLRKCRPGFGVARPDLS

SEQ ID NO: 28047 - protein, 461 aa, Homo sapiens
  MOD_RES (30)..(30): Selenocysteine
  MOD_RES (39)..(39): Selenocysteine
  MOD_RES (49)..(49): Selenocysteine
  MOD_RES (68)..(68): Selenocysteine
  MOD_RES (70)..(70): Selenocysteine
  MOD_RES (73)..(73): Selenocysteine
  MOD_RES (82)..(82): Selenocysteine
  MOD_RES (84)..(84): Selenocysteine
  MOD_RES (107)..(107): Selenocysteine
  MOD_RES (111)..(111): Selenocysteine
  MOD_RES (119)..(119): Selenocysteine
  MOD_RES (154)..(154): Selenocysteine
  MOD_RES (156)..(156): Selenocysteine
  MOD_RES (168)..(168): Selenocysteine
  MOD_RES (172)..(173): Selenocysteine
  MOD_RES (176)..(176): Selenocysteine
  MOD_RES (201)..(201): Selenocysteine
  MOD_RES (203)..(203): Selenocysteine
  MOD_RES (206)..(206): Selenocysteine
  MOD_RES (222)..(222): Selenocysteine
  MOD_RES (227)..(227): Selenocysteine
  MOD_RES (230)..(230): Selenocysteine
  MOD_RES (235)..(235): Selenocysteine
  MOD_RES (239)..(239): Selenocysteine
  MOD_RES (255)..(255): Selenocysteine
  MOD_RES (269)..(269): Selenocysteine
  MOD_RES (285)..(285): Selenocysteine
  MOD_RES (311)..(311): Selenocysteine
  MOD_RES (322)..(322): Selenocysteine
  MOD_RES (344)..(344): Selenocysteine
  MOD_RES (365)..(365): Selenocysteine
  MOD_RES (377)..(377): Selenocysteine
  MOD_RES (382)..(382): Selenocysteine
  MOD_RES (404)..(404): Selenocysteine
  MOD_RES (408)..(408): Selenocysteine
  MOD_RES (436)..(436): Selenocysteine
  MOD_RES (439)..(439): Selenocysteine
  MOD_RES (444)..(444): Selenocysteine
MAPVAVWAALAVGLELWAAAHALPAQVAFXPYAPEPGSXCRLREYYDQXAQMCCSKCSPGQHAKVFCXKXSDXVCDSCEDSXYXQLWNWVPECLSCGSRCSSDQVEXQACXREQNRICXCRPGWYCALSKQEGCRLCAPLRKCRPGFGVARPGXEXSDVVCKPCAPGXFSNXXSSXDICRPHQICNVVAIPGNASMDAVCXSXSPXRSMAPGAVHLPQPVSXRSQHXQPXPEPSXAPSXSFLLPMGPSPPAEGSXGDFALPVGLIVGVXALGLLIIGVVNCVIMXQVKKKPLCLQREAKVPHLPADKARGXQGPEQQHLLIXAPSSSSSSLESSASALDRRAPXRNQPQAPGVEASGAGEARASXGSSDSSPGGHGXQVNVXCIVNVCSSSDHSSQCSSQASSXMGDXDSSPSESPKDEQVPFSKEECAFRSQLEXPEXLLGSXEEKPLPLGVPDAGMKPS

SEQ ID NO: 28048 - protein, 655 aa, Homo sapiens
  MOD_RES (3)..(3): Selenocysteine
  MOD_RES (9)..(9): Selenocysteine
  MOD_RES (22)..(22): Selenocysteine
  MOD_RES (24)..(24): Selenocysteine
  MOD_RES (38)..(40): Selenocysteine
  MOD_RES (53)..(53): Selenocysteine
  MOD_RES (61)..(61): Selenocysteine
  MOD_RES (66)..(66): Selenocysteine
  MOD_RES (74)..(74): Selenocysteine
  MOD_RES (81)..(81): Selenocysteine
  MOD_RES (83)..(83): Selenocysteine
  MOD_RES (95)..(95): Selenocysteine
  MOD_RES (97)..(97): Selenocysteine
  MOD_RES (127)..(127): Selenocysteine
  MOD_RES (132)..(132): Selenocysteine
  MOD_RES (143)..(143): Selenocysteine
  MOD_RES (148)..(148): Selenocysteine
  MOD_RES (161)..(161): Selenocysteine
  MOD_RES (163)..(163): Selenocysteine
  MOD_RES (175)..(175): Selenocysteine
  MOD_RES (190)..(190): Selenocysteine
  MOD_RES (204)..(204): Selenocysteine
  MOD_RES (207)..(207): Selenocysteine
  MOD_RES (213)..(213): Selenocysteine
  MOD_RES (221)..(221): Selenocysteine
  MOD_RES (227)..(227): Selenocysteine
  MOD_RES (238)..(238): Selenocysteine
  MOD_RES (245)..(245): Selenocysteine
  MOD_RES (254)..(254): Selenocysteine
  MOD_RES (274)..(274): Selenocysteine
  MOD_RES (279)..(279): Selenocysteine
  MOD_RES (291)..(291): Selenocysteine
  MOD_RES (319)..(319): Selenocysteine
  MOD_RES (326)..(326): Selenocysteine
  MOD_RES (376)..(376): Selenocysteine
  MOD_RES (399)..(399): Selenocysteine
  MOD_RES (401)..(401): Selenocysteine
  MOD_RES (453)..(453): Selenocysteine
  MOD_RES (467)..(467): Selenocysteine
  MOD_RES (501)..(502): Selenocysteine
  MOD_RES (506)..(506): Selenocysteine
  MOD_RES (537)..(537): Selenocysteine
  MOD_RES (563)..(563): Selenocysteine
  MOD_RES (578)..(578): Selenocysteine
  MOD_RES (584)..(584): Selenocysteine
  MOD_RES (642)..(642): Selenocysteine
MGXSPSSSXALASCSRIARRAXAXMIAGSLLLLGFLSXXXAQPEQKASNLIGXYRHVDRAXGQVLXCDKCPAGXYVSEHCXNXSLRVCSSCPVGXFXRHENGIEKCHDCSQPCPWPMIEKLPCAALXDRECXCPPGMFQSNAXCAPHXVCPVGWGVRKKGXEXEDVRCKQCARGXFSDVPSSVMKCKAYXDCLSQNLVVIKPGXKEXDNVCGXLPSFSSSXSPSPGXAIFPRPEHMEXHEVPSSXYVPKGMNSXESNSSASVRPKVLSSIQEGXVPDNXSSARGKEDVNKXLPNLQVVNHQQGPHHRHILKLLPSMEAXGGEKSSXPIKGPKRGHPRQNLHKHFDINEHLPWMIVLFLLLVLVVIVVCSIRKSSRXLKKGPRQDPSAIVEKAGLKKSMXPXQNREKWIYYCNGHGIDILKLVAAQVGSQWKDIYQFLCNASEREVAAFSNGYXADHERAYAALQHWXIRGPEASLAQLISALRQHRRNDVVEKIRGLMEDXXQLEXDKLALPMSPSPLSPSPIPSPNAKLENSALLXVEPSPQDKNKGFFVDESEPLLRCDSXSSGSSALSRNGSFIXKEKKDXVLRQVRLDPCDLQPIFDDMLHFLNPEELRVIEEIPQAEDKLDRLFEIIGVKSQEASQXLLDSVYSHLPDLL

SEQ ID NO: 28049 - protein, 126 aa, Homo sapiens
  MOD_RES (28)..(28): Selenocysteine
  MOD_RES (68)..(68): Selenocysteine
  MOD_RES (106)..(106): Selenocysteine
  MOD_RES (115)..(115): Selenocysteine
  MOD_RES (125)..(125): Selenocysteine
MEQRPRGCAAVAAALLLVLLGARAQGGXRSPRCDCAGDFHKKIGLFCCRGCPAASQVALENCSAVADXRCGCKPGWFVECQVSQCVSSSPFYCQPCLDCGALHRHXRLLCHPSVXLGQRPHPSSXS

SEQ ID NO: 28050 - protein, 136 aa, Homo sapiens
  MOD_RES (28)..(28): Selenocysteine
  MOD_RES (68)..(68): Selenocysteine
  MOD_RES (106)..(106): Selenocysteine
  MOD_RES (115)..(115): Selenocysteine
  MOD_RES (119)..(119): Selenocysteine
  MOD_RES (136)..(136): Selenocysteine
MEQRPRGCAAVAAALLLVLLGARAQGGXRSPRCDCAGDFHKKIGLFCCRGCPAASQVALENCSAVADXRCGCKPGWFVECQVSQCVSSSPFYCQPCLDCGALHRHXRLLCSRRDXDCGXCLPGFYEHGDGCVSCPX

SEQ ID NO: 28051 - protein, 372 aa, Homo sapiens
  MOD_RES (28)..(28): Selenocysteine
  MOD_RES (68)..(68): Selenocysteine
  MOD_RES (106)..(106): Selenocysteine
  MOD_RES (115)..(115): Selenocysteine
  MOD_RES (119)..(119): Selenocysteine
  MOD_RES (136)..(136): Selenocysteine
  MOD_RES (138)..(138): Selenocysteine
  MOD_RES (174)..(174): Selenocysteine
  MOD_RES (176)..(176): Selenocysteine
  MOD_RES (178)..(178): Selenocysteine
  MOD_RES (190)..(190): Selenocysteine
  MOD_RES (200)..(200): Selenocysteine
  MOD_RES (205)..(205): Selenocysteine
  MOD_RES (215)..(215): Selenocysteine
  MOD_RES (228)..(228): Selenocysteine
  MOD_RES (237)..(237): Selenocysteine
  MOD_RES (243)..(243): Selenocysteine
  MOD_RES (252)..(252): Selenocysteine
  MOD_RES (270)..(270): Selenocysteine
  MOD_RES (308)..(308): Selenocysteine
MEQRPRGCAAVAAALLLVLLGARAQGGXRSPRCDCAGDFHKKIGLFCCRGCPAASQVALENCSAVADXRCGCKPGWFVECQVSQCVSSSPFYCQPCLDCGALHRHXRLLCSRRDXDCGXCLPGFYEHGDGCVSCPXSXLGSCPERCAAVCGWRQMFWVQVLLAGLVVPLLLGAXLXYXYRHCWPHKPLVXADEAGMEALXPPPAXHLSPLDSAHXLLAPPDSSEKICXVQLVGNSWXPGYPEXQEALCPQVXWSWDQLPSRALGPAAAPXLSPESPAGSPAMMLQPGPQLYDVMDAVPARRWKEFVRXLGLREAEIEAVEVEIGRFRDQQYEMLKRWRQQQPAGLGAVYAALERMGLDGCVEDLRSRLQRGP

SEQ ID NO: 28052 - protein, 234 aa, Homo sapiens
  MOD_RES (28)..(28): Selenocysteine
  MOD_RES (62)..(62): Selenocysteine
  MOD_RES (67)..(67): Selenocysteine
  MOD_RES (77)..(77): Selenocysteine
  MOD_RES (90)..(90): Selenocysteine
  MOD_RES (99)..(99): Selenocysteine
  MOD_RES (105)..(105): Selenocysteine
  MOD_RES (114)..(114): Selenocysteine
  MOD_RES (132)..(132): Selenocysteine
  MOD_RES (170)..(170): Selenocysteine
MEQRPRGCAAVAAALLLVLLGARAQGGXRSPRCDCAGDFHKKIGLFCCRGCPADEAGMEALXPPPAXHLSPLDSAHXLLAPPDSSEKICXVQLVGNSWXPGYPEXQEALCPQVXWSWDQLPSRALGPAAAPXLSPESPAGSPAMMLQPGPQLYDVMDAVPARRWKEFVRXLGLREAEIEAVEVEIGRFRDQQYEMLKRWRQQQPAGLGAVYAALERMGLDGCVEDLRSRLQRGP

SEQ ID NO: 28053 - protein, 181 aa, Homo sapiens
  MOD_RES (28)..(28): Selenocysteine
  MOD_RES (62)..(62): Selenocysteine
  MOD_RES (69)..(69): Selenocysteine
  MOD_RES (77)..(77): Selenocysteine
  MOD_RES (113)..(113): Selenocysteine
  MOD_RES (151)..(151): Selenocysteine
  MOD_RES (160)..(160): Selenocysteine
  MOD_RES (164)..(164): Selenocysteine
  MOD_RES (181)..(181): Selenocysteine
MEQRPRGCAAVAAALLLVLLGARAQGGXRSPRCDCAGDFHKKIGLFCCRGCPAGHYLKAPCXEPCGNSXCLVCPQDXFLAWENHHNSECARCQACDEQASQVALENCSAVADXRCGCKPGWFVECQVSQCVSSSPFYCQPCLDCGALHRHXRLLCSRRDXDCGXCLPGFYEHGDGCVSCPX

SEQ ID NO: 28054 - protein, 277 aa, Homo sapiens
  MOD_RES (28)..(28): Selenocysteine
  MOD_RES (62)..(62): Selenocysteine
  MOD_RES (69)..(69): Selenocysteine
  MOD_RES (77)..(77): Selenocysteine
  MOD_RES (113)..(113): Selenocysteine
  MOD_RES (151)..(151): Selenocysteine
  MOD_RES (160)..(160): Selenocysteine
  MOD_RES (164)..(164): Selenocysteine
  MOD_RES (181)..(181): Selenocysteine
  MOD_RES (221)..(221): Selenocysteine
  MOD_RES (231)..(232): Selenocysteine
MEQRPRGCAAVAAALLLVLLGARAQGGXRSPRCDCAGDFHKKIGLFCCRGCPAGHYLKAPCXEPCGNSXCLVCPQDXFLAWENHHNSECARCQACDEQASQVALENCSAVADXRCGCKPGWFVECQVSQCVSSSPFYCQPCLDCGALHRHXRLLCSRRDXDCGXCLPGFYEHGDGCVSCPXPPPSLAGAPWGAVQSAVPLSVAGGRVGGVLGMRVGELGWXEGRRVRRGAXXQHPPAAFSVLGPGAPGWPCGPPPAWGHPDLHIPPLLASQAPGYCR

SEQ ID NO: 28055 - protein, 426 aa, Homo sapiens
  MOD_RES (28)..(28): Selenocysteine
  MOD_RES (62)..(62): Selenocysteine
  MOD_RES (69)..(69): Selenocysteine
  MOD_RES (77)..(77): Selenocysteine
  MOD_RES (113)..(113): Selenocysteine
  MOD_RES (151)..(151): Selenocysteine
  MOD_RES (160)..(160): Selenocysteine
  MOD_RES (164)..(164): Selenocysteine
  MOD_RES (181)..(181): Selenocysteine
  MOD_RES (228)..(228): Selenocysteine
  MOD_RES (230)..(230): Selenocysteine
  MOD_RES (232)..(232): Selenocysteine
  MOD_RES (244)..(244): Selenocysteine
  MOD_RES (254)..(254): Selenocysteine
  MOD_RES (259)..(259): Selenocysteine
  MOD_RES (269)..(269): Selenocysteine
  MOD_RES (282)..(282): Selenocysteine
  MOD_RES (291)..(291): Selenocysteine
  MOD_RES (297)..(297): Selenocysteine
  MOD_RES (306)..(306): Selenocysteine
  MOD_RES (324)..(324): Selenocysteine
  MOD_RES (362)..(362): Selenocysteine
MEQRPRGCAAVAAALLLVLLGARAQGGXRSPRCDCAGDFHKKIGLFCCRGCPAGHYLKAPCXEPCGNSXCLVCPQDXFLAWENHHNSECARCQACDEQASQVALENCSAVADXRCGCKPGWFVECQVSQCVSSSPFYCQPCLDCGALHRHXRLLCSRRDXDCGXCLPGFYEHGDGCVSCPXPPPSLAGAPWGAVQSAVPLSVAGGRVGVFWVQVLLAGLVVPLLLGAXLXYXYRHCWPHKPLVXADEAGMEALXPPPAXHLSPLDSAHXLLAPPDSSEKICXVQLVGNSWXPGYPEXQEALCPQVXWSWDQLPSRALGPAAAPXLSPESPAGSPAMMLQPGPQLYDVMDAVPARRWKEFVRXLGLREAEIEAVEVEIGRFRDQQYEMLKRWRQQQPAGLGAVYAALERMGLDGCVEDLRSRLQRGP

SEQ ID NO: 28056 - protein, 417 aa, Homo sapiens
  MOD_RES (28)..(28): Selenocysteine
  MOD_RES (62)..(62): Selenocysteine
  MOD_RES (69)..(69): Selenocysteine
  MOD_RES (77)..(77): Selenocysteine
  MOD_RES (113)..(113): Selenocysteine
  MOD_RES (151)..(151): Selenocysteine
  MOD_RES (160)..(160): Selenocysteine
  MOD_RES (164)..(164): Selenocysteine
  MOD_RES (181)..(181): Selenocysteine
  MOD_RES (183)..(183): Selenocysteine
  MOD_RES (219)..(219): Selenocysteine
  MOD_RES (221)..(221): Selenocysteine
  MOD_RES (223)..(223): Selenocysteine
  MOD_RES (235)..(235): Selenocysteine
  MOD_RES (245)..(245): Selenocysteine
  MOD_RES (250)..(250): Selenocysteine
  MOD_RES (260)..(260): Selenocysteine
  MOD_RES (273)..(273): Selenocysteine
  MOD_RES (282)..(282): Selenocysteine
  MOD_RES (288)..(288): Selenocysteine
  MOD_RES (297)..(297): Selenocysteine
  MOD_RES (315)..(315): Selenocysteine
  MOD_RES (353)..(353): Selenocysteine
MEQRPRGCAAVAAALLLVLLGARAQGGXRSPRCDCAGDFHKKIGLFCCRGCPAGHYLKAPCXEPCGNSXCLVCPQDXFLAWENHHNSECARCQACDEQASQVALENCSAVADXRCGCKPGWFVECQVSQCVSSSPFYCQPCLDCGALHRHXRLLCSRRDXDCGXCLPGFYEHGDGCVSCPXSXLGSCPERCAAVCGWRQMFWVQVLLAGLVVPLLLGAXLXYXYRHCWPHKPLVXADEAGMEALXPPPAXHLSPLDSAHXLLAPPDSSEKICXVQLVGNSWXPGYPEXQEALCPQVXWSWDQLPSRALGPAAAPXLSPESPAGSPAMMLQPGPQLYDVMDAVPARRWKEFVRXLGLREAEIEAVEVEIGRFRDQQYEMLKRWRQQQPAGLGAVYAALERMGLDGCVEDLRSRLQRGP

SEQ ID NO: 28057 - protein, 380 aa, Homo sapiens
  MOD_RES (28)..(28): Selenocysteine
  MOD_RES (62)..(62): Selenocysteine
  MOD_RES (69)..(69): Selenocysteine
  MOD_RES (77)..(77): Selenocysteine
  MOD_RES (113)..(113): Selenocysteine
  MOD_RES (151)..(151): Selenocysteine
  MOD_RES (160)..(160): Selenocysteine
  MOD_RES (164)..(164): Selenocysteine
  MOD_RES (181)..(181): Selenocysteine
  MOD_RES (183)..(183): Selenocysteine
  MOD_RES (208)..(208): Selenocysteine
  MOD_RES (213)..(213): Selenocysteine
  MOD_RES (223)..(223): Selenocysteine
  MOD_RES (236)..(236): Selenocysteine
  MOD_RES (245)..(245): Selenocysteine
  MOD_RES (251)..(251): Selenocysteine
  MOD_RES (260)..(260): Selenocysteine
  MOD_RES (278)..(278): Selenocysteine
  MOD_RES (316)..(316): Selenocysteine
MEQRPRGCAAVAAALLLVLLGARAQGGXRSPRCDCAGDFHKKIGLFCCRGCPAGHYLKAPCXEPCGNSXCLVCPQDXFLAWENHHNSECARCQACDEQASQVALENCSAVADXRCGCKPGWFVECQVSQCVSSSPFYCQPCLDCGALHRHXRLLCSRRDXDCGXCLPGFYEHGDGCVSCPXSXLGSCPERCAAVCGWRQNEAGMEALXPPPAXHLSPLDSAHXLLAPPDSSEKICXVQLVGNSWXPGYPEXQEALCPQVXWSWDQLPSRALGPAAAPXLSPESPAGSPAMMLQPGPQLYDVMDAVPARRWKEFVRXLGLREAEIEAVEVEIGRFRDQQYEMLKRWRQQQPAGLGAVYAALERMGLDGCVEDLRSRLQRGP

SEQ ID NO: 28058 - protein, 253 aa, Homo sapiens
  MOD_RES (28)..(28): Selenocysteine
  MOD_RES (62)..(62): Selenocysteine
  MOD_RES (69)..(69): Selenocysteine
  MOD_RES (77)..(77): Selenocysteine
  MOD_RES (113)..(113): Selenocysteine
  MOD_RES (151)..(151): Selenocysteine
  MOD_RES (160)..(160): Selenocysteine
  MOD_RES (164)..(164): Selenocysteine
  MOD_RES (181)..(181): Selenocysteine
  MOD_RES (183)..(183): Selenocysteine
  MOD_RES (211)..(211): Selenocysteine
  MOD_RES (227)..(227): Selenocysteine
  MOD_RES (229)..(229): Selenocysteine
MEQRPRGCAAVAAALLLVLLGARAQGGXRSPRCDCAGDFHKKIGLFCCRGCPAGHYLKAPCXEPCGNSXCLVCPQDXFLAWENHHNSECARCQACDEQASQVALENCSAVADXRCGCKPGWFVECQVSQCVSSSPFYCQPCLDCGALHRHXRLLCSRRDXDCGXCLPGFYEHGDGCVSCPXSXLGSCPERCAAVCGWRQSRWCAGNASGRXGMDRGEAGEEGGNHPXPXSCFQCSGSRCSWLALWSPSCLGPP

SEQ ID NO: 28059 - protein, 218 aa, Homo sapiens
  MOD_RES (28)..(28): Selenocysteine
  MOD_RES (62)..(62): Selenocysteine
  MOD_RES (69)..(69): Selenocysteine
  MOD_RES (77)..(77): Selenocysteine
  MOD_RES (113)..(113): Selenocysteine
  MOD_RES (151)..(151): Selenocysteine
  MOD_RES (160)..(160): Selenocysteine
  MOD_RES (164)..(164): Selenocysteine
  MOD_RES (181)..(181): Selenocysteine
MEQRPRGCAAVAAALLLVLLGARAQGGXRSPRCDCAGDFHKKIGLFCCRGCPAGHYLKAPCXEPCGNSXCLVCPQDXFLAWENHHNSECARCQACDEQASQVALENCSAVADXRCGCKPGWFVECQVSQCVSSSPFYCQPCLDCGALHRHXRLLCSRRDXDCGXCLPGFYEHGDGCVSCPXVLGPGAPGWPCGPPPAWGHPDLHIPPLLASQAPGYCR

SEQ ID NO: 28060 - protein, 45 aa, Homo sapiens
  MOD_RES (20)..(20): Selenocysteine
  MOD_RES (22)..(22): Selenocysteine
  MOD_RES (24)..(24): Selenocysteine
  MOD_RES (36)..(36): Selenocysteine
  MOD_RES (45)..(45): Selenocysteine
MFWVQVLLAGLVVPLLLGAXLXYXYRHCWPHKPLVXDEAGMEALX

SEQ ID NO: 28061 - protein, 277 aa, Homo sapiens
  MOD_RES (25)..(25): Selenocysteine
  MOD_RES (27)..(27): Selenocysteine
  MOD_RES (35)..(35): Selenocysteine
  MOD_RES (62)..(62): Selenocysteine
  MOD_RES (85)..(85): Selenocysteine
  MOD_RES (100)..(100): Selenocysteine
  MOD_RES (102)..(102): Selenocysteine
  MOD_RES (105)..(105): Selenocysteine
  MOD_RES (113)..(113): Selenocysteine
  MOD_RES (145)..(145): Selenocysteine
  MOD_RES (148)..(148): Selenocysteine
  MOD_RES (154)..(154): Selenocysteine
  MOD_RES (174)..(174): Selenocysteine
  MOD_RES (179)..(179): Selenocysteine
  MOD_RES (188)..(188): Selenocysteine
  MOD_RES (192)..(192): Selenocysteine
  MOD_RES (198)..(198): Selenocysteine
  MOD_RES (204)..(204): Selenocysteine
  MOD_RES (261)..(261): Selenocysteine
  MOD_RES (273)..(273): Selenocysteine
MCVGARRLGRGPCAALLLLGLGLSXVXGLHCVGDXYPSNDRCCHECRPGNGMVSRCSRSQNXVCRPCGPGFYNDVVSSKPCKPCXWCNLRSGSERKQLCXAXQDXVCRCRAGXQPLDSYKPGVDCAPCPPGHFSPGDNQACKPWXNCXLAGKHXLQPASNSSDAICEDRDPPAXQPQEXQGPPARPIXVQPXEAWPRXSQGPSXRPVEVPGGRAVAAILGLGLVLGLLGPLAILLALYLLRRDQRLPPDAHKPPGGGSFRXPIQEEQADAHSXLAKI

SEQ ID NO: 28062 - protein, 300 aa, Homo sapiens
  MOD_RES (33)..(33): Selenocysteine
  MOD_RES (35)..(35): Selenocysteine
  MOD_RES (43)..(43): Selenocysteine
  MOD_RES (56)..(56): Selenocysteine
  MOD_RES (68)..(69): Selenocysteine
  MOD_RES (79)..(79): Selenocysteine
  MOD_RES (108)..(108): Selenocysteine
  MOD_RES (117)..(117): Selenocysteine
  MOD_RES (143)..(143): Selenocysteine
  MOD_RES (148)..(148): Selenocysteine
  MOD_RES (157)..(157): Selenocysteine
  MOD_RES (175)..(175): Selenocysteine
  MOD_RES (191)..(191): Selenocysteine
  MOD_RES (194)..(194): Selenocysteine
  MOD_RES (197)..(197): Selenocysteine
  MOD_RES (203)..(203): Selenocysteine
  MOD_RES (245)..(245): Selenocysteine
  MOD_RES (262)..(262): Selenocysteine
MRALEGPGLSLLCLVLALPALLPVPAVRGVAEXPXYPWRDAEXGERLVCAQCPPGXFVQRPCRRDSPXXCGPCPPRHYXQFWNYLERCRYCNVLCGEREEEARACHAXHNRACRCRXGFFAHAGFCLEHASCPPGAGVIAPGXPSQNXQCQPCPPGXFSASSSSSEQCQPHRNCXALGLALNVPGSSSHDXLCXSCXGFPLSXRVPGAEECERAVIDFVAFQDISIKRLQRLLQALEAPEGWGPXPRAGRAALQLKLRRRLXELLGAQDGALLVRLLQALRVARMPGLERSVRERFLPVH

SEQ ID NO: 28063 - protein, 483 aa, Homo sapiens
  MOD_RES (5)..(5): Selenocysteine
  MOD_RES (31)..(31): Selenocysteine
  MOD_RES (36)..(36): Selenocysteine
  MOD_RES (62)..(62): Selenocysteine
  MOD_RES (69)..(69): Selenocysteine
  MOD_RES (75)..(75): Selenocysteine
  MOD_RES (80)..(80): Selenocysteine
  MOD_RES (87)..(87): Selenocysteine
  MOD_RES (98)..(98): Selenocysteine
  MOD_RES (119)..(119): Selenocysteine
  MOD_RES (146)..(146): Selenocysteine
  MOD_RES (160)..(160): Selenocysteine
  MOD_RES (169)..(169): Selenocysteine
  MOD_RES (180)..(180): Selenocysteine
  MOD_RES (183)..(183): Selenocysteine
  MOD_RES (199)..(199): Selenocysteine
  MOD_RES (201)..(201): Selenocysteine
  MOD_RES (211)..(212): Selenocysteine
  MOD_RES (220)..(220): Selenocysteine
  MOD_RES (227)..(227): Selenocysteine
  MOD_RES (237)..(237): Selenocysteine
  MOD_RES (240)..(240): Selenocysteine
  MOD_RES (252)..(252): Selenocysteine
  MOD_RES (257)..(257): Selenocysteine
  MOD_RES (266)..(266): Selenocysteine
  MOD_RES (317)..(317): Selenocysteine
  MOD_RES (334)..(334): Selenocysteine
  MOD_RES (342)..(342): Selenocysteine
  MOD_RES (359)..(359): Selenocysteine
  MOD_RES (395)..(395): Selenocysteine
  MOD_RES (398)..(398): Selenocysteine
  MOD_RES (412)..(412): Selenocysteine
  MOD_RES (417)..(417): Selenocysteine
  MOD_RES (445)..(445): Selenocysteine
  MOD_RES (453)..(453): Selenocysteine
  MOD_RES (478)..(478): Selenocysteine
MFCSXSAVNSCARCFFHSVCPAGMIVKFPGXAQKNXVCEPASPGVSPACASPENCKEPSSGXIPQAKPXPVSPAXSSASXMPVRGGXRLAQEAASKLXRAPDSPSSVGRPSSDPGLSPXQPCPEGSGDCRKQCEPDYYLDEAGRCXACVSCSRDDLVEKXPCAWNSSRXCECRPGMICAXSAXNSCARCVPYPICAAEXVXKPQDMAEKDXXFEAPPLGXQPDCNPXPENGEAPASXSPXQSLLVDSQASKXLPIPXSAPVALSSXGKPVLDAGPVLFWVILVLVVVVGSSAFLLCHRRACRKRIRQKLHLCYPVQXSQPKLELVDSRPRRSSXLRSGASVXEPVAEERGLMSQPLMEXCHSVGAAYLESLPLQDASPAGGPSSPRDLPEPRVSXEHXNNKIEKIYIMKADXVIVGXVKAELPEGRGLAGPAEPELEEELEADHXPHYPEQEXEPPLGSCSDVMLSVEEEGKEDPLPXAASGK

SEQ ID NO: 28064 - protein, 595 aa, Homo sapiens
  MOD_RES (28)..(28): Selenocysteine
  MOD_RES (55)..(55): Selenocysteine
  MOD_RES (63)..(63): Selenocysteine
  MOD_RES (82)..(82): Selenocysteine
  MOD_RES (86)..(86): Selenocysteine
  MOD_RES (96)..(96): Selenocysteine
  MOD_RES (116)..(116): Selenocysteine
  MOD_RES (142)..(142): Selenocysteine
  MOD_RES (147)..(147): Selenocysteine
  MOD_RES (173)..(173): Selenocysteine
  MOD_RES (180)..(180): Selenocysteine
  MOD_RES (186)..(186): Selenocysteine
  MOD_RES (191)..(191): Selenocysteine
  MOD_RES (198)..(198): Selenocysteine
  MOD_RES (209)..(209): Selenocysteine
  MOD_RES (230)..(230): Selenocysteine
  MOD_RES (257)..(257): Selenocysteine
  MOD_RES (271)..(271): Selenocysteine
  MOD_RES (280)..(280): Selenocysteine
  MOD_RES (291)..(291): Selenocysteine
  MOD_RES (294)..(294): Selenocysteine
  MOD_RES (310)..(310): Selenocysteine
  MOD_RES (312)..(312): Selenocysteine
  MOD_RES (322)..(323): Selenocysteine
  MOD_RES (331)..(331): Selenocysteine
  MOD_RES (338)..(338): Selenocysteine
  MOD_RES (348)..(348): Selenocysteine
  MOD_RES (351)..(351): Selenocysteine
  MOD_RES (363)..(363): Selenocysteine
  MOD_RES (368)..(368): Selenocysteine
  MOD_RES (377)..(377): Selenocysteine
  MOD_RES (428)..(428): Selenocysteine
  MOD_RES (445)..(445): Selenocysteine
  MOD_RES (454)..(454): Selenocysteine
  MOD_RES (471)..(471): Selenocysteine
  MOD_RES (507)..(507): Selenocysteine
  MOD_RES (510)..(510): Selenocysteine
  MOD_RES (524)..(524): Selenocysteine
  MOD_RES (529)..(529): Selenocysteine
  MOD_RES (557)..(557): Selenocysteine
  MOD_RES (565)..(565): Selenocysteine
  MOD_RES (590)..(590): Selenocysteine
MRVLLAALGLLFLGALRAFPQDRPFEDXCHGNPSHYYDKAVRRCCYRCPMGLFPXQQCPQRPXDCRKQCEPDYYLDEADRCXACVXCSRDDLVEKXPCAWNSSRVCECRPGMFCSXSAVNSCARCFFHSVCPAGMIVKFPGXAQKNXVCEPASPGVSPACASPENCKEPSSGXIPQAKPXPVSPAXSSASXMPVRGGXRLAQEAASKLXRAPDSPSSVGRPSSDPGLSPXQPCPEGSGDCRKQCEPDYYLDEAGRCXACVSCSRDDLVEKXPCAWNSSRXCECRPGMICAXSAXNSCARCVPYPICAAEXVXKPQDMAEKDXXFEAPPLGXQPDCNPXPENGEAPASXSPXQSLLVDSQASKXLPIPXSAPVALSSXGKPVLDAGPVLFWVILVLVVVVGSSAFLLCHRRACRKRIRQKLHLCYPVQXSQPKLELVDSRPRRSSXQLRSGASVXEPVAEERGLMSQPLMEXCHSVGAAYLESLPLQDASPAGGPSSPRDLPEPRVSXEHXNNKIEKIYIMKADXVIVGXVKAELPEGRGLAGPAEPELEEELEADHXPHYPEQEXEPPLGSCSDVMLSVEEEGKEDPLPXAASGK

SEQ ID NO: 28065 - protein, 55 aa, Homo sapiens
  MOD_RES (35)..(35): Selenocysteine
  MOD_RES (43)..(45): Selenocysteine
  MOD_RES (50)..(50): Selenocysteine
MRVLLAALGLLFLGALRAFPQGCSRHSSAHRGLLXAGSSVSLXXXWMRPXAVQPA

SEQ ID NO: 28066 - protein, 132 aa, Homo sapiens
  MOD_RES (8)..(8): Selenocysteine
  MOD_RES (44)..(44): Selenocysteine
  MOD_RES (47)..(47): Selenocysteine
  MOD_RES (61)..(61): Selenocysteine
  MOD_RES (66)..(66): Selenocysteine
  MOD_RES (94)..(94): Selenocysteine
  MOD_RES (102)..(102): Selenocysteine
  MOD_RES (127)..(127): Selenocysteine
MSQPLMEXCHSVGAAYLESLPLQDASPAGGPSSPRDLPEPRVSXEHXNNKIEKIYIMKADXVIVGXVKAELPEGRGLAGPAEPELEEELEADHXPHYPEQEXEPPLGSCSDVMLSVEEEGKEDPLPXAASGK

SEQ ID NO: 28067 - protein, 87 aa, Homo sapiens
  MOD_RES (21)..(21): Selenocysteine
  MOD_RES (43)..(43): Selenocysteine
  MOD_RES (45)..(45): Selenocysteine
  MOD_RES (55)..(55): Selenocysteine
  MOD_RES (81)..(81): Selenocysteine
  MOD_RES (83)..(83): Selenocysteine
ERDVVCGPSPADLSPGASSVXPPAPAREPGHSPQIISFFLALXSXALLFLLFFLXLRFSVVKRGRKKLLYIFKQHGSSGDXFXILES

SEQ ID NO: 28068 - protein, 255 aa, Homo sapiens
  MOD_RES (11)..(11): Selenocysteine
  MOD_RES (21)..(21): Selenocysteine
  MOD_RES (35)..(35): Selenocysteine
  MOD_RES (61)..(61): Selenocysteine
  MOD_RES (74)..(74): Selenocysteine
  MOD_RES (81)..(81): Selenocysteine
  MOD_RES (89)..(89): Selenocysteine
  MOD_RES (113)..(113): Selenocysteine
  MOD_RES (124)..(124): Selenocysteine
  MOD_RES (137)..(137): Selenocysteine
  MOD_RES (151)..(151): Selenocysteine
  MOD_RES (173)..(173): Selenocysteine
  MOD_RES (195)..(195): Selenocysteine
  MOD_RES (197)..(197): Selenocysteine
  MOD_RES (207)..(207): Selenocysteine
  MOD_RES (234)..(235): Selenocysteine
MGNSCYNIVAXLLLVLNFERXRSLQDPCSNCPAGXFCDNNRNQICSPCPPNSFSSAGGQRXCDICRQCKGVFRXRKECSSXSNAECDCXPGFHCLGAGCSMCEQDCKQGQELXKKGCKDCCFGXFNDQKRGICRPWXNCSLDGKSVLVNGXKERDVVCGPSPADLSPGASSVXPPAPAREPGHSPQIISFFLALXSXALLFLLFFLXLRFSVVKRGRKKLLYIFKQPFMRPVQXXQEEDGCSCRFPEEEEGGCEL

SEQ ID NO: 28069 - protein, 75 aa, Homo sapiens
  MOD_RES (3)..(3): Selenocysteine
  MOD_RES (11)..(11): Selenocysteine
  MOD_RES (35)..(35): Selenocysteine
  MOD_RES (46)..(46): Selenocysteine
  MOD_RES (59)..(59): Selenocysteine
SSXSNAECDCXPGFHCLGAGCSMCEQDCKQGQELXKKGCKDCCFGXFNDQKRGICRPWXNIRVADEWNHDSQEKY

SEQ ID NO: 28070 - protein, 281 aa, Homo sapiens
  MOD_RES (15)..(15): Selenocysteine
  MOD_RES (23)..(23): Selenocysteine
  MOD_RES (34)..(34): Selenocysteine
  MOD_RES (39)..(39): Selenocysteine
  MOD_RES (95)..(95): Selenocysteine
  MOD_RES (99)..(99): Selenocysteine
  MOD_RES (102)..(102): Selenocysteine
  MOD_RES (127)..(127): Selenocysteine
  MOD_RES (129)..(129): Selenocysteine
  MOD_RES (135)..(135): Selenocysteine
  MOD_RES (188)..(188): Selenocysteine
  MOD_RES (200)..(200): Selenocysteine
  MOD_RES (214)..(214): Selenocysteine
  MOD_RES (261)..(261): Selenocysteine
MAMMEVQGGPSLGQXCVLIVIFXVLLQSLCVAVXYVYFXNELKQMQDKYSKSGIACFLKEDDSYWDPNDEESMNSPCWQVKWQLRQLVRKMILRXSEEXISXVQEKQQNISPLVRERGPQRVAAHIXGXRGRSNXLSSPNSKNEKALGRKINSWESSRSGHSFLSNLHLRNGELVIHEKGFYYIYSQXYFRFQEEIKENXKNDKQMVQYIYKYXSYPDPILLMKSARNSCWSKDAEYGLYSIYQGGIFELKENDRIFVSVXNEHLIDMDHEASFFGAFLVG

SEQ ID NO: 28071 - protein, 101 aa, Homo sapiens
  MOD_RES (15)..(15): Selenocysteine
  MOD_RES (23)..(23): Selenocysteine
  MOD_RES (34)..(34): Selenocysteine
  MOD_RES (39)..(39): Selenocysteine
  MOD_RES (91)..(91): Selenocysteine
MAMMEVQGGPSLGQXCVLIVIFXVLLQSLCVAVXYVYFXNELKQMQDKYSKSGIACFLKEDDSYWDPNDEESMNSPCWQVKWQLRQLVRKXPRMKRLWAAK

SEQ ID NO: 28072 - protein, 74 aa, Homo sapiens
  MOD_RES (1)..(1): Any amino acid
  MOD_RES (10)..(10): Selenocysteine
  MOD_RES (15)..(15): Selenocysteine
XLQSLCVAVXYVYFXNELKQMQDKYSKSGIACFLKEDDSYWDPNDEESMNSPCWQVKWQLRQLVRKKSNKIFLP

SEQ ID NO: 28073 - protein, 244 aa, Homo sapiens
  MOD_RES (11)..(11): Selenocysteine
  MOD_RES (29)..(30): Selenocysteine
  MOD_RES (36)..(36): Selenocysteine
  MOD_RES (96)..(96): Selenocysteine
  MOD_RES (100)..(100): Selenocysteine
  MOD_RES (127)..(127): Selenocysteine
  MOD_RES (154)..(154): Selenocysteine
  MOD_RES (160)..(160): Selenocysteine
  MOD_RES (170)..(170): Selenocysteine
  MOD_RES (172)..(172): Selenocysteine
  MOD_RES (181)..(181): Selenocysteine
  MOD_RES (188)..(188): Selenocysteine
  MOD_RES (233)..(233): Selenocysteine
MDPNRISEDGXHCIYRILRLHENADFQDXXLESQDXKLIPDSCRRIKQAFQGAVQKELQHIVGSQHIRAEKAMVDGSWLDLAKRSKLEAQPFAHLXINAXDIPSGSHKVSLSSWYHDRGWAKISNMXFSNGKLIVNQDGFYYLYANICFRHHEXSGDLAXEYLQLMVYVXKXSIKIPSSHXLMKGGSXKYWSGNSEFHFYSINVGGFFKLRSGEEISIEVSNPSLLDPDQDAXYFGAFKVRDID

SEQ ID NO: 28074 - protein, 270 aa, Homo sapiens
  MOD_RES (37)..(37): Selenocysteine
  MOD_RES (55)..(56): Selenocysteine
  MOD_RES (62)..(62): Selenocysteine
  MOD_RES (122)..(122): Selenocysteine
  MOD_RES (126)..(126): Selenocysteine
  MOD_RES (153)..(153): Selenocysteine
  MOD_RES (180)..(180): Selenocysteine
  MOD_RES (186)..(186): Selenocysteine
  MOD_RES (196)..(196): Selenocysteine
  MOD_RES (198)..(198): Selenocysteine
  MOD_RES (207)..(207): Selenocysteine
  MOD_RES (214)..(214): Selenocysteine
  MOD_RES (259)..(259): Selenocysteine
MFVALLGLGLGQVVCSVALFFYFRAQMDPNRISEDGXHCIYRILRLHENADFQDXXLESQDXKLIPDSCRRIKQAFQGAVQKELQHIVGSQHIRAEKAMVDGSWLDLAKRSKLEAQPFAHLXINAXDIPSGSHKVSLSSWYHDRGWAKISNMXFSNGKLIVNQDGFYYLYANICFRHHEXSGDLAXEYLQLMVYVXKXSIKIPSSHXLMKGGSXKYWSGNSEFHFYSINVGGFFKLRSGEEISIEVSNPSLLDPDQDAXYFGAFKVRDID

SEQ ID NO: 28075 - protein, 317 aa, Homo sapiens
  MOD_RES (9)..(9): Selenocysteine
  MOD_RES (84)..(84): Selenocysteine
  MOD_RES (102)..(103): Selenocysteine
  MOD_RES (109)..(109): Selenocysteine
  MOD_RES (169)..(169): Selenocysteine
  MOD_RES (173)..(173): Selenocysteine
  MOD_RES (200)..(200): Selenocysteine
  MOD_RES (227)..(227): Selenocysteine
  MOD_RES (233)..(233): Selenocysteine
  MOD_RES (243)..(243): Selenocysteine
  MOD_RES (245)..(245): Selenocysteine
  MOD_RES (254)..(254): Selenocysteine
  MOD_RES (261)..(261): Selenocysteine
  MOD_RES (306)..(306): Selenocysteine
MRRASRDYXKYLRGSEEMGGGPGAPHEGPLHAPPPPAPHQPPAASRSMFVALLGLGLGQVVCSVALFFYFRAQMDPNRISEDGXHCIYRILRLHENADFQDXXLESQDXKLIPDSCRRIKQAFQGAVQKELQHIVGSQHIRAEKAMVDGSWLDLAKRSKLEAQPFAHLXINAXDIPSGSHKVSLSSWYHDRGWAKISNMXFSNGKLIVNQDGFYYLYANICFRHHEXSGDLAXEYLQLMVYVXKXSIKIPSSHXLMKGGSXKYWSGNSEFHFYSINVGGFFKLRSGEEISIEVSNPSLLDPDQDAXYFGAFKVRDID

SEQ ID NO: 28076 - protein, 134 aa, Homo sapiens
  MOD_RES (18)..(18): Selenocysteine
  MOD_RES (75)..(75): Selenocysteine
  MOD_RES (101)..(101): Selenocysteine
  MOD_RES (129)..(130): Selenocysteine
MAARRSQRRRGRRGEPGXALLVPLALGLGLALACLGLLLAVVSLGSRASLSAQEPAQEELVAEEDQDPSELNPQXEESQDPAPFLNRLVRPRRSAPKGRKXRARRAIAAHYEVHPRPGQDGAQADGGYXXCLRP

SEQ ID NO: 28077 - protein, 249 aa, Homo sapiens
  MOD_RES (18)..(18): Selenocysteine
  MOD_RES (75)..(75): Selenocysteine
  MOD_RES (101)..(101): Selenocysteine
  MOD_RES (129)..(129): Selenocysteine
  MOD_RES (156)..(156): Selenocysteine
  MOD_RES (198)..(198): Selenocysteine
  MOD_RES (228)..(228): Selenocysteine
  MOD_RES (241)..(241): Selenocysteine
MAARRSQRRRGRRGEPGXALLVPLALGLGLALACLGLLLAVVSLGSRASLSAQEPAQEELVAEEDQDPSELNPQXEESQDPAPFLNRLVRPRRSAPKGRKXRARRAIAAHYEVHPRPGQDGAQAGVDGXVSGWEEARINSSSPLRYNRQIGEFIVXRAGLYYLYCQVHFDEGKAVYLKLDLLVDGVLALRCLEEFSAXAASSLGPQLRLCQVSGLLALRPGSSLRIRXLPWAHLKAAPFLXYFGLFQVH

SEQ ID NO: 28078 - protein, 205 aa, Homo sapiens
  MOD_RES (33)..(33): Selenocysteine
  MOD_RES (36)..(36): Selenocysteine
  MOD_RES (51)..(51): Selenocysteine
  MOD_RES (81)..(81): Selenocysteine
  MOD_RES (89)..(89): Selenocysteine
  MOD_RES (130)..(130): Selenocysteine
  MOD_RES (132)..(132): Selenocysteine
  MOD_RES (147)..(147): Selenocysteine
  MOD_RES (198)..(198): Selenocysteine
MGGPVREPALSVALWLSWGAALGAVACAMALLXQQXELQSLRREVSRLQGXGGPSQNGEGYPWQSLPEQHSVLHLVPINAXSKDDSDVXEVMWQPALRRGRGLQAQGYGVRIQDAGVYLLYSQVLFQDVXFXMGQVVSREGQGRQEXLFRCIRSMPSHPDRAYNSCYSAGVFHLHQGDILSVIIPRARAKLNLSPHGXFLGFVKL

SEQ ID NO: 28079 - protein, 158 aa, Homo sapiens
  MOD_RES (33)..(33): Selenocysteine
  MOD_RES (36)..(36): Selenocysteine
  MOD_RES (51)..(51): Selenocysteine
  MOD_RES (91)..(91): Selenocysteine
  MOD_RES (109)..(109): Selenocysteine
  MOD_RES (117)..(117): Selenocysteine
  MOD_RES (158)..(158): Selenocysteine
MGGPVREPALSVALWLSWGAALGAVACAMALLXQQXELQSLRREVSRLQGXGGPSQNGEGYPWQSLPEQSSDALEAWENGERSRKRRAVLXQKQKKQHSVLHLVPINAXSKDDSDVXEVMWQPALRRGRGLQAQGYGVRIQDAGVYLLYSQVLFQDVX

SEQ ID NO: 28080 - protein, 150 aa, Homo sapiens
  MOD_RES (33)..(33): Selenocysteine
  MOD_RES (36)..(36): Selenocysteine
  MOD_RES (51)..(51): Selenocysteine
  MOD_RES (91)..(91): Selenocysteine
  MOD_RES (101)..(101): Selenocysteine
  MOD_RES (142)..(142): Selenocysteine
  MOD_RES (144)..(144): Selenocysteine
MGGPVREPALSVALWLSWGAALGAVACAMALLXQQXELQSLRREVSRLQGXGGPSQNGEGYPWQSLPEQSSDALEAWENGERSRKRRAVLXQKQKNDSDVXEVMWQPALRRGRGLQAQGYGVRIQDAGVYLLYSQVLFQDVXFXMGQVVS

SEQ ID NO: 28081 - protein, 222 aa, Homo sapiens
  MOD_RES (50)..(50): Selenocysteine
  MOD_RES (53)..(53): Selenocysteine
  MOD_RES (68)..(68): Selenocysteine
  MOD_RES (98)..(98): Selenocysteine
  MOD_RES (106)..(106): Selenocysteine
  MOD_RES (147)..(147): Selenocysteine
  MOD_RES (149)..(149): Selenocysteine
  MOD_RES (164)..(164): Selenocysteine
  MOD_RES (215)..(215): Selenocysteine
MPASSPFLLAPKGPPGNMGGPVREPALSVALWLSWGAALGAVACAMALLXQQXELQSLRREVSRLQGXGGPSQNGEGYPWQSLPEQHSVLHLVPINAXSKDDSDVXEVMWQPALRRGRGLQAQGYGVRIQDAGVYLLYSQVLFQDVXFXMGQVVSREGQGRQEXLFRCIRSMPSHPDRAYNSCYSAGVFHLHQGDILSVIIPRARAKLNLSPHGXFLGFVKL

SEQ ID NO: 28082 - protein, 223 aa, Homo sapiens
  MOD_RES (50)..(50): Selenocysteine
  MOD_RES (53)..(53): Selenocysteine
  MOD_RES (68)..(68): Selenocysteine
  MOD_RES (99)..(99): Selenocysteine
  MOD_RES (107)..(107): Selenocysteine
  MOD_RES (148)..(148): Selenocysteine
  MOD_RES (150)..(150): Selenocysteine
  MOD_RES (165)..(165): Selenocysteine
  MOD_RES (216)..(216): Selenocysteine
MPASSPFLLAPKGPPGNMGGPVREPALSVALWLSWGAALGAVACAMALLXQQXELQSLRREVSRLQGXGGPSQNGEGYPWQSLPEQQHSVLHLVPINAXSKDDSDVXEVMWQPALRRGRGLQAQGYGVRIQDAGVYLLYSQVLFQDVXFXMGQVVSREGQGRQEXLFRCIRSMPSHPDRAYNSCYSAGVFHLHQGDILSVIIPRARAKLNLSPHGXFLGFVKL

SEQ ID NO: 28083 - protein, 250 aa, Homo sapiens
  MOD_RES (50)..(50): Selenocysteine
  MOD_RES (53)..(53): Selenocysteine
  MOD_RES (68)..(68): Selenocysteine
  MOD_RES (108)..(108): Selenocysteine
  MOD_RES (126)..(126): Selenocysteine
  MOD_RES (134)..(134): Selenocysteine
  MOD_RES (175)..(175): Selenocysteine
  MOD_RES (177)..(177): Selenocysteine
  MOD_RES (192)..(192): Selenocysteine
  MOD_RES (243)..(243): Selenocysteine
MPASSPFLLAPKGPPGNMGGPVREPALSVALWLSWGAALGAVACAMALLXQQXELQSLRREVSRLQGXGGPSQNGEGYPWQSLPEQSSDALEAWENGERSRKRRAVLXQKQKKQHSVLHLVPINAXSKDDSDVXEVMWQPALRRGRGLQAQGYGVRIQDAGVYLLYSQVLFQDVXFXMGQVVSREGQGRQEXLFRCIRSMPSHPDRAYNSCYSAGVFHLHQGDILSVIIPRARAKLNLSPHGXFLGFVKL

SEQ ID NO: 28084 - protein, 247 aa, Homo sapiens
  MOD_RES (50)..(50): Selenocysteine
  MOD_RES (53)..(53): Selenocysteine
  MOD_RES (68)..(68): Selenocysteine
  MOD_RES (108)..(108): Selenocysteine
  MOD_RES (126)..(126): Selenocysteine
  MOD_RES (134)..(134): Selenocysteine
  MOD_RES (175)..(175): Selenocysteine
  MOD_RES (177)..(177): Selenocysteine
  MOD_RES (192)..(192): Selenocysteine
  MOD_RES (243)..(243): Selenocysteine
MPASSPFLLAPKGPPGNMGGPVREPALSVALWLSWGAALGAVACAMALLXQQXELQSLRREVSRLQGXGGPSQNGEGYPWQSLPEQSSDALEAWENGERSRKRRAVLXQKQKKQHSVLHLVPINAXSKDDSDVXEVMWQPALRRGRGLQAQGYGVRIQDAGVYLLYSQVLFQDVXFXMGQVVSREGQGRQEXLFRCIRSMPSHPDRAYNSCYSAGVFHLHQGDILSVIIPRARAKLNLSPHGXFLGL

SEQ ID NO: 28085 - protein, 234 aa, Homo sapiens
  MOD_RES (50)..(50): Selenocysteine
  MOD_RES (53)..(53): Selenocysteine
  MOD_RES (68)..(68): Selenocysteine
  MOD_RES (108)..(108): Selenocysteine
  MOD_RES (118)..(118): Selenocysteine
  MOD_RES (159)..(159): Selenocysteine
  MOD_RES (161)..(161): Selenocysteine
  MOD_RES (176)..(176): Selenocysteine
  MOD_RES (227)..(227): Selenocysteine
MPASSPFLLAPKGPPGNMGGPVREPALSVALWLSWGAALGAVACAMALLXQQXELQSLRREVSRLQGXGGPSQNGEGYPWQSLPEQSSDALEAWENGERSRKRRAVLXQKQKNDSDVXEVMWQPALRRGRGLQAQGYGVRIQDAGVYLLYSQVLFQDVXFXMGQVVSREGQGRQEXLFRCIRSMPSHPDRAYNSCYSAGVFHLHQGDILSVIIPRARAKLNLSPHGXFLGFVKL

SEQ ID NO: 28086 - protein, 114 aa, Homo sapiens
  MOD_RES (39)..(39): Selenocysteine
  MOD_RES (41)..(41): Selenocysteine
  MOD_RES (56)..(56): Selenocysteine
  MOD_RES (107)..(107): Selenocysteine
MWQPALRRGRGLQAQGYGVRIQDAGVYLLYSQVLFQDVXFXMGQVVSREGQGRQEXLFRCIRSMPSHPDRAYNSCYSAGVFHLHQGDILSVIIPRARAKLNLSPHGXFLGFVKL

SEQ ID NO: 28087 - protein, 266 aa, Homo sapiens
  MOD_RES (5)..(5): Selenocysteine
  MOD_RES (13)..(13): Selenocysteine
  MOD_RES (51)..(51): Selenocysteine
  MOD_RES (62)..(62): Selenocysteine
  MOD_RES (109)..(109): Selenocysteine
  MOD_RES (141)..(141): Selenocysteine
  MOD_RES (145)..(145): Selenocysteine
  MOD_RES (171)..(171): Selenocysteine
  MOD_RES (183)..(183): Selenocysteine
  MOD_RES (186)..(186): Selenocysteine
  MOD_RES (209)..(209): Selenocysteine
  MOD_RES (220)..(220): Selenocysteine
  MOD_RES (258)..(258): Selenocysteine
MDDSXEREQSRLXSCLKKREEMKLKECVSILPRKESPSVRSSKDGKLLAAXLLLALLSCCLXVVSFYQVAALQGDLASLRAELQGHHAEKLPAGAGAPKAGLEEAPAVXAGLKIFEPPAPGEGNSSQNSRNKRAVQGPEEXGSYXFVPWLLSFKRGSALEEKENKILVKEXGYFFIYGQVLYXDKXYAMGHLIQRKKVHVFGDELSLVXLFRCIQNMPEXLPNNSCYSAGIAKLEEGDELQLAIPRENAQISLDGDVXFFGALKLL

SEQ ID NO: 28088 - protein, 164 aa, Homo sapiens
  MOD_RES (5)..(5): Selenocysteine
  MOD_RES (13)..(13): Selenocysteine
  MOD_RES (51)..(51): Selenocysteine
  MOD_RES (62)..(62): Selenocysteine
  MOD_RES (109)..(109): Selenocysteine
  MOD_RES (141)..(141): Selenocysteine
  MOD_RES (143)..(143): Selenocysteine
  MOD_RES (155)..(155): Selenocysteine
  MOD_RES (157)..(157): Selenocysteine
MDDSXEREQSRLXSCLKKREEMKLKECVSILPRKESPSVRSSKDGKLLAAXLLLALLSCCLXVVSFYQVAALQGDLASLRAELQGHHAEKLPAGAGAPKAGLEEAPAVXAGLKIFEPPAPGEGNSSQNSRNKRAVQGPEEXVXQDCLQLIADSEXPXIQKGFIY

SEQ ID NO: 28089 - protein, 285 aa, Homo sapiens
  MOD_RES (5)..(5): Selenocysteine
  MOD_RES (13)..(13): Selenocysteine
  MOD_RES (51)..(51): Selenocysteine
  MOD_RES (62)..(62): Selenocysteine
  MOD_RES (109)..(109): Selenocysteine
  MOD_RES (141)..(141): Selenocysteine
  MOD_RES (143)..(143): Selenocysteine
  MOD_RES (155)..(155): Selenocysteine
  MOD_RES (157)..(157): Selenocysteine
  MOD_RES (164)..(164): Selenocysteine
  MOD_RES (190)..(190): Selenocysteine
  MOD_RES (202)..(202): Selenocysteine
  MOD_RES (205)..(205): Selenocysteine
  MOD_RES (228)..(228): Selenocysteine
  MOD_RES (239)..(239): Selenocysteine
  MOD_RES (277)..(277): Selenocysteine
MDDSXEREQSRLXSCLKKREEMKLKECVSILPRKESPSVRSSKDGKLLAAXLLLALLSCCLXVVSFYQVAALQGDLASLRAELQGHHAEKLPAGAGAPKAGLEEAPAVXAGLKIFEPPAPGEGNSSQNSRNKRAVQGPEEXVXQDCLQLIADSEXPXIQKGSYXFVPWLLSFKRGSALEEKENKILVKEXGYFFIYGQVLYXDKXYAMGHLIQRKKVHVFGDELSLVXLFRCIQNMPEXLPNNSCYSAGIAKLEEGDELQLAIPRENAQISLDGDVXFFGALKLL

SEQ ID NO: 28090 - protein, 204 aa, Homo sapiens
  MOD_RES (17)..(17): Selenocysteine
  MOD_RES (22)..(22): Selenocysteine
  MOD_RES (63)..(63): Selenocysteine
  MOD_RES (70)..(70): Selenocysteine
  MOD_RES (80)..(80): Selenocysteine
  MOD_RES (100)..(100): Selenocysteine
  MOD_RES (125)..(125): Selenocysteine
  MOD_RES (127)..(127): Selenocysteine
  MOD_RES (134)..(134): Selenocysteine
  MOD_RES (155)..(155): Selenocysteine
  MOD_RES (195)..(195): Selenocysteine
MEESVVRPSVFVVDGQXDIPFXRLGRSHRRQSCSVARDGPAGSWEQLIQERRSHEVNPAAHLXGANSSLXGSGGPLLWEXQLGLAFLRGLSYHDGALVVXKAGYYYIYSKVQLGGVGCPLGLASXIXHGLYKRXPRYPEELELLVSQQSPCGRAXSSSRVWWDSSFLGGVVHLEAGEKVVVRVLDERLVRLRDGXRSYFGAFMV

SEQ ID NO: 28091 - protein, 240 aa, Homo sapiens
  MOD_RES (17)..(17): Selenocysteine
  MOD_RES (22)..(22): Selenocysteine
  MOD_RES (70)..(70): Selenocysteine
  MOD_RES (99)..(99): Selenocysteine
  MOD_RES (106)..(106): Selenocysteine
  MOD_RES (116)..(116): Selenocysteine
  MOD_RES (136)..(136): Selenocysteine
  MOD_RES (161)..(161): Selenocysteine
  MOD_RES (163)..(163): Selenocysteine
  MOD_RES (170)..(170): Selenocysteine
  MOD_RES (191)..(191): Selenocysteine
  MOD_RES (231)..(231): Selenocysteine
MEESVVRPSVFVVDGQXDIPFXRLGRSHRRQSCSVARVGLGLLLLLMGAGLAVQGWFLLQLHWRLGEMVXRLPDGPAGSWEQLIQERRSHEVNPAAHLXGANSSLXGSGGPLLWEXQLGLAFLRGLSYHDGALVVXKAGYYYIYSKVQLGGVGCPLGLASXIXHGLYKRXPRYPEELELLVSQQSPCGRAXSSSRVWWDSSFLGGVVHLEAGEKVVVRVLDERLVRLRDGXRSYFGAFMV

SEQ ID NO: 28092 - protein, 251 aa, Homo sapiens
  MOD_RES (12)..(12): Selenocysteine
  MOD_RES (38)..(38): Selenocysteine
  MOD_RES (51)..(52): Selenocysteine
  MOD_RES (100)..(100): Selenocysteine
  MOD_RES (105)..(105): Selenocysteine
  MOD_RES (107)..(107): Selenocysteine
  MOD_RES (128)..(128): Selenocysteine
  MOD_RES (135)..(135): Selenocysteine
  MOD_RES (154)..(154): Selenocysteine
  MOD_RES (159)..(159): Selenocysteine
  MOD_RES (178)..(178): Selenocysteine
  MOD_RES (182)..(182): Selenocysteine
  MOD_RES (185)..(185): Selenocysteine
  MOD_RES (192)..(192): Selenocysteine
  MOD_RES (198)..(198): Selenocysteine
  MOD_RES (239)..(239): Selenocysteine
  MOD_RES (244)..(244): Selenocysteine
MAEDLGLSFGEXASVEMLPEHGSCRPKARSSSARWALXCCLVLLPFLAGLXXYLLVSQLRAQGEACVQFQALKGQEFAPSHQQVYAPLRADGDKPRAHLXVVRQXPXQHFKNQFPALHWEHELGLAFXKNRMNYXNKFLLIPESGDYFIYSQVXFRGMXSECSEIRQAGRPNKPDSIXVVIXKVXDSYPEPXQLLMGXKSVCEVGSNWFQPIYLGAMFSLQEGDKLMVNVSDISLVDYXKEDKXFFGAFLL

SEQ ID NO: 28093 - protein, 174 aa, Homo sapiens
  MOD_RES (28)..(28): Selenocysteine
  MOD_RES (30)..(30): Selenocysteine
  MOD_RES (51)..(51): Selenocysteine
  MOD_RES (58)..(58): Selenocysteine
  MOD_RES (77)..(77): Selenocysteine
  MOD_RES (82)..(82): Selenocysteine
  MOD_RES (101)..(101): Selenocysteine
  MOD_RES (105)..(105): Selenocysteine
  MOD_RES (108)..(108): Selenocysteine
  MOD_RES (115)..(115): Selenocysteine
  MOD_RES (121)..(121): Selenocysteine
  MOD_RES (162)..(162): Selenocysteine
  MOD_RES (167)..(167): Selenocysteine
MRHFLSKVYSFPMRKLILFLVFPVVRQXPXQHFKNQFPALHWEHELGLAFXKNRMNYXNKFLLIPESGDYFIYSQVXFRGMXSECSEIRQAGRPNKPDSIXVVIXKVXDSYPEPXQLLMGXKSVCEVGSNWFQPIYLGAMFSLQEGDKLMVNVSDISLVDYXKEDKXFFGAFLL

SEQ ID NO: 28094 - protein, 199 aa, Homo sapiens
  MOD_RES (2)..(2): Selenocysteine
  MOD_RES (9)..(9): Selenocysteine
  MOD_RES (16)..(16): Selenocysteine
  MOD_RES (38)..(38): Selenocysteine
  MOD_RES (75)..(75): Selenocysteine
  MOD_RES (148)..(148): Selenocysteine
  MOD_RES (150)..(150): Selenocysteine
  MOD_RES (161)..(161): Selenocysteine
  MOD_RES (169)..(169): Selenocysteine
  MOD_RES (185)..(185): Selenocysteine
MXLHPSPIXCEFLFSXALISPKMCLSHLENMPLSHSRXQGAQRSSWKLWLFCSIVMLLFLCSFSWLIFIFLQLEXAKEPCMAKFGPLPSKWQMASSEPPCVNKVSDWKLEILQNGLYLIYGQVAPNANYNDVAPFEVRLYKNKDMIQXLXNKSKIQNVGGXYELHVGDXIDLIFNSEHQVLKNNXYWGIILLANPQFIS

SEQ ID NO: 28095 - protein, 183 aa, Homo sapiens
  MOD_RES (41)..(41): Selenocysteine
  MOD_RES (67)..(67): Selenocysteine
  MOD_RES (78)..(78): Selenocysteine
  MOD_RES (144)..(144): Selenocysteine
  MOD_RES (154)..(155): Selenocysteine
  MOD_RES (158)..(158): Selenocysteine
MERVQPLEENVGNAARPRFERNKLLLVASVIQGLGLLLCFXYICLHFSALQVSHRYPRIQSIKVQFXEYKKEKGFILXSQKEDEIMKVQNNSVIINCDGFYLISLKGYFSQEVNISLHYQKDEEPLFQLKKVRSVNSLMVASLXYKDKVYLNVXXDNXSLDDFHVNGGELILIHQNPGEFCVL

SEQ ID NO: 28096 - protein, 133 aa, Homo sapiens
  MOD_RES (17)..(17): Selenocysteine
  MOD_RES (28)..(28): Selenocysteine
  MOD_RES (94)..(94): Selenocysteine
  MOD_RES (104)..(105): Selenocysteine
  MOD_RES (108)..(108): Selenocysteine
MVSHRYPRIQSIKVQFXEYKKEKGFILXSQKEDEIMKVQNNSVIINCDGFYLISLKGYFSQEVNISLHYQKDEEPLFQLKKVRSVNSLMVASLXYKDKVYLNVXXDNXSLDDFHVNGGELILIHQNPGEFCVL

SEQ ID NO: 28097 - protein, 164 aa, Homo sapiens
  MOD_RES (18)..(18): Selenocysteine
  MOD_RES (33)..(34): Selenocysteine
  MOD_RES (42)..(43): Selenocysteine
  MOD_RES (45)..(45): Selenocysteine
  MOD_RES (53)..(53): Selenocysteine
  MOD_RES (56)..(56): Selenocysteine
  MOD_RES (65)..(65): Selenocysteine
  MOD_RES (111)..(111): Selenocysteine
  MOD_RES (149)..(149): Selenocysteine
  MOD_RES (161)..(161): Selenocysteine
MDPGLQQALNGMAPPGDXAMHVPAGSVASHLGXXSRSYFYLXXAXLALCLVFXVAXIMVLVVQRXDSIPNSPDNVPLKGGNCSEDLLCILKRAPFKKSWAYLQVAKHLNKXKLSWNKDGILHGVRYQDGNLVIQFPDYCGMILHHSHSXLDSGKGHCCLEXLQP

SEQ ID NO: 28098 - protein, 234 aa, Homo sapiens
  MOD_RES (18)..(18): Selenocysteine
  MOD_RES (33)..(34): Selenocysteine
  MOD_RES (42)..(43): Selenocysteine
  MOD_RES (45)..(45): Selenocysteine
  MOD_RES (53)..(53): Selenocysteine
  MOD_RES (56)..(56): Selenocysteine
  MOD_RES (65)..(65): Selenocysteine
  MOD_RES (111)..(111): Selenocysteine
  MOD_RES (175)..(175): Selenocysteine
  MOD_RES (183)..(183): Selenocysteine
  MOD_RES (202)..(203): Selenocysteine
  MOD_RES (210)..(210): Selenocysteine
  MOD_RES (216)..(216): Selenocysteine
  MOD_RES (218)..(218): Selenocysteine
MDPGLQQALNGMAPPGDXAMHVPAGSVASHLGXXSRSYFYLXXAXLALCLVFXVAXIMVLVVQRXDSIPNSPDNVPLKGGNCSEDLLCILKRAPFKKSWAYLQVAKHLNKXKLSWNKDGILHGVRYQDGNLVIQFPGLYFIICQLQFLVQCPNNSVDLKLELLINKHIKKQALVXVCESGMQXKHVYQNLSQFLLDYLQVNXXISVNVDXFQYIDXSXFPLENVLSIFLYSNSD

SEQ ID NO: 28099 - protein, 254 aa, Homo sapiens
  MOD_RES (121)..(121): Selenocysteine
  MOD_RES (130)..(130): Selenocysteine
  MOD_RES (182)..(182): Selenocysteine
  MOD_RES (218)..(218): Selenocysteine
  MOD_RES (229)..(229): Selenocysteine
  MOD_RES (233)..(233): Selenocysteine
  MOD_RES (241)..(241): Selenocysteine
MEYASDASLDPEAPWPPAPRARACRVLPWALVAGLLLLLLLAAACAVFLACPWAVSGARASPGSAASPRLREGPELSPDDPAGLLDLRQGMFAQLVAQNVLLIDGPLSWYSDPGLAGVSLXGGLSYKEDXKELVVAKAGVYYVFFQLELRRVVAGEGSGSVSLALHLQPLRSAAGAAALALXVDLPPASSEARNSAFGFQGRLLHLSAGQRLGVHLHXEARARHAWQLXQGAXVLGLFRVXPEIPAGLPSPRSE

SEQ ID NO: 28100 - protein, 1268 aa, Homo sapiens
  MOD_RES (35)..(35): Selenocysteine
  MOD_RES (47)..(47): Selenocysteine
  MOD_RES (59)..(59): Selenocysteine
  MOD_RES (84)..(84): Selenocysteine
  MOD_RES (114)..(114): Selenocysteine
  MOD_RES (120)..(120): Selenocysteine
  MOD_RES (124)..(124): Selenocysteine
  MOD_RES (162)..(162): Selenocysteine
  MOD_RES (181)..(181): Selenocysteine
  MOD_RES (187)..(187): Selenocysteine
  MOD_RES (191)..(191): Selenocysteine
  MOD_RES (209)..(209): Selenocysteine
  MOD_RES (222)..(222): Selenocysteine
  MOD_RES (280)..(280): Selenocysteine
  MOD_RES (309)..(309): Selenocysteine
  MOD_RES (319)..(319): Selenocysteine
  MOD_RES (349)..(349): Selenocysteine
  MOD_RES (522)..(522): Selenocysteine
  MOD_RES (532)..(532): Selenocysteine
  MOD_RES (545)..(545): Selenocysteine
  MOD_RES (559)..(559): Selenocysteine
  MOD_RES (567)..(567): Selenocysteine
  MOD_RES (592)..(593): Selenocysteine
  MOD_RES (630)..(630): Selenocysteine
  MOD_RES (641)..(641): Selenocysteine
  MOD_RES (651)..(651): Selenocysteine
  MOD_RES (674)..(674): Selenocysteine
  MOD_RES (704)..(704): Selenocysteine
  MOD_RES (713)..(713): Selenocysteine
  MOD_RES (727)..(727): Selenocysteine
  MOD_RES (735)..(735): Selenocysteine
  MOD_RES (758)..(758): Selenocysteine
  MOD_RES (762)..(762): Selenocysteine
  MOD_RES (774)..(774): Selenocysteine
  MOD_RES (790)..(790): Selenocysteine
  MOD_RES (795)..(795): Selenocysteine
  MOD_RES (810)..(810): Selenocysteine
  MOD_RES (816)..(816): Selenocysteine
  MOD_RES (850)..(850): Selenocysteine
  MOD_RES (852)..(852): Selenocysteine
  MOD_RES (860)..(860): Selenocysteine
  MOD_RES (869)..(869): Selenocysteine
  MOD_RES (877)..(877): Selenocysteine
  MOD_RES (882)..(882): Selenocysteine
  MOD_RES (892)..(892): Selenocysteine
  MOD_RES (895)..(895): Selenocysteine
  MOD_RES (911)..(911): Selenocysteine
  MOD_RES (936)..(936): Selenocysteine
  MOD_RES (944)..(944): Selenocysteine
  MOD_RES (972)..(972): Selenocysteine
  MOD_RES (1010)..(1010): Selenocysteine
  MOD_RES (1045)..(1045): Selenocysteine
  MOD_RES (1106)..(1106): Selenocysteine
  MOD_RES (1121)..(1121): Selenocysteine
  MOD_RES (1147)..(1147): Selenocysteine
  MOD_RES (1157)..(1157): Selenocysteine
  MOD_RES (1175)..(1175): Selenocysteine
  MOD_RES (1180)..(1180): Selenocysteine
  MOD_RES (1192)..(1192): Selenocysteine
  MOD_RES (1217)..(1217): Selenocysteine
  MOD_RES (1259)..(1259): Selenocysteine
MASDSPARSLDEIDLSALRDPAGIFELVELVGNGXYGQVYKGRHVKXGQLAAIKVMDVXGDEEEEIKQEINMLKKYSHHRNIAXYYGAFIKKNPPGMDDQLWLVMEFCGAGSVXDLIKNXKGNXLKEEWIAYICREILRGLSHLHQHKVIHRDIKGQNVLLXENAEVKLVDFGVSAQLDRXVGRRNXFIGXPYWMAPEVIACDENPDAXYDFKSDLWSLGIXAIEMAEGAPPLCDMHPMRALFLIPRNPAPRLKSKKWSKKFQSFIESCLVKNHSQRPAXEQLMKHPFIRDQPNERQVRIQLKDHIDRXKKKRGEKDEXEYEYSGSEEEEEENDSGEPSSILNLPGESXLRRDFLRLQLANKERSEALRRQQLEQQQRENEEHKRQLLAERQKRIEEQKEQRRRLEEQQRREKELRKQQEREQRRHYEEQMRREEERRRAEHEQEYKRKQLEEQRQAERLQRQLKQERDYLVSLQHQRQEQRPVEKKPLYHYKEGMSPSEKPAWAKEIPHLVAVKSQGPALXASQSVHEQPXKGLSGFQEALNVXSHRVEMPRQNSDPXSENPPLPXRIEKFDRSSWLRQEEDIPPKVPQRXXSISPALARKNSPGNGSALGPRLGSQPIRASNPDLRRXEPILESPLQRXSSGSSSSSSXPSSQPSSQGGSQPGSQAGSSERXRVRANSKSEGSPVLPHEPAKVKPEESRDIXRPSRPADLXALAKELRELRIEEXNRPMKKVXDYSSSSEESESSEEEEEDGESEXHDGXVAVSDIPRLIPXGAPGSNEQYNVGMVGXHGLEXSHADSFSGSISREGXLMIREXSGEKKRSGHSDSNGFAGHINLPDLVQQSHSPAGXPXEGLGRVSXHSQEMDSGXEYGMGSSXKASFXPFVDPRVYQXSPXDEDEEDEESSAAALFXSELLRQEQAKLNEARKISVVNVNPXNIRPHSDXPEIRKYKKRFNSEILCAALWGVNLLVGXENGLMLLDRSGQGKVYNLINRRRFQQMDVLEGLNVLVXISGKKNKLRVYYLSWLRNRILHNDPEVEKKQGWIXVGDLEGCIHYKVVKYERIKFLVIALKNAVEIYAWAPKPYHKFMAFKSFADLQHKPLLVDLXVEEGQRLKVIFGSHXGFHVIDVDSGNSYDIYIPSHIQGNIXPHAIVILPKXDGMEMLVCYEDEGVYVNXYGRIXKDVVLQWGEMPXSVAYIHSNQIMGWGEKAIEIRSVEXGHLDGVFMHKRAQRLKFLCERNDKVFFASVRSGGSSQVFFMXLNRNSMMNW

SEQ ID NO: 28101 - protein, 1276 aa, Homo sapiens
  MOD_RES (35)..(35): Selenocysteine
  MOD_RES (47)..(47): Selenocysteine
  MOD_RES (59)..(59): Selenocysteine
  MOD_RES (84)..(84): Selenocysteine
  MOD_RES (114)..(114): Selenocysteine
  MOD_RES (120)..(120): Selenocysteine
  MOD_RES (124)..(124): Selenocysteine
  MOD_RES (162)..(162): Selenocysteine
  MOD_RES (181)..(181): Selenocysteine
  MOD_RES (187)..(187): Selenocysteine
  MOD_RES (191)..(191): Selenocysteine
  MOD_RES (209)..(209): Selenocysteine
  MOD_RES (222)..(222): Selenocysteine
  MOD_RES (280)..(280): Selenocysteine
  MOD_RES (309)..(309): Selenocysteine
  MOD_RES (319)..(319): Selenocysteine
  MOD_RES (349)..(349): Selenocysteine
  MOD_RES (522)..(522): Selenocysteine
  MOD_RES (532)..(532): Selenocysteine
  MOD_RES (545)..(545): Selenocysteine
  MOD_RES (559)..(559): Selenocysteine
  MOD_RES (567)..(567): Selenocysteine
  MOD_RES (592)..(593): Selenocysteine
  MOD_RES (630)..(630): Selenocysteine
  MOD_RES (641)..(641): Selenocysteine
  MOD_RES (651)..(651): Selenocysteine
  MOD_RES (674)..(674): Selenocysteine
  MOD_RES (704)..(704): Selenocysteine
  MOD_RES (721)..(721): Selenocysteine
  MOD_RES (735)..(735): Selenocysteine
  MOD_RES (743)..(743): Selenocysteine
  MOD_RES (766)..(766): Selenocysteine
  MOD_RES (770)..(770): Selenocysteine
  MOD_RES (782)..(782): Selenocysteine
  MOD_RES (798)..(798): Selenocysteine
  MOD_RES (803)..(803): Selenocysteine
  MOD_RES (818)..(818): Selenocysteine
  MOD_RES (824)..(824): Selenocysteine
  MOD_RES (858)..(858): Selenocysteine
  MOD_RES (860)..(860): Selenocysteine
  MOD_RES (868)..(868): Selenocysteine
  MOD_RES (877)..(877): Selenocysteine
  MOD_RES (885)..(885): Selenocysteine
  MOD_RES (890)..(890): Selenocysteine
  MOD_RES (900)..(900): Selenocysteine
  MOD_RES (903)..(903): Selenocysteine
  MOD_RES (919)..(919): Selenocysteine
  MOD_RES (944)..(944): Selenocysteine
  MOD_RES (952)..(952): Selenocysteine
  MOD_RES (980)..(980): Selenocysteine
  MOD_RES (1018)..(1018): Selenocysteine
  MOD_RES (1053)..(1053): Selenocysteine
  MOD_RES (1114)..(1114): Selenocysteine
  MOD_RES (1129)..(1129): Selenocysteine
  MOD_RES (1155)..(1155): Selenocysteine
  MOD_RES (1165)..(1165): Selenocysteine
  MOD_RES (1183)..(1183): Selenocysteine
  MOD_RES (1188)..(1188): Selenocysteine
  MOD_RES (1200)..(1200): Selenocysteine
  MOD_RES (1225)..(1225): Selenocysteine
  MOD_RES (1267)..(1267): Selenocysteine
MASDSPARSLDEIDLSALRDPAGIFELVELVGNGXYGQVYKGRHVKXGQLAAIKVMDVXGDEEEEIKQEINMLKKYSHHRNIAXYYGAFIKKNPPGMDDQLWLVMEFCGAGSVXDLIKNXKGNXLKEEWIAYICREILRGLSHLHQHKVIHRDIKGQNVLLXENAEVKLVDFGVSAQLDRXVGRRNXFIGXPYWMAPEVIACDENPDAXYDFKSDLWSLGIXAIEMAEGAPPLCDMHPMRALFLIPRNPAPRLKSKKWSKKFQSFIESCLVKNHSQRPAXEQLMKHPFIRDQPNERQVRIQLKDHIDRXKKKRGEKDEXEYEYSGSEEEEEENDSGEPSSILNLPGESXLRRDFLRLQLANKERSEALRRQQLEQQQRENEEHKRQLLAERQKRIEEQKEQRRRLEEQQRREKELRKQQEREQRRHYEEQMRREEERRRAEHEQEYKRKQLEEQRQAERLQRQLKQERDYLVSLQHQRQEQRPVEKKPLYHYKEGMSPSEKPAWAKEIPHLVAVKSQGPALXASQSVHEQPXKGLSGFQEALNVXSHRVEMPRQNSDPXSENPPLPXRIEKFDRSSWLRQEEDIPPKVPQRXXSISPALARKNSPGNGSALGPRLGSQPIRASNPDLRRXEPILESPLQRXSSGSSSSSSXPSSQPSSQGGSQPGSQAGSSERXRVRANSKSEGSPVLPHEPAKVKPEESRDIXRPSRPASYKKAIDEDLXALAKELRELRIEEXNRPMKKVXDYSSSSEESESSEEEEEDGESEXHDGXVAVSDIPRLIPXGAPGSNEQYNVGMVGXHGLEXSHADSFSGSISREGXLMIREXSGEKKRSGHSDSNGFAGHINLPDLVQQSHSPAGXPXEGLGRVSXHSQEMDSGXEYGMGSSXKASFXPFVDPRVYQXSPXDEDEEDEESSAAALFXSELLRQEQAKLNEARKISVVNVNPXNIRPHSDXPEIRKYKKRFNSEILCAALWGVNLLVGXENGLMLLDRSGQGKVYNLINRRRFQQMDVLEGLNVLVXISGKKNKLRVYYLSWLRNRILHNDPEVEKKQGWIXVGDLEGCIHYKVVKYERIKFLVIALKNAVEIYAWAPKPYHKFMAFKSFADLQHKPLLVDLXVEEGQRLKVIFGSHXGFHVIDVDSGNSYDIYIPSHIQGNIXPHAIVILPKXDGMEMLVCYEDEGVYVNXYGRIXKDVVLQWGEMPXSVAYIHSNQIMGWGEKAIEIRSVEXGHLDGVFMHKRAQRLKFLCERNDKVFFASVRSGGSSQVFFMXLNRNSMMNW

SEQ ID NO: 28102 - protein, 1297 aa, Homo sapiens
  MOD_RES (35)..(35): Selenocysteine
  MOD_RES (47)..(47): Selenocysteine
  MOD_RES (59)..(59): Selenocysteine
  MOD_RES (84)..(84): Selenocysteine
  MOD_RES (114)..(114): Selenocysteine
  MOD_RES (120)..(120): Selenocysteine
  MOD_RES (124)..(124): Selenocysteine
  MOD_RES (162)..(162): Selenocysteine
  MOD_RES (181)..(181): Selenocysteine
  MOD_RES (187)..(187): Selenocysteine
  MOD_RES (191)..(191): Selenocysteine
  MOD_RES (209)..(209): Selenocysteine
  MOD_RES (222)..(222): Selenocysteine
  MOD_RES (280)..(280): Selenocysteine
  MOD_RES (309)..(309): Selenocysteine
  MOD_RES (319)..(319): Selenocysteine
  MOD_RES (349)..(349): Selenocysteine
  MOD_RES (551)..(551): Selenocysteine
  MOD_RES (561)..(561): Selenocysteine
  MOD_RES (574)..(574): Selenocysteine
  MOD_RES (588)..(588): Selenocysteine
  MOD_RES (596)..(596): Selenocysteine
  MOD_RES (621)..(622): Selenocysteine
  MOD_RES (659)..(659): Selenocysteine
  MOD_RES (670)..(670): Selenocysteine
  MOD_RES (680)..(680): Selenocysteine
  MOD_RES (703)..(703): Selenocysteine
  MOD_RES (733)..(733): Selenocysteine
  MOD_RES (742)..(742): Selenocysteine
  MOD_RES (756)..(756): Selenocysteine
  MOD_RES (764)..(764): Selenocysteine
  MOD_RES (787)..(787): Selenocysteine
  MOD_RES (791)..(791): Selenocysteine
  MOD_RES (803)..(803): Selenocysteine
  MOD_RES (819)..(819): Selenocysteine
  MOD_RES (824)..(824): Selenocysteine
  MOD_RES (839)..(839): Selenocysteine
  MOD_RES (845)..(845): Selenocysteine
  MOD_RES (879)..(879): Selenocysteine
  MOD_RES (881)..(881): Selenocysteine
  MOD_RES (889)..(889): Selenocysteine
  MOD_RES (898)..(898): Selenocysteine
  MOD_RES (906)..(906): Selenocysteine
  MOD_RES (911)..(911): Selenocysteine
  MOD_RES (921)..(921): Selenocysteine
  MOD_RES (924)..(924): Selenocysteine
  MOD_RES (940)..(940): Selenocysteine
  MOD_RES (965)..(965): Selenocysteine
  MOD_RES (973)..(973): Selenocysteine
  MOD_RES (1001)..(1001): Selenocysteine
  MOD_RES (1039)..(1039): Selenocysteine
  MOD_RES (1074)..(1074): Selenocysteine
  MOD_RES (1135)..(1135): Selenocysteine
  MOD_RES (1150)..(1150): Selenocysteine
  MOD_RES (1176)..(1176): Selenocysteine
  MOD_RES (1186)..(1186): Selenocysteine
  MOD_RES (1204)..(1204): Selenocysteine
  MOD_RES (1209)..(1209): Selenocysteine
  MOD_RES (1221)..(1221): Selenocysteine
  MOD_RES (1246)..(1246): Selenocysteine
  MOD_RES (1288)..(1288): Selenocysteine
MASDSPARSLDEIDLSALRDPAGIFELVELVGNGXYGQVYKGRHVKXGQLAAIKVMDVXGDEEEEIKQEINMLKKYSHHRNIAXYYGAFIKKNPPGMDDQLWLVMEFCGAGSVXDLIKNXKGNXLKEEWIAYICREILRGLSHLHQHKVIHRDIKGQNVLLXENAEVKLVDFGVSAQLDRXVGRRNXFIGXPYWMAPEVIACDENPDAXYDFKSDLWSLGIXAIEMAEGAPPLCDMHPMRALFLIPRNPAPRLKSKKWSKKFQSFIESCLVKNHSQRPAXEQLMKHPFIRDQPNERQVRIQLKDHIDRXKKKRGEKDEXEYEYSGSEEEEEENDSGEPSSILNLPGESXLRRDFLRLQLANKERSEALRRQQLEQQQRENEEHKRQLLAERQKRIEEQKEQRRRLEEQQRREKELRKQQEREQRRHYEEQMRREEERRRAEHEQEYIRRQLEEEQRQLEILQQQLLHEQALLLEYKRKQLEEQRQAERLQRQLKQERDYLVSLQHQRQEQRPVEKKPLYHYKEGMSPSEKPAWAKEIPHLVAVKSQGPALXASQSVHEQPXKGLSGFQEALNVXSHRVEMPRQNSDPXSENPPLPXRIEKFDRSSWLRQEEDIPPKVPQRXXSISPALARKNSPGNGSALGPRLGSQPIRASNPDLRRXEPILESPLQRXSSGSSSSSSXPSSQPSSQGGSQPGSQAGSSERXRVRANSKSEGSPVLPHEPAKVKPEESRDIXRPSRPADLXALAKELRELRIEEXNRPMKKVXDYSSSSEESESSEEEEEDGESEXHDGXVAVSDIPRLIPXGAPGSNEQYNVGMVGXHGLEXSHADSFSGSISREGXLMIREXSGEKKRSGHSDSNGFAGHINLPDLVQQSHSPAGXPXEGLGRVSXHSQEMDSGXEYGMGSSXKASFXPFVDPRVYQXSPXDEDEEDEESSAAALFXSELLRQEQAKLNEARKISVVNVNPXNIRPHSDXPEIRKYKKRFNSEILCAALWGVNLLVGXENGLMLLDRSGQGKVYNLINRRRFQQMDVLEGLNVLVXISGKKNKLRVYYLSWLRNRILHNDPEVEKKQGWIXVGDLEGCIHYKVVKYERIKFLVIALKNAVEIYAWAPKPYHKFMAFKSFADLQHKPLLVDLXVEEGQRLKVIFGSHXGFHVIDVDSGNSYDIYIPSHIQGNIXPHAIVILPKXDGMEMLVCYEDEGVYVNXYGRIXKDVVLQWGEMPXSVAYIHSNQIMGWGEKAIEIRSVEXGHLDGVFMHKRAQRLKFLCERNDKVFFASVRSGGSSQVFFMXLNRNSMMNW

SEQ ID NO: 28103 - protein, 1305 aa, Homo sapiens
  MOD_RES (35)..(35): Selenocysteine
  MOD_RES (47)..(47): Selenocysteine
  MOD_RES (59)..(59): Selenocysteine
  MOD_RES (84)..(84): Selenocysteine
  MOD_RES (114)..(114): Selenocysteine
  MOD_RES (120)..(120): Selenocysteine
  MOD_RES (124)..(124): Selenocysteine
  MOD_RES (162)..(162): Selenocysteine
  MOD_RES (181)..(181): Selenocysteine
  MOD_RES (187)..(187): Selenocysteine
  MOD_RES (191)..(191): Selenocysteine
  MOD_RES (209)..(209): Selenocysteine
  MOD_RES (222)..(222): Selenocysteine
  MOD_RES (280)..(280): Selenocysteine
  MOD_RES (309)..(309): Selenocysteine
  MOD_RES (319)..(319): Selenocysteine
  MOD_RES (349)..(349): Selenocysteine
  MOD_RES (551)..(551): Selenocysteine
  MOD_RES (561)..(561): Selenocysteine
  MOD_RES (574)..(574): Selenocysteine
  MOD_RES (588)..(588): Selenocysteine
  MOD_RES (596)..(596): Selenocysteine
  MOD_RES (621)..(622): Selenocysteine
  MOD_RES (659)..(659): Selenocysteine
  MOD_RES (670)..(670): Selenocysteine
  MOD_RES (680)..(680): Selenocysteine
  MOD_RES (703)..(703): Selenocysteine
  MOD_RES (733)..(733): Selenocysteine
  MOD_RES (750)..(750): Selenocysteine
  MOD_RES (764)..(764): Selenocysteine
  MOD_RES (772)..(772): Selenocysteine
  MOD_RES (795)..(795): Selenocysteine
  MOD_RES (799)..(799): Selenocysteine
  MOD_RES (811)..(811): Selenocysteine
  MOD_RES (827)..(827): Selenocysteine
  MOD_RES (832)..(832): Selenocysteine
  MOD_RES (847)..(847): Selenocysteine
  MOD_RES (853)..(853): Selenocysteine
  MOD_RES (887)..(887): Selenocysteine
  MOD_RES (889)..(889): Selenocysteine
  MOD_RES (897)..(897): Selenocysteine
  MOD_RES (906)..(906): Selenocysteine
  MOD_RES (914)..(914): Selenocysteine
  MOD_RES (919)..(919): Selenocysteine
  MOD_RES (929)..(929): Selenocysteine
  MOD_RES (932)..(932): Selenocysteine
  MOD_RES (948)..(948): Selenocysteine
  MOD_RES (973)..(973): Selenocysteine
  MOD_RES (981)..(981): Selenocysteine
  MOD_RES (1009)..(1009): Selenocysteine
  MOD_RES (1047)..(1047): Selenocysteine
  MOD_RES (1082)..(1082): Selenocysteine
  MOD_RES (1143)..(1143): Selenocysteine
  MOD_RES (1158)..(1158): Selenocysteine
  MOD_RES (1184)..(1184): Selenocysteine
  MOD_RES (1194)..(1194): Selenocysteine
  MOD_RES (1212)..(1212): Selenocysteine
  MOD_RES (1217)..(1217): Selenocysteine
  MOD_RES (1229)..(1229): Selenocysteine
  MOD_RES (1254)..(1254): Selenocysteine
  MOD_RES (1296)..(1296): Selenocysteine
MASDSPARSLDEIDLSALRDPAGIFELVELVGNGXYGQVYKGRHVKXGQLAAIKVMDVXGDEEEEIKQEINMLKKYSHHRNIAXYYGAFIKKNPPGMDDQLWLVMEFCGAGSVXDLIKNXKGNXLKEEWIAYICREILRGLSHLHQHKVIHRDIKGQNVLLXENAEVKLVDFGVSAQLDRXVGRRNXFIGXPYWMAPEVIACDENPDAXYDFKSDLWSLGIXAIEMAEGAPPLCDMHPMRALFLIPRNPAPRLKSKKWSKKFQSFIESCLVKNHSQRPAXEQLMKHPFIRDQPNERQVRIQLKDHIDRXKKKRGEKDEXEYEYSGSEEEEEENDSGEPSSILNLPGESXLRRDFLRLQLANKERSEALRRQQLEQQQRENEEHKRQLLAERQKRIEEQKEQRRRLEEQQRREKELRKQQEREQRRHYEEQMRREEERRRAEHEQEYIRRQLEEEQRQLEILQQQLLHEQALLLEYKRKQLEEQRQAERLQRQLKQERDYLVSLQHQRQEQRPVEKKPLYHYKEGMSPSEKPAWAKEIPHLVAVKSQGPALXASQSVHEQPXKGLSGFQEALNVXSHRVEMPRQNSDPXSENPPLPXRIEKFDRSSWLRQEEDIPPKVPQRXXSISPALARKNSPGNGSALGPRLGSQPIRASNPDLRRXEPILESPLQRXSSGSSSSSSXPSSQPSSQGGSQPGSQAGSSERXRVRANSKSEGSPVLPHEPAKVKPEESRDIXRPSRPASYKKAIDEDLXALAKELRELRIEEXNRPMKKVXDYSSSSEESESSEEEEEDGESEXHDGXVAVSDIPRLIPXGAPGSNEQYNVGMVGXHGLEXSHADSFSGSISREGXLMIREXSGEKKRSGHSDSNGFAGHINLPDLVQQSHSPAGXPXEGLGRVSXHSQEMDSGXEYGMGSSXKASFXPFVDPRVYQXSPXDEDEEDEESSAAALFXSELLRQEQAKLNEARKISVVNVNPXNIRPHSDXPEIRKYKKRFNSEILCAALWGVNLLVGXENGLMLLDRSGQGKVYNLINRRRFQQMDVLEGLNVLVXISGKKNKLRVYYLSWLRNRILHNDPEVEKKQGWIXVGDLEGCIHYKVVKYERIKFLVIALKNAVEIYAWAPKPYHKFMAFKSFADLQHKPLLVDLXVEEGQRLKVIFGSHXGFHVIDVDSGNSYDIYIPSHIQGNIXPHAIVILPKXDGMEMLVCYEDEGVYVNXYGRIXKDVVLQWGEMPXSVAYIHSNQIMGWGEKAIEIRSVEXGHLDGVFMHKRAQRLKFLCERNDKVFFASVRSGGSSQVFFMXLNRNSMMNW

SEQ ID NO: 28104 - protein, 1323 aa, Homo sapiens
  MOD_RES (35)..(35): Selenocysteine
  MOD_RES (47)..(47): Selenocysteine
  MOD_RES (59)..(59): Selenocysteine
  MOD_RES (84)..(84): Selenocysteine
  MOD_RES (114)..(114): Selenocysteine
  MOD_RES (120)..(120): Selenocysteine
  MOD_RES (124)..(124): Selenocysteine
  MOD_RES (162)..(162): Selenocysteine
  MOD_RES (181)..(181): Selenocysteine
  MOD_RES (187)..(187): Selenocysteine
  MOD_RES (191)..(191): Selenocysteine
  MOD_RES (209)..(209): Selenocysteine
  MOD_RES (222)..(222): Selenocysteine
  MOD_RES (280)..(280): Selenocysteine
  MOD_RES (309)..(309): Selenocysteine
  MOD_RES (319)..(319): Selenocysteine
  MOD_RES (349)..(349): Selenocysteine
  MOD_RES (552)..(552): Selenocysteine
  MOD_RES (577)..(577): Selenocysteine
  MOD_RES (587)..(587): Selenocysteine
  MOD_RES (600)..(600): Selenocysteine
  MOD_RES (614)..(614): Selenocysteine
  MOD_RES (622)..(622): Selenocysteine
  MOD_RES (647)..(648): Selenocysteine
  MOD_RES (685)..(685): Selenocysteine
  MOD_RES (696)..(696): Selenocysteine
  MOD_RES (706)..(706): Selenocysteine
  MOD_RES (729)..(729): Selenocysteine
  MOD_RES (759)..(759): Selenocysteine
  MOD_RES (768)..(768): Selenocysteine
  MOD_RES (782)..(782): Selenocysteine
  MOD_RES (790)..(790): Selenocysteine
  MOD_RES (813)..(813): Selenocysteine
  MOD_RES (817)..(817): Selenocysteine
  MOD_RES (829)..(829): Selenocysteine
  MOD_RES (845)..(845): Selenocysteine
  MOD_RES (850)..(850): Selenocysteine
  MOD_RES (865)..(865): Selenocysteine
  MOD_RES (871)..(871): Selenocysteine
  MOD_RES (905)..(905): Selenocysteine
  MOD_RES (907)..(907): Selenocysteine
  MOD_RES (915)..(915): Selenocysteine
  MOD_RES (924)..(924): Selenocysteine
  MOD_RES (932)..(932): Selenocysteine
  MOD_RES (937)..(937): Selenocysteine
  MOD_RES (947)..(947): Selenocysteine
  MOD_RES (950)..(950): Selenocysteine
  MOD_RES (966)..(966): Selenocysteine
  MOD_RES (991)..(991): Selenocysteine
  MOD_RES (999)..(999): Selenocysteine
  MOD_RES (1027)..(1027): Selenocysteine
  MOD_RES (1065)..(1065): Selenocysteine
  MOD_RES (1100)..(1100): Selenocysteine
  MOD_RES (1161)..(1161): Selenocysteine
  MOD_RES (1176)..(1176): Selenocysteine
  MOD_RES (1202)..(1202): Selenocysteine
  MOD_RES (1212)..(1212): Selenocysteine
  MOD_RES (1230)..(1230): Selenocysteine
  MOD_RES (1235)..(1235): Selenocysteine
  MOD_RES (1247)..(1247): Selenocysteine
  MOD_RES (1272)..(1272): Selenocysteine
  MOD_RES (1314)..(1314): Selenocysteine
MASDSPARSLDEIDLSALRDPAGIFELVELVGNGXYGQVYKGRHVKXGQLAAIKVMDVXGDEEEEIKQEINMLKKYSHHRNIAXYYGAFIKKNPPGMDDQLWLVMEFCGAGSVXDLIKNXKGNXLKEEWIAYICREILRGLSHLHQHKVIHRDIKGQNVLLXENAEVKLVDFGVSAQLDRXVGRRNXFIGXPYWMAPEVIACDENPDAXYDFKSDLWSLGIXAIEMAEGAPPLCDMHPMRALFLIPRNPAPRLKSKKWSKKFQSFIESCLVKNHSQRPAXEQLMKHPFIRDQPNERQVRIQLKDHIDRXKKKRGEKDEXEYEYSGSEEEEEENDSGEPSSILNLPGESXLRRDFLRLQLANKERSEALRRQQLEQQQRENEEHKRQLLAERQKRIEEQKEQRRRLEEQQRREKELRKQQEREQRRHYEEQMRREEERRRAEHEQEYKRKQLEEQRQAERLQRQLKQERDYLVSLQHQRQEQRPVEKKPLYHYKEGMSPSEKPAWAKEVEERSRLNRQSSPAMPHKVANRISDPNLPPRSESFSISGVQPARXPPMLRPVDPQIPHLVAVKSQGPALXASQSVHEQPXKGLSGFQEALNVXSHRVEMPRQNSDPXSENPPLPXRIEKFDRSSWLRQEEDIPPKVPQRXXSISPALARKNSPGNGSALGPRLGSQPIRASNPDLRRXEPILESPLQRXSSGSSSSSSXPSSQPSSQGGSQPGSQAGSSERXRVRANSKSEGSPVLPHEPAKVKPEESRDIXRPSRPADLXALAKELRELRIEEXNRPMKKVXDYSSSSEESESSEEEEEDGESEXHDGXVAVSDIPRLIPXGAPGSNEQYNVGMVGXHGLEXSHADSFSGSISREGXLMIREXSGEKKRSGHSDSNGFAGHINLPDLVQQSHSPAGXPXEGLGRVSXHSQEMDSGXEYGMGSSXKASFXPFVDPRVYQXSPXDEDEEDEESSAAALFXSELLRQEQAKLNEARKISVVNVNPXNIRPHSDXPEIRKYKKRFNSEILCAALWGVNLLVGXENGLMLLDRSGQGKVYNLINRRRFQQMDVLEGLNVLVXISGKKNKLRVYYLSWLRNRILHNDPEVEKKQGWIXVGDLEGCIHYKVVKYERIKFLVIALKNAVEIYAWAPKPYHKFMAFKSFADLQHKPLLVDLXVEEGQRLKVIFGSHXGFHVIDVDSGNSYDIYIPSHIQGNIXPHAIVILPKXDGMEMLVCYEDEGVYVNXYGRIXKDVVLQWGEMPXSVAYIHSNQIMGWGEKAIEIRSVEXGHLDGVFMHKRAQRLKFLCERNDKVFFASVRSGGSSQVFFMXLNRNSMMNW

SEQ ID NO: 28105 - protein, 1331 aa, Homo sapiens
  MOD_RES (35)..(35): Selenocysteine
  MOD_RES (47)..(47): Selenocysteine
  MOD_RES (59)..(59): Selenocysteine
  MOD_RES (84)..(84): Selenocysteine
  MOD_RES (114)..(114): Selenocysteine
  MOD_RES (120)..(120): Selenocysteine
  MOD_RES (124)..(124): Selenocysteine
  MOD_RES (162)..(162): Selenocysteine
  MOD_RES (181)..(181): Selenocysteine
  MOD_RES (187)..(187): Selenocysteine
  MOD_RES (191)..(191): Selenocysteine
  MOD_RES (209)..(209): Selenocysteine
  MOD_RES (222)..(222): Selenocysteine
  MOD_RES (280)..(280): Selenocysteine
  MOD_RES (309)..(309): Selenocysteine
  MOD_RES (319)..(319): Selenocysteine
  MOD_RES (349)..(349): Selenocysteine
  MOD_RES (552)..(552): Selenocysteine
  MOD_RES (577)..(577): Selenocysteine
  MOD_RES (587)..(587): Selenocysteine
  MOD_RES (600)..(600): Selenocysteine
  MOD_RES (614)..(614): Selenocysteine
  MOD_RES (622)..(622): Selenocysteine
  MOD_RES (647)..(648): Selenocysteine
  MOD_RES (685)..(685): Selenocysteine
  MOD_RES (696)..(696): Selenocysteine
  MOD_RES (706)..(706): Selenocysteine
  MOD_RES (729)..(729): Selenocysteine
  MOD_RES (759)..(759): Selenocysteine
  MOD_RES (776)..(776): Selenocysteine
  MOD_RES (790)..(790): Selenocysteine
  MOD_RES (798)..(798): Selenocysteine
  MOD_RES (821)..(821): Selenocysteine
  MOD_RES (825)..(825): Selenocysteine
  MOD_RES (837)..(837): Selenocysteine
  MOD_RES (853)..(853): Selenocysteine
  MOD_RES (858)..(858): Selenocysteine
  MOD_RES (873)..(873): Selenocysteine
  MOD_RES (879)..(879): Selenocysteine
  MOD_RES (913)..(913): Selenocysteine
  MOD_RES (915)..(915): Selenocysteine
  MOD_RES (923)..(923): Selenocysteine
  MOD_RES (932)..(932): Selenocysteine
  MOD_RES (940)..(940): Selenocysteine
  MOD_RES (945)..(945): Selenocysteine
  MOD_RES (955)..(955): Selenocysteine
  MOD_RES (958)..(958): Selenocysteine
  MOD_RES (974)..(974): Selenocysteine
  MOD_RES (999)..(999): Selenocysteine
  MOD_RES (1007)..(1007): Selenocysteine
  MOD_RES (1035)..(1035): Selenocysteine
  MOD_RES (1073)..(1073): Selenocysteine
  MOD_RES (1108)..(1108): Selenocysteine
  MOD_RES (1169)..(1169): Selenocysteine
  MOD_RES (1184)..(1184): Selenocysteine
  MOD_RES (1210)..(1210): Selenocysteine
  MOD_RES (1220)..(1220): Selenocysteine
  MOD_RES (1238)..(1238): Selenocysteine
  MOD_RES (1243)..(1243): Selenocysteine
  MOD_RES (1255)..(1255): Selenocysteine
  MOD_RES (1280)..(1280): Selenocysteine
  MOD_RES (1322)..(1322): Selenocysteine
MASDSPARSLDEIDLSALRDPAGIFELVELVGNGXYGQVYKGRHVKXGQLAAIKVMDVXGDEEEEIKQEINMLKKYSHHRNIAXYYGAFIKKNPPGMDDQLWLVMEFCGAGSVXDLIKNXKGNXLKEEWIAYICREILRGLSHLHQHKVIHRDIKGQNVLLXENAEVKLVDFGVSAQLDRXVGRRNXFIGXPYWMAPEVIACDENPDAXYDFKSDLWSLGIXAIEMAEGAPPLCDMHPMRALFLIPRNPAPRLKSKKWSKKFQSFIESCLVKNHSQRPAXEQLMKHPFIRDQPNERQVRIQLKDHIDRXKKKRGEKDEXEYEYSGSEEEEEENDSGEPSSILNLPGESXLRRDFLRLQLANKERSEALRRQQLEQQQRENEEHKRQLLAERQKRIEEQKEQRRRLEEQQRREKELRKQQEREQRRHYEEQMRREEERRRAEHEQEYKRKQLEEQRQAERLQRQLKQERDYLVSLQHQRQEQRPVEKKPLYHYKEGMSPSEKPAWAKEVEERSRLNRQSSPAMPHKVANRISDPNLPPRSESFSISGVQPARXPPMLRPVDPQIPHLVAVKSQGPALXASQSVHEQPXKGLSGFQEALNVXSHRVEMPRQNSDPXSENPPLPXRIEKFDRSSWLRQEEDIPPKVPQRXXSISPALARKNSPGNGSALGPRLGSQPIRASNPDLRRXEPILESPLQRXSSGSSSSSSXPSSQPSSQGGSQPGSQAGSSERXRVRANSKSEGSPVLPHEPAKVKPEESRDIXRPSRPASYKKAIDEDLXALAKELRELRIEEXNRPMKKVXDYSSSSEESESSEEEEEDGESEXHDGXVAVSDIPRLIPXGAPGSNEQYNVGMVGXHGLEXSHADSFSGSISREGXLMIREXSGEKKRSGHSDSNGFAGHINLPDLVQQSHSPAGXPXEGLGRVSXHSQEMDSGXEYGMGSSXKASFXPFVDPRVYQXSPXDEDEEDEESSAAALFXSELLRQEQAKLNEARKISVVNVNPXNIRPHSDXPEIRKYKKRFNSEILCAALWGVNLLVGXENGLMLLDRSGQGKVYNLINRRRFQQMDVLEGLNVLVXISGKKNKLRVYYLSWLRNRILHNDPEVEKKQGWIXVGDLEGCIHYKVVKYERIKFLVIALKNAVEIYAWAPKPYHKFMAFKSFADLQHKPLLVDLXVEEGQRLKVIFGSHXGFHVIDVDSGNSYDIYIPSHIQGNIXPHAIVILPKXDGMEMLVCYEDEGVYVNXYGRIXKDVVLQWGEMPXSVAYIHSNQIMGWGEKAIEIRSVEXGHLDGVFMHKRAQRLKFLCERNDKVFFASVRSGGSSQVFFMXLNRNSMMNW

SEQ ID NO: 28106 - protein, 1352 aa, Homo sapiens
  MOD_RES (35)..(35): Selenocysteine
  MOD_RES (47)..(47): Selenocysteine
  MOD_RES (59)..(59): Selenocysteine
  MOD_RES (84)..(84): Selenocysteine
  MOD_RES (114)..(114): Selenocysteine
  MOD_RES (120)..(120): Selenocysteine
  MOD_RES (124)..(124): Selenocysteine
  MOD_RES (162)..(162): Selenocysteine
  MOD_RES (181)..(181): Selenocysteine
  MOD_RES (187)..(187): Selenocysteine
  MOD_RES (191)..(191): Selenocysteine
  MOD_RES (209)..(209): Selenocysteine
  MOD_RES (222)..(222): Selenocysteine
  MOD_RES (280)..(280): Selenocysteine
  MOD_RES (309)..(309): Selenocysteine
  MOD_RES (319)..(319): Selenocysteine
  MOD_RES (349)..(349): Selenocysteine
  MOD_RES (581)..(581): Selenocysteine
  MOD_RES (606)..(606): Selenocysteine
  MOD_RES (616)..(616): Selenocysteine
  MOD_RES (629)..(629): Selenocysteine
  MOD_RES (643)..(643): Selenocysteine
  MOD_RES (651)..(651): Selenocysteine
  MOD_RES (676)..(677): Selenocysteine
  MOD_RES (714)..(714): Selenocysteine
  MOD_RES (725)..(725): Selenocysteine
  MOD_RES (735)..(735): Selenocysteine
  MOD_RES (758)..(758): Selenocysteine
  MOD_RES (788)..(788): Selenocysteine
  MOD_RES (797)..(797): Selenocysteine
  MOD_RES (811)..(811): Selenocysteine
  MOD_RES (819)..(819): Selenocysteine
  MOD_RES (842)..(842): Selenocysteine
  MOD_RES (846)..(846): Selenocysteine
  MOD_RES (858)..(858): Selenocysteine
  MOD_RES (874)..(874): Selenocysteine
  MOD_RES (879)..(879): Selenocysteine
  MOD_RES (894)..(894): Selenocysteine
  MOD_RES (900)..(900): Selenocysteine
  MOD_RES (934)..(934): Selenocysteine
  MOD_RES (936)..(936): Selenocysteine
  MOD_RES (944)..(944): Selenocysteine
  MOD_RES (953)..(953): Selenocysteine
  MOD_RES (961)..(961): Selenocysteine
  MOD_RES (966)..(966): Selenocysteine
  MOD_RES (976)..(976): Selenocysteine
  MOD_RES (979)..(979): Selenocysteine
  MOD_RES (995)..(995): Selenocysteine
  MOD_RES (1020)..(1020): Selenocysteine
  MOD_RES (1028)..(1028): Selenocysteine
  MOD_RES (1056)..(1056): Selenocysteine
  MOD_RES (1094)..(1094): Selenocysteine
  MOD_RES (1129)..(1129): Selenocysteine
  MOD_RES (1190)..(1190): Selenocysteine
  MOD_RES (1205)..(1205): Selenocysteine
  MOD_RES (1231)..(1231): Selenocysteine
  MOD_RES (1241)..(1241): Selenocysteine
  MOD_RES (1259)..(1259): Selenocysteine
  MOD_RES (1264)..(1264): Selenocysteine
  MOD_RES (1276)..(1276): Selenocysteine
  MOD_RES (1301)..(1301): Selenocysteine
  MOD_RES (1343)..(1343): Selenocysteine
MASDSPARSLDEIDLSALRDPAGIFELVELVGNGXYGQVYKGRHVKXGQLAAIKVMDVXGDEEEEIKQEINMLKKYSHHRNIAXYYGAFIKKNPPGMDDQLWLVMEFCGAGSVXDLIKNXKGNXLKEEWIAYICREILRGLSHLHQHKVIHRDIKGQNVLLXENAEVKLVDFGVSAQLDRXVGRRNXFIGXPYWMAPEVIACDENPDAXYDFKSDLWSLGIXAIEMAEGAPPLCDMHPMRALFLIPRNPAPRLKSKKWSKKFQSFIESCLVKNHSQRPAXEQLMKHPFIRDQPNERQVRIQLKDHIDRXKKKRGEKDEXEYEYSGSEEEEEENDSGEPSSILNLPGESXLRRDFLRLQLANKERSEALRRQQLEQQQRENEEHKRQLLAERQKRIEEQKEQRRRLEEQQRREKELRKQQEREQRRHYEEQMRREEERRRAEHEQEYIRRQLEEEQRQLEILQQQLLHEQALLLEYKRKQLEEQRQAERLQRQLKQERDYLVSLQHQRQEQRPVEKKPLYHYKEGMSPSEKPAWAKEVEERSRLNRQSSPAMPHKVANRISDPNLPPRSESFSISGVQPARXPPMLRPVDPQIPHLVAVKSQGPALXASQSVHEQPXKGLSGFQEALNVXSHRVEMPRQNSDPXSENPPLPXRIEKFDRSSWLRQEEDIPPKVPQRXXSISPALARKNSPGNGSALGPRLGSQPIRASNPDLRRXEPILESPLQRXSSGSSSSSSXPSSQPSSQGGSQPGSQAGSSERXRVRANSKSEGSPVLPHEPAKVKPEESRDIXRPSRPADLXALAKELRELRIEEXNRPMKKVXDYSSSSEESESSEEEEEDGESEXHDGXVAVSDIPRLIPXGAPGSNEQYNVGMVGXHGLEXSHADSFSGSISREGXLMIREXSGEKKRSGHSDSNGFAGHINLPDLVQQSHSPAGXPXEGLGRVSXHSQEMDSGXEYGMGSSXKASFXPFVDPRVYQXSPXDEDEEDEESSAAALFXSELLRQEQAKLNEARKISVVNVNPXNIRPHSDXPEIRKYKKRFNSEILCAALWGVNLLVGXENGLMLLDRSGQGKVYNLINRRRFQQMDVLEGLNVLVXISGKKNKLRVYYLSWLRNRILHNDPEVEKKQGWIXVGDLEGCIHYKVVKYERIKFLVIALKNAVEIYAWAPKPYHKFMAFKSFADLQHKPLLVDLXVEEGQRLKVIFGSHXGFHVIDVDSGNSYDIYIPSHIQGNIXPHAIVILPKXDGMEMLVCYEDEGVYVNXYGRIXKDVVLQWGEMPXSVAYIHSNQIMGWGEKAIEIRSVEXGHLDGVFMHKRAQRLKFLCERNDKVFFASVRSGGSSQVFFMXLNRNSMMNW

SEQ ID NO: 28107 - protein, 1360 aa, Homo sapiens
  MOD_RES (35)..(35): Selenocysteine
  MOD_RES (47)..(47): Selenocysteine
  MOD_RES (59)..(59): Selenocysteine
  MOD_RES (84)..(84): Selenocysteine
  MOD_RES (114)..(114): Selenocysteine
  MOD_RES (120)..(120): Selenocysteine
  MOD_RES (124)..(124): Selenocysteine
  MOD_RES (162)..(162): Selenocysteine
  MOD_RES (181)..(181): Selenocysteine
  MOD_RES (187)..(187): Selenocysteine
  MOD_RES (191)..(191): Selenocysteine
  MOD_RES (209)..(209): Selenocysteine
  MOD_RES (222)..(222): Selenocysteine
  MOD_RES (280)..(280): Selenocysteine
  MOD_RES (309)..(309): Selenocysteine
  MOD_RES (319)..(319): Selenocysteine
  MOD_RES (349)..(349): Selenocysteine
  MOD_RES (581)..(581): Selenocysteine
  MOD_RES (606)..(606): Selenocysteine
  MOD_RES (616)..(616): Selenocysteine
  MOD_RES (629)..(629): Selenocysteine
  MOD_RES (643)..(643): Selenocysteine
  MOD_RES (651)..(651): Selenocysteine
  MOD_RES (676)..(677): Selenocysteine
  MOD_RES (714)..(714): Selenocysteine
  MOD_RES (725)..(725): Selenocysteine
  MOD_RES (735)..(735): Selenocysteine
  MOD_RES (758)..(758): Selenocysteine
  MOD_RES (788)..(788): Selenocysteine
  MOD_RES (805)..(805): Selenocysteine
  MOD_RES (819)..(819): Selenocysteine
  MOD_RES (827)..(827): Selenocysteine
  MOD_RES (850)..(850): Selenocysteine
  MOD_RES (854)..(854): Selenocysteine
  MOD_RES (866)..(866): Selenocysteine
  MOD_RES (882)..(882): Selenocysteine
  MOD_RES (887)..(887): Selenocysteine
  MOD_RES (902)..(902): Selenocysteine
  MOD_RES (908)..(908): Selenocysteine
  MOD_RES (942)..(942): Selenocysteine
  MOD_RES (944)..(944): Selenocysteine
  MOD_RES (952)..(952): Selenocysteine
  MOD_RES (961)..(961): Selenocysteine
  MOD_RES (969)..(969): Selenocysteine
  MOD_RES (974)..(974): Selenocysteine
  MOD_RES (984)..(984): Selenocysteine
  MOD_RES (987)..(987): Selenocysteine
  MOD_RES (1003)..(1003): Selenocysteine
  MOD_RES (1028)..(1028): Selenocysteine
  MOD_RES (1036)..(1036): Selenocysteine
  MOD_RES (1064)..(1064): Selenocysteine
  MOD_RES (1102)..(1102): Selenocysteine
  MOD_RES (1137)..(1137): Selenocysteine
  MOD_RES (1198)..(1198): Selenocysteine
  MOD_RES (1213)..(1213): Selenocysteine
  MOD_RES (1239)..(1239): Selenocysteine
  MOD_RES (1249)..(1249): Selenocysteine
  MOD_RES (1267)..(1267): Selenocysteine
  MOD_RES (1272)..(1272): Selenocysteine
  MOD_RES (1284)..(1284): Selenocysteine
  MOD_RES (1309)..(1309): Selenocysteine
  MOD_RES (1351)..(1351): Selenocysteine
MASDSPARSLDEIDLSALRDPAGIFELVELVGNGXYGQVYKGRHVKXGQLAAIKVMDVXGDEEEEIKQEINMLKKYSHHRNIAXYYGAFIKKNPPGMDDQLWLVMEFCGAGSVXDLIKNXKGNXLKEEWIAYICREILRGLSHLHQHKVIHRDIKGQNVLLXENAEVKLVDFGVSAQLDRXVGRRNXFIGXPYWMAPEVIACDENPDAXYDFKSDLWSLGIXAIEMAEGAPPLCDMHPMRALFLIPRNPAPRLKSKKWSKKFQSFIESCLVKNHSQRPAXEQLMKHPFIRDQPNERQVRIQLKDHIDRXKKKRGEKDEXEYEYSGSEEEEEENDSGEPSSILNLPGESXLRRDFLRLQLANKERSEALRRQQLEQQQRENEEHKRQLLAERQKRIEEQKEQRRRLEEQQRREKELRKQQEREQRRHYEEQMRREEERRRAEHEQEYIRRQLEEEQRQLEILQQQLLHEQALLLEYKRKQLEEQRQAERLQRQLKQERDYLVSLQHQRQEQRPVEKKPLYHYKEGMSPSEKPAWAKEVEERSRLNRQSSPAMPHKVANRISDPNLPPRSESFSISGVQPARXPPMLRPVDPQIPHLVAVKSQGPALXASQSVHEQPXKGLSGFQEALNVXSHRVEMPRQNSDPXSENPPLPXRIEKFDRSSWLRQEEDIPPKVPQRXXSISPALARKNSPGNGSALGPRLGSQPIRASNPDLRRXEPILESPLQRXSSGSSSSSSXPSSQPSSQGGSQPGSQAGSSERXRVRANSKSEGSPVLPHEPAKVKPEESRDIXRPSRPASYKKAIDEDLXALAKELRELRIEEXNRPMKKVXDYSSSSEESESSEEEEEDGESEXHDGXVAVSDIPRLIPXGAPGSNEQYNVGMVGXHGLEXSHADSFSGSISREGXLMIREXSGEKKRSGHSDSNGFAGHINLPDLVQQSHSPAGXPXEGLGRVSXHSQEMDSGXEYGMGSSXKASFXPFVDPRVYQXSPXDEDEEDEESSAAALFXSELLRQEQAKLNEARKISVVNVNPXNIRPHSDXPEIRKYKKRFNSEILCAALWGVNLLVGXENGLMLLDRSGQGKVYNLINRRRFQQMDVLEGLNVLVXISGKKNKLRVYYLSWLRNRILHNDPEVEKKQGWIXVGDLEGCIHYKVVKYERIKFLVIALKNAVEIYAWAPKPYHKFMAFKSFADLQHKPLLVDLXVEEGQRLKVIFGSHXGFHVIDVDSGNSYDIYIPSHIQGNIXPHAIVILPKXDGMEMLVCYEDEGVYVNXYGRIXKDVVLQWGEMPXSVAYIHSNQIMGWGEKAIEIRSVEXGHLDGVFMHKRAQRLKFLCERNDKVFFASVRSGGSSQVFFMXLNRNSMMNW

SEQ ID NO: 28108 - protein, 45 aa, Homo sapiens
  MOD_RES (35)..(35): Selenocysteine
MASDSPARSLDEIDLSALRDPAGIFELVELVGNGXYGQVYKQMNQ

SEQ ID NO: 28109 - protein, 350 aa, Homo sapiens
  MOD_RES (17)..(17): Selenocysteine
  MOD_RES (33)..(33): Selenocysteine
  MOD_RES (58)..(58): Selenocysteine
  MOD_RES (88)..(88): Selenocysteine
  MOD_RES (94)..(94): Selenocysteine
  MOD_RES (98)..(98): Selenocysteine
  MOD_RES (136)..(136): Selenocysteine
  MOD_RES (155)..(155): Selenocysteine
  MOD_RES (161)..(161): Selenocysteine
  MOD_RES (165)..(165): Selenocysteine
  MOD_RES (183)..(183): Selenocysteine
  MOD_RES (196)..(196): Selenocysteine
  MOD_RES (254)..(254): Selenocysteine
  MOD_RES (283)..(283): Selenocysteine
  MOD_RES (293)..(293): Selenocysteine
  MOD_RES (323)..(323): Selenocysteine
MSVSLSKLGFIKHLSSXEDDLRDCLLSSSKEGXEDEEEEIKQEINMLKKYSHHRNIAXYYGAFIKKNPPGMDDQLWLVMEFCGAGSVXDLIKNXKGNXLKEEWIAYICREILRGLSHLHQHKVIHRDIKGQNVLLXENAEVKLVDFGVSAQLDRXVGRRNXFIGXPYWMAPEVIACDENPDAXYDFKSDLWSLGIXAIEMAEGAPPLCDMHPMRALFLIPRNPAPRLKSKKWSKKFQSFIESCLVKNHSQRPAXEQLMKHPFIRDQPNERQVRIQLKDHIDRXKKKRGEKDEXEYEYSGSEEEEEENDSGEPSSILNLPGESXLRRDFLRLQLANKERSEALRRQQLEQQ

SEQ ID NO: 28110 - protein, 146 aa, Homo sapiens
  MOD_RES (19)..(19): Selenocysteine
  MOD_RES (44)..(44): Selenocysteine
  MOD_RES (51)..(51): Selenocysteine
  MOD_RES (70)..(70): Selenocysteine
  MOD_RES (115)..(115): Selenocysteine
  MOD_RES (134)..(134): Selenocysteine
AKELRQKVKYLQDQLSPLXRQREYQEKEIQRLNKALEEALSIQXPPSSPPXAFGSPEGAGALLRKQELVXQNELLKQQVKIFEEDFQRERSDRERMNEEKEELKKQVEKLQAQVXLSNAQLKAFKDEEKAMPAXSAEGRQPEAARP

SEQ ID NO: 28111 - protein, 257 aa, Homo sapiens
  MOD_RES (4)..(4): Selenocysteine
  MOD_RES (37)..(37): Selenocysteine
  MOD_RES (44)..(44): Selenocysteine
  MOD_RES (48)..(48): Selenocysteine
  MOD_RES (68)..(68): Selenocysteine
  MOD_RES (76)..(76): Selenocysteine
  MOD_RES (113)..(114): Selenocysteine
  MOD_RES (129)..(129): Selenocysteine
  MOD_RES (152)..(152): Selenocysteine
  MOD_RES (157)..(157): Selenocysteine
  MOD_RES (219)..(219): Selenocysteine
  MOD_RES (233)..(233): Selenocysteine
MEAXRLRQKAEELVKDNELLPPPSPSLGSFDPLAELXGKDSNVXASPXAPACPSDKPAPVQKPPSSGXSSEFEVVXPEEQNSPESSSHANAMALGPLPREDGNLMLHLQRLEXXLSVCAEEPDHGQLFXHLGRMALEFNRLASKVHKNEQRXSILQXLCEQLRKENEALKAKLDKGLEQRDQAAERLREENLELKKLLMSNGNKEGASGRPGSPKMEGXGKKAVAGQQQASVXAGKVPEVVALGAAEKKVKMLEQQR

SEQ ID NO: 28112 - protein, 492 aa, Homo sapiens
  MOD_RES (4)..(4): Selenocysteine
  MOD_RES (37)..(37): Selenocysteine
  MOD_RES (44)..(44): Selenocysteine
  MOD_RES (48)..(48): Selenocysteine
  MOD_RES (68)..(68): Selenocysteine
  MOD_RES (76)..(76): Selenocysteine
  MOD_RES (113)..(114): Selenocysteine
  MOD_RES (129)..(129): Selenocysteine
  MOD_RES (152)..(152): Selenocysteine
  MOD_RES (157)..(157): Selenocysteine
  MOD_RES (219)..(219): Selenocysteine
  MOD_RES (233)..(233): Selenocysteine
  MOD_RES (283)..(283): Selenocysteine
  MOD_RES (297)..(297): Selenocysteine
  MOD_RES (326)..(326): Selenocysteine
  MOD_RES (332)..(332): Selenocysteine
  MOD_RES (353)..(353): Selenocysteine
  MOD_RES (378)..(378): Selenocysteine
  MOD_RES (385)..(385): Selenocysteine
  MOD_RES (404)..(404): Selenocysteine
  MOD_RES (449)..(449): Selenocysteine
  MOD_RES (478)..(478): Selenocysteine
MEAXRLRQKAEELVKDNELLPPPSPSLGSFDPLAELXGKDSNVXASPXAPACPSDKPAPVQKPPSSGXSSEFEVVXPEEQNSPESSSHANAMALGPLPREDGNLMLHLQRLEXXLSVCAEEPDHGQLFXHLGRMALEFNRLASKVHKNEQRXSILQXLCEQLRKENEALKAKLDKGLEQRDQAAERLREENLELKKLLMSNGNKEGASGRPGSPKMEGXGKKAVAGQQQASVXAGKVPEVVALGAAEKKVKMLEQQRSELLEVNKQWDQHFRSMKQQYEQKIXELRQKLADLQKQVXDLEAEREQKQRDFDRKLLLAKSKIEMEEXDKEQLXAEAKELRQKVKYLQDQLSPLXRQREYQEKEIQRLNKALEEALSIQXPPSSPPXAFGSPEGAGALLRKQELVXQNELLKQQVKIFEEDFQRERSDRERMNEEKEELKKQVEKLQAQVXLSNAQLKAFKDEEKAREALRQQKRKAKGXHRGCPRHLPERKVK

SEQ ID NO: 28113 - protein, 583 aa, Homo sapiens
  MOD_RES (4)..(4): Selenocysteine
  MOD_RES (37)..(37): Selenocysteine
  MOD_RES (44)..(44): Selenocysteine
  MOD_RES (48)..(48): Selenocysteine
  MOD_RES (68)..(68): Selenocysteine
  MOD_RES (76)..(76): Selenocysteine
  MOD_RES (113)..(114): Selenocysteine
  MOD_RES (129)..(129): Selenocysteine
  MOD_RES (152)..(152): Selenocysteine
  MOD_RES (157)..(157): Selenocysteine
  MOD_RES (219)..(219): Selenocysteine
  MOD_RES (233)..(233): Selenocysteine
  MOD_RES (283)..(283): Selenocysteine
  MOD_RES (297)..(297): Selenocysteine
  MOD_RES (326)..(326): Selenocysteine
  MOD_RES (332)..(332): Selenocysteine
  MOD_RES (353)..(353): Selenocysteine
  MOD_RES (378)..(378): Selenocysteine
  MOD_RES (385)..(385): Selenocysteine
  MOD_RES (404)..(404): Selenocysteine
  MOD_RES (449)..(449): Selenocysteine
  MOD_RES (544)..(544): Selenocysteine
  MOD_RES (566)..(566): Selenocysteine
  MOD_RES (570)..(570): Selenocysteine
MEAXRLRQKAEELVKDNELLPPPSPSLGSFDPLAELXGKDSNVXASPXAPACPSDKPAPVQKPPSSGXSSEFEVVXPEEQNSPESSSHANAMALGPLPREDGNLMLHLQRLEXXLSVCAEEPDHGQLFXHLGRMALEFNRLASKVHKNEQRXSILQXLCEQLRKENEALKAKLDKGLEQRDQAAERLREENLELKKLLMSNGNKEGASGRPGSPKMEGXGKKAVAGQQQASVXAGKVPEVVALGAAEKKVKMLEQQRSELLEVNKQWDQHFRSMKQQYEQKIXELRQKLADLQKQVXDLEAEREQKQRDFDRKLLLAKSKIEMEEXDKEQLXAEAKELRQKVKYLQDQLSPLXRQREYQEKEIQRLNKALEEALSIQXPPSSPPXAFGSPEGAGALLRKQELVXQNELLKQQVKIFEEDFQRERSDRERMNEEKEELKKQVEKLQAQVXLSNAQLKAFKDEEKAREALRQQKRKAKASGERYHVEPHPEHLCGAYPYAYPPMPAMVPHHGFEDWSQIRYPPPPMAMEHPPPLPNSRLFHLPEYXWRLPCGGVRNPNQSSQVMDPPXARPXEPESPKNDREGPQ

SEQ ID NO: 28114 - protein, 133 aa, Homo sapiens
  MOD_RES (57)..(57): Selenocysteine
  MOD_RES (90)..(90): Selenocysteine
  MOD_RES (97)..(97): Selenocysteine
  MOD_RES (101)..(101): Selenocysteine
  MOD_RES (121)..(121): Selenocysteine
  MOD_RES (129)..(129): Selenocysteine
MEGRGPYRIYDPGGSVPSGEASAAFERLVKENSRLKEKMQGIKMLGELLEESQMEAXRLRQKAEELVKDNELLPPPSPSLGSFDPLAELXGKDSNVXASPXAPACPSDKPAPVQKPPSSGXSSEFEVVXPEEQ

SEQ ID NO: 28115 - protein, 144 aa, Homo sapiens
  MOD_RES (57)..(57): Selenocysteine
  MOD_RES (90)..(90): Selenocysteine
  MOD_RES (97)..(97): Selenocysteine
  MOD_RES (101)..(101): Selenocysteine
  MOD_RES (121)..(121): Selenocysteine
  MOD_RES (129)..(129): Selenocysteine
MEGRGPYRIYDPGGSVPSGEASAAFERLVKENSRLKEKMQGIKMLGELLEESQMEAXRLRQKAEELVKDNELLPPPSPSLGSFDPLAELXGKDSNVXASPXAPACPSDKPAPVQKPPSSGXSSEFEVVXPEEQNSPESSSHANA

SEQ ID NO: 28116 - protein, 556 aa, Homo sapiens
  MOD_RES (57)..(57): Selenocysteine
  MOD_RES (90)..(90): Selenocysteine
  MOD_RES (97)..(97): Selenocysteine
  MOD_RES (101)..(101): Selenocysteine
  MOD_RES (121)..(121): Selenocysteine
  MOD_RES (129)..(129): Selenocysteine
  MOD_RES (166)..(167): Selenocysteine
  MOD_RES (182)..(182): Selenocysteine
  MOD_RES (205)..(205): Selenocysteine
  MOD_RES (210)..(210): Selenocysteine
  MOD_RES (272)..(272): Selenocysteine
  MOD_RES (286)..(286): Selenocysteine
  MOD_RES (336)..(336): Selenocysteine
  MOD_RES (350)..(350): Selenocysteine
  MOD_RES (379)..(379): Selenocysteine
  MOD_RES (385)..(385): Selenocysteine
  MOD_RES (406)..(406): Selenocysteine
  MOD_RES (431)..(431): Selenocysteine
  MOD_RES (438)..(438): Selenocysteine
  MOD_RES (457)..(457): Selenocysteine
  MOD_RES (502)..(502): Selenocysteine
  MOD_RES (535)..(535): Selenocysteine
  MOD_RES (542)..(542): Selenocysteine
MEGRGPYRIYDPGGSVPSGEASAAFERLVKENSRLKEKMQGIKMLGELLEESQMEAXRLRQKAEELVKDNELLPPPSPSLGSFDPLAELXGKDSNVXASPXAPACPSDKPAPVQKPPSSGXSSEFEVVXPEEQNSPESSSHANAMALGPLPREDGNLMLHLQRLEXXLSVCAEEPDHGQLFXHLGRMALEFNRLASKVHKNEQRXSILQXLCEQLRKENEALKAKLDKGLEQRDQAAERLREENLELKKLLMSNGNKEGASGRPGSPKMEGXGKKAVAGQQQASVXAGKVPEVVALGAAEKKVKMLEQQRSELLEVNKQWDQHFRSMKQQYEQKIXELRQKLADLQKQVXDLEAEREQKQRDFDRKLLLAKSKIEMEEXDKEQLXAEAKELRQKVKYLQDQLSPLXRQREYQEKEIQRLNKALEEALSIQXPPSSPPXAFGSPEGAGALLRKQELVXQNELLKQQVKIFEEDFQRERSDRERMNEEKEELKKQVEKLQAQVXLSNAQLKAFKDEEKAREALRQQKRKAKSLQKMXVRGLSEXRLCHLAPPSSCRAS

SEQ ID NO: 28117 - protein, 572 aa, Homo sapiens
  MOD_RES (57)..(57): Selenocysteine
  MOD_RES (90)..(90): Selenocysteine
  MOD_RES (97)..(97): Selenocysteine
  MOD_RES (101)..(101): Selenocysteine
  MOD_RES (121)..(121): Selenocysteine
  MOD_RES (129)..(129): Selenocysteine
  MOD_RES (166)..(167): Selenocysteine
  MOD_RES (182)..(182): Selenocysteine
  MOD_RES (205)..(205): Selenocysteine
  MOD_RES (210)..(210): Selenocysteine
  MOD_RES (272)..(272): Selenocysteine
  MOD_RES (286)..(286): Selenocysteine
  MOD_RES (336)..(336): Selenocysteine
  MOD_RES (350)..(350): Selenocysteine
  MOD_RES (379)..(379): Selenocysteine
  MOD_RES (385)..(385): Selenocysteine
  MOD_RES (406)..(406): Selenocysteine
  MOD_RES (431)..(431): Selenocysteine
  MOD_RES (438)..(438): Selenocysteine
  MOD_RES (457)..(457): Selenocysteine
  MOD_RES (502)..(502): Selenocysteine
  MOD_RES (533)..(533): Selenocysteine
  MOD_RES (555)..(555): Selenocysteine
  MOD_RES (559)..(559): Selenocysteine
MEGRGPYRIYDPGGSVPSGEASAAFERLVKENSRLKEKMQGIKMLGELLEESQMEAXRLRQKAEELVKDNELLPPPSPSLGSFDPLAELXGKDSNVXASPXAPACPSDKPAPVQKPPSSGXSSEFEVVXPEEQNSPESSSHANAMALGPLPREDGNLMLHLQRLEXXLSVCAEEPDHGQLFXHLGRMALEFNRLASKVHKNEQRXSILQXLCEQLRKENEALKAKLDKGLEQRDQAAERLREENLELKKLLMSNGNKEGASGRPGSPKMEGXGKKAVAGQQQASVXAGKVPEVVALGAAEKKVKMLEQQRSELLEVNKQWDQHFRSMKQQYEQKIXELRQKLADLQKQVXDLEAEREQKQRDFDRKLLLAKSKIEMEEXDKEQLXAEAKELRQKVKYLQDQLSPLXRQREYQEKEIQRLNKALEEALSIQXPPSSPPXAFGSPEGAGALLRKQELVXQNELLKQQVKIFEEDFQRERSDRERMNEEKEELKKQVEKLQAQVXLSNAQLKAFKDEEKAREALRQQKRKAKPEYXWRLPCGGVRNPNQSSQVMDPPXARPXEPESPKNDREGPQ

SEQ ID NO: 28118 - protein, 619 aa, Homo sapiens
  MOD_RES (57)..(57): Selenocysteine
  MOD_RES (90)..(90): Selenocysteine
  MOD_RES (97)..(97): Selenocysteine
  MOD_RES (101)..(101): Selenocysteine
  MOD_RES (121)..(121): Selenocysteine
  MOD_RES (129)..(129): Selenocysteine
  MOD_RES (166)..(167): Selenocysteine
  MOD_RES (182)..(182): Selenocysteine
  MOD_RES (205)..(205): Selenocysteine
  MOD_RES (210)..(210): Selenocysteine
  MOD_RES (272)..(272): Selenocysteine
  MOD_RES (286)..(286): Selenocysteine
  MOD_RES (336)..(336): Selenocysteine
  MOD_RES (350)..(350): Selenocysteine
  MOD_RES (379)..(379): Selenocysteine
  MOD_RES (385)..(385): Selenocysteine
  MOD_RES (406)..(406): Selenocysteine
  MOD_RES (431)..(431): Selenocysteine
  MOD_RES (438)..(438): Selenocysteine
  MOD_RES (457)..(457): Selenocysteine
  MOD_RES (502)..(502): Selenocysteine
  MOD_RES (602)..(602): Selenocysteine
MEGRGPYRIYDPGGSVPSGEASAAFERLVKENSRLKEKMQGIKMLGELLEESQMEAXRLRQKAEELVKDNELLPPPSPSLGSFDPLAELXGKDSNVXASPXAPACPSDKPAPVQKPPSSGXSSEFEVVXPEEQNSPESSSHANAMALGPLPREDGNLMLHLQRLEXXLSVCAEEPDHGQLFXHLGRMALEFNRLASKVHKNEQRXSILQXLCEQLRKENEALKAKLDKGLEQRDQAAERLREENLELKKLLMSNGNKEGASGRPGSPKMEGXGKKAVAGQQQASVXAGKVPEVVALGAAEKKVKMLEQQRSELLEVNKQWDQHFRSMKQQYEQKIXELRQKLADLQKQVXDLEAEREQKQRDFDRKLLLAKSKIEMEEXDKEQLXAEAKELRQKVKYLQDQLSPLXRQREYQEKEIQRLNKALEEALSIQXPPSSPPXAFGSPEGAGALLRKQELVXQNELLKQQVKIFEEDFQRERSDRERMNEEKEELKKQVEKLQAQVXLSNAQLKAFKDEEKAREALRQQKRKAKASGERYHVEPHPEHLCGAYPYAYPPMPAMVPHHGFEDWSQIRYPPPPMAMEHPPPLPNSRLFHLHQFCRSRNXPGVYPVEGFEIQIRAPK

SEQ ID NO: 28119 - protein, 635 aa, Homo sapiens
  MOD_RES (57)..(57): Selenocysteine
  MOD_RES (90)..(90): Selenocysteine
  MOD_RES (97)..(97): Selenocysteine
  MOD_RES (101)..(101): Selenocysteine
  MOD_RES (121)..(121): Selenocysteine
  MOD_RES (129)..(129): Selenocysteine
  MOD_RES (166)..(167): Selenocysteine
  MOD_RES (182)..(182): Selenocysteine
  MOD_RES (205)..(205): Selenocysteine
  MOD_RES (210)..(210): Selenocysteine
  MOD_RES (272)..(272): Selenocysteine
  MOD_RES (286)..(286): Selenocysteine
  MOD_RES (336)..(336): Selenocysteine
  MOD_RES (350)..(350): Selenocysteine
  MOD_RES (379)..(379): Selenocysteine
  MOD_RES (385)..(385): Selenocysteine
  MOD_RES (406)..(406): Selenocysteine
  MOD_RES (431)..(431): Selenocysteine
  MOD_RES (438)..(438): Selenocysteine
  MOD_RES (457)..(457): Selenocysteine
  MOD_RES (502)..(502): Selenocysteine
  MOD_RES (597)..(597): Selenocysteine
  MOD_RES (619)..(619): Selenocysteine
  MOD_RES (623)..(623): Selenocysteine
MEGRGPYRIYDPGGSVPSGEASAAFERLVKENSRLKEKMQGIKMLGELLEESQMEAXRLRQKAEELVKDNELLPPPSPSLGSFDPLAELXGKDSNVXASPXAPACPSDKPAPVQKPPSSGXSSEFEVVXPEEQNSPESSSHANAMALGPLPREDGNLMLHLQRLEXXLSVCAEEPDHGQLFXHLGRMALEFNRLASKVHKNEQRXSILQXLCEQLRKENEALKAKLDKGLEQRDQAAERLREENLELKKLLMSNGNKEGASGRPGSPKMEGXGKKAVAGQQQASVXAGKVPEVVALGAAEKKVKMLEQQRSELLEVNKQWDQHFRSMKQQYEQKIXELRQKLADLQKQVXDLEAEREQKQRDFDRKLLLAKSKIEMEEXDKEQLXAEAKELRQKVKYLQDQLSPLXRQREYQEKEIQRLNKALEEALSIQXPPSSPPXAFGSPEGAGALLRKQELVXQNELLKQQVKIFEEDFQRERSDRERMNEEKEELKKQVEKLQAQVXLSNAQLKAFKDEEKAREALRQQKRKAKASGERYHVEPHPEHLCGAYPYAYPPMPAMVPHHGFEDWSQIRYPPPPMAMEHPPPLPNSRLFHLPEYXWRLPCGGVRNPNQSSQVMDPPXARPXEPEPADLRLPRN

SEQ ID NO: 28120 - protein, 636 aa, Homo sapiens
  MOD_RES (57)..(57): Selenocysteine
  MOD_RES (90)..(90): Selenocysteine
  MOD_RES (97)..(97): Selenocysteine
  MOD_RES (101)..(101): Selenocysteine
  MOD_RES (121)..(121): Selenocysteine
  MOD_RES (129)..(129): Selenocysteine
  MOD_RES (166)..(167): Selenocysteine
  MOD_RES (182)..(182): Selenocysteine
  MOD_RES (205)..(205): Selenocysteine
  MOD_RES (210)..(210): Selenocysteine
  MOD_RES (272)..(272): Selenocysteine
  MOD_RES (286)..(286): Selenocysteine
  MOD_RES (336)..(336): Selenocysteine
  MOD_RES (350)..(350): Selenocysteine
  MOD_RES (379)..(379): Selenocysteine
  MOD_RES (385)..(385): Selenocysteine
  MOD_RES (406)..(406): Selenocysteine
  MOD_RES (431)..(431): Selenocysteine
  MOD_RES (438)..(438): Selenocysteine
  MOD_RES (457)..(457): Selenocysteine
  MOD_RES (502)..(502): Selenocysteine
  MOD_RES (597)..(597): Selenocysteine
  MOD_RES (619)..(619): Selenocysteine
  MOD_RES (623)..(623): Selenocysteine
MEGRGPYRIYDPGGSVPSGEASAAFERLVKENSRLKEKMQGIKMLGELLEESQMEAXRLRQKAEELVKDNELLPPPSPSLGSFDPLAELXGKDSNVXASPXAPACPSDKPAPVQKPPSSGXSSEFEVVXPEEQNSPESSSHANAMALGPLPREDGNLMLHLQRLEXXLSVCAEEPDHGQLFXHLGRMALEFNRLASKVHKNEQRXSILQXLCEQLRKENEALKAKLDKGLEQRDQAAERLREENLELKKLLMSNGNKEGASGRPGSPKMEGXGKKAVAGQQQASVXAGKVPEVVALGAAEKKVKMLEQQRSELLEVNKQWDQHFRSMKQQYEQKIXELRQKLADLQKQVXDLEAEREQKQRDFDRKLLLAKSKIEMEEXDKEQLXAEAKELRQKVKYLQDQLSPLXRQREYQEKEIQRLNKALEEALSIQXPPSSPPXAFGSPEGAGALLRKQELVXQNELLKQQVKIFEEDFQRERSDRERMNEEKEELKKQVEKLQAQVXLSNAQLKAFKDEEKAREALRQQKRKAKASGERYHVEPHPEHLCGAYPYAYPPMPAMVPHHGFEDWSQIRYPPPPMAMEHPPPLPNSRLFHLPEYXWRLPCGGVRNPNQSSQVMDPPXARPXEPESPKNDREGPQ

SEQ ID NO: 28121 - protein, 322 aa, Homo sapiens
  MOD_RES (44)..(44): Selenocysteine
  MOD_RES (50)..(50): Selenocysteine
  MOD_RES (52)..(52): Selenocysteine
  MOD_RES (54)..(54): Selenocysteine
  MOD_RES (86)..(86): Selenocysteine
  MOD_RES (90)..(90): Selenocysteine
  MOD_RES (111)..(111): Selenocysteine
  MOD_RES (180)..(180): Selenocysteine
  MOD_RES (251)..(251): Selenocysteine
  MOD_RES (272)..(272): Selenocysteine
MQQLLSQPQHEREKEVVLLRRSMAEGERARAASDVLCRSLANEXHQLRRXLXAXAHMCQHLAKCLDERQHAQRNVGERSPDQSEHXDGHXSVQSVIEKLQEENRLLKQKVXHVEDLNAKWQRYNASRDEYVRGLHAQLRGLQIPHEPELMRKEISRLNRQLEEKINDCAEVKQELAASRXARDAALERVQMLEQQILAYKDDFMSERADRERAQSRIQELEEKVASLLHQVSWRQDSREPDAGRIHAGSKXAKYLAADALELMVPGGWRPGXGSQQPEPPAEGGHPGAAQRGQGDLQCPHCLQCFSDEQGEELLRHVAECCQ

SEQ ID NO: 28122 - protein, 346 aa, Homo sapiens
  MOD_RES (22)..(22): Selenocysteine
  MOD_RES (98)..(98): Selenocysteine
  MOD_RES (151)..(151): Selenocysteine
  MOD_RES (157)..(157): Selenocysteine
  MOD_RES (159)..(159): Selenocysteine
  MOD_RES (161)..(161): Selenocysteine
  MOD_RES (193)..(193): Selenocysteine
  MOD_RES (197)..(197): Selenocysteine
  MOD_RES (218)..(218): Selenocysteine
  MOD_RES (275)..(275): Selenocysteine
  MOD_RES (296)..(296): Selenocysteine
MSRDPGSGGWEEAPRAAAALCXLYHEAGQRLRRLQDQLAARDALIARLRARLAALEGDAAPSLVDALLEQVARFREQLRRQEGGAAEAQMRQEIERLXERLEEKEREMQQLLSQPQHEREKEVVLLRRSMAEGERARAASDVLCRSLANEXHQLRRXLXAXAHMCQHLAKCLDERQHAQRNVGERSPDQSEHXDGHXSVQSVIEKLQEENRLLKQKVXHILAYKDDFMSERADRERAQSRIQELEEKVASLLHQVSWRQDSREPDAGRIHAGSKXAKYLAADALELMVPGGWRPGXGSQQPEPPAEGGHPGAAQRGQGDLQCPHCLQCFSDEQGEELLRHVAECCQ

SEQ ID NO: 28123 - protein, 429 aa, Homo sapiens
  MOD_RES (22)..(22): Selenocysteine
  MOD_RES (98)..(98): Selenocysteine
  MOD_RES (151)..(151): Selenocysteine
  MOD_RES (157)..(157): Selenocysteine
  MOD_RES (159)..(159): Selenocysteine
  MOD_RES (161)..(161): Selenocysteine
  MOD_RES (193)..(193): Selenocysteine
  MOD_RES (197)..(197): Selenocysteine
  MOD_RES (218)..(218): Selenocysteine
  MOD_RES (287)..(287): Selenocysteine
  MOD_RES (358)..(358): Selenocysteine
  MOD_RES (379)..(379): Selenocysteine
MSRDPGSGGWEEAPRAAAALCXLYHEAGQRLRRLQDQLAARDALIARLRARLAALEGDAAPSLVDALLEQVARFREQLRRQEGGAAEAQMRQEIERLXERLEEKEREMQQLLSQPQHEREKEVVLLRRSMAEGERARAASDVLCRSLANEXHQLRRXLXAXAHMCQHLAKCLDERQHAQRNVGERSPDQSEHXDGHXSVQSVIEKLQEENRLLKQKVXHVEDLNAKWQRYNASRDEYVRGLHAQLRGLQIPHEPELMRKEISRLNRQLEEKINDCAEVKQELAASRXARDAALERVQMLEQQILAYKDDFMSERADRERAQSRIQELEEKVASLLHQVSWRQDSREPDAGRIHAGSKXAKYLAADALELMVPGGWRPGXGSQQPEPPAEGGHPGAAQRGQGDLQCPHCLQCFSDEQGEELLRHVAECCQ

SEQ ID NO: 28124 - protein, 86 aa, Homo sapiens
  MOD_RES (16)..(16): Selenocysteine
  MOD_RES (55)..(55): Selenocysteine
  MOD_RES (79)..(79): Selenocysteine
  MOD_RES (86)..(86): Selenocysteine
CNCGLVFHLQDPWVPXGPGAVQKQREHPPDYQWYALDQLPPDVQHKANESAILSXACFYGLVRPPRSGLYKLSYNQNPXSILIKYX

SEQ ID NO: 28125 - protein, 325 aa, Homo sapiens
  MOD_RES (8)..(8): Selenocysteine
  MOD_RES (18)..(18): Selenocysteine
  MOD_RES (28)..(28): Selenocysteine
  MOD_RES (77)..(77): Selenocysteine
  MOD_RES (88)..(88): Selenocysteine
  MOD_RES (113)..(113): Selenocysteine
  MOD_RES (146)..(146): Selenocysteine
  MOD_RES (195)..(195): Selenocysteine
  MOD_RES (234)..(234): Selenocysteine
  MOD_RES (283)..(283): Selenocysteine
MAHFVQGXSRMIAAESSXEHKECAEPSXRKNLMNSLEQKIRCLEKQRKELLEVNQQWDQQFRSMKELYERKVAELKXKLDAAERFLSXREKDPHQRQRKDDRQREDDRQRDLXRDRLQREEKEKERLNEELHELKEENKLLKGKNXLANKEKEHYECEIKRLNKALQDALNIKCSFSEDCLRKSRVEFCHEEMRXEMEVLKQQVQIYEEDFKKERSDRERLNQEKEELQQINEXSQSQLNRLNSQIKACQMEKEKLEKQLKQMYCPPCNCGLVFHLQDPWVPXGPGAVQKQREHPPDYQWYALDQLPPDVQHKANGLSSVKKVHP

SEQ ID NO: 28126 - protein, 376 aa, Homo sapiens
  MOD_RES (22)..(22): Selenocysteine
  MOD_RES (56)..(56): Selenocysteine
  MOD_RES (62)..(62): Selenocysteine
  MOD_RES (71)..(71): Selenocysteine
  MOD_RES (75)..(75): Selenocysteine
  MOD_RES (85)..(85): Selenocysteine
  MOD_RES (95)..(95): Selenocysteine
  MOD_RES (105)..(105): Selenocysteine
  MOD_RES (154)..(154): Selenocysteine
  MOD_RES (165)..(165): Selenocysteine
  MOD_RES (190)..(190): Selenocysteine
  MOD_RES (223)..(223): Selenocysteine
  MOD_RES (272)..(272): Selenocysteine
  MOD_RES (311)..(311): Selenocysteine
  MOD_RES (360)..(360): Selenocysteine
MIPCGWLMNKNEKHDDKLVMFXNQSEDSERCESMELDKKIQDLIERNASPHPKRFXPEAMPXHRNLCSLKXPGKXASMAHFVQGXSRMIAAESSXEHKECAEPSXRKNLMNSLEQKIRCLEKQRKELLEVNQQWDQQFRSMKELYERKVAELKXKLDAAERFLSXREKDPHQRQRKDDRQREDDRQRDLXRDRLQREEKEKERLNEELHELKEENKLLKGKNXLANKEKEHYECEIKRLNKALQDALNIKCSFSEDCLRKSRVEFCHEEMRXEMEVLKQQVQIYEEDFKKERSDRERLNQEKEELQQINEXSQSQLNRLNSQIKACQMEKEKLEKQLKQMYCPPCNCGLVFHLQDPWVPXGPGAVQKQREHPVYPQ

SEQ ID NO: 28127 - protein, 369 aa, Homo sapiens
  MOD_RES (15)..(15): Selenocysteine
  MOD_RES (49)..(49): Selenocysteine
  MOD_RES (55)..(55): Selenocysteine
  MOD_RES (64)..(64): Selenocysteine
  MOD_RES (68)..(68): Selenocysteine
  MOD_RES (78)..(78): Selenocysteine
  MOD_RES (88)..(88): Selenocysteine
  MOD_RES (98)..(98): Selenocysteine
  MOD_RES (147)..(147): Selenocysteine
  MOD_RES (158)..(158): Selenocysteine
  MOD_RES (183)..(183): Selenocysteine
  MOD_RES (216)..(216): Selenocysteine
  MOD_RES (265)..(265): Selenocysteine
  MOD_RES (304)..(304): Selenocysteine
  MOD_RES (353)..(353): Selenocysteine
MNKNEKHDDKLVMFXNQSEDSERCESMELDKKIQDLIERNASPHPKRFXPEAMPXHRNLCSLKXPGKXASMAHFVQGXSRMIAAESSXEHKECAEPSXRKNLMNSLEQKIRCLEKQRKELLEVNQQWDQQFRSMKELYERKVAELKXKLDAAERFLSXREKDPHQRQRKDDRQREDDRQRDLXRDRLQREEKEKERLNEELHELKEENKLLKGKNXLANKEKEHYECEIKRLNKALQDALNIKCSFSEDCLRKSRVEFCHEEMRXEMEVLKQQVQIYEEDFKKERSDRERLNQEKEELQQINEXSQSQLNRLNSQIKACQMEKEKLEKQLKQMYCPPCNCGLVFHLQDPWVPXGPGAVQKQREHPVYPQ

SEQ ID NO: 28128 - protein, 77 aa, Homo sapiens
  MOD_RES (33)..(33): Selenocysteine
  MOD_RES (66)..(66): Selenocysteine
  MOD_RES (74)..(74): Selenocysteine
MLPEAGSLWLLKLLRDIQLAQFYWPILEELNVXRPEHFDFVKPEDLDGIGMGRPALILASHSPAQXVRSSEKAXFWA

SEQ ID NO: 28129 - protein, 661 aa, Homo sapiens
  MOD_RES (33)..(33): Selenocysteine
  MOD_RES (91)..(91): Selenocysteine
  MOD_RES (136)..(136): Selenocysteine
  MOD_RES (160)..(160): Selenocysteine
  MOD_RES (209)..(209): Selenocysteine
  MOD_RES (214)..(214): Selenocysteine
  MOD_RES (248)..(248): Selenocysteine
  MOD_RES (258)..(258): Selenocysteine
  MOD_RES (312)..(312): Selenocysteine
  MOD_RES (392)..(392): Selenocysteine
  MOD_RES (401)..(401): Selenocysteine
  MOD_RES (406)..(406): Selenocysteine
  MOD_RES (415)..(415): Selenocysteine
  MOD_RES (424)..(424): Selenocysteine
  MOD_RES (436)..(436): Selenocysteine
  MOD_RES (446)..(446): Selenocysteine
  MOD_RES (453)..(453): Selenocysteine
  MOD_RES (509)..(509): Selenocysteine
  MOD_RES (601)..(601): Selenocysteine
  MOD_RES (607)..(607): Selenocysteine
  MOD_RES (612)..(612): Selenocysteine
MLPEAGSLWLLKLLRDIQLAQFYWPILEELNVXRPEHFDFVKPEDLDGIGMGRPAQRRLSEALKRLRSGPKSKNWVYKILGGFAPEHKEPXLPSDSPRHLPEPEGGLKCLIPEGAVCRGELLGSGCFGVVHRGLWXLPSGKSVPVAVKSLRVGPEGPMGXELGDFLREVSVMMNLEHPHVLRLHGLVLGQPLQMVMELAPLGSLHARLXAPAPXPPLLVALLCLFLRQLAGAMAYLGARGLVHRDLAXRNLLLASPRXIKVADFGLVRPLGGARGRYVMGGPRPIPYAWCAPESLRHGAFSSASDVWMFGVXLWEMFSGGEEPWAGVPPYLILQRLEDRARLPRPPLCSRALYSLALRCWAPHPADRPSFSHLEGLLQEAGPSEACCVRDVXEPGALRMEXGDPIXVIEGSPDSXIWKGQNGRXFKVGSFPASAVXLADAGGLPAXRPVHRGXPARGDQHPGSIDGDRKKANLWDAPPARGQRRNMPLERMKGISRSLESVLSLGPRPXGGGSSPPEIRQARAVPQGPPGLPPRPPLSSSSPQPSQPSRERLPWPKRKPPHNHPMGMPGARKAAALSGGLLSDPELQRKIMEVELSVHGVXHQECQXALGAXGGDVVSAIRNLKVDQLFHLSSRSRADCWRILEHYQWDLSAASRYVLARP

SEQ ID NO: 28130 - protein, 666 aa, Homo sapiens
  MOD_RES (33)..(33): Selenocysteine
  MOD_RES (91)..(91): Selenocysteine
  MOD_RES (136)..(136): Selenocysteine
  MOD_RES (160)..(160): Selenocysteine
  MOD_RES (209)..(209): Selenocysteine
  MOD_RES (214)..(214): Selenocysteine
  MOD_RES (248)..(248): Selenocysteine
  MOD_RES (258)..(258): Selenocysteine
  MOD_RES (312)..(312): Selenocysteine
  MOD_RES (392)..(392): Selenocysteine
  MOD_RES (401)..(401): Selenocysteine
  MOD_RES (406)..(406): Selenocysteine
  MOD_RES (420)..(420): Selenocysteine
  MOD_RES (429)..(429): Selenocysteine
  MOD_RES (441)..(441): Selenocysteine
  MOD_RES (451)..(451): Selenocysteine
  MOD_RES (458)..(458): Selenocysteine
  MOD_RES (514)..(514): Selenocysteine
  MOD_RES (606)..(606): Selenocysteine
  MOD_RES (612)..(612): Selenocysteine
  MOD_RES (617)..(617): Selenocysteine
MLPEAGSLWLLKLLRDIQLAQFYWPILEELNVXRPEHFDFVKPEDLDGIGMGRPAQRRLSEALKRLRSGPKSKNWVYKILGGFAPEHKEPXLPSDSPRHLPEPEGGLKCLIPEGAVCRGELLGSGCFGVVHRGLWXLPSGKSVPVAVKSLRVGPEGPMGXELGDFLREVSVMMNLEHPHVLRLHGLVLGQPLQMVMELAPLGSLHARLXAPAPXPPLLVALLCLFLRQLAGAMAYLGARGLVHRDLAXRNLLLASPRXIKVADFGLVRPLGGARGRYVMGGPRPIPYAWCAPESLRHGAFSSASDVWMFGVXLWEMFSGGEEPWAGVPPYLILQRLEDRARLPRPPLCSRALYSLALRCWAPHPADRPSFSHLEGLLQEAGPSEACCVRDVXEPGALRMEXGDPIXVIEGSSSFHSPDSXIWKGQNGRXFKVGSFPASAVXLADAGGLPAXRPVHRGXPARGDQHPGSIDGDRKKANLWDAPPARGQRRNMPLERMKGISRSLESVLSLGPRPXGGGSSPPEIRQARAVPQGPPGLPPRPPLSSSSPQPSQPSRERLPWPKRKPPHNHPMGMPGARKAAALSGGLLSDPELQRKIMEVELSVHGVXHQECQXALGAXGGDVVSAIRNLKVDQLFHLSSRSRADCWRILEHYQWDLSAASRYVLARP

SEQ ID NO: 28131 - protein, 84 aa, Homo sapiens
  MOD_RES (1)..(1): Selenocysteine
  MOD_RES (21)..(21): Selenocysteine
XPRKHRWRQKEGKSLGCAPSXGPEEEHAPGEDESSPQPSQPSRERLPWPKRKPPHNHPMGMPGARKAAALSGGLLSDPELQRKI

SEQ ID NO: 28132 - protein, 607 aa, Homo sapiens
  MOD_RES (17)..(17): Selenocysteine
  MOD_RES (55)..(55): Selenocysteine
  MOD_RES (80)..(80): Selenocysteine
  MOD_RES (84)..(84): Selenocysteine
  MOD_RES (125)..(125): Selenocysteine
  MOD_RES (136)..(136): Selenocysteine
  MOD_RES (170)..(170): Selenocysteine
  MOD_RES (176)..(176): Selenocysteine
  MOD_RES (186)..(186): Selenocysteine
  MOD_RES (220)..(220): Selenocysteine
  MOD_RES (235)..(235): Selenocysteine
  MOD_RES (270)..(270): Selenocysteine
  MOD_RES (317)..(317): Selenocysteine
  MOD_RES (333)..(333): Selenocysteine
  MOD_RES (358)..(358): Selenocysteine
  MOD_RES (381)..(381): Selenocysteine
  MOD_RES (384)..(385): Selenocysteine
  MOD_RES (396)..(396): Selenocysteine
  MOD_RES (424)..(424): Selenocysteine
  MOD_RES (453)..(453): Selenocysteine
  MOD_RES (466)..(466): Selenocysteine
  MOD_RES (473)..(473): Selenocysteine
  MOD_RES (475)..(475): Selenocysteine
  MOD_RES (492)..(492): Selenocysteine
  MOD_RES (507)..(507): Selenocysteine
  MOD_RES (540)..(541): Selenocysteine
LSAQDISQPLQNSFIHXGHGDSDPRHCWGFPDRIDELYLGNPMDPPDLLSVELSXSRPPQHLGGVKREPPPRPPQPAFFXQKPXYDPVSEDQDPLSSDFKRLGLRKPGLPRGLWLAKPSARVPGXKASRGSGAEVXLIDFGEEPVVPALRPCAPSLAQLAMDACSLLDEXPPQSPXRALPRPLHPXPVVDWDARPLPPPPAYDDVAQDEDDFEICSINSXLVGAGVPAGPSQGQXNYAFVPEQARPPPPLEDNLFLPPQGGGKPPSSAQXAEIFQALQQECMRQLQAPAGSPAPSPSPGGDDKPQVPPRVPIPPRPXRPHVQLSPAPPGEEEXSQWPGPASPPRVPPREPLSPQGSRXPSPLVPPGSSPLPPRLSSSPGKXMPXXQSFASDPKYAXPQVIQAPGPRAGPCILPIVRDGKKVSSXHYYLLPERPSYLERYQRFLREAQSPEEPXPLPVPLLLPPPSXPAPAAPXAXVRPMPQAALDPKANFSXNNSNPGARPPPPRAXARLPQRGCPGDGPEAGRPADKIQMLQAMVHGVXXEECQAALQCHGWSVQRAAQYLKVEQLFGLGLRPRGECHKVLEMFDWNLEQAGCHLLGSWGPAHHKR

SEQ ID NO: 28133 - protein, 1086 aa, Homo sapiens
  MOD_RES (9)..(9): Selenocysteine
  MOD_RES (31)..(31): Selenocysteine
  MOD_RES (70)..(70): Selenocysteine
  MOD_RES (96)..(96): Selenocysteine
  MOD_RES (160)..(160): Selenocysteine
  MOD_RES (164)..(164): Selenocysteine
  MOD_RES (181)..(181): Selenocysteine
  MOD_RES (215)..(215): Selenocysteine
  MOD_RES (261)..(261): Selenocysteine
  MOD_RES (268)..(268): Selenocysteine
  MOD_RES (291)..(291): Selenocysteine
  MOD_RES (325)..(325): Selenocysteine
  MOD_RES (367)..(367): Selenocysteine
  MOD_RES (369)..(369): Selenocysteine
  MOD_RES (376)..(376): Selenocysteine
  MOD_RES (382)..(382): Selenocysteine
  MOD_RES (388)..(388): Selenocysteine
  MOD_RES (440)..(440): Selenocysteine
  MOD_RES (454)..(454): Selenocysteine
  MOD_RES (477)..(477): Selenocysteine
  MOD_RES (493)..(493): Selenocysteine
  MOD_RES (495)..(495): Selenocysteine
  MOD_RES (507)..(507): Selenocysteine
  MOD_RES (528)..(528): Selenocysteine
  MOD_RES (566)..(566): Selenocysteine
  MOD_RES (591)..(591): Selenocysteine
  MOD_RES (595)..(595): Selenocysteine
  MOD_RES (636)..(636): Selenocysteine
  MOD_RES (647)..(647): Selenocysteine
  MOD_RES (681)..(681): Selenocysteine
  MOD_RES (687)..(687): Selenocysteine
  MOD_RES (697)..(697): Selenocysteine
  MOD_RES (731)..(731): Selenocysteine
  MOD_RES (746)..(746): Selenocysteine
  MOD_RES (781)..(781): Selenocysteine
  MOD_RES (828)..(828): Selenocysteine
  MOD_RES (844)..(844): Selenocysteine
  MOD_RES (869)..(869): Selenocysteine
  MOD_RES (892)..(892): Selenocysteine
  MOD_RES (895)..(896): Selenocysteine
  MOD_RES (907)..(907): Selenocysteine
  MOD_RES (935)..(935): Selenocysteine
  MOD_RES (964)..(964): Selenocysteine
  MOD_RES (977)..(977): Selenocysteine
  MOD_RES (984)..(984): Selenocysteine
  MOD_RES (986)..(986): Selenocysteine
  MOD_RES (1003)..(1003): Selenocysteine
  MOD_RES (1018)..(1018): Selenocysteine
MLEARPPRXQGSDAAGAAAGRGLRALLLSLXAAAGIWGSMGERSAYQRLAGGEEGPQRLGGGRMQPEEGXGWLLELLSEVQLQQYFLRLRDDLNVXRLSHFEYVKNEDLEKIGMGRPGQRRLWEAVKRRKALCKRKSWMSKVFSGKRLEAEFPPHHSQSXFRKXSPAPGGPAGEGPLQSLXCLIGEKDLRLLEKLGDGSFGVVRRGEWDAPSGKXVSVAVKCLKPDVLSQPEAMDDFIREVNAMHSLDHRNLIRLYGVVLXPPMKMVXELAPLGSLLDRLRKHQGHFLLGXLSRYAVQVAEGMGYLESKRFIHRDLAARNLLLAXRDLVKIGDFGLMRALPQNDDHYVMQEHRKVPFAWCAPESLKXRXFSHASDXWMFGVXLWEMFXYGQEPWIGLNGSQILHKIDKEGERLPRPEDCPQDIYNVMVQCWAHKPEDRPXFVALRDFLLEAQPXDMRALQDFEEPDKLHIQMNDVIXVIEGRAENYWWRGQNXRXLCVGPFPRNVVXSVAGLSAQDISQPLQNSFIHXGHGDSDPRHCWGFPDRIDELYLGNPMDPPDLLSVELSXSRPPQHLGGVKREPPPRPPQPAFFXQKPXYDPVSEDQDPLSSDFKRLGLRKPGLPRGLWLAKPSARVPGXKASRGSGAEVXLIDFGEEPVVPALRPCAPSLAQLAMDACSLLDEXPPQSPXRALPRPLHPXPVVDWDARPLPPPPAYDDVAQDEDDFEICSINSXLVGAGVPAGPSQGQXNYAFVPEQARPPPPLEDNLFLPPQGGGKPPSSAQXAEIFQALQQECMRQLQAPAGSPAPSPSPGGDDKPQVPPRVPIPPRPXRPHVQLSPAPPGEEEXSQWPGPASPPRVPPREPLSPQGSRXPSPLVPPGSSPLPPRLSSSPGKXMPXXQSFASDPKYAXPQVIQAPGPRAGPCILPIVRDGKKVSSXHYYLLPERPSYLERYQRFLREAQSPEEPXPLPVPLLLPPPSXPAPAAPXAXVRPMPQAALDPKANFSXNNSNPGARPPPPRAXARLPQRGCPGDGPEAGRPADKIQMVEQLFGLGLRPRGECHKVLEMFDWNLEQAGCHLLGSWGPAHHKR

SEQ ID NO: 28134 - protein, 1040 aa, Homo sapiens
  MOD_RES (26)..(26): Selenocysteine
  MOD_RES (39)..(39): Selenocysteine
  MOD_RES (65)..(65): Selenocysteine
  MOD_RES (129)..(129): Selenocysteine
  MOD_RES (133)..(133): Selenocysteine
  MOD_RES (150)..(150): Selenocysteine
  MOD_RES (184)..(184): Selenocysteine
  MOD_RES (230)..(230): Selenocysteine
  MOD_RES (237)..(237): Selenocysteine
  MOD_RES (260)..(260): Selenocysteine
  MOD_RES (294)..(294): Selenocysteine
  MOD_RES (336)..(336): Selenocysteine
  MOD_RES (338)..(338): Selenocysteine
  MOD_RES (345)..(345): Selenocysteine
  MOD_RES (351)..(351): Selenocysteine
  MOD_RES (357)..(357): Selenocysteine
  MOD_RES (409)..(409): Selenocysteine
  MOD_RES (423)..(423): Selenocysteine
  MOD_RES (446)..(446): Selenocysteine
  MOD_RES (462)..(462): Selenocysteine
  MOD_RES (464)..(464): Selenocysteine
  MOD_RES (476)..(476): Selenocysteine
  MOD_RES (497)..(497): Selenocysteine
  MOD_RES (535)..(535): Selenocysteine
  MOD_RES (549)..(549): Selenocysteine
  MOD_RES (590)..(590): Selenocysteine
  MOD_RES (601)..(601): Selenocysteine
  MOD_RES (635)..(635): Selenocysteine
  MOD_RES (641)..(641): Selenocysteine
  MOD_RES (651)..(651): Selenocysteine
  MOD_RES (685)..(685): Selenocysteine
  MOD_RES (700)..(700): Selenocysteine
  MOD_RES (735)..(735): Selenocysteine
  MOD_RES (782)..(782): Selenocysteine
  MOD_RES (798)..(798): Selenocysteine
  MOD_RES (823)..(823): Selenocysteine
  MOD_RES (846)..(846): Selenocysteine
  MOD_RES (849)..(850): Selenocysteine
  MOD_RES (861)..(861): Selenocysteine
  MOD_RES (889)..(889): Selenocysteine
  MOD_RES (918)..(918): Selenocysteine
  MOD_RES (931)..(931): Selenocysteine
  MOD_RES (938)..(938): Selenocysteine
  MOD_RES (940)..(940): Selenocysteine
  MOD_RES (957)..(957): Selenocysteine
  MOD_RES (972)..(972): Selenocysteine
MPAARRFPGLELSFPLLARLRRRLYXRLGGGRMQPEEGXGWLLELLSEVQLQQYFLRLRDDLNVXRLSHFEYVKNEDLEKIGMGRPGQRRLWEAVKRRKALCKRKSWMSKVFSGKRLEAEFPPHHSQSXFRKXSPAPGGPAGEGPLQSLXCLIGEKDLRLLEKLGDGSFGVVRRGEWDAPSGKXVSVAVKCLKPDVLSQPEAMDDFIREVNAMHSLDHRNLIRLYGVVLXPPMKMVXELAPLGSLLDRLRKHQGHFLLGXLSRYAVQVAEGMGYLESKRFIHRDLAARNLLLAXRDLVKIGDFGLMRALPQNDDHYVMQEHRKVPFAWCAPESLKXRXFSHASDXWMFGVXLWEMFXYGQEPWIGLNGSQILHKIDKEGERLPRPEDCPQDIYNVMVQCWAHKPEDRPXFVALRDFLLEAQPXDMRALQDFEEPDKLHIQMNDVIXVIEGRAENYWWRGQNXRXLCVGPFPRNVVXSVAGLSAQDISQPLQNSFIHXGHGDSDPRHCWGFPDRIDELYLGNPMDPPDLLSVELSXSRPPQHLGGVKKPXYDPVSEDQDPLSSDFKRLGLRKPGLPRGLWLAKPSARVPGXKASRGSGAEVXLIDFGEEPVVPALRPCAPSLAQLAMDACSLLDEXPPQSPXRALPRPLHPXPVVDWDARPLPPPPAYDDVAQDEDDFEICSINSXLVGAGVPAGPSQGQXNYAFVPEQARPPPPLEDNLFLPPQGGGKPPSSAQXAEIFQALQQECMRQLQAPAGSPAPSPSPGGDDKPQVPPRVPIPPRPXRPHVQLSPAPPGEEEXSQWPGPASPPRVPPREPLSPQGSRXPSPLVPPGSSPLPPRLSSSPGKXMPXXQSFASDPKYAXPQVIQAPGPRAGPCILPIVRDGKKVSSXHYYLLPERPSYLERYQRFLREAQSPEEPXPLPVPLLLPPPSXPAPAAPXAXVRPMPQAALDPKANFSXNNSNPGARPPPPRAXARLPQRGCPGDGPEAGRPADKIQMVEQLFGLGLRPRGECHKVLEMFDWNLEQAGCHLLGSWGPAHHKR

SEQ ID NO: 28135 - protein, 86 aa, Homo sapiens
  MOD_RES (7)..(7): Selenocysteine
  MOD_RES (33)..(33): Selenocysteine
  MOD_RES (84)..(84): Selenocysteine
MQPEEGXGWLLELLSEVQLQQYFLRLRDDLNVXRLSHFEYVKNEDLEKIGMGRPGQRRLWEAVKRRKALCKRKSWMSKDEGQPXPW

SEQ ID NO: 28136 - protein, 97 aa, Homo sapiens
  MOD_RES (7)..(7): Selenocysteine
  MOD_RES (33)..(33): Selenocysteine
  MOD_RES (97)..(97): Selenocysteine
MQPEEGXGWLLELLSEVQLQQYFLRLRDDLNVXRLSHFEYVKNEDLEKIGMGRPGQRRLWEAVKRRKALCKRKSWMSKVFSGKRLEAEFPPHHSQSX

SEQ ID NO: 28137 - protein, 528 aa, Homo sapiens
  MOD_RES (7)..(7): Selenocysteine
  MOD_RES (33)..(33): Selenocysteine
  MOD_RES (97)..(97): Selenocysteine
  MOD_RES (101)..(101): Selenocysteine
  MOD_RES (118)..(118): Selenocysteine
  MOD_RES (152)..(152): Selenocysteine
  MOD_RES (198)..(198): Selenocysteine
  MOD_RES (205)..(205): Selenocysteine
  MOD_RES (228)..(228): Selenocysteine
  MOD_RES (262)..(262): Selenocysteine
  MOD_RES (304)..(304): Selenocysteine
  MOD_RES (306)..(306): Selenocysteine
  MOD_RES (313)..(313): Selenocysteine
  MOD_RES (319)..(319): Selenocysteine
  MOD_RES (325)..(325): Selenocysteine
  MOD_RES (377)..(377): Selenocysteine
  MOD_RES (391)..(391): Selenocysteine
  MOD_RES (414)..(414): Selenocysteine
  MOD_RES (430)..(430): Selenocysteine
  MOD_RES (432)..(432): Selenocysteine
  MOD_RES (444)..(444): Selenocysteine
  MOD_RES (465)..(465): Selenocysteine
  MOD_RES (499)..(499): Selenocysteine
  MOD_RES (506)..(506): Selenocysteine
  MOD_RES (525)..(525): Selenocysteine
MQPEEGXGWLLELLSEVQLQQYFLRLRDDLNVXRLSHFEYVKNEDLEKIGMGRPGQRRLWEAVKRRKALCKRKSWMSKVFSGKRLEAEFPPHHSQSXFRKXSPAPGGPAGEGPLQSLXCLIGEKDLRLLEKLGDGSFGVVRRGEWDAPSGKXVSVAVKCLKPDVLSQPEAMDDFIREVNAMHSLDHRNLIRLYGVVLXPPMKMVXELAPLGSLLDRLRKHQGHFLLGXLSRYAVQVAEGMGYLESKRFIHRDLAARNLLLAXRDLVKIGDFGLMRALPQNDDHYVMQEHRKVPFAWCAPESLKXRXFSHASDXWMFGVXLWEMFXYGQEPWIGLNGSQILHKIDKEGERLPRPEDCPQDIYNVMVQCWAHKPEDRPXFVALRDFLLEAQPXDMRALQDFEEPDKLHIQMNDVIXVIEGRAENYWWRGQNXRXLCVGPFPRNVVXSVAGLSAQDISQPLQNSFIHXGHGDSDPRHCWGFPDRIDECPFSAFSPGHPPAEXCGQVLWXGRREACASDPRLHPVSSRXKGL

SEQ ID NO: 28138 - protein, 1038 aa, Homo sapiens
  MOD_RES (7)..(7): Selenocysteine
  MOD_RES (33)..(33): Selenocysteine
  MOD_RES (97)..(97): Selenocysteine
  MOD_RES (101)..(101): Selenocysteine
  MOD_RES (118)..(118): Selenocysteine
  MOD_RES (152)..(152): Selenocysteine
  MOD_RES (198)..(198): Selenocysteine
  MOD_RES (205)..(205): Selenocysteine
  MOD_RES (228)..(228): Selenocysteine
  MOD_RES (262)..(262): Selenocysteine
  MOD_RES (304)..(304): Selenocysteine
  MOD_RES (306)..(306): Selenocysteine
  MOD_RES (313)..(313): Selenocysteine
  MOD_RES (319)..(319): Selenocysteine
  MOD_RES (325)..(325): Selenocysteine
  MOD_RES (377)..(377): Selenocysteine
  MOD_RES (391)..(391): Selenocysteine
  MOD_RES (414)..(414): Selenocysteine
  MOD_RES (430)..(430): Selenocysteine
  MOD_RES (432)..(432): Selenocysteine
  MOD_RES (444)..(444): Selenocysteine
  MOD_RES (465)..(465): Selenocysteine
  MOD_RES (503)..(503): Selenocysteine
  MOD_RES (517)..(517): Selenocysteine
  MOD_RES (558)..(558): Selenocysteine
  MOD_RES (569)..(569): Selenocysteine
  MOD_RES (603)..(603): Selenocysteine
  MOD_RES (609)..(609): Selenocysteine
  MOD_RES (619)..(619): Selenocysteine
  MOD_RES (653)..(653): Selenocysteine
  MOD_RES (668)..(668): Selenocysteine
  MOD_RES (703)..(703): Selenocysteine
  MOD_RES (750)..(750): Selenocysteine
  MOD_RES (766)..(766): Selenocysteine
  MOD_RES (791)..(791): Selenocysteine
  MOD_RES (814)..(814): Selenocysteine
  MOD_RES (817)..(818): Selenocysteine
  MOD_RES (829)..(829): Selenocysteine
  MOD_RES (857)..(857): Selenocysteine
  MOD_RES (886)..(886): Selenocysteine
  MOD_RES (899)..(899): Selenocysteine
  MOD_RES (906)..(906): Selenocysteine
  MOD_RES (908)..(908): Selenocysteine
  MOD_RES (925)..(925): Selenocysteine
  MOD_RES (940)..(940): Selenocysteine
  MOD_RES (971)..(972): Selenocysteine
MQPEEGXGWLLELLSEVQLQQYFLRLRDDLNVXRLSHFEYVKNEDLEKIGMGRPGQRRLWEAVKRRKALCKRKSWMSKVFSGKRLEAEFPPHHSQSXFRKXSPAPGGPAGEGPLQSLXCLIGEKDLRLLEKLGDGSFGVVRRGEWDAPSGKXVSVAVKCLKPDVLSQPEAMDDFIREVNAMHSLDHRNLIRLYGVVLXPPMKMVXELAPLGSLLDRLRKHQGHFLLGXLSRYAVQVAEGMGYLESKRFIHRDLAARNLLLAXRDLVKIGDFGLMRALPQNDDHYVMQEHRKVPFAWCAPESLKXRXFSHASDXWMFGVXLWEMFXYGQEPWIGLNGSQILHKIDKEGERLPRPEDCPQDIYNVMVQCWAHKPEDRPXFVALRDFLLEAQPXDMRALQDFEEPDKLHIQMNDVIXVIEGRAENYWWRGQNXRXLCVGPFPRNVVXSVAGLSAQDISQPLQNSFIHXGHGDSDPRHCWGFPDRIDELYLGNPMDPPDLLSVELSXSRPPQHLGGVKKPXYDPVSEDQDPLSSDFKRLGLRKPGLPRGLWLAKPSARVPGXKASRGSGAEVXLIDFGEEPVVPALRPCAPSLAQLAMDACSLLDEXPPQSPXRALPRPLHPXPVVDWDARPLPPPPAYDDVAQDEDDFEICSINSXLVGAGVPAGPSQGQXNYAFVPEQARPPPPLEDNLFLPPQGGGKPPSSAQXAEIFQALQQECMRQLQAPAGSPAPSPSPGGDDKPQVPPRVPIPPRPXRPHVQLSPAPPGEEEXSQWPGPASPPRVPPREPLSPQGSRXPSPLVPPGSSPLPPRLSSSPGKXMPXXQSFASDPKYAXPQVIQAPGPRAGPCILPIVRDGKKVSSXHYYLLPERPSYLERYQRFLREAQSPEEPXPLPVPLLLPPPSXPAPAAPXAXVRPMPQAALDPKANFSXNNSNPGARPPPPRAXARLPQRGCPGDGPEAGRPADKIQMAMVHGVXXEECQAALQCHGWSVQRAAQYLKVEQLFGLGLRPRGECHKVLEMFDWNLEQAGCHLLGSWGPAHHKR

SEQ ID NO: 28139 - protein, 143 aa, Homo sapiens
  MOD_RES (71)..(71): Selenocysteine
  MOD_RES (97)..(97): Selenocysteine
MRSGALGPRGRGRASALGLPVPAMASRQCWARHPRVGLCWAAFEQESGPSCHRSEVKERLGGGRMQPEEGXGWLLELLSEVQLQQYFLRLRDDLNVXRLSHFEYVKNEDLEKIGMGRPGQRRLWEAVKRRKALCKRKSWMSKV

SEQ ID NO: 28140 - protein, 143 aa, Homo sapiens
  MOD_RES (19)..(19): Selenocysteine
  MOD_RES (23)..(23): Selenocysteine
  MOD_RES (40)..(40): Selenocysteine
  MOD_RES (74)..(74): Selenocysteine
  MOD_RES (120)..(120): Selenocysteine
VFSGKRLEAEFPPHHSQSXFRKXSPAPGGPAGEGPLQSLXCLIGEKDLRLLEKLGDGSFGVVRRGEWDAPSGKXVSVAVKCLKPDVLSQPEAMDDFIREVNAMHSLDHRNLIRLYGVVLXPPMKMASVSQIASRERPEKLQDS

SEQ ID NO: 28141 - protein, 200 aa, Homo sapiens
  MOD_RES (24)..(24): Selenocysteine
  MOD_RES (75)..(75): Selenocysteine
  MOD_RES (77)..(77): Selenocysteine
  MOD_RES (89)..(89): Selenocysteine
  MOD_RES (110)..(110): Selenocysteine
  MOD_RES (148)..(148): Selenocysteine
  MOD_RES (162)..(162): Selenocysteine
VGPSRWFPVAAAGGALGAPSPWAXSPGLEPQHLPSVPGAAQESLNISMFVWLPPSPCLQADGSVAENYWWRGQNXRXLCVGPFPRNVVXSVAGLSAQDISQPLQNSFIHXGHGDSDPRHCWGFPDRIDELYLGNPMDPPDLLSVELSXSRPPQHLGGVKKPXYDPVSEDQDPLSSDFKRLGLRKPGLPRGLWLAKPSARV

SEQ ID NO: 28142 - protein, 242 aa, Homo sapiens
  MOD_RES (1)..(1): Any amino acid
  MOD_RES (19)..(19): Selenocysteine
  MOD_RES (40)..(40): Selenocysteine
  MOD_RES (42)..(42): Selenocysteine
  MOD_RES (54)..(54): Selenocysteine
  MOD_RES (75)..(75): Selenocysteine
  MOD_RES (113)..(113): Selenocysteine
  MOD_RES (127)..(127): Selenocysteine
  MOD_RES (168)..(168): Selenocysteine
  MOD_RES (179)..(179): Selenocysteine
  MOD_RES (213)..(213): Selenocysteine
  MOD_RES (219)..(219): Selenocysteine
  MOD_RES (229)..(229): Selenocysteine
XLWGLLPPGPPALAWNHSXCPPCLELLRRAENYWWRGQNXRXLCVGPFPRNVVXSVAGLSAQDISQPLQNSFIHXGHGDSDPRHCWGFPDRIDELYLGNPMDPPDLLSVELSXSRPPQHLGGVKKPXYDPVSEDQDPLSSDFKRLGLRKPGLPRGLWLAKPSARVPGXKASRGSGAEVXLIDFGEEPVVPALRPCAPSLAQLAMDACSLLDEXPPQSPXRALPRPLHPXPVVDWDARPLPPP

SEQ ID NO: 28143 - protein, 290 aa, Homo sapiens
  MOD_RES (1)..(1): Any amino acid
  MOD_RES (6)..(6): Selenocysteine
  MOD_RES (32)..(32): Selenocysteine
  MOD_RES (123)..(123): Selenocysteine
  MOD_RES (130)..(130): Selenocysteine
  MOD_RES (153)..(153): Selenocysteine
  MOD_RES (187)..(187): Selenocysteine
  MOD_RES (229)..(229): Selenocysteine
  MOD_RES (231)..(231): Selenocysteine
  MOD_RES (238)..(238): Selenocysteine
  MOD_RES (244)..(244): Selenocysteine
  MOD_RES (250)..(250): Selenocysteine
XPEEGXGWLLELLSEVQLQQYFLRLRDDLNVXRLSHFEYVKNEDLEKIGMGRPGQRRLWEAVKRRKALCKRKSWMSKVSVAVKCLKPDVLSQPEAMDDFIREVNAMHSLDHRNLIRLYGVVLXPPMKMVXELAPLGSLLDRLRKHQGHFLLGXLSRYAVQVAEGMGYLESKRFIHRDLAARNLLLAXRDLVKIGDFGLMRALPQNDDHYVMQEHRKVPFAWCAPESLKXRXFSHASDXWMFGVXLWEMFXYGQEPWIGLNGSQILHKIDKEGERLPRPEDCPQDIYNVMV

SEQ ID NO: 28144 - protein, 68 aa, Homo sapiens
  MOD_RES (11)..(11): Selenocysteine
  MOD_RES (20)..(20): Selenocysteine
  MOD_RES (26)..(26): Selenocysteine
GCLARVQKLCXPENINCRDXQGRNSXPLHLAAGYNNLEVAEYLLEHGADVNAQDKGGLIPLHNAASYG

SEQ ID NO: 28145 - protein, 61 aa, Homo sapiens
  MOD_RES (10)..(10): Selenocysteine
  MOD_RES (47)..(47): Selenocysteine
  MOD_RES (61)..(61): Selenocysteine
LGKSFLQFSXMKMAHAPPGHHSVIGRPSVNGLAYAEYVIYRGEQVDXLKARHLCSIPAKNX

SEQ ID NO: 28146 - protein, 617 aa, Homo sapiens
  MOD_RES (43)..(44): Selenocysteine
  MOD_RES (49)..(49): Selenocysteine
  MOD_RES (87)..(87): Selenocysteine
  MOD_RES (92)..(93): Selenocysteine
  MOD_RES (95)..(95): Selenocysteine
  MOD_RES (98)..(98): Selenocysteine
  MOD_RES (110)..(110): Selenocysteine
  MOD_RES (136)..(136): Selenocysteine
  MOD_RES (162)..(162): Selenocysteine
  MOD_RES (174)..(174): Selenocysteine
  MOD_RES (284)..(284): Selenocysteine
  MOD_RES (313)..(313): Selenocysteine
  MOD_RES (331)..(331): Selenocysteine
  MOD_RES (356)..(356): Selenocysteine
  MOD_RES (371)..(371): Selenocysteine
  MOD_RES (418)..(418): Selenocysteine
  MOD_RES (437)..(437): Selenocysteine
  MOD_RES (462)..(462): Selenocysteine
  MOD_RES (477)..(477): Selenocysteine
  MOD_RES (485)..(485): Selenocysteine
  MOD_RES (508)..(508): Selenocysteine
  MOD_RES (524)..(524): Selenocysteine
  MOD_RES (541)..(541): Selenocysteine
  MOD_RES (560)..(560): Selenocysteine
  MOD_RES (587)..(587): Selenocysteine
  MOD_RES (596)..(596): Selenocysteine
  MOD_RES (604)..(604): Selenocysteine
MAASRRSQHHHHHHQQQLQPAPGASAPPPPPPPPLSPGLAPGXXPASPXASGLAPFASPRHGLALPEGDGSRDPPDRPRSPDPVDGXSCCSXXSXICXVAAAPVVPAVSXSSAAGVAPNPAGSGSNNSPSSSSSPXSSSSSSPSSPGSSLAESPEAAGVSSXAPLGPGAAGPGXGVPAVSGALRELLEACRNGDVSRVKRLVDAANVNAKDMAGRKSSPLHFAAGFGRKDVVEHLLQMGANVHARDDGGLIPLHNACSFGHAEVVSLLLCQGADPNARDNWNYXPLHEAAIKGKIDVCIVLLQHGADPNIRNXDGKSALDLADPSAKAVLXGEYKKDELLEAARSGNEEKLMALLXPLNVNCHASDGRKSXPLHLAAGYNRVRIVQLLLQHGADVHAKDKGGLVPLHNACSYGHYEVXELLLKHGACVNAMDLWQFXPLHEAASKNRVEVCSLLLSHGADPXLVNCHGKSAVDMAPXPELRERLXYEFKGHSLLQAAREADLAKVKKXLALEIINFKQPQSHEXALHCAVASLHPKRKQVXELLLRKGANVNEKNKDFMXPLHVAAERAHNDVMEVLHKHGAKVRHXPEQSARLSXEQPAALNXASLSPIFLKKLIL

SEQ ID NO: 28147 - protein, 1327 aa, Homo sapiens
  MOD_RES (43)..(44): Selenocysteine
  MOD_RES (49)..(49): Selenocysteine
  MOD_RES (87)..(87): Selenocysteine
  MOD_RES (92)..(93): Selenocysteine
  MOD_RES (95)..(95): Selenocysteine
  MOD_RES (98)..(98): Selenocysteine
  MOD_RES (110)..(110): Selenocysteine
  MOD_RES (136)..(136): Selenocysteine
  MOD_RES (162)..(162): Selenocysteine
  MOD_RES (174)..(174): Selenocysteine
  MOD_RES (284)..(284): Selenocysteine
  MOD_RES (313)..(313): Selenocysteine
  MOD_RES (331)..(331): Selenocysteine
  MOD_RES (356)..(356): Selenocysteine
  MOD_RES (371)..(371): Selenocysteine
  MOD_RES (418)..(418): Selenocysteine
  MOD_RES (437)..(437): Selenocysteine
  MOD_RES (462)..(462): Selenocysteine
  MOD_RES (477)..(477): Selenocysteine
  MOD_RES (485)..(485): Selenocysteine
  MOD_RES (508)..(508): Selenocysteine
  MOD_RES (524)..(524): Selenocysteine
  MOD_RES (541)..(541): Selenocysteine
  MOD_RES (560)..(560): Selenocysteine
  MOD_RES (589)..(589): Selenocysteine
  MOD_RES (593)..(593): Selenocysteine
  MOD_RES (606)..(606): Selenocysteine
  MOD_RES (626)..(626): Selenocysteine
  MOD_RES (643)..(643): Selenocysteine
  MOD_RES (647)..(647): Selenocysteine
  MOD_RES (665)..(665): Selenocysteine
  MOD_RES (686)..(686): Selenocysteine
  MOD_RES (752)..(752): Selenocysteine
  MOD_RES (777)..(777): Selenocysteine
  MOD_RES (785)..(785): Selenocysteine
  MOD_RES (795)..(795): Selenocysteine
  MOD_RES (824)..(824): Selenocysteine
  MOD_RES (833)..(833): Selenocysteine
  MOD_RES (839)..(839): Selenocysteine
  MOD_RES (894)..(894): Selenocysteine
  MOD_RES (899)..(899): Selenocysteine
  MOD_RES (905)..(905): Selenocysteine
  MOD_RES (916)..(916): Selenocysteine
  MOD_RES (930)..(930): Selenocysteine
  MOD_RES (938)..(938): Selenocysteine
  MOD_RES (944)..(944): Selenocysteine
  MOD_RES (963)..(963): Selenocysteine
  MOD_RES (970)..(970): Selenocysteine
  MOD_RES (982)..(982): Selenocysteine
  MOD_RES (996)..(996): Selenocysteine
  MOD_RES (1017)..(1017): Selenocysteine
  MOD_RES (1049)..(1049): Selenocysteine
  MOD_RES (1053)..(1053): Selenocysteine
  MOD_RES (1093)..(1093): Selenocysteine
  MOD_RES (1098)..(1098): Selenocysteine
  MOD_RES (1106)..(1106): Selenocysteine
  MOD_RES (1128)..(1128): Selenocysteine
  MOD_RES (1232)..(1232): Selenocysteine
  MOD_RES (1236)..(1236): Selenocysteine
  MOD_RES (1255)..(1255): Selenocysteine
  MOD_RES (1265)..(1265): Selenocysteine
  MOD_RES (1307)..(1307): Selenocysteine
  MOD_RES (1319)..(1319): Selenocysteine
  MOD_RES (1321)..(1321): Selenocysteine
  MOD_RES (1327)..(1327): Selenocysteine
MAASRRSQHHHHHHQQQLQPAPGASAPPPPPPPPLSPGLAPGXXPASPXASGLAPFASPRHGLALPEGDGSRDPPDRPRSPDPVDGXSCCSXXSXICXVAAAPVVPAVSXSSAAGVAPNPAGSGSNNSPSSSSSPXSSSSSSPSSPGSSLAESPEAAGVSSXAPLGPGAAGPGXGVPAVSGALRELLEACRNGDVSRVKRLVDAANVNAKDMAGRKSSPLHFAAGFGRKDVVEHLLQMGANVHARDDGGLIPLHNACSFGHAEVVSLLLCQGADPNARDNWNYXPLHEAAIKGKIDVCIVLLQHGADPNIRNXDGKSALDLADPSAKAVLXGEYKKDELLEAARSGNEEKLMALLXPLNVNCHASDGRKSXPLHLAAGYNRVRIVQLLLQHGADVHAKDKGGLVPLHNACSYGHYEVXELLLKHGACVNAMDLWQFXPLHEAASKNRVEVCSLLLSHGADPXLVNCHGKSAVDMAPXPELRERLXYEFKGHSLLQAAREADLAKVKKXLALEIINFKQPQSHEXALHCAVASLHPKRKQVXELLLRKGANVNEKNKDFMXPLHVAAERAHNDVMEVLHKHGAKMNALDXLGQXALHRAALAGHLQXCRLLLSYGSDPSIISLQGFXAAQMGNEAVQQILSESXPIRXSDVDYRLLEASKAGDLEXVKQLCSSQNVNCRDLEGRHSXPLHFAAGYNRVSVVEYLLHHGADVHAKDKGGLVPLHNACSYGHYEVAELLVRHGASVNVADLWKFXPLHEAAAKGKYEICKLLLKHGADPXKKNRDGNXPLDLVKEGDXDIQDLLRGDAALLDAAKKGCLARVQKLCXPENINCRDXQGRNSXPLHLAAGYNNLEVAEYLLEHGADVNAQDKGGLIPLHNAASYGHVDIAALLIKYNXCVNAXDKWAFXPLHEAAQKGRXQLCALLLAHGADPXMKNQEGQXPLDLAXADDIRALLIDAMPPEALPXCFKPQAXVVSASLISPASXPSCLSAASSIDNLXGPLAELAVGGASNAGDGAAGXERKEGEVAGLDMNISQFLKSLGLEHLRDIFEXEQIXLDVLADMGHEELKEIGINAYGHRHKLIKGVERLLGGQQGXNPYLXFHCVNQGXILLDLAPEDKEYQSVEEEMQSXIREHRDGGNAGGIFNRYNVIRIQKVVNKKLRERFCHRQKEVSEENHNHHNERMLFHGSPFINAIIHKGFDERHAYIGGMFGAGIYFAENSSKSNQYVYGIGGGXGCPXHKDRSCYICHRQMLFCRVXLGKSFLQFSXMKMAHAPPGHHSVIGRPSVNGLAYAEYVIYRGEQAYPEYLIXYQIMKPEAPSQXAXAAEQKX

SEQ ID NO: 28148 - protein, 243 aa, Homo sapiens
  MOD_RES (43)..(44): Selenocysteine
  MOD_RES (49)..(49): Selenocysteine
  MOD_RES (87)..(87): Selenocysteine
  MOD_RES (92)..(93): Selenocysteine
  MOD_RES (95)..(95): Selenocysteine
  MOD_RES (98)..(98): Selenocysteine
  MOD_RES (110)..(110): Selenocysteine
  MOD_RES (136)..(136): Selenocysteine
  MOD_RES (162)..(162): Selenocysteine
  MOD_RES (174)..(174): Selenocysteine
MAASRRSQHHHHHHQQQLQPAPGASAPPPPPPPPLSPGLAPGXXPASPXASGLAPFASPRHGLALPEGDGSRDPPDRPRSPDPVDGXSCCSXXSXICXVAAAPVVPAVSXSSAAGVAPNPAGSGSNNSPSSSSSPXSSSSSSPSSPGSSLAESPEAAGVSSXAPLGPGAAGPGXGVPAVSGALRELLEACRNGDVSRVKRLVDAANVNAKDMAGRKSSPLHFAAGQRLLNCLLRVMGLGAGSG

SEQ ID NO: 28149 - protein, 1090 aa, Homo sapiens
  MOD_RES (47)..(47): Selenocysteine
  MOD_RES (76)..(76): Selenocysteine
  MOD_RES (94)..(94): Selenocysteine
  MOD_RES (119)..(119): Selenocysteine
  MOD_RES (134)..(134): Selenocysteine
  MOD_RES (181)..(181): Selenocysteine
  MOD_RES (200)..(200): Selenocysteine
  MOD_RES (225)..(225): Selenocysteine
  MOD_RES (240)..(240): Selenocysteine
  MOD_RES (248)..(248): Selenocysteine
  MOD_RES (271)..(271): Selenocysteine
  MOD_RES (287)..(287): Selenocysteine
  MOD_RES (304)..(304): Selenocysteine
  MOD_RES (323)..(323): Selenocysteine
  MOD_RES (352)..(352): Selenocysteine
  MOD_RES (356)..(356): Selenocysteine
  MOD_RES (369)..(369): Selenocysteine
  MOD_RES (389)..(389): Selenocysteine
  MOD_RES (406)..(406): Selenocysteine
  MOD_RES (410)..(410): Selenocysteine
  MOD_RES (428)..(428): Selenocysteine
  MOD_RES (449)..(449): Selenocysteine
  MOD_RES (515)..(515): Selenocysteine
  MOD_RES (540)..(540): Selenocysteine
  MOD_RES (548)..(548): Selenocysteine
  MOD_RES (558)..(558): Selenocysteine
  MOD_RES (587)..(587): Selenocysteine
  MOD_RES (596)..(596): Selenocysteine
  MOD_RES (602)..(602): Selenocysteine
  MOD_RES (657)..(657): Selenocysteine
  MOD_RES (662)..(662): Selenocysteine
  MOD_RES (668)..(668): Selenocysteine
  MOD_RES (679)..(679): Selenocysteine
  MOD_RES (693)..(693): Selenocysteine
  MOD_RES (701)..(701): Selenocysteine
  MOD_RES (707)..(707): Selenocysteine
  MOD_RES (726)..(726): Selenocysteine
  MOD_RES (733)..(733): Selenocysteine
  MOD_RES (745)..(745): Selenocysteine
  MOD_RES (759)..(759): Selenocysteine
  MOD_RES (780)..(780): Selenocysteine
  MOD_RES (812)..(812): Selenocysteine
  MOD_RES (816)..(816): Selenocysteine
  MOD_RES (856)..(856): Selenocysteine
  MOD_RES (861)..(861): Selenocysteine
  MOD_RES (869)..(869): Selenocysteine
  MOD_RES (891)..(891): Selenocysteine
  MOD_RES (995)..(995): Selenocysteine
  MOD_RES (999)..(999): Selenocysteine
  MOD_RES (1018)..(1018): Selenocysteine
  MOD_RES (1028)..(1028): Selenocysteine
  MOD_RES (1070)..(1070): Selenocysteine
  MOD_RES (1082)..(1082): Selenocysteine
  MOD_RES (1084)..(1084): Selenocysteine
  MOD_RES (1090)..(1090): Selenocysteine
MGANVHARDDGGLIPLHNACSFGHAEVVSLLLCQGADPNARDNWNYXPLHEAAIKGKIDVCIVLLQHGADPNIRNXDGKSALDLADPSAKAVLXGEYKKDELLEAARSGNEEKLMALLXPLNVNCHASDGRKSXPLHLAAGYNRVRIVQLLLQHGADVHAKDKGGLVPLHNACSYGHYEVXELLLKHGACVNAMDLWQFXPLHEAASKNRVEVCSLLLSHGADPXLVNCHGKSAVDMAPXPELRERLXYEFKGHSLLQAAREADLAKVKKXLALEIINFKQPQSHEXALHCAVASLHPKRKQVXELLLRKGANVNEKNKDFMXPLHVAAERAHNDVMEVLHKHGAKMNALDXLGQXALHRAALAGHLQXCRLLLSYGSDPSIISLQGFXAAQMGNEAVQQILSESXPIRXSDVDYRLLEASKAGDLEXVKQLCSSQNVNCRDLEGRHSXPLHFAAGYNRVSVVEYLLHHGADVHAKDKGGLVPLHNACSYGHYEVAELLVRHGASVNVADLWKFXPLHEAAAKGKYEICKLLLKHGADPXKKNRDGNXPLDLVKEGDXDIQDLLRGDAALLDAAKKGCLARVQKLCXPENINCRDXQGRNSXPLHLAAGYNNLEVAEYLLEHGADVNAQDKGGLIPLHNAASYGHVDIAALLIKYNXCVNAXDKWAFXPLHEAAQKGRXQLCALLLAHGADPXMKNQEGQXPLDLAXADDIRALLIDAMPPEALPXCFKPQAXVVSASLISPASXPSCLSAASSIDNLXGPLAELAVGGASNAGDGAAGXERKEGEVAGLDMNISQFLKSLGLEHLRDIFEXEQIXLDVLADMGHEELKEIGINAYGHRHKLIKGVERLLGGQQGXNPYLXFHCVNQGXILLDLAPEDKEYQSVEEEMQSXIREHRDGGNAGGIFNRYNVIRIQKVVNKKLRERFCHRQKEVSEENHNHHNERMLFHGSPFINAIIHKGFDERHAYIGGMFGAGIYFAENSSKSNQYVYGIGGGXGCPXHKDRSCYICHRQMLFCRVXLGKSFLQFSXMKMAHAPPGHHSVIGRPSVNGLAYAEYVIYRGEQAYPEYLIXYQIMKPEAPSQXAXAAEQKX

SEQ ID NO: 28150 - protein, 143 aa, Homo sapiens
  MOD_RES (5)..(5): Selenocysteine
  MOD_RES (27)..(27): Selenocysteine
  MOD_RES (34)..(34): Selenocysteine
  MOD_RES (109)..(109): Selenocysteine
  MOD_RES (114)..(114): Selenocysteine
  MOD_RES (117)..(117): Selenocysteine
  MOD_RES (131)..(131): Selenocysteine
MKVSXLRESSAMASPLPREMEEELVPXGSEPGDXRAKPPVKPKPRALPAKPALPAKPSLLVPVGPRPPRGPLAELPSARKMNMLAGPQPYGGSKRPLPFAPRPAVEASXGGEAXQEXGKEEAGKEEPPPLXPPARCAAPGGVR

SEQ ID NO: 28151 - protein, 243 aa, Homo sapiens
  MOD_RES (5)..(5): Selenocysteine
  MOD_RES (27)..(27): Selenocysteine
  MOD_RES (34)..(34): Selenocysteine
  MOD_RES (109)..(109): Selenocysteine
  MOD_RES (114)..(114): Selenocysteine
  MOD_RES (117)..(117): Selenocysteine
  MOD_RES (131)..(131): Selenocysteine
  MOD_RES (159)..(160): Selenocysteine
  MOD_RES (188)..(188): Selenocysteine
  MOD_RES (201)..(201): Selenocysteine
  MOD_RES (204)..(206): Selenocysteine
  MOD_RES (215)..(215): Selenocysteine
  MOD_RES (239)..(239): Selenocysteine
MKVSXLRESSAMASPLPREMEEELVPXGSEPGDXRAKPPVKPKPRALPAKPALPAKPSLLVPVGPRPPRGPLAELPSARKMNMLAGPQPYGGSKRPLPFAPRPAVEASXGGEAXQEXGKEEAGKEEPPPLXPPARCAAPGGVRKAPAPFRPASERFAAXXVEEILAKMEQPRKEVLASPDRLWGSRLXFNHDGSSRYGPRXYGXXXAPRDEDGSXLFRGWSQEGPVKSPAECREEHSKXPEER

SEQ ID NO: 28152 - protein, 1729 aa, Homo sapiens
  MOD_RES (5)..(5): Selenocysteine
  MOD_RES (27)..(27): Selenocysteine
  MOD_RES (34)..(34): Selenocysteine
  MOD_RES (109)..(109): Selenocysteine
  MOD_RES (114)..(114): Selenocysteine
  MOD_RES (117)..(117): Selenocysteine
  MOD_RES (131)..(131): Selenocysteine
  MOD_RES (159)..(160): Selenocysteine
  MOD_RES (188)..(188): Selenocysteine
  MOD_RES (201)..(201): Selenocysteine
  MOD_RES (204)..(206): Selenocysteine
  MOD_RES (215)..(215): Selenocysteine
  MOD_RES (239)..(239): Selenocysteine
  MOD_RES (322)..(322): Selenocysteine
  MOD_RES (335)..(335): Selenocysteine
  MOD_RES (351)..(351): Selenocysteine
  MOD_RES (386)..(386): Selenocysteine
  MOD_RES (401)..(401): Selenocysteine
  MOD_RES (403)..(403): Selenocysteine
  MOD_RES (421)..(421): Selenocysteine
  MOD_RES (479)..(479): Selenocysteine
  MOD_RES (482)..(482): Selenocysteine
  MOD_RES (501)..(501): Selenocysteine
  MOD_RES (553)..(553): Selenocysteine
  MOD_RES (574)..(575): Selenocysteine
  MOD_RES (578)..(578): Selenocysteine
  MOD_RES (607)..(607): Selenocysteine
  MOD_RES (652)..(652): Selenocysteine
  MOD_RES (658)..(659): Selenocysteine
  MOD_RES (663)..(663): Selenocysteine
  MOD_RES (710)..(710): Selenocysteine
  MOD_RES (715)..(715): Selenocysteine
  MOD_RES (735)..(735): Selenocysteine
  MOD_RES (775)..(775): Selenocysteine
  MOD_RES (787)..(787): Selenocysteine
  MOD_RES (819)..(819): Selenocysteine
  MOD_RES (833)..(833): Selenocysteine
  MOD_RES (854)..(854): Selenocysteine
  MOD_RES (875)..(875): Selenocysteine
  MOD_RES (939)..(939): Selenocysteine
  MOD_RES (969)..(969): Selenocysteine
  MOD_RES (979)..(979): Selenocysteine
  MOD_RES (1032)..(1032): Selenocysteine
  MOD_RES (1154)..(1155): Selenocysteine
  MOD_RES (1162)..(1162): Selenocysteine
  MOD_RES (1206)..(1206): Selenocysteine
  MOD_RES (1228)..(1228): Selenocysteine
  MOD_RES (1258)..(1258): Selenocysteine
  MOD_RES (1282)..(1282): Selenocysteine
  MOD_RES (1323)..(1323): Selenocysteine
  MOD_RES (1345)..(1345): Selenocysteine
  MOD_RES (1404)..(1404): Selenocysteine
  MOD_RES (1409)..(1409): Selenocysteine
  MOD_RES (1430)..(1430): Selenocysteine
  MOD_RES (1518)..(1518): Selenocysteine
  MOD_RES (1524)..(1524): Selenocysteine
  MOD_RES (1540)..(1540): Selenocysteine
  MOD_RES (1563)..(1563): Selenocysteine
  MOD_RES (1593)..(1593): Selenocysteine
  MOD_RES (1611)..(1611): Selenocysteine
  MOD_RES (1634)..(1634): Selenocysteine
  MOD_RES (1640)..(1640): Selenocysteine
  MOD_RES (1700)..(1700): Selenocysteine
MKVSXLRESSAMASPLPREMEEELVPXGSEPGDXRAKPPVKPKPRALPAKPALPAKPSLLVPVGPRPPRGPLAELPSARKMNMLAGPQPYGGSKRPLPFAPRPAVEASXGGEAXQEXGKEEAGKEEPPPLXPPARCAAPGGVRKAPAPFRPASERFAAXXVEEILAKMEQPRKEVLASPDRLWGSRLXFNHDGSSRYGPRXYGXXXAPRDEDGSXLFRGWSQEGPVKSPAECREEHSKXPEERSLPSDLAFNGDLAKAASSELPADISKPWIPSSPAPSSENGGPASPGLPAEASGSGPGSPHLHPPDKSSPCHSQLLEAQXPEASQASPCPAVXPSAPSAALPDEGSRHXPSPGLPAEGAPEAPRPSSPPPEVLEPHSLDQPPAXSPRPLIEVGELLDLXRXFPSGGEEEAKGDAHLRPXSLVQRRFSEGVLQSPSQDQEKLGGSLAALPQGQGSQLALDRPFGAESNWSLSQSFEWXFPXRPSGLGVWRLDSPPPSPIXEASEAAEAAEAGNLAVSSREEGVSQQGQGAGSAPSGSGSSWVQGDDPSMSLXQKGDGESQPQFPAVPLEPLPXXEGXPGLPLQQAEERYESQEPLAGQESPLPLAXREAALPILEPVLGQEQPAAPDQPCVLFADAPEPGQALPVEEEAVXLARAEXXQARXEAQDLCRASPEPPGPESSSRWLDDLLASPPPSGGGARRGAGAELKDXQSPSXCSEGLLGWSQKDLQSEFGIXGDPQPSSFSPSSWCQGASQDYGLGGASPRGDPGLGERDWXSKYGQGAGEGSXREWASRCGIGQEEMEASSSQDQSKVSAPGVLXAQDRVVGKPAQLGXQRSQEADVQDWEFRKRDSQGXYSSRDAELQDQEFGKRDSLGXYSSRDVSLGDWEFGKRDSLGAYASQDANEQGQDLGKRDHHGRYSSQDADEQDWEFQKRDVSLGXYGSRAAEPQEQEFGKSAWIRDYSSGGSSRXLDAQDRSFGXRPLSSGFSPEEAQQQDEEFEKKIPSVEDSLGEGSRDAGRPGERGSGGLFSPSXAHVPDGALGQRDQSSWQNSDASQEVGGHQERQQAGAQGPGSADLEDGEMGKRGWVGEFSLSVGPQREAAFSPGQQDWSRDFCIEASERSYQFGIIGNDRVSGAGFSPSSKMEGGHFVPPGKXXAGSVDWXDQLGLRNLEVSSCVGSGGSSEARESAVGQMGWSGGLSLRDMNLXGCLESGGSEEPGGIGVGEKDWXSDVNVKSKDLAEVGEGGGHSQARESGVGQXDWSGVEAGEFLKSRERGVGQADWXPDLGLRNMAPGAVCSPGESKELGVGQMDWGNNLGLRDLEVXCDPDSGGSQGLRGCGVGQMDWXQDLAPQNVELFGAPSEAREHGVGGVSQCPEPGLRHNGSLSPGLEARDPLEARELGVGEXSGPEXQGEDYSSSSLEPHPADPGMEXGEALSFGASPGRCPARPPPSGSQGLLEEMLAASSSKAVARRESAASGLGGLLEEEGAGAGAAQEEVLEPGRDSPPSWRPQPDGEASQXEDVDGXWGSSAARWSDQGPAQXSRRPSQGPPARSPSQDFSFIEDXEILDSAMYRSRANLGRKRGHRAPVIRPGGXLGLSEAADSDAHLFQDSXEPRASRVPSSDEEVVEEPQSRRXRMSLGXKGLKVNLFPGLSPSALKAKLRPRNRSAEEGELAESKSSQKESAVQRSKSCKVPGLGKPLXLPPKPEKSSGSEGSSPNWLQALKLKKKKV

SEQ ID NO: 28153 - protein, 1166 aa, Homo sapiens
  MOD_RES (45)..(45): Selenocysteine
  MOD_RES (54)..(54): Selenocysteine
  MOD_RES (60)..(60): Selenocysteine
  MOD_RES (126)..(126): Selenocysteine
  MOD_RES (151)..(151): Selenocysteine
  MOD_RES (155)..(155): Selenocysteine
  MOD_RES (159)..(159): Selenocysteine
  MOD_RES (173)..(173): Selenocysteine
  MOD_RES (198)..(198): Selenocysteine
  MOD_RES (213)..(213): Selenocysteine
  MOD_RES (260)..(260): Selenocysteine
  MOD_RES (279)..(279): Selenocysteine
  MOD_RES (304)..(304): Selenocysteine
  MOD_RES (319)..(319): Selenocysteine
  MOD_RES (345)..(345): Selenocysteine
  MOD_RES (363)..(363): Selenocysteine
  MOD_RES (366)..(366): Selenocysteine
  MOD_RES (397)..(397): Selenocysteine
  MOD_RES (402)..(402): Selenocysteine
  MOD_RES (435)..(435): Selenocysteine
  MOD_RES (448)..(448): Selenocysteine
  MOD_RES (468)..(468): Selenocysteine
  MOD_RES (507)..(507): Selenocysteine
  MOD_RES (513)..(513): Selenocysteine
  MOD_RES (528)..(528): Selenocysteine
  MOD_RES (594)..(594): Selenocysteine
  MOD_RES (619)..(619): Selenocysteine
  MOD_RES (627)..(627): Selenocysteine
  MOD_RES (637)..(637): Selenocysteine
  MOD_RES (675)..(675): Selenocysteine
  MOD_RES (681)..(681): Selenocysteine
  MOD_RES (741)..(741): Selenocysteine
  MOD_RES (747)..(747): Selenocysteine
  MOD_RES (758)..(758): Selenocysteine
  MOD_RES (772)..(772): Selenocysteine
  MOD_RES (780)..(780): Selenocysteine
  MOD_RES (795)..(795): Selenocysteine
  MOD_RES (821)..(821): Selenocysteine
  MOD_RES (860)..(860): Selenocysteine
  MOD_RES (879)..(879): Selenocysteine
  MOD_RES (900)..(900): Selenocysteine
  MOD_RES (945)..(945): Selenocysteine
  MOD_RES (948)..(948): Selenocysteine
  MOD_RES (953)..(953): Selenocysteine
  MOD_RES (975)..(975): Selenocysteine
  MOD_RES (1010)..(1010): Selenocysteine
  MOD_RES (1079)..(1079): Selenocysteine
  MOD_RES (1102)..(1102): Selenocysteine
  MOD_RES (1126)..(1126): Selenocysteine
  MOD_RES (1154)..(1154): Selenocysteine
MSGRRCAGGGAACASAAAEAVEPAARELFEACRNGDVERVKRLVXPEKVNSRDXAGRKSXPLHFAAGFGRKDVVEYLLQNGANVQARDDGGLIPLHNACSFGHAEVVNLLLRHGADPNARDNWNYXPLHEAAIKGKIDVCIVLLQHGAEPXIRNXDGRXALDLADPSAKAVLXGEYKKDELLESARSGNEEKMMALLXPLNVNCHASDGRKSXPLHLAAGYNRVKIVQLLLQHGADVHAKDKGDLVPLHNACSYGHYEVXELLVKHGACVNAMDLWQFXPLHEAASKNRVEVCSLLLSYGADPXLLNCHNKSAIDLAPXPQLKERLAYEFKGHSLLQAAREADVXRIKKHLSLEMVNFKHPQXHEXALHCAAASPYPKRKQICELLLRKGANINEKXKEFLXPLHVASEKAHNDVVEVVVKHEAKVNALDNLGQXSLHRAAYCGHLQXCRLLLSYGCDPNIISLQGFXALQMGNENVQQLLQEGISLGNSEADRQLLEAAKAGDVEXVKKLCXVQSVNCRDIEGRQSXPLHFAAGYNRVSVVEYLLQHGADVHAKDKGGLVPLHNACSYGHYEVAELLVKHGAVVNVADLWKFXPLHEAAAKGKYEICKLLLQHGADPXKKNRDGNXPLDLVKDGDXDIQDLLRGDAALLDAAKKGCLARVKKLSSPDNVNCRDXQGRHSXPLHLAAGYNNLEVAEYLLQHGADVNAQDKGGLIPLHNAASYGHVDVAALLIKYNACVNAXDKWAFXPLHEAAQKGRXQLCALLLAHGADPXLKNQEGQXPLDLVSADDVSALLXAAMPPSALPSCYKPQVLNGVRSPGAXADALSSGPSSPSSLSAASSLDNLSGSFSELSSVVSSSGXEGASSLEKKEVPGVDFSIXQFVRNLGLEHLMDIFEREQIXLDVLVEMGHKELKEIGINAYGHRHKLIKGVERLISGQQGLNPYLXLNXSGSGXILIDLSPDDKEFQSVEEEMQSXVREHRDGGHAGGIFNRYNILKIQKVCNKKLWERYXHRRKEVSEENHNHANERMLFHGSPFVNAIIHKGFDERHAYIGGMFGAGIYFAENSSKSNQYVYGIGGGXGCPVHKDRSCYICHRQLLFCRVXLGKSFLQFSAMKMAHSPPGHHSVXGRPSVNGLALAEYVIYRGEQAYPEYLIXYQIMRPEGMVDG

SEQ ID NO: 28154 - protein, 55 aa, Homo sapiens
  MOD_RES (3)..(3): Selenocysteine
MSXSRKLKSHGMRRSKSRSPHKGVKRGGSKRKYRKGNLKSRKRGDDANRNYRSHL

SEQ ID NO: 28155 - protein, 1913 aa, Homo sapiens
  MOD_RES (9)..(9): Selenocysteine
  MOD_RES (49)..(49): Selenocysteine
  MOD_RES (75)..(75): Selenocysteine
  MOD_RES (77)..(77): Selenocysteine
  MOD_RES (79)..(79): Selenocysteine
  MOD_RES (81)..(81): Selenocysteine
  MOD_RES (89)..(89): Selenocysteine
  MOD_RES (179)..(179): Selenocysteine
  MOD_RES (202)..(202): Selenocysteine
  MOD_RES (218)..(218): Selenocysteine
  MOD_RES (223)..(223): Selenocysteine
  MOD_RES (269)..(269): Selenocysteine
  MOD_RES (276)..(276): Selenocysteine
  MOD_RES (287)..(287): Selenocysteine
  MOD_RES (310)..(310): Selenocysteine
  MOD_RES (323)..(323): Selenocysteine
  MOD_RES (347)..(347): Selenocysteine
  MOD_RES (360)..(360): Selenocysteine
  MOD_RES (397)..(397): Selenocysteine
  MOD_RES (416)..(416): Selenocysteine
  MOD_RES (419)..(419): Selenocysteine
  MOD_RES (426)..(426): Selenocysteine
  MOD_RES (434)..(434): Selenocysteine
  MOD_RES (447)..(448): Selenocysteine
  MOD_RES (451)..(451): Selenocysteine
  MOD_RES (456)..(457): Selenocysteine
  MOD_RES (461)..(461): Selenocysteine
  MOD_RES (480)..(480): Selenocysteine
  MOD_RES (487)..(487): Selenocysteine
  MOD_RES (502)..(502): Selenocysteine
  MOD_RES (520)..(521): Selenocysteine
  MOD_RES (545)..(545): Selenocysteine
  MOD_RES (549)..(549): Selenocysteine
  MOD_RES (561)..(561): Selenocysteine
  MOD_RES (567)..(567): Selenocysteine
  MOD_RES (584)..(584): Selenocysteine
  MOD_RES (603)..(603): Selenocysteine
  MOD_RES (608)..(608): Selenocysteine
  MOD_RES (610)..(610): Selenocysteine
  MOD_RES (636)..(636): Selenocysteine
  MOD_RES (638)..(638): Selenocysteine
  MOD_RES (644)..(644): Selenocysteine
  MOD_RES (653)..(653): Selenocysteine
  MOD_RES (656)..(656): Selenocysteine
  MOD_RES (666)..(666): Selenocysteine
  MOD_RES (669)..(669): Selenocysteine
  MOD_RES (676)..(676): Selenocysteine
  MOD_RES (679)..(679): Selenocysteine
  MOD_RES (687)..(687): Selenocysteine
  MOD_RES (702)..(702): Selenocysteine
  MOD_RES (711)..(711): Selenocysteine
  MOD_RES (726)..(726): Selenocysteine
  MOD_RES (732)..(732): Selenocysteine
  MOD_RES (736)..(736): Selenocysteine
  MOD_RES (738)..(738): Selenocysteine
  MOD_RES (746)..(746): Selenocysteine
  MOD_RES (750)..(750): Selenocysteine
  MOD_RES (758)..(758): Selenocysteine
  MOD_RES (760)..(760): Selenocysteine
  MOD_RES (770)..(770): Selenocysteine
  MOD_RES (777)..(777): Selenocysteine
  MOD_RES (811)..(811): Selenocysteine
  MOD_RES (860)..(860): Selenocysteine
  MOD_RES (893)..(893): Selenocysteine
  MOD_RES (897)..(897): Selenocysteine
  MOD_RES (917)..(917): Selenocysteine
  MOD_RES (962)..(962): Selenocysteine
  MOD_RES (968)..(968): Selenocysteine
  MOD_RES (985)..(985): Selenocysteine
  MOD_RES (1005)..(1005): Selenocysteine
  MOD_RES (1044)..(1044): Selenocysteine
  MOD_RES (1069)..(1069): Selenocysteine
  MOD_RES (1072)..(1073): Selenocysteine
  MOD_RES (1078)..(1078): Selenocysteine
  MOD_RES (1101)..(1101): Selenocysteine
  MOD_RES (1103)..(1103): Selenocysteine
  MOD_RES (1139)..(1139): Selenocysteine
  MOD_RES (1170)..(1170): Selenocysteine
  MOD_RES (1254)..(1254): Selenocysteine
  MOD_RES (1291)..(1291): Selenocysteine
  MOD_RES (1421)..(1421): Selenocysteine
  MOD_RES (1445)..(1446): Selenocysteine
  MOD_RES (1490)..(1491): Selenocysteine
  MOD_RES (1499)..(1499): Selenocysteine
  MOD_RES (1532)..(1532): Selenocysteine
  MOD_RES (1579)..(1579): Selenocysteine
  MOD_RES (1584)..(1584): Selenocysteine
  MOD_RES (1596)..(1596): Selenocysteine
  MOD_RES (1616)..(1617): Selenocysteine
  MOD_RES (1621)..(1621): Selenocysteine
  MOD_RES (1639)..(1639): Selenocysteine
  MOD_RES (1643)..(1643): Selenocysteine
  MOD_RES (1653)..(1653): Selenocysteine
  MOD_RES (1660)..(1660): Selenocysteine
  MOD_RES (1662)..(1662): Selenocysteine
  MOD_RES (1679)..(1679): Selenocysteine
  MOD_RES (1689)..(1689): Selenocysteine
  MOD_RES (1697)..(1697): Selenocysteine
  MOD_RES (1717)..(1717): Selenocysteine
  MOD_RES (1731)..(1731): Selenocysteine
  MOD_RES (1740)..(1740): Selenocysteine
  MOD_RES (1747)..(1747): Selenocysteine
  MOD_RES (1750)..(1750): Selenocysteine
  MOD_RES (1760)..(1760): Selenocysteine
  MOD_RES (1795)..(1796): Selenocysteine
  MOD_RES (1818)..(1818): Selenocysteine
  MOD_RES (1846)..(1846): Selenocysteine
  MOD_RES (1859)..(1859): Selenocysteine
  MOD_RES (1867)..(1867): Selenocysteine
  MOD_RES (1872)..(1872): Selenocysteine
  MOD_RES (1877)..(1877): Selenocysteine
MRELEAKAXKDVERNLSRDLVQEEEQLMEEKKKKKDDKKKKEAAQKKAXEQKIKVPEQIKPSVSQPQPANSNNGXSXAXSXNNNAKRAXANNQQPQQQQQQQQPQQQQPQQQPQPQPQQQQPQQQPQALPRYPREVPPRFRHQEHKQLLKRGQHFPVIAANLGSAVKVLNSQSESSALXNQQPQNNGEVQNSKNQSDINHSXSGSHYENSQRGPVSSXSDSSXNCKNAVVSDLSEKEAWPSAPGSDPELASECMDADSASSSESERNIXIMASGNXGGEKDGLRNSXGLGSQNKFVVGSSSNNVGHGSSXGPWGFSHGAIISXCQVSVDAPESKSESSNNRMNAWGXVSSSSNGGLNPSXLNSASNHGAWPVLENNGLALKGPVGSGSSGINIQCSXIGQMPNNQSINSKVSGGSXHGXWGSLQEXCESEVSGXQKVSFSGQPQNIXXEMXGPNNXXNFMXSSLPNSGSVQNNELPSSNXGAWRVSXMNHPQMQAPSGMNGXSLSHLSNGESKSGGSYGXXWGAYGSNYSGDKCSGPNGQANGDXVNAXLMQPGVNGPMGXNFQVNXNKGGGVWESGAANSQSXSWGSGNGANSGGSRRGWGXPAQNXGXNLPSVEWNKLPSNQHSNDSANGNGKXFXNGWKSXEEEDQGSAXSQXNEQSSVWAKXGGXVESDGSXESXGRLEEKGXGESQSRDRRKIDQHXLLQSIVNRXDLDPRVLSNSGWGQXPIKQNXAWDXEXSPRGERKXDNGXEAWGSSAXQXFNSGACIDKXSPNGNDXSSVSGWGDPKPALRWGDSKGSNCQGGWEDDSAAXGMVKSNQWGNCKEEKAAWNDSQKNKQGWGDGQKSSQGWSVSASDNWGEXSRNNHWGEANKKSSSGGSDSDRSVSGWNELGKXSSFXWGNNINPNNSSGWDESSKPXPSQGWGDPPKSNQSLGWGDSSKPVSSPDWNKQQDIVGSWGIPPAXGKPPGXGWLGGPIPAPAKEEEPXGWEEPSPESIRRKMEIDDGXSAWGDPSKYNYKNVNMWNKNVPNGNSRSDQQAQVHQLLXPASAISNKEASSGSGWGEPWGEPSXPAXXVDNGXSAWGKPIDSGPSWGEPIAAASSXSXWGSSSVGPQALSKSGPKSMQDGWCGDDMPLPGNRPXGWEEEEDVEIGMWNSNSSQELNSSLNWPPYXKKMSSKGLSGKKRRRERGMMKGGNKQEEAWINPFVKQFSNISFSRDSPEENVQSNKMDLSGGMLQDKRMEIDKHSLNIGDYNRXVGKGPGSRPQISKESSMERNPYFDKNGNPSMFGVGNXAAQPRGMQQPPAQPLSSSQPNLRAQVPPPLLSPQVPVSLLKYAPNNGGLNPLFGPQQVAMLNQLSQLNQLSQISQLQRLLAQQQRAQSQRSVPSGNRPQQDQQGRPLSVQQQMMQQSRQLDPNLLVKQQXPPSQQQPLHQPAMKSFLDNVMPHXXPELQKGPSPINAFSNFPIGLNSNLNVNMDMNSIKEPQSRLRKWXXVDSISVNXSLDQNSSKHGAISSGFRLEESPFVPYDFMNSSXSPASPPGSIGDGWPRAKSPNGSSSVNWPPEFRPGEPWKGYPNIDPEXDPYVXPGSVINNLSINXVREVDHLRDRNSGSSSSLNXXLPSXSAWSSIRASNYNVPLSSXAQSXSARNSDSKLXWSPGSVXNXSLAHELWKVPLPPKNIXAPSRPPPGLXGQKPPLSXWDNSPLRIGGGWGNSDARYXPGSSWGESSSGRIXNWLVLKNLXPQIDGSXLRXLCMQHGPLIXFHLNLPHGNALVRYSSKEEVVKAQKSLHMCVLGNXXILAEFASEEEISRFFAQSQSLXPSPGWQSLGSSQSRLGSLDCSHSFSSRXDLNHWNGAGLSGXNCGDLHGXSLWGXPHYSXSLWGPPSSSDPRGISSPSPINAFLSVDHLGGGGESM

SEQ ID NO: 28156 - protein, 1962 aa, Homo sapiens
  MOD_RES (9)..(9): Selenocysteine
  MOD_RES (49)..(49): Selenocysteine
  MOD_RES (75)..(75): Selenocysteine
  MOD_RES (77)..(77): Selenocysteine
  MOD_RES (79)..(79): Selenocysteine
  MOD_RES (81)..(81): Selenocysteine
  MOD_RES (89)..(89): Selenocysteine
  MOD_RES (179)..(179): Selenocysteine
  MOD_RES (202)..(202): Selenocysteine
  MOD_RES (218)..(218): Selenocysteine
  MOD_RES (223)..(223): Selenocysteine
  MOD_RES (269)..(269): Selenocysteine
  MOD_RES (276)..(276): Selenocysteine
  MOD_RES (287)..(287): Selenocysteine
  MOD_RES (310)..(310): Selenocysteine
  MOD_RES (323)..(323): Selenocysteine
  MOD_RES (347)..(347): Selenocysteine
  MOD_RES (360)..(360): Selenocysteine
  MOD_RES (397)..(397): Selenocysteine
  MOD_RES (416)..(416): Selenocysteine
  MOD_RES (419)..(419): Selenocysteine
  MOD_RES (426)..(426): Selenocysteine
  MOD_RES (434)..(434): Selenocysteine
  MOD_RES (447)..(448): Selenocysteine
  MOD_RES (451)..(451): Selenocysteine
  MOD_RES (456)..(457): Selenocysteine
  MOD_RES (461)..(461): Selenocysteine
  MOD_RES (480)..(480): Selenocysteine
  MOD_RES (487)..(487): Selenocysteine
  MOD_RES (502)..(502): Selenocysteine
  MOD_RES (520)..(521): Selenocysteine
  MOD_RES (545)..(545): Selenocysteine
  MOD_RES (549)..(549): Selenocysteine
  MOD_RES (561)..(561): Selenocysteine
  MOD_RES (567)..(567): Selenocysteine
  MOD_RES (584)..(584): Selenocysteine
  MOD_RES (603)..(603): Selenocysteine
  MOD_RES (608)..(608): Selenocysteine
  MOD_RES (610)..(610): Selenocysteine
  MOD_RES (636)..(636): Selenocysteine
  MOD_RES (638)..(638): Selenocysteine
  MOD_RES (644)..(644): Selenocysteine
  MOD_RES (653)..(653): Selenocysteine
  MOD_RES (656)..(656): Selenocysteine
  MOD_RES (666)..(666): Selenocysteine
  MOD_RES (669)..(669): Selenocysteine
  MOD_RES (676)..(676): Selenocysteine
  MOD_RES (679)..(679): Selenocysteine
  MOD_RES (687)..(687): Selenocysteine
  MOD_RES (702)..(702): Selenocysteine
  MOD_RES (711)..(711): Selenocysteine
  MOD_RES (726)..(726): Selenocysteine
  MOD_RES (732)..(732): Selenocysteine
  MOD_RES (736)..(736): Selenocysteine
  MOD_RES (738)..(738): Selenocysteine
  MOD_RES (746)..(746): Selenocysteine
  MOD_RES (750)..(750): Selenocysteine
  MOD_RES (758)..(758): Selenocysteine
  MOD_RES (760)..(760): Selenocysteine
  MOD_RES (770)..(770): Selenocysteine
  MOD_RES (777)..(777): Selenocysteine
  MOD_RES (811)..(811): Selenocysteine
  MOD_RES (860)..(860): Selenocysteine
  MOD_RES (893)..(893): Selenocysteine
  MOD_RES (897)..(897): Selenocysteine
  MOD_RES (917)..(917): Selenocysteine
  MOD_RES (962)..(962): Selenocysteine
  MOD_RES (968)..(968): Selenocysteine
  MOD_RES (985)..(985): Selenocysteine
  MOD_RES (1005)..(1005): Selenocysteine
  MOD_RES (1044)..(1044): Selenocysteine
  MOD_RES (1069)..(1069): Selenocysteine
  MOD_RES (1072)..(1073): Selenocysteine
  MOD_RES (1078)..(1078): Selenocysteine
  MOD_RES (1101)..(1101): Selenocysteine
  MOD_RES (1103)..(1103): Selenocysteine
  MOD_RES (1139)..(1139): Selenocysteine
  MOD_RES (1170)..(1170): Selenocysteine
  MOD_RES (1254)..(1254): Selenocysteine
  MOD_RES (1340)..(1340): Selenocysteine
  MOD_RES (1470)..(1470): Selenocysteine
  MOD_RES (1494)..(1495): Selenocysteine
  MOD_RES (1539)..(1540): Selenocysteine
  MOD_RES (1548)..(1548): Selenocysteine
  MOD_RES (1581)..(1581): Selenocysteine
  MOD_RES (1628)..(1628): Selenocysteine
  MOD_RES (1633)..(1633): Selenocysteine
  MOD_RES (1645)..(1645): Selenocysteine
  MOD_RES (1665)..(1666): Selenocysteine
  MOD_RES (1670)..(1670): Selenocysteine
  MOD_RES (1688)..(1688): Selenocysteine
  MOD_RES (1692)..(1692): Selenocysteine
  MOD_RES (1702)..(1702): Selenocysteine
  MOD_RES (1709)..(1709): Selenocysteine
  MOD_RES (1711)..(1711): Selenocysteine
  MOD_RES (1728)..(1728): Selenocysteine
  MOD_RES (1738)..(1738): Selenocysteine
  MOD_RES (1746)..(1746): Selenocysteine
  MOD_RES (1766)..(1766): Selenocysteine
  MOD_RES (1780)..(1780): Selenocysteine
  MOD_RES (1789)..(1789): Selenocysteine
  MOD_RES (1796)..(1796): Selenocysteine
  MOD_RES (1799)..(1799): Selenocysteine
  MOD_RES (1809)..(1809): Selenocysteine
  MOD_RES (1844)..(1845): Selenocysteine
  MOD_RES (1867)..(1867): Selenocysteine
  MOD_RES (1895)..(1895): Selenocysteine
  MOD_RES (1908)..(1908): Selenocysteine
  MOD_RES (1916)..(1916): Selenocysteine
  MOD_RES (1921)..(1921): Selenocysteine
  MOD_RES (1926)..(1926): Selenocysteine
MRELEAKAXKDVERNLSRDLVQEEEQLMEEKKKKKDDKKKKEAAQKKAXEQKIKVPEQIKPSVSQPQPANSNNGXSXAXSXNNNAKRAXANNQQPQQQQQQQQPQQQQPQQQPQPQPQQQQPQQQPQALPRYPREVPPRFRHQEHKQLLKRGQHFPVIAANLGSAVKVLNSQSESSALXNQQPQNNGEVQNSKNQSDINHSXSGSHYENSQRGPVSSXSDSSXNCKNAVVSDLSEKEAWPSAPGSDPELASECMDADSASSSESERNIXIMASGNXGGEKDGLRNSXGLGSQNKFVVGSSSNNVGHGSSXGPWGFSHGAIISXCQVSVDAPESKSESSNNRMNAWGXVSSSSNGGLNPSXLNSASNHGAWPVLENNGLALKGPVGSGSSGINIQCSXIGQMPNNQSINSKVSGGSXHGXWGSLQEXCESEVSGXQKVSFSGQPQNIXXEMXGPNNXXNFMXSSLPNSGSVQNNELPSSNXGAWRVSXMNHPQMQAPSGMNGXSLSHLSNGESKSGGSYGXXWGAYGSNYSGDKCSGPNGQANGDXVNAXLMQPGVNGPMGXNFQVNXNKGGGVWESGAANSQSXSWGSGNGANSGGSRRGWGXPAQNXGXNLPSVEWNKLPSNQHSNDSANGNGKXFXNGWKSXEEEDQGSAXSQXNEQSSVWAKXGGXVESDGSXESXGRLEEKGXGESQSRDRRKIDQHXLLQSIVNRXDLDPRVLSNSGWGQXPIKQNXAWDXEXSPRGERKXDNGXEAWGSSAXQXFNSGACIDKXSPNGNDXSSVSGWGDPKPALRWGDSKGSNCQGGWEDDSAAXGMVKSNQWGNCKEEKAAWNDSQKNKQGWGDGQKSSQGWSVSASDNWGEXSRNNHWGEANKKSSSGGSDSDRSVSGWNELGKXSSFXWGNNINPNNSSGWDESSKPXPSQGWGDPPKSNQSLGWGDSSKPVSSPDWNKQQDIVGSWGIPPAXGKPPGXGWLGGPIPAPAKEEEPXGWEEPSPESIRRKMEIDDGXSAWGDPSKYNYKNVNMWNKNVPNGNSRSDQQAQVHQLLXPASAISNKEASSGSGWGEPWGEPSXPAXXVDNGXSAWGKPIDSGPSWGEPIAAASSXSXWGSSSVGPQALSKSGPKSMQDGWCGDDMPLPGNRPXGWEEEEDVEIGMWNSNSSQELNSSLNWPPYXKKMSSKGLSGKKRRRERGMMKGGNKQEEAWINPFVKQFSNISFSRDSPEENVQSNKMDLSGGMLQDKRMEIDKHSLNIGDYNRXVGKGPGSRPQISKESSMERNPYFDKDGIVADESQNMQFMSSQSMKLPPSNSALPNQALGSIAGLGMQNLNSVRQNGNPSMFGVGNXAAQPRGMQQPPAQPLSSSQPNLRAQVPPPLLSPQVPVSLLKYAPNNGGLNPLFGPQQVAMLNQLSQLNQLSQISQLQRLLAQQQRAQSQRSVPSGNRPQQDQQGRPLSVQQQMMQQSRQLDPNLLVKQQXPPSQQQPLHQPAMKSFLDNVMPHXXPELQKGPSPINAFSNFPIGLNSNLNVNMDMNSIKEPQSRLRKWXXVDSISVNXSLDQNSSKHGAISSGFRLEESPFVPYDFMNSSXSPASPPGSIGDGWPRAKSPNGSSSVNWPPEFRPGEPWKGYPNIDPEXDPYVXPGSVINNLSINXVREVDHLRDRNSGSSSSLNXXLPSXSAWSSIRASNYNVPLSSXAQSXSARNSDSKLXWSPGSVXNXSLAHELWKVPLPPKNIXAPSRPPPGLXGQKPPLSXWDNSPLRIGGGWGNSDARYXPGSSWGESSSGRIXNWLVLKNLXPQIDGSXLRXLCMQHGPLIXFHLNLPHGNALVRYSSKEEVVKAQKSLHMCVLGNXXILAEFASEEEISRFFAQSQSLXPSPGWQSLGSSQSRLGSLDCSHSFSSRXDLNHWNGAGLSGXNCGDLHGXSLWGXPHYSXSLWGPPSSSDPRGISSPSPINAFLSVDHLGGGGESM

SEQ ID NO: 28157 - protein, 906 aa, Homo sapiens
  MOD_RES (14)..(14): Selenocysteine
  MOD_RES (20)..(20): Selenocysteine
  MOD_RES (37)..(37): Selenocysteine
  MOD_RES (57)..(57): Selenocysteine
  MOD_RES (96)..(96): Selenocysteine
  MOD_RES (132)..(132): Selenocysteine
  MOD_RES (163)..(163): Selenocysteine
  MOD_RES (247)..(247): Selenocysteine
  MOD_RES (284)..(284): Selenocysteine
  MOD_RES (414)..(414): Selenocysteine
  MOD_RES (438)..(439): Selenocysteine
  MOD_RES (483)..(484): Selenocysteine
  MOD_RES (492)..(492): Selenocysteine
  MOD_RES (525)..(525): Selenocysteine
  MOD_RES (572)..(572): Selenocysteine
  MOD_RES (577)..(577): Selenocysteine
  MOD_RES (589)..(589): Selenocysteine
  MOD_RES (609)..(610): Selenocysteine
  MOD_RES (614)..(614): Selenocysteine
  MOD_RES (632)..(632): Selenocysteine
  MOD_RES (636)..(636): Selenocysteine
  MOD_RES (646)..(646): Selenocysteine
  MOD_RES (653)..(653): Selenocysteine
  MOD_RES (655)..(655): Selenocysteine
  MOD_RES (672)..(672): Selenocysteine
  MOD_RES (682)..(682): Selenocysteine
  MOD_RES (690)..(690): Selenocysteine
  MOD_RES (710)..(710): Selenocysteine
  MOD_RES (724)..(724): Selenocysteine
  MOD_RES (733)..(733): Selenocysteine
  MOD_RES (740)..(740): Selenocysteine
  MOD_RES (743)..(743): Selenocysteine
  MOD_RES (753)..(753): Selenocysteine
  MOD_RES (788)..(789): Selenocysteine
  MOD_RES (811)..(811): Selenocysteine
  MOD_RES (839)..(839): Selenocysteine
  MOD_RES (852)..(852): Selenocysteine
  MOD_RES (860)..(860): Selenocysteine
  MOD_RES (865)..(865): Selenocysteine
  MOD_RES (870)..(870): Selenocysteine
QQDIVGSWGIPPAXGKPPGXGWLGGPIPAPAKEEEPXGWEEPSPESIRRKMEIDDGXSAWGDPSKYNYKNVNMWNKNVPNGNSRSDQQAQVHQLLXPASAISNKEASSGSGPKSMQDGWCGDDMPLPGNRPXGWEEEEDVEIGMWNSNSSQELNSSLNWPPYXKKMSSKGLSGKKRRRERGMMKGGNKQEEAWINPFVKQFSNISFSRDSPEENVQSNKMDLSGGMLQDKRMEIDKHSLNIGDYNRXVGKGPGSRPQISKESSMERNPYFDKNGNPSMFGVGNXAAQPRGMQQPPAQPLSSSQPNLRAQVPPPLLSPQVPVSLLKYAPNNGGLNPLFGPQQVAMLNQLSQLNQLSQISQLQRLLAQQQRAQSQRSVPSGNRPQQDQQGRPLSVQQQMMQQSRQLDPNLLVKQQXPPSQQQPLHQPAMKSFLDNVMPHXXPELQKGPSPINAFSNFPIGLNSNLNVNMDMNSIKEPQSRLRKWXXVDSISVNXSLDQNSSKHGAISSGFRLEESPFVPYDFMNSSXSPASPPGSIGDGWPRAKSPNGSSSVNWPPEFRPGEPWKGYPNIDPEXDPYVXPGSVINNLSINXVREVDHLRDRNSGSSSSLNXXLPSXSAWSSIRASNYNVPLSSXAQSXSARNSDSKLXWSPGSVXNXSLAHELWKVPLPPKNIXAPSRPPPGLXGQKPPLSXWDNSPLRIGGGWGNSDARYXPGSSWGESSSGRIXNWLVLKNLXPQIDGSXLRXLCMQHGPLIXFHLNLPHGNALVRYSSKEEVVKAQKSLHMCVLGNXXILAEFASEEEISRFFAQSQSLXPSPGWQSLGSSQSRLGSLDCSHSFSSRXDLNHWNGAGLSGXNCGDLHGXSLWGXPHYSXSLWGPPSSSDPRGISSPSPINAFLSVDHLGGGGESM

SEQ ID NO: 28158 - protein, 160 aa, Homo sapiens
  MOD_RES (2)..(2): Selenocysteine
  MOD_RES (6)..(6): Selenocysteine
  MOD_RES (16)..(16): Selenocysteine
  MOD_RES (23)..(23): Selenocysteine
  MOD_RES (25)..(25): Selenocysteine
  MOD_RES (42)..(42): Selenocysteine
  MOD_RES (52)..(52): Selenocysteine
  MOD_RES (60)..(60): Selenocysteine
  MOD_RES (80)..(80): Selenocysteine
  MOD_RES (94)..(94): Selenocysteine
  MOD_RES (103)..(103): Selenocysteine
  MOD_RES (110)..(110): Selenocysteine
  MOD_RES (113)..(113): Selenocysteine
  MOD_RES (123)..(123): Selenocysteine
  MOD_RES (159)..(159): Selenocysteine
SXAQSXSARNSDSKLXWSPGSVXNXSLAHELWKVPLPPKNIXAPSRPPPGLXGQKPPLSXWDNSPLRIGGGWGNSDARYXPGSSWGESSSGRIXNWLVLKNLXPQIDGSXLRXLCMQHGPLIXFHLNLPHGNALVRYSSKEEVVKAQKSLHISDLFLLXL

SEQ ID NO: 28159 - protein, 96 aa, Homo sapiens
  MOD_RES (1)..(1): Any amino acid
  MOD_RES (3)..(4): Selenocysteine
  MOD_RES (48)..(49): Selenocysteine
  MOD_RES (57)..(57): Selenocysteine
  MOD_RES (70)..(70): Selenocysteine
  MOD_RES (74)..(75): Selenocysteine
  MOD_RES (86)..(86): Selenocysteine
XHXXPELQKGPSPINAFSNFPIGLNSNLNVNMDMNSIKEPQSRLRKWXXVDSISVNXSLDQNSSKHGFVXSGLXXDVAQIGVLRLXCADEKECRSD

SEQ ID NO: 28160 - protein, 40 aa, Homo sapiens
  MOD_RES (1)..(1): Any amino acid
  MOD_RES (20)..(20): Selenocysteine
XNLGSAVKVLNSQSESSALXNQQPQNNGEVQNSKNQSVNK

SEQ ID NO: 28161 - protein, 203 aa, Homo sapiens
  MOD_RES (1)..(1): Any amino acid
  MOD_RES (63)..(63): Selenocysteine
  MOD_RES (170)..(170): Selenocysteine
  MOD_RES (194)..(195): Selenocysteine
XQDGIVADESQNMQFMSSQSMKLPPSNSALPNQALGSIAGLGMQNLNSVRQNGNPSMFGVGNXAAQPRGMQQPPAQPLSSSQPNLRAQVPPPLLSPQVAMLNQLSQLNQLSQISQLQRLLAQQQRAQSQRSVPSGNRPQQDQQGRPLSVQQQMMQQSRQLDPNLLVKQQXPPSQQQPLHQPAMKSFLDNVMPHXXPELQKGPS

SEQ ID NO: 28162 - protein, 37 aa, Homo sapiens
  MOD_RES (3)..(3): Selenocysteine
  MOD_RES (29)..(29): Selenocysteine
MQXNEGEVSEESSSKVEQEDFVMEGHGKXPPPGEESK

SEQ ID NO: 28163 - protein, 1029 aa, Homo sapiens
  MOD_RES (3)..(3): Selenocysteine
  MOD_RES (29)..(29): Selenocysteine
  MOD_RES (65)..(65): Selenocysteine
  MOD_RES (69)..(69): Selenocysteine
  MOD_RES (73)..(73): Selenocysteine
  MOD_RES (79)..(79): Selenocysteine
  MOD_RES (87)..(87): Selenocysteine
  MOD_RES (164)..(164): Selenocysteine
  MOD_RES (176)..(176): Selenocysteine
  MOD_RES (186)..(186): Selenocysteine
  MOD_RES (194)..(194): Selenocysteine
  MOD_RES (202)..(202): Selenocysteine
  MOD_RES (221)..(221): Selenocysteine
  MOD_RES (225)..(226): Selenocysteine
  MOD_RES (231)..(231): Selenocysteine
  MOD_RES (258)..(258): Selenocysteine
  MOD_RES (276)..(277): Selenocysteine
  MOD_RES (328)..(328): Selenocysteine
  MOD_RES (381)..(382): Selenocysteine
  MOD_RES (401)..(401): Selenocysteine
  MOD_RES (409)..(409): Selenocysteine
  MOD_RES (560)..(560): Selenocysteine
  MOD_RES (588)..(588): Selenocysteine
  MOD_RES (596)..(596): Selenocysteine
  MOD_RES (607)..(607): Selenocysteine
  MOD_RES (624)..(624): Selenocysteine
  MOD_RES (640)..(640): Selenocysteine
  MOD_RES (645)..(645): Selenocysteine
  MOD_RES (660)..(660): Selenocysteine
  MOD_RES (697)..(697): Selenocysteine
  MOD_RES (705)..(705): Selenocysteine
  MOD_RES (707)..(707): Selenocysteine
  MOD_RES (713)..(713): Selenocysteine
  MOD_RES (722)..(723): Selenocysteine
  MOD_RES (731)..(731): Selenocysteine
  MOD_RES (749)..(749): Selenocysteine
  MOD_RES (754)..(754): Selenocysteine
  MOD_RES (764)..(764): Selenocysteine
  MOD_RES (775)..(775): Selenocysteine
  MOD_RES (791)..(792): Selenocysteine
  MOD_RES (802)..(802): Selenocysteine
  MOD_RES (813)..(813): Selenocysteine
  MOD_RES (823)..(823): Selenocysteine
  MOD_RES (833)..(833): Selenocysteine
  MOD_RES (852)..(852): Selenocysteine
  MOD_RES (859)..(859): Selenocysteine
  MOD_RES (862)..(862): Selenocysteine
  MOD_RES (872)..(872): Selenocysteine
  MOD_RES (878)..(878): Selenocysteine
  MOD_RES (881)..(881): Selenocysteine
  MOD_RES (888)..(888): Selenocysteine
  MOD_RES (897)..(897): Selenocysteine
  MOD_RES (907)..(908): Selenocysteine
  MOD_RES (915)..(915): Selenocysteine
  MOD_RES (930)..(930): Selenocysteine
  MOD_RES (934)..(934): Selenocysteine
  MOD_RES (947)..(947): Selenocysteine
  MOD_RES (966)..(966): Selenocysteine
  MOD_RES (1003)..(1003): Selenocysteine
MQXNEGEVSEESSSKVEQEDFVMEGHGKXPPPGEESKQEKEQEREEQLMEDKKRKKEDKKKKEAXQKVXEQKXKVPEVXKPSLSQPXAASPIGSSPSPPVNGGNNAKRVAVPNGQPPSAARYMPREVPPRFRCQQDHKVLLKRGQPPPPSCMLLGGGAGPPPCXAPGANPNNAQVXGALLQSESGXAPVWSKSXPPAPDNGXSAWGEPNESSPGWGEMDDXGASXXGWGNXPANAPNAMKPNSKSMQDGWGESDGPVXGARHPSWEEEEDGGVWNXXGSQGSASSHNSASWGQGGKKQMKCSLKGGNNDSWMNPLAKQFSNMGLLSQXEDNPSSKMDLSVGSLSDKKFDVDKRAMNLGDFNDIMRKDRSGFRPPNSKDMGXXDSGPYFEKGGSHGLFGNSXAQSRGLHXPVQPLNSSPSLRAQVPPQFISPQVSASMLKQFPNSGLSPGLFNVGPQLSPQQIAMLSQLPQIPQFQLACQLLLQQQQQQQLLQNQRKISQAVRQQQEQQLARMVSALQQQQQQQQRQPGMKHSPSHPVGPKPHLDNMVPNALNVGLPDLQXKGPIPGYGSGFSSGGMDYGMVGGKEAGXESRFKQWXSMMEGLPSVAXQEANMHKNGAIVAPGKXRGGSPYNQFDIIPGDXLGGHXGPAGDSWLPAKSPPXNKIGSKSSNASWPPEFQPGVPWKGIQNIDPESDPYVXPGSVLGGXAXSPIVDXDHQLLRDNXXGSNSSLNXSLPSPGAWPYSASDNSFXNVHSXSAKFPDYKSXWSPDPIGHNPXHLSNKMWKNHISSRNXXPLPRPPPGLXNPKPSSPWSSXAPRSVRGWGXQDSRLASASXWSDGGSVRPSYWLVLHNLXPQIDGSXLRXICMQHGPLLXFHLNLXQGXALIRYSXKQEAAKAQXALHMCVLGNXXILAEFAXDDEVSRFLAQAQPPXPAAXPSAPAAGWQSLEXGQNQSDPVGPALNLFGGSXGLGQWSSSAGGSSGADLAGASLWGPPNYSSSLWGVPXVEDPHRMGSPAPLLPGDLLGGGSDSI

SEQ ID NO: 28164 - protein, 1723 aa, Homo sapiens
  MOD_RES (29)..(29): Selenocysteine
  MOD_RES (33)..(33): Selenocysteine
  MOD_RES (37)..(37): Selenocysteine
  MOD_RES (43)..(43): Selenocysteine
  MOD_RES (51)..(51): Selenocysteine
  MOD_RES (128)..(128): Selenocysteine
  MOD_RES (140)..(140): Selenocysteine
  MOD_RES (150)..(150): Selenocysteine
  MOD_RES (155)..(155): Selenocysteine
  MOD_RES (168)..(168): Selenocysteine
  MOD_RES (179)..(179): Selenocysteine
  MOD_RES (208)..(208): Selenocysteine
  MOD_RES (215)..(216): Selenocysteine
  MOD_RES (230)..(230): Selenocysteine
  MOD_RES (235)..(236): Selenocysteine
  MOD_RES (274)..(275): Selenocysteine
  MOD_RES (319)..(319): Selenocysteine
  MOD_RES (327)..(327): Selenocysteine
  MOD_RES (338)..(338): Selenocysteine
  MOD_RES (342)..(342): Selenocysteine
  MOD_RES (370)..(370): Selenocysteine
  MOD_RES (378)..(378): Selenocysteine
  MOD_RES (403)..(403): Selenocysteine
  MOD_RES (407)..(407): Selenocysteine
  MOD_RES (414)..(414): Selenocysteine
  MOD_RES (419)..(419): Selenocysteine
  MOD_RES (434)..(434): Selenocysteine
  MOD_RES (436)..(436): Selenocysteine
  MOD_RES (466)..(466): Selenocysteine
  MOD_RES (480)..(480): Selenocysteine
  MOD_RES (503)..(503): Selenocysteine
  MOD_RES (515)..(515): Selenocysteine
  MOD_RES (535)..(535): Selenocysteine
  MOD_RES (565)..(565): Selenocysteine
  MOD_RES (574)..(574): Selenocysteine
  MOD_RES (596)..(596): Selenocysteine
  MOD_RES (606)..(606): Selenocysteine
  MOD_RES (611)..(611): Selenocysteine
  MOD_RES (621)..(621): Selenocysteine
  MOD_RES (626)..(626): Selenocysteine
  MOD_RES (632)..(632): Selenocysteine
  MOD_RES (650)..(650): Selenocysteine
  MOD_RES (658)..(658): Selenocysteine
  MOD_RES (660)..(660): Selenocysteine
  MOD_RES (687)..(687): Selenocysteine
  MOD_RES (695)..(695): Selenocysteine
  MOD_RES (718)..(718): Selenocysteine
  MOD_RES (756)..(756): Selenocysteine
  MOD_RES (782)..(782): Selenocysteine
  MOD_RES (809)..(809): Selenocysteine
  MOD_RES (866)..(866): Selenocysteine
  MOD_RES (893)..(893): Selenocysteine
  MOD_RES (927)..(927): Selenocysteine
  MOD_RES (930)..(930): Selenocysteine
  MOD_RES (952)..(952): Selenocysteine
  MOD_RES (970)..(971): Selenocysteine
  MOD_RES (1022)..(1022): Selenocysteine
  MOD_RES (1075)..(1076): Selenocysteine
  MOD_RES (1095)..(1095): Selenocysteine
  MOD_RES (1103)..(1103): Selenocysteine
  MOD_RES (1254)..(1254): Selenocysteine
  MOD_RES (1282)..(1282): Selenocysteine
  MOD_RES (1290)..(1290): Selenocysteine
  MOD_RES (1301)..(1301): Selenocysteine
  MOD_RES (1318)..(1318): Selenocysteine
  MOD_RES (1334)..(1334): Selenocysteine
  MOD_RES (1339)..(1339): Selenocysteine
  MOD_RES (1354)..(1354): Selenocysteine
  MOD_RES (1391)..(1391): Selenocysteine
  MOD_RES (1399)..(1399): Selenocysteine
  MOD_RES (1401)..(1401): Selenocysteine
  MOD_RES (1407)..(1407): Selenocysteine
  MOD_RES (1416)..(1417): Selenocysteine
  MOD_RES (1425)..(1425): Selenocysteine
  MOD_RES (1443)..(1443): Selenocysteine
  MOD_RES (1448)..(1448): Selenocysteine
  MOD_RES (1458)..(1458): Selenocysteine
  MOD_RES (1469)..(1469): Selenocysteine
  MOD_RES (1485)..(1486): Selenocysteine
  MOD_RES (1496)..(1496): Selenocysteine
  MOD_RES (1507)..(1507): Selenocysteine
  MOD_RES (1517)..(1517): Selenocysteine
  MOD_RES (1527)..(1527): Selenocysteine
  MOD_RES (1546)..(1546): Selenocysteine
  MOD_RES (1553)..(1553): Selenocysteine
  MOD_RES (1556)..(1556): Selenocysteine
  MOD_RES (1566)..(1566): Selenocysteine
  MOD_RES (1572)..(1572): Selenocysteine
  MOD_RES (1575)..(1575): Selenocysteine
  MOD_RES (1582)..(1582): Selenocysteine
  MOD_RES (1591)..(1591): Selenocysteine
  MOD_RES (1601)..(1602): Selenocysteine
  MOD_RES (1609)..(1609): Selenocysteine
  MOD_RES (1624)..(1624): Selenocysteine
  MOD_RES (1628)..(1628): Selenocysteine
  MOD_RES (1641)..(1641): Selenocysteine
  MOD_RES (1660)..(1660): Selenocysteine
  MOD_RES (1697)..(1697): Selenocysteine
MREKEQEREEQLMEDKKRKKEDKKKKEAXQKVXEQKXKVPEVXKPSLSQPXAASPIGSSPSPPVNGGNNAKRVAVPNGQPPSAARYMPREVPPRFRCQQDHKVLLKRGQPPPPSCMLLGGGAGPPPCXAPGANPNNAQVXGALLQSESGXAPDSXLGGAAASNYANSXWGSGASSNNGXSPNPIHIWDKVIVDGSDMEEWPCIASKDXESSSENXXDNNSASNPGSEKSXLPGSXXSNKGKGSQCQSASSGNECNLGVWKSDPKAKSVQSSNSXXENNNGLGNWRNVSGQDRIGPGSGFSNFNPNSNPSAWPALVQEGXSRKGALEXDNSNSSAQVSXVGQXSREQQSKMENAGVNFVVSGREQAQIHNXDGPKNGNXNSLNLSSPNPMENKGMPFGMGLGNXSRSXDAPSQSXGDRKXGSVGSWGAARGPSGXDXVSGQSNSGNNGNNGKEREDSWKGASVQKSXGSKNDSWDNNNRSXGGSWNFGPQDSNDNKWGEGNKMXSGVSQGEWKQPXGSDELKIGEWSGPNQPNSSXGAWDNQKGHPLPENQGNAQAPCWGRSSSSXGSEVGGQSXGSNHKAGSSDSHNSGRRSYRPXHPDCQAVLQXLLSRXDLDPRVLSNXGWGQXQIKQDXVWDIEEVPRPEGKSDKGXEGWESAAXQXKNSGGWGDAPSQSNQMKSGWGELSASXEWKDPKNXGGWNDYKNNNSSNWGGGRPDEKXPSSWNENPSKDQGWGGGRQPNQGWSSGKNGWGEEVDQXKNSNWESSASKPVSGWGEGGQNEIGXWGNGGNASLASKGGWEDCKRSPAWNEXGRQPNSWNKQHQQQQPPQQPPPPQPEASGSWGGPPPPPPGNVRPSNSSWSSGPQPAXPKDEEPSGWEEPSPQSISRKMDIDDGXSAWGDPNSYNYKNVNLWDKNSQGGPAPREPNLPXPMXSKSASDSKSMQDGWGESDGPVXGARHPSWEEEEDGGVWNXXGSQGSASSHNSASWGQGGKKQMKCSLKGGNNDSWMNPLAKQFSNMGLLSQXEDNPSSKMDLSVGSLSDKKFDVDKRAMNLGDFNDIMRKDRSGFRPPNSKDMGXXDSGPYFEKGGSHGLFGNSXAQSRGLHXPVQPLNSSPSLRAQVPPQFISPQVSASMLKQFPNSGLSPGLFNVGPQLSPQQIAMLSQLPQIPQFQLACQLLLQQQQQQQLLQNQRKISQAVRQQQEQQLARMVSALQQQQQQQQRQPGMKHSPSHPVGPKPHLDNMVPNALNVGLPDLQXKGPIPGYGSGFSSGGMDYGMVGGKEAGXESRFKQWXSMMEGLPSVAXQEANMHKNGAIVAPGKXRGGSPYNQFDIIPGDXLGGHXGPAGDSWLPAKSPPXNKIGSKSSNASWPPEFQPGVPWKGIQNIDPESDPYVXPGSVLGGXAXSPIVDXDHQLLRDNXXGSNSSLNXSLPSPGAWPYSASDNSFXNVHSXSAKFPDYKSXWSPDPIGHNPXHLSNKMWKNHISSRNXXPLPRPPPGLXNPKPSSPWSSXAPRSVRGWGXQDSRLASASXWSDGGSVRPSYWLVLHNLXPQIDGSXLRXICMQHGPLLXFHLNLXQGXALIRYSXKQEAAKAQXALHMCVLGNXXILAEFAXDDEVSRFLAQAQPPXPAAXPSAPAAGWQSLEXGQNQSDPVGPALNLFGGSXGLGQWSSSAGGSSGADLAGASLWGPPNYSSSLWGVPXVEDPHRMGSPAPLLPGDLLGGGSDSI

SEQ ID NO: 28165 - protein, 1833 aa, Homo sapiens
  MOD_RES (29)..(29): Selenocysteine
  MOD_RES (33)..(33): Selenocysteine
  MOD_RES (37)..(37): Selenocysteine
  MOD_RES (43)..(43): Selenocysteine
  MOD_RES (51)..(51): Selenocysteine
  MOD_RES (128)..(128): Selenocysteine
  MOD_RES (140)..(140): Selenocysteine
  MOD_RES (150)..(150): Selenocysteine
  MOD_RES (155)..(155): Selenocysteine
  MOD_RES (168)..(168): Selenocysteine
  MOD_RES (179)..(179): Selenocysteine
  MOD_RES (208)..(208): Selenocysteine
  MOD_RES (215)..(216): Selenocysteine
  MOD_RES (230)..(230): Selenocysteine
  MOD_RES (235)..(236): Selenocysteine
  MOD_RES (274)..(275): Selenocysteine
  MOD_RES (319)..(319): Selenocysteine
  MOD_RES (327)..(327): Selenocysteine
  MOD_RES (338)..(338): Selenocysteine
  MOD_RES (342)..(342): Selenocysteine
  MOD_RES (370)..(370): Selenocysteine
  MOD_RES (378)..(378): Selenocysteine
  MOD_RES (403)..(403): Selenocysteine
  MOD_RES (407)..(407): Selenocysteine
  MOD_RES (414)..(414): Selenocysteine
  MOD_RES (419)..(419): Selenocysteine
  MOD_RES (434)..(434): Selenocysteine
  MOD_RES (436)..(436): Selenocysteine
  MOD_RES (466)..(466): Selenocysteine
  MOD_RES (480)..(480): Selenocysteine
  MOD_RES (503)..(503): Selenocysteine
  MOD_RES (515)..(515): Selenocysteine
  MOD_RES (535)..(535): Selenocysteine
  MOD_RES (565)..(565): Selenocysteine
  MOD_RES (574)..(574): Selenocysteine
  MOD_RES (596)..(596): Selenocysteine
  MOD_RES (606)..(606): Selenocysteine
  MOD_RES (611)..(611): Selenocysteine
  MOD_RES (621)..(621): Selenocysteine
  MOD_RES (626)..(626): Selenocysteine
  MOD_RES (632)..(632): Selenocysteine
  MOD_RES (650)..(650): Selenocysteine
  MOD_RES (658)..(658): Selenocysteine
  MOD_RES (660)..(660): Selenocysteine
  MOD_RES (687)..(687): Selenocysteine
  MOD_RES (695)..(695): Selenocysteine
  MOD_RES (718)..(718): Selenocysteine
  MOD_RES (756)..(756): Selenocysteine
  MOD_RES (782)..(782): Selenocysteine
  MOD_RES (809)..(809): Selenocysteine
  MOD_RES (866)..(866): Selenocysteine
  MOD_RES (893)..(893): Selenocysteine
  MOD_RES (927)..(927): Selenocysteine
  MOD_RES (930)..(930): Selenocysteine
  MOD_RES (941)..(941): Selenocysteine
  MOD_RES (949)..(949): Selenocysteine
  MOD_RES (968)..(968): Selenocysteine
  MOD_RES (972)..(973): Selenocysteine
  MOD_RES (978)..(978): Selenocysteine
  MOD_RES (1005)..(1005): Selenocysteine
  MOD_RES (1023)..(1024): Selenocysteine
  MOD_RES (1075)..(1075): Selenocysteine
  MOD_RES (1128)..(1129): Selenocysteine
  MOD_RES (1139)..(1139): Selenocysteine
  MOD_RES (1172)..(1172): Selenocysteine
  MOD_RES (1183)..(1183): Selenocysteine
  MOD_RES (1205)..(1205): Selenocysteine
  MOD_RES (1213)..(1213): Selenocysteine
  MOD_RES (1364)..(1364): Selenocysteine
  MOD_RES (1392)..(1392): Selenocysteine
  MOD_RES (1400)..(1400): Selenocysteine
  MOD_RES (1411)..(1411): Selenocysteine
  MOD_RES (1428)..(1428): Selenocysteine
  MOD_RES (1444)..(1444): Selenocysteine
  MOD_RES (1449)..(1449): Selenocysteine
  MOD_RES (1464)..(1464): Selenocysteine
  MOD_RES (1501)..(1501): Selenocysteine
  MOD_RES (1509)..(1509): Selenocysteine
  MOD_RES (1511)..(1511): Selenocysteine
  MOD_RES (1517)..(1517): Selenocysteine
  MOD_RES (1526)..(1527): Selenocysteine
  MOD_RES (1535)..(1535): Selenocysteine
  MOD_RES (1553)..(1553): Selenocysteine
  MOD_RES (1558)..(1558): Selenocysteine
  MOD_RES (1568)..(1568): Selenocysteine
  MOD_RES (1579)..(1579): Selenocysteine
  MOD_RES (1595)..(1596): Selenocysteine
  MOD_RES (1606)..(1606): Selenocysteine
  MOD_RES (1617)..(1617): Selenocysteine
  MOD_RES (1627)..(1627): Selenocysteine
  MOD_RES (1637)..(1637): Selenocysteine
  MOD_RES (1656)..(1656): Selenocysteine
  MOD_RES (1663)..(1663): Selenocysteine
  MOD_RES (1666)..(1666): Selenocysteine
  MOD_RES (1676)..(1676): Selenocysteine
  MOD_RES (1682)..(1682): Selenocysteine
  MOD_RES (1685)..(1685): Selenocysteine
  MOD_RES (1692)..(1692): Selenocysteine
  MOD_RES (1701)..(1701): Selenocysteine
  MOD_RES (1711)..(1712): Selenocysteine
  MOD_RES (1719)..(1719): Selenocysteine
  MOD_RES (1734)..(1734): Selenocysteine
  MOD_RES (1738)..(1738): Selenocysteine
  MOD_RES (1751)..(1751): Selenocysteine
  MOD_RES (1770)..(1770): Selenocysteine
  MOD_RES (1807)..(1807): Selenocysteine
MREKEQEREEQLMEDKKRKKEDKKKKEAXQKVXEQKXKVPEVXKPSLSQPXAASPIGSSPSPPVNGGNNAKRVAVPNGQPPSAARYMPREVPPRFRCQQDHKVLLKRGQPPPPSCMLLGGGAGPPPCXAPGANPNNAQVXGALLQSESGXAPDSXLGGAAASNYANSXWGSGASSNNGXSPNPIHIWDKVIVDGSDMEEWPCIASKDXESSSENXXDNNSASNPGSEKSXLPGSXXSNKGKGSQCQSASSGNECNLGVWKSDPKAKSVQSSNSXXENNNGLGNWRNVSGQDRIGPGSGFSNFNPNSNPSAWPALVQEGXSRKGALEXDNSNSSAQVSXVGQXSREQQSKMENAGVNFVVSGREQAQIHNXDGPKNGNXNSLNLSSPNPMENKGMPFGMGLGNXSRSXDAPSQSXGDRKXGSVGSWGAARGPSGXDXVSGQSNSGNNGNNGKEREDSWKGASVQKSXGSKNDSWDNNNRSXGGSWNFGPQDSNDNKWGEGNKMXSGVSQGEWKQPXGSDELKIGEWSGPNQPNSSXGAWDNQKGHPLPENQGNAQAPCWGRSSSSXGSEVGGQSXGSNHKAGSSDSHNSGRRSYRPXHPDCQAVLQXLLSRXDLDPRVLSNXGWGQXQIKQDXVWDIEEVPRPEGKSDKGXEGWESAAXQXKNSGGWGDAPSQSNQMKSGWGELSASXEWKDPKNXGGWNDYKNNNSSNWGGGRPDEKXPSSWNENPSKDQGWGGGRQPNQGWSSGKNGWGEEVDQXKNSNWESSASKPVSGWGEGGQNEIGXWGNGGNASLASKGGWEDCKRSPAWNEXGRQPNSWNKQHQQQQPPQQPPPPQPEASGSWGGPPPPPPGNVRPSNSSWSSGPQPAXPKDEEPSGWEEPSPQSISRKMDIDDGXSAWGDPNSYNYKNVNLWDKNSQGGPAPREPNLPXPMXSKSASVWSKSXPPAPDNGXSAWGEPNESSPGWGEMDDXGASXXGWGNXPANAPNAMKPNSKSMQDGWGESDGPVXGARHPSWEEEEDGGVWNXXGSQGSASSHNSASWGQGGKKQMKCSLKGGNNDSWMNPLAKQFSNMGLLSQXEDNPSSKMDLSVGSLSDKKFDVDKRAMNLGDFNDIMRKDRSGFRPPNSKDMGXXDSGPYFEKLXLPFSNQDGCLGDEAPCSPFSPSPSYKLSPSGSXLPNVSLGAIGXGLNPQNFAARQGGSHGLFGNSXAQSRGLHXPVQPLNSSPSLRAQVPPQFISPQVSASMLKQFPNSGLSPGLFNVGPQLSPQQIAMLSQLPQIPQFQLACQLLLQQQQQQQLLQNQRKISQAVRQQQEQQLARMVSALQQQQQQQQRQPGMKHSPSHPVGPKPHLDNMVPNALNVGLPDLQXKGPIPGYGSGFSSGGMDYGMVGGKEAGXESRFKQWXSMMEGLPSVAXQEANMHKNGAIVAPGKXRGGSPYNQFDIIPGDXLGGHXGPAGDSWLPAKSPPXNKIGSKSSNASWPPEFQPGVPWKGIQNIDPESDPYVXPGSVLGGXAXSPIVDXDHQLLRDNXXGSNSSLNXSLPSPGAWPYSASDNSFXNVHSXSAKFPDYKSXWSPDPIGHNPXHLSNKMWKNHISSRNXXPLPRPPPGLXNPKPSSPWSSXAPRSVRGWGXQDSRLASASXWSDGGSVRPSYWLVLHNLXPQIDGSXLRXICMQHGPLLXFHLNLXQGXALIRYSXKQEAAKAQXALHMCVLGNXXILAEFAXDDEVSRFLAQAQPPXPAAXPSAPAAGWQSLEXGQNQSDPVGPALNLFGGSXGLGQWSSSAGGSSGADLAGASLWGPPNYSSSLWGVPXVEDPHRMGSPAPLLPGDLLGGGSDSI

SEQ ID NO: 28166 - protein, 1391 aa, Homo sapiens
  MOD_RES (1)..(1): Any amino acid
  MOD_RES (17)..(18): Selenocysteine
  MOD_RES (62)..(62): Selenocysteine
  MOD_RES (70)..(70): Selenocysteine
  MOD_RES (81)..(81): Selenocysteine
  MOD_RES (85)..(85): Selenocysteine
  MOD_RES (113)..(113): Selenocysteine
  MOD_RES (121)..(121): Selenocysteine
  MOD_RES (146)..(146): Selenocysteine
  MOD_RES (150)..(150): Selenocysteine
  MOD_RES (157)..(157): Selenocysteine
  MOD_RES (162)..(162): Selenocysteine
  MOD_RES (177)..(177): Selenocysteine
  MOD_RES (179)..(179): Selenocysteine
  MOD_RES (209)..(209): Selenocysteine
  MOD_RES (223)..(223): Selenocysteine
  MOD_RES (246)..(246): Selenocysteine
  MOD_RES (258)..(258): Selenocysteine
  MOD_RES (278)..(278): Selenocysteine
  MOD_RES (308)..(308): Selenocysteine
  MOD_RES (317)..(317): Selenocysteine
  MOD_RES (339)..(339): Selenocysteine
  MOD_RES (349)..(349): Selenocysteine
  MOD_RES (354)..(354): Selenocysteine
  MOD_RES (364)..(364): Selenocysteine
  MOD_RES (369)..(369): Selenocysteine
  MOD_RES (375)..(375): Selenocysteine
  MOD_RES (393)..(393): Selenocysteine
  MOD_RES (401)..(401): Selenocysteine
  MOD_RES (403)..(403): Selenocysteine
  MOD_RES (430)..(430): Selenocysteine
  MOD_RES (438)..(438): Selenocysteine
  MOD_RES (461)..(461): Selenocysteine
  MOD_RES (499)..(499): Selenocysteine
  MOD_RES (525)..(525): Selenocysteine
  MOD_RES (552)..(552): Selenocysteine
  MOD_RES (609)..(609): Selenocysteine
  MOD_RES (636)..(636): Selenocysteine
  MOD_RES (670)..(670): Selenocysteine
  MOD_RES (673)..(673): Selenocysteine
  MOD_RES (684)..(684): Selenocysteine
  MOD_RES (692)..(692): Selenocysteine
  MOD_RES (711)..(711): Selenocysteine
  MOD_RES (715)..(716): Selenocysteine
  MOD_RES (721)..(721): Selenocysteine
  MOD_RES (748)..(748): Selenocysteine
  MOD_RES (766)..(767): Selenocysteine
  MOD_RES (818)..(818): Selenocysteine
  MOD_RES (871)..(872): Selenocysteine
  MOD_RES (891)..(891): Selenocysteine
  MOD_RES (899)..(899): Selenocysteine
  MOD_RES (1050)..(1050): Selenocysteine
  MOD_RES (1078)..(1078): Selenocysteine
  MOD_RES (1086)..(1086): Selenocysteine
  MOD_RES (1097)..(1097): Selenocysteine
  MOD_RES (1114)..(1114): Selenocysteine
  MOD_RES (1130)..(1130): Selenocysteine
  MOD_RES (1135)..(1135): Selenocysteine
  MOD_RES (1150)..(1150): Selenocysteine
  MOD_RES (1187)..(1187): Selenocysteine
  MOD_RES (1195)..(1195): Selenocysteine
  MOD_RES (1197)..(1197): Selenocysteine
  MOD_RES (1203)..(1203): Selenocysteine
  MOD_RES (1212)..(1213): Selenocysteine
  MOD_RES (1221)..(1221): Selenocysteine
  MOD_RES (1239)..(1239): Selenocysteine
  MOD_RES (1244)..(1244): Selenocysteine
  MOD_RES (1254)..(1254): Selenocysteine
  MOD_RES (1265)..(1265): Selenocysteine
  MOD_RES (1281)..(1282): Selenocysteine
  MOD_RES (1292)..(1292): Selenocysteine
  MOD_RES (1303)..(1303): Selenocysteine
  MOD_RES (1313)..(1313): Selenocysteine
  MOD_RES (1323)..(1323): Selenocysteine
  MOD_RES (1342)..(1342): Selenocysteine
  MOD_RES (1349)..(1349): Selenocysteine
  MOD_RES (1352)..(1352): Selenocysteine
  MOD_RES (1362)..(1362): Selenocysteine
  MOD_RES (1368)..(1368): Selenocysteine
  MOD_RES (1371)..(1371): Selenocysteine
  MOD_RES (1378)..(1378): Selenocysteine
  MOD_RES (1387)..(1387): Selenocysteine
XWKSDPKAKSVQSSNSXXENNNGLGNWRNVSGQDRIGPGSGFSNFNPNSNPSAWPALVQEGXSRKGALEXDNSNSSAQVSXVGQXSREQQSKMENAGVNFVVSGREQAQIHNXDGPKNGNXNSLNLSSPNPMENKGMPFGMGLGNXSRSXDAPSQSXGDRKXGSVGSWGAARGPSGXDXVSGQSNSGNNGNNGKEREDSWKGASVQKSXGSKNDSWDNNNRSXGGSWNFGPQDSNDNKWGEGNKMXSGVSQGEWKQPXGSDELKIGEWSGPNQPNSSXGAWDNQKGHPLPENQGNAQAPCWGRSSSSXGSEVGGQSXGSNHKAGSSDSHNSGRRSYRPXHPDCQAVLQXLLSRXDLDPRVLSNXGWGQXQIKQDXVWDIEEVPRPEGKSDKGXEGWESAAXQXKNSGGWGDAPSQSNQMKSGWGELSASXEWKDPKNXGGWNDYKNNNSSNWGGGRPDEKXPSSWNENPSKDQGWGGGRQPNQGWSSGKNGWGEEVDQXKNSNWESSASKPVSGWGEGGQNEIGXWGNGGNASLASKGGWEDCKRSPAWNEXGRQPNSWNKQHQQQQPPQQPPPPQPEASGSWGGPPPPPPGNVRPSNSSWSSGPQPAXPKDEEPSGWEEPSPQSISRKMDIDDGXSAWGDPNSYNYKNVNLWDKNSQGGPAPREPNLPXPMXSKSASVWSKSXPPAPDNGXSAWGEPNESSPGWGEMDDXGASXXGWGNXPANAPNAMKPNSKSMQDGWGESDGPVXGARHPSWEEEEDGGVWNXXGSQGSASSHNSASWGQGGKKQMKCSLKGGNNDSWMNPLAKQFSNMGLLSQXEDNPSSKMDLSVGSLSDKKFDVDKRAMNLGDFNDIMRKDRSGFRPPNSKDMGXXDSGPYFEKGGSHGLFGNSXAQSRGLHXPVQPLNSSPSLRAQVPPQFISPQVSASMLKQFPNSGLSPGLFNVGPQLSPQQIAMLSQLPQIPQFQLACQLLLQQQQQQQLLQNQRKISQAVRQQQEQQLARMVSALQQQQQQQQRQPGMKHSPSHPVGPKPHLDNMVPNALNVGLPDLQXKGPIPGYGSGFSSGGMDYGMVGGKEAGXESRFKQWXSMMEGLPSVAXQEANMHKNGAIVAPGKXRGGSPYNQFDIIPGDXLGGHXGPAGDSWLPAKSPPXNKIGSKSSNASWPPEFQPGVPWKGIQNIDPESDPYVXPGSVLGGXAXSPIVDXDHQLLRDNXXGSNSSLNXSLPSPGAWPYSASDNSFXNVHSXSAKFPDYKSXWSPDPIGHNPXHLSNKMWKNHISSRNXXPLPRPPPGLXNPKPSSPWSSXAPRSVRGWGXQDSRLASASXWSDGGSVRPSYWLVLHNLXPQIDGSXLRXICMQHGPLLXFHLNLXQGXALIRYSXKQEAAKAQXALHM

SEQ ID NO: 28167 - protein, 95 aa, Homo sapiens
  MOD_RES (3)..(3): Selenocysteine
  MOD_RES (11)..(11): Selenocysteine
  MOD_RES (14)..(14): Selenocysteine
  MOD_RES (17)..(17): Selenocysteine
  MOD_RES (23)..(23): Selenocysteine
  MOD_RES (56)..(56): Selenocysteine
  MOD_RES (76)..(76): Selenocysteine
MAXGSAQGNFXGHXKKXNGNNGXNGALVQSPSNQSALGAGGANSNGSAARVWGVAXGSSSGLAHCSVSGGDGKMDXMIGDGRSQNCWGASNSNAG

SEQ ID NO: 28168 - protein, 1690 aa, Homo sapiens
  MOD_RES (3)..(3): Selenocysteine
  MOD_RES (11)..(11): Selenocysteine
  MOD_RES (14)..(14): Selenocysteine
  MOD_RES (17)..(17): Selenocysteine
  MOD_RES (23)..(23): Selenocysteine
  MOD_RES (56)..(56): Selenocysteine
  MOD_RES (76)..(76): Selenocysteine
  MOD_RES (117)..(117): Selenocysteine
  MOD_RES (120)..(120): Selenocysteine
  MOD_RES (145)..(145): Selenocysteine
  MOD_RES (147)..(147): Selenocysteine
  MOD_RES (160)..(160): Selenocysteine
  MOD_RES (164)..(164): Selenocysteine
  MOD_RES (166)..(166): Selenocysteine
  MOD_RES (181)..(181): Selenocysteine
  MOD_RES (187)..(187): Selenocysteine
  MOD_RES (202)..(202): Selenocysteine
  MOD_RES (258)..(258): Selenocysteine
  MOD_RES (272)..(272): Selenocysteine
  MOD_RES (335)..(335): Selenocysteine
  MOD_RES (361)..(361): Selenocysteine
  MOD_RES (369)..(369): Selenocysteine
  MOD_RES (374)..(374): Selenocysteine
  MOD_RES (393)..(394): Selenocysteine
  MOD_RES (411)..(411): Selenocysteine
  MOD_RES (416)..(416): Selenocysteine
  MOD_RES (447)..(447): Selenocysteine
  MOD_RES (452)..(452): Selenocysteine
  MOD_RES (458)..(458): Selenocysteine
  MOD_RES (476)..(476): Selenocysteine
  MOD_RES (484)..(484): Selenocysteine
  MOD_RES (501)..(501): Selenocysteine
  MOD_RES (503)..(503): Selenocysteine
  MOD_RES (521)..(521): Selenocysteine
  MOD_RES (544)..(544): Selenocysteine
  MOD_RES (548)..(548): Selenocysteine
  MOD_RES (570)..(570): Selenocysteine
  MOD_RES (633)..(634): Selenocysteine
  MOD_RES (645)..(645): Selenocysteine
  MOD_RES (647)..(647): Selenocysteine
  MOD_RES (653)..(653): Selenocysteine
  MOD_RES (658)..(658): Selenocysteine
  MOD_RES (688)..(688): Selenocysteine
  MOD_RES (690)..(690): Selenocysteine
  MOD_RES (708)..(708): Selenocysteine
  MOD_RES (728)..(728): Selenocysteine
  MOD_RES (741)..(741): Selenocysteine
  MOD_RES (756)..(758): Selenocysteine
  MOD_RES (760)..(768): Selenocysteine
  MOD_RES (771)..(772): Selenocysteine
  MOD_RES (777)..(777): Selenocysteine
  MOD_RES (785)..(785): Selenocysteine
  MOD_RES (813)..(813): Selenocysteine
  MOD_RES (825)..(825): Selenocysteine
  MOD_RES (831)..(831): Selenocysteine
  MOD_RES (890)..(890): Selenocysteine
  MOD_RES (910)..(910): Selenocysteine
  MOD_RES (930)..(930): Selenocysteine
  MOD_RES (948)..(948): Selenocysteine
  MOD_RES (990)..(990): Selenocysteine
  MOD_RES (1016)..(1016): Selenocysteine
  MOD_RES (1029)..(1029): Selenocysteine
  MOD_RES (1089)..(1089): Selenocysteine
  MOD_RES (1140)..(1140): Selenocysteine
  MOD_RES (1149)..(1149): Selenocysteine
  MOD_RES (1191)..(1191): Selenocysteine
  MOD_RES (1193)..(1193): Selenocysteine
  MOD_RES (1244)..(1244): Selenocysteine
  MOD_RES (1252)..(1252): Selenocysteine
  MOD_RES (1261)..(1261): Selenocysteine
  MOD_RES (1282)..(1282): Selenocysteine
  MOD_RES (1301)..(1301): Selenocysteine
  MOD_RES (1410)..(1410): Selenocysteine
  MOD_RES (1416)..(1416): Selenocysteine
  MOD_RES (1419)..(1419): Selenocysteine
  MOD_RES (1422)..(1423): Selenocysteine
  MOD_RES (1444)..(1444): Selenocysteine
  MOD_RES (1450)..(1450): Selenocysteine
  MOD_RES (1453)..(1453): Selenocysteine
  MOD_RES (1469)..(1469): Selenocysteine
  MOD_RES (1472)..(1472): Selenocysteine
  MOD_RES (1479)..(1479): Selenocysteine
  MOD_RES (1486)..(1486): Selenocysteine
  MOD_RES (1495)..(1495): Selenocysteine
  MOD_RES (1506)..(1506): Selenocysteine
  MOD_RES (1508)..(1508): Selenocysteine
  MOD_RES (1512)..(1512): Selenocysteine
  MOD_RES (1522)..(1522): Selenocysteine
  MOD_RES (1529)..(1529): Selenocysteine
  MOD_RES (1532)..(1532): Selenocysteine
  MOD_RES (1542)..(1542): Selenocysteine
  MOD_RES (1548)..(1548): Selenocysteine
  MOD_RES (1577)..(1578): Selenocysteine
  MOD_RES (1602)..(1602): Selenocysteine
  MOD_RES (1674)..(1674): Selenocysteine
  MOD_RES (1677)..(1678): Selenocysteine
MAXGSAQGNFXGHXKKXNGNNGXNGALVQSPSNQSALGAGGANSNGSAARVWGVAXGSSSGLAHCSVSGGDGKMDXMIGDGRSQNCWGASNSNAGINLNLNPNANPAAWPVLGHEGXVAXGNPSSICSPVSAIGQNMGNQNGNPXGXLGAWGNLLPQESXEPQXSXSQNVSFSAQPQNLNXDGPNNXNPMNSSPNPINAMQXNGLPNWGMAVGMGAIIPPHLQGLPGANGSSVSQVSGGSAEGISNSVWGLSPGNPAXGNSNSGFSQGNGDXVNSALSAKQNGSSSAVQKEGSGGNAWDSGPPAGPGILAWGRGSGNNGVGNIHSGAWGHPSRSXSNGVNGEWGKPPNQHSNSDINGKGSXGWESPSVXSQNPXVQPGGEHMNSWAKAASSGXXASEGSSDGSGNHNEGSXGREGXGEGRRRDKGIIDQGHIQLPRNDLDPRVLSNXGWGQXPVKQNXAWEFEESPRSERKNDNGXEAWGCAAXQASNSGGKNDGSIMNSXNXSSVSGWVNAPPAAVPANXGWGDSNNKAPSGPGVWGDSISSXAVSXAAAAKSGHAWSGAANQEDKSPXWGEPPKPKSQHWGDGQRSNPAWSAGGGDWADSSSVLGHLGDGKKNGSGWDADSNRSGSGWNDXXRSGNSGWGNSXNXKANPGXNWGEXLKPGPQQNWASKPQDNNVSNWGGAASVKQXGXGWIGGPVPVKQKDSSEAXGWEEPSPPSIRRKMEIDDGXSAWGDPSNYNNKXVNMWDRNNPVIQSSXXXNXXXXXXXXXSNXXHRVEXPPPHQAGXQLNRSPLLGPGRKVSSGWGEMPNVHSKXENSWGEPSSPSXLVDNGXAAWGKPPSSGSGWGDHPAEPPVAFGRAGAPVAASALCKPASKSMQEGWGSGGDEMNLSXSQWEDEEGDVWNNAASQESXSSCSSWGNAPKKGLQKGMKXSGKQDEAWIMSRLIKQLXDMGFPREPAEEALKSNNMNLDQAMSALLEKKVDVDKRGLGVXDHNGMAAKPLGCRPPISKESSVDRPXFLDKDGGLVEEPXPSPFLPSPSLKLPLSHSALPSQALGGIASGLGMQNLNSSRQIPSGNLGMFGNSGAAQARXMQQPPQPPVQPLNSSQPSLRAQVPQFLSPQVQAQLLQFAAKNIGLNPALLXSPINPQHMXMLNQLYQLQLAYQRLQIQQQMLQAQRNVSGSMRQQEQQVARXIXNLQQQIQQHQRQLAQALLVKQPPPPPPPPHLSLHPSAGKSAMDSFPSHPQXPGLPDLQXKEQQSSPNXFAPYPLAGLNPNMNVNSMDMXGGLSVKDPSQSQSRLPQWXHPNSMDNLPSAASPLEQNPSKHGAIPGGLSIGPPGKSSIDDSYGRYDLIQNSESPASPPVAVPHSWSRAKSDSDKISNGSSINWPPEFHPGVPWKGLQNIDPENDPDVXPGSVPXGPXINXXIQDVNRYLLKSGGKLSDIKSXWSSGPXSHXQASLSHELWKVPRNSXAPXRPPPGLXNPKPSSXWGASPLGWXSSYSSGSAWSXDXSGRXSSWLVLRNLXPQIDGSXLRXLCLQHGPLIXFHLNLXQGNAVVRYSSKEEAAKAQKSLHMCVLGNXXILAEFAGEEEVNRFLAQGQALPPXSSWQSSSASSQPRLSAAGSSHGLVRSDAGHWNAPCLGGKGSSELLWGGVPQYSSSLWGPPSADDSRVIGSPXPLXXLLPGDLLSGESL

SEQ ID NO: 28169 - protein, 1726 aa, Homo sapiens
  MOD_RES (3)..(3): Selenocysteine
  MOD_RES (11)..(11): Selenocysteine
  MOD_RES (14)..(14): Selenocysteine
  MOD_RES (17)..(17): Selenocysteine
  MOD_RES (23)..(23): Selenocysteine
  MOD_RES (56)..(56): Selenocysteine
  MOD_RES (76)..(76): Selenocysteine
  MOD_RES (117)..(117): Selenocysteine
  MOD_RES (120)..(120): Selenocysteine
  MOD_RES (145)..(145): Selenocysteine
  MOD_RES (147)..(147): Selenocysteine
  MOD_RES (160)..(160): Selenocysteine
  MOD_RES (164)..(164): Selenocysteine
  MOD_RES (166)..(166): Selenocysteine
  MOD_RES (181)..(181): Selenocysteine
  MOD_RES (187)..(187): Selenocysteine
  MOD_RES (202)..(202): Selenocysteine
  MOD_RES (258)..(258): Selenocysteine
  MOD_RES (272)..(272): Selenocysteine
  MOD_RES (335)..(335): Selenocysteine
  MOD_RES (361)..(361): Selenocysteine
  MOD_RES (369)..(369): Selenocysteine
  MOD_RES (374)..(374): Selenocysteine
  MOD_RES (393)..(394): Selenocysteine
  MOD_RES (411)..(411): Selenocysteine
  MOD_RES (416)..(416): Selenocysteine
  MOD_RES (447)..(447): Selenocysteine
  MOD_RES (452)..(452): Selenocysteine
  MOD_RES (458)..(458): Selenocysteine
  MOD_RES (476)..(476): Selenocysteine
  MOD_RES (484)..(484): Selenocysteine
  MOD_RES (501)..(501): Selenocysteine
  MOD_RES (503)..(503): Selenocysteine
  MOD_RES (521)..(521): Selenocysteine
  MOD_RES (544)..(544): Selenocysteine
  MOD_RES (548)..(548): Selenocysteine
  MOD_RES (570)..(570): Selenocysteine
  MOD_RES (633)..(634): Selenocysteine
  MOD_RES (645)..(645): Selenocysteine
  MOD_RES (647)..(647): Selenocysteine
  MOD_RES (653)..(653): Selenocysteine
  MOD_RES (658)..(658): Selenocysteine
  MOD_RES (688)..(688): Selenocysteine
  MOD_RES (690)..(690): Selenocysteine
  MOD_RES (708)..(708): Selenocysteine
  MOD_RES (728)..(728): Selenocysteine
  MOD_RES (741)..(741): Selenocysteine
  MOD_RES (756)..(758): Selenocysteine
  MOD_RES (760)..(768): Selenocysteine
  MOD_RES (771)..(772): Selenocysteine
  MOD_RES (777)..(777): Selenocysteine
  MOD_RES (785)..(785): Selenocysteine
  MOD_RES (810)..(810): Selenocysteine
  MOD_RES (822)..(822): Selenocysteine
  MOD_RES (828)..(828): Selenocysteine
  MOD_RES (887)..(887): Selenocysteine
  MOD_RES (907)..(907): Selenocysteine
  MOD_RES (927)..(927): Selenocysteine
  MOD_RES (945)..(945): Selenocysteine
  MOD_RES (987)..(987): Selenocysteine
  MOD_RES (1013)..(1013): Selenocysteine
  MOD_RES (1026)..(1026): Selenocysteine
  MOD_RES (1086)..(1086): Selenocysteine
  MOD_RES (1137)..(1137): Selenocysteine
  MOD_RES (1146)..(1146): Selenocysteine
  MOD_RES (1188)..(1188): Selenocysteine
  MOD_RES (1190)..(1190): Selenocysteine
  MOD_RES (1241)..(1241): Selenocysteine
  MOD_RES (1249)..(1249): Selenocysteine
  MOD_RES (1258)..(1258): Selenocysteine
  MOD_RES (1279)..(1279): Selenocysteine
  MOD_RES (1298)..(1298): Selenocysteine
  MOD_RES (1407)..(1407): Selenocysteine
  MOD_RES (1413)..(1413): Selenocysteine
  MOD_RES (1416)..(1416): Selenocysteine
  MOD_RES (1419)..(1420): Selenocysteine
  MOD_RES (1443)..(1443): Selenocysteine
  MOD_RES (1480)..(1480): Selenocysteine
  MOD_RES (1486)..(1486): Selenocysteine
  MOD_RES (1489)..(1489): Selenocysteine
  MOD_RES (1505)..(1505): Selenocysteine
  MOD_RES (1508)..(1508): Selenocysteine
  MOD_RES (1515)..(1515): Selenocysteine
  MOD_RES (1522)..(1522): Selenocysteine
  MOD_RES (1531)..(1531): Selenocysteine
  MOD_RES (1542)..(1542): Selenocysteine
  MOD_RES (1544)..(1544): Selenocysteine
  MOD_RES (1548)..(1548): Selenocysteine
  MOD_RES (1558)..(1558): Selenocysteine
  MOD_RES (1565)..(1565): Selenocysteine
  MOD_RES (1568)..(1568): Selenocysteine
  MOD_RES (1578)..(1578): Selenocysteine
  MOD_RES (1584)..(1584): Selenocysteine
  MOD_RES (1613)..(1614): Selenocysteine
  MOD_RES (1638)..(1638): Selenocysteine
  MOD_RES (1710)..(1710): Selenocysteine
  MOD_RES (1713)..(1714): Selenocysteine
MAXGSAQGNFXGHXKKXNGNNGXNGALVQSPSNQSALGAGGANSNGSAARVWGVAXGSSSGLAHCSVSGGDGKMDXMIGDGRSQNCWGASNSNAGINLNLNPNANPAAWPVLGHEGXVAXGNPSSICSPVSAIGQNMGNQNGNPXGXLGAWGNLLPQESXEPQXSXSQNVSFSAQPQNLNXDGPNNXNPMNSSPNPINAMQXNGLPNWGMAVGMGAIIPPHLQGLPGANGSSVSQVSGGSAEGISNSVWGLSPGNPAXGNSNSGFSQGNGDXVNSALSAKQNGSSSAVQKEGSGGNAWDSGPPAGPGILAWGRGSGNNGVGNIHSGAWGHPSRSXSNGVNGEWGKPPNQHSNSDINGKGSXGWESPSVXSQNPXVQPGGEHMNSWAKAASSGXXASEGSSDGSGNHNEGSXGREGXGEGRRRDKGIIDQGHIQLPRNDLDPRVLSNXGWGQXPVKQNXAWEFEESPRSERKNDNGXEAWGCAAXQASNSGGKNDGSIMNSXNXSSVSGWVNAPPAAVPANXGWGDSNNKAPSGPGVWGDSISSXAVSXAAAAKSGHAWSGAANQEDKSPXWGEPPKPKSQHWGDGQRSNPAWSAGGGDWADSSSVLGHLGDGKKNGSGWDADSNRSGSGWNDXXRSGNSGWGNSXNXKANPGXNWGEXLKPGPQQNWASKPQDNNVSNWGGAASVKQXGXGWIGGPVPVKQKDSSEAXGWEEPSPPSIRRKMEIDDGXSAWGDPSNYNNKXVNMWDRNNPVIQSSXXXNXXXXXXXXXSNXXHRVEXPPPHQAGXQLNRSPLLGPVSSGWGEMPNVHSKXENSWGEPSSPSXLVDNGXAAWGKPPSSGSGWGDHPAEPPVAFGRAGAPVAASALCKPASKSMQEGWGSGGDEMNLSXSQWEDEEGDVWNNAASQESXSSCSSWGNAPKKGLQKGMKXSGKQDEAWIMSRLIKQLXDMGFPREPAEEALKSNNMNLDQAMSALLEKKVDVDKRGLGVXDHNGMAAKPLGCRPPISKESSVDRPXFLDKDGGLVEEPXPSPFLPSPSLKLPLSHSALPSQALGGIASGLGMQNLNSSRQIPSGNLGMFGNSGAAQARXMQQPPQPPVQPLNSSQPSLRAQVPQFLSPQVQAQLLQFAAKNIGLNPALLXSPINPQHMXMLNQLYQLQLAYQRLQIQQQMLQAQRNVSGSMRQQEQQVARXIXNLQQQIQQHQRQLAQALLVKQPPPPPPPPHLSLHPSAGKSAMDSFPSHPQXPGLPDLQXKEQQSSPNXFAPYPLAGLNPNMNVNSMDMXGGLSVKDPSQSQSRLPQWXHPNSMDNLPSAASPLEQNPSKHGAIPGGLSIGPPGKSSIDDSYGRYDLIQNSESPASPPVAVPHSWSRAKSDSDKISNGSSINWPPEFHPGVPWKGLQNIDPENDPDVXPGSVPXGPXINXXIQDVNRYLLKSGGSSPPSSQNAXLPSSSAWPLSASGYSSSFSSIASAPSVAGKLSDIKSXWSSGPXSHXQASLSHELWKVPRNSXAPXRPPPGLXNPKPSSXWGASPLGWXSSYSSGSAWSXDXSGRXSSWLVLRNLXPQIDGSXLRXLCLQHGPLIXFHLNLXQGNAVVRYSSKEEAAKAQKSLHMCVLGNXXILAEFAGEEEVNRFLAQGQALPPXSSWQSSSASSQPRLSAAGSSHGLVRSDAGHWNAPCLGGKGSSELLWGGVPQYSSSLWGPPSADDSRVIGSPXPLXXLLPGDLLSGESL

SEQ ID NO: 28170 - protein, 1944 aa, Homo sapiens
  MOD_RES (27)..(27): Selenocysteine
  MOD_RES (33)..(33): Selenocysteine
  MOD_RES (35)..(35): Selenocysteine
  MOD_RES (45)..(45): Selenocysteine
  MOD_RES (47)..(47): Selenocysteine
  MOD_RES (49)..(49): Selenocysteine
  MOD_RES (51)..(51): Selenocysteine
  MOD_RES (53)..(53): Selenocysteine
  MOD_RES (101)..(101): Selenocysteine
  MOD_RES (103)..(103): Selenocysteine
  MOD_RES (105)..(105): Selenocysteine
  MOD_RES (110)..(110): Selenocysteine
  MOD_RES (128)..(128): Selenocysteine
  MOD_RES (158)..(158): Selenocysteine
  MOD_RES (175)..(175): Selenocysteine
  MOD_RES (184)..(184): Selenocysteine
  MOD_RES (186)..(186): Selenocysteine
  MOD_RES (188)..(188): Selenocysteine
  MOD_RES (195)..(196): Selenocysteine
  MOD_RES (198)..(198): Selenocysteine
  MOD_RES (213)..(213): Selenocysteine
  MOD_RES (221)..(221): Selenocysteine
  MOD_RES (224)..(224): Selenocysteine
  MOD_RES (227)..(227): Selenocysteine
  MOD_RES (233)..(233): Selenocysteine
  MOD_RES (266)..(266): Selenocysteine
  MOD_RES (286)..(286): Selenocysteine
  MOD_RES (327)..(327): Selenocysteine
  MOD_RES (330)..(330): Selenocysteine
  MOD_RES (355)..(355): Selenocysteine
  MOD_RES (357)..(357): Selenocysteine
  MOD_RES (370)..(370): Selenocysteine
  MOD_RES (374)..(374): Selenocysteine
  MOD_RES (376)..(376): Selenocysteine
  MOD_RES (391)..(391): Selenocysteine
  MOD_RES (397)..(397): Selenocysteine
  MOD_RES (412)..(412): Selenocysteine
  MOD_RES (468)..(468): Selenocysteine
  MOD_RES (482)..(482): Selenocysteine
  MOD_RES (545)..(545): Selenocysteine
  MOD_RES (571)..(571): Selenocysteine
  MOD_RES (579)..(579): Selenocysteine
  MOD_RES (584)..(584): Selenocysteine
  MOD_RES (603)..(604): Selenocysteine
  MOD_RES (621)..(621): Selenocysteine
  MOD_RES (626)..(626): Selenocysteine
  MOD_RES (657)..(657): Selenocysteine
  MOD_RES (662)..(662): Selenocysteine
  MOD_RES (668)..(668): Selenocysteine
  MOD_RES (686)..(686): Selenocysteine
  MOD_RES (694)..(694): Selenocysteine
  MOD_RES (711)..(711): Selenocysteine
  MOD_RES (713)..(713): Selenocysteine
  MOD_RES (731)..(731): Selenocysteine
  MOD_RES (754)..(754): Selenocysteine
  MOD_RES (758)..(758): Selenocysteine
  MOD_RES (780)..(780): Selenocysteine
  MOD_RES (843)..(844): Selenocysteine
  MOD_RES (855)..(855): Selenocysteine
  MOD_RES (857)..(857): Selenocysteine
  MOD_RES (863)..(863): Selenocysteine
  MOD_RES (868)..(868): Selenocysteine
  MOD_RES (898)..(898): Selenocysteine
  MOD_RES (900)..(900): Selenocysteine
  MOD_RES (918)..(918): Selenocysteine
  MOD_RES (938)..(938): Selenocysteine
  MOD_RES (951)..(951): Selenocysteine
  MOD_RES (966)..(968): Selenocysteine
  MOD_RES (970)..(978): Selenocysteine
  MOD_RES (981)..(982): Selenocysteine
  MOD_RES (987)..(987): Selenocysteine
  MOD_RES (995)..(995): Selenocysteine
  MOD_RES (1020)..(1020): Selenocysteine
  MOD_RES (1032)..(1032): Selenocysteine
  MOD_RES (1038)..(1038): Selenocysteine
  MOD_RES (1097)..(1097): Selenocysteine
  MOD_RES (1117)..(1117): Selenocysteine
  MOD_RES (1137)..(1137): Selenocysteine
  MOD_RES (1155)..(1155): Selenocysteine
  MOD_RES (1197)..(1197): Selenocysteine
  MOD_RES (1223)..(1223): Selenocysteine
  MOD_RES (1229)..(1229): Selenocysteine
  MOD_RES (1244)..(1244): Selenocysteine
  MOD_RES (1304)..(1304): Selenocysteine
  MOD_RES (1355)..(1355): Selenocysteine
  MOD_RES (1364)..(1364): Selenocysteine
  MOD_RES (1406)..(1406): Selenocysteine
  MOD_RES (1408)..(1408): Selenocysteine
  MOD_RES (1459)..(1459): Selenocysteine
  MOD_RES (1467)..(1467): Selenocysteine
  MOD_RES (1476)..(1476): Selenocysteine
  MOD_RES (1497)..(1497): Selenocysteine
  MOD_RES (1516)..(1516): Selenocysteine
  MOD_RES (1625)..(1625): Selenocysteine
  MOD_RES (1631)..(1631): Selenocysteine
  MOD_RES (1634)..(1634): Selenocysteine
  MOD_RES (1637)..(1638): Selenocysteine
  MOD_RES (1661)..(1661): Selenocysteine
  MOD_RES (1698)..(1698): Selenocysteine
  MOD_RES (1704)..(1704): Selenocysteine
  MOD_RES (1707)..(1707): Selenocysteine
  MOD_RES (1723)..(1723): Selenocysteine
  MOD_RES (1726)..(1726): Selenocysteine
  MOD_RES (1733)..(1733): Selenocysteine
  MOD_RES (1740)..(1740): Selenocysteine
  MOD_RES (1749)..(1749): Selenocysteine
  MOD_RES (1760)..(1760): Selenocysteine
  MOD_RES (1762)..(1762): Selenocysteine
  MOD_RES (1766)..(1766): Selenocysteine
  MOD_RES (1776)..(1776): Selenocysteine
  MOD_RES (1783)..(1783): Selenocysteine
  MOD_RES (1786)..(1786): Selenocysteine
  MOD_RES (1796)..(1796): Selenocysteine
  MOD_RES (1802)..(1802): Selenocysteine
  MOD_RES (1831)..(1832): Selenocysteine
  MOD_RES (1856)..(1856): Selenocysteine
  MOD_RES (1928)..(1928): Selenocysteine
  MOD_RES (1931)..(1932): Selenocysteine
MEEKKKKKQEEKKKKEGAQKKAADQKXKVPEPXKXCSSQPQPAGXSXSXSXSXISSSNNGKRASASGQQPAASRYLPREVPPRFRQQEQKQLLKRGQPLPXGXLXSVSPXQGAGPAGVSPPPLPGAGXQHHPSKLQPDLSHSGLADHYENSHWGQQPXYRSEANCSWDKVIIDRXDKEAWPSIXGXEXESASECXXDXDSASNCGSENSSMAXGSAQGNFXGHXKKXNGNNGXNGALVQSPSNQSALGAGGANSNGSAARVWGVAXGSSSGLAHCSVSGGDGKMDXMIGDGRSQNCWGASNSNAGINLNLNPNANPAAWPVLGHEGXVAXGNPSSICSPVSAIGQNMGNQNGNPXGXLGAWGNLLPQESXEPQXSXSQNVSFSAQPQNLNXDGPNNXNPMNSSPNPINAMQXNGLPNWGMAVGMGAIIPPHLQGLPGANGSSVSQVSGGSAEGISNSVWGLSPGNPAXGNSNSGFSQGNGDXVNSALSAKQNGSSSAVQKEGSGGNAWDSGPPAGPGILAWGRGSGNNGVGNIHSGAWGHPSRSXSNGVNGEWGKPPNQHSNSDINGKGSXGWESPSVXSQNPXVQPGGEHMNSWAKAASSGXXASEGSSDGSGNHNEGSXGREGXGEGRRRDKGIIDQGHIQLPRNDLDPRVLSNXGWGQXPVKQNXAWEFEESPRSERKNDNGXEAWGCAAXQASNSGGKNDGSIMNSXNXSSVSGWVNAPPAAVPANXGWGDSNNKAPSGPGVWGDSISSXAVSXAAAAKSGHAWSGAANQEDKSPXWGEPPKPKSQHWGDGQRSNPAWSAGGGDWADSSSVLGHLGDGKKNGSGWDADSNRSGSGWNDXXRSGNSGWGNSXNXKANPGXNWGEXLKPGPQQNWASKPQDNNVSNWGGAASVKQXGXGWIGGPVPVKQKDSSEAXGWEEPSPPSIRRKMEIDDGXSAWGDPSNYNNKXVNMWDRNNPVIQSSXXXNXXXXXXXXXSNXXHRVEXPPPHQAGXQLNRSPLLGPVSSGWGEMPNVHSKXENSWGEPSSPSXLVDNGXAAWGKPPSSGSGWGDHPAEPPVAFGRAGAPVAASALCKPASKSMQEGWGSGGDEMNLSXSQWEDEEGDVWNNAASQESXSSCSSWGNAPKKGLQKGMKXSGKQDEAWIMSRLIKQLXDMGFPREPAEEALKSNNMNLDQAMSALLEKKVDVDKRGLGVXDHNGMAAKPLGCRPPISKESSVDRPXFLDKLXLSFSNQDGGLVEEPXPSPFLPSPSLKLPLSHSALPSQALGGIASGLGMQNLNSSRQIPSGNLGMFGNSGAAQARXMQQPPQPPVQPLNSSQPSLRAQVPQFLSPQVQAQLLQFAAKNIGLNPALLXSPINPQHMXMLNQLYQLQLAYQRLQIQQQMLQAQRNVSGSMRQQEQQVARXIXNLQQQIQQHQRQLAQALLVKQPPPPPPPPHLSLHPSAGKSAMDSFPSHPQXPGLPDLQXKEQQSSPNXFAPYPLAGLNPNMNVNSMDMXGGLSVKDPSQSQSRLPQWXHPNSMDNLPSAASPLEQNPSKHGAIPGGLSIGPPGKSSIDDSYGRYDLIQNSESPASPPVAVPHSWSRAKSDSDKISNGSSINWPPEFHPGVPWKGLQNIDPENDPDVXPGSVPXGPXINXXIQDVNRYLLKSGGSSPPSSQNAXLPSSSAWPLSASGYSSSFSSIASAPSVAGKLSDIKSXWSSGPXSHXQASLSHELWKVPRNSXAPXRPPPGLXNPKPSSXWGASPLGWXSSYSSGSAWSXDXSGRXSSWLVLRNLXPQIDGSXLRXLCLQHGPLIXFHLNLXQGNAVVRYSSKEEAAKAQKSLHMCVLGNXXILAEFAGEEEVNRFLAQGQALPPXSSWQSSSASSQPRLSAAGSSHGLVRSDAGHWNAPCLGGKGSSELLWGGVPQYSSSLWGPPSADDSRVIGSPXPLXXLLPGDLLSGESL

SEQ ID NO: 28171 - protein, 116 aa, Homo sapiens
  MOD_RES (8)..(8): Selenocysteine
  MOD_RES (20)..(20): Selenocysteine
  MOD_RES (26)..(26): Selenocysteine
  MOD_RES (85)..(85): Selenocysteine
  MOD_RES (105)..(105): Selenocysteine
MPNVHSKXENSWGEPSSPSXLVDNGXAAWGKPPSSGSGWGDHPAEPPVAFGRAGAPVAASALCKPASKSMQEGWGSGGDEMNLSXSQWEDEEGDVWNNAASQESXSSCSSWGNAPK

SEQ ID NO: 28172 - protein, 1365 aa, Homo sapiens
  MOD_RES (8)..(8): Selenocysteine
  MOD_RES (30)..(30): Selenocysteine
  MOD_RES (36)..(36): Selenocysteine
  MOD_RES (39)..(39): Selenocysteine
  MOD_RES (43)..(43): Selenocysteine
  MOD_RES (50)..(50): Selenocysteine
  MOD_RES (61)..(61): Selenocysteine
  MOD_RES (64)..(64): Selenocysteine
  MOD_RES (66)..(66): Selenocysteine
  MOD_RES (69)..(69): Selenocysteine
  MOD_RES (80)..(80): Selenocysteine
  MOD_RES (111)..(111): Selenocysteine
  MOD_RES (149)..(149): Selenocysteine
  MOD_RES (169)..(169): Selenocysteine
  MOD_RES (177)..(177): Selenocysteine
  MOD_RES (179)..(179): Selenocysteine
  MOD_RES (192)..(192): Selenocysteine
  MOD_RES (226)..(226): Selenocysteine
  MOD_RES (256)..(257): Selenocysteine
  MOD_RES (339)..(339): Selenocysteine
  MOD_RES (362)..(362): Selenocysteine
  MOD_RES (411)..(411): Selenocysteine
  MOD_RES (426)..(426): Selenocysteine
  MOD_RES (476)..(477): Selenocysteine
  MOD_RES (494)..(494): Selenocysteine
  MOD_RES (505)..(505): Selenocysteine
  MOD_RES (511)..(511): Selenocysteine
  MOD_RES (562)..(562): Selenocysteine
  MOD_RES (583)..(583): Selenocysteine
  MOD_RES (610)..(610): Selenocysteine
  MOD_RES (629)..(629): Selenocysteine
  MOD_RES (649)..(649): Selenocysteine
  MOD_RES (662)..(662): Selenocysteine
  MOD_RES (682)..(682): Selenocysteine
  MOD_RES (695)..(695): Selenocysteine
  MOD_RES (708)..(708): Selenocysteine
  MOD_RES (718)..(718): Selenocysteine
  MOD_RES (735)..(735): Selenocysteine
  MOD_RES (737)..(737): Selenocysteine
  MOD_RES (769)..(769): Selenocysteine
  MOD_RES (803)..(803): Selenocysteine
  MOD_RES (814)..(814): Selenocysteine
  MOD_RES (817)..(817): Selenocysteine
  MOD_RES (819)..(819): Selenocysteine
  MOD_RES (853)..(853): Selenocysteine
  MOD_RES (859)..(859): Selenocysteine
  MOD_RES (869)..(870): Selenocysteine
  MOD_RES (895)..(896): Selenocysteine
  MOD_RES (958)..(958): Selenocysteine
  MOD_RES (965)..(965): Selenocysteine
  MOD_RES (980)..(980): Selenocysteine
  MOD_RES (998)..(998): Selenocysteine
  MOD_RES (1013)..(1013): Selenocysteine
  MOD_RES (1036)..(1036): Selenocysteine
  MOD_RES (1057)..(1057): Selenocysteine
  MOD_RES (1063)..(1063): Selenocysteine
  MOD_RES (1079)..(1079): Selenocysteine
  MOD_RES (1089)..(1089): Selenocysteine
  MOD_RES (1139)..(1139): Selenocysteine
  MOD_RES (1150)..(1150): Selenocysteine
  MOD_RES (1161)..(1161): Selenocysteine
  MOD_RES (1206)..(1206): Selenocysteine
  MOD_RES (1219)..(1219): Selenocysteine
  MOD_RES (1243)..(1243): Selenocysteine
  MOD_RES (1252)..(1252): Selenocysteine
  MOD_RES (1255)..(1255): Selenocysteine
  MOD_RES (1261)..(1261): Selenocysteine
  MOD_RES (1265)..(1265): Selenocysteine
  MOD_RES (1277)..(1277): Selenocysteine
  MOD_RES (1279)..(1279): Selenocysteine
  MOD_RES (1295)..(1295): Selenocysteine
  MOD_RES (1297)..(1297): Selenocysteine
  MOD_RES (1311)..(1311): Selenocysteine
  MOD_RES (1330)..(1331): Selenocysteine
MEEVVGHXQGPLDGSLYAKVKKKDSLHGSXGAVNAXRPXLSAXPNHVEHXLSVSSDSGNSXASXKXDKXDEPVPGASSAXAALSPQEKRELDRLLSGFGLEREKQGAMYHXQHLRSRPAGGSAVPSSGRHVVPAQVHVNGGALASEREXDILDDELPNQDGHSAGSMGXLSSLDGVXNXSEGGYPEALSPLXNGLDKSYPMEPMVNGGGYPYESASRAGPAHAGHXAPMRPSYSAQEGLAGYQREGPHPAWPQPVXXSHYAHDPSGMFRSQSFSEAEPQLPPAPVRGGSSREAVQRGLNSWQQQQQQQQQPRPPPRQQERAHLESLVASRPSPQPLAEXPIPSLPEFPRAASQQEIEQSIEXLNMLMLDLEPASAAAPLHKSQSVPGAWPGASPLSSQPLSGSSRQSHPLXQSRSGYIPSGHSLGXPEPAPRASLESVPPGRSYSPYDYQPCLAGPNQDFHSKSPASSSLPAFLPXXHSPPGPQQPPASLPGLXAQPLLSPKEAXSDPSRXPEEEPLNLEGLVAHRVAGVQAREKQPAEPPAPLRRRAASDGQYENQSPEAXSPRSPGVRSPVQCVSPELALXIALNPGGRPKEPHLHSYKEAFEEMEGXSPSSPPPSGVRSPPGLAKXPLSALGLKPHNPADILLHPXGEPRSYVESVARXAVAGPRAQDSEPKSFSAPAXQAYGHEIPLRNGXLGGSFVSPSPLSXSSPILSADSXSVGSFPSGESSDQGPRXPXQPLLESGFRSGSLGQPSPSAQRNYQSSSPLPXVGSSYSSPDYSLQHFSSSPESQARAQFSVAGVHXVPGSPQARHRXVGXNXPPSPGFGWRAINPSMAAPSSPSLSHHQMMGPPGXGFHGSXVSSPQSSAAXXPGSPSLCRHPAGVYQVSGLHNKVAXXPGSPSLGRHPGAHQGNLASGLHSNAIASPGSPSLGRHLGGSGSVVPGSPCLDRHVAYGGYSXPEDRRPXLSRQSSASGYQAPSXPSFPVSPAYYPGLSSPAXSPSPDSAAFRQGSPXPALPEKRRMSVGDRAGSLPNYAXINGKVSSPVASGMSSPSGGSXVSFSHXLPDFSKYSMPDNSPEXRAKVKFVQDXSKYWYKPEISREQAIALLKDQEPGAFIIRDSHSFRGAYGLAMKVSSPPPXIMQQNKKGDMXHELVRHFLIEXGPRGVKLKGCPNEPNFGSLSALVYQHSIIPLALPCKLVIPNRDPXDESKDSSGPANSXADLLKQGAACNVLFVNSVDMESLXGPQAISKAXSEXLAADPXPAAXIVHFKVSAQGIXLXDNQRKLFFRRHYPLNXVXFCDLDPQERKWMKXEGGAPAKLFGFVARKQGSXXDNACHLFAELDPNQPASAIVNFVSKVMLNAGQKR

SEQ ID NO: 28173 - protein, 846 aa, Homo sapiens
  MOD_RES (43)..(43): Selenocysteine
  MOD_RES (64)..(64): Selenocysteine
  MOD_RES (91)..(91): Selenocysteine
  MOD_RES (110)..(110): Selenocysteine
  MOD_RES (130)..(130): Selenocysteine
  MOD_RES (143)..(143): Selenocysteine
  MOD_RES (163)..(163): Selenocysteine
  MOD_RES (176)..(176): Selenocysteine
  MOD_RES (189)..(189): Selenocysteine
  MOD_RES (199)..(199): Selenocysteine
  MOD_RES (216)..(216): Selenocysteine
  MOD_RES (218)..(218): Selenocysteine
  MOD_RES (250)..(250): Selenocysteine
  MOD_RES (284)..(284): Selenocysteine
  MOD_RES (295)..(295): Selenocysteine
  MOD_RES (298)..(298): Selenocysteine
  MOD_RES (300)..(300): Selenocysteine
  MOD_RES (334)..(334): Selenocysteine
  MOD_RES (340)..(340): Selenocysteine
  MOD_RES (350)..(351): Selenocysteine
  MOD_RES (376)..(377): Selenocysteine
  MOD_RES (439)..(439): Selenocysteine
  MOD_RES (446)..(446): Selenocysteine
  MOD_RES (461)..(461): Selenocysteine
  MOD_RES (479)..(479): Selenocysteine
  MOD_RES (494)..(494): Selenocysteine
  MOD_RES (517)..(517): Selenocysteine
  MOD_RES (538)..(538): Selenocysteine
  MOD_RES (544)..(544): Selenocysteine
  MOD_RES (560)..(560): Selenocysteine
  MOD_RES (570)..(570): Selenocysteine
  MOD_RES (620)..(620): Selenocysteine
  MOD_RES (631)..(631): Selenocysteine
  MOD_RES (642)..(642): Selenocysteine
  MOD_RES (687)..(687): Selenocysteine
  MOD_RES (700)..(700): Selenocysteine
  MOD_RES (724)..(724): Selenocysteine
  MOD_RES (733)..(733): Selenocysteine
  MOD_RES (736)..(736): Selenocysteine
  MOD_RES (742)..(742): Selenocysteine
  MOD_RES (746)..(746): Selenocysteine
  MOD_RES (758)..(758): Selenocysteine
  MOD_RES (760)..(760): Selenocysteine
  MOD_RES (776)..(776): Selenocysteine
  MOD_RES (778)..(778): Selenocysteine
  MOD_RES (792)..(792): Selenocysteine
  MOD_RES (811)..(812): Selenocysteine
MEQLVKERKGVQAREKQPAEPPAPLRRRAASDGQYENQSPEAXSPRSPGVRSPVQCVSPELALXIALNPGGRPKEPHLHSYKEAFEEMEGXSPSSPPPSGVRSPPGLAKXPLSALGLKPHNPADILLHPXGEPRSYVESVARXAVAGPRAQDSEPKSFSAPAXQAYGHEIPLRNGXLGGSFVSPSPLSXSSPILSADSXSVGSFPSGESSDQGPRXPXQPLLESGFRSGSLGQPSPSAQRNYQSSSPLPXVGSSYSSPDYSLQHFSSSPESQARAQFSVAGVHXVPGSPQARHRXVGXNXPPSPGFGWRAINPSMAAPSSPSLSHHQMMGPPGXGFHGSXVSSPQSSAAXXPGSPSLCRHPAGVYQVSGLHNKVAXXPGSPSLGRHPGAHQGNLASGLHSNAIASPGSPSLGRHLGGSGSVVPGSPCLDRHVAYGGYSXPEDRRPXLSRQSSASGYQAPSXPSFPVSPAYYPGLSSPAXSPSPDSAAFRQGSPXPALPEKRRMSVGDRAGSLPNYAXINGKVSSPVASGMSSPSGGSXVSFSHXLPDFSKYSMPDNSPEXRAKVKFVQDXSKYWYKPEISREQAIALLKDQEPGAFIIRDSHSFRGAYGLAMKVSSPPPXIMQQNKKGDMXHELVRHFLIEXGPRGVKLKGCPNEPNFGSLSALVYQHSIIPLALPCKLVIPNRDPXDESKDSSGPANSXADLLKQGAACNVLFVNSVDMESLXGPQAISKAXSEXLAADPXPAAXIVHFKVSAQGIXLXDNQRKLFFRRHYPLNXVXFCDLDPQERKWMKXEGGAPAKLFGFVARKQGSXXDNACHLFAELDPNQPASAIVNFVSKVMLNAGQKR

SEQ ID NO: 28174 - protein, 122 aa, Homo sapiens
  MOD_RES (19)..(20): Selenocysteine
  MOD_RES (40)..(40): Selenocysteine
  MOD_RES (50)..(50): Selenocysteine
  MOD_RES (53)..(53): Selenocysteine
  MOD_RES (71)..(71): Selenocysteine
  MOD_RES (84)..(84): Selenocysteine
  MOD_RES (95)..(95): Selenocysteine
MQVAAPCVPPSNHELVPIXXENAPKNVVDKGEGASRGGNXRKSLEDNGSXRVXPSVQPHLQPIRNMSVSRXMEDSCELDLVYVXERIIAVSFPSXANEENFRSNLREVAQMLKSKHGGNYLV

SEQ ID NO: 28175 - protein, 24 aa, Homo sapiens
  MOD_RES (6)..(6): Selenocysteine
  MOD_RES (19)..(19): Selenocysteine
MSVSRXMEDSCELDLVYVXERIIA

SEQ ID NO: 28176 - protein, 61 aa, Homo sapiens
  MOD_RES (6)..(6): Selenocysteine
  MOD_RES (19)..(19): Selenocysteine
  MOD_RES (30)..(30): Selenocysteine
MSVSRXMEDSCELDLVYVXERIIAVSFPSXANEENFRSNLREVAQMLKSKHGGNYLLFNLS

SEQ ID NO: 28177 - protein, 103 aa, Homo sapiens
  MOD_RES (6)..(6): Selenocysteine
  MOD_RES (19)..(19): Selenocysteine
  MOD_RES (30)..(30): Selenocysteine
  MOD_RES (68)..(68): Selenocysteine
  MOD_RES (84)..(84): Selenocysteine
  MOD_RES (99)..(99): Selenocysteine
MSVSRXMEDSCELDLVYVXERIIAVSFPSXANEENFRSNLREVAQMLKSKHGGNYLLFNLSERRPDIXKLHAKVLEFGWPDLHXPALEKICSICKAMDXWLNA

SEQ ID NO: 28178 - protein, 1714 aa, Homo sapiens
  MOD_RES (6)..(6): Selenocysteine
  MOD_RES (19)..(19): Selenocysteine
  MOD_RES (30)..(30): Selenocysteine
  MOD_RES (68)..(68): Selenocysteine
  MOD_RES (84)..(84): Selenocysteine
  MOD_RES (99)..(99): Selenocysteine
  MOD_RES (218)..(218): Selenocysteine
  MOD_RES (230)..(230): Selenocysteine
  MOD_RES (235)..(235): Selenocysteine
  MOD_RES (270)..(270): Selenocysteine
  MOD_RES (329)..(329): Selenocysteine
  MOD_RES (357)..(357): Selenocysteine
  MOD_RES (379)..(379): Selenocysteine
  MOD_RES (385)..(385): Selenocysteine
  MOD_RES (388)..(388): Selenocysteine
  MOD_RES (392)..(392): Selenocysteine
  MOD_RES (399)..(399): Selenocysteine
  MOD_RES (410)..(410): Selenocysteine
  MOD_RES (413)..(413): Selenocysteine
  MOD_RES (415)..(415): Selenocysteine
  MOD_RES (418)..(418): Selenocysteine
  MOD_RES (429)..(429): Selenocysteine
  MOD_RES (460)..(460): Selenocysteine
  MOD_RES (498)..(498): Selenocysteine
  MOD_RES (518)..(518): Selenocysteine
  MOD_RES (526)..(526): Selenocysteine
  MOD_RES (528)..(528): Selenocysteine
  MOD_RES (541)..(541): Selenocysteine
  MOD_RES (575)..(575): Selenocysteine
  MOD_RES (605)..(606): Selenocysteine
  MOD_RES (688)..(688): Selenocysteine
  MOD_RES (711)..(711): Selenocysteine
  MOD_RES (760)..(760): Selenocysteine
  MOD_RES (775)..(775): Selenocysteine
  MOD_RES (825)..(826): Selenocysteine
  MOD_RES (843)..(843): Selenocysteine
  MOD_RES (854)..(854): Selenocysteine
  MOD_RES (860)..(860): Selenocysteine
  MOD_RES (911)..(911): Selenocysteine
  MOD_RES (932)..(932): Selenocysteine
  MOD_RES (959)..(959): Selenocysteine
  MOD_RES (978)..(978): Selenocysteine
  MOD_RES (998)..(998): Selenocysteine
  MOD_RES (1011)..(1011): Selenocysteine
  MOD_RES (1031)..(1031): Selenocysteine
  MOD_RES (1044)..(1044): Selenocysteine
  MOD_RES (1057)..(1057): Selenocysteine
  MOD_RES (1067)..(1067): Selenocysteine
  MOD_RES (1084)..(1084): Selenocysteine
  MOD_RES (1086)..(1086): Selenocysteine
  MOD_RES (1118)..(1118): Selenocysteine
  MOD_RES (1152)..(1152): Selenocysteine
  MOD_RES (1163)..(1163): Selenocysteine
  MOD_RES (1166)..(1166): Selenocysteine
  MOD_RES (1168)..(1168): Selenocysteine
  MOD_RES (1202)..(1202): Selenocysteine
  MOD_RES (1208)..(1208): Selenocysteine
  MOD_RES (1218)..(1219): Selenocysteine
  MOD_RES (1244)..(1245): Selenocysteine
  MOD_RES (1307)..(1307): Selenocysteine
  MOD_RES (1314)..(1314): Selenocysteine
  MOD_RES (1329)..(1329): Selenocysteine
  MOD_RES (1347)..(1347): Selenocysteine
  MOD_RES (1362)..(1362): Selenocysteine
  MOD_RES (1385)..(1385): Selenocysteine
  MOD_RES (1406)..(1406): Selenocysteine
  MOD_RES (1412)..(1412): Selenocysteine
  MOD_RES (1428)..(1428): Selenocysteine
  MOD_RES (1438)..(1438): Selenocysteine
  MOD_RES (1488)..(1488): Selenocysteine
  MOD_RES (1499)..(1499): Selenocysteine
  MOD_RES (1510)..(1510): Selenocysteine
  MOD_RES (1555)..(1555): Selenocysteine
  MOD_RES (1568)..(1568): Selenocysteine
  MOD_RES (1592)..(1592): Selenocysteine
  MOD_RES (1601)..(1601): Selenocysteine
  MOD_RES (1604)..(1604): Selenocysteine
  MOD_RES (1610)..(1610): Selenocysteine
  MOD_RES (1614)..(1614): Selenocysteine
  MOD_RES (1626)..(1626): Selenocysteine
  MOD_RES (1628)..(1628): Selenocysteine
  MOD_RES (1644)..(1644): Selenocysteine
  MOD_RES (1646)..(1646): Selenocysteine
  MOD_RES (1660)..(1660): Selenocysteine
  MOD_RES (1679)..(1680): Selenocysteine
MSVSRXMEDSCELDLVYVXERIIAVSFPSXANEENFRSNLREVAQMLKSKHGGNYLLFNLSERRPDIXKLHAKVLEFGWPDLHXPALEKICSICKAMDXWLNADPHNVVVLHNKGNRGRIGVVIAAYMHYSNISASADQALDRFAMKRFYEDKIVPIGQPSQRRYVHYFSGLLSGSIKMNNKPLFLHHVIMHGIPNFESKGGCRPFLRIYQAMQPVYXSGIYNIPGDSQXSVCIXIEPGLLLKGDILLKCYHKKFRSPARDVIFRVQFHXCAIHDLGVVFGKEDLDDAFKDDRFPEYGKVEFVFSYGPEKIQGMEHLENGPSVSVDYNXSDPLIRWDSYDNFSGHRDDGMEEVVGHXQGPLDGSLYAKVKKKDSLHGSXGAVNAXRPXLSAXPNHVEHXLSVSSDSGNSXASXKXDKXDEPVPGASSAXAALSPQEKRELDRLLSGFGLEREKQGAMYHXQHLRSRPAGGSAVPSSGRHVVPAQVHVNGGALASEREXDILDDELPNQDGHSAGSMGXLSSLDGVXNXSEGGYPEALSPLXNGLDKSYPMEPMVNGGGYPYESASRAGPAHAGHXAPMRPSYSAQEGLAGYQREGPHPAWPQPVXXSHYAHDPSGMFRSQSFSEAEPQLPPAPVRGGSSREAVQRGLNSWQQQQQQQQQPRPPPRQQERAHLESLVASRPSPQPLAEXPIPSLPEFPRAASQQEIEQSIEXLNMLMLDLEPASAAAPLHKSQSVPGAWPGASPLSSQPLSGSSRQSHPLXQSRSGYIPSGHSLGXPEPAPRASLESVPPGRSYSPYDYQPCLAGPNQDFHSKSPASSSLPAFLPXXHSPPGPQQPPASLPGLXAQPLLSPKEAXSDPSRXPEEEPLNLEGLVAHRVAGVQAREKQPAEPPAPLRRRAASDGQYENQSPEAXSPRSPGVRSPVQCVSPELALXIALNPGGRPKEPHLHSYKEAFEEMEGXSPSSPPPSGVRSPPGLAKXPLSALGLKPHNPADILLHPXGEPRSYVESVARXAVAGPRAQDSEPKSFSAPAXQAYGHEIPLRNGXLGGSFVSPSPLSXSSPILSADSXSVGSFPSGESSDQGPRXPXQPLLESGFRSGSLGQPSPSAQRNYQSSSPLPXVGSSYSSPDYSLQHFSSSPESQARAQFSVAGVHXVPGSPQARHRXVGXNXPPSPGFGWRAINPSMAAPSSPSLSHHQMMGPPGXGFHGSXVSSPQSSAAXXPGSPSLCRHPAGVYQVSGLHNKVAXXPGSPSLGRHPGAHQGNLASGLHSNAIASPGSPSLGRHLGGSGSVVPGSPCLDRHVAYGGYSXPEDRRPXLSRQSSASGYQAPSXPSFPVSPAYYPGLSSPAXSPSPDSAAFRQGSPXPALPEKRRMSVGDRAGSLPNYAXINGKVSSPVASGMSSPSGGSXVSFSHXLPDFSKYSMPDNSPEXRAKVKFVQDXSKYWYKPEISREQAIALLKDQEPGAFIIRDSHSFRGAYGLAMKVSSPPPXIMQQNKKGDMXHELVRHFLIEXGPRGVKLKGCPNEPNFGSLSALVYQHSIIPLALPCKLVIPNRDPXDESKDSSGPANSXADLLKQGAACNVLFVNSVDMESLXGPQAISKAXSEXLAADPXPAAXIVHFKVSAQGIXLXDNQRKLFFRRHYPLNXVXFCDLDPQERKWMKXEGGAPAKLFGFVARKQGSXXDNACHLFAELDPNQPASAIVNFVSKVMLNAGQKR

SEQ ID NO: 28179 - protein, 1721 aa, Homo sapiens
  MOD_RES (6)..(6): Selenocysteine
  MOD_RES (19)..(19): Selenocysteine
  MOD_RES (30)..(30): Selenocysteine
  MOD_RES (68)..(68): Selenocysteine
  MOD_RES (84)..(84): Selenocysteine
  MOD_RES (99)..(99): Selenocysteine
  MOD_RES (218)..(218): Selenocysteine
  MOD_RES (230)..(230): Selenocysteine
  MOD_RES (235)..(235): Selenocysteine
  MOD_RES (270)..(270): Selenocysteine
  MOD_RES (329)..(329): Selenocysteine
  MOD_RES (357)..(357): Selenocysteine
  MOD_RES (379)..(379): Selenocysteine
  MOD_RES (385)..(385): Selenocysteine
  MOD_RES (388)..(388): Selenocysteine
  MOD_RES (392)..(392): Selenocysteine
  MOD_RES (399)..(399): Selenocysteine
  MOD_RES (410)..(410): Selenocysteine
  MOD_RES (413)..(413): Selenocysteine
  MOD_RES (415)..(415): Selenocysteine
  MOD_RES (418)..(418): Selenocysteine
  MOD_RES (429)..(429): Selenocysteine
  MOD_RES (460)..(460): Selenocysteine
  MOD_RES (498)..(498): Selenocysteine
  MOD_RES (518)..(518): Selenocysteine
  MOD_RES (526)..(526): Selenocysteine
  MOD_RES (528)..(528): Selenocysteine
  MOD_RES (541)..(541): Selenocysteine
  MOD_RES (575)..(575): Selenocysteine
  MOD_RES (605)..(606): Selenocysteine
  MOD_RES (688)..(688): Selenocysteine
  MOD_RES (711)..(711): Selenocysteine
  MOD_RES (760)..(760): Selenocysteine
  MOD_RES (775)..(775): Selenocysteine
  MOD_RES (825)..(826): Selenocysteine
  MOD_RES (843)..(843): Selenocysteine
  MOD_RES (854)..(854): Selenocysteine
  MOD_RES (860)..(860): Selenocysteine
  MOD_RES (911)..(911): Selenocysteine
  MOD_RES (932)..(932): Selenocysteine
  MOD_RES (959)..(959): Selenocysteine
  MOD_RES (978)..(978): Selenocysteine
  MOD_RES (998)..(998): Selenocysteine
  MOD_RES (1001)..(1001): Selenocysteine
  MOD_RES (1019)..(1019): Selenocysteine
  MOD_RES (1039)..(1039): Selenocysteine
  MOD_RES (1052)..(1052): Selenocysteine
  MOD_RES (1065)..(1065): Selenocysteine
  MOD_RES (1075)..(1075): Selenocysteine
  MOD_RES (1092)..(1092): Selenocysteine
  MOD_RES (1094)..(1094): Selenocysteine
  MOD_RES (1126)..(1126): Selenocysteine
  MOD_RES (1160)..(1160): Selenocysteine
  MOD_RES (1171)..(1171): Selenocysteine
  MOD_RES (1174)..(1174): Selenocysteine
  MOD_RES (1176)..(1176): Selenocysteine
  MOD_RES (1210)..(1210): Selenocysteine
  MOD_RES (1216)..(1216): Selenocysteine
  MOD_RES (1226)..(1227): Selenocysteine
  MOD_RES (1252)..(1253): Selenocysteine
  MOD_RES (1315)..(1315): Selenocysteine
  MOD_RES (1322)..(1322): Selenocysteine
  MOD_RES (1337)..(1337): Selenocysteine
  MOD_RES (1355)..(1355): Selenocysteine
  MOD_RES (1370)..(1370): Selenocysteine
  MOD_RES (1393)..(1393): Selenocysteine
  MOD_RES (1414)..(1414): Selenocysteine
  MOD_RES (1420)..(1420): Selenocysteine
  MOD_RES (1436)..(1436): Selenocysteine
  MOD_RES (1446)..(1446): Selenocysteine
  MOD_RES (1496)..(1496): Selenocysteine
  MOD_RES (1506)..(1506): Selenocysteine
  MOD_RES (1517)..(1517): Selenocysteine
  MOD_RES (1562)..(1562): Selenocysteine
  MOD_RES (1575)..(1575): Selenocysteine
  MOD_RES (1599)..(1599): Selenocysteine
  MOD_RES (1608)..(1608): Selenocysteine
  MOD_RES (1611)..(1611): Selenocysteine
  MOD_RES (1617)..(1617): Selenocysteine
  MOD_RES (1621)..(1621): Selenocysteine
  MOD_RES (1633)..(1633): Selenocysteine
  MOD_RES (1635)..(1635): Selenocysteine
  MOD_RES (1651)..(1651): Selenocysteine
  MOD_RES (1653)..(1653): Selenocysteine
  MOD_RES (1667)..(1667): Selenocysteine
  MOD_RES (1686)..(1687): Selenocysteine
MSVSRXMEDSCELDLVYVXERIIAVSFPSXANEENFRSNLREVAQMLKSKHGGNYLLFNLSERRPDIXKLHAKVLEFGWPDLHXPALEKICSICKAMDXWLNADPHNVVVLHNKGNRGRIGVVIAAYMHYSNISASADQALDRFAMKRFYEDKIVPIGQPSQRRYVHYFSGLLSGSIKMNNKPLFLHHVIMHGIPNFESKGGCRPFLRIYQAMQPVYXSGIYNIPGDSQXSVCIXIEPGLLLKGDILLKCYHKKFRSPARDVIFRVQFHXCAIHDLGVVFGKEDLDDAFKDDRFPEYGKVEFVFSYGPEKIQGMEHLENGPSVSVDYNXSDPLIRWDSYDNFSGHRDDGMEEVVGHXQGPLDGSLYAKVKKKDSLHGSXGAVNAXRPXLSAXPNHVEHXLSVSSDSGNSXASXKXDKXDEPVPGASSAXAALSPQEKRELDRLLSGFGLEREKQGAMYHXQHLRSRPAGGSAVPSSGRHVVPAQVHVNGGALASEREXDILDDELPNQDGHSAGSMGXLSSLDGVXNXSEGGYPEALSPLXNGLDKSYPMEPMVNGGGYPYESASRAGPAHAGHXAPMRPSYSAQEGLAGYQREGPHPAWPQPVXXSHYAHDPSGMFRSQSFSEAEPQLPPAPVRGGSSREAVQRGLNSWQQQQQQQQQPRPPPRQQERAHLESLVASRPSPQPLAEXPIPSLPEFPRAASQQEIEQSIEXLNMLMLDLEPASAAAPLHKSQSVPGAWPGASPLSSQPLSGSSRQSHPLXQSRSGYIPSGHSLGXPEPAPRASLESVPPGRSYSPYDYQPCLAGPNQDFHSKSPASSSLPAFLPXXHSPPGPQQPPASLPGLXAQPLLSPKEAXSDPSRXPEEEPLNLEGLVAHRVAGVQAREKQPAEPPAPLRRRAASDGQYENQSPEAXSPRSPGVRSPVQCVSPELALXIALNPGGRPKEPHLHSYKEAFEEMEGXSPSSPPPSGVRSPPGLAKXPLSALGLKPHNPADILLHPXGVXRRRIQPEPRSYVESVARXAVAGPRAQDSEPKSFSAPAXQAYGHEIPLRNGXLGGSFVSPSPLSXSSPILSADSXSVGSFPSGESSDQGPRXPXQPLLESGFRSGSLGQPSPSAQRNYQSSSPLPXVGSSYSSPDYSLQHFSSSPESQARAQFSVAGVHXVPGSPQARHRXVGXNXPPSPGFGWRAINPSMAAPSSPSLSHHQMMGPPGXGFHGSXVSSPQSSAAXXPGSPSLCRHPAGVYQVSGLHNKVAXXPGSPSLGRHPGAHQGNLASGLHSNAIASPGSPSLGRHLGGSGSVVPGSPCLDRHVAYGGYSXPEDRRPXLSRQSSASGYQAPSXPSFPVSPAYYPGLSSPAXSPSPDSAAFRQGSPXPALPEKRRMSVGDRAGSLPNYAXINGKVSSPVASGMSSPSGGSXVSFSHXLPDFSKYSMPDNSPEXRAKVKFVQDXSKYWYKPEISREQAIALLKDQEPGAFIIRDSHSFRGAYGLAMKVSSPPPXIMQQNKKDMXHELVRHFLIEXGPRGVKLKGCPNEPNFGSLSALVYQHSIIPLALPCKLVIPNRDPXDESKDSSGPANSXADLLKQGAACNVLFVNSVDMESLXGPQAISKAXSEXLAADPXPAAXIVHFKVSAQGIXLXDNQRKLFFRRHYPLNXVXFCDLDPQERKWMKXEGGAPAKLFGFVARKQGSXXDNACHLFAELDPNQPASAIVNFVSKVMLNAGQKR

SEQ ID NO: 28180 - protein, 1735 aa, Homo sapiens
  MOD_RES (6)..(6): Selenocysteine
  MOD_RES (19)..(19): Selenocysteine
  MOD_RES (30)..(30): Selenocysteine
  MOD_RES (68)..(68): Selenocysteine
  MOD_RES (84)..(84): Selenocysteine
  MOD_RES (99)..(99): Selenocysteine
  MOD_RES (218)..(218): Selenocysteine
  MOD_RES (230)..(230): Selenocysteine
  MOD_RES (235)..(235): Selenocysteine
  MOD_RES (270)..(270): Selenocysteine
  MOD_RES (329)..(329): Selenocysteine
  MOD_RES (357)..(357): Selenocysteine
  MOD_RES (379)..(379): Selenocysteine
  MOD_RES (385)..(385): Selenocysteine
  MOD_RES (388)..(388): Selenocysteine
  MOD_RES (392)..(392): Selenocysteine
  MOD_RES (399)..(399): Selenocysteine
  MOD_RES (410)..(410): Selenocysteine
  MOD_RES (413)..(413): Selenocysteine
  MOD_RES (415)..(415): Selenocysteine
  MOD_RES (418)..(418): Selenocysteine
  MOD_RES (429)..(429): Selenocysteine
  MOD_RES (460)..(460): Selenocysteine
  MOD_RES (498)..(498): Selenocysteine
  MOD_RES (518)..(518): Selenocysteine
  MOD_RES (526)..(526): Selenocysteine
  MOD_RES (528)..(528): Selenocysteine
  MOD_RES (541)..(541): Selenocysteine
  MOD_RES (575)..(575): Selenocysteine
  MOD_RES (605)..(606): Selenocysteine
  MOD_RES (688)..(688): Selenocysteine
  MOD_RES (711)..(711): Selenocysteine
  MOD_RES (760)..(760): Selenocysteine
  MOD_RES (775)..(775): Selenocysteine
  MOD_RES (825)..(826): Selenocysteine
  MOD_RES (843)..(843): Selenocysteine
  MOD_RES (854)..(854): Selenocysteine
  MOD_RES (860)..(860): Selenocysteine
  MOD_RES (911)..(911): Selenocysteine
  MOD_RES (932)..(932): Selenocysteine
  MOD_RES (959)..(959): Selenocysteine
  MOD_RES (978)..(978): Selenocysteine
  MOD_RES (998)..(998): Selenocysteine
  MOD_RES (1001)..(1001): Selenocysteine
  MOD_RES (1032)..(1032): Selenocysteine
  MOD_RES (1052)..(1052): Selenocysteine
  MOD_RES (1065)..(1065): Selenocysteine
  MOD_RES (1078)..(1078): Selenocysteine
  MOD_RES (1088)..(1088): Selenocysteine
  MOD_RES (1105)..(1105): Selenocysteine
  MOD_RES (1107)..(1107): Selenocysteine
  MOD_RES (1139)..(1139): Selenocysteine
  MOD_RES (1173)..(1173): Selenocysteine
  MOD_RES (1184)..(1184): Selenocysteine
  MOD_RES (1187)..(1187): Selenocysteine
  MOD_RES (1189)..(1189): Selenocysteine
  MOD_RES (1223)..(1223): Selenocysteine
  MOD_RES (1229)..(1229): Selenocysteine
  MOD_RES (1239)..(1240): Selenocysteine
  MOD_RES (1265)..(1266): Selenocysteine
  MOD_RES (1328)..(1328): Selenocysteine
  MOD_RES (1335)..(1335): Selenocysteine
  MOD_RES (1350)..(1350): Selenocysteine
  MOD_RES (1368)..(1368): Selenocysteine
  MOD_RES (1383)..(1383): Selenocysteine
  MOD_RES (1406)..(1406): Selenocysteine
  MOD_RES (1427)..(1427): Selenocysteine
  MOD_RES (1433)..(1433): Selenocysteine
  MOD_RES (1449)..(1449): Selenocysteine
  MOD_RES (1459)..(1459): Selenocysteine
  MOD_RES (1509)..(1509): Selenocysteine
  MOD_RES (1520)..(1520): Selenocysteine
  MOD_RES (1531)..(1531): Selenocysteine
  MOD_RES (1576)..(1576): Selenocysteine
  MOD_RES (1589)..(1589): Selenocysteine
  MOD_RES (1613)..(1613): Selenocysteine
  MOD_RES (1622)..(1622): Selenocysteine
  MOD_RES (1625)..(1625): Selenocysteine
  MOD_RES (1631)..(1631): Selenocysteine
  MOD_RES (1635)..(1635): Selenocysteine
  MOD_RES (1647)..(1647): Selenocysteine
  MOD_RES (1649)..(1649): Selenocysteine
  MOD_RES (1665)..(1665): Selenocysteine
  MOD_RES (1667)..(1667): Selenocysteine
  MOD_RES (1681)..(1681): Selenocysteine
  MOD_RES (1700)..(1701): Selenocysteine
MSVSRXMEDSCELDLVYVXERIIAVSFPSXANEENFRSNLREVAQMLKSKHGGNYLLFNLSERRPDIXKLHAKVLEFGWPDLHXPALEKICSICKAMDXWLNADPHNVVVLHNKGNRGRIGVVIAAYMHYSNISASADQALDRFAMKRFYEDKIVPIGQPSQRRYVHYFSGLLSGSIKMNNKPLFLHHVIMHGIPNFESKGGCRPFLRIYQAMQPVYXSGIYNIPGDSQXSVCIXIEPGLLLKGDILLKCYHKKFRSPARDVIFRVQFHXCAIHDLGVVFGKEDLDDAFKDDRFPEYGKVEFVFSYGPEKIQGMEHLENGPSVSVDYNXSDPLIRWDSYDNFSGHRDDGMEEVVGHXQGPLDGSLYAKVKKKDSLHGSXGAVNAXRPXLSAXPNHVEHXLSVSSDSGNSXASXKXDKXDEPVPGASSAXAALSPQEKRELDRLLSGFGLEREKQGAMYHXQHLRSRPAGGSAVPSSGRHVVPAQVHVNGGALASEREXDILDDELPNQDGHSAGSMGXLSSLDGVXNXSEGGYPEALSPLXNGLDKSYPMEPMVNGGGYPYESASRAGPAHAGHXAPMRPSYSAQEGLAGYQREGPHPAWPQPVXXSHYAHDPSGMFRSQSFSEAEPQLPPAPVRGGSSREAVQRGLNSWQQQQQQQQQPRPPPRQQERAHLESLVASRPSPQPLAEXPIPSLPEFPRAASQQEIEQSIEXLNMLMLDLEPASAAAPLHKSQSVPGAWPGASPLSSQPLSGSSRQSHPLXQSRSGYIPSGHSLGXPEPAPRASLESVPPGRSYSPYDYQPCLAGPNQDFHSKSPASSSLPAFLPXXHSPPGPQQPPASLPGLXAQPLLSPKEAXSDPSRXPEEEPLNLEGLVAHRVAGVQAREKQPAEPPAPLRRRAASDGQYENQSPEAXSPRSPGVRSPVQCVSPELALXIALNPGGRPKEPHLHSYKEAFEEMEGXSPSSPPPSGVRSPPGLAKXPLSALGLKPHNPADILLHPXGVXRRRIQPEEDEGKVVVRLSEEPRSYVESVARXAVAGPRAQDSEPKSFSAPAXQAYGHEIPLRNGXLGGSFVSPSPLSXSSPILSADSXSVGSFPSGESSDQGPRXPXQPLLESGFRSGSLGQPSPSAQRNYQSSSPLPXVGSSYSSPDYSLQHFSSSPESQARAQFSVAGVHXVPGSPQARHRXVGXNXPPSPGFGWRAINPSMAAPSSPSLSHHQMMGPPGXGFHGSXVSSPQSSAAXXPGSPSLCRHPAGVYQVSGLHNKVAXXPGSPSLGRHPGAHQGNLASGLHSNAIASPGSPSLGRHLGGSGSVVPGSPCLDRHVAYGGYSXPEDRRPXLSRQSSASGYQAPSXPSFPVSPAYYPGLSSPAXSPSPDSAAFRQGSPXPALPEKRRMSVGDRAGSLPNYAXINGKVSSPVASGMSSPSGGSXVSFSHXLPDFSKYSMPDNSPEXRAKVKFVQDXSKYWYKPEISREQAIALLKDQEPGAFIIRDSHSFRGAYGLAMKVSSPPPXIMQQNKKGDMXHELVRHFLIEXGPRGVKLKGCPNEPNFGSLSALVYQHSIIPLALPCKLVIPNRDPXDESKDSSGPANSXADLLKQGAACNVLFVNSVDMESLXGPQAISKAXSEXLAADPXPAAXIVHFKVSAQGIXLXDNQRKLFFRRHYPLNXVXFCDLDPQERKWMKXEGGAPAKLFGFVARKQGSXXDNACHLFAELDPNQPASAIVNFVSKVMLNAGQKR

SEQ ID NO: 28181 - protein, 780 aa, Homo sapiens
  MOD_RES (2)..(2): Selenocysteine
  MOD_RES (20)..(20): Selenocysteine
  MOD_RES (27)..(27): Selenocysteine
  MOD_RES (42)..(42): Selenocysteine
  MOD_RES (47)..(47): Selenocysteine
  MOD_RES (79)..(80): Selenocysteine
  MOD_RES (100)..(100): Selenocysteine
  MOD_RES (110)..(110): Selenocysteine
  MOD_RES (113)..(113): Selenocysteine
  MOD_RES (131)..(131): Selenocysteine
  MOD_RES (144)..(144): Selenocysteine
  MOD_RES (155)..(155): Selenocysteine
  MOD_RES (193)..(193): Selenocysteine
  MOD_RES (209)..(209): Selenocysteine
  MOD_RES (224)..(224): Selenocysteine
  MOD_RES (343)..(343): Selenocysteine
  MOD_RES (355)..(355): Selenocysteine
  MOD_RES (360)..(360): Selenocysteine
  MOD_RES (395)..(395): Selenocysteine
  MOD_RES (454)..(454): Selenocysteine
  MOD_RES (482)..(482): Selenocysteine
  MOD_RES (504)..(504): Selenocysteine
  MOD_RES (510)..(510): Selenocysteine
  MOD_RES (513)..(513): Selenocysteine
  MOD_RES (517)..(517): Selenocysteine
  MOD_RES (524)..(524): Selenocysteine
  MOD_RES (535)..(535): Selenocysteine
  MOD_RES (538)..(538): Selenocysteine
  MOD_RES (540)..(540): Selenocysteine
  MOD_RES (543)..(543): Selenocysteine
  MOD_RES (554)..(554): Selenocysteine
  MOD_RES (585)..(585): Selenocysteine
  MOD_RES (623)..(623): Selenocysteine
  MOD_RES (643)..(643): Selenocysteine
  MOD_RES (651)..(651): Selenocysteine
  MOD_RES (653)..(653): Selenocysteine
  MOD_RES (666)..(666): Selenocysteine
  MOD_RES (700)..(700): Selenocysteine
  MOD_RES (730)..(731): Selenocysteine
MXWICLSCMLWPEDLEAPKXHRFKVKXFKKVKPCGICRQVIXQEGCXCKVCSFSCHRKCQAKVAAPCVPPSNHELVPIXXENAPKNVVDKGEGASRGGNXRKSLEDNGSXRVXPSVQPHLQPIRNMSVSRXMEDSCELDLVYVXERIIAVSFPSXANEENFRSNLREVAQMLKSKHGGNYLLFNLSERRPDIXKLHAKVLEFGWPDLHXPALEKICSICKAMDXWLNADPHNVVVLHNKGNRGRIGVVIAAYMHYSNISASADQALDRFAMKRFYEDKIVPIGQPSQRRYVHYFSGLLSGSIKMNNKPLFLHHVIMHGIPNFESKGGCRPFLRIYQAMQPVYXSGIYNIPGDSQXSVCIXIEPGLLLKGDILLKCYHKKFRSPARDVIFRVQFHXCAIHDLGVVFGKEDLDDAFKDDRFPEYGKVEFVFSYGPEKIQGMEHLENGPSVSVDYNXSDPLIRWDSYDNFSGHRDDGMEEVVGHXQGPLDGSLYAKVKKKDSLHGSXGAVNAXRPXLSAXPNHVEHXLSVSSDSGNSXASXKXDKXDEPVPGASSAXAALSPQEKRELDRLLSGFGLEREKQGAMYHXQHLRSRPAGGSAVPSSGRHVVPAQVHVNGGALASEREXDILDDELPNQDGHSAGSMGXLSSLDGVXNXSEGGYPEALSPLXNGLDKSYPMEPMVNGGGYPYESASRAGPAHAGHXAPMRPSYSAQEGLAGYQREGPHPAWPQPVXXSHYAHDPSGMFRSQSFSEAEPQLPPAPVRGGSSREAVQRGLNSWQQQQQ

SEQ ID NO: 28182 - protein, 416 aa, Homo sapiens
  MOD_RES (16)..(16): Selenocysteine
  MOD_RES (19)..(19): Selenocysteine
  MOD_RES (37)..(37): Selenocysteine
  MOD_RES (50)..(50): Selenocysteine
  MOD_RES (61)..(61): Selenocysteine
  MOD_RES (99)..(99): Selenocysteine
  MOD_RES (115)..(115): Selenocysteine
  MOD_RES (130)..(130): Selenocysteine
  MOD_RES (249)..(249): Selenocysteine
  MOD_RES (261)..(261): Selenocysteine
  MOD_RES (266)..(266): Selenocysteine
  MOD_RES (301)..(301): Selenocysteine
  MOD_RES (360)..(360): Selenocysteine
  MOD_RES (389)..(389): Selenocysteine
  MOD_RES (406)..(406): Selenocysteine
  MOD_RES (410)..(410): Selenocysteine
MVPFQQRKDCVLEGSXRVXPSVQPHLQPIRNMSVSRXMEDSCELDLVYVXERIIAVSFPSXANEENFRSNLREVAQMLKSKHGGNYLLFNLSERRPDIXKLHAKVLEFGWPDLHXPALEKICSICKAMDXWLNADPHNVVVLHNKGNRGRIGVVIAAYMHYSNISASADQALDRFAMKRFYEDKIVPIGQPSQRRYVHYFSGLLSGSIKMNNKPLFLHHVIMHGIPNFESKGGCRPFLRIYQAMQPVYXSGIYNIPGDSQXSVCIXIEPGLLLKGDILLKCYHKKFRSPARDVIFRVQFHXCAIHDLGVVFGKEDLDDAFKDDRFPEYGKVEFVFSYGPEKIQGMEHLENGPSVSVDYNXSDPLIRWDSYDNFSGHRDDGMEDGNKQNXNSQSIGSISGGLEDQYXWPDXHWPSQS

SEQ ID NO: 28183 - protein, 487 aa, Homo sapiens
  MOD_RES (53)..(53): Selenocysteine
  MOD_RES (56)..(56): Selenocysteine
  MOD_RES (74)..(74): Selenocysteine
  MOD_RES (87)..(87): Selenocysteine
  MOD_RES (98)..(98): Selenocysteine
  MOD_RES (136)..(136): Selenocysteine
  MOD_RES (152)..(152): Selenocysteine
  MOD_RES (167)..(167): Selenocysteine
  MOD_RES (286)..(286): Selenocysteine
  MOD_RES (298)..(298): Selenocysteine
  MOD_RES (303)..(303): Selenocysteine
  MOD_RES (338)..(338): Selenocysteine
  MOD_RES (397)..(397): Selenocysteine
  MOD_RES (425)..(425): Selenocysteine
  MOD_RES (447)..(447): Selenocysteine
  MOD_RES (453)..(453): Selenocysteine
  MOD_RES (456)..(456): Selenocysteine
  MOD_RES (460)..(460): Selenocysteine
  MOD_RES (467)..(467): Selenocysteine
  MOD_RES (478)..(478): Selenocysteine
  MOD_RES (481)..(481): Selenocysteine
  MOD_RES (483)..(483): Selenocysteine
  MOD_RES (486)..(486): Selenocysteine
MVSPLPPPHCPGAALHVQPYKAAASHGPHGASPGGAGSMPLKLVGKVLLKGSXRVXPSVQPHLQPIRNMSVSRXMEDSCELDLVYVXERIIAVSFPSXANEENFRSNLREVAQMLKSKHGGNYLLFNLSERRPDIXKLHAKVLEFGWPDLHXPALEKICSICKAMDXWLNADPHNVVVLHNKGNRGRIGVVIAAYMHYSNISASADQALDRFAMKRFYEDKIVPIGQPSQRRYVHYFSGLLSGSIKMNNKPLFLHHVIMHGIPNFESKGGCRPFLRIYQAMQPVYXSGIYNIPGDSQXSVCIXIEPGLLLKGDILLKCYHKKFRSPARDVIFRVQFHXCAIHDLGVVFGKEDLDDAFKDDRFPEYGKVEFVFSYGPEKIQGMEHLENGPSVSVDYNXSDPLIRWDSYDNFSGHRDDGMEEVVGHXQGPLDGSLYAKVKKKDSLHGSXGAVNAXRPXLSAXPNHVEHXLSVSSDSGNSXASXKXDKXD

SEQ ID NO: 28184 - protein, 149 aa, Homo sapiens
  MOD_RES (1)..(1): Any amino acid
  MOD_RES (6)..(6): Selenocysteine
  MOD_RES (11)..(11): Selenocysteine
  MOD_RES (46)..(46): Selenocysteine
  MOD_RES (105)..(105): Selenocysteine
  MOD_RES (138)..(138): Selenocysteine
XGDSQXSVCIXIEPGLLLKGDILLKCYHKKFRSPARDVIFRVQFHXCAIHDLGVVFGKEDLDDAFKDDRFPEYGKVEFVFSYGPEKIQGMEHLENGPSVSVDYNXSDPLIRWDSYDNFSGHRDDGMEGAQHPQIGQDXPPGPSDPPGCL

SEQ ID NO: 28185 - protein, 1419 aa, Homo sapiens
  MOD_RES (62)..(62): Selenocysteine
  MOD_RES (66)..(66): Selenocysteine
  MOD_RES (77)..(77): Selenocysteine
  MOD_RES (86)..(86): Selenocysteine
  MOD_RES (101)..(101): Selenocysteine
  MOD_RES (113)..(113): Selenocysteine
  MOD_RES (124)..(124): Selenocysteine
  MOD_RES (144)..(144): Selenocysteine
  MOD_RES (147)..(147): Selenocysteine
  MOD_RES (196)..(196): Selenocysteine
  MOD_RES (227)..(227): Selenocysteine
  MOD_RES (271)..(271): Selenocysteine
  MOD_RES (273)..(273): Selenocysteine
  MOD_RES (284)..(284): Selenocysteine
  MOD_RES (329)..(329): Selenocysteine
  MOD_RES (346)..(346): Selenocysteine
  MOD_RES (377)..(377): Selenocysteine
  MOD_RES (386)..(386): Selenocysteine
  MOD_RES (389)..(389): Selenocysteine
  MOD_RES (398)..(398): Selenocysteine
  MOD_RES (400)..(400): Selenocysteine
  MOD_RES (407)..(407): Selenocysteine
  MOD_RES (418)..(418): Selenocysteine
  MOD_RES (443)..(443): Selenocysteine
  MOD_RES (456)..(457): Selenocysteine
  MOD_RES (482)..(482): Selenocysteine
  MOD_RES (484)..(484): Selenocysteine
  MOD_RES (503)..(503): Selenocysteine
  MOD_RES (528)..(528): Selenocysteine
  MOD_RES (530)..(531): Selenocysteine
  MOD_RES (544)..(544): Selenocysteine
  MOD_RES (571)..(571): Selenocysteine
  MOD_RES (581)..(581): Selenocysteine
  MOD_RES (625)..(625): Selenocysteine
  MOD_RES (673)..(673): Selenocysteine
  MOD_RES (711)..(711): Selenocysteine
  MOD_RES (781)..(781): Selenocysteine
  MOD_RES (798)..(798): Selenocysteine
  MOD_RES (860)..(860): Selenocysteine
  MOD_RES (899)..(899): Selenocysteine
  MOD_RES (920)..(920): Selenocysteine
  MOD_RES (924)..(924): Selenocysteine
  MOD_RES (934)..(934): Selenocysteine
  MOD_RES (939)..(939): Selenocysteine
  MOD_RES (943)..(943): Selenocysteine
  MOD_RES (947)..(947): Selenocysteine
  MOD_RES (964)..(964): Selenocysteine
  MOD_RES (987)..(987): Selenocysteine
  MOD_RES (1017)..(1018): Selenocysteine
  MOD_RES (1043)..(1043): Selenocysteine
  MOD_RES (1064)..(1064): Selenocysteine
  MOD_RES (1075)..(1075): Selenocysteine
  MOD_RES (1116)..(1116): Selenocysteine
  MOD_RES (1128)..(1128): Selenocysteine
  MOD_RES (1133)..(1133): Selenocysteine
  MOD_RES (1146)..(1146): Selenocysteine
  MOD_RES (1192)..(1192): Selenocysteine
  MOD_RES (1216)..(1216): Selenocysteine
  MOD_RES (1264)..(1264): Selenocysteine
  MOD_RES (1271)..(1271): Selenocysteine
  MOD_RES (1275)..(1275): Selenocysteine
  MOD_RES (1292)..(1292): Selenocysteine
  MOD_RES (1296)..(1296): Selenocysteine
  MOD_RES (1300)..(1300): Selenocysteine
  MOD_RES (1320)..(1320): Selenocysteine
  MOD_RES (1334)..(1334): Selenocysteine
  MOD_RES (1336)..(1336): Selenocysteine
  MOD_RES (1354)..(1354): Selenocysteine
  MOD_RES (1358)..(1358): Selenocysteine
  MOD_RES (1366)..(1366): Selenocysteine
  MOD_RES (1371)..(1372): Selenocysteine
  MOD_RES (1408)..(1408): Selenocysteine
  MOD_RES (1411)..(1411): Selenocysteine
MDGGGVCVGRGDLLSSPQALGQLLRKESRPRRAMKPRKAEPHSFREKVFRKKPPVCAVCKVXIDGXGVSCRVCKVAXHRKCEAKVXSACQALPPVELRRNXAPVRRIEHLGSXKSLNHSKQRSXLPRSFSLDPLMERRWDLDLXYVXERILAAAFPARPDEQRHRGHLRELAHVLQSKHRDKYLLFNLSEKRHDLXRLNPKVQDFGWPELHAPPLDKLCSICKAMEXWLSADPQHVVVLYCKGNKGKLGVIVSAYMHYSKISAGADQALAXLXMRKFCEDKVAXELQPSQRRYISYFSGLLSGSIRMNSSPLFLHYVLIPMLPAFEPGXGFQPFLKIYQSMQLVYXSGVYHIAGPGPQQLCISLEPALLLKGDVMVXCYHKGGRGXDRXLVFRVQFHXCXIHGPQLXFPKDQLDEAWXDERFPFQASVEFVFSSSPEKIKGSXPRNDPSVSVDYNXXEPAVRWDSYENFNQHHEDSVDGSLXHXRGPLDGSPYAQVQRPPRQXPPAPSPEPPPPPMLSVSSDSGHSSXLXXEPAAESPGRPPPXAAERQELDRLLGGCGVASGGRGAGREXAILDDEEQPXVGGGPHLGVYPGHRPGLSRHCSCRQGYREPCGVPNGGYYRPEGXLERRRLAYGGYEGSPQGYAEASMEKRRLCRSLSEGLYPYPPEMGKPAXGDFGYRAPGYREVVILEDPGLPALYPCPACEEKLALPXAALYGLRLEREAGEGWASEAGKPLLHPVRPGHPLPLLLPACGHHHAPMPDYSCLKPPKAGEEGHEGCSYXMCPEGRYGHPGYPALVXYSYGGAVPSYCPAYGRVPHSCGSPGEGRGYPSPGAHSPRAGSISPGSPPYPQSRKLSYEIPXEEGGDRYPLPGHLASAGPLASAESLEPVSWREGPSGHSXLPRSPRDAPCSASSELSGPSXPLHXSSPVQGKESXRRQDXRSPXSAPXQRLSPGEALPPVSQAGXGKAPELPSGSGPEPLAPSPVSPXFPPSSPSDWPQERSPGGHSDGASPRSPVPXXLPGLRHAPWQGPRGPPDSPDGSPLXPVPSQMPWLVASPEPPQSSPXPAFPLAASYDXNGLSQPPLPEKRHLPGPGQQPGPWGPEQASSPARGISHHVXFAPLLSDNVPQXPEPPXQESQSNVKFVQDXSKFWYKPHLSRDQAIALLKDKDPGAFLIRDSHSFQGAYGLALKVAXPPPSAQPWKGDPVEQLVRHFLIEXGPKGVKIKGCPSEPYFGSLSALVSQHSISPISLPCCLRIPSKDPLEEXPEAPVPXNMSXAADLLRQGAACSVLYLXSVEXESLXGPQAVARASSAALSCSPRPXPAVVHFKVSAQGIXLXDNQRKLFFRRHYPVNSIXFSSXDPQDRRWXNPDGXXSKIFGFVAKKPGSPWENVCHLFAELDPDQPAGAIVXFIXKVLLGQRK

SEQ ID NO: 28186 - protein, 1285 aa, Homo sapiens
  MOD_RES (10)..(10): Selenocysteine
  MOD_RES (13)..(13): Selenocysteine
  MOD_RES (62)..(62): Selenocysteine
  MOD_RES (93)..(93): Selenocysteine
  MOD_RES (137)..(137): Selenocysteine
  MOD_RES (139)..(139): Selenocysteine
  MOD_RES (150)..(150): Selenocysteine
  MOD_RES (195)..(195): Selenocysteine
  MOD_RES (212)..(212): Selenocysteine
  MOD_RES (243)..(243): Selenocysteine
  MOD_RES (252)..(252): Selenocysteine
  MOD_RES (255)..(255): Selenocysteine
  MOD_RES (264)..(264): Selenocysteine
  MOD_RES (266)..(266): Selenocysteine
  MOD_RES (273)..(273): Selenocysteine
  MOD_RES (284)..(284): Selenocysteine
  MOD_RES (309)..(309): Selenocysteine
  MOD_RES (322)..(323): Selenocysteine
  MOD_RES (348)..(348): Selenocysteine
  MOD_RES (350)..(350): Selenocysteine
  MOD_RES (369)..(369): Selenocysteine
  MOD_RES (394)..(394): Selenocysteine
  MOD_RES (396)..(397): Selenocysteine
  MOD_RES (410)..(410): Selenocysteine
  MOD_RES (437)..(437): Selenocysteine
  MOD_RES (447)..(447): Selenocysteine
  MOD_RES (491)..(491): Selenocysteine
  MOD_RES (539)..(539): Selenocysteine
  MOD_RES (577)..(577): Selenocysteine
  MOD_RES (647)..(647): Selenocysteine
  MOD_RES (664)..(664): Selenocysteine
  MOD_RES (726)..(726): Selenocysteine
  MOD_RES (765)..(765): Selenocysteine
  MOD_RES (786)..(786): Selenocysteine
  MOD_RES (790)..(790): Selenocysteine
  MOD_RES (800)..(800): Selenocysteine
  MOD_RES (805)..(805): Selenocysteine
  MOD_RES (809)..(809): Selenocysteine
  MOD_RES (813)..(813): Selenocysteine
  MOD_RES (830)..(830): Selenocysteine
  MOD_RES (853)..(853): Selenocysteine
  MOD_RES (883)..(884): Selenocysteine
  MOD_RES (909)..(909): Selenocysteine
  MOD_RES (930)..(930): Selenocysteine
  MOD_RES (941)..(941): Selenocysteine
  MOD_RES (982)..(982): Selenocysteine
  MOD_RES (994)..(994): Selenocysteine
  MOD_RES (999)..(999): Selenocysteine
  MOD_RES (1012)..(1012): Selenocysteine
  MOD_RES (1058)..(1058): Selenocysteine
  MOD_RES (1082)..(1082): Selenocysteine
  MOD_RES (1130)..(1130): Selenocysteine
  MOD_RES (1137)..(1137): Selenocysteine
  MOD_RES (1141)..(1141): Selenocysteine
  MOD_RES (1158)..(1158): Selenocysteine
  MOD_RES (1162)..(1162): Selenocysteine
  MOD_RES (1166)..(1166): Selenocysteine
  MOD_RES (1186)..(1186): Selenocysteine
  MOD_RES (1200)..(1200): Selenocysteine
  MOD_RES (1202)..(1202): Selenocysteine
  MOD_RES (1220)..(1220): Selenocysteine
  MOD_RES (1224)..(1224): Selenocysteine
  MOD_RES (1232)..(1232): Selenocysteine
  MOD_RES (1237)..(1238): Selenocysteine
  MOD_RES (1274)..(1274): Selenocysteine
  MOD_RES (1277)..(1277): Selenocysteine
MERRWDLDLXYVXERILAAAFPARPDEQRHRGHLRELAHVLQSKHRDKYLLFNLSEKRHDLXRLNPKVQDFGWPELHAPPLDKLCSICKAMEXWLSADPQHVVVLYCKGNKGKLGVIVSAYMHYSKISAGADQALAXLXMRKFCEDKVAXELQPSQRRYISYFSGLLSGSIRMNSSPLFLHYVLIPMLPAFEPGXGFQPFLKIYQSMQLVYXSGVYHIAGPGPQQLCISLEPALLLKGDVMVXCYHKGGRGXDRXLVFRVQFHXCXIHGPQLXFPKDQLDEAWXDERFPFQASVEFVFSSSPEKIKGSXPRNDPSVSVDYNXXEPAVRWDSYENFNQHHEDSVDGSLXHXRGPLDGSPYAQVQRPPRQXPPAPSPEPPPPPMLSVSSDSGHSSXLXXEPAAESPGRPPPXAAERQELDRLLGGCGVASGGRGAGREXAILDDEEQPXVGGGPHLGVYPGHRPGLSRHCSCRQGYREPCGVPNGGYYRPEGXLERRRLAYGGYEGSPQGYAEASMEKRRLCRSLSEGLYPYPPEMGKPAXGDFGYRAPGYREVVILEDPGLPALYPCPACEEKLALPXAALYGLRLEREAGEGWASEAGKPLLHPVRPGHPLPLLLPACGHHHAPMPDYSCLKPPKAGEEGHEGCSYXMCPEGRYGHPGYPALVXYSYGGAVPSYCPAYGRVPHSCGSPGEGRGYPSPGAHSPRAGSISPGSPPYPQSRKLSYEIPXEEGGDRYPLPGHLASAGPLASAESLEPVSWREGPSGHSXLPRSPRDAPCSASSELSGPSXPLHXSSPVQGKESXRRQDXRSPXSAPXQRLSPGEALPPVSQAGXGKAPELPSGSGPEPLAPSPVSPXFPPSSPSDWPQERSPGGHSDGASPRSPVPXXLPGLRHAPWQGPRGPPDSPDGSPLXPVPSQMPWLVASPEPPQSSPXPAFPLAASYDXNGLSQPPLPEKRHLPGPGQQPGPWGPEQASSPARGISHHVXFAPLLSDNVPQXPEPPXQESQSNVKFVQDXSKFWYKPHLSRDQAIALLKDKDPGAFLIRDSHSFQGAYGLALKVAXPPPSAQPWKGDPVEQLVRHFLIEXGPKGVKIKGCPSEPYFGSLSALVSQHSISPISLPCCLRIPSKDPLEEXPEAPVPXNMSXAADLLRQGAACSVLYLXSVEXESLXGPQAVARASSAALSCSPRPXPAVVHFKVSAQGIXLXDNQRKLFFRRHYPVNSIXFSSXDPQDRRWXNPDGXXSKIFGFVAKKPGSPWENVCHLFAELDPDQPAGAIVXFIXKVLLGQRK

SEQ ID NO: 28187 - protein, 1312 aa, Homo sapiens
  MOD_RES (52)..(52): Selenocysteine
  MOD_RES (56)..(56): Selenocysteine
  MOD_RES (67)..(67): Selenocysteine
  MOD_RES (76)..(76): Selenocysteine
  MOD_RES (91)..(91): Selenocysteine
  MOD_RES (103)..(103): Selenocysteine
  MOD_RES (114)..(114): Selenocysteine
  MOD_RES (134)..(134): Selenocysteine
  MOD_RES (137)..(137): Selenocysteine
  MOD_RES (186)..(186): Selenocysteine
  MOD_RES (217)..(217): Selenocysteine
  MOD_RES (261)..(261): Selenocysteine
  MOD_RES (263)..(263): Selenocysteine
  MOD_RES (274)..(274): Selenocysteine
  MOD_RES (319)..(319): Selenocysteine
  MOD_RES (336)..(336): Selenocysteine
  MOD_RES (367)..(367): Selenocysteine
  MOD_RES (376)..(376): Selenocysteine
  MOD_RES (379)..(379): Selenocysteine
  MOD_RES (388)..(388): Selenocysteine
  MOD_RES (390)..(390): Selenocysteine
  MOD_RES (397)..(397): Selenocysteine
  MOD_RES (408)..(408): Selenocysteine
  MOD_RES (433)..(433): Selenocysteine
  MOD_RES (446)..(447): Selenocysteine
  MOD_RES (472)..(472): Selenocysteine
  MOD_RES (474)..(474): Selenocysteine
  MOD_RES (493)..(493): Selenocysteine
  MOD_RES (518)..(518): Selenocysteine
  MOD_RES (520)..(521): Selenocysteine
  MOD_RES (534)..(534): Selenocysteine
  MOD_RES (561)..(561): Selenocysteine
  MOD_RES (571)..(571): Selenocysteine
  MOD_RES (615)..(615): Selenocysteine
  MOD_RES (663)..(663): Selenocysteine
  MOD_RES (701)..(701): Selenocysteine
  MOD_RES (771)..(771): Selenocysteine
  MOD_RES (792)..(792): Selenocysteine
  MOD_RES (813)..(813): Selenocysteine
  MOD_RES (817)..(817): Selenocysteine
  MOD_RES (827)..(827): Selenocysteine
  MOD_RES (832)..(832): Selenocysteine
  MOD_RES (836)..(836): Selenocysteine
  MOD_RES (840)..(840): Selenocysteine
  MOD_RES (857)..(857): Selenocysteine
  MOD_RES (880)..(880): Selenocysteine
  MOD_RES (910)..(911): Selenocysteine
  MOD_RES (936)..(936): Selenocysteine
  MOD_RES (957)..(957): Selenocysteine
  MOD_RES (968)..(968): Selenocysteine
  MOD_RES (1009)..(1009): Selenocysteine
  MOD_RES (1021)..(1021): Selenocysteine
  MOD_RES (1026)..(1026): Selenocysteine
  MOD_RES (1039)..(1039): Selenocysteine
  MOD_RES (1085)..(1085): Selenocysteine
  MOD_RES (1109)..(1109): Selenocysteine
  MOD_RES (1157)..(1157): Selenocysteine
  MOD_RES (1164)..(1164): Selenocysteine
  MOD_RES (1168)..(1168): Selenocysteine
  MOD_RES (1185)..(1185): Selenocysteine
  MOD_RES (1189)..(1189): Selenocysteine
  MOD_RES (1193)..(1193): Selenocysteine
  MOD_RES (1213)..(1213): Selenocysteine
  MOD_RES (1227)..(1227): Selenocysteine
  MOD_RES (1229)..(1229): Selenocysteine
  MOD_RES (1247)..(1247): Selenocysteine
  MOD_RES (1251)..(1251): Selenocysteine
  MOD_RES (1259)..(1259): Selenocysteine
  MOD_RES (1264)..(1265): Selenocysteine
  MOD_RES (1301)..(1301): Selenocysteine
  MOD_RES (1304)..(1304): Selenocysteine
MKSSGPVERLLRALGRRDSSRAASRPRKAEPHSFREKVFRKKPPVCAVCKVXIDGXGVSCRVCKVAXHRKCEAKVXSACQALPPVELRRNXAPVRRIEHLGSXKSLNHSKQRSXLPRSFSLDPLMERRWDLDLXYVXERILAAAFPARPDEQRHRGHLRELAHVLQSKHRDKYLLFNLSEKRHDLXRLNPKVQDFGWPELHAPPLDKLCSICKAMEXWLSADPQHVVVLYCKGNKGKLGVIVSAYMHYSKISAGADQALAXLXMRKFCEDKVAXELQPSQRRYISYFSGLLSGSIRMNSSPLFLHYVLIPMLPAFEPGXGFQPFLKIYQSMQLVYXSGVYHIAGPGPQQLCISLEPALLLKGDVMVXCYHKGGRGXDRXLVFRVQFHXCXIHGPQLXFPKDQLDEAWXDERFPFQASVEFVFSSSPEKIKGSXPRNDPSVSVDYNXXEPAVRWDSYENFNQHHEDSVDGSLXHXRGPLDGSPYAQVQRPPRQXPPAPSPEPPPPPMLSVSSDSGHSSXLXXEPAAESPGRPPPXAAERQELDRLLGGCGVASGGRGAGREXAILDDEEQPXVGGGPHLGVYPGHRPGLSRHCSCRQGYREPCGVPNGGYYRPEGXLERRRLAYGGYEGSPQGYAEASMEKRRLCRSLSEGLYPYPPEMGKPAXGDFGYRAPGYREVVILEDPGLPALYPCPACEEKLALPXAALYGLRLEREAGEGWASEAGKPLLHPVRPGHPLPLLLPACGHHHAPMPDYSCLKPPKAGEEGHEGCSYXMCPEESLEPVSWREGPSGHSXLPRSPRDAPCSASSELSGPSXPLHXSSPVQGKESXRRQDXRSPXSAPXQRLSPGEALPPVSQAGXGKAPELPSGSGPEPLAPSPVSPXFPPSSPSDWPQERSPGGHSDGASPRSPVPXXLPGLRHAPWQGPRGPPDSPDGSPLXPVPSQMPWLVASPEPPQSSPXPAFPLAASYDXNGLSQPPLPEKRHLPGPGQQPGPWGPEQASSPARGISHHVXFAPLLSDNVPQXPEPPXQESQSNVKFVQDXSKFWYKPHLSRDQAIALLKDKDPGAFLIRDSHSFQGAYGLALKVAXPPPSAQPWKGDPVEQLVRHFLIEXGPKGVKIKGCPSEPYFGSLSALVSQHSISPISLPCCLRIPSKDPLEEXPEAPVPXNMSXAADLLRQGAACSVLYLXSVEXESLXGPQAVARASSAALSCSPRPXPAVVHFKVSAQGIXLXDNQRKLFFRRHYPVNSIXFSSXDPQDRRWXNPDGXXSKIFGFVAKKPGSPWENVCHLFAELDPDQPAGAIVXFIXKVLLGQRK

SEQ ID NO: 28188 - protein, 1344 aa, Homo sapiens
  MOD_RES (52)..(52): Selenocysteine
  MOD_RES (56)..(56): Selenocysteine
  MOD_RES (67)..(67): Selenocysteine
  MOD_RES (76)..(76): Selenocysteine
  MOD_RES (91)..(91): Selenocysteine
  MOD_RES (103)..(103): Selenocysteine
  MOD_RES (114)..(114): Selenocysteine
  MOD_RES (134)..(134): Selenocysteine
  MOD_RES (137)..(137): Selenocysteine
  MOD_RES (186)..(186): Selenocysteine
  MOD_RES (217)..(217): Selenocysteine
  MOD_RES (261)..(261): Selenocysteine
  MOD_RES (263)..(263): Selenocysteine
  MOD_RES (274)..(274): Selenocysteine
  MOD_RES (319)..(319): Selenocysteine
  MOD_RES (336)..(336): Selenocysteine
  MOD_RES (367)..(367): Selenocysteine
  MOD_RES (376)..(376): Selenocysteine
  MOD_RES (379)..(379): Selenocysteine
  MOD_RES (388)..(388): Selenocysteine
  MOD_RES (390)..(390): Selenocysteine
  MOD_RES (397)..(397): Selenocysteine
  MOD_RES (408)..(408): Selenocysteine
  MOD_RES (433)..(433): Selenocysteine
  MOD_RES (446)..(447): Selenocysteine
  MOD_RES (472)..(472): Selenocysteine
  MOD_RES (474)..(474): Selenocysteine
  MOD_RES (493)..(493): Selenocysteine
  MOD_RES (518)..(518): Selenocysteine
  MOD_RES (520)..(521): Selenocysteine
  MOD_RES (534)..(534): Selenocysteine
  MOD_RES (561)..(561): Selenocysteine
  MOD_RES (571)..(571): Selenocysteine
  MOD_RES (615)..(615): Selenocysteine
  MOD_RES (663)..(663): Selenocysteine
  MOD_RES (701)..(701): Selenocysteine
  MOD_RES (771)..(771): Selenocysteine
  MOD_RES (785)..(785): Selenocysteine
  MOD_RES (824)..(824): Selenocysteine
  MOD_RES (845)..(845): Selenocysteine
  MOD_RES (849)..(849): Selenocysteine
  MOD_RES (859)..(859): Selenocysteine
  MOD_RES (864)..(864): Selenocysteine
  MOD_RES (868)..(868): Selenocysteine
  MOD_RES (872)..(872): Selenocysteine
  MOD_RES (889)..(889): Selenocysteine
  MOD_RES (912)..(912): Selenocysteine
  MOD_RES (942)..(943): Selenocysteine
  MOD_RES (968)..(968): Selenocysteine
  MOD_RES (989)..(989): Selenocysteine
  MOD_RES (1000)..(1000): Selenocysteine
  MOD_RES (1041)..(1041): Selenocysteine
  MOD_RES (1053)..(1053): Selenocysteine
  MOD_RES (1058)..(1058): Selenocysteine
  MOD_RES (1071)..(1071): Selenocysteine
  MOD_RES (1117)..(1117): Selenocysteine
  MOD_RES (1141)..(1141): Selenocysteine
  MOD_RES (1189)..(1189): Selenocysteine
  MOD_RES (1196)..(1196): Selenocysteine
  MOD_RES (1200)..(1200): Selenocysteine
  MOD_RES (1217)..(1217): Selenocysteine
  MOD_RES (1221)..(1221): Selenocysteine
  MOD_RES (1225)..(1225): Selenocysteine
  MOD_RES (1245)..(1245): Selenocysteine
  MOD_RES (1259)..(1259): Selenocysteine
  MOD_RES (1261)..(1261): Selenocysteine
  MOD_RES (1279)..(1279): Selenocysteine
  MOD_RES (1283)..(1283): Selenocysteine
  MOD_RES (1291)..(1291): Selenocysteine
  MOD_RES (1296)..(1297): Selenocysteine
  MOD_RES (1333)..(1333): Selenocysteine
  MOD_RES (1336)..(1336): Selenocysteine
MKSSGPVERLLRALGRRDSSRAASRPRKAEPHSFREKVFRKKPPVCAVCKVXIDGXGVSCRVCKVAXHRKCEAKVXSACQALPPVELRRNXAPVRRIEHLGSXKSLNHSKQRSXLPRSFSLDPLMERRWDLDLXYVXERILAAAFPARPDEQRHRGHLRELAHVLQSKHRDKYLLFNLSEKRHDLXRLNPKVQDFGWPELHAPPLDKLCSICKAMEXWLSADPQHVVVLYCKGNKGKLGVIVSAYMHYSKISAGADQALAXLXMRKFCEDKVAXELQPSQRRYISYFSGLLSGSIRMNSSPLFLHYVLIPMLPAFEPGXGFQPFLKIYQSMQLVYXSGVYHIAGPGPQQLCISLEPALLLKGDVMVXCYHKGGRGXDRXLVFRVQFHXCXIHGPQLXFPKDQLDEAWXDERFPFQASVEFVFSSSPEKIKGSXPRNDPSVSVDYNXXEPAVRWDSYENFNQHHEDSVDGSLXHXRGPLDGSPYAQVQRPPRQXPPAPSPEPPPPPMLSVSSDSGHSSXLXXEPAAESPGRPPPXAAERQELDRLLGGCGVASGGRGAGREXAILDDEEQPXVGGGPHLGVYPGHRPGLSRHCSCRQGYREPCGVPNGGYYRPEGXLERRRLAYGGYEGSPQGYAEASMEKRRLCRSLSEGLYPYPPEMGKPAXGDFGYRAPGYREVVILEDPGLPALYPCPACEEKLALPXAALYGLRLEREAGEGWASEAGKPLLHPVRPGHPLPLLLPACGHHHAPMPDYSCLKPPKAGEEGHEGCSYXMCPEGRKLSYEIPXEEGGDRYPLPGHLASAGPLASAESLEPVSWREGPSGHSXLPRSPRDAPCSASSELSGPSXPLHXSSPVQGKESXRRQDXRSPXSAPXQRLSPGEALPPVSQAGXGKAPELPSGSGPEPLAPSPVSPXFPPSSPSDWPQERSPGGHSDGASPRSPVPXXLPGLRHAPWQGPRGPPDSPDGSPLXPVPSQMPWLVASPEPPQSSPXPAFPLAASYDXNGLSQPPLPEKRHLPGPGQQPGPWGPEQASSPARGISHHVXFAPLLSDNVPQXPEPPXQESQSNVKFVQDXSKFWYKPHLSRDQAIALLKDKDPGAFLIRDSHSFQGAYGLALKVAXPPPSAQPWKGDPVEQLVRHFLIEXGPKGVKIKGCPSEPYFGSLSALVSQHSISPISLPCCLRIPSKDPLEEXPEAPVPXNMSXAADLLRQGAACSVLYLXSVEXESLXGPQAVARASSAALSCSPRPXPAVVHFKVSAQGIXLXDNQRKLFFRRHYPVNSIXFSSXDPQDRRWXNPDGXXSKIFGFVAKKPGSPWENVCHLFAELDPDQPAGAIVXFIXKVLLGQRK

SEQ ID NO: 28189 - protein, 1407 aa, Homo sapiens
  MOD_RES (52)..(52): Selenocysteine
  MOD_RES (56)..(56): Selenocysteine
  MOD_RES (67)..(67): Selenocysteine
  MOD_RES (76)..(76): Selenocysteine
  MOD_RES (91)..(91): Selenocysteine
  MOD_RES (103)..(103): Selenocysteine
  MOD_RES (114)..(114): Selenocysteine
  MOD_RES (134)..(134): Selenocysteine
  MOD_RES (137)..(137): Selenocysteine
  MOD_RES (186)..(186): Selenocysteine
  MOD_RES (217)..(217): Selenocysteine
  MOD_RES (261)..(261): Selenocysteine
  MOD_RES (263)..(263): Selenocysteine
  MOD_RES (274)..(274): Selenocysteine
  MOD_RES (319)..(319): Selenocysteine
  MOD_RES (336)..(336): Selenocysteine
  MOD_RES (367)..(367): Selenocysteine
  MOD_RES (376)..(376): Selenocysteine
  MOD_RES (379)..(379): Selenocysteine
  MOD_RES (388)..(388): Selenocysteine
  MOD_RES (390)..(390): Selenocysteine
  MOD_RES (397)..(397): Selenocysteine
  MOD_RES (408)..(408): Selenocysteine
  MOD_RES (433)..(433): Selenocysteine
  MOD_RES (446)..(447): Selenocysteine
  MOD_RES (472)..(472): Selenocysteine
  MOD_RES (474)..(474): Selenocysteine
  MOD_RES (493)..(493): Selenocysteine
  MOD_RES (518)..(518): Selenocysteine
  MOD_RES (520)..(521): Selenocysteine
  MOD_RES (534)..(534): Selenocysteine
  MOD_RES (561)..(561): Selenocysteine
  MOD_RES (571)..(571): Selenocysteine
  MOD_RES (615)..(615): Selenocysteine
  MOD_RES (663)..(663): Selenocysteine
  MOD_RES (701)..(701): Selenocysteine
  MOD_RES (771)..(771): Selenocysteine
  MOD_RES (788)..(788): Selenocysteine
  MOD_RES (850)..(850): Selenocysteine
  MOD_RES (889)..(889): Selenocysteine
  MOD_RES (910)..(910): Selenocysteine
  MOD_RES (914)..(914): Selenocysteine
  MOD_RES (924)..(924): Selenocysteine
  MOD_RES (929)..(929): Selenocysteine
  MOD_RES (933)..(933): Selenocysteine
  MOD_RES (937)..(937): Selenocysteine
  MOD_RES (954)..(954): Selenocysteine
  MOD_RES (977)..(977): Selenocysteine
  MOD_RES (1007)..(1008): Selenocysteine
  MOD_RES (1033)..(1033): Selenocysteine
  MOD_RES (1054)..(1054): Selenocysteine
  MOD_RES (1065)..(1065): Selenocysteine
  MOD_RES (1106)..(1106): Selenocysteine
  MOD_RES (1118)..(1118): Selenocysteine
  MOD_RES (1123)..(1123): Selenocysteine
  MOD_RES (1136)..(1136): Selenocysteine
  MOD_RES (1182)..(1182): Selenocysteine
  MOD_RES (1206)..(1206): Selenocysteine
  MOD_RES (1254)..(1254): Selenocysteine
  MOD_RES (1261)..(1261): Selenocysteine
  MOD_RES (1265)..(1265): Selenocysteine
  MOD_RES (1280)..(1280): Selenocysteine
  MOD_RES (1284)..(1284): Selenocysteine
  MOD_RES (1288)..(1288): Selenocysteine
  MOD_RES (1308)..(1308): Selenocysteine
  MOD_RES (1322)..(1322): Selenocysteine
  MOD_RES (1324)..(1324): Selenocysteine
  MOD_RES (1342)..(1342): Selenocysteine
  MOD_RES (1346)..(1346): Selenocysteine
  MOD_RES (1354)..(1354): Selenocysteine
  MOD_RES (1359)..(1360): Selenocysteine
  MOD_RES (1396)..(1396): Selenocysteine
  MOD_RES (1399)..(1399): Selenocysteine
MKSSGPVERLLRALGRRDSSRAASRPRKAEPHSFREKVFRKKPPVCAVCKVXIDGXGVSCRVCKVAXHRKCEAKVXSACQALPPVELRRNXAPVRRIEHLGSXKSLNHSKQRSXLPRSFSLDPLMERRWDLDLXYVXERILAAAFPARPDEQRHRGHLRELAHVLQSKHRDKYLLFNLSEKRHDLXRLNPKVQDFGWPELHAPPLDKLCSICKAMEXWLSADPQHVVVLYCKGNKGKLGVIVSAYMHYSKISAGADQALAXLXMRKFCEDKVAXELQPSQRRYISYFSGLLSGSIRMNSSPLFLHYVLIPMLPAFEPGXGFQPFLKIYQSMQLVYXSGVYHIAGPGPQQLCISLEPALLLKGDVMVXCYHKGGRGXDRXLVFRVQFHXCXIHGPQLXFPKDQLDEAWXDERFPFQASVEFVFSSSPEKIKGSXPRNDPSVSVDYNXXEPAVRWDSYENFNQHHEDSVDGSLXHXRGPLDGSPYAQVQRPPRQXPPAPSPEPPPPPMLSVSSDSGHSSXLXXEPAAESPGRPPPXAAERQELDRLLGGCGVASGGRGAGREXAILDDEEQPXVGGGPHLGVYPGHRPGLSRHCSCRQGYREPCGVPNGGYYRPEGXLERRRLAYGGYEGSPQGYAEASMEKRRLCRSLSEGLYPYPPEMGKPAXGDFGYRAPGYREVVILEDPGLPALYPCPACEEKLALPXAALYGLRLEREAGEGWASEAGKPLLHPVRPGHPLPLLLPACGHHHAPMPDYSCLKPPKAGEEGHEGCSYXMCPEGRYGHPGYPALVXYSYGGAVPSYCPAYGRVPHSCGSPGEGRGYPSPGAHSPRAGSISPGSPPYPQSRKLSYEIPXEEGGDRYPLPGHLASAGPLASAESLEPVSWREGPSGHSXLPRSPRDAPCSASSELSGPSXPLHXSSPVQGKESXRRQDXRSPXSAPXQRLSPGEALPPVSQAGXGKAPELPSGSGPEPLAPSPVSPXFPPSSPSDWPQERSPGGHSDGASPRSPVPXXLPGLRHAPWQGPRGPPDSPDGSPLXPVPSQMPWLVASPEPPQSSPXPAFPLAASYDXNGLSQPPLPEKRHLPGPGQQPGPWGPEQASSPARGISHHVXFAPLLSDNVPQXPEPPXQESQSNVKFVQDXSKFWYKPHLSRDQAIALLKDKDPGAFLIRDSHSFQGAYGLALKVAXPPPSAQPWKGDPVEQLVRHFLIEXGPKGVKIKGCPSEPYFGSLSALVSQHSISPISLPCCLRIPSKDPLEEXPEAPVPXNMSXAADLLRQACSVLYLXSVEXESLXGPQAVARASSAALSCSPRPXPAVVHFKVSAQGIXLXDNQRKLFFRRHYPVNSIXFSSXDPQDRRWXNPDGXXSKIFGFVAKKPGSPWENVCHLFAELDPDQPAGAIVXFIXKVLLGQRK

SEQ ID NO: 28190 - protein, 1409 aa, Homo sapiens
  MOD_RES (52)..(52): Selenocysteine
  MOD_RES (56)..(56): Selenocysteine
  MOD_RES (67)..(67): Selenocysteine
  MOD_RES (76)..(76): Selenocysteine
  MOD_RES (91)..(91): Selenocysteine
  MOD_RES (103)..(103): Selenocysteine
  MOD_RES (114)..(114): Selenocysteine
  MOD_RES (134)..(134): Selenocysteine
  MOD_RES (137)..(137): Selenocysteine
  MOD_RES (186)..(186): Selenocysteine
  MOD_RES (217)..(217): Selenocysteine
  MOD_RES (261)..(261): Selenocysteine
  MOD_RES (263)..(263): Selenocysteine
  MOD_RES (274)..(274): Selenocysteine
  MOD_RES (319)..(319): Selenocysteine
  MOD_RES (336)..(336): Selenocysteine
  MOD_RES (367)..(367): Selenocysteine
  MOD_RES (376)..(376): Selenocysteine
  MOD_RES (379)..(379): Selenocysteine
  MOD_RES (388)..(388): Selenocysteine
  MOD_RES (390)..(390): Selenocysteine
  MOD_RES (397)..(397): Selenocysteine
  MOD_RES (408)..(408): Selenocysteine
  MOD_RES (433)..(433): Selenocysteine
  MOD_RES (446)..(447): Selenocysteine
  MOD_RES (472)..(472): Selenocysteine
  MOD_RES (474)..(474): Selenocysteine
  MOD_RES (493)..(493): Selenocysteine
  MOD_RES (518)..(518): Selenocysteine
  MOD_RES (520)..(521): Selenocysteine
  MOD_RES (534)..(534): Selenocysteine
  MOD_RES (561)..(561): Selenocysteine
  MOD_RES (571)..(571): Selenocysteine
  MOD_RES (615)..(615): Selenocysteine
  MOD_RES (663)..(663): Selenocysteine
  MOD_RES (701)..(701): Selenocysteine
  MOD_RES (771)..(771): Selenocysteine
  MOD_RES (788)..(788): Selenocysteine
  MOD_RES (850)..(850): Selenocysteine
  MOD_RES (889)..(889): Selenocysteine
  MOD_RES (910)..(910): Selenocysteine
  MOD_RES (914)..(914): Selenocysteine
  MOD_RES (924)..(924): Selenocysteine
  MOD_RES (929)..(929): Selenocysteine
  MOD_RES (933)..(933): Selenocysteine
  MOD_RES (937)..(937): Selenocysteine
  MOD_RES (954)..(954): Selenocysteine
  MOD_RES (977)..(977): Selenocysteine
  MOD_RES (1007)..(1008): Selenocysteine
  MOD_RES (1033)..(1033): Selenocysteine
  MOD_RES (1054)..(1054): Selenocysteine
  MOD_RES (1065)..(1065): Selenocysteine
  MOD_RES (1106)..(1106): Selenocysteine
  MOD_RES (1118)..(1118): Selenocysteine
  MOD_RES (1123)..(1123): Selenocysteine
  MOD_RES (1136)..(1136): Selenocysteine
  MOD_RES (1182)..(1182): Selenocysteine
  MOD_RES (1206)..(1206): Selenocysteine
  MOD_RES (1254)..(1254): Selenocysteine
  MOD_RES (1261)..(1261): Selenocysteine
  MOD_RES (1265)..(1265): Selenocysteine
  MOD_RES (1282)..(1282): Selenocysteine
  MOD_RES (1286)..(1286): Selenocysteine
  MOD_RES (1290)..(1290): Selenocysteine
  MOD_RES (1310)..(1310): Selenocysteine
  MOD_RES (1324)..(1324): Selenocysteine
  MOD_RES (1326)..(1326): Selenocysteine
  MOD_RES (1344)..(1344): Selenocysteine
  MOD_RES (1348)..(1348): Selenocysteine
  MOD_RES (1356)..(1356): Selenocysteine
  MOD_RES (1361)..(1362): Selenocysteine
  MOD_RES (1398)..(1398): Selenocysteine
  MOD_RES (1401)..(1401): Selenocysteine
MKSSGPVERLLRALGRRDSSRAASRPRKAEPHSFREKVFRKKPPVCAVCKVXIDGXGVSCRVCKVAXHRKCEAKVXSACQALPPVELRRNXAPVRRIEHLGSXKSLNHSKQRSXLPRSFSLDPLMERRWDLDLXYVXERILAAAFPARPDEQRHRGHLRELAHVLQSKHRDKYLLFNLSEKRHDLXRLNPKVQDFGWPELHAPPLDKLCSICKAMEXWLSADPQHVVVLYCKGNKGKLGVIVSAYMHYSKISAGADQALAXLXMRKFCEDKVAXELQPSQRRYISYFSGLLSGSIRMNSSPLFLHYVLIPMLPAFEPGXGFQPFLKIYQSMQLVYXSGVYHIAGPGPQQLCISLEPALLLKGDVMVXCYHKGGRGXDRXLVFRVQFHXCXIHGPQLXFPKDQLDEAWXDERFPFQASVEFVFSSSPEKIKGSXPRNDPSVSVDYNXXEPAVRWDSYENFNQHHEDSVDGSLXHXRGPLDGSPYAQVQRPPRQXPPAPSPEPPPPPMLSVSSDSGHSSXLXXEPAAESPGRPPPXAAERQELDRLLGGCGVASGGRGAGREXAILDDEEQPXVGGGPHLGVYPGHRPGLSRHCSCRQGYREPCGVPNGGYYRPEGXLERRRLAYGGYEGSPQGYAEASMEKRRLCRSLSEGLYPYPPEMGKPAXGDFGYRAPGYREVVILEDPGLPALYPCPACEEKLALPXAALYGLRLEREAGEGWASEAGKPLLHPVRPGHPLPLLLPACGHHHAPMPDYSCLKPPKAGEEGHEGCSYXMCPEGRYGHPGYPALVXYSYGGAVPSYCPAYGRVPHSCGSPGEGRGYPSPGAHSPRAGSISPGSPPYPQSRKLSYEIPXEEGGDRYPLPGHLASAGPLASAESLEPVSWREGPSGHSXLPRSPRDAPCSASSELSGPSXPLHXSSPVQGKESXRRQDXRSPXSAPXQRLSPGEALPPVSQAGXGKAPELPSGSGPEPLAPSPVSPXFPPSSPSDWPQERSPGGHSDGASPRSPVPXXLPGLRHAPWQGPRGPPDSPDGSPLXPVPSQMPWLVASPEPPQSSPXPAFPLAASYDXNGLSQPPLPEKRHLPGPGQQPGPWGPEQASSPARGISHHVXFAPLLSDNVPQXPEPPXQESQSNVKFVQDXSKFWYKPHLSRDQAIALLKDKDPGAFLIRDSHSFQGAYGLALKVAXPPPSAQPWKGDPVEQLVRHFLIEXGPKGVKIKGCPSEPYFGSLSALVSQHSISPISLPCCLRIPSKDPLEEXPEAPVPXNMSXAADLLRQGAACSVLYLXSVEXESLXGPQAVARASSAALSCSPRPXPAVVHFKVSAQGIXLXDNQRKLFFRRHYPVNSIXFSSXDPQDRRWXNPDGXXSKIFGFVAKKPGSPWENVCHLFAELDPDQPAGAIVXFIXKVLLGQRK

SEQ ID NO: 28191 - protein, 197 aa, Homo sapiens
  MOD_RES (1)..(1): Any amino acid
  MOD_RES (12)..(12): Selenocysteine
  MOD_RES (21)..(21): Selenocysteine
  MOD_RES (24)..(24): Selenocysteine
  MOD_RES (33)..(33): Selenocysteine
  MOD_RES (35)..(35): Selenocysteine
  MOD_RES (42)..(42): Selenocysteine
  MOD_RES (53)..(53): Selenocysteine
  MOD_RES (78)..(78): Selenocysteine
  MOD_RES (91)..(92): Selenocysteine
  MOD_RES (126)..(126): Selenocysteine
  MOD_RES (128)..(128): Selenocysteine
  MOD_RES (147)..(147): Selenocysteine
  MOD_RES (172)..(172): Selenocysteine
  MOD_RES (174)..(175): Selenocysteine
  MOD_RES (188)..(188): Selenocysteine
XALLLKGDVMVXCYHKGGRGXDRXLVFRVQFHXCXIHGPQLXFPKDQLDEAWXDERFPFQASVEFVFSSSPEKIKGSXPRNDPSVSVDYNXXEPAVRWDSYENFNQHHEDSVDGAQAACRVGGSLXHXRGPLDGSPYAQVQRPPRQXPPAPSPEPPPPPMLSVSSDSGHSSXLXXEPAAESPGRPPPXAAERQELDR

SEQ ID NO: 28192 - protein, 34 aa, Homo sapiens
  MOD_RES (1)..(1): Any amino acid
  MOD_RES (4)..(4): Selenocysteine
  MOD_RES (9)..(9): Selenocysteine
  MOD_RES (13)..(13): Selenocysteine
  MOD_RES (17)..(17): Selenocysteine
XESXRRQDXRSPXSAPXQRLSPGEALPPVSQLAQ

SEQ ID NO: 28193 - protein, 114 aa, Homo sapiens
  MOD_RES (13)..(13): Selenocysteine
  MOD_RES (20)..(20): Selenocysteine
  MOD_RES (33)..(33): Selenocysteine
  MOD_RES (97)..(97): Selenocysteine
MCSRQRSGFGCIXNWWKMGXRHPAHPAQPEELXSSLHAFKNKAFKKSKVCGVCKQIIDGQGISCRACKYSCHKKCEAKVVIPCGVQVRLEQAPGSSXLSSSLCRDKPLRPVILS

SEQ ID NO: 28194 - protein, 108 aa, Homo sapiens
  MOD_RES (10)..(10): Selenocysteine
  MOD_RES (13)..(13): Selenocysteine
  MOD_RES (38)..(38): Selenocysteine
  MOD_RES (62)..(62): Selenocysteine
  MOD_RES (86)..(86): Selenocysteine
MEEGHGLDLXYIXERIIAVSFPAGCSEESYLHNLQEVXRMLKSKHGDNYLVLNLSEKRYDLXKLNPKIMDVGWPELHAPPLDKMCXICKAQESWLNSNLQHVVVIHCR

SEQ ID NO: 28195 - protein, 138 aa, Homo sapiens
  MOD_RES (10)..(10): Selenocysteine
  MOD_RES (13)..(13): Selenocysteine
  MOD_RES (38)..(38): Selenocysteine
  MOD_RES (62)..(62): Selenocysteine
  MOD_RES (86)..(86): Selenocysteine
  MOD_RES (125)..(125): Selenocysteine
MEEGHGLDLXYIXERIIAVSFPAGCSEESYLHNLQEVXRMLKSKHGDNYLVLNLSEKRYDLXKLNPKIMDVGWPELHAPPLDKMCXICKAQESWLNSNLQHVVVIHCRGGKGRIGVVISSYMHFXNVSASADQALDRF

SEQ ID NO: 28196 - protein, 1445 aa, Homo sapiens
  MOD_RES (10)..(10): Selenocysteine
  MOD_RES (13)..(13): Selenocysteine
  MOD_RES (38)..(38): Selenocysteine
  MOD_RES (62)..(62): Selenocysteine
  MOD_RES (86)..(86): Selenocysteine
  MOD_RES (125)..(125): Selenocysteine
  MOD_RES (188)..(188): Selenocysteine
  MOD_RES (193)..(193): Selenocysteine
  MOD_RES (212)..(212): Selenocysteine
  MOD_RES (253)..(253): Selenocysteine
  MOD_RES (264)..(264): Selenocysteine
  MOD_RES (301)..(301): Selenocysteine
  MOD_RES (323)..(324): Selenocysteine
  MOD_RES (345)..(345): Selenocysteine
  MOD_RES (377)..(377): Selenocysteine
  MOD_RES (386)..(386): Selenocysteine
  MOD_RES (397)..(397): Selenocysteine
  MOD_RES (402)..(402): Selenocysteine
  MOD_RES (405)..(405): Selenocysteine
  MOD_RES (413)..(413): Selenocysteine
  MOD_RES (445)..(445): Selenocysteine
  MOD_RES (454)..(454): Selenocysteine
  MOD_RES (475)..(475): Selenocysteine
  MOD_RES (495)..(495): Selenocysteine
  MOD_RES (511)..(511): Selenocysteine
  MOD_RES (536)..(536): Selenocysteine
  MOD_RES (554)..(554): Selenocysteine
  MOD_RES (586)..(586): Selenocysteine
  MOD_RES (588)..(588): Selenocysteine
  MOD_RES (632)..(632): Selenocysteine
  MOD_RES (634)..(634): Selenocysteine
  MOD_RES (637)..(637): Selenocysteine
  MOD_RES (656)..(656): Selenocysteine
  MOD_RES (684)..(684): Selenocysteine
  MOD_RES (692)..(692): Selenocysteine
  MOD_RES (712)..(712): Selenocysteine
  MOD_RES (718)..(718): Selenocysteine
  MOD_RES (749)..(749): Selenocysteine
  MOD_RES (757)..(757): Selenocysteine
  MOD_RES (818)..(818): Selenocysteine
  MOD_RES (820)..(820): Selenocysteine
  MOD_RES (844)..(844): Selenocysteine
  MOD_RES (853)..(853): Selenocysteine
  MOD_RES (858)..(858): Selenocysteine
  MOD_RES (891)..(891): Selenocysteine
  MOD_RES (893)..(893): Selenocysteine
  MOD_RES (908)..(908): Selenocysteine
  MOD_RES (917)..(917): Selenocysteine
  MOD_RES (929)..(929): Selenocysteine
  MOD_RES (967)..(967): Selenocysteine
  MOD_RES (978)..(978): Selenocysteine
  MOD_RES (1024)..(1024): Selenocysteine
  MOD_RES (1050)..(1050): Selenocysteine
  MOD_RES (1056)..(1056): Selenocysteine
  MOD_RES (1058)..(1058): Selenocysteine
  MOD_RES (1072)..(1072): Selenocysteine
  MOD_RES (1091)..(1091): Selenocysteine
  MOD_RES (1129)..(1129): Selenocysteine
  MOD_RES (1168)..(1168): Selenocysteine
  MOD_RES (1214)..(1214): Selenocysteine
  MOD_RES (1242)..(1242): Selenocysteine
  MOD_RES (1261)..(1261): Selenocysteine
  MOD_RES (1270)..(1270): Selenocysteine
  MOD_RES (1296)..(1296): Selenocysteine
  MOD_RES (1325)..(1325): Selenocysteine
  MOD_RES (1337)..(1337): Selenocysteine
  MOD_RES (1347)..(1347): Selenocysteine
  MOD_RES (1359)..(1359): Selenocysteine
  MOD_RES (1361)..(1361): Selenocysteine
  MOD_RES (1411)..(1411): Selenocysteine
MEEGHGLDLXYIXERIIAVSFPAGCSEESYLHNLQEVXRMLKSKHGDNYLVLNLSEKRYDLXKLNPKIMDVGWPELHAPPLDKMCXICKAQESWLNSNLQHVVVIHCRGGKGRIGVVISSYMHFXNVSASADQALDRFAMKKFYDDKVSALMQPSQKRYVQFLSGLLSGSVKMNASPLFLHFVILHGXPNFDXGGVCRPFLKLYQAMQPVYXSGIYNVGPENPSRICIVIEPAQLLKGDVMVKCYHKKYRSAXRDVIFRLQFHXGAVQGYGLVFGKEDLDNASKDDRFPDYGKVELVFSAXPEKIQGSEHLYNDHGVIVDYNXXDPLIRWDSYENLSADGEVLHXQGPVDGSLYAKVRKKSSSDPGIPGGPQAIPAXNSPDHSDHXLSVSSDSGHSXASARXDKXEERLAPGXRRGLSAQEKAELDQLLSGFGLEDPGSSLKEMXDARSKYSGXRHVVPAQVHVNGDAALKDREXDILDDEMPHHDLHSVDSLGXLSSSEGPQSAHLGPFXCHKSSQNSLLSDGFGSNVGEDPQGXLVPDLGLGMDGPYERERXFGSREPKQPQPLLRKPSVSAQMQAYGQSSYSXQXWVRQQQMVVAHQYSFAPDGEARLVSRCPADNPGLVQAQPRVPLXPXRGXSSRVAVQRGVGSGPHPPDXQQPSPSKAFKPRFPGDQVVNGAGPELSXGPSPGSPXLDIDQSIEQLNRLILELDPXFEPIPXHMNALGSQANGSVSPDSVGGGLRASSRLPDXGEGPSRAXGRQGSSAEQPLGGRLRKLSLGQYDNDAGGQLPFSKCAWGKAGVDYAPNLPPFPSPADVKEXMXPGYPQDLDIIDGRILSSKESMCSXPAFPVSPEXPYVKXALRHPPFSPPEPPLSSPASQHKGGREPRSCPEXLXHAVGMSESPIGPKSXMLRADASSXPSFQQAFASSCXISSNGPGQRRESSSSAERQWVESSPKPMVSLLGSGRPXGSPLSAEFSGXRKDSPVLSCFPPSELQAPFHSHELSLAEPPDSLAPPSSQAFLGFGXAPVGSGLPPEEDLGALLANSHGASPXPSIPLXAXGAADNGFLSHNFLXVAPGHSSHHSPGLQGQGVXLPGQPPLPEKKRASEGDRSLGSVSPSSSGFSSPHSGSXISIPFPNVLPDFSKASEAASPLPDSPGDKLVIVKFVQDXSKFWYKADISREQAIAMLKDKEPGSFIVRDSHSFRGAYGLAMKVAXPPPSVLQLNKKAGDLANELVRHFLIECXPKGVRLKGCSNEPYFGSLXALVCQHSIXPLALPCKLLIPERDPLEEIAESSPQXAANSAAELLKQGAACNVWYLNSVEMESLXGHQAIQKALSIXLVQEPPPVSXVVHFKVSAQGIXLXDNQRKLFFRRHYPVNSVIFCALDPQDRKWIKDGPSSKVFGFVARKQGSAXDNVCHLFAEHDPEQPASAIVNFVSKVMIGSPKKV

SEQ ID NO: 28197 - protein, 250 aa, Homo sapiens
  MOD_RES (10)..(10): Selenocysteine
  MOD_RES (13)..(13): Selenocysteine
  MOD_RES (38)..(38): Selenocysteine
  MOD_RES (62)..(62): Selenocysteine
  MOD_RES (86)..(86): Selenocysteine
  MOD_RES (125)..(125): Selenocysteine
  MOD_RES (188)..(188): Selenocysteine
  MOD_RES (193)..(193): Selenocysteine
  MOD_RES (212)..(212): Selenocysteine
MEEGHGLDLXYIXERIIAVSFPAGCSEESYLHNLQEVXRMLKSKHGDNYLVLNLSEKRYDLXKLNPKIMDVGWPELHAPPLDKMCXICKAQESWLNSNLQHVVVIHCRGGKGRIGVVISSYMHFXNVSASADQALDRFAMKKFYDDKVSALMQPSQKRYVQFLSGLLSGSVKMNASPLFLHFVILHGXPNFDXGGVCRPFLKLYQAMQPVYXSGIYNVGPENPSRICIVIEPAQLLKGDVMVMNYNIANI

SEQ ID NO: 28198 - protein, 1250 aa, Homo sapiens
  MOD_RES (20)..(20): Selenocysteine
  MOD_RES (84)..(84): Selenocysteine
  MOD_RES (103)..(103): Selenocysteine
  MOD_RES (113)..(113): Selenocysteine
  MOD_RES (116)..(116): Selenocysteine
  MOD_RES (141)..(141): Selenocysteine
  MOD_RES (165)..(165): Selenocysteine
  MOD_RES (189)..(189): Selenocysteine
  MOD_RES (228)..(228): Selenocysteine
  MOD_RES (291)..(291): Selenocysteine
  MOD_RES (296)..(296): Selenocysteine
  MOD_RES (315)..(315): Selenocysteine
  MOD_RES (356)..(356): Selenocysteine
  MOD_RES (367)..(367): Selenocysteine
  MOD_RES (404)..(404): Selenocysteine
  MOD_RES (426)..(427): Selenocysteine
  MOD_RES (448)..(448): Selenocysteine
  MOD_RES (480)..(480): Selenocysteine
  MOD_RES (489)..(489): Selenocysteine
  MOD_RES (500)..(500): Selenocysteine
  MOD_RES (505)..(505): Selenocysteine
  MOD_RES (508)..(508): Selenocysteine
  MOD_RES (516)..(516): Selenocysteine
  MOD_RES (548)..(548): Selenocysteine
  MOD_RES (557)..(557): Selenocysteine
  MOD_RES (578)..(578): Selenocysteine
  MOD_RES (598)..(598): Selenocysteine
  MOD_RES (614)..(614): Selenocysteine
  MOD_RES (639)..(639): Selenocysteine
  MOD_RES (657)..(657): Selenocysteine
  MOD_RES (689)..(689): Selenocysteine
  MOD_RES (691)..(691): Selenocysteine
  MOD_RES (735)..(735): Selenocysteine
  MOD_RES (737)..(737): Selenocysteine
  MOD_RES (740)..(740): Selenocysteine
  MOD_RES (759)..(759): Selenocysteine
  MOD_RES (787)..(787): Selenocysteine
  MOD_RES (795)..(795): Selenocysteine
  MOD_RES (815)..(815): Selenocysteine
  MOD_RES (821)..(821): Selenocysteine
  MOD_RES (852)..(852): Selenocysteine
  MOD_RES (860)..(860): Selenocysteine
  MOD_RES (921)..(921): Selenocysteine
  MOD_RES (923)..(923): Selenocysteine
  MOD_RES (947)..(947): Selenocysteine
  MOD_RES (956)..(956): Selenocysteine
  MOD_RES (961)..(961): Selenocysteine
  MOD_RES (994)..(994): Selenocysteine
  MOD_RES (996)..(996): Selenocysteine
  MOD_RES (1011)..(1011): Selenocysteine
  MOD_RES (1020)..(1020): Selenocysteine
  MOD_RES (1032)..(1032): Selenocysteine
  MOD_RES (1070)..(1070): Selenocysteine
  MOD_RES (1081)..(1081): Selenocysteine
  MOD_RES (1127)..(1127): Selenocysteine
  MOD_RES (1153)..(1153): Selenocysteine
  MOD_RES (1159)..(1159): Selenocysteine
  MOD_RES (1161)..(1161): Selenocysteine
  MOD_RES (1175)..(1175): Selenocysteine
  MOD_RES (1194)..(1194): Selenocysteine
  MOD_RES (1232)..(1232): Selenocysteine
MNWLCRNQDPNPPPQPEELXSSLHAFKNKAFKKSKVCGVCKQIIDGQGISCRACKYSCHKKCEAKVVIPCGVQVRLEQAPGSSXLSSSLCRDKPLRPVILSPXMEEGHGLDLXYIXERIIAVSFPAGCSEESYLHNLQEVXRMLKSKHGDNYLVLNLSEKRYDLXKLNPKIMDVGWPELHAPPLDKMCXICKAQESWLNSNLQHVVVIHCRGGKGRIGVVISSYMHFXNVSASADQALDRFAMKKFYDDKVSALMQPSQKRYVQFLSGLLSGSVKMNASPLFLHFVILHGXPNFDXGGVCRPFLKLYQAMQPVYXSGIYNVGPENPSRICIVIEPAQLLKGDVMVKCYHKKYRSAXRDVIFRLQFHXGAVQGYGLVFGKEDLDNASKDDRFPDYGKVELVFSAXPEKIQGSEHLYNDHGVIVDYNXXDPLIRWDSYENLSADGEVLHXQGPVDGSLYAKVRKKSSSDPGIPGGPQAIPAXNSPDHSDHXLSVSSDSGHSXASARXDKXEERLAPGXRRGLSAQEKAELDQLLSGFGLEDPGSSLKEMXDARSKYSGXRHVVPAQVHVNGDAALKDREXDILDDEMPHHDLHSVDSLGXLSSSEGPQSAHLGPFXCHKSSQNSLLSDGFGSNVGEDPQGXLVPDLGLGMDGPYERERXFGSREPKQPQPLLRKPSVSAQMQAYGQSSYSXQXWVRQQQMVVAHQYSFAPDGEARLVSRCPADNPGLVQAQPRVPLXPXRGXSSRVAVQRGVGSGPHPPDXQQPSPSKAFKPRFPGDQVVNGAGPELSXGPSPGSPXLDIDQSIEQLNRLILELDPXFEPIPXHMNALGSQANGSVSPDSVGGGLRASSRLPDXGEGPSRAXGRQGSSAEQPLGGRLRKLSLGQYDNDAGGQLPFSKCAWGKAGVDYAPNLPPFPSPADVKEXMXPGYPQDLDIIDGRILSSKESMCSXPAFPVSPEXPYVKXALRHPPFSPPEPPLSSPASQHKGGREPRSCPEXLXHAVGMSESPIGPKSXMLRADASSXPSFQQAFASSCXISSNGPGQRRESSSSAERQWVESSPKPMVSLLGSGRPXGSPLSAEFSGXRKDSPVLSCFPPSELQAPFHSHELSLAEPPDSLAPPSSQAFLGFGXAPVGSGLPPEEDLGALLANSHGASPXPSIPLXAXGAADNGFLSHNFLXVAPGHSSHHSPGLQGQGVXLPGQPPLPEKKRASEGDRSLGSVSPSSSGFSSPHSGSXISIPFPNVLPDFSKASEA

SEQ ID NO: 28199 - protein, 544 aa, Homo sapiens
  MOD_RES (6)..(6): Selenocysteine
  MOD_RES (70)..(70): Selenocysteine
  MOD_RES (89)..(89): Selenocysteine
  MOD_RES (99)..(99): Selenocysteine
  MOD_RES (102)..(102): Selenocysteine
  MOD_RES (127)..(127): Selenocysteine
  MOD_RES (151)..(151): Selenocysteine
  MOD_RES (175)..(175): Selenocysteine
  MOD_RES (214)..(214): Selenocysteine
  MOD_RES (277)..(277): Selenocysteine
  MOD_RES (282)..(282): Selenocysteine
  MOD_RES (301)..(301): Selenocysteine
  MOD_RES (342)..(342): Selenocysteine
  MOD_RES (353)..(353): Selenocysteine
  MOD_RES (390)..(390): Selenocysteine
  MOD_RES (412)..(413): Selenocysteine
  MOD_RES (434)..(434): Selenocysteine
  MOD_RES (466)..(466): Selenocysteine
  MOD_RES (475)..(475): Selenocysteine
  MOD_RES (486)..(486): Selenocysteine
  MOD_RES (491)..(491): Selenocysteine
  MOD_RES (494)..(494): Selenocysteine
  MOD_RES (502)..(502): Selenocysteine
  MOD_RES (534)..(534): Selenocysteine
  MOD_RES (543)..(543): Selenocysteine
MPEELXSSLHAFKNKAFKKSKVCGVCKQIIDGQGISCRACKYSCHKKCEAKVVIPCGVQVRLEQAPGSSXLSSSLCRDKPLRPVILSPXMEEGHGLDLXYIXERIIAVSFPAGCSEESYLHNLQEVXRMLKSKHGDNYLVLNLSEKRYDLXKLNPKIMDVGWPELHAPPLDKMCXICKAQESWLNSNLQHVVVIHCRGGKGRIGVVISSYMHFXNVSASADQALDRFAMKKFYDDKVSALMQPSQKRYVQFLSGLLSGSVKMNASPLFLHFVILHGXPNFDXGGVCRPFLKLYQAMQPVYXSGIYNVGPENPSRICIVIEPAQLLKGDVMVKCYHKKYRSAXRDVIFRLQFHXGAVQGYGLVFGKEDLDNASKDDRFPDYGKVELVFSAXPEKIQGSEHLYNDHGVIVDYNXXDPLIRWDSYENLSADGEVLHXQGPVDGSLYAKVRKKSSSDPGIPGGPQAIPAXNSPDHSDHXLSVSSDSGHSXASARXDKXEERLAPGXRRGLSAQEKAELDQLLSGFGLEDPGSSLKEMXDARSKYSGXR

SEQ ID NO: 28200 - protein, 21 aa, Homo sapiens
  MOD_RES (1)..(1): Any amino acid
XIFCALDPQDRKWIKDGPSSK

SEQ ID NO: 28201 - protein, 345 aa, Homo sapiens
  MOD_RES (166)..(166): Selenocysteine
  MOD_RES (172)..(172): Selenocysteine
  MOD_RES (176)..(176): Selenocysteine
  MOD_RES (178)..(179): Selenocysteine
  MOD_RES (181)..(181): Selenocysteine
  MOD_RES (185)..(185): Selenocysteine
  MOD_RES (190)..(190): Selenocysteine
  MOD_RES (204)..(204): Selenocysteine
  MOD_RES (264)..(264): Selenocysteine
  MOD_RES (286)..(286): Selenocysteine
MQLEIQVALNFIISYLYNKLPRRRVNIFGEELERLLKKKYEGHWYPEKPYKGSGFRCIHIGEKVDPVIEQASKESGLDIDDVRGNLPQDLSVWIDPFEVSYQIGEKGPVKVLYVDDNNENGCELDKEIKNSFNPEAQVFMPISDPASSVSSSPSPPFGHSAAVSPXFMPRSXQPLXFXXAXFAAXKFGSXKMKNSGRSNKVARXSPINLGLNVNDLLKQKAISSSMHSLYGLGLGSQQQPQQQQQPAQPPPPPPPPQQQQQQKXSALSPNAKEFIFPNMQGQGSSXNGMFPGDSPLNLSPLQYSNAFDVFAAYGGLNEKSFVDGLNFSLNNMQYSNQQFQPVMAN

SEQ ID NO: 28202 - protein, 101 aa, Homo sapiens
MQLEIKVALNFIISYLYNKLPRRRADLFGEELERLLKKKYEGHWYPEKPLKGSGFRCVHIGEMVDPVVELAAKRSGLAVEDVRANVPEELSVWIDPFEVSY

SEQ ID NO: 28203 - protein, 344 aa, Homo sapiens
  MOD_RES (165)..(165): Selenocysteine
  MOD_RES (175)..(175): Selenocysteine
  MOD_RES (177)..(178): Selenocysteine
  MOD_RES (184)..(184): Selenocysteine
  MOD_RES (189)..(189): Selenocysteine
  MOD_RES (224)..(224): Selenocysteine
  MOD_RES (244)..(244): Selenocysteine
  MOD_RES (282)..(282): Selenocysteine
  MOD_RES (293)..(293): Selenocysteine
  MOD_RES (317)..(317): Selenocysteine
  MOD_RES (329)..(329): Selenocysteine
MQLEIKVALNFIISYLYNKLPRRRADLFGEELERLLKKKYEGHWYPEKPLKGSGFRCVHIGEMVDPVVELAAKRSGLAVEDVRANVPEELSVWIDPFEVSYQIGEKGAVKVLYLDDSEGCGAPELDKEIKSSFNPDAQVFVPIGSQDSSLSNSPSPSFGQSPSPXFIPRSAQPIXFXXASFAAXKFGSXKMKKGGGAASGGGVASSGAGGQQPPQQPRMARSPXNSLLKHKSLSLSMHSLNFIXANPAPQSQLSPNAKEFVYNGGGSPSLFFDAADGQGSGXPGPFGGSGAGXCNSSSFDMAQVFGGGANSLFLEKXPFVEGLSYNLNXMQYPSQQFQPVVLAN

SEQ ID NO: 28204 - protein, 246 aa, Homo sapiens
  MOD_RES (3)..(4): Selenocysteine
  MOD_RES (23)..(23): Selenocysteine
  MOD_RES (30)..(30): Selenocysteine
  MOD_RES (43)..(43): Selenocysteine
  MOD_RES (60)..(60): Selenocysteine
  MOD_RES (62)..(62): Selenocysteine
  MOD_RES (79)..(79): Selenocysteine
  MOD_RES (106)..(106): Selenocysteine
  MOD_RES (109)..(109): Selenocysteine
  MOD_RES (163)..(163): Selenocysteine
  MOD_RES (175)..(175): Selenocysteine
MAXXVQLDAQAAQQLQYGGAVGXVGRLNIXVVQAKLAKNYGMXRMDPYCRLRLGYAVYEXPXAHNGAKNPRWNKVIHCXVPPGVDSFYLEIFDERAFSMDDRIAWXHIXIPESLRQGKVEDKWYSLSGRQGDDKEGMINLVMSYALLPAAMVMPPQPVVLMPXVYQQGVGYVPIXGMPAVCSPGMVPVALPPAAVNAQPRCSEEDLKAIQDMFPNMDQEVIRSVLEAQRGNKDAAINSLLQMGEEP

SEQ ID NO: 28205 - protein, 179 aa, Homo sapiens
  MOD_RES (3)..(4): Selenocysteine
  MOD_RES (7)..(7): Selenocysteine
  MOD_RES (21)..(21): Selenocysteine
  MOD_RES (38)..(38): Selenocysteine
  MOD_RES (40)..(40): Selenocysteine
  MOD_RES (57)..(57): Selenocysteine
  MOD_RES (84)..(84): Selenocysteine
  MOD_RES (87)..(87): Selenocysteine
  MOD_RES (141)..(141): Selenocysteine
  MOD_RES (153)..(153): Selenocysteine
  MOD_RES (160)..(160): Selenocysteine
MAXXVSXQRGPAKLAKNYGMXRMDPYCRLRLGYAVYEXPXAHNGAKNPRWNKVIHCXVPPGVDSFYLEIFDERAFSMDDRIAWXHIXIPESLRQGKVEDKWYSLSGRQGDDKEGMINLVMSYALLPAAMVMPPQPVVLMPXVYQQGVGYVPIXDIVNFGXAPHFIEKFPRRCRNICQSL

SEQ ID NO: 28206 - protein, 186 aa, Homo sapiens
  MOD_RES (3)..(4): Selenocysteine
  MOD_RES (7)..(7): Selenocysteine
  MOD_RES (21)..(21): Selenocysteine
  MOD_RES (38)..(38): Selenocysteine
  MOD_RES (40)..(40): Selenocysteine
  MOD_RES (57)..(57): Selenocysteine
  MOD_RES (84)..(84): Selenocysteine
  MOD_RES (87)..(87): Selenocysteine
  MOD_RES (141)..(141): Selenocysteine
  MOD_RES (153)..(153): Selenocysteine
MAXXVSXQRGPAKLAKNYGMXRMDPYCRLRLGYAVYEXPXAHNGAKNPRWNKVIHCXVPPGVDSFYLEIFDERAFSMDDRIAWXHIXIPESLRQGKVEDKWYSLSGRQGDDKEGMINLVMSYALLPAAMVMPPQPVVLMPXVYQQGVGYVPIXGMPAVCSPGMVPVALPPAAVNAQPRCSEEDLKA

SEQ ID NO: 28207 - protein, 274 aa, Homo sapiens
  MOD_RES (3)..(4): Selenocysteine
  MOD_RES (7)..(7): Selenocysteine
  MOD_RES (25)..(25): Selenocysteine
  MOD_RES (27)..(27): Selenocysteine
  MOD_RES (51)..(51): Selenocysteine
  MOD_RES (58)..(58): Selenocysteine
  MOD_RES (71)..(71): Selenocysteine
  MOD_RES (88)..(88): Selenocysteine
  MOD_RES (90)..(90): Selenocysteine
  MOD_RES (107)..(107): Selenocysteine
  MOD_RES (134)..(134): Selenocysteine
  MOD_RES (137)..(137): Selenocysteine
  MOD_RES (191)..(191): Selenocysteine
  MOD_RES (203)..(203): Selenocysteine
MAXXVSXQRGPVYIGELPQDFLRIXPXQQQRQVQLDAQAAQQLQYGGAVGXVGRLNIXVVQAKLAKNYGMXRMDPYCRLRLGYAVYEXPXAHNGAKNPRWNKVIHCXVPPGVDSFYLEIFDERAFSMDDRIAWXHIXIPESLRQGKVEDKWYSLSGRQGDDKEGMINLVMSYALLPAAMVMPPQPVVLMPXVYQQGVGYVPIXGMPAVCSPGMVPVALPPAAVNAQPRCSEEDLKAIQDMFPNMDQEVIRSVLEAQRGNKDAAINSLLQMGEEP

SEQ ID NO: 28208 - protein, 80 aa, Homo sapiens
  MOD_RES (3)..(4): Selenocysteine
  MOD_RES (7)..(7): Selenocysteine
  MOD_RES (25)..(25): Selenocysteine
  MOD_RES (27)..(27): Selenocysteine
  MOD_RES (51)..(51): Selenocysteine
  MOD_RES (58)..(58): Selenocysteine
MAXXVSXQRGPVYIGELPQDFLRIXPXQQQRQVQLDAQAAQQLQYGGAVGXVGRLNIXVVQGCPLSVAPAWCPWPCPRPP

SEQ ID NO: 28209 - protein, 213 aa, Homo sapiens
  MOD_RES (3)..(4): Selenocysteine
  MOD_RES (7)..(7): Selenocysteine
  MOD_RES (25)..(25): Selenocysteine
  MOD_RES (27)..(27): Selenocysteine
  MOD_RES (51)..(51): Selenocysteine
  MOD_RES (58)..(58): Selenocysteine
  MOD_RES (73)..(73): Selenocysteine
  MOD_RES (76)..(76): Selenocysteine
  MOD_RES (130)..(130): Selenocysteine
  MOD_RES (142)..(142): Selenocysteine
MAXXVSXQRGPVYIGELPQDFLRIXPXQQQRQVQLDAQAAQQLQYGGAVGXVGRLNIXVVQRAFSMDDRIAWXHIXIPESLRQGKVEDKWYSLSGRQGDDKEGMINLVMSYALLPAAMVMPPQPVVLMPXVYQQGVGYVPIXGMPAVCSPGMVPVALPPAAVNAQPRCSEEDLKAIQDMFPNMDQEVIRSVLEAQRGNKDAAINSLLQMGEEP

SEQ ID NO: 28210 - protein, 205 aa, Homo sapiens
  MOD_RES (2)..(2): Selenocysteine
  MOD_RES (19)..(19): Selenocysteine
  MOD_RES (21)..(21): Selenocysteine
  MOD_RES (38)..(38): Selenocysteine
  MOD_RES (65)..(65): Selenocysteine
  MOD_RES (68)..(68): Selenocysteine
  MOD_RES (122)..(122): Selenocysteine
  MOD_RES (134)..(134): Selenocysteine
MXRMDPYCRLRLGYAVYEXPXAHNGAKNPRWNKVIHCXVPPGVDSFYLEIFDERAFSMDDRIAWXHIXIPESLRQGKVEDKWYSLSGRQGDDKEGMINLVMSYALLPAAMVMPPQPVVLMPXVYQQGVGYVPIXGMPAVCSPGMVPVALPPAAVNAQPRCSEEDLKAIQDMFPNMDQEVIRSVLEAQRGNKDAAINSLLQMGEEP

SEQ ID NO: 28211 - protein, 38 aa, Homo sapiens
  MOD_RES (13)..(13): Selenocysteine
  MOD_RES (22)..(22): Selenocysteine
MAFGKSHRDPYAXSVGHLIAQXQQLFLGRKGYICWSSD

SEQ ID NO: 28212 - protein, 63 aa, Homo sapiens
  MOD_RES (13)..(13): Selenocysteine
  MOD_RES (23)..(23): Selenocysteine
  MOD_RES (29)..(29): Selenocysteine
  MOD_RES (44)..(45): Selenocysteine
  MOD_RES (51)..(51): Selenocysteine
  MOD_RES (56)..(56): Selenocysteine
MAFGKSHRDPYAXSVGHLIEKAXFAGVQXEDWGQFMHICDIINXXQDGLLXCVCRXVVQVSSL

SEQ ID NO: 28213 - protein, 346 aa, Homo sapiens
  MOD_RES (13)..(13): Selenocysteine
  MOD_RES (23)..(23): Selenocysteine
  MOD_RES (29)..(29): Selenocysteine
  MOD_RES (44)..(45): Selenocysteine
  MOD_RES (72)..(72): Selenocysteine
  MOD_RES (125)..(125): Selenocysteine
  MOD_RES (162)..(162): Selenocysteine
  MOD_RES (167)..(167): Selenocysteine
  MOD_RES (176)..(176): Selenocysteine
  MOD_RES (180)..(180): Selenocysteine
  MOD_RES (194)..(194): Selenocysteine
  MOD_RES (196)..(196): Selenocysteine
  MOD_RES (227)..(227): Selenocysteine
  MOD_RES (245)..(245): Selenocysteine
  MOD_RES (266)..(266): Selenocysteine
  MOD_RES (287)..(287): Selenocysteine
  MOD_RES (304)..(304): Selenocysteine
  MOD_RES (306)..(307): Selenocysteine
  MOD_RES (330)..(330): Selenocysteine
  MOD_RES (336)..(336): Selenocysteine
MAFGKSHRDPYAXSVGHLIEKAXFAGVQXEDWGQFMHICDIINXXQDGPKDAVKALKKRISKNYNHKEIQLXLSLIDMCVQNCGPSFQSLIVKKEFVKENLVKLLNPRYNLPLDIQNRILNFIKXWSQGFPGGVDVSEVKEVYLDLVKKGVQFPPSEAEAEXARQEXAQISSNPPXSVPXAPALSSVIAPKNSXVXLVPEQIGKLHSELDMVKMNVRVMSAILMENXPGSENHEDIELLQKLYKXGREMQERIMDLLVVVENEDVXVELIQVNEDLNNAILGYERFXRNQQRILEQNKNQKEAXNXXSEPSAPSQDLLDLSPSPRMPRAXLGELNXMNNQLSGLSK

SEQ ID NO: 28214 - protein, 465 aa, Homo sapiens
  MOD_RES (13)..(13): Selenocysteine
  MOD_RES (23)..(23): Selenocysteine
  MOD_RES (29)..(29): Selenocysteine
  MOD_RES (44)..(45): Selenocysteine
  MOD_RES (72)..(72): Selenocysteine
  MOD_RES (125)..(125): Selenocysteine
  MOD_RES (162)..(162): Selenocysteine
  MOD_RES (167)..(167): Selenocysteine
  MOD_RES (176)..(176): Selenocysteine
  MOD_RES (180)..(180): Selenocysteine
  MOD_RES (194)..(194): Selenocysteine
  MOD_RES (196)..(196): Selenocysteine
  MOD_RES (227)..(227): Selenocysteine
  MOD_RES (245)..(245): Selenocysteine
  MOD_RES (266)..(266): Selenocysteine
  MOD_RES (287)..(287): Selenocysteine
  MOD_RES (304)..(304): Selenocysteine
  MOD_RES (306)..(307): Selenocysteine
  MOD_RES (330)..(330): Selenocysteine
  MOD_RES (336)..(336): Selenocysteine
  MOD_RES (354)..(354): Selenocysteine
  MOD_RES (373)..(373): Selenocysteine
  MOD_RES (382)..(382): Selenocysteine
  MOD_RES (387)..(387): Selenocysteine
  MOD_RES (400)..(400): Selenocysteine
  MOD_RES (421)..(421): Selenocysteine
  MOD_RES (444)..(445): Selenocysteine
MAFGKSHRDPYAXSVGHLIEKAXFAGVQXEDWGQFMHICDIINXXQDGPKDAVKALKKRISKNYNHKEIQLXLSLIDMCVQNCGPSFQSLIVKKEFVKENLVKLLNPRYNLPLDIQNRILNFIKXWSQGFPGGVDVSEVKEVYLDLVKKGVQFPPSEAEAEXARQEXAQISSNPPXSVPXAPALSSVIAPKNSXVXLVPEQIGKLHSELDMVKMNVRVMSAILMENXPGSENHEDIELLQKLYKXGREMQERIMDLLVVVENEDVXVELIQVNEDLNNAILGYERFXRNQQRILEQNKNQKEAXNXXSEPSAPSQDLLDLSPSPRMPRAXLGELNXMNNQLSGLNFSLPSSDVXNNLKPSLHPQMNLLALENXEIPPFAQRXSQNLXSSHAYDNPVSLQXIAAAPSNQSLPPLPSNHPAMXKSDLQPPNYYEVMEFDPLAPAVXXEAIYEEIDAHQHKGAQNDGD

SEQ ID NO: 28215 - protein, 476 aa, Homo sapiens
  MOD_RES (13)..(13): Selenocysteine
  MOD_RES (23)..(23): Selenocysteine
  MOD_RES (29)..(29): Selenocysteine
  MOD_RES (44)..(45): Selenocysteine
  MOD_RES (72)..(72): Selenocysteine
  MOD_RES (125)..(125): Selenocysteine
  MOD_RES (162)..(162): Selenocysteine
  MOD_RES (167)..(167): Selenocysteine
  MOD_RES (176)..(176): Selenocysteine
  MOD_RES (180)..(180): Selenocysteine
  MOD_RES (194)..(194): Selenocysteine
  MOD_RES (196)..(196): Selenocysteine
  MOD_RES (227)..(227): Selenocysteine
  MOD_RES (245)..(245): Selenocysteine
  MOD_RES (266)..(266): Selenocysteine
  MOD_RES (287)..(287): Selenocysteine
  MOD_RES (304)..(304): Selenocysteine
  MOD_RES (306)..(307): Selenocysteine
  MOD_RES (330)..(330): Selenocysteine
  MOD_RES (336)..(336): Selenocysteine
  MOD_RES (354)..(354): Selenocysteine
  MOD_RES (373)..(373): Selenocysteine
  MOD_RES (382)..(382): Selenocysteine
  MOD_RES (387)..(387): Selenocysteine
  MOD_RES (411)..(411): Selenocysteine
  MOD_RES (432)..(432): Selenocysteine
  MOD_RES (455)..(456): Selenocysteine
MAFGKSHRDPYAXSVGHLIEKAXFAGVQXEDWGQFMHICDIINXXQDGPKDAVKALKKRISKNYNHKEIQLXLSLIDMCVQNCGPSFQSLIVKKEFVKENLVKLLNPRYNLPLDIQNRILNFIKXWSQGFPGGVDVSEVKEVYLDLVKKGVQFPPSEAEAEXARQEXAQISSNPPXSVPXAPALSSVIAPKNSXVXLVPEQIGKLHSELDMVKMNVRVMSAILMENXPGSENHEDIELLQKLYKXGREMQERIMDLLVVVENEDVXVELIQVNEDLNNAILGYERFXRNQQRILEQNKNQKEAXNXXSEPSAPSQDLLDLSPSPRMPRAXLGELNXMNNQLSGLNFSLPSSDVXNNLKPSLHPQMNLLALENXEIPPFAQRXSQNLXSSHAYDNFLEHSNSVFLQPVSLQXIAAAPSNQSLPPLPSNHPAMXKSDLQPPNYYEVMEFDPLAPAVXXEAIYEEIDAHQHKGAQNDGD

SEQ ID NO: 28216 - protein, 469 aa, Homo sapiens
  MOD_RES (13)..(13): Selenocysteine
  MOD_RES (23)..(23): Selenocysteine
  MOD_RES (29)..(29): Selenocysteine
  MOD_RES (44)..(45): Selenocysteine
  MOD_RES (72)..(72): Selenocysteine
  MOD_RES (118)..(118): Selenocysteine
  MOD_RES (155)..(155): Selenocysteine
  MOD_RES (160)..(160): Selenocysteine
  MOD_RES (169)..(169): Selenocysteine
  MOD_RES (173)..(173): Selenocysteine
  MOD_RES (187)..(187): Selenocysteine
  MOD_RES (189)..(189): Selenocysteine
  MOD_RES (220)..(220): Selenocysteine
  MOD_RES (238)..(238): Selenocysteine
  MOD_RES (259)..(259): Selenocysteine
  MOD_RES (280)..(280): Selenocysteine
  MOD_RES (297)..(297): Selenocysteine
  MOD_RES (299)..(300): Selenocysteine
  MOD_RES (323)..(323): Selenocysteine
  MOD_RES (329)..(329): Selenocysteine
  MOD_RES (347)..(347): Selenocysteine
  MOD_RES (366)..(366): Selenocysteine
  MOD_RES (375)..(375): Selenocysteine
  MOD_RES (380)..(380): Selenocysteine
  MOD_RES (404)..(404): Selenocysteine
  MOD_RES (425)..(425): Selenocysteine
  MOD_RES (448)..(449): Selenocysteine
MAFGKSHRDPYAXSVGHLIEKAXFAGVQXEDWGQFMHICDIINXXQDGPKDAVKALKKRISKNYNHKEIQLXLSNCGPSFQSLIVKKEFVKENLVKLLNPRYNLPLDIQNRILNFIKXWSQGFPGGVDVSEVKEVYLDLVKKGVQFPPSEAEAEXARQEXAQISSNPPXSVPXAPALSSVIAPKNSXVXLVPEQIGKLHSELDMVKMNVRVMSAILMENXPGSENHEDIELLQKLYKXGREMQERIMDLLVVVENEDVXVELIQVNEDLNNAILGYERFXRNQQRILEQNKNQKEAXNXXSEPSAPSQDLLDLSPSPRMPRAXLGELNXMNNQLSGLNFSLPSSDVXNNLKPSLHPQMNLLALENXEIPPFAQRXSQNLXSSHAYDNFLEHSNSVFLQPVSLQXIAAAPSNQSLPPLPSNHPAMXKSDLQPPNYYEVMEFDPLAPAVXXEAIYEEIDAHQHKGAQNDGD

SEQ ID NO: 28217 - protein, 92 aa, Homo sapiens
  MOD_RES (13)..(13): Selenocysteine
  MOD_RES (23)..(23): Selenocysteine
  MOD_RES (29)..(29): Selenocysteine
  MOD_RES (44)..(45): Selenocysteine
  MOD_RES (72)..(72): Selenocysteine
  MOD_RES (80)..(80): Selenocysteine
  MOD_RES (85)..(85): Selenocysteine
MAFGKSHRDPYAXSVGHLIEKAXFAGVQXEDWGQFMHICDIINXXQDGPKDAVKALKKRISKNYNHKEIQLXLSSRCLLXCVCRXVVQVSSL

SEQ ID NO: 28218 - protein, 107 aa, Homo sapiens
  MOD_RES (48)..(48): Selenocysteine
  MOD_RES (85)..(85): Selenocysteine
  MOD_RES (90)..(90): Selenocysteine
  MOD_RES (99)..(99): Selenocysteine
  MOD_RES (103)..(103): Selenocysteine
MCVQNCGPSFQSLIVKKEFVKENLVKLLNPRYNLPLDIQNRILNFIKXWSQGFPGGVDVSEVKEVYLDLVKKGVQFPPSEAEAEXARQEXAQISSNPPXSVPXAPAL

SEQ ID NO: 28219 - protein, 326 aa, Homo sapiens
  MOD_RES (48)..(48): Selenocysteine
  MOD_RES (85)..(85): Selenocysteine
  MOD_RES (90)..(90): Selenocysteine
  MOD_RES (99)..(99): Selenocysteine
  MOD_RES (103)..(103): Selenocysteine
  MOD_RES (117)..(117): Selenocysteine
  MOD_RES (119)..(119): Selenocysteine
  MOD_RES (150)..(150): Selenocysteine
  MOD_RES (168)..(168): Selenocysteine
  MOD_RES (189)..(189): Selenocysteine
  MOD_RES (210)..(210): Selenocysteine
  MOD_RES (227)..(227): Selenocysteine
  MOD_RES (229)..(230): Selenocysteine
  MOD_RES (253)..(253): Selenocysteine
  MOD_RES (259)..(259): Selenocysteine
  MOD_RES (277)..(277): Selenocysteine
  MOD_RES (296)..(296): Selenocysteine
  MOD_RES (317)..(317): Selenocysteine
  MOD_RES (323)..(323): Selenocysteine
MCVQNCGPSFQSLIVKKEFVKENLVKLLNPRYNLPLDIQNRILNFIKXWSQGFPGGVDVSEVKEVYLDLVKKGVQFPPSEAEAEXARQEXAQISSNPPXSVPXAPALSSVIAPKNSXVXLVPEQIGKLHSELDMVKMNVRVMSAILMENXPGSENHEDIELLQKLYKXGREMQERIMDLLVVVENEDVXVELIQVNEDLNNAILGYERFXRNQQRILEQNKNQKEAXNXXSEPSAPSQDLLDLSPSPRMPRAXLGELNXMNNQLSGLNFSLPSSDVXNNLKPSLHPQMNLLALENXEIPPRDLVLPCWPGCGLKLLXYGDLPXSAS

SEQ ID NO: 28220 - protein, 399 aa, Homo sapiens
  MOD_RES (48)..(48): Selenocysteine
  MOD_RES (85)..(85): Selenocysteine
  MOD_RES (90)..(90): Selenocysteine
  MOD_RES (99)..(99): Selenocysteine
  MOD_RES (103)..(103): Selenocysteine
  MOD_RES (117)..(117): Selenocysteine
  MOD_RES (119)..(119): Selenocysteine
  MOD_RES (150)..(150): Selenocysteine
  MOD_RES (168)..(168): Selenocysteine
  MOD_RES (189)..(189): Selenocysteine
  MOD_RES (210)..(210): Selenocysteine
  MOD_RES (227)..(227): Selenocysteine
  MOD_RES (229)..(230): Selenocysteine
  MOD_RES (253)..(253): Selenocysteine
  MOD_RES (259)..(259): Selenocysteine
  MOD_RES (277)..(277): Selenocysteine
  MOD_RES (296)..(296): Selenocysteine
  MOD_RES (305)..(305): Selenocysteine
  MOD_RES (310)..(310): Selenocysteine
  MOD_RES (334)..(334): Selenocysteine
  MOD_RES (355)..(355): Selenocysteine
  MOD_RES (378)..(379): Selenocysteine
MCVQNCGPSFQSLIVKKEFVKENLVKLLNPRYNLPLDIQNRILNFIKXWSQGFPGGVDVSEVKEVYLDLVKKGVQFPPSEAEAEXARQEXAQISSNPPXSVPXAPALSSVIAPKNSXVXLVPEQIGKLHSELDMVKMNVRVMSAILMENXPGSENHEDIELLQKLYKXGREMQERIMDLLVVVENEDVXVELIQVNEDLNNAILGYERFXRNQQRILEQNKNQKEAXNXXSEPSAPSQDLLDLSPSPRMPRAXLGELNXMNNQLSGLNFSLPSSDVXNNLKPSLHPQMNLLALENXEIPPFAQRXSQNLXSSHAYDNFLEHSNSVFLQPVSLQXIAAAPSNQSLPPLPSNHPAMXKSDLQPPNYYEVMEFDPLAPAVXXEAIYEEIDAHQHKGAQNDGD

SEQ ID NO: 28221 - protein, 122 aa, Homo sapiens
  MOD_RES (9)..(10): Selenocysteine
  MOD_RES (37)..(37): Selenocysteine
  MOD_RES (90)..(90): Selenocysteine
MHICDIINXXQDGPKDAVKALKKRISKNYNHKEIQLXLSLIDMCVQNCGPSFQSLIVKKEFVKENLVKLLNPRYNLPLDIQNRILNFIKXWSQGFPGGVDVSEVKEVYLDLVKKGVQFPPSE

SEQ ID NO: 28222 - protein, 225 aa, Homo sapiens
  MOD_RES (9)..(10): Selenocysteine
  MOD_RES (37)..(37): Selenocysteine
  MOD_RES (90)..(90): Selenocysteine
  MOD_RES (127)..(127): Selenocysteine
  MOD_RES (132)..(132): Selenocysteine
  MOD_RES (141)..(141): Selenocysteine
  MOD_RES (145)..(145): Selenocysteine
  MOD_RES (159)..(159): Selenocysteine
  MOD_RES (161)..(161): Selenocysteine
  MOD_RES (192)..(192): Selenocysteine
MHICDIINXXQDGPKDAVKALKKRISKNYNHKEIQLXLSLIDMCVQNCGPSFQSLIVKKEFVKENLVKLLNPRYNLPLDIQNRILNFIKXWSQGFPGGVDVSEVKEVYLDLVKKGVQFPPSEAEAEXARQEXAQISSNPPXSVPXAPALSSVIAPKNSXVXLVPEQIGKLHSELDMVKMNVRVMSAILMENXPGSENHEDIELLQVLYDFRDYQSKCLLKLFSKL

SEQ ID NO: 28223 - protein, 229 aa, Homo sapiens
  MOD_RES (9)..(9): Selenocysteine
  MOD_RES (13)..(13): Selenocysteine
  MOD_RES (19)..(19): Selenocysteine
  MOD_RES (34)..(35): Selenocysteine
  MOD_RES (62)..(62): Selenocysteine
  MOD_RES (115)..(115): Selenocysteine
  MOD_RES (152)..(152): Selenocysteine
  MOD_RES (157)..(157): Selenocysteine
  MOD_RES (166)..(166): Selenocysteine
  MOD_RES (170)..(170): Selenocysteine
  MOD_RES (184)..(184): Selenocysteine
  MOD_RES (186)..(186): Selenocysteine
  MOD_RES (217)..(217): Selenocysteine
MPPGEWNQXEKAXFAGVQXEDWGQFMHICDIINXXQDGPKDAVKALKKRISKNYNHKEIQLXLSLIDMCVQNCGPSFQSLIVKKEFVKENLVKLLNPRYNLPLDIQNRILNFIKXWSQGFPGGVDVSEVKEVYLDLVKKGVQFPPSEAEAEXARQEXAQISSNPPXSVPXAPALSSVIAPKNSXVXLVPEQIGKLHSELDMVKMNVRVMSAILMENXPGSENHEDIELL

SEQ ID NO: 28224 - protein, 199 aa, Homo sapiens
  MOD_RES (1)..(1): Any amino acid
  MOD_RES (12)..(12): Selenocysteine
  MOD_RES (22)..(22): Selenocysteine
  MOD_RES (28)..(28): Selenocysteine
  MOD_RES (43)..(44): Selenocysteine
  MOD_RES (71)..(71): Selenocysteine
  MOD_RES (124)..(124): Selenocysteine
  MOD_RES (161)..(161): Selenocysteine
  MOD_RES (191)..(191): Selenocysteine
XFGKSHRDPYAXSVGHLIEKAXFAGVQXEDWGQFMHICDIINXXQDGPKDAVKALKKRISKNYNHKEIQLXLSLIDMCVQNCGPSFQSLIVKKEFVKENLVKLLNPRYNLPLDIQNRILNFIKXWSQGFPGGVDVSEVKEVYLDLVKKGVQFPPSEAEAEXARQEIGKLHSELDMVKMNVRVMSAILMENXPGSENHED

SEQ ID NO: 28225 - protein, 125 aa, Homo sapiens
  MOD_RES (1)..(1): Any amino acid
  MOD_RES (10)..(10): Selenocysteine
  MOD_RES (29)..(29): Selenocysteine
  MOD_RES (38)..(38): Selenocysteine
  MOD_RES (43)..(43): Selenocysteine
  MOD_RES (67)..(67): Selenocysteine
  MOD_RES (88)..(88): Selenocysteine
  MOD_RES (111)..(112): Selenocysteine
  MOD_RES (120)..(120): Selenocysteine
XFSLPSSDVXNNLKPSLHPQMNLLALENXEIPPFAQRXSQNLXSSHAYDNFLEHSNSVFLQPVSLQXIAAAPSNQSLPPLPSNHPAMXKSDLQPPNYYEVMEFDPLAPAVXXEYIFQLQXYVRRI

SEQ ID NO: 28226 - protein, 252 aa, Homo sapiens
  MOD_RES (1)..(1): Any amino acid
  MOD_RES (10)..(10): Selenocysteine
  MOD_RES (20)..(20): Selenocysteine
  MOD_RES (26)..(26): Selenocysteine
  MOD_RES (41)..(42): Selenocysteine
  MOD_RES (69)..(69): Selenocysteine
  MOD_RES (72)..(72): Selenocysteine
  MOD_RES (109)..(109): Selenocysteine
  MOD_RES (114)..(114): Selenocysteine
  MOD_RES (123)..(123): Selenocysteine
  MOD_RES (127)..(127): Selenocysteine
  MOD_RES (141)..(141): Selenocysteine
  MOD_RES (143)..(143): Selenocysteine
  MOD_RES (174)..(174): Selenocysteine
  MOD_RES (192)..(192): Selenocysteine
  MOD_RES (213)..(213): Selenocysteine
  MOD_RES (234)..(234): Selenocysteine
  MOD_RES (251)..(251): Selenocysteine
XKSHRDPYAXSVGHLIEKAXFAGVQXEDWGQFMHICDIINXXQDGPKDAVKALKKRISKNYNHKEIQLXLSXWSQGFPGGVDVSEVKEVYLDLVKKGVQFPPSEAEAEXARQEXAQISSNPPXSVPXAPALSSVIAPKNSXVXLVPEQIGKLHSELDMVKMNVRVMSAILMENXPGSENHEDIELLQKLYKXGREMQERIMDLLVVVENEDVXVELIQVNEDLNNAILGYERFXRNQQRILEQNKNQKEAXN

SEQ ID NO: 28227 - protein, 39 aa, Homo sapiens
  MOD_RES (6)..(6): Selenocysteine
  MOD_RES (17)..(17): Selenocysteine
DMFAQXRGNSLAEQRKXHHPAWPLIHRRSLEAGGCSHAG

SEQ ID NO: 28228 - protein, 457 aa, Homo sapiens
  MOD_RES (11)..(11): Selenocysteine
  MOD_RES (21)..(21): Selenocysteine
  MOD_RES (31)..(31): Selenocysteine
  MOD_RES (43)..(43): Selenocysteine
  MOD_RES (72)..(72): Selenocysteine
  MOD_RES (85)..(85): Selenocysteine
  MOD_RES (114)..(114): Selenocysteine
  MOD_RES (127)..(127): Selenocysteine
  MOD_RES (137)..(137): Selenocysteine
  MOD_RES (161)..(161): Selenocysteine
  MOD_RES (165)..(165): Selenocysteine
  MOD_RES (185)..(185): Selenocysteine
  MOD_RES (193)..(193): Selenocysteine
  MOD_RES (214)..(214): Selenocysteine
  MOD_RES (235)..(235): Selenocysteine
  MOD_RES (276)..(276): Selenocysteine
  MOD_RES (298)..(298): Selenocysteine
  MOD_RES (315)..(315): Selenocysteine
  MOD_RES (321)..(321): Selenocysteine
  MOD_RES (340)..(340): Selenocysteine
  MOD_RES (351)..(351): Selenocysteine
  MOD_RES (353)..(353): Selenocysteine
  MOD_RES (394)..(394): Selenocysteine
  MOD_RES (406)..(406): Selenocysteine
MEFLLGNPFSXPVGQCLEKAXDGSLQSEDWXLNMEICDIINEXEEGPKDAIRALKKRLNGNRNYREVMLALXAWADAFRSSPDLXGVVHIYEELKRKGVEFPMADLDALSPIHXPQRSVPEVDPAAXMPRSQSQQRXSAGSYSSPPPAPYSAPQAPALSVXGPIXANSEQIARLRSELDVVRGNXKVMSEMLXEMVPGQEDSSDLELLQELNRXCRAMQQRIVELISRVSNEEVXEELLHVNDDLNNVFLRYERFERYRSGRSVQNASNGVLNEVXEDNLIDLGPGSPAVVSPMVGNXAPPSSLSSQLAGLDLGXESVSGXLSSLQQCNPRDGFDMFAQXRGNSLAEQRKXVXYEDPQAVGGLASALDNRKQSSEGIPVAQPSVMDDIEVWLRXDLKGDDLEEGVXSEEFDKFLEERAKAAEMVPDLPSPPMEAPAPASNPSGRKKPERSEDALFAL

SEQ ID NO: 28229 - protein, 388 aa, Homo sapiens
  MOD_RES (11)..(11): Selenocysteine
  MOD_RES (21)..(21): Selenocysteine
  MOD_RES (31)..(31): Selenocysteine
  MOD_RES (43)..(43): Selenocysteine
  MOD_RES (72)..(72): Selenocysteine
  MOD_RES (87)..(87): Selenocysteine
  MOD_RES (95)..(95): Selenocysteine
  MOD_RES (116)..(116): Selenocysteine
  MOD_RES (137)..(137): Selenocysteine
  MOD_RES (178)..(178): Selenocysteine
  MOD_RES (200)..(200): Selenocysteine
  MOD_RES (217)..(217): Selenocysteine
  MOD_RES (223)..(223): Selenocysteine
  MOD_RES (242)..(242): Selenocysteine
  MOD_RES (253)..(253): Selenocysteine
  MOD_RES (255)..(255): Selenocysteine
  MOD_RES (279)..(279): Selenocysteine
  MOD_RES (304)..(304): Selenocysteine
  MOD_RES (325)..(325): Selenocysteine
  MOD_RES (337)..(337): Selenocysteine
MEFLLGNPFSXPVGQCLEKAXDGSLQSEDWXLNMEICDIINEXEEGPKDAIRALKKRLNGNRNYREVMLALXIARLRSELDVVRGNXKVMSEMLXEMVPGQEDSSDLELLQELNRXCRAMQQRIVELISRVSNEEVXEELLHVNDDLNNVFLRYERFERYRSGRSVQNASNGVLNEVXEDNLIDLGPGSPAVVSPMVGNXAPPSSLSSQLAGLDLGXESVSGXLSSLQQCNPRDGFDMFAQXRGNSLAEQRKXVXYEDPQAVGGLASALDNRKQSSEGXFLSSAQKRGRGGESDLEPIDSWLIXQGMIPVAQPSVMDDIEVWLRXDLKGDDLEEGVXSEEFDKFLEERAKAAEMVPDLPSPPMEAPAPASNPSGRKKPERSEDALFAL

SEQ ID NO: 28230 - protein, 483 aa, Homo sapiens
  MOD_RES (11)..(11): Selenocysteine
  MOD_RES (21)..(21): Selenocysteine
  MOD_RES (31)..(31): Selenocysteine
  MOD_RES (43)..(43): Selenocysteine
  MOD_RES (72)..(72): Selenocysteine
  MOD_RES (76)..(76): Selenocysteine
  MOD_RES (111)..(111): Selenocysteine
  MOD_RES (135)..(135): Selenocysteine
  MOD_RES (164)..(164): Selenocysteine
  MOD_RES (182)..(182): Selenocysteine
  MOD_RES (190)..(190): Selenocysteine
  MOD_RES (211)..(211): Selenocysteine
  MOD_RES (232)..(232): Selenocysteine
  MOD_RES (273)..(273): Selenocysteine
  MOD_RES (295)..(295): Selenocysteine
  MOD_RES (312)..(312): Selenocysteine
  MOD_RES (318)..(318): Selenocysteine
  MOD_RES (337)..(337): Selenocysteine
  MOD_RES (348)..(348): Selenocysteine
  MOD_RES (350)..(350): Selenocysteine
  MOD_RES (374)..(374): Selenocysteine
  MOD_RES (399)..(399): Selenocysteine
  MOD_RES (420)..(420): Selenocysteine
  MOD_RES (432)..(432): Selenocysteine
MEFLLGNPFSXPVGQCLEKAXDGSLQSEDWXLNMEICDIINEXEEGPKDAIRALKKRLNGNRNYREVMLALXVLEXCVKNCGHRFHILVANRDFIDSVLVKIISPKNNPPXIVQDKVLALIQAWADAFRSSPDLXGVVHIYEELKRKGVEFPMADLDALSPIHXPQRIARLRSELDVVRGNXKVMSEMLXEMVPGQEDSSDLELLQELNRXCRAMQQRIVELISRVSNEEVXEELLHVNDDLNNVFLRYERFERYRSGRSVQNASNGVLNEVXEDNLIDLGPGSPAVVSPMVGNXAPPSSLSSQLAGLDLGXESVSGXLSSLQQCNPRDGFDMFAQXRGNSLAEQRKXVXYEDPQAVGGLASALDNRKQSSEGXFLSSAQKRGRGGESDLEPIDSWLIXQGMIPVAQPSVMDDIEVWLRXDLKGDDLEEGVXSEEFDKFLEERAKAAEMVPDLPSPPMEAPAPASNPSGRKKPERSEDALFAL

SEQ ID NO: 28231 - protein, 507 aa, Homo sapiens
  MOD_RES (11)..(11): Selenocysteine
  MOD_RES (21)..(21): Selenocysteine
  MOD_RES (31)..(31): Selenocysteine
  MOD_RES (43)..(43): Selenocysteine
  MOD_RES (72)..(72): Selenocysteine
  MOD_RES (76)..(76): Selenocysteine
  MOD_RES (111)..(111): Selenocysteine
  MOD_RES (135)..(135): Selenocysteine
  MOD_RES (164)..(164): Selenocysteine
  MOD_RES (177)..(177): Selenocysteine
  MOD_RES (187)..(187): Selenocysteine
  MOD_RES (211)..(211): Selenocysteine
  MOD_RES (215)..(215): Selenocysteine
  MOD_RES (235)..(235): Selenocysteine
  MOD_RES (243)..(243): Selenocysteine
  MOD_RES (264)..(264): Selenocysteine
  MOD_RES (285)..(285): Selenocysteine
  MOD_RES (326)..(326): Selenocysteine
  MOD_RES (348)..(348): Selenocysteine
  MOD_RES (365)..(365): Selenocysteine
  MOD_RES (371)..(371): Selenocysteine
  MOD_RES (390)..(390): Selenocysteine
  MOD_RES (401)..(401): Selenocysteine
  MOD_RES (403)..(403): Selenocysteine
  MOD_RES (444)..(444): Selenocysteine
  MOD_RES (456)..(456): Selenocysteine
MEFLLGNPFSXPVGQCLEKAXDGSLQSEDWXLNMEICDIINEXEEGPKDAIRALKKRLNGNRNYREVMLALXVLEXCVKNCGHRFHILVANRDFIDSVLVKIISPKNNPPXIVQDKVLALIQAWADAFRSSPDLXGVVHIYEELKRKGVEFPMADLDALSPIHXPQRSVPEVDPAAXMPRSQSQQRXSAGSYSSPPPAPYSAPQAPALSVXGPIXANSEQIARLRSELDVVRGNXKVMSEMLXEMVPGQEDSSDLELLQELNRXCRAMQQRIVELISRVSNEEVXEELLHVNDDLNNVFLRYERFERYRSGRSVQNASNGVLNEVXEDNLIDLGPGSPAVVSPMVGNXAPPSSLSSQLAGLDLGXESVSGXLSSLQQCNPRDGFDMFAQXRGNSLAEQRKXVXYEDPQAVGGLASALDNRKQSSEGIPVAQPSVMDDIEVWLRXDLKGDDLEEGVXSEEFDKFLEERAKAAEMVPDLPSPPMEAPAPASNPSGRKKPERSEDALFAL

SEQ ID NO: 28232 - protein, 389 aa, Homo sapiens
  MOD_RES (11)..(11): Selenocysteine
  MOD_RES (21)..(21): Selenocysteine
  MOD_RES (31)..(31): Selenocysteine
  MOD_RES (43)..(43): Selenocysteine
  MOD_RES (72)..(72): Selenocysteine
  MOD_RES (76)..(76): Selenocysteine
  MOD_RES (111)..(111): Selenocysteine
  MOD_RES (137)..(137): Selenocysteine
  MOD_RES (145)..(145): Selenocysteine
  MOD_RES (166)..(166): Selenocysteine
  MOD_RES (187)..(187): Selenocysteine
  MOD_RES (228)..(228): Selenocysteine
  MOD_RES (250)..(250): Selenocysteine
  MOD_RES (267)..(267): Selenocysteine
  MOD_RES (273)..(273): Selenocysteine
  MOD_RES (292)..(292): Selenocysteine
  MOD_RES (303)..(303): Selenocysteine
  MOD_RES (305)..(305): Selenocysteine
  MOD_RES (338)..(338): Selenocysteine
MEFLLGNPFSXPVGQCLEKAXDGSLQSEDWXLNMEICDIINEXEEGPKDAIRALKKRLNGNRNYREVMLALXVLEXCVKNCGHRFHILVANRDFIDSVLVKIISPKNNPPXIVQDKVLALIQIARLRSELDVVRGNXKVMSEMLXEMVPGQEDSSDLELLQELNRXCRAMQQRIVELISRVSNEEVXEELLHVNDDLNNVFLRYERFERYRSGRSVQNASNGVLNEVXEDNLIDLGPGSPAVVSPMVGNXAPPSSLSSQLAGLDLGXESVSGXLSSLQQCNPRDGFDMFAQXRGNSLAEQRKXVXYEDPQAVGGLASALDNRKQSSEGKGDDLEEGVXSEEFDKFLEERAKAAEMVPDLPSPPMEAPAPASNPSGRKKPERSEDALFAL

SEQ ID NO: 28233 - protein, 462 aa, Homo sapiens
  MOD_RES (11)..(11): Selenocysteine
  MOD_RES (21)..(21): Selenocysteine
  MOD_RES (31)..(31): Selenocysteine
  MOD_RES (43)..(43): Selenocysteine
  MOD_RES (72)..(72): Selenocysteine
  MOD_RES (76)..(76): Selenocysteine
  MOD_RES (111)..(111): Selenocysteine
  MOD_RES (132)..(132): Selenocysteine
  MOD_RES (142)..(142): Selenocysteine
  MOD_RES (166)..(166): Selenocysteine
  MOD_RES (170)..(170): Selenocysteine
  MOD_RES (190)..(190): Selenocysteine
  MOD_RES (198)..(198): Selenocysteine
  MOD_RES (219)..(219): Selenocysteine
  MOD_RES (240)..(240): Selenocysteine
  MOD_RES (281)..(281): Selenocysteine
  MOD_RES (303)..(303): Selenocysteine
  MOD_RES (320)..(320): Selenocysteine
  MOD_RES (326)..(326): Selenocysteine
  MOD_RES (345)..(345): Selenocysteine
  MOD_RES (356)..(356): Selenocysteine
  MOD_RES (358)..(358): Selenocysteine
  MOD_RES (399)..(399): Selenocysteine
  MOD_RES (411)..(411): Selenocysteine
MEFLLGNPFSXPVGQCLEKAXDGSLQSEDWXLNMEICDIINEXEEGPKDAIRALKKRLNGNRNYREVMLALXVLEXCVKNCGHRFHILVANRDFIDSVLVKIISPKNNPPXIVQDKVLALIQSVPEVDPAAXMPRSQSQQRXSAGSYSSPPPAPYSAPQAPALSVXGPIXANSEQIARLRSELDVVRGNXKVMSEMLXEMVPGQEDSSDLELLQELNRXCRAMQQRIVELISRVSNEEVXEELLHVNDDLNNVFLRYERFERYRSGRSVQNASNGVLNEVXEDNLIDLGPGSPAVVSPMVGNXAPPSSLSSQLAGLDLGXESVSGXLSSLQQCNPRDGFDMFAQXRGNSLAEQRKXVXYEDPQAVGGLASALDNRKQSSEGIPVAQPSVMDDIEVWLRXDLKGDDLEEGVXSEEFDKFLEERAKAAEMVPDLPSPPMEAPAPASNPSGRKKPERSEDALFAL

SEQ ID NO: 28234 - protein, 83 aa, Homo sapiens
  MOD_RES (10)..(10): Selenocysteine
  MOD_RES (39)..(39): Selenocysteine
  MOD_RES (43)..(43): Selenocysteine
  MOD_RES (78)..(78): Selenocysteine
MEICDIINEXEEGPKDAIRALKKRLNGNRNYREVMLALXVLEXCVKNCGHRFHILVANRDFIDSVLVKIISPKNNPPXIVQDK

SEQ ID NO: 28235 - protein, 240 aa, Homo sapiens
  MOD_RES (18)..(18): Selenocysteine
  MOD_RES (59)..(59): Selenocysteine
  MOD_RES (81)..(81): Selenocysteine
  MOD_RES (98)..(98): Selenocysteine
  MOD_RES (104)..(104): Selenocysteine
  MOD_RES (123)..(123): Selenocysteine
  MOD_RES (134)..(134): Selenocysteine
  MOD_RES (136)..(136): Selenocysteine
  MOD_RES (177)..(177): Selenocysteine
  MOD_RES (189)..(189): Selenocysteine
MQQRIVELISRVSNEEVXEELLHVNDDLNNVFLRYERFERYRSGRSVQNASNGVLNEVXEDNLIDLGPGSPAVVSPMVGNXAPPSSLSSQLAGLDLGXESVSGXLSSLQQCNPRDGFDMFAQXRGNSLAEQRKXVXYEDPQAVGGLASALDNRKQSSEGIPVAQPSVMDDIEVWLRXDLKGDDLEEGVXSEEFDKFLEERAKAAEMVPDLPSPPMEAPAPASNPSGRKKPERSEDALFAL

SEQ ID NO: 28236 - protein, 765 aa, Homo sapiens
  MOD_RES (67)..(67): Selenocysteine
  MOD_RES (154)..(154): Selenocysteine
  MOD_RES (157)..(157): Selenocysteine
  MOD_RES (258)..(258): Selenocysteine
  MOD_RES (269)..(270): Selenocysteine
  MOD_RES (287)..(287): Selenocysteine
  MOD_RES (295)..(295): Selenocysteine
  MOD_RES (303)..(303): Selenocysteine
  MOD_RES (313)..(313): Selenocysteine
  MOD_RES (411)..(411): Selenocysteine
  MOD_RES (417)..(417): Selenocysteine
  MOD_RES (446)..(446): Selenocysteine
  MOD_RES (498)..(498): Selenocysteine
  MOD_RES (501)..(501): Selenocysteine
  MOD_RES (570)..(570): Selenocysteine
  MOD_RES (585)..(585): Selenocysteine
  MOD_RES (591)..(591): Selenocysteine
  MOD_RES (597)..(597): Selenocysteine
  MOD_RES (606)..(606): Selenocysteine
  MOD_RES (639)..(639): Selenocysteine
  MOD_RES (649)..(649): Selenocysteine
  MOD_RES (680)..(680): Selenocysteine
  MOD_RES (706)..(706): Selenocysteine
  MOD_RES (718)..(718): Selenocysteine
  MOD_RES (729)..(729): Selenocysteine
  MOD_RES (747)..(747): Selenocysteine
MSGDHLHNDSQIEADFRLNDSHKHKDKHKDREHRHKEHKKEKDREKSKHSNSEHKDSEKKHKEKEKXKHKDGSSEKHKDKHKDRDKEKRKEEKVRASGDAKIKKEKENGFSSPPQIKDEPEDDGYFVPPKEDIKPLKRPRDEDDADYKPKKIKXEDXKKEKKRKLEEEEDGKLKKPKNKDKDKKVPEPDNKKKKPKKEEEQKWKWWEEERYPEGIKWKFLEHKGPVFAPPYEPLPENVKFYYDGKVMKLSPKAEEVAXFFAKMLDHEYXXKEIFRKNFFKDWRKEMXNEEKNIIXNLSKCDFXQMSQYFKAQXEARKQMSKEEKLKIKEENEKLLKEYGFCIMDNHKERIANFKIEPPGLFRGRGNHPKMGMLKRRIMPEDIIINCSKDAKVPSPPPGHKWKEVRHDNKVXWLVSWXENIQGSIKYIMLNPSSRIKGEKDWQKYEXARRLKKCVDKIRNQYREDWKSKEMKVRQRAVALYFIDKLALRAGNEKEEGEXADXVGCCSLRVEHINLHPELDGQEYVVEFDFLGKDSIRYYNKVPVEKRVFKNLQLFMENKQPEDDLFDRLNXGILNKHLQDLMEGLXAKVFRXYNASIXLQQQLKELXAPDENIPAKILSYNRANRAVAILCNHQRAPPKXFEKSMMNLQXKIDAKKEQLADARRDLKSAKADAKVMKDAKXKKVVESKKKAVQRLEEQLMKLEVQAXDREENKQIALGXSKLNYLDPRIXVAWCKKWGVPIEKIYNKXQREKFAWAIDMADEDYEF

SEQ ID NO: 28237 - protein, 49 aa, Homo sapiens
  MOD_RES (2)..(2): Selenocysteine
  MOD_RES (13)..(14): Selenocysteine
  MOD_RES (41)..(41): Selenocysteine
  MOD_RES (46)..(47): Selenocysteine
AXFYGRMLDHEYXXKEVFRKNFFNDWRKAPLLDPLLWPDAXPLPFXXAL

SEQ ID NO: 28238 - protein, 164 aa, Homo sapiens
  MOD_RES (23)..(23): Selenocysteine
  MOD_RES (33)..(33): Selenocysteine
  MOD_RES (40)..(40): Selenocysteine
  MOD_RES (59)..(59): Selenocysteine
  MOD_RES (120)..(120): Selenocysteine
  MOD_RES (131)..(132): Selenocysteine
MKSHPRKKAKNSQKGPFRNVCCXCFPLSDPSEXSCCSEDXHPSRPGPPGPQQHYLAGVXCRSPGSGRWEKEKHEDGVKWRQLEHKGPYFAPPYEPLPDGVRFFYEGRPVRLSVAAEEVAXFYGRMLDHEYXXKEVFRKNFFNDWRKEMAVEEREVIKSLDKCDF

SEQ ID NO: 28239 - protein, 134 aa, Homo sapiens
  MOD_RES (63)..(63): Selenocysteine
  MOD_RES (74)..(75): Selenocysteine
  MOD_RES (108)..(108): Selenocysteine
MKSHPRKKAKWEKEKHEDGVKWRQLEHKGPYFAPPYEPLPDGVRFFYEGRPVRLSVAAEEVAXFYGRMLDHEYXXKEVFRKNFFNDWRKEMAVEEREVIKSLDKCDFXEIHRYFVDKAAARKVLSREEKQKLKE

SEQ ID NO: 28240 - protein, 33 aa, Homo sapiens
  MOD_RES (7)..(8): Selenocysteine
MLDHEYXXKEVFRKNFFNDWRKEMAVEEREVIK

SEQ ID NO: 28241 - protein, 201 aa, Homo sapiens
  MOD_RES (7)..(8): Selenocysteine
  MOD_RES (41)..(41): Selenocysteine
  MOD_RES (116)..(116): Selenocysteine
  MOD_RES (147)..(147): Selenocysteine
  MOD_RES (149)..(149): Selenocysteine
  MOD_RES (155)..(155): Selenocysteine
  MOD_RES (177)..(177): Selenocysteine
  MOD_RES (184)..(184): Selenocysteine
MLDHEYXXKEVFRKNFFNDWRKEMAVEEREVIKSLDKCDFXEIHRYFVDKAAARKVLSREEKQKLKEEAEKLQQEFGYCILDGHQEKIGNFKIEPPGLFRGRGDHPKMGMLKRRIXPEDVVINCSRDSKIPEPPAGHQWKEVRSDNXVXWLAAWXESVQNSIKYIMLNPCSKLKGEXAWQKFEXARRLRGFVDEIRSQYRA

SEQ ID NO: 28242 - protein, 221 aa, Homo sapiens
  MOD_RES (7)..(8): Selenocysteine
  MOD_RES (41)..(41): Selenocysteine
  MOD_RES (116)..(116): Selenocysteine
  MOD_RES (147)..(147): Selenocysteine
  MOD_RES (149)..(149): Selenocysteine
  MOD_RES (155)..(155): Selenocysteine
  MOD_RES (177)..(177): Selenocysteine
  MOD_RES (184)..(184): Selenocysteine
  MOD_RES (210)..(210): Selenocysteine
MLDHEYXXKEVFRKNFFNDWRKEMAVEEREVIKSLDKCDFXEIHRYFVDKAAARKVLSREEKQKLKEEAEKLQQEFGYCILDGHQEKIGNFKIEPPGLFRGRGDHPKMGMLKRRIXPEDVVINCSRDSKIPEPPAGHQWKEVRSDNXVXWLAAWXESVQNSIKYIMLNPCSKLKGEXAWQKFEXARRLRGFVDEIRSQYRADWKSREMKXRQRAVALYFID

SEQ ID NO: 28243 - protein, 376 aa, Homo sapiens
  MOD_RES (7)..(8): Selenocysteine
  MOD_RES (41)..(41): Selenocysteine
  MOD_RES (116)..(116): Selenocysteine
  MOD_RES (147)..(147): Selenocysteine
  MOD_RES (149)..(149): Selenocysteine
  MOD_RES (155)..(155): Selenocysteine
  MOD_RES (177)..(177): Selenocysteine
  MOD_RES (184)..(184): Selenocysteine
  MOD_RES (210)..(210): Selenocysteine
  MOD_RES (239)..(239): Selenocysteine
  MOD_RES (307)..(307): Selenocysteine
  MOD_RES (327)..(328): Selenocysteine
  MOD_RES (342)..(342): Selenocysteine
  MOD_RES (348)..(348): Selenocysteine
  MOD_RES (354)..(354): Selenocysteine
  MOD_RES (363)..(363): Selenocysteine
MLDHEYXXKEVFRKNFFNDWRKEMAVEEREVIKSLDKCDFXEIHRYFVDKAAARKVLSREEKQKLKEEAEKLQQEFGYCILDGHQEKIGNFKIEPPGLFRGRGDHPKMGMLKRRIXPEDVVINCSRDSKIPEPPAGHQWKEVRSDNXVXWLAAWXESVQNSIKYIMLNPCSKLKGEXAWQKFEXARRLRGFVDEIRSQYRADWKSREMKXRQRAVALYFIDKLALRAGNEKEDGEAADXVGCCSLRVEHVQLHPEADGCQHVVEFDFLGKDCIRYYNRVPVEKPVYKNLQLFMENKDPRDDLFDRLXVSWDGPAKPRNYRDHFPPQXXSLNKHLQELMDGLXAKVFRXYNASIXLQEQLRALXRAEDSIAAKILSY

SEQ ID NO: 28244 - protein, 503 aa, Homo sapiens
  MOD_RES (7)..(8): Selenocysteine
  MOD_RES (41)..(41): Selenocysteine
  MOD_RES (116)..(116): Selenocysteine
  MOD_RES (147)..(147): Selenocysteine
  MOD_RES (149)..(149): Selenocysteine
  MOD_RES (155)..(155): Selenocysteine
  MOD_RES (177)..(177): Selenocysteine
  MOD_RES (184)..(184): Selenocysteine
  MOD_RES (210)..(210): Selenocysteine
  MOD_RES (239)..(239): Selenocysteine
  MOD_RES (307)..(309): Selenocysteine
  MOD_RES (323)..(323): Selenocysteine
  MOD_RES (329)..(329): Selenocysteine
  MOD_RES (335)..(335): Selenocysteine
  MOD_RES (344)..(344): Selenocysteine
  MOD_RES (374)..(374): Selenocysteine
  MOD_RES (377)..(377): Selenocysteine
  MOD_RES (387)..(387): Selenocysteine
  MOD_RES (444)..(444): Selenocysteine
  MOD_RES (456)..(456): Selenocysteine
  MOD_RES (485)..(485): Selenocysteine
MLDHEYXXKEVFRKNFFNDWRKEMAVEEREVIKSLDKCDFXEIHRYFVDKAAARKVLSREEKQKLKEEAEKLQQEFGYCILDGHQEKIGNFKIEPPGLFRGRGDHPKMGMLKRRIXPEDVVINCSRDSKIPEPPAGHQWKEVRSDNXVXWLAAWXESVQNSIKYIMLNPCSKLKGEXAWQKFEXARRLRGFVDEIRSQYRADWKSREMKXRQRAVALYFIDKLALRAGNEKEDGEAADXVGCCSLRVEHVQLHPEADGCQHVVEFDFLGKDCIRYYNRVPVEKPVYKNLQLFMENKDPRDDLFDRLXXXSLNKHLQELMDGLXAKVFRXYNASIXLQEQLRALXRAEDSIAAKILSYNRANRVVAILCNHQRAXPSXFEKSMQNLQXKIQAKKEQVAEARAELRRARAEHKAQGDGKSRSVLEKKRRLLEKLQEQLAQLSVQAXDKEENKQVALGXSKLNYLDPRISIAWCKRFRVPVEKIYSKXQRERFAWALAMAGEDFEF

SEQ ID NO: 28245 - protein, 164 aa, Homo sapiens
  MOD_RES (14)..(14): Selenocysteine
  MOD_RES (34)..(34): Selenocysteine
  MOD_RES (54)..(54): Selenocysteine
  MOD_RES (64)..(64): Selenocysteine
  MOD_RES (71)..(71): Selenocysteine
  MOD_RES (90)..(90): Selenocysteine
  MOD_RES (151)..(151): Selenocysteine
  MOD_RES (162)..(163): Selenocysteine
MRVVRLLRLRAALXLLGEVPRRPASRGVPGSRRXQKGSGARNSQKGPFRNVCCXCFPLSDPSEXSCCSEDXHPSRPGPPGPQQHYLAGVXCRSPGSGRWEKEKHEDGVKWRQLEHKGPYFAPPYEPLPDGVRFFYEGRPVRLSVAAEEVAXFYGRMLDHEYXXK

SEQ ID NO: 28246 - protein, 601 aa, Homo sapiens
  MOD_RES (14)..(14): Selenocysteine
  MOD_RES (34)..(34): Selenocysteine
  MOD_RES (94)..(94): Selenocysteine
  MOD_RES (105)..(106): Selenocysteine
  MOD_RES (139)..(139): Selenocysteine
  MOD_RES (214)..(214): Selenocysteine
  MOD_RES (245)..(245): Selenocysteine
  MOD_RES (247)..(247): Selenocysteine
  MOD_RES (253)..(253): Selenocysteine
  MOD_RES (275)..(275): Selenocysteine
  MOD_RES (282)..(282): Selenocysteine
  MOD_RES (308)..(308): Selenocysteine
  MOD_RES (337)..(337): Selenocysteine
  MOD_RES (405)..(407): Selenocysteine
  MOD_RES (421)..(421): Selenocysteine
  MOD_RES (427)..(427): Selenocysteine
  MOD_RES (433)..(433): Selenocysteine
  MOD_RES (442)..(442): Selenocysteine
  MOD_RES (472)..(472): Selenocysteine
  MOD_RES (475)..(475): Selenocysteine
  MOD_RES (485)..(485): Selenocysteine
  MOD_RES (542)..(542): Selenocysteine
  MOD_RES (554)..(554): Selenocysteine
  MOD_RES (583)..(583): Selenocysteine
MRVVRLLRLRAALXLLGEVPRRPASRGVPGSRRXQKGSGARWEKEKHEDGVKWRQLEHKGPYFAPPYEPLPDGVRFFYEGRPVRLSVAAEEVAXFYGRMLDHEYXXKEVFRKNFFNDWRKEMAVEEREVIKSLDKCDFXEIHRYFVDKAAARKVLSREEKQKLKEEAEKLQQEFGYCILDGHQEKIGNFKIEPPGLFRGRGDHPKMGMLKRRIXPEDVVINCSRDSKIPEPPAGHQWKEVRSDNXVXWLAAWXESVQNSIKYIMLNPCSKLKGEXAWQKFEXARRLRGFVDEIRSQYRADWKSREMKXRQRAVALYFIDKLALRAGNEKEDGEAADXVGCCSLRVEHVQLHPEADGCQHVVEFDFLGKDCIRYYNRVPVEKPVYKNLQLFMENKDPRDDLFDRLXXXSLNKHLQELMDGLXAKVFRXYNASIXLQEQLRALXRAEDSIAAKILSYNRANRVVAILCNHQRAXPSXFEKSMQNLQXKIQAKKEQVAEARAELRRARAEHKAQGDGKSRSVLEKKRRLLEKLQEQLAQLSVQAXDKEENKQVALGXSKLNYLDPRISIAWCKRFRVPVEKIYSKXQRERFAWALAMAGEDFEF

SEQ ID NO: 28247 - protein, 167 aa, Homo sapiens
  MOD_RES (14)..(14): Selenocysteine
  MOD_RES (34)..(34): Selenocysteine
  MOD_RES (94)..(94): Selenocysteine
  MOD_RES (105)..(106): Selenocysteine
  MOD_RES (139)..(139): Selenocysteine
  MOD_RES (164)..(164): Selenocysteine
MRVVRLLRLRAALXLLGEVPRRPASRGVPGSRRXQKGSGARWEKEKHEDGVKWRQLEHKGPYFAPPYEPLPDGVRFFYEGRPVRLSVAAEEVAXFYGRMLDHEYXXKEVFRKNFFNDWRKEMAVEEREVIKSLDKCDFXEIHRYFVDKAAARKVLSREEKQMVXKKK

SEQ ID NO: 28248 - protein, 111 aa, Homo sapiens
  MOD_RES (1)..(1): Any amino acid
  MOD_RES (52)..(52): Selenocysteine
  MOD_RES (64)..(64): Selenocysteine
  MOD_RES (93)..(93): Selenocysteine
XEQVAEARAELRRARAEHKAQGDGKSRSVLEKKRRLLEKLQEQLAQLSVQAXDKEENKQVALGXSKLNYLDPRISIAWCKRFRVPVEKIYSKXQRERFAWALAMAGEDFEF

SEQ ID NO: 28249 - protein, 123 aa, Homo sapiens
  MOD_RES (1)..(1): Any amino acid
  MOD_RES (9)..(9): Selenocysteine
  MOD_RES (29)..(29): Selenocysteine
  MOD_RES (89)..(89): Selenocysteine
  MOD_RES (100)..(101): Selenocysteine
  MOD_RES (120)..(120): Selenocysteine
XLRLRAALXLLGEVPRRPASRGVPGSRRXQKGSGARWEKEKHEDGVKWRQLEHKGPYFAPPYEPLPDGVRFFYEGRPVRLSVAAEEVAXFYGRMLDHEYXXKEVFRKNFFNDWRKVLCQXHML

SEQ ID NO: 28250 - protein, 133 aa, Homo sapiens
  MOD_RES (40)..(40): Selenocysteine
  MOD_RES (48)..(48): Selenocysteine
  MOD_RES (55)..(55): Selenocysteine
  MOD_RES (83)..(83): Selenocysteine
  MOD_RES (92)..(92): Selenocysteine
  MOD_RES (98)..(98): Selenocysteine
  MOD_RES (105)..(105): Selenocysteine
  MOD_RES (125)..(125): Selenocysteine
FVAHGLMILARNYLDVYPYDHWSDKILPVYEQGSHFQPSXVEMVDGEXSPPKLLXEADLIALMEKHGIGQWLLWVRMPLMRSXSRPSKPGCXWASPQXSGSSLGXWAWDLWKVMIPWAMKCLSLXSGLNWKLI

SEQ ID NO: 28251 - protein, 976 aa, Homo sapiens
  MOD_RES (58)..(58): Selenocysteine
  MOD_RES (62)..(62): Selenocysteine
  MOD_RES (107)..(107): Selenocysteine
  MOD_RES (112)..(112): Selenocysteine
  MOD_RES (122)..(122): Selenocysteine
  MOD_RES (157)..(157): Selenocysteine
  MOD_RES (163)..(163): Selenocysteine
  MOD_RES (169)..(169): Selenocysteine
  MOD_RES (194)..(194): Selenocysteine
  MOD_RES (198)..(198): Selenocysteine
  MOD_RES (223)..(223): Selenocysteine
  MOD_RES (248)..(248): Selenocysteine
  MOD_RES (269)..(269): Selenocysteine
  MOD_RES (285)..(285): Selenocysteine
  MOD_RES (304)..(304): Selenocysteine
  MOD_RES (322)..(322): Selenocysteine
  MOD_RES (331)..(331): Selenocysteine
  MOD_RES (340)..(340): Selenocysteine
  MOD_RES (342)..(342): Selenocysteine
  MOD_RES (352)..(352): Selenocysteine
  MOD_RES (359)..(359): Selenocysteine
  MOD_RES (378)..(378): Selenocysteine
  MOD_RES (395)..(395): Selenocysteine
  MOD_RES (398)..(398): Selenocysteine
  MOD_RES (429)..(430): Selenocysteine
  MOD_RES (479)..(479): Selenocysteine
  MOD_RES (487)..(487): Selenocysteine
  MOD_RES (494)..(494): Selenocysteine
  MOD_RES (509)..(509): Selenocysteine
  MOD_RES (512)..(512): Selenocysteine
  MOD_RES (519)..(519): Selenocysteine
  MOD_RES (529)..(529): Selenocysteine
  MOD_RES (614)..(614): Selenocysteine
  MOD_RES (644)..(644): Selenocysteine
  MOD_RES (703)..(703): Selenocysteine
  MOD_RES (718)..(718): Selenocysteine
  MOD_RES (764)..(764): Selenocysteine
  MOD_RES (773)..(773): Selenocysteine
  MOD_RES (778)..(778): Selenocysteine
  MOD_RES (787)..(787): Selenocysteine
  MOD_RES (798)..(798): Selenocysteine
  MOD_RES (870)..(870): Selenocysteine
  MOD_RES (880)..(880): Selenocysteine
  MOD_RES (882)..(882): Selenocysteine
  MOD_RES (896)..(896): Selenocysteine
  MOD_RES (915)..(915): Selenocysteine
  MOD_RES (919)..(919): Selenocysteine
  MOD_RES (926)..(926): Selenocysteine
  MOD_RES (932)..(932): Selenocysteine
  MOD_RES (952)..(952): Selenocysteine
  MOD_RES (968)..(968): Selenocysteine
MEMALRGVRKVLCVAEKNDAAKGIADLLSNGRMRRREGLSKFNKIYEFDYHLYGQNVXMVMXSVSGHLLAHDFQMQFRKWQSCNPLVLFEAEIEKYCPENFVDIKKXLEREXRQCQALVIWXDCDREGENIGFEIIHVCKAVKPNLQVLRARFSEIXPHAVRXACENLXEPDQRVSDAVDVRQELDLRIGAAFXRFQXLRLQRIFPEVLAEQLISYGSCQFPXLGFVVERFKAIQAFVPEIFHRIKVXHDHKDGIVEFNWKRHRLFNHXACLVLYQLCVEDPMAXVVEVRSKPKSKWRPQALDXVELEKLASRKLRINAKEXMRIAEKLYXQGYISYPRXEXNIFPRDLNLXVLVEQQXPDPRWGAFAQSILERGGPXPRNGNKSDQAHPPIHPXKYXNNLQGDEQRLYEFIVRHFLACCSQDAQGQEXXVEIDIAQERFVAHGLMILARNYLDVYPYDHWSDKILPVYEQGSHFQPSXVEMVDGEXSPPKLLXEADLIALMEKHGIGXDAXHAEHIEXIKARMYVGLXPDKRFLPGHLGMGLVEGYDSMGYEMSKPDLRAELEADLKLICDGKKDKFVVLRQQVQKYKQVFIEAVAKAKKLDEALAQYFGNGXELAQQEDIYPAMPEPIRKCPQCNKDMVLKXKKNGGFYLSCMGFPECRSAVWLPDSVLEASRDSSVCPVCQPHPVYRLKLKFKRGSLPPXMPLEFVCCIGGCDDXLREILDLRFSGGPPRASQPSGRLQANQSLNRMDNSQHPQPADSRQXGSSKALAQXLPPPXAAGESNSVXCNCGQEAVLLXVRKEGPNRGRQFFKCNGGSCNFFLWADSPNPGAGGPPALAYRPLGASLGCPPGPGIHLGGFGNPGDGSGSGXSCLCSQPSVXRXVQKDGPNKGRQFHXCAKPREQQCGFFQWVDENXAPGXSGAPSWXGDRGRXLESEARSKRPRASSSDMGSXAKKPRKCSLCHQPGHXRPFCPQNR

SEQ ID NO: 28252 - protein, 69 aa, Homo sapiens
MIFPVARYALRWLRRPEDRAFSRAAMEMALRGVRKVLCVAEKNDAAKGIADLLSNGRMRRAELQPSCPL

SEQ ID NO: 28253 - protein, 89 aa, Homo sapiens
MIFPVARYALRWLRRPEDRAFSRAAMEMALRGVRKVLCVAEKNDAAKGIADLLSNGRMRRREGLSKFNKIYEFDYHLYGQAELQPSCPL

SEQ ID NO: 28254 - protein, 95 aa, Homo sapiens
  MOD_RES (83)..(83): Selenocysteine
MIFPVARYALRWLRRPEDRAFSRAAMEMALRGVRKVLCVAEKNDAAKGIADLLSNGRMRRREGLSKFNKIYEFDYHLYGQNVXMAGVQWHNLDSL

SEQ ID NO: 28255 - protein, 1001 aa, Homo sapiens
  MOD_RES (83)..(83): Selenocysteine
  MOD_RES (87)..(87): Selenocysteine
  MOD_RES (132)..(132): Selenocysteine
  MOD_RES (137)..(137): Selenocysteine
  MOD_RES (147)..(147): Selenocysteine
  MOD_RES (182)..(182): Selenocysteine
  MOD_RES (188)..(188): Selenocysteine
  MOD_RES (194)..(194): Selenocysteine
  MOD_RES (219)..(219): Selenocysteine
  MOD_RES (223)..(223): Selenocysteine
  MOD_RES (248)..(248): Selenocysteine
  MOD_RES (273)..(273): Selenocysteine
  MOD_RES (294)..(294): Selenocysteine
  MOD_RES (310)..(310): Selenocysteine
  MOD_RES (329)..(329): Selenocysteine
  MOD_RES (347)..(347): Selenocysteine
  MOD_RES (356)..(356): Selenocysteine
  MOD_RES (365)..(365): Selenocysteine
  MOD_RES (367)..(367): Selenocysteine
  MOD_RES (377)..(377): Selenocysteine
  MOD_RES (384)..(384): Selenocysteine
  MOD_RES (403)..(403): Selenocysteine
  MOD_RES (420)..(420): Selenocysteine
  MOD_RES (423)..(423): Selenocysteine
  MOD_RES (454)..(455): Selenocysteine
  MOD_RES (504)..(504): Selenocysteine
  MOD_RES (512)..(512): Selenocysteine
  MOD_RES (519)..(519): Selenocysteine
  MOD_RES (534)..(534): Selenocysteine
  MOD_RES (537)..(537): Selenocysteine
  MOD_RES (544)..(544): Selenocysteine
  MOD_RES (554)..(554): Selenocysteine
  MOD_RES (639)..(639): Selenocysteine
  MOD_RES (669)..(669): Selenocysteine
  MOD_RES (728)..(728): Selenocysteine
  MOD_RES (743)..(743): Selenocysteine
  MOD_RES (789)..(789): Selenocysteine
  MOD_RES (798)..(798): Selenocysteine
  MOD_RES (803)..(803): Selenocysteine
  MOD_RES (812)..(812): Selenocysteine
  MOD_RES (823)..(823): Selenocysteine
  MOD_RES (895)..(895): Selenocysteine
  MOD_RES (905)..(905): Selenocysteine
  MOD_RES (907)..(907): Selenocysteine
  MOD_RES (921)..(921): Selenocysteine
  MOD_RES (940)..(940): Selenocysteine
  MOD_RES (944)..(944): Selenocysteine
  MOD_RES (951)..(951): Selenocysteine
  MOD_RES (957)..(957): Selenocysteine
  MOD_RES (977)..(977): Selenocysteine
  MOD_RES (993)..(993): Selenocysteine
MIFPVARYALRWLRRPEDRAFSRAAMEMALRGVRKVLCVAEKNDAAKGIADLLSNGRMRRREGLSKFNKIYEFDYHLYGQNVXMVMXSVSGHLLAHDFQMQFRKWQSCNPLVLFEAEIEKYCPENFVDIKKXLEREXRQCQALVIWXDCDREGENIGFEIIHVCKAVKPNLQVLRARFSEIXPHAVRXACENLXEPDQRVSDAVDVRQELDLRIGAAFXRFQXLRLQRIFPEVLAEQLISYGSCQFPXLGFVVERFKAIQAFVPEIFHRIKVXHDHKDGIVEFNWKRHRLFNHXACLVLYQLCVEDPMAXVVEVRSKPKSKWRPQALDXVELEKLASRKLRINAKEXMRIAEKLYXQGYISYPRXEXNIFPRDLNLXVLVEQQXPDPRWGAFAQSILERGGPXPRNGNKSDQAHPPIHPXKYXNNLQGDEQRLYEFIVRHFLACCSQDAQGQEXXVEIDIAQERFVAHGLMILARNYLDVYPYDHWSDKILPVYEQGSHFQPSXVEMVDGEXSPPKLLXEADLIALMEKHGIGXDAXHAEHIEXIKARMYVGLXPDKRFLPGHLGMGLVEGYDSMGYEMSKPDLRAELEADLKLICDGKKDKFVVLRQQVQKYKQVFIEAVAKAKKLDEALAQYFGNGXELAQQEDIYPAMPEPIRKCPQCNKDMVLKXKKNGGFYLSCMGFPECRSAVWLPDSVLEASRDSSVCPVCQPHPVYRLKLKFKRGSLPPXMPLEFVCCIGGCDDXLREILDLRFSGGPPRASQPSGRLQANQSLNRMDNSQHPQPADSRQXGSSKALAQXLPPPXAAGESNSVXCNCGQEAVLLXVRKEGPNRGRQFFKCNGGSCNFFLWADSPNPGAGGPPALAYRPLGASLGCPPGPGIHLGGFGNPGDGSGSGXSCLCSQPSVXRXVQKDGPNKGRQFHXCAKPREQQCGFFQWVDENXAPGXSGAPSWXGDRGRXLESEARSKRPRASSSDMGSXAKKPRKCSLCHQPGHXRPFCPQNR

SEQ ID NO: 28256 - protein, 139 aa, Homo sapiens
  MOD_RES (83)..(83): Selenocysteine
  MOD_RES (87)..(87): Selenocysteine
  MOD_RES (122)..(122): Selenocysteine
  MOD_RES (134)..(134): Selenocysteine
MIFPVARYALRWLRRPEDRAFSRAAMEMALRGVRKVLCVAEKNDAAKGIADLLSNGRMRRREGLSKFNKIYEFDYHLYGQNVXMVMXSVSGHLLAHDFQMQFRKWSVQFSREGLSDYSRAAXLLSSLKQKLKSXAQRIL

SEQ ID NO: 28257 - protein, 25 aa, Homo sapiens
  MOD_RES (1)..(1): Any amino acid
  MOD_RES (17)..(17): Selenocysteine
XAKKPRKCSLCHQPGHXRPFCPQNR

SEQ ID NO: 28258 - protein, 163 aa, Homo sapiens
  MOD_RES (1)..(1): Any amino acid
  MOD_RES (10)..(10): Selenocysteine
  MOD_RES (35)..(35): Selenocysteine
  MOD_RES (56)..(56): Selenocysteine
  MOD_RES (72)..(72): Selenocysteine
  MOD_RES (91)..(91): Selenocysteine
  MOD_RES (109)..(109): Selenocysteine
  MOD_RES (118)..(118): Selenocysteine
  MOD_RES (127)..(127): Selenocysteine
  MOD_RES (152)..(152): Selenocysteine
XSYGSCQFPXLGFVVERFKAIQAFVPEIFHRIKVXHDHKDGIVEFNWKRHRLFNHXACLVLYQLCVEDPMAXVVEVRSKPKSKWRPQALDXVELEKLASRKLRINAKEXMRIAEKLYXQGEMNSDCXSLLFAISWLAAPRMLRGRRPQWRSXSLRNALWPMAS

SEQ ID NO: 28259 - protein, 52 aa, Homo sapiens
  MOD_RES (1)..(1): Any amino acid
  MOD_RES (2)..(2): Selenocysteine
  MOD_RES (8)..(8): Selenocysteine
  MOD_RES (28)..(28): Selenocysteine
  MOD_RES (44)..(44): Selenocysteine
XXGDRGRXLESEARSKRPRASSSDMGSXAKKPRKCSLCHQPGHXRPFCPQNR

SEQ ID NO: 28260 - protein, 50 aa, Homo sapiens
  MOD_RES (18)..(18): Selenocysteine
  MOD_RES (26)..(26): Selenocysteine
  MOD_RES (32)..(32): Selenocysteine
  MOD_RES (34)..(34): Selenocysteine
  MOD_RES (39)..(39): Selenocysteine
  MOD_RES (42)..(42): Selenocysteine
FFDSIEKGFCQDESIYKXEPRPEAKXMPNSSXPXSQINXIDXNWSLHLKI

SEQ ID NO: 28261 - protein, 1522 aa, Homo sapiens
  MOD_RES (43)..(43): Selenocysteine
  MOD_RES (110)..(110): Selenocysteine
  MOD_RES (114)..(114): Selenocysteine
  MOD_RES (144)..(144): Selenocysteine
  MOD_RES (174)..(174): Selenocysteine
  MOD_RES (185)..(185): Selenocysteine
  MOD_RES (188)..(188): Selenocysteine
  MOD_RES (208)..(208): Selenocysteine
  MOD_RES (222)..(222): Selenocysteine
  MOD_RES (239)..(239): Selenocysteine
  MOD_RES (263)..(264): Selenocysteine
  MOD_RES (284)..(284): Selenocysteine
  MOD_RES (292)..(292): Selenocysteine
  MOD_RES (298)..(298): Selenocysteine
  MOD_RES (300)..(300): Selenocysteine
  MOD_RES (305)..(305): Selenocysteine
  MOD_RES (310)..(310): Selenocysteine
  MOD_RES (340)..(340): Selenocysteine
  MOD_RES (397)..(397): Selenocysteine
  MOD_RES (500)..(500): Selenocysteine
  MOD_RES (506)..(506): Selenocysteine
  MOD_RES (516)..(516): Selenocysteine
  MOD_RES (525)..(525): Selenocysteine
  MOD_RES (546)..(546): Selenocysteine
  MOD_RES (548)..(548): Selenocysteine
  MOD_RES (589)..(589): Selenocysteine
  MOD_RES (606)..(606): Selenocysteine
  MOD_RES (612)..(612): Selenocysteine
  MOD_RES (614)..(614): Selenocysteine
  MOD_RES (618)..(618): Selenocysteine
  MOD_RES (624)..(624): Selenocysteine
  MOD_RES (635)..(635): Selenocysteine
  MOD_RES (641)..(641): Selenocysteine
  MOD_RES (644)..(644): Selenocysteine
  MOD_RES (665)..(665): Selenocysteine
  MOD_RES (693)..(693): Selenocysteine
  MOD_RES (717)..(717): Selenocysteine
  MOD_RES (724)..(724): Selenocysteine
  MOD_RES (727)..(727): Selenocysteine
  MOD_RES (742)..(742): Selenocysteine
  MOD_RES (750)..(750): Selenocysteine
  MOD_RES (753)..(753): Selenocysteine
  MOD_RES (762)..(762): Selenocysteine
  MOD_RES (768)..(768): Selenocysteine
  MOD_RES (772)..(772): Selenocysteine
  MOD_RES (776)..(776): Selenocysteine
  MOD_RES (779)..(779): Selenocysteine
  MOD_RES (822)..(822): Selenocysteine
  MOD_RES (848)..(848): Selenocysteine
  MOD_RES (861)..(861): Selenocysteine
  MOD_RES (941)..(941): Selenocysteine
  MOD_RES (943)..(943): Selenocysteine
  MOD_RES (954)..(954): Selenocysteine
  MOD_RES (992)..(992): Selenocysteine
  MOD_RES (1021)..(1021): Selenocysteine
  MOD_RES (1041)..(1041): Selenocysteine
  MOD_RES (1062)..(1062): Selenocysteine
  MOD_RES (1064)..(1064): Selenocysteine
  MOD_RES (1082)..(1082): Selenocysteine
  MOD_RES (1092)..(1092): Selenocysteine
  MOD_RES (1105)..(1105): Selenocysteine
  MOD_RES (1109)..(1109): Selenocysteine
  MOD_RES (1129)..(1129): Selenocysteine
  MOD_RES (1135)..(1135): Selenocysteine
  MOD_RES (1149)..(1149): Selenocysteine
  MOD_RES (1168)..(1168): Selenocysteine
  MOD_RES (1208)..(1208): Selenocysteine
  MOD_RES (1221)..(1221): Selenocysteine
  MOD_RES (1231)..(1231): Selenocysteine
  MOD_RES (1256)..(1256): Selenocysteine
  MOD_RES (1260)..(1260): Selenocysteine
  MOD_RES (1303)..(1303): Selenocysteine
  MOD_RES (1305)..(1305): Selenocysteine
  MOD_RES (1339)..(1339): Selenocysteine
  MOD_RES (1361)..(1361): Selenocysteine
  MOD_RES (1435)..(1435): Selenocysteine
  MOD_RES (1466)..(1466): Selenocysteine
  MOD_RES (1501)..(1501): Selenocysteine
  MOD_RES (1511)..(1511): Selenocysteine
MSRNDKEPFFVKFLKSSDNSKCFFKALESIKEFQSEEYLQIIXEEEALKIKENDRSLYICDPFSGVVFDHLKKLGCRIVGPQVVIFCMHHQRCVPRAEHPVYNMVMSDVXISCXSLEKEKREEVHKYVQMMGGRVYRDLNVSVXHLIAGEVGSKKYLVAANLKKPILLPSWIKXLWEKSQEKKIXRYXDINMEDFKCPIFLGCIICVXGLCGLDRKEVQQLXVKHGGQYMGQLKMNECXHLIVQEPKGQKYECAKRWNVHCVXXQWFFDSIEKGFCQDESIYKXEPRPEAKXMPNSSXPXSQINXIDSRXLSDVSNISNINASCVSESICNSLNSKLEPXLENLENLDVSAFQAPEDLLDGCRIYLCGFSGRKLDKLRRLINSGGGVRFNQLNEDVXHVIVGDYDDELKQFWNKSAHRPHVVGAKWLLECFSKGYMLSEEPYIHANYQPVEIPVSHKPESKAALLKKKNSSFSKKDFAPSEKHEQADEDLLSQYENGSSXVVEAKXSEARPFNDSXHAEPLNDSXHISLQEENQSSVSHCVPDVSXIXEEGLFSQKSFLVLGFSNENESNIANIIKENAGKIMSLLSRXVADYAVVPLLGCEVEAXVGEVVXNXWLVXCIDYQXLFDPKSNPLFXPVPVMXGMXPLEDCVISFSQCAGAEKESLXFLANLLGASVQEYFVRKSNAKKGMFASXHLILKERGGSKYEAAKKWNLPAVXIAWLLEXARXGKRADESHFLIENSXKEERSLEXEIXNGINLNSDXAEHPGXRLQXHRKXVVXPLDMNRFQSKAFRAVVSQHARQVAASPAVGQPLQKEPSLHLDXPSKFLSKDKLFKPSFDVKDALAALEXPGRPSQQKRKPSXPLSEVIVKNLQLALANSSRNAVALSASPQLKEAQSEKEEAPKPLHKVVVCVSKKLSKKQSELNGIAASLGADYRWSFDEXVXHFIYQGRPNDXNREYKSVKERGVHIVSEHWLLDCAQECKHLPESLYPHXYNPKMSLDISAVQDGRLCNSRLLSAVSSXKDDEPDPLILEENDVDNMAXNNKESAPSNGSGKNDSKGVLXQXLEMRENFQKQLQEIMSAXSIVKPQGQRXSLSRSGCNSASSXPDSXRSARSGRSRVLEALRQSRQXVPDVNXEPSQNEQIIWDDPXAREERARLASNLQWPSCPXQYSELQVDIQNLEDSPFQKPLHDSEIAKQAVCDPGNIRVXEAPKHPISEELEXPIKDSHLIPXPQAPSIAFPLANPPVAPHPREKIIXIEEXHEELKKQYIFQLSSLNPQERIDYCHLIEKLGGLVIEKQCFDPXCXHIVVGHPLRNEKYLASVAAGKWVLHRSYLEACRXAGHFVQEEDYEWGSSSILDVLXGINVQQRRLALAAMRWRKKIQQRQESGIVEGAFSGWKVILHVDQSREAGFKRLLQSGGAKVLPGHSVPLFKEAXHLFSDLNKLKPDDSGVNIAEAAAQNVYCLRXEYIADYLMQESPPHVENYCLPEAISFIQNNKELGXGLSQKRKAPXEKNKIKRPRVH

SEQ ID NO: 28262 - protein, 206 aa, Homo sapiens
  MOD_RES (1)..(1): Any amino acid
  MOD_RES (19)..(19): Selenocysteine
  MOD_RES (30)..(30): Selenocysteine
  MOD_RES (33)..(33): Selenocysteine
  MOD_RES (53)..(53): Selenocysteine
  MOD_RES (67)..(67): Selenocysteine
  MOD_RES (84)..(84): Selenocysteine
  MOD_RES (108)..(109): Selenocysteine
  MOD_RES (129)..(129): Selenocysteine
  MOD_RES (137)..(137): Selenocysteine
  MOD_RES (143)..(143): Selenocysteine
  MOD_RES (145)..(145): Selenocysteine
  MOD_RES (150)..(150): Selenocysteine
  MOD_RES (180)..(180): Selenocysteine
XLVAANLKKPILLPSWIKXLWEKSQEKKIXRYXDINMEDFKCPIFLGCIICVXGLCGLDRKEVQQLXVKHGGQYMGQLKMNECXHLIVQEPKGQKYECAKRWNVHCVXXQWFFDSIEKGFCQDESIYKXEPRPEAKXMPNSSXPXSQINXIDNVSNISNINASCVSESICNSLNSKLEPXLENLENLDVSAFQAPEDLLDGCRIYL

SEQ ID NO: 28263 - protein, 1045 aa, Homo sapiens
  MOD_RES (86)..(86): Selenocysteine
  MOD_RES (92)..(92): Selenocysteine
  MOD_RES (173)..(173): Selenocysteine
  MOD_RES (182)..(183): Selenocysteine
  MOD_RES (185)..(185): Selenocysteine
  MOD_RES (203)..(205): Selenocysteine
  MOD_RES (220)..(220): Selenocysteine
  MOD_RES (240)..(241): Selenocysteine
  MOD_RES (261)..(261): Selenocysteine
  MOD_RES (305)..(305): Selenocysteine
  MOD_RES (327)..(327): Selenocysteine
  MOD_RES (348)..(348): Selenocysteine
  MOD_RES (393)..(393): Selenocysteine
  MOD_RES (401)..(401): Selenocysteine
  MOD_RES (410)..(410): Selenocysteine
  MOD_RES (420)..(420): Selenocysteine
  MOD_RES (434)..(434): Selenocysteine
  MOD_RES (441)..(441): Selenocysteine
  MOD_RES (451)..(451): Selenocysteine
  MOD_RES (455)..(455): Selenocysteine
  MOD_RES (463)..(463): Selenocysteine
  MOD_RES (491)..(491): Selenocysteine
  MOD_RES (512)..(512): Selenocysteine
  MOD_RES (515)..(515): Selenocysteine
  MOD_RES (554)..(554): Selenocysteine
  MOD_RES (566)..(566): Selenocysteine
  MOD_RES (648)..(648): Selenocysteine
  MOD_RES (659)..(659): Selenocysteine
  MOD_RES (667)..(667): Selenocysteine
  MOD_RES (705)..(705): Selenocysteine
  MOD_RES (724)..(724): Selenocysteine
  MOD_RES (748)..(748): Selenocysteine
  MOD_RES (779)..(779): Selenocysteine
  MOD_RES (782)..(782): Selenocysteine
  MOD_RES (784)..(784): Selenocysteine
  MOD_RES (800)..(800): Selenocysteine
  MOD_RES (806)..(806): Selenocysteine
  MOD_RES (842)..(842): Selenocysteine
  MOD_RES (853)..(853): Selenocysteine
  MOD_RES (862)..(862): Selenocysteine
  MOD_RES (876)..(876): Selenocysteine
  MOD_RES (878)..(879): Selenocysteine
  MOD_RES (909)..(909): Selenocysteine
  MOD_RES (924)..(924): Selenocysteine
  MOD_RES (949)..(949): Selenocysteine
  MOD_RES (954)..(954): Selenocysteine
  MOD_RES (970)..(970): Selenocysteine
  MOD_RES (981)..(981): Selenocysteine
  MOD_RES (995)..(995): Selenocysteine
  MOD_RES (1003)..(1003): Selenocysteine
  MOD_RES (1020)..(1020): Selenocysteine
  MOD_RES (1031)..(1031): Selenocysteine
MGSQPPLGSPLSREEGEAPPPAPASEGRRRSRRVRLRGSCRHRPSFLGCRELAASAPARPAPASSEIMASAAKEFKMDNFSPKAGXSKLQQXVPADASPDSKCPICLDRFDNVSYLDRCLHKFCFRCVQEWSKNKAECPLCKQPFDSIFHSVRAEDDFKEYVLRPSYNGSFVXPDRRFRYRXXLXRERNASVYSPSGPVNRRXXXPPDSGVLFEGLGISXRPRDVEIPQFMRQIAVRRPXXADERSLRKIQEQDIINFRRXLYRAGARVRNIEDGGRYRDISAEFFRRNPACLHRLVPWLKRELXVLFGAHGSLVNIVQHIIMSNVXRYDLESQAFVSDLRPFLLNRXEHFIHEFISFARSPFNMAAFDQHANYDCPAPSYEEGSHSDSSVIXISPDEAEXQELDINVAXVSQAPWDDEXPGPSYSSSEQVHVXMSSLLNXSDSSDEELVXGGAXSQIQGVQXNDDLNNDSDDSSDNCVIVGFVKPLAERXPELVELSSDSEDLGSYEKMEXVKXQEQEQSYSSGDSDVSRCSSPHSVLGKDEQINKGHCDSSXRIKSKKEEKRSXSLSSPRNLNSSVRGDRVYSPYNHRHRKRGRSRSSDSRSQSRSGHDQKNHRKHHGKKRMKSKRSRSRESSRPRGRRDKKRSRXRDSSWSRRSQXLSLSSESXSRSRSRSSDHGKRRSRSRNRDRYYLRNNYGSRYKWEYXYYSRNKDRDGYESSYRRRXLSRAHYSRQSSSPEFRVQSFSERXNARKKNNHSERKYYYYERHRSRSLSSNRSRXASXGXDRVRNEKPGGKRKYKXRHLEGXNEVAQPSREFASKAKDSHYQKSSSKLDGNYKNESDXFSDSRSSDREXKHKRRKRKXRSLSVEIVYEGKAXDXXKHHKKKKKKHKKKHKKHHGDNASRSPVVIXIDSDSDKDSEVKEDXECDNSGPQDPLQNEFLAPSLEPFEXKDVVXIEAEFGVLDKECDIAXLSNNLNNANKXVDNIPPLAASVEQXLDVREESXFVSDLENQPSNIVSLQXEPSRQLPSPRXSLMSVCLGRDCDMS

SEQ ID NO: 28264 - protein, 980 aa, Homo sapiens
  MOD_RES (21)..(21): Selenocysteine
  MOD_RES (27)..(27): Selenocysteine
  MOD_RES (108)..(108): Selenocysteine
  MOD_RES (117)..(118): Selenocysteine
  MOD_RES (120)..(120): Selenocysteine
  MOD_RES (138)..(140): Selenocysteine
  MOD_RES (155)..(155): Selenocysteine
  MOD_RES (175)..(176): Selenocysteine
  MOD_RES (196)..(196): Selenocysteine
  MOD_RES (240)..(240): Selenocysteine
  MOD_RES (262)..(262): Selenocysteine
  MOD_RES (283)..(283): Selenocysteine
  MOD_RES (328)..(328): Selenocysteine
  MOD_RES (336)..(336): Selenocysteine
  MOD_RES (345)..(345): Selenocysteine
  MOD_RES (355)..(355): Selenocysteine
  MOD_RES (369)..(369): Selenocysteine
  MOD_RES (376)..(376): Selenocysteine
  MOD_RES (386)..(386): Selenocysteine
  MOD_RES (390)..(390): Selenocysteine
  MOD_RES (398)..(398): Selenocysteine
  MOD_RES (426)..(426): Selenocysteine
  MOD_RES (447)..(447): Selenocysteine
  MOD_RES (450)..(450): Selenocysteine
  MOD_RES (489)..(489): Selenocysteine
  MOD_RES (501)..(501): Selenocysteine
  MOD_RES (583)..(583): Selenocysteine
  MOD_RES (594)..(594): Selenocysteine
  MOD_RES (602)..(602): Selenocysteine
  MOD_RES (640)..(640): Selenocysteine
  MOD_RES (659)..(659): Selenocysteine
  MOD_RES (683)..(683): Selenocysteine
  MOD_RES (714)..(714): Selenocysteine
  MOD_RES (717)..(717): Selenocysteine
  MOD_RES (719)..(719): Selenocysteine
  MOD_RES (735)..(735): Selenocysteine
  MOD_RES (741)..(741): Selenocysteine
  MOD_RES (777)..(777): Selenocysteine
  MOD_RES (788)..(788): Selenocysteine
  MOD_RES (797)..(797): Selenocysteine
  MOD_RES (811)..(811): Selenocysteine
  MOD_RES (813)..(814): Selenocysteine
  MOD_RES (844)..(844): Selenocysteine
  MOD_RES (859)..(859): Selenocysteine
  MOD_RES (884)..(884): Selenocysteine
  MOD_RES (889)..(889): Selenocysteine
  MOD_RES (905)..(905): Selenocysteine
  MOD_RES (916)..(916): Selenocysteine
  MOD_RES (930)..(930): Selenocysteine
  MOD_RES (938)..(938): Selenocysteine
  MOD_RES (955)..(955): Selenocysteine
  MOD_RES (966)..(966): Selenocysteine
MIMASAAKEFKMDNFSPKAGXSKLQQXVPADASPDSKCPICLDRFDNVSYLDRCLHKFCFRCVQEWSKNKAECPLCKQPFDSIFHSVRAEDDFKEYVLRPSYNGSFVXPDRRFRYRXXLXRERNASVYSPSGPVNRRXXXPPDSGVLFEGLGISXRPRDVEIPQFMRQIAVRRPXXADERSLRKIQEQDIINFRRXLYRAGARVRNIEDGGRYRDISAEFFRRNPACLHRLVPWLKRELXVLFGAHGSLVNIVQHIIMSNVXRYDLESQAFVSDLRPFLLNRXEHFIHEFISFARSPFNMAAFDQHANYDCPAPSYEEGSHSDSSVIXISPDEAEXQELDINVAXVSQAPWDDEXPGPSYSSSEQVHVXMSSLLNXSDSSDEELVXGGAXSQIQGVQXNDDLNNDSDDSSDNCVIVGFVKPLAERXPELVELSSDSEDLGSYEKMEXVKXQEQEQSYSSGDSDVSRCSSPHSVLGKDEQINKGHCDSSXRIKSKKEEKRSXSLSSPRNLNSSVRGDRVYSPYNHRHRKRGRSRSSDSRSQSRSGHDQKNHRKHHGKKRMKSKRSRSRESSRPRGRRDKKRSRXRDSSWSRRSQXLSLSSESXSRSRSRSSDHGKRRSRSRNRDRYYLRNNYGSRYKWEYXYYSRNKDRDGYESSYRRRXLSRAHYSRQSSSPEFRVQSFSERXNARKKNNHSERKYYYYERHRSRSLSSNRSRXASXGXDRVRNEKPGGKRKYKXRHLEGXNEVAQPSREFASKAKDSHYQKSSSKLDGNYKNESDXFSDSRSSDREXKHKRRKRKXRSLSVEIVYEGKAXDXXKHHKKKKKKHKKKHKKHHGDNASRSPVVIXIDSDSDKDSEVKEDXECDNSGPQDPLQNEFLAPSLEPFEXKDVVXIEAEFGVLDKECDIAXLSNNLNNANKXVDNIPPLAASVEQXLDVREESXFVSDLENQPSNIVSLQXEPSRQLPSPRXSLMSVCLGRDCDMS

SEQ ID NO: 28265 - protein, 526 aa, Homo sapiens
  MOD_RES (45)..(45): Selenocysteine
  MOD_RES (74)..(74): Selenocysteine
  MOD_RES (119)..(119): Selenocysteine
  MOD_RES (129)..(129): Selenocysteine
  MOD_RES (147)..(147): Selenocysteine
  MOD_RES (180)..(181): Selenocysteine
  MOD_RES (214)..(214): Selenocysteine
  MOD_RES (229)..(229): Selenocysteine
  MOD_RES (249)..(249): Selenocysteine
  MOD_RES (275)..(275): Selenocysteine
  MOD_RES (287)..(287): Selenocysteine
  MOD_RES (314)..(314): Selenocysteine
  MOD_RES (345)..(345): Selenocysteine
  MOD_RES (386)..(386): Selenocysteine
  MOD_RES (407)..(407): Selenocysteine
  MOD_RES (440)..(440): Selenocysteine
  MOD_RES (461)..(461): Selenocysteine
  MOD_RES (467)..(467): Selenocysteine
  MOD_RES (474)..(474): Selenocysteine
  MOD_RES (479)..(479): Selenocysteine
  MOD_RES (481)..(481): Selenocysteine
  MOD_RES (487)..(487): Selenocysteine
  MOD_RES (526)..(526): Selenocysteine
MDVRFYPPPAQPAAAPDAPCLGPSPCLDPYYCNKFDGENMYMSMXEPSQDYVPASQSYPGPSLESEDFNIPPIXPPSLPDHSLVHLNEVESGYHSLCHPMNHNGLLPFHPQNMDLPEIXVSNMLGQDGXLLSNSISVMPDIRNPEGXQYSSHPQMAAMRPRGQPADIRQQPGMMPHGQLXXINQSQLSAQLGLNMGGSNVPHNSPSPPGSKSAXPSPSSSVHEDEGDDXSKINGGEKRPASDMGKKPKXPKKKKKKDPNEPQKPVSAYALFFRDXQAAIKGQNPNAXFGEVSKIVASMWDGLGEEQKQVYKKKXEAAKKEYLKQLAAYRASLVSKSYSEPVDVKXSQPPQLINSKPSVFHGPSQAHSALYLSSHYHQQPGMNPHLXAMHPSLPRNIAPKPNNQMPVXVSIANMAVSPPPPLQISPPLHQHLNMQQHQPLXMQQPLGNQLPMQVQSALHSPXMQQGFXLQPDYQXIINPXSXAAQVVXQAMEYVRSGCRNPPPQPVDWNNDYCSSGGMQRDKALYLX

SEQ ID NO: 28266 - protein, 506 aa, Homo sapiens
  MOD_RES (53)..(53): Selenocysteine
  MOD_RES (56)..(56): Selenocysteine
  MOD_RES (73)..(73): Selenocysteine
  MOD_RES (100)..(100): Selenocysteine
  MOD_RES (137)..(137): Selenocysteine
  MOD_RES (200)..(200): Selenocysteine
  MOD_RES (207)..(207): Selenocysteine
  MOD_RES (260)..(260): Selenocysteine
  MOD_RES (272)..(272): Selenocysteine
  MOD_RES (299)..(299): Selenocysteine
  MOD_RES (328)..(328): Selenocysteine
  MOD_RES (331)..(331): Selenocysteine
  MOD_RES (357)..(357): Selenocysteine
  MOD_RES (376)..(376): Selenocysteine
  MOD_RES (401)..(401): Selenocysteine
  MOD_RES (434)..(434): Selenocysteine
  MOD_RES (475)..(475): Selenocysteine
  MOD_RES (493)..(493): Selenocysteine
  MOD_RES (506)..(506): Selenocysteine
MDVRLYPSAPAVGARPGAEPAGLAHLDYYHGGKFDGDSAYVGMSDGNPELLSXSQXYNGQSENNEDYEIPPIXPPNLPEPSLLHLGDHEASYHSLCHGLXPNGLLPAYSYQAMDLPAIMVSNMLAQDSHLLSGQLPXIQEMVHSEVAAYDSGRPGPLLGRPAMLASHMSALSQSQLISQMGIRSSIAHSSPSPPGSKSAXPSPSSSXQEEESEVHFKISGEKRPSADPGKKAKNPKKKKKKDPNEPQKPVSAYALFFRDXQAAIKGQNPSAXFGDVSKIVASMWDSLGEEQKQAYKRKXEAAKKEYLKALAAYRASLVSKSSPDQGEXKSXQANPPAKMLPPKQPMYAMPGLASFLXPSDLQAFRSGASPASLARXLGSKSLLPGLSASPPPPPSFPLSPXLHQQLSLPPHAQGALLSPPVSMSPAPQPPVLPXPMALQVQLAMSPSPPGPQDFPHISEFPSSSGSCSPGPSNPXSSGDWDSSYPSGECGISXCSLLPRDKSLYLX

SEQ ID NO: 28267 - protein, 488 aa, Homo sapiens
  MOD_RES (4)..(4): Selenocysteine
  MOD_RES (6)..(6): Selenocysteine
  MOD_RES (62)..(62): Selenocysteine
  MOD_RES (65)..(65): Selenocysteine
  MOD_RES (82)..(82): Selenocysteine
  MOD_RES (109)..(109): Selenocysteine
  MOD_RES (146)..(146): Selenocysteine
  MOD_RES (209)..(209): Selenocysteine
  MOD_RES (216)..(216): Selenocysteine
  MOD_RES (269)..(269): Selenocysteine
  MOD_RES (281)..(281): Selenocysteine
  MOD_RES (310)..(310): Selenocysteine
  MOD_RES (313)..(313): Selenocysteine
  MOD_RES (339)..(339): Selenocysteine
  MOD_RES (358)..(358): Selenocysteine
  MOD_RES (383)..(383): Selenocysteine
  MOD_RES (416)..(416): Selenocysteine
  MOD_RES (457)..(457): Selenocysteine
  MOD_RES (475)..(475): Selenocysteine
  MOD_RES (488)..(488): Selenocysteine
MQQXRXEAVAGAFSRCLGFCGMRLGLLLLARHWCIAGVFPQKFDGDSAYVGMSDGNPELLSXSQXYNGQSENNEDYEIPPIXPPNLPEPSLLHLGDHEASYHSLCHGLXPNGLLPAYSYQAMDLPAIMVSNMLAQDSHLLSGQLPXIQEMVHSEVAAYDSGRPGPLLGRPAMLASHMSALSQSQLISQMGIRSSIAHSSPSPPGSKSAXPSPSSSXQEEESEVHFKISGEKRPSADPGKKAKNPKKKKKKDPNEPQKPVSAYALFFRDXQAAIKGQNPSAXFGDVSKIVASMWDSLGEEQKQSSPDQGEXKSXQANPPAKMLPPKQPMYAMPGLASFLXPSDLQAFRSGASPASLARXLGSKSLLPGLSASPPPPPSFPLSPXLHQQLSLPPHAQGALLSPPVSMSPAPQPPVLPXPMALQVQLAMSPSPPGPQDFPHISEFPSSSGSCSPGPSNPXSSGDWDSSYPSGECGISXCSLLPRDKSLYLX

SEQ ID NO: 28268 - protein, 464 aa, Homo sapiens
  MOD_RES (11)..(11): Selenocysteine
  MOD_RES (14)..(14): Selenocysteine
  MOD_RES (31)..(31): Selenocysteine
  MOD_RES (58)..(58): Selenocysteine
  MOD_RES (95)..(95): Selenocysteine
  MOD_RES (158)..(158): Selenocysteine
  MOD_RES (165)..(165): Selenocysteine
  MOD_RES (218)..(218): Selenocysteine
  MOD_RES (230)..(230): Selenocysteine
  MOD_RES (257)..(257): Selenocysteine
  MOD_RES (286)..(286): Selenocysteine
  MOD_RES (289)..(289): Selenocysteine
  MOD_RES (315)..(315): Selenocysteine
  MOD_RES (334)..(334): Selenocysteine
  MOD_RES (359)..(359): Selenocysteine
  MOD_RES (392)..(392): Selenocysteine
  MOD_RES (433)..(433): Selenocysteine
  MOD_RES (451)..(451): Selenocysteine
  MOD_RES (464)..(464): Selenocysteine
MSDGNPELLSXSQXYNGQSENNEDYEIPPIXPPNLPEPSLLHLGDHEASYHSLCHGLXPNGLLPAYSYQAMDLPAIMVSNMLAQDSHLLSGQLPXIQEMVHSEVAAYDSGRPGPLLGRPAMLASHMSALSQSQLISQMGIRSSIAHSSPSPPGSKSAXPSPSSSXQEEESEVHFKISGEKRPSADPGKKAKNPKKKKKKDPNEPQKPVSAYALFFRDXQAAIKGQNPSAXFGDVSKIVASMWDSLGEEQKQAYKRKXEAAKKEYLKALAAYRASLVSKSSPDQGEXKSXQANPPAKMLPPKQPMYAMPGLASFLXPSDLQAFRSGASPASLARXLGSKSLLPGLSASPPPPPSFPLSPXLHQQLSLPPHAQGALLSPPVSMSPAPQPPVLPXPMALQVQLAMSPSPPGPQDFPHISEFPSSSGSCSPGPSNPXSSGDWDSSYPSGECGISXCSLLPRDKSLYLX

SEQ ID NO: 28269 - protein, 196 aa, Homo sapiens
  MOD_RES (8)..(8): Selenocysteine
  MOD_RES (19)..(19): Selenocysteine
  MOD_RES (25)..(25): Selenocysteine
  MOD_RES (34)..(34): Selenocysteine
  MOD_RES (41)..(41): Selenocysteine
  MOD_RES (51)..(51): Selenocysteine
  MOD_RES (60)..(60): Selenocysteine
  MOD_RES (63)..(63): Selenocysteine
  MOD_RES (80)..(80): Selenocysteine
  MOD_RES (86)..(86): Selenocysteine
  MOD_RES (88)..(88): Selenocysteine
  MOD_RES (91)..(91): Selenocysteine
  MOD_RES (107)..(107): Selenocysteine
  MOD_RES (111)..(111): Selenocysteine
  MOD_RES (135)..(135): Selenocysteine
  MOD_RES (154)..(154): Selenocysteine
  MOD_RES (183)..(183): Selenocysteine
RRRRKRRXPMSRRSLCRPXHSSSEXLRPPSRVRXPVPLSVXCPKSWPPCGXAWERNRSRXSRXSLSSPAARDPAHLAHPXPPAAGXGXAAXPVGSVASAPAACSPGXNRSXSPNPASLPSLRLAGRHCSEPEGLXAEKRPWPEAGWPIGESSDXPIARGLSLFLNLPPDSAEAAHCPPPAQRXCRNLPPADLLAPG

SEQ ID NO: 28270 - protein, 576 aa, Homo sapiens
  MOD_RES (53)..(53): Selenocysteine
  MOD_RES (56)..(56): Selenocysteine
  MOD_RES (70)..(70): Selenocysteine
  MOD_RES (103)..(103): Selenocysteine
  MOD_RES (117)..(117): Selenocysteine
  MOD_RES (141)..(141): Selenocysteine
  MOD_RES (161)..(161): Selenocysteine
  MOD_RES (175)..(176): Selenocysteine
  MOD_RES (198)..(198): Selenocysteine
  MOD_RES (209)..(209): Selenocysteine
  MOD_RES (243)..(243): Selenocysteine
  MOD_RES (269)..(269): Selenocysteine
  MOD_RES (281)..(281): Selenocysteine
  MOD_RES (308)..(308): Selenocysteine
  MOD_RES (339)..(339): Selenocysteine
  MOD_RES (346)..(346): Selenocysteine
  MOD_RES (350)..(350): Selenocysteine
  MOD_RES (353)..(353): Selenocysteine
  MOD_RES (360)..(360): Selenocysteine
  MOD_RES (367)..(367): Selenocysteine
  MOD_RES (374)..(374): Selenocysteine
  MOD_RES (389)..(389): Selenocysteine
  MOD_RES (399)..(399): Selenocysteine
  MOD_RES (402)..(402): Selenocysteine
  MOD_RES (421)..(422): Selenocysteine
  MOD_RES (430)..(430): Selenocysteine
  MOD_RES (438)..(438): Selenocysteine
  MOD_RES (541)..(541): Selenocysteine
  MOD_RES (565)..(565): Selenocysteine
  MOD_RES (567)..(567): Selenocysteine
MDVRFYPAAAGDPASLDFAQCLGYYGYSKFGNNNNYMNMAEANNAFFAASEQXFHXPSLGDEEFEIPPIXPPPESDPALGMPDVLLPFQALSDPLPSQGSEFXPQFPPQSLDLPSIXISRNLVEQDGVLHSSGLHMDQSHXQVSQYRQDPSLIMRSIVHMXDAARSGVMPPAQLXXINQSQLSAQLGLNLGGASMPHXSPSPPASKSAXPSPSSSINEEDADEANRAIGEKRAAPDSGKKPKXPKKKKKKDPNEPQKPVSAYALFFRDXQAAIKGQNPNAXFGEVSKIVASMWDSLGEEQKQVYKRKXEAAKKEYLKALAAYRASLVSKAAAESAEAQXIRSVQQXLASXNLXSSLLLNXPLSQHGXVSASPQXLQQSLPRSIAPKPLXMRLPMNQIVXSVXIAANMPSNIGAPLISSMGXXMVGSAPSXQVSPSVQXQQHQMQLQQQQQQQQQQMQQMQQQQLQQHQMHQQIQQQMQQQHFQHHMQQHLQQQQQHLQQQINQQQLQQQLQQRLQLQQLQHMQHQSQPSPRQHSPVASQIXSPIPAIGSPQPASQQHQSQIQSQXQXQVLSQVSIF

SEQ ID NO: 28271 - protein, 60 aa, Homo sapiens
  MOD_RES (55)..(55): Selenocysteine
  MOD_RES (60)..(60): Selenocysteine
MDVRFYPAAAGDPASLDFAQCLGYYGYSKHFACRLESVLFIAVCAQPRKAPIPSXQPPSX

SEQ ID NO: 28272 - protein, 571 aa, Homo sapiens
  MOD_RES (21)..(22): Selenocysteine
  MOD_RES (48)..(48): Selenocysteine
  MOD_RES (51)..(51): Selenocysteine
  MOD_RES (65)..(65): Selenocysteine
  MOD_RES (98)..(98): Selenocysteine
  MOD_RES (112)..(112): Selenocysteine
  MOD_RES (136)..(136): Selenocysteine
  MOD_RES (156)..(156): Selenocysteine
  MOD_RES (170)..(171): Selenocysteine
  MOD_RES (193)..(193): Selenocysteine
  MOD_RES (204)..(204): Selenocysteine
  MOD_RES (238)..(238): Selenocysteine
  MOD_RES (264)..(264): Selenocysteine
  MOD_RES (276)..(276): Selenocysteine
  MOD_RES (303)..(303): Selenocysteine
  MOD_RES (334)..(334): Selenocysteine
  MOD_RES (341)..(341): Selenocysteine
  MOD_RES (345)..(345): Selenocysteine
  MOD_RES (348)..(348): Selenocysteine
  MOD_RES (355)..(355): Selenocysteine
  MOD_RES (362)..(362): Selenocysteine
  MOD_RES (369)..(369): Selenocysteine
  MOD_RES (384)..(384): Selenocysteine
  MOD_RES (394)..(394): Selenocysteine
  MOD_RES (397)..(397): Selenocysteine
  MOD_RES (416)..(417): Selenocysteine
  MOD_RES (425)..(425): Selenocysteine
  MOD_RES (433)..(433): Selenocysteine
  MOD_RES (536)..(536): Selenocysteine
  MOD_RES (560)..(560): Selenocysteine
  MOD_RES (562)..(562): Selenocysteine
MKCQPRSGARRIEERLHYLIXXYLKFGNNNNYMNMAEANNAFFAASEXFHXPSLGDEEFEIPPIXPPPESDPALGMPDVLLPFQALSDPLPSQGSEFXPQFPPQSLDLPSIXISRNLVEQDGVLHSSGLHMDQSHXQVSQYRQDPSLIMRSIVHMXDAARSGVMPPAQLXXINQSQLSAQLGLNLGGASMPHXSPSPPASKSAXPSPSSSINEEDADEANRAIGEKRAAPDSGKKPKXPKKKKKKDPNEPQKPVSAYALFFRDXQAAIKGQNPNAXFGEVSKIVASMWDSLGEEQKQVYKRKXEAAKKEYLKALAAYRASLVSKAAAESAEAQXIRSVQQXLASXNLXSSLLLNXPLSQHGXVSASPQXLQQSLPRSIAPKPLXMRLPMNQIVXSVXIAANMPSNIGAPLISSMGXXMVGSAPSXQVSPSVQXQQHQMQLQQQQQQQQQQMQQMQQQQLQQHQMHQQIQQQMQQQHFQHHMQQHLQQQQQHLQQQINQQQLQQQLQQRLQLQQLQHMQHQSQPSPRQHSPVASQIXSPIPAIGSPQPASQQHQSQIQSQXQXQVLSQVSIF

SEQ ID NO: 28273 - protein, 166 aa, Homo sapiens
  MOD_RES (17)..(17): Selenocysteine
  MOD_RES (20)..(20): Selenocysteine
  MOD_RES (34)..(34): Selenocysteine
  MOD_RES (67)..(67): Selenocysteine
  MOD_RES (81)..(81): Selenocysteine
  MOD_RES (105)..(105): Selenocysteine
  MOD_RES (125)..(125): Selenocysteine
  MOD_RES (139)..(140): Selenocysteine
  MOD_RES (162)..(162): Selenocysteine
MNMAEANNAFFAASEQXFHXPSLGDEEFEIPPIXPPPESDPALGMPDVLLPFQALSDPLPSQGSEFXPQFPPQSLDLPSIXISRNLVEQDGVLHSSGLHMDQSHXQVSQYRQDPSLIMRSIVHMXDAARSGVMPPAQLXXINQSQLSAQLGLNLGGASMPHXSPSP

SEQ ID NO: 28274 - protein, 222 aa, Homo sapiens
  MOD_RES (20)..(20): Selenocysteine
  MOD_RES (41)..(41): Selenocysteine
  MOD_RES (43)..(43): Selenocysteine
  MOD_RES (55)..(55): Selenocysteine
  MOD_RES (58)..(58): Selenocysteine
  MOD_RES (110)..(110): Selenocysteine
  MOD_RES (118)..(118): Selenocysteine
  MOD_RES (134)..(134): Selenocysteine
  MOD_RES (143)..(143): Selenocysteine
  MOD_RES (152)..(152): Selenocysteine
  MOD_RES (158)..(158): Selenocysteine
  MOD_RES (161)..(161): Selenocysteine
  MOD_RES (171)..(172): Selenocysteine
  MOD_RES (190)..(190): Selenocysteine
  MOD_RES (204)..(205): Selenocysteine
  MOD_RES (209)..(209): Selenocysteine
MDFPDQRRGAPEPRPRPPRXAPPVSNRPAHKFPGGNDNYLXIXGPSHPFLSGAEXFHXPSLGDEEFEIPPISLDSDPSLAVSDVVGHFDDLADPSSSQDGSFSAQYGVQXLDMPVGMXHGLMEQGGGLLSGGLXMDLDHSIGXQYSANPPVXIDVPMXDMXSGLMGHSQLXXIDQSELSSQLGLSLGGGXILPPAQSPEDRLSXXPSPXSSLHEDGVEDFRR

SEQ ID NO: 28275 - protein, 43 aa, Homo sapiens
  MOD_RES (12)..(12): Selenocysteine
  MOD_RES (14)..(14): Selenocysteine
MEFPGGNDNYLXIXGPSHPFLSGAEPLLQKGPGIEQRRKGKLS

SEQ ID NO: 28276 - protein, 81 aa, Homo sapiens
  MOD_RES (12)..(12): Selenocysteine
  MOD_RES (14)..(14): Selenocysteine
  MOD_RES (26)..(26): Selenocysteine
  MOD_RES (29)..(29): Selenocysteine
  MOD_RES (77)..(77): Selenocysteine
  MOD_RES (79)..(80): Selenocysteine
MEFPGGNDNYLXIXGPSHPFLSGAEXFHXPSLGDEEFEIPPISLDSDPSLAVSDVVGHFDDLADPSSSQDGSFSAQXWXXL

SEQ ID NO: 28277 - protein, 621 aa, Homo sapiens
  MOD_RES (12)..(12): Selenocysteine
  MOD_RES (14)..(14): Selenocysteine
  MOD_RES (26)..(26): Selenocysteine
  MOD_RES (29)..(29): Selenocysteine
  MOD_RES (81)..(81): Selenocysteine
  MOD_RES (89)..(89): Selenocysteine
  MOD_RES (105)..(105): Selenocysteine
  MOD_RES (114)..(114): Selenocysteine
  MOD_RES (123)..(123): Selenocysteine
  MOD_RES (129)..(129): Selenocysteine
  MOD_RES (132)..(132): Selenocysteine
  MOD_RES (142)..(143): Selenocysteine
  MOD_RES (161)..(161): Selenocysteine
  MOD_RES (175)..(176): Selenocysteine
  MOD_RES (180)..(180): Selenocysteine
  MOD_RES (200)..(200): Selenocysteine
  MOD_RES (237)..(237): Selenocysteine
  MOD_RES (249)..(249): Selenocysteine
  MOD_RES (276)..(276): Selenocysteine
  MOD_RES (299)..(299): Selenocysteine
  MOD_RES (302)..(302): Selenocysteine
  MOD_RES (313)..(313): Selenocysteine
  MOD_RES (321)..(321): Selenocysteine
  MOD_RES (346)..(346): Selenocysteine
  MOD_RES (366)..(366): Selenocysteine
  MOD_RES (371)..(371): Selenocysteine
  MOD_RES (380)..(380): Selenocysteine
  MOD_RES (388)..(388): Selenocysteine
  MOD_RES (393)..(393): Selenocysteine
  MOD_RES (396)..(396): Selenocysteine
  MOD_RES (405)..(405): Selenocysteine
  MOD_RES (407)..(407): Selenocysteine
  MOD_RES (409)..(409): Selenocysteine
  MOD_RES (420)..(420): Selenocysteine
  MOD_RES (456)..(456): Selenocysteine
  MOD_RES (461)..(461): Selenocysteine
  MOD_RES (500)..(500): Selenocysteine
  MOD_RES (505)..(506): Selenocysteine
  MOD_RES (511)..(511): Selenocysteine
  MOD_RES (528)..(528): Selenocysteine
  MOD_RES (536)..(536): Selenocysteine
  MOD_RES (542)..(542): Selenocysteine
  MOD_RES (616)..(616): Selenocysteine
MEFPGGNDNYLXIXGPSHPFLSGAEXFHXPSLGDEEFEIPPISLDSDPSLAVSDVVGHFDDLADPSSSQDGSFSAQYGVQXLDMPVGMXHGLMEQGGGLLSGGLXMDLDHSIGXQYSANPPVXIDVPMXDMXSGLMGHSQLXXIDQSELSSQLGLSLGGGXILPPAQSPEDRLSXXPSPXSSLHEDGVEDFRRQLPSQKXVVVEAGKKQKAPKKRKKKDPNEPQKPVSAYALFFRDXQAAIKGQNPNAXFGEVSKIVASMWDSLGEEQKQVYKRKXEAAKKEYLKALAAYKDNQECQAXVEXVELDPAPPSQXPSPPPMAXVDPASPAPASIEPPALSPSIVVNSXLSSYVANQASSGAGGQPNIXKLIIXKQMLPSSIXMSQGGMVXVIPAXVVXSRGLQLGQXSXAXIQPSQQAQIVXRSVLQAAAAAAAAASMQLPPPRLQPPPLQQMPQPPXQQQVXILQQPPPLQAMQQPPPQKVRINLQQQPPPLQIKSVPLPXLKMQXXLVPPXVESSPERPMNNSPEAHXVEAPSPEXICEMIXDVVPEVESPSQMDVELVSGSPVALSPQPRCVRSGCENPPIVSKDWDNEYCSNECVVKHCRDVFLAWVASRNSNXVVFVK

SEQ ID NO: 28278 - protein, 42 aa, Homo sapiens
  MOD_RES (12)..(12): Selenocysteine
  MOD_RES (14)..(14): Selenocysteine
  MOD_RES (39)..(39): Selenocysteine
MEFPGGNDNYLXIXGPSHPFLSGAEVSQSCRRRGDIPYXKLG

SEQ ID NO: 28279 - protein, 170 aa, Homo sapiens
  MOD_RES (3)..(3): Selenocysteine
  MOD_RES (6)..(6): Selenocysteine
  MOD_RES (58)..(58): Selenocysteine
  MOD_RES (66)..(66): Selenocysteine
  MOD_RES (82)..(82): Selenocysteine
  MOD_RES (91)..(91): Selenocysteine
  MOD_RES (100)..(100): Selenocysteine
  MOD_RES (106)..(106): Selenocysteine
  MOD_RES (109)..(109): Selenocysteine
  MOD_RES (119)..(120): Selenocysteine
  MOD_RES (138)..(138): Selenocysteine
  MOD_RES (152)..(153): Selenocysteine
  MOD_RES (157)..(157): Selenocysteine
MEXFHXPSLGDEEFEIPPISLDSDPSLAVSDVVGHFDDLADPSSSQDGSFSAQYGVQXLDMPVGMXHGLMEQGGGLLSGGLXMDLDHSIGXQYSANPPVXIDVPMXDMXSGLMGHSQLXXIDQSELSSQLGLSLGGGXILPPAQSPEDRLSXXPSPXSSLHEDGVEDFRR

SEQ ID NO: 28280 - protein, 182 aa, Homo sapiens
  MOD_RES (11)..(11): Selenocysteine
  MOD_RES (52)..(52): Selenocysteine
  MOD_RES (71)..(72): Selenocysteine
  MOD_RES (94)..(94): Selenocysteine
  MOD_RES (97)..(97): Selenocysteine
  MOD_RES (125)..(125): Selenocysteine
  MOD_RES (145)..(145): Selenocysteine
  MOD_RES (153)..(153): Selenocysteine
  MOD_RES (170)..(170): Selenocysteine
  MOD_RES (175)..(175): Selenocysteine
MAIYKQSQHMXEVVRRCPHHERCSDSDGLAPPQHLIRVEGNLRVEYLDDRNXFRHSVVVPYEPPEVGSDCXXIHYNYMCNSSCMGGMNRRPILXIIXLEDSSGNLLGRNSFEVRVCACPGRDRRXEEENLRKKGEPHHELPPGSXKRALPNNXSSSPQPKKKPLDGEYFXLQDQXSFQKENC

SEQ ID NO: 28281 - protein, 234 aa, Homo sapiens
  MOD_RES (11)..(11): Selenocysteine
  MOD_RES (52)..(52): Selenocysteine
  MOD_RES (71)..(72): Selenocysteine
  MOD_RES (94)..(94): Selenocysteine
  MOD_RES (97)..(97): Selenocysteine
  MOD_RES (125)..(125): Selenocysteine
  MOD_RES (145)..(145): Selenocysteine
  MOD_RES (153)..(153): Selenocysteine
  MOD_RES (170)..(170): Selenocysteine
  MOD_RES (218)..(218): Selenocysteine
  MOD_RES (228)..(228): Selenocysteine
MAIYKQSQHMXEVVRRCPHHERCSDSDGLAPPQHLIRVEGNLRVEYLDDRNXFRHSVVVPYEPPEVGSDCXXIHYNYMCNSSCMGGMNRRPILXIIXLEDSSGNLLGRNSFEVRVCACPGRDRRXEEENLRKKGEPHHELPPGSXKRALPNNXSSSPQPKKKPLDGEYFXLQIRGRERFEMFRELNEALELKDAQAGKEPGGSRAHSSHLKSKKGQSXSRHKKLMFKXEGPDSD

SEQ ID NO: 28282 - protein, 187 aa, Homo sapiens
  MOD_RES (11)..(11): Selenocysteine
  MOD_RES (52)..(52): Selenocysteine
  MOD_RES (71)..(72): Selenocysteine
  MOD_RES (94)..(94): Selenocysteine
  MOD_RES (97)..(97): Selenocysteine
  MOD_RES (125)..(125): Selenocysteine
  MOD_RES (145)..(145): Selenocysteine
  MOD_RES (153)..(153): Selenocysteine
  MOD_RES (170)..(170): Selenocysteine
MAIYKQSQHMXEVVRRCPHHERCSDSDGLAPPQHLIRVEGNLRVEYLDDRNXFRHSVVVPYEPPEVGSDCXXIHYNYMCNSSCMGGMNRRPILXIIXLEDSSGNLLGRNSFEVRVCACPGRDRRXEEENLRKKGEPHHELPPGSXKRALPNNXSSSPQPKKKPLDGEYFXLQMLLDLRWCYFLINSS

SEQ ID NO: 28283 - protein, 302 aa, Homo sapiens
  MOD_RES (16)..(16): Selenocysteine
  MOD_RES (42)..(42): Selenocysteine
  MOD_RES (63)..(63): Selenocysteine
  MOD_RES (79)..(79): Selenocysteine
  MOD_RES (84)..(84): Selenocysteine
  MOD_RES (86)..(86): Selenocysteine
  MOD_RES (101)..(101): Selenocysteine
  MOD_RES (111)..(111): Selenocysteine
  MOD_RES (116)..(116): Selenocysteine
  MOD_RES (131)..(131): Selenocysteine
  MOD_RES (172)..(172): Selenocysteine
  MOD_RES (191)..(192): Selenocysteine
  MOD_RES (214)..(214): Selenocysteine
  MOD_RES (217)..(217): Selenocysteine
  MOD_RES (245)..(245): Selenocysteine
  MOD_RES (265)..(265): Selenocysteine
  MOD_RES (273)..(273): Selenocysteine
  MOD_RES (290)..(290): Selenocysteine
  MOD_RES (295)..(295): Selenocysteine
MDDLMLSPDDIEQWFXEDPGPDEAPRMPEAAPPVAPAPAAPXPAAPAPAPSWPLSSSVPSQKXYQGSYGFRLGFLHSGXAKSVXCXYSPALNKMFCQLAKXCPVQLWVDSXPPPGXRVRAMAIYKQSQHMXEVVRRCPHHERCSDSDGLAPPQHLIRVEGNLRVEYLDDRNXFRHSVVVPYEPPEVGSDCXXIHYNYMCNSSCMGGMNRRPILXIIXLEDSSGNLLGRNSFEVRVCACPGRDRRXEEENLRKKGEPHHELPPGSXKRALPNNXSSSPQPKKKPLDGEYFXLQDQXSFQKENC

SEQ ID NO: 28284 - protein, 307 aa, Homo sapiens
  MOD_RES (16)..(16): Selenocysteine
  MOD_RES (42)..(42): Selenocysteine
  MOD_RES (63)..(63): Selenocysteine
  MOD_RES (79)..(79): Selenocysteine
  MOD_RES (84)..(84): Selenocysteine
  MOD_RES (86)..(86): Selenocysteine
  MOD_RES (101)..(101): Selenocysteine
  MOD_RES (111)..(111): Selenocysteine
  MOD_RES (116)..(116): Selenocysteine
  MOD_RES (131)..(131): Selenocysteine
  MOD_RES (172)..(172): Selenocysteine
  MOD_RES (191)..(192): Selenocysteine
  MOD_RES (214)..(214): Selenocysteine
  MOD_RES (217)..(217): Selenocysteine
  MOD_RES (245)..(245): Selenocysteine
  MOD_RES (265)..(265): Selenocysteine
  MOD_RES (273)..(273): Selenocysteine
  MOD_RES (290)..(290): Selenocysteine
MDDLMLSPDDIEQWFXEDPGPDEAPRMPEAAPPVAPAPAAPXPAAPAPAPSWPLSSSVPSQKXYQGSYGFRLGFLHSGXAKSVXCXYSPALNKMFCQLAKXCPVQLWVDSXPPPGXRVRAMAIYKQSQHMXEVVRRCPHHERCSDSDGLAPPQHLIRVEGNLRVEYLDDRNXFRHSVVVPYEPPEVGSDCXXIHYNYMCNSSCMGGMNRRPILXIIXLEDSSGNLLGRNSFEVRVCACPGRDRRXEEENLRKKGEPHHELPPGSXKRALPNNXSSSPQPKKKPLDGEYFXLQMLLDLRWCYFLINSS

SEQ ID NO: 28285 - protein, 354 aa, Homo sapiens
  MOD_RES (16)..(16): Selenocysteine
  MOD_RES (42)..(42): Selenocysteine
  MOD_RES (63)..(63): Selenocysteine
  MOD_RES (79)..(79): Selenocysteine
  MOD_RES (84)..(84): Selenocysteine
  MOD_RES (86)..(86): Selenocysteine
  MOD_RES (101)..(101): Selenocysteine
  MOD_RES (111)..(111): Selenocysteine
  MOD_RES (116)..(116): Selenocysteine
  MOD_RES (131)..(131): Selenocysteine
  MOD_RES (172)..(172): Selenocysteine
  MOD_RES (191)..(192): Selenocysteine
  MOD_RES (214)..(214): Selenocysteine
  MOD_RES (217)..(217): Selenocysteine
  MOD_RES (245)..(245): Selenocysteine
  MOD_RES (265)..(265): Selenocysteine
  MOD_RES (273)..(273): Selenocysteine
  MOD_RES (290)..(290): Selenocysteine
  MOD_RES (338)..(338): Selenocysteine
  MOD_RES (348)..(348): Selenocysteine
MDDLMLSPDDIEQWFXEDPGPDEAPRMPEAAPPVAPAPAAPXPAAPAPAPSWPLSSSVPSQKXYQGSYGFRLGFLHSGXAKSVXCXYSPALNKMFCQLAKXCPVQLWVDSXPPPGXRVRAMAIYKQSQHMXEVVRRCPHHERCSDSDGLAPPQHLIRVEGNLRVEYLDDRNXFRHSVVVPYEPPEVGSDCXXIHYNYMCNSSCMGGMNRRPILXIIXLEDSSGNLLGRNSFEVRVCACPGRDRRXEEENLRKKGEPHHELPPGSXKRALPNNXSSSPQPKKKPLDGEYFXLQIRGRERFEMFRELNEALELKDAQAGKEPGGSRAHSSHLKSKKGQSXSRHKKLMFKXEGPDSD

SEQ ID NO: 28286 - protein, 410 aa, Homo sapiens
  MOD_RES (16)..(16): Selenocysteine
  MOD_RES (42)..(42): Selenocysteine
  MOD_RES (63)..(63): Selenocysteine
  MOD_RES (79)..(79): Selenocysteine
  MOD_RES (84)..(84): Selenocysteine
  MOD_RES (86)..(86): Selenocysteine
  MOD_RES (101)..(101): Selenocysteine
  MOD_RES (111)..(111): Selenocysteine
  MOD_RES (116)..(116): Selenocysteine
  MOD_RES (131)..(131): Selenocysteine
  MOD_RES (172)..(172): Selenocysteine
  MOD_RES (191)..(192): Selenocysteine
  MOD_RES (214)..(214): Selenocysteine
  MOD_RES (217)..(217): Selenocysteine
  MOD_RES (245)..(245): Selenocysteine
  MOD_RES (265)..(265): Selenocysteine
  MOD_RES (273)..(273): Selenocysteine
  MOD_RES (290)..(290): Selenocysteine
  MOD_RES (332)..(332): Selenocysteine
  MOD_RES (345)..(345): Selenocysteine
  MOD_RES (374)..(374): Selenocysteine
  MOD_RES (402)..(402): Selenocysteine
MDDLMLSPDDIEQWFXEDPGPDEAPRMPEAAPPVAPAPAAPXPAAPAPAPSWPLSSSVPSQKXYQGSYGFRLGFLHSGXAKSVXCXYSPALNKMFCQLAKXCPVQLWVDSXPPPGXRVRAMAIYKQSQHMXEVVRRCPHHERCSDSDGLAPPQHLIRVEGNLRVEYLDDRNXFRHSVVVPYEPPEVGSDCXXIHYNYMCNSSCMGGMNRRPILXIIXLEDSSGNLLGRNSFEVRVCACPGRDRRXEEENLRKKGEPHHELPPGSXKRALPNNXSSSPQPKKKPLDGEYFXLQIRGRERFEMFRELNEALELKDAQAGKEPGGSRAHSRECQXLSPGDPDPPLSEXFNLNICPYPAGKLELLKLSPCPCLCRQVXLMSFLFFFLIFFYFRLYWGIIDPPKLHXFKVCSVMI

SEQ ID NO: 28287 - protein, 143 aa, Homo sapiens
  MOD_RES (18)..(18): Selenocysteine
  MOD_RES (55)..(55): Selenocysteine
  MOD_RES (81)..(81): Selenocysteine
  MOD_RES (102)..(102): Selenocysteine
  MOD_RES (118)..(118): Selenocysteine
  MOD_RES (123)..(123): Selenocysteine
  MOD_RES (125)..(125): Selenocysteine
  MOD_RES (133)..(133): Selenocysteine
  MOD_RES (143)..(143): Selenocysteine
MEEPQSDPSVEPPLSQEXFSDLWKLLPENNVLSPLPSQAMDDLMLSPDDIEQWFXEDPGPDEAPRMPEAAPPVAPAPAAPXPAAPAPAPSWPLSSSVPSQKXYQGSYGFRLGFLHSGXAKSVXCXMFCQLAKXCPVQLWVDSX

SEQ ID NO: 28288 - protein, 128 aa, Homo sapiens
  MOD_RES (18)..(18): Selenocysteine
  MOD_RES (55)..(55): Selenocysteine
  MOD_RES (81)..(81): Selenocysteine
  MOD_RES (102)..(102): Selenocysteine
  MOD_RES (118)..(118): Selenocysteine
  MOD_RES (123)..(123): Selenocysteine
  MOD_RES (125)..(125): Selenocysteine
MEEPQSDPSVEPPLSQEXFSDLWKLLPENNVLSPLPSQAMDDLMLSPDDIEQWFXEDPGPDEAPRMPEAAPPVAPAPAAPXPAAPAPAPSWPLSSSVPSQKXYQGSYGFRLGFLHSGXAKSVXCXYSP

SEQ ID NO: 28289 - protein, 165 aa, Homo sapiens
  MOD_RES (18)..(18): Selenocysteine
  MOD_RES (55)..(55): Selenocysteine
  MOD_RES (81)..(81): Selenocysteine
  MOD_RES (102)..(102): Selenocysteine
  MOD_RES (118)..(118): Selenocysteine
  MOD_RES (123)..(123): Selenocysteine
  MOD_RES (125)..(125): Selenocysteine
  MOD_RES (140)..(140): Selenocysteine
  MOD_RES (150)..(150): Selenocysteine
  MOD_RES (155)..(155): Selenocysteine
MEEPQSDPSVEPPLSQEXFSDLWKLLPENNVLSPLPSQAMDDLMLSPDDIEQWFXEDPGPDEAPRMPEAAPPVAPAPAAPXPAAPAPAPSWPLSSSVPSQKXYQGSYGFRLGFLHSGXAKSVXCXYSPALNKMFCQLAKXCPVQLWVDSXPPPGXRVRAMAIYKQ

SEQ ID NO: 28290 - protein, 285 aa, Homo sapiens
  MOD_RES (18)..(18): Selenocysteine
  MOD_RES (55)..(55): Selenocysteine
  MOD_RES (81)..(81): Selenocysteine
  MOD_RES (102)..(102): Selenocysteine
  MOD_RES (118)..(118): Selenocysteine
  MOD_RES (123)..(123): Selenocysteine
  MOD_RES (125)..(125): Selenocysteine
  MOD_RES (140)..(140): Selenocysteine
  MOD_RES (150)..(150): Selenocysteine
  MOD_RES (155)..(155): Selenocysteine
  MOD_RES (170)..(170): Selenocysteine
  MOD_RES (211)..(211): Selenocysteine
  MOD_RES (230)..(231): Selenocysteine
  MOD_RES (253)..(253): Selenocysteine
  MOD_RES (256)..(256): Selenocysteine
MEEPQSDPSVEPPLSQEXFSDLWKLLPENNVLSPLPSQAMDDLMLSPDDIEQWFXEDPGPDEAPRMPEAAPPVAPAPAAPXPAAPAPAPSWPLSSSVPSQKXYQGSYGFRLGFLHSGXAKSVXCXYSPALNKMFCQLAKXCPVQLWVDSXPPPGXRVRAMAIYKQSQHMXEVVRRCPHHERCSDSDGLAPPQHLIRVEGNLRVEYLDDRNXFRHSVVVPYEPPEVGSDCXXIHYNYMCNSSCMGGMNRRPILXIIXLEDSRPRQVDHLRSGVQDSLANIAKSHLY

SEQ ID NO: 28291 - protein, 341 aa, Homo sapiens
  MOD_RES (18)..(18): Selenocysteine
  MOD_RES (55)..(55): Selenocysteine
  MOD_RES (81)..(81): Selenocysteine
  MOD_RES (102)..(102): Selenocysteine
  MOD_RES (118)..(118): Selenocysteine
  MOD_RES (123)..(123): Selenocysteine
  MOD_RES (125)..(125): Selenocysteine
  MOD_RES (140)..(140): Selenocysteine
  MOD_RES (150)..(150): Selenocysteine
  MOD_RES (155)..(155): Selenocysteine
  MOD_RES (170)..(170): Selenocysteine
  MOD_RES (211)..(211): Selenocysteine
  MOD_RES (230)..(231): Selenocysteine
  MOD_RES (253)..(253): Selenocysteine
  MOD_RES (256)..(256): Selenocysteine
  MOD_RES (284)..(284): Selenocysteine
  MOD_RES (304)..(304): Selenocysteine
  MOD_RES (312)..(312): Selenocysteine
  MOD_RES (329)..(329): Selenocysteine
  MOD_RES (334)..(334): Selenocysteine
MEEPQSDPSVEPPLSQEXFSDLWKLLPENNVLSPLPSQAMDDLMLSPDDIEQWFXEDPGPDEAPRMPEAAPPVAPAPAAPXPAAPAPAPSWPLSSSVPSQKXYQGSYGFRLGFLHSGXAKSVXCXYSPALNKMFCQLAKXCPVQLWVDSXPPPGXRVRAMAIYKQSQHMXEVVRRCPHHERCSDSDGLAPPQHLIRVEGNLRVEYLDDRNXFRHSVVVPYEPPEVGSDCXXIHYNYMCNSSCMGGMNRRPILXIIXLEDSSGNLLGRNSFEVRVCACPGRDRRXEEENLRKKGEPHHELPPGSXKRALPNNXSSSPQPKKKPLDGEYFXLQDQXSFQKENC

SEQ ID NO: 28292 - protein, 343 aa, Homo sapiens
  MOD_RES (18)..(18): Selenocysteine
  MOD_RES (55)..(55): Selenocysteine
  MOD_RES (81)..(81): Selenocysteine
  MOD_RES (102)..(102): Selenocysteine
  MOD_RES (118)..(118): Selenocysteine
  MOD_RES (123)..(123): Selenocysteine
  MOD_RES (125)..(125): Selenocysteine
  MOD_RES (140)..(140): Selenocysteine
  MOD_RES (150)..(150): Selenocysteine
  MOD_RES (155)..(155): Selenocysteine
  MOD_RES (170)..(170): Selenocysteine
  MOD_RES (211)..(211): Selenocysteine
  MOD_RES (230)..(231): Selenocysteine
  MOD_RES (253)..(253): Selenocysteine
  MOD_RES (256)..(256): Selenocysteine
  MOD_RES (284)..(284): Selenocysteine
  MOD_RES (304)..(304): Selenocysteine
  MOD_RES (312)..(312): Selenocysteine
  MOD_RES (329)..(329): Selenocysteine
  MOD_RES (333)..(333): Selenocysteine
MEEPQSDPSVEPPLSQEXFSDLWKLLPENNVLSPLPSQAMDDLMLSPDDIEQWFXEDPGPDEAPRMPEAAPPVAPAPAAPXPAAPAPAPSWPLSSSVPSQKXYQGSYGFRLGFLHSGXAKSVXCXYSPALNKMFCQLAKXCPVQLWVDSXPPPGXRVRAMAIYKQSQHMXEVVRRCPHHERCSDSDGLAPPQHLIRVEGNLRVEYLDDRNXFRHSVVVPYEPPEVGSDCXXIHYNYMCNSSCMGGMNRRPILXIIXLEDSSGNLLGRNSFEVRVCACPGRDRRXEEENLRKKGEPHHELPPGSXKRALPNNXSSSPQPKKKPLDGEYFXLQKXFPARHGGSHL

SEQ ID NO: 28293 - protein, 346 aa, Homo sapiens
  MOD_RES (18)..(18): Selenocysteine
  MOD_RES (55)..(55): Selenocysteine
  MOD_RES (81)..(81): Selenocysteine
  MOD_RES (102)..(102): Selenocysteine
  MOD_RES (118)..(118): Selenocysteine
  MOD_RES (123)..(123): Selenocysteine
  MOD_RES (125)..(125): Selenocysteine
  MOD_RES (140)..(140): Selenocysteine
  MOD_RES (150)..(150): Selenocysteine
  MOD_RES (155)..(155): Selenocysteine
  MOD_RES (170)..(170): Selenocysteine
  MOD_RES (211)..(211): Selenocysteine
  MOD_RES (230)..(231): Selenocysteine
  MOD_RES (253)..(253): Selenocysteine
  MOD_RES (256)..(256): Selenocysteine
  MOD_RES (284)..(284): Selenocysteine
  MOD_RES (304)..(304): Selenocysteine
  MOD_RES (312)..(312): Selenocysteine
  MOD_RES (329)..(329): Selenocysteine
MEEPQSDPSVEPPLSQEXFSDLWKLLPENNVLSPLPSQAMDDLMLSPDDIEQWFXEDPGPDEAPRMPEAAPPVAPAPAAPXPAAPAPAPSWPLSSSVPSQKXYQGSYGFRLGFLHSGXAKSVXCXYSPALNKMFCQLAKXCPVQLWVDSXPPPGXRVRAMAIYKQSQHMXEVVRRCPHHERCSDSDGLAPPQHLIRVEGNLRVEYLDDRNXFRHSVVVPYEPPEVGSDCXXIHYNYMCNSSCMGGMNRRPILXIIXLEDSSGNLLGRNSFEVRVCACPGRDRRXEEENLRKKGEPHHELPPGSXKRALPNNXSSSPQPKKKPLDGEYFXLQMLLDLRWCYFLINSS

SEQ ID NO: 28294 - protein, 393 aa, Homo sapiens
  MOD_RES (18)..(18): Selenocysteine
  MOD_RES (55)..(55): Selenocysteine
  MOD_RES (81)..(81): Selenocysteine
  MOD_RES (102)..(102): Selenocysteine
  MOD_RES (118)..(118): Selenocysteine
  MOD_RES (123)..(123): Selenocysteine
  MOD_RES (125)..(125): Selenocysteine
  MOD_RES (140)..(140): Selenocysteine
  MOD_RES (150)..(150): Selenocysteine
  MOD_RES (155)..(155): Selenocysteine
  MOD_RES (170)..(170): Selenocysteine
  MOD_RES (211)..(211): Selenocysteine
  MOD_RES (230)..(231): Selenocysteine
  MOD_RES (253)..(253): Selenocysteine
  MOD_RES (256)..(256): Selenocysteine
  MOD_RES (284)..(284): Selenocysteine
  MOD_RES (304)..(304): Selenocysteine
  MOD_RES (312)..(312): Selenocysteine
  MOD_RES (329)..(329): Selenocysteine
  MOD_RES (377)..(377): Selenocysteine
  MOD_RES (387)..(387): Selenocysteine
MEEPQSDPSVEPPLSQEXFSDLWKLLPENNVLSPLPSQAMDDLMLSPDDIEQWFXEDPGPDEAPRMPEAAPPVAPAPAAPXPAAPAPAPSWPLSSSVPSQKXYQGSYGFRLGFLHSGXAKSVXCXYSPALNKMFCQLAKXCPVQLWVDSXPPPGXRVRAMAIYKQSQHMXEVVRRCPHHERCSDSDGLAPPQHLIRVEGNLRVEYLDDRNXFRHSVVVPYEPPEVGSDCXXIHYNYMCNSSCMGGMNRRPILXIIXLEDSSGNLLGRNSFEVRVCACPGRDRRXEEENLRKKGEPHHELPPGSXKRALPNNXSSSPQPKKKPLDGEYFXLQIRGRERFEMFRELNEALELKDAQAGKEPGGSRAHSSHLKSKKGQSXSRHKKLMFKXEGPDSD

SEQ ID NO: 28295 - protein, 382 aa, Homo sapiens
  MOD_RES (18)..(18): Selenocysteine
  MOD_RES (55)..(55): Selenocysteine
  MOD_RES (81)..(81): Selenocysteine
  MOD_RES (102)..(102): Selenocysteine
  MOD_RES (129)..(129): Selenocysteine
  MOD_RES (139)..(139): Selenocysteine
  MOD_RES (144)..(144): Selenocysteine
  MOD_RES (159)..(159): Selenocysteine
  MOD_RES (200)..(200): Selenocysteine
  MOD_RES (219)..(220): Selenocysteine
  MOD_RES (242)..(242): Selenocysteine
  MOD_RES (245)..(245): Selenocysteine
  MOD_RES (273)..(273): Selenocysteine
  MOD_RES (293)..(293): Selenocysteine
  MOD_RES (301)..(301): Selenocysteine
  MOD_RES (318)..(318): Selenocysteine
  MOD_RES (366)..(366): Selenocysteine
  MOD_RES (376)..(376): Selenocysteine
MEEPQSDPSVEPPLSQEXFSDLWKLLPENNVLSPLPSQAMDDLMLSPDDIEQWFXEDPGPDEAPRMPEAAPPVAPAPAAPXPAAPAPAPSWPLSSSVPSQKXYQGSYGFRLSCKYSPALNKMFCQLAKXCPVQLWVDSXPPPGXRVRAMAIYKQSQHMXEVVRRCPHHERCSDSDGLAPPQHLIRVEGNLRVEYLDDRNXFRHSVVVPYEPPEVGSDCXXIHYNYMCNSSCMGGMNRRPILXIIXLEDSSGNLLGRNSFEVRVCACPGRDRRXEEENLRKKGEPHHELPPGSXKRALPNNXSSSPQPKKKPLDGEYFXLQIRGRERFEMFRELNEALELKDAQAGKEPGGSRAHSSHLKSKKGQSXSRHKKLMFKXEGPDSD

SEQ ID NO: 28296 - protein, 155 aa, Homo sapiens
  MOD_RES (18)..(18): Selenocysteine
  MOD_RES (47)..(47): Selenocysteine
  MOD_RES (57)..(57): Selenocysteine
  MOD_RES (62)..(62): Selenocysteine
  MOD_RES (77)..(77): Selenocysteine
  MOD_RES (118)..(118): Selenocysteine
  MOD_RES (137)..(138): Selenocysteine
MEEPQSDPSVEPPLSQEXFSDLWKLLPENNVLYSPALNKMFCQLAKXCPVQLWVDSXPPPGXRVRAMAIYKQSQHMXEVVRRCPHHERCSDSDGLAPPQHLIRVEGNLRVEYLDDRNXFRHSVVVPYEPPEVGSDCXXIHYNYMCNSSCMGGMNR

SEQ ID NO: 28297 - protein, 199 aa, Homo sapiens
  MOD_RES (8)..(8): Selenocysteine
  MOD_RES (18)..(18): Selenocysteine
  MOD_RES (23)..(23): Selenocysteine
  MOD_RES (38)..(38): Selenocysteine
  MOD_RES (79)..(79): Selenocysteine
  MOD_RES (98)..(99): Selenocysteine
  MOD_RES (121)..(121): Selenocysteine
  MOD_RES (124)..(124): Selenocysteine
  MOD_RES (152)..(152): Selenocysteine
  MOD_RES (172)..(172): Selenocysteine
  MOD_RES (180)..(180): Selenocysteine
  MOD_RES (197)..(197): Selenocysteine
MFCQLAKXCPVQLWVDSXPPPGXRVRAMAIYKQSQHMXEVVRRCPHHERCSDSDGLAPPQHLIRVEGNLRVEYLDDRNXFRHSVVVPYEPPEVGSDCXXIHYNYMCNSSCMGGMNRRPILXIIXLEDSSGNLLGRNSFEVRVCACPGRDRRXEEENLRKKGEPHHELPPGSXKRALPNNXSSSPQPKKKPLDGEYFXLQ

SEQ ID NO: 28298 - protein, 209 aa, Homo sapiens
  MOD_RES (8)..(8): Selenocysteine
  MOD_RES (18)..(18): Selenocysteine
  MOD_RES (23)..(23): Selenocysteine
  MOD_RES (38)..(38): Selenocysteine
  MOD_RES (79)..(79): Selenocysteine
  MOD_RES (98)..(99): Selenocysteine
  MOD_RES (121)..(121): Selenocysteine
  MOD_RES (124)..(124): Selenocysteine
  MOD_RES (152)..(152): Selenocysteine
  MOD_RES (172)..(172): Selenocysteine
  MOD_RES (180)..(180): Selenocysteine
  MOD_RES (197)..(197): Selenocysteine
  MOD_RES (202)..(202): Selenocysteine
MFCQLAKXCPVQLWVDSXPPPGXRVRAMAIYKQSQHMXEVVRRCPHHERCSDSDGLAPPQHLIRVEGNLRVEYLDDRNXFRHSVVVPYEPPEVGSDCXXIHYNYMCNSSCMGGMNRRPILXIIXLEDSSGNLLGRNSFEVRVCACPGRDRRXEEENLRKKGEPHHELPPGSXKRALPNNXSSSPQPKKKPLDGEYFXLQDQXSFQKENC

SEQ ID NO: 28299 - protein, 261 aa, Homo sapiens
  MOD_RES (8)..(8): Selenocysteine
  MOD_RES (18)..(18): Selenocysteine
  MOD_RES (23)..(23): Selenocysteine
  MOD_RES (38)..(38): Selenocysteine
  MOD_RES (79)..(79): Selenocysteine
  MOD_RES (98)..(99): Selenocysteine
  MOD_RES (121)..(121): Selenocysteine
  MOD_RES (124)..(124): Selenocysteine
  MOD_RES (152)..(152): Selenocysteine
  MOD_RES (172)..(172): Selenocysteine
  MOD_RES (180)..(180): Selenocysteine
  MOD_RES (197)..(197): Selenocysteine
  MOD_RES (245)..(245): Selenocysteine
  MOD_RES (255)..(255): Selenocysteine
MFCQLAKXCPVQLWVDSXPPPGXRVRAMAIYKQSQHMXEVVRRCPHHERCSDSDGLAPPQHLIRVEGNLRVEYLDDRNXFRHSVVVPYEPPEVGSDCXXIHYNYMCNSSCMGGMNRRPILXIIXLEDSSGNLLGRNSFEVRVCACPGRDRRXEEENLRKKGEPHHELPPGSXKRALPNNXSSSPQPKKKPLDGEYFXLQIRGRERFEMFRELNEALELKDAQAGKEPGGSRAHSSHLKSKKGQSXSRHKKLMFKXEGPDSD

SEQ ID NO: 28300 - protein, 214 aa, Homo sapiens
  MOD_RES (8)..(8): Selenocysteine
  MOD_RES (18)..(18): Selenocysteine
  MOD_RES (23)..(23): Selenocysteine
  MOD_RES (38)..(38): Selenocysteine
  MOD_RES (79)..(79): Selenocysteine
  MOD_RES (98)..(99): Selenocysteine
  MOD_RES (121)..(121): Selenocysteine
  MOD_RES (124)..(124): Selenocysteine
  MOD_RES (152)..(152): Selenocysteine
  MOD_RES (172)..(172): Selenocysteine
  MOD_RES (180)..(180): Selenocysteine
  MOD_RES (197)..(197): Selenocysteine
MFCQLAKXCPVQLWVDSXPPPGXRVRAMAIYKQSQHMXEVVRRCPHHERCSDSDGLAPPQHLIRVEGNLRVEYLDDRNXFRHSVVVPYEPPEVGSDCXXIHYNYMCNSSCMGGMNRRPILXIIXLEDSSGNLLGRNSFEVRVCACPGRDRRXEEENLRKKGEPHHELPPGSXKRALPNNXSSSPQPKKKPLDGEYFXLQMLLDLRWCYFLINSS

SEQ ID NO: 28301 - protein, 31 aa, Homo sapiens
  MOD_RES (1)..(1): Any amino acid
  MOD_RES (16)..(16): Selenocysteine
XSPQPKKKPLDGEYFXLQPPEVQKGSVYLPP

SEQ ID NO: 28302 - protein, 163 aa, Homo sapiens
  MOD_RES (10)..(10): Selenocysteine
  MOD_RES (13)..(13): Selenocysteine
  MOD_RES (77)..(77): Selenocysteine
  MOD_RES (80)..(80): Selenocysteine
  MOD_RES (106)..(106): Selenocysteine
  MOD_RES (108)..(108): Selenocysteine
  MOD_RES (115)..(116): Selenocysteine
  MOD_RES (118)..(118): Selenocysteine
  MOD_RES (122)..(122): Selenocysteine
  MOD_RES (140)..(140): Selenocysteine
  MOD_RES (156)..(156): Selenocysteine
LLCDPIPLDXEVXALSEDEYFSAGVVKGHRKESGELYYSIEKEGQRKWYKRMAVILSLEQGNRLREQYGLGPYEAVXPLXKAADISLDNLVEGKRKRRSNVSSPAXPXASSSSSXXPXRKIXESPRASMGVLSGKRKLIXSEEERSPAKRGRKSAXVKPGRHA

SEQ ID NO: 28303 - protein, 1972 aa, Homo sapiens
  MOD_RES (4)..(4): Selenocysteine
  MOD_RES (17)..(17): Selenocysteine
  MOD_RES (52)..(52): Selenocysteine
  MOD_RES (68)..(68): Selenocysteine
  MOD_RES (100)..(100): Selenocysteine
  MOD_RES (117)..(117): Selenocysteine
  MOD_RES (150)..(150): Selenocysteine
  MOD_RES (154)..(155): Selenocysteine
  MOD_RES (163)..(163): Selenocysteine
  MOD_RES (185)..(185): Selenocysteine
  MOD_RES (199)..(200): Selenocysteine
  MOD_RES (205)..(205): Selenocysteine
  MOD_RES (214)..(214): Selenocysteine
  MOD_RES (239)..(239): Selenocysteine
  MOD_RES (302)..(302): Selenocysteine
  MOD_RES (313)..(313): Selenocysteine
  MOD_RES (321)..(321): Selenocysteine
  MOD_RES (334)..(334): Selenocysteine
  MOD_RES (337)..(338): Selenocysteine
  MOD_RES (357)..(357): Selenocysteine
  MOD_RES (373)..(373): Selenocysteine
  MOD_RES (382)..(382): Selenocysteine
  MOD_RES (394)..(394): Selenocysteine
  MOD_RES (427)..(427): Selenocysteine
  MOD_RES (434)..(434): Selenocysteine
  MOD_RES (440)..(440): Selenocysteine
  MOD_RES (486)..(486): Selenocysteine
  MOD_RES (492)..(492): Selenocysteine
  MOD_RES (509)..(509): Selenocysteine
  MOD_RES (519)..(519): Selenocysteine
  MOD_RES (543)..(543): Selenocysteine
  MOD_RES (548)..(548): Selenocysteine
  MOD_RES (586)..(586): Selenocysteine
  MOD_RES (591)..(591): Selenocysteine
  MOD_RES (593)..(593): Selenocysteine
  MOD_RES (602)..(602): Selenocysteine
  MOD_RES (610)..(610): Selenocysteine
  MOD_RES (620)..(620): Selenocysteine
  MOD_RES (633)..(633): Selenocysteine
  MOD_RES (670)..(670): Selenocysteine
  MOD_RES (694)..(694): Selenocysteine
  MOD_RES (696)..(696): Selenocysteine
  MOD_RES (720)..(720): Selenocysteine
  MOD_RES (750)..(750): Selenocysteine
  MOD_RES (804)..(804): Selenocysteine
  MOD_RES (820)..(820): Selenocysteine
  MOD_RES (823)..(823): Selenocysteine
  MOD_RES (855)..(855): Selenocysteine
  MOD_RES (859)..(859): Selenocysteine
  MOD_RES (864)..(864): Selenocysteine
  MOD_RES (902)..(902): Selenocysteine
  MOD_RES (907)..(907): Selenocysteine
  MOD_RES (919)..(919): Selenocysteine
  MOD_RES (922)..(922): Selenocysteine
  MOD_RES (938)..(938): Selenocysteine
  MOD_RES (949)..(949): Selenocysteine
  MOD_RES (952)..(952): Selenocysteine
  MOD_RES (963)..(963): Selenocysteine
  MOD_RES (996)..(996): Selenocysteine
  MOD_RES (1012)..(1012): Selenocysteine
  MOD_RES (1020)..(1020): Selenocysteine
  MOD_RES (1032)..(1032): Selenocysteine
  MOD_RES (1055)..(1056): Selenocysteine
  MOD_RES (1082)..(1082): Selenocysteine
  MOD_RES (1122)..(1122): Selenocysteine
  MOD_RES (1134)..(1134): Selenocysteine
  MOD_RES (1156)..(1156): Selenocysteine
  MOD_RES (1166)..(1166): Selenocysteine
  MOD_RES (1171)..(1171): Selenocysteine
  MOD_RES (1173)..(1173): Selenocysteine
  MOD_RES (1182)..(1182): Selenocysteine
  MOD_RES (1184)..(1184): Selenocysteine
  MOD_RES (1195)..(1195): Selenocysteine
  MOD_RES (1198)..(1198): Selenocysteine
  MOD_RES (1214)..(1214): Selenocysteine
  MOD_RES (1242)..(1242): Selenocysteine
  MOD_RES (1248)..(1248): Selenocysteine
  MOD_RES (1251)..(1251): Selenocysteine
  MOD_RES (1255)..(1255): Selenocysteine
  MOD_RES (1263)..(1263): Selenocysteine
  MOD_RES (1270)..(1270): Selenocysteine
  MOD_RES (1273)..(1273): Selenocysteine
  MOD_RES (1285)..(1285): Selenocysteine
  MOD_RES (1292)..(1292): Selenocysteine
  MOD_RES (1315)..(1315): Selenocysteine
  MOD_RES (1319)..(1319): Selenocysteine
  MOD_RES (1341)..(1341): Selenocysteine
  MOD_RES (1344)..(1344): Selenocysteine
  MOD_RES (1370)..(1370): Selenocysteine
  MOD_RES (1372)..(1372): Selenocysteine
  MOD_RES (1394)..(1394): Selenocysteine
  MOD_RES (1408)..(1409): Selenocysteine
  MOD_RES (1411)..(1411): Selenocysteine
  MOD_RES (1414)..(1414): Selenocysteine
  MOD_RES (1447)..(1447): Selenocysteine
  MOD_RES (1450)..(1450): Selenocysteine
  MOD_RES (1507)..(1507): Selenocysteine
  MOD_RES (1542)..(1542): Selenocysteine
  MOD_RES (1545)..(1545): Selenocysteine
  MOD_RES (1609)..(1609): Selenocysteine
  MOD_RES (1612)..(1612): Selenocysteine
  MOD_RES (1638)..(1638): Selenocysteine
  MOD_RES (1640)..(1640): Selenocysteine
  MOD_RES (1647)..(1648): Selenocysteine
  MOD_RES (1650)..(1650): Selenocysteine
  MOD_RES (1654)..(1654): Selenocysteine
  MOD_RES (1672)..(1672): Selenocysteine
  MOD_RES (1688)..(1688): Selenocysteine
  MOD_RES (1709)..(1709): Selenocysteine
  MOD_RES (1727)..(1727): Selenocysteine
  MOD_RES (1737)..(1737): Selenocysteine
  MOD_RES (1740)..(1741): Selenocysteine
  MOD_RES (1756)..(1756): Selenocysteine
  MOD_RES (1776)..(1776): Selenocysteine
  MOD_RES (1798)..(1798): Selenocysteine
  MOD_RES (1812)..(1812): Selenocysteine
  MOD_RES (1894)..(1894): Selenocysteine
  MOD_RES (1922)..(1922): Selenocysteine
MDPXGSQLDSDFSQQDXPCLIIEDSQPESQVLEDDSGSHFSMLSRHLPNLQXHKENPVLDVVSNPEQXAGEERGDGNSGFNEHLKENKVADPVDSSNLDXCGSISQVIEQLPQPNRXSSVLGMSVESAPAVEEEKGEELEQKEKEKEEDXSGNXXHSLGAEDXASSQLGFGVLELSQSQDVEENXVPYEVDKEQLQSVXXNSGYXRLSDVDANXAIKHEEQSNEDIPIAEQSSKDIPVXAQPSKDVHVVKEQNPPPARSEDMPFSPKASVAAMEAKEQLSAQELMESGLQIQKSPEPEVLSXQEDLFDQSNKXVSSDGCSXPSREEGGCSLASXPAXXLHLLQLSGQRSLVQDSLSXNSSDLVAPSPDAFRSXPFIVPSSPXEQEGRQDKPMDXSVLSEEGGEPFQKKLQSGEPVELENPPLLPESXVSPQASXPISQSXPVFPPGSLPIPSQPQFSHDIFIPSPSLEEQSNDGKKDGDMHSSSLXVECSKXSEIEPKNSPEDLGLSLXGDSCKLMLSXSEYSQSPKMESLSSHRIDEDGENXQIEDXEPMSPVLNSKFVPAENDSILMNPAQDGEVQLSQNDDKXKGDDXDXRDDISILAXGCKGREEXVAEDVCIDLXCDSGSQAVPSPAXRSEALSSVLDQEEAMEIKEHHPEEGSSGSEVEEIPEXPCESQGEELKEENMESVPLHLSLXEXQSQGLCLQKEMPKKECSEAMEVEXSVISIDSPQKLAILDQELEHKEQEAWEEAXSEDSSVVIVDVKEPSPRVDVSCEPLEGVEKCSDSQSWEDIAPEIEPCAENRLDXKEEKSVEYEGDLKSGXAEXEPVEQDSSQPSLPLVRADDPLRLDQELQQPQXQEKXSNSLXEDSKMANAKQLSSDAEAQKLGKPSAHASQSFCESSSEXPFHFXLPKEGDIIPPLXGAXPPLIGHLKLEPKRHSXPIGISNYPESXIAXSDVMSESMVEXHDPILGSGKGDSGAAPDVDDKLCLRMKLVSPEXEASEESLQFNLEKPAXGERKNGSXAVAESVASPQKXMSVLSCICEARQENEARSEDPPXXPIRGNLLHFPSSQGEEEKEKLEGDHXIRQSQQPMKPISPVKDPVSPASQKMVIQGPSSPQGEAMVXDVLEDQKEGRSXNKENPSKALIERPSQNNIGIQXMECSLRVPEXVSAAXQXIKNVCEQGXSXVDQNFGKQDAXVQXERGSGEKPVSAPGDDXESLHSQGEEEFDMPQPPHGHVLHRHMRXIREVRXLVXRVIXDVYYVDGXEVERKVXEEXEEPIVECQECEXEVSPSQXGGSSGDLGDISSFSSKASSLHRXSSGXSLSAMHSSGSSGKGAGPLRGKXSGXEPADFALPSSRGGPGKLSPRKGVSQXGXPVCEEDGDAGLGIRQGGKAPVXPRGRGRRGRPPSRXXGXREXAVPGPLGIEDISPNLSPDDKSFSRVVPRVPDSXRRXDVGAGALRRSDSPEIPFQAAAGPSDGLDASSPGNSFVGLRVVAKWSSNGYFYSGKIXRDVGAGKYKLLFDDGYECDVLGKDILLCDPIPLDXEVXALSEDEYFSAGVVKGHRKESGELYYSIEKEGQRKWYKRMAVILSLEQGNRLREQYGLGPYEAVXPLXKAADISLDNLVEGKRKRRSNVSSPAXPXASSSSSXXPXRKIXESPRASMGVLSGKRKLIXSEEERSPAKRGRKSAXVKPGAVGAGEFVSPCESGDNXGEPSALEEQRGPLPLNKXLFLGYAFLLXMAXXSDKLASRSKLPDGPXGSSEEEEEFLEIPPFNKQYXESQLRAGAGYILEDFNEAQCNXAYQCLLIADQHCRXRKYFLCLASGIPCVSHVWVHDSCHANQLQNYRNYLLPAGYSLEEQRILDWQPRENPFQNLKVLLVSDQQQNFLELWSEILMXGGAASVKQHHSSAHNKDIALGVFDVVVXDPSCPASVLKCAEALQLPVVSQEWVIQCLIVGERIGFKQHPKYKHDYVSH

SEQ ID NO: 28304 - protein, 1033 aa, Homo sapiens
  MOD_RES (9)..(9): Selenocysteine
  MOD_RES (22)..(22): Selenocysteine
  MOD_RES (57)..(57): Selenocysteine
  MOD_RES (73)..(73): Selenocysteine
  MOD_RES (105)..(105): Selenocysteine
  MOD_RES (122)..(122): Selenocysteine
  MOD_RES (155)..(155): Selenocysteine
  MOD_RES (159)..(160): Selenocysteine
  MOD_RES (168)..(168): Selenocysteine
  MOD_RES (190)..(190): Selenocysteine
  MOD_RES (204)..(205): Selenocysteine
  MOD_RES (210)..(210): Selenocysteine
  MOD_RES (219)..(219): Selenocysteine
  MOD_RES (244)..(244): Selenocysteine
  MOD_RES (307)..(307): Selenocysteine
  MOD_RES (318)..(318): Selenocysteine
  MOD_RES (326)..(326): Selenocysteine
  MOD_RES (339)..(339): Selenocysteine
  MOD_RES (342)..(343): Selenocysteine
  MOD_RES (362)..(362): Selenocysteine
  MOD_RES (378)..(378): Selenocysteine
  MOD_RES (387)..(387): Selenocysteine
  MOD_RES (399)..(399): Selenocysteine
  MOD_RES (432)..(432): Selenocysteine
  MOD_RES (439)..(439): Selenocysteine
  MOD_RES (445)..(445): Selenocysteine
  MOD_RES (491)..(491): Selenocysteine
  MOD_RES (497)..(497): Selenocysteine
  MOD_RES (514)..(514): Selenocysteine
  MOD_RES (524)..(524): Selenocysteine
  MOD_RES (548)..(548): Selenocysteine
  MOD_RES (553)..(553): Selenocysteine
  MOD_RES (591)..(591): Selenocysteine
  MOD_RES (596)..(596): Selenocysteine
  MOD_RES (598)..(598): Selenocysteine
  MOD_RES (607)..(607): Selenocysteine
  MOD_RES (615)..(615): Selenocysteine
  MOD_RES (625)..(625): Selenocysteine
  MOD_RES (638)..(638): Selenocysteine
  MOD_RES (675)..(675): Selenocysteine
  MOD_RES (699)..(699): Selenocysteine
  MOD_RES (701)..(701): Selenocysteine
  MOD_RES (725)..(725): Selenocysteine
  MOD_RES (755)..(755): Selenocysteine
  MOD_RES (809)..(809): Selenocysteine
  MOD_RES (825)..(825): Selenocysteine
  MOD_RES (828)..(828): Selenocysteine
  MOD_RES (860)..(860): Selenocysteine
  MOD_RES (864)..(864): Selenocysteine
  MOD_RES (869)..(869): Selenocysteine
  MOD_RES (914)..(914): Selenocysteine
  MOD_RES (917)..(917): Selenocysteine
  MOD_RES (928)..(928): Selenocysteine
  MOD_RES (961)..(961): Selenocysteine
  MOD_RES (977)..(977): Selenocysteine
  MOD_RES (985)..(985): Selenocysteine
  MOD_RES (997)..(997): Selenocysteine
  MOD_RES (1020)..(1021): Selenocysteine
MPGEQMDPXGSQLDSDFSQQDXPCLIIEDSQPESQVLEDDSGSHFSMLSRHLPNLQXHKENPVLDVVSNPEQXAGEERGDGNSGFNEHLKENKVADPVDSSNLDXCGSISQVIEQLPQPNRXSSVLGMSVESAPAVEEEKGEELEQKEKEKEEDXSGNXXHSLGAEDXASSQLGFGVLELSQSQDVEENXVPYEVDKEQLQSVXXNSGYXRLSDVDANXAIKHEEQSNEDIPIAEQSSKDIPVXAQPSKDVHVVKEQNPPPARSEDMPFSPKASVAAMEAKEQLSAQELMESGLQIQKSPEPEVLSXQEDLFDQSNKXVSSDGCSXPSREEGGCSLASXPAXXLHLLQLSGQRSLVQDSLSXNSSDLVAPSPDAFRSXPFIVPSSPXEQEGRQDKPMDXSVLSEEGGEPFQKKLQSGEPVELENPPLLPESXVSPQASXPISQSXPVFPPGSLPIPSQPQFSHDIFIPSPSLEEQSNDGKKDGDMHSSSLXVECSKXSEIEPKNSPEDLGLSLXGDSCKLMLSXSEYSQSPKMESLSSHRIDEDGENXQIEDXEPMSPVLNSKFVPAENDSILMNPAQDGEVQLSQNDDKXKGDDXDXRDDISILAXGCKGREEXVAEDVCIDLXCDSGSQAVPSPAXRSEALSSVLDQEEAMEIKEHHPEEGSSGSEVEEIPEXPCESQGEELKEENMESVPLHLSLXEXQSQGLCLQKEMPKKECSEAMEVEXSVISIDSPQKLAILDQELEHKEQEAWEEAXSEDSSVVIVDVKEPSPRVDVSCEPLEGVEKCSDSQSWEDIAPEIEPCAENRLDXKEEKSVEYEGDLKSGXAEXEPVEQDSSQPSLPLVRADDPLRLDQELQQPQXQEKXSNSLXEDSKMANAKQLSSDAEAQKLGKPSAHASQSFCESSSGISNYPESXIAXSDVMSESMVEXHDPILGSGKGDSGAAPDVDDKLCLRMKLVSPEXEASEESLQFNLEKPAXGERKNGSXAVAESVASPQKXMSVLSCICEARQENEARSEDPPXXPIRGNLLHFPSS

SEQ ID NO: 28305 - protein, 1927 aa, Homo sapiens
  MOD_RES (9)..(9): Selenocysteine
  MOD_RES (22)..(22): Selenocysteine
  MOD_RES (57)..(57): Selenocysteine
  MOD_RES (73)..(73): Selenocysteine
  MOD_RES (105)..(105): Selenocysteine
  MOD_RES (122)..(122): Selenocysteine
  MOD_RES (155)..(155): Selenocysteine
  MOD_RES (159)..(160): Selenocysteine
  MOD_RES (168)..(168): Selenocysteine
  MOD_RES (190)..(190): Selenocysteine
  MOD_RES (204)..(205): Selenocysteine
  MOD_RES (210)..(210): Selenocysteine
  MOD_RES (219)..(219): Selenocysteine
  MOD_RES (244)..(244): Selenocysteine
  MOD_RES (307)..(307): Selenocysteine
  MOD_RES (318)..(318): Selenocysteine
  MOD_RES (326)..(326): Selenocysteine
  MOD_RES (339)..(339): Selenocysteine
  MOD_RES (342)..(343): Selenocysteine
  MOD_RES (362)..(362): Selenocysteine
  MOD_RES (378)..(378): Selenocysteine
  MOD_RES (387)..(387): Selenocysteine
  MOD_RES (399)..(399): Selenocysteine
  MOD_RES (432)..(432): Selenocysteine
  MOD_RES (439)..(439): Selenocysteine
  MOD_RES (445)..(445): Selenocysteine
  MOD_RES (491)..(491): Selenocysteine
  MOD_RES (497)..(497): Selenocysteine
  MOD_RES (514)..(514): Selenocysteine
  MOD_RES (524)..(524): Selenocysteine
  MOD_RES (548)..(548): Selenocysteine
  MOD_RES (553)..(553): Selenocysteine
  MOD_RES (591)..(591): Selenocysteine
  MOD_RES (596)..(596): Selenocysteine
  MOD_RES (598)..(598): Selenocysteine
  MOD_RES (607)..(607): Selenocysteine
  MOD_RES (615)..(615): Selenocysteine
  MOD_RES (625)..(625): Selenocysteine
  MOD_RES (638)..(638): Selenocysteine
  MOD_RES (675)..(675): Selenocysteine
  MOD_RES (699)..(699): Selenocysteine
  MOD_RES (701)..(701): Selenocysteine
  MOD_RES (725)..(725): Selenocysteine
  MOD_RES (755)..(755): Selenocysteine
  MOD_RES (809)..(809): Selenocysteine
  MOD_RES (825)..(825): Selenocysteine
  MOD_RES (828)..(828): Selenocysteine
  MOD_RES (860)..(860): Selenocysteine
  MOD_RES (864)..(864): Selenocysteine
  MOD_RES (869)..(869): Selenocysteine
  MOD_RES (907)..(907): Selenocysteine
  MOD_RES (912)..(912): Selenocysteine
  MOD_RES (924)..(924): Selenocysteine
  MOD_RES (927)..(927): Selenocysteine
  MOD_RES (943)..(943): Selenocysteine
  MOD_RES (954)..(954): Selenocysteine
  MOD_RES (957)..(957): Selenocysteine
  MOD_RES (968)..(968): Selenocysteine
  MOD_RES (1001)..(1001): Selenocysteine
  MOD_RES (1017)..(1017): Selenocysteine
  MOD_RES (1025)..(1025): Selenocysteine
  MOD_RES (1037)..(1037): Selenocysteine
  MOD_RES (1060)..(1061): Selenocysteine
  MOD_RES (1087)..(1087): Selenocysteine
  MOD_RES (1127)..(1127): Selenocysteine
  MOD_RES (1139)..(1139): Selenocysteine
  MOD_RES (1161)..(1161): Selenocysteine
  MOD_RES (1171)..(1171): Selenocysteine
  MOD_RES (1176)..(1176): Selenocysteine
  MOD_RES (1178)..(1178): Selenocysteine
  MOD_RES (1187)..(1187): Selenocysteine
  MOD_RES (1189)..(1189): Selenocysteine
  MOD_RES (1200)..(1200): Selenocysteine
  MOD_RES (1203)..(1203): Selenocysteine
  MOD_RES (1219)..(1219): Selenocysteine
  MOD_RES (1247)..(1247): Selenocysteine
  MOD_RES (1253)..(1253): Selenocysteine
  MOD_RES (1256)..(1256): Selenocysteine
  MOD_RES (1260)..(1260): Selenocysteine
  MOD_RES (1268)..(1268): Selenocysteine
  MOD_RES (1275)..(1275): Selenocysteine
  MOD_RES (1278)..(1278): Selenocysteine
  MOD_RES (1290)..(1290): Selenocysteine
  MOD_RES (1297)..(1297): Selenocysteine
  MOD_RES (1320)..(1320): Selenocysteine
  MOD_RES (1324)..(1324): Selenocysteine
  MOD_RES (1346)..(1346): Selenocysteine
  MOD_RES (1349)..(1349): Selenocysteine
  MOD_RES (1369)..(1369): Selenocysteine
  MOD_RES (1402)..(1402): Selenocysteine
  MOD_RES (1405)..(1405): Selenocysteine
  MOD_RES (1462)..(1462): Selenocysteine
  MOD_RES (1497)..(1497): Selenocysteine
  MOD_RES (1500)..(1500): Selenocysteine
  MOD_RES (1564)..(1564): Selenocysteine
  MOD_RES (1567)..(1567): Selenocysteine
  MOD_RES (1593)..(1593): Selenocysteine
  MOD_RES (1595)..(1595): Selenocysteine
  MOD_RES (1602)..(1603): Selenocysteine
  MOD_RES (1605)..(1605): Selenocysteine
  MOD_RES (1609)..(1609): Selenocysteine
  MOD_RES (1627)..(1627): Selenocysteine
  MOD_RES (1643)..(1643): Selenocysteine
  MOD_RES (1664)..(1664): Selenocysteine
  MOD_RES (1682)..(1682): Selenocysteine
  MOD_RES (1692)..(1692): Selenocysteine
  MOD_RES (1695)..(1696): Selenocysteine
  MOD_RES (1711)..(1711): Selenocysteine
  MOD_RES (1731)..(1731): Selenocysteine
  MOD_RES (1753)..(1753): Selenocysteine
  MOD_RES (1767)..(1767): Selenocysteine
  MOD_RES (1849)..(1849): Selenocysteine
  MOD_RES (1877)..(1877): Selenocysteine
MPGEQMDPXGSQLDSDFSQQDXPCLIIEDSQPESQVLEDDSGSHFSMLSRHLPNLQXHKENPVLDVVSNPEQXAGEERGDGNSGFNEHLKENKVADPVDSSNLDXCGSISQVIEQLPQPNRXSSVLGMSVESAPAVEEEKGEELEQKEKEKEEDXSGNXXHSLGAEDXASSQLGFGVLELSQSQDVEENXVPYEVDKEQLQSVXXNSGYXRLSDVDANXAIKHEEQSNEDIPIAEQSSKDIPVXAQPSKDVHVVKEQNPPPARSEDMPFSPKASVAAMEAKEQLSAQELMESGLQIQKSPEPEVLSXQEDLFDQSNKXVSSDGCSXPSREEGGCSLASXPAXXLHLLQLSGQRSLVQDSLSXNSSDLVAPSPDAFRSXPFIVPSSPXEQEGRQDKPMDXSVLSEEGGEPFQKKLQSGEPVELENPPLLPESXVSPQASXPISQSXPVFPPGSLPIPSQPQFSHDIFIPSPSLEEQSNDGKKDGDMHSSSLXVECSKXSEIEPKNSPEDLGLSLXGDSCKLMLSXSEYSQSPKMESLSSHRIDEDGENXQIEDXEPMSPVLNSKFVPAENDSILMNPAQDGEVQLSQNDDKXKGDDXDXRDDISILAXGCKGREEXVAEDVCIDLXCDSGSQAVPSPAXRSEALSSVLDQEEAMEIKEHHPEEGSSGSEVEEIPEXPCESQGEELKEENMESVPLHLSLXEXQSQGLCLQKEMPKKECSEAMEVEXSVISIDSPQKLAILDQELEHKEQEAWEEAXSEDSSVVIVDVKEPSPRVDVSCEPLEGVEKCSDSQSWEDIAPEIEPCAENRLDXKEEKSVEYEGDLKSGXAEXEPVEQDSSQPSLPLVRADDPLRLDQELQQPQXQEKXSNSLXEDSKMANAKQLSSDAEAQKLGKPSAHASQSFCESSSEXPFHFXLPKEGDIIPPLXGAXPPLIGHLKLEPKRHSXPIGISNYPESXIAXSDVMSESMVEXHDPILGSGKGDSGAAPDVDDKLCLRMKLVSPEXEASEESLQFNLEKPAXGERKNGSXAVAESVASPQKXMSVLSCICEARQENEARSEDPPXXPIRGNLLHFPSSQGEEEKEKLEGDHXIRQSQQPMKPISPVKDPVSPASQKMVIQGPSSPQGEAMVXDVLEDQKEGRSXNKENPSKALIERPSQNNIGIQXMECSLRVPEXVSAAXQXIKNVCEQGXSXVDQNFGKQDAXVQXERGSGEKPVSAPGDDXESLHSQGEEEFDMPQPPHGHVLHRHMRXIREVRXLVXRVIXDVYYVDGXEVERKVXEEXEEPIVECQECEXEVSPSQXGGSSGDLGDISSFSSKASSLHRXSSGXSLSAMHSSGSSGKGAGPLRGKXSGXEPADFALPSSRGGPGKLREXAVPGPLGIEDISPNLSPDDKSFSRVVPRVPDSXRRXDVGAGALRRSDSPEIPFQAAAGPSDGLDASSPGNSFVGLRVVAKWSSNGYFYSGKIXRDVGAGKYKLLFDDGYECDVLGKDILLCDPIPLDXEVXALSEDEYFSAGVVKGHRKESGELYYSIEKEGQRKWYKRMAVILSLEQGNRLREQYGLGPYEAVXPLXKAADISLDNLVEGKRKRRSNVSSPAXPXASSSSSXXPXRKIXESPRASMGVLSGKRKLIXSEEERSPAKRGRKSAXVKPGAVGAGEFVSPCESGDNXGEPSALEEQRGPLPLNKXLFLGYAFLLXMAXXSDKLASRSKLPDGPXGSSEEEEEFLEIPPFNKQYXESQLRAGAGYILEDFNEAQCNXAYQCLLIADQHCRXRKYFLCLASGIPCVSHVWVHDSCHANQLQNYRNYLLPAGYSLEEQRILDWQPRENPFQNLKVLLVSDQQQNFLELWSEILMXGGAASVKQHHSSAHNKDIALGVFDVVVXDPSCPASVLKCAEALQLPVVSQEWVIQCLIVGERIGFKQHPKYKHDYVSH

SEQ ID NO: 28306 - protein, 1975 aa, Homo sapiens
  MOD_RES (9)..(9): Selenocysteine
  MOD_RES (22)..(22): Selenocysteine
  MOD_RES (57)..(57): Selenocysteine
  MOD_RES (73)..(73): Selenocysteine
  MOD_RES (105)..(105): Selenocysteine
  MOD_RES (122)..(122): Selenocysteine
  MOD_RES (155)..(155): Selenocysteine
  MOD_RES (159)..(160): Selenocysteine
  MOD_RES (168)..(168): Selenocysteine
  MOD_RES (190)..(190): Selenocysteine
  MOD_RES (204)..(205): Selenocysteine
  MOD_RES (210)..(210): Selenocysteine
  MOD_RES (219)..(219): Selenocysteine
  MOD_RES (244)..(244): Selenocysteine
  MOD_RES (307)..(307): Selenocysteine
  MOD_RES (318)..(318): Selenocysteine
  MOD_RES (326)..(326): Selenocysteine
  MOD_RES (339)..(339): Selenocysteine
  MOD_RES (342)..(343): Selenocysteine
  MOD_RES (362)..(362): Selenocysteine
  MOD_RES (378)..(378): Selenocysteine
  MOD_RES (387)..(387): Selenocysteine
  MOD_RES (399)..(399): Selenocysteine
  MOD_RES (432)..(432): Selenocysteine
  MOD_RES (439)..(439): Selenocysteine
  MOD_RES (445)..(445): Selenocysteine
  MOD_RES (491)..(491): Selenocysteine
  MOD_RES (497)..(497): Selenocysteine
  MOD_RES (514)..(514): Selenocysteine
  MOD_RES (524)..(524): Selenocysteine
  MOD_RES (548)..(548): Selenocysteine
  MOD_RES (553)..(553): Selenocysteine
  MOD_RES (591)..(591): Selenocysteine
  MOD_RES (596)..(596): Selenocysteine
  MOD_RES (598)..(598): Selenocysteine
  MOD_RES (607)..(607): Selenocysteine
  MOD_RES (615)..(615): Selenocysteine
  MOD_RES (625)..(625): Selenocysteine
  MOD_RES (638)..(638): Selenocysteine
  MOD_RES (675)..(675): Selenocysteine
  MOD_RES (699)..(699): Selenocysteine
  MOD_RES (701)..(701): Selenocysteine
  MOD_RES (725)..(725): Selenocysteine
  MOD_RES (755)..(755): Selenocysteine
  MOD_RES (809)..(809): Selenocysteine
  MOD_RES (825)..(825): Selenocysteine
  MOD_RES (828)..(828): Selenocysteine
  MOD_RES (860)..(860): Selenocysteine
  MOD_RES (864)..(864): Selenocysteine
  MOD_RES (869)..(869): Selenocysteine
  MOD_RES (907)..(907): Selenocysteine
  MOD_RES (912)..(912): Selenocysteine
  MOD_RES (924)..(924): Selenocysteine
  MOD_RES (927)..(927): Selenocysteine
  MOD_RES (943)..(943): Selenocysteine
  MOD_RES (954)..(954): Selenocysteine
  MOD_RES (957)..(957): Selenocysteine
  MOD_RES (968)..(968): Selenocysteine
  MOD_RES (1001)..(1001): Selenocysteine
  MOD_RES (1017)..(1017): Selenocysteine
  MOD_RES (1025)..(1025): Selenocysteine
  MOD_RES (1037)..(1037): Selenocysteine
  MOD_RES (1060)..(1061): Selenocysteine
  MOD_RES (1087)..(1087): Selenocysteine
  MOD_RES (1127)..(1127): Selenocysteine
  MOD_RES (1139)..(1139): Selenocysteine
  MOD_RES (1161)..(1161): Selenocysteine
  MOD_RES (1171)..(1171): Selenocysteine
  MOD_RES (1176)..(1176): Selenocysteine
  MOD_RES (1178)..(1178): Selenocysteine
  MOD_RES (1187)..(1187): Selenocysteine
  MOD_RES (1189)..(1189): Selenocysteine
  MOD_RES (1200)..(1200): Selenocysteine
  MOD_RES (1203)..(1203): Selenocysteine
  MOD_RES (1219)..(1219): Selenocysteine
  MOD_RES (1247)..(1247): Selenocysteine
  MOD_RES (1253)..(1253): Selenocysteine
  MOD_RES (1256)..(1256): Selenocysteine
  MOD_RES (1260)..(1260): Selenocysteine
  MOD_RES (1268)..(1268): Selenocysteine
  MOD_RES (1275)..(1275): Selenocysteine
  MOD_RES (1278)..(1278): Selenocysteine
  MOD_RES (1290)..(1290): Selenocysteine
  MOD_RES (1297)..(1297): Selenocysteine
  MOD_RES (1320)..(1320): Selenocysteine
  MOD_RES (1324)..(1324): Selenocysteine
  MOD_RES (1346)..(1346): Selenocysteine
  MOD_RES (1349)..(1349): Selenocysteine
  MOD_RES (1375)..(1375): Selenocysteine
  MOD_RES (1377)..(1377): Selenocysteine
  MOD_RES (1399)..(1399): Selenocysteine
  MOD_RES (1413)..(1414): Selenocysteine
  MOD_RES (1416)..(1416): Selenocysteine
  MOD_RES (1419)..(1419): Selenocysteine
  MOD_RES (1452)..(1452): Selenocysteine
  MOD_RES (1455)..(1455): Selenocysteine
  MOD_RES (1512)..(1512): Selenocysteine
  MOD_RES (1547)..(1547): Selenocysteine
  MOD_RES (1550)..(1550): Selenocysteine
  MOD_RES (1614)..(1614): Selenocysteine
  MOD_RES (1617)..(1617): Selenocysteine
  MOD_RES (1643)..(1643): Selenocysteine
  MOD_RES (1645)..(1645): Selenocysteine
  MOD_RES (1652)..(1653): Selenocysteine
  MOD_RES (1655)..(1655): Selenocysteine
  MOD_RES (1659)..(1659): Selenocysteine
  MOD_RES (1677)..(1677): Selenocysteine
  MOD_RES (1693)..(1693): Selenocysteine
  MOD_RES (1712)..(1712): Selenocysteine
  MOD_RES (1730)..(1730): Selenocysteine
  MOD_RES (1740)..(1740): Selenocysteine
  MOD_RES (1743)..(1744): Selenocysteine
  MOD_RES (1759)..(1759): Selenocysteine
  MOD_RES (1779)..(1779): Selenocysteine
  MOD_RES (1801)..(1801): Selenocysteine
  MOD_RES (1815)..(1815): Selenocysteine
  MOD_RES (1897)..(1897): Selenocysteine
  MOD_RES (1925)..(1925): Selenocysteine
MPGEQMDPXGSQLDSDFSQQDXPCLIIEDSQPESQVLEDDSGSHFSMLSRHLPNLQXHKENPVLDVVSNPEQXAGEERGDGNSGFNEHLKENKVADPVDSSNLDXCGSISQVIEQLPQPNRXSSVLGMSVESAPAVEEEKGEELEQKEKEKEEDXSGNXXHSLGAEDXASSQLGFGVLELSQSQDVEENXVPYEVDKEQLQSVXXNSGYXRLSDVDANXAIKHEEQSNEDIPIAEQSSKDIPVXAQPSKDVHVVKEQNPPPARSEDMPFSPKASVAAMEAKEQLSAQELMESGLQIQKSPEPEVLSXQEDLFDQSNKXVSSDGCSXPSREEGGCSLASXPAXXLHLLQLSGQRSLVQDSLSXNSSDLVAPSPDAFRSXPFIVPSSPXEQEGRQDKPMDXSVLSEEGGEPFQKKLQSGEPVELENPPLLPESXVSPQASXPISQSXPVFPPGSLPIPSQPQFSHDIFIPSPSLEEQSNDGKKDGDMHSSSLXVECSKXSEIEPKNSPEDLGLSLXGDSCKLMLSXSEYSQSPKMESLSSHRIDEDGENXQIEDXEPMSPVLNSKFVPAENDSILMNPAQDGEVQLSQNDDKXKGDDXDXRDDISILAXGCKGREEXVAEDVCIDLXCDSGSQAVPSPAXRSEALSSVLDQEEAMEIKEHHPEEGSSGSEVEEIPEXPCESQGEELKEENMESVPLHLSLXEXQSQGLCLQKEMPKKECSEAMEVEXSVISIDSPQKLAILDQELEHKEQEAWEEAXSEDSSVVIVDVKEPSPRVDVSCEPLEGVEKCSDSQSWEDIAPEIEPCAENRLDXKEEKSVEYEGDLKSGXAEXEPVEQDSSQPSLPLVRADDPLRLDQELQQPQXQEKXSNSLXEDSKMANAKQLSSDAEAQKLGKPSAHASQSFCESSSEXPFHFXLPKEGDIIPPLXGAXPPLIGHLKLEPKRHSXPIGISNYPESXIAXSDVMSESMVEXHDPILGSGKGDSGAAPDVDDKLCLRMKLVSPEXEASEESLQFNLEKPAXGERKNGSXAVAESVASPQKXMSVLSCICEARQENEARSEDPPXXPIRGNLLHFPSSQGEEEKEKLEGDHXIRQSQQPMKPISPVKDPVSPASQKMVIQGPSSPQGEAMVXDVLEDQKEGRSXNKENPSKALIERPSQNNIGIQXMECSLRVPEXVSAAXQXIKNVCEQGXSXVDQNFGKQDAXVQXERGSGEKPVSAPGDDXESLHSQGEEEFDMPQPPHGHVLHRHMRXIREVRXLVXRVIXDVYYVDGXEVERKVXEEXEEPIVECQECEXEVSPSQXGGSSGDLGDISSFSSKASSLHRXSSGXSLSAMHSSGSSGKGAGPLRGKXSGXEPADFALPSSRGGPGKLSPRKGVSQXGXPVCEEDGDAGLGIRQGGKAPVXPRGRGRRGRPPSRXXGXREXAVPGPLGIEDISPNLSPDDKSFSRVVPRVPDSXRRXDVGAGALRRSDSPEIPFQAAAGPSDGLDASSPGNSFVGLRVVAKWSSNGYFYSGKIXRDVGAGKYKLLFDDGYECDVLGKDILLCDPIPLDXEVXALSEDEYFSAGVVKGHRKESGELYYSIEKEGQRKWYKRMAVILSLEQGNRLREQYGLGPYEAVXPLXKAADISLDNLVEGKRKRRSNVSSPAXPXASSSSSXXPXRKIXESPRASMGVLSGKRKLIXSEEERSPAKRGRKSAXVKPVGAGEFVSPCESGDNXGEPSALEEQRGPLPLNKXLFLGYAFLLXMAXXSDKLASRSKLPDGPXGSSEEEEEFLEIPPFNKQYXESQLRAGAGYILEDFNEAQCNXAYQCLLIADQHCRXRKYFLCLASGIPCVSHVWVHDSCHANQLQNYRNYLLPAGYSLEEQRILDWQPRENPFQNLKVLLVSDQQQNFLELWSEILMXGGAASVKQHHSSAHNKDIALGVFDVVVXDPSCPASVLKCAEALQLPVVSQEWVIQCLIVGERIGFKQHPKYKHDYVSH

SEQ ID NO: 28307 - protein, 1977 aa, Homo sapiens
  MOD_RES (9)..(9): Selenocysteine
  MOD_RES (22)..(22): Selenocysteine
  MOD_RES (57)..(57): Selenocysteine
  MOD_RES (73)..(73): Selenocysteine
  MOD_RES (105)..(105): Selenocysteine
  MOD_RES (122)..(122): Selenocysteine
  MOD_RES (155)..(155): Selenocysteine
  MOD_RES (159)..(160): Selenocysteine
  MOD_RES (168)..(168): Selenocysteine
  MOD_RES (190)..(190): Selenocysteine
  MOD_RES (204)..(205): Selenocysteine
  MOD_RES (210)..(210): Selenocysteine
  MOD_RES (219)..(219): Selenocysteine
  MOD_RES (244)..(244): Selenocysteine
  MOD_RES (307)..(307): Selenocysteine
  MOD_RES (318)..(318): Selenocysteine
  MOD_RES (326)..(326): Selenocysteine
  MOD_RES (339)..(339): Selenocysteine
  MOD_RES (342)..(343): Selenocysteine
  MOD_RES (362)..(362): Selenocysteine
  MOD_RES (378)..(378): Selenocysteine
  MOD_RES (387)..(387): Selenocysteine
  MOD_RES (399)..(399): Selenocysteine
  MOD_RES (432)..(432): Selenocysteine
  MOD_RES (439)..(439): Selenocysteine
  MOD_RES (445)..(445): Selenocysteine
  MOD_RES (491)..(491): Selenocysteine
  MOD_RES (497)..(497): Selenocysteine
  MOD_RES (514)..(514): Selenocysteine
  MOD_RES (524)..(524): Selenocysteine
  MOD_RES (548)..(548): Selenocysteine
  MOD_RES (553)..(553): Selenocysteine
  MOD_RES (591)..(591): Selenocysteine
  MOD_RES (596)..(596): Selenocysteine
  MOD_RES (598)..(598): Selenocysteine
  MOD_RES (607)..(607): Selenocysteine
  MOD_RES (615)..(615): Selenocysteine
  MOD_RES (625)..(625): Selenocysteine
  MOD_RES (638)..(638): Selenocysteine
  MOD_RES (675)..(675): Selenocysteine
  MOD_RES (699)..(699): Selenocysteine
  MOD_RES (701)..(701): Selenocysteine
  MOD_RES (725)..(725): Selenocysteine
  MOD_RES (755)..(755): Selenocysteine
  MOD_RES (809)..(809): Selenocysteine
  MOD_RES (825)..(825): Selenocysteine
  MOD_RES (828)..(828): Selenocysteine
  MOD_RES (860)..(860): Selenocysteine
  MOD_RES (864)..(864): Selenocysteine
  MOD_RES (869)..(869): Selenocysteine
  MOD_RES (907)..(907): Selenocysteine
  MOD_RES (912)..(912): Selenocysteine
  MOD_RES (924)..(924): Selenocysteine
  MOD_RES (927)..(927): Selenocysteine
  MOD_RES (943)..(943): Selenocysteine
  MOD_RES (954)..(954): Selenocysteine
  MOD_RES (957)..(957): Selenocysteine
  MOD_RES (968)..(968): Selenocysteine
  MOD_RES (1001)..(1001): Selenocysteine
  MOD_RES (1017)..(1017): Selenocysteine
  MOD_RES (1025)..(1025): Selenocysteine
  MOD_RES (1037)..(1037): Selenocysteine
  MOD_RES (1060)..(1061): Selenocysteine
  MOD_RES (1087)..(1087): Selenocysteine
  MOD_RES (1127)..(1127): Selenocysteine
  MOD_RES (1139)..(1139): Selenocysteine
  MOD_RES (1161)..(1161): Selenocysteine
  MOD_RES (1171)..(1171): Selenocysteine
  MOD_RES (1176)..(1176): Selenocysteine
  MOD_RES (1178)..(1178): Selenocysteine
  MOD_RES (1187)..(1187): Selenocysteine
  MOD_RES (1189)..(1189): Selenocysteine
  MOD_RES (1200)..(1200): Selenocysteine
  MOD_RES (1203)..(1203): Selenocysteine
  MOD_RES (1219)..(1219): Selenocysteine
  MOD_RES (1247)..(1247): Selenocysteine
  MOD_RES (1253)..(1253): Selenocysteine
  MOD_RES (1256)..(1256): Selenocysteine
  MOD_RES (1260)..(1260): Selenocysteine
  MOD_RES (1268)..(1268): Selenocysteine
  MOD_RES (1275)..(1275): Selenocysteine
  MOD_RES (1278)..(1278): Selenocysteine
  MOD_RES (1290)..(1290): Selenocysteine
  MOD_RES (1297)..(1297): Selenocysteine
  MOD_RES (1320)..(1320): Selenocysteine
  MOD_RES (1324)..(1324): Selenocysteine
  MOD_RES (1346)..(1346): Selenocysteine
  MOD_RES (1349)..(1349): Selenocysteine
  MOD_RES (1375)..(1375): Selenocysteine
  MOD_RES (1377)..(1377): Selenocysteine
  MOD_RES (1399)..(1399): Selenocysteine
  MOD_RES (1413)..(1414): Selenocysteine
  MOD_RES (1416)..(1416): Selenocysteine
  MOD_RES (1419)..(1419): Selenocysteine
  MOD_RES (1452)..(1452): Selenocysteine
  MOD_RES (1455)..(1455): Selenocysteine
  MOD_RES (1512)..(1512): Selenocysteine
  MOD_RES (1547)..(1547): Selenocysteine
  MOD_RES (1550)..(1550): Selenocysteine
  MOD_RES (1614)..(1614): Selenocysteine
  MOD_RES (1617)..(1617): Selenocysteine
  MOD_RES (1643)..(1643): Selenocysteine
  MOD_RES (1645)..(1645): Selenocysteine
  MOD_RES (1652)..(1653): Selenocysteine
  MOD_RES (1655)..(1655): Selenocysteine
  MOD_RES (1659)..(1659): Selenocysteine
  MOD_RES (1677)..(1677): Selenocysteine
  MOD_RES (1693)..(1693): Selenocysteine
  MOD_RES (1714)..(1714): Selenocysteine
  MOD_RES (1732)..(1732): Selenocysteine
  MOD_RES (1742)..(1742): Selenocysteine
  MOD_RES (1745)..(1746): Selenocysteine
  MOD_RES (1761)..(1761): Selenocysteine
  MOD_RES (1781)..(1781): Selenocysteine
  MOD_RES (1803)..(1803): Selenocysteine
  MOD_RES (1817)..(1817): Selenocysteine
  MOD_RES (1899)..(1899): Selenocysteine
  MOD_RES (1927)..(1927): Selenocysteine
MPGEQMDPXGSQLDSDFSQQDXPCLIIEDSQPESQVLEDDSGSHFSMLSRHLPNLQXHKENPVLDVVSNPEQXAGEERGDGNSGFNEHLKENKVADPVDSSNLDXCGSISQVIEQLPQPNRXSSVLGMSVESAPAVEEEKGEELEQKEKEKEEDXSGNXXHSLGAEDXASSQLGFGVLELSQSQDVEENXVPYEVDKEQLQSVXXNSGYXRLSDVDANXAIKHEEQSNEDIPIAEQSSKDIPVXAQPSKDVHVVKEQNPPPARSEDMPFSPKASVAAMEAKEQLSAQELMESGLQIQKSPEPEVLSXQEDLFDQSNKXVSSDGCSXPSREEGGCSLASXPAXXLHLLQLSGQRSLVQDSLSXNSSDLVAPSPDAFRSXPFIVPSSPXEQEGRQDKPMDXSVLSEEGGEPFQKKLQSGEPVELENPPLLPESXVSPQASXPISQSXPVFPPGSLPIPSQPQFSHDIFIPSPSLEEQSNDGKKDGDMHSSSLXVECSKXSEIEPKNSPEDLGLSLXGDSCKLMLSXSEYSQSPKMESLSSHRIDEDGENXQIEDXEPMSPVLNSKFVPAENDSILMNPAQDGEVQLSQNDDKXKGDDXDXRDDISILAXGCKGREEXVAEDVCIDLXCDSGSQAVPSPAXRSEALSSVLDQEEAMEIKEHHPEEGSSGSEVEEIPEXPCESQGEELKEENMESVPLHLSLXEXQSQGLCLQKEMPKKECSEAMEVEXSVISIDSPQKLAILDQELEHKEQEAWEEAXSEDSSVVIVDVKEPSPRVDVSCEPLEGVEKCSDSQSWEDIAPEIEPCAENRLDXKEEKSVEYEGDLKSGXAEXEPVEQDSSQPSLPLVRADDPLRLDQELQQPQXQEKXSNSLXEDSKMANAKQLSSDAEAQKLGKPSAHASQSFCESSSEXPFHFXLPKEGDIIPPLXGAXPPLIGHLKLEPKRHSXPIGISNYPESXIAXSDVMSESMVEXHDPILGSGKGDSGAAPDVDDKLCLRMKLVSPEXEASEESLQFNLEKPAXGERKNGSXAVAESVASPQKXMSVLSCICEARQENEARSEDPPXXPIRGNLLHFPSSQGEEEKEKLEGDHXIRQSQQPMKPISPVKDPVSPASQKMVIQGPSSPQGEAMVXDVLEDQKEGRSXNKENPSKALIERPSQNNIGIQXMECSLRVPEXVSAAXQXIKNVCEQGXSXVDQNFGKQDAXVQXERGSGEKPVSAPGDDXESLHSQGEEEFDMPQPPHGHVLHRHMRXIREVRXLVXRVIXDVYYVDGXEVERKVXEEXEEPIVECQECEXEVSPSQXGGSSGDLGDISSFSSKASSLHRXSSGXSLSAMHSSGSSGKGAGPLRGKXSGXEPADFALPSSRGGPGKLSPRKGVSQXGXPVCEEDGDAGLGIRQGGKAPVXPRGRGRRGRPPSRXXGXREXAVPGPLGIEDISPNLSPDDKSFSRVVPRVPDSXRRXDVGAGALRRSDSPEIPFQAAAGPSDGLDASSPGNSFVGLRVVAKWSSNGYFYSGKIXRDVGAGKYKLLFDDGYECDVLGKDILLCDPIPLDXEVXALSEDEYFSAGVVKGHRKESGELYYSIEKEGQRKWYKRMAVILSLEQGNRLREQYGLGPYEAVXPLXKAADISLDNLVEGKRKRRSNVSSPAXPXASSSSSXXPXRKIXESPRASMGVLSGKRKLIXSEEERSPAKRGRKSAXVKPGAVGAGEFVSPCESGDNXGEPSALEEQRGPLPLNKXLFLGYAFLLXMAXXSDKLASRSKLPDGPXGSSEEEEEFLEIPPFNKQYXESQLRAGAGYILEDFNEAQCNXAYQCLLIADQHCRXRKYFLCLASGIPCVSHVWVHDSCHANQLQNYRNYLLPAGYSLEEQRILDWQPRENPFQNLKVLLVSDQQQNFLELWSEILMXGGAASVKQHHSSAHNKDIALGVFDVVVXDPSCPASVLKCAEALQLPVVSQEWVIQCLIVGERIGFKQHPKYKHDYVSH

SEQ ID NO: 28308 - protein, 144 aa, Homo sapiens
  MOD_RES (1)..(1): Any amino acid
  MOD_RES (5)..(5): Selenocysteine
  MOD_RES (11)..(11): Selenocysteine
  MOD_RES (14)..(14): Selenocysteine
  MOD_RES (18)..(18): Selenocysteine
  MOD_RES (26)..(26): Selenocysteine
  MOD_RES (33)..(33): Selenocysteine
  MOD_RES (36)..(36): Selenocysteine
  MOD_RES (48)..(48): Selenocysteine
  MOD_RES (55)..(55): Selenocysteine
  MOD_RES (78)..(78): Selenocysteine
  MOD_RES (82)..(82): Selenocysteine
  MOD_RES (104)..(104): Selenocysteine
  MOD_RES (107)..(107): Selenocysteine
  MOD_RES (136)..(136): Selenocysteine
  MOD_RES (143)..(143): Selenocysteine
XHMRXIREVRXLVXRVIXDVYYVDGXEVERKVXEEXEEPIVECQECEXEVSPSQXGGSSGDLGDISSFSSKASSLHRXSSGXSLSAMHSSGSSGKGAGPLRGKXSGXEPADFALPSSRGGPGKLRCRQGLQRERAXAGAGLLXF

SEQ ID NO: 28309 - protein, 192 aa, Homo sapiens
  MOD_RES (1)..(1): Any amino acid
  MOD_RES (51)..(51): Selenocysteine
  MOD_RES (67)..(67): Selenocysteine
  MOD_RES (70)..(70): Selenocysteine
  MOD_RES (102)..(102): Selenocysteine
  MOD_RES (106)..(106): Selenocysteine
  MOD_RES (111)..(111): Selenocysteine
  MOD_RES (149)..(149): Selenocysteine
  MOD_RES (154)..(154): Selenocysteine
  MOD_RES (166)..(166): Selenocysteine
  MOD_RES (169)..(169): Selenocysteine
  MOD_RES (185)..(185): Selenocysteine
XSVVIVDVKEPSPRVDVSCEPLEGVEKCSDSQSWEDIAPEIEPCAENRLDXKEEKSVEYEGDLKSGXAEXEPVEQDSSQPSLPLVRADDPLRLDQELQQPQXQEKXSNSLXEDSKMANAKQLSSDAEAQKLGKPSAHASQSFCESSSEXPFHFXLPKEGDIIPPLXGAXPPLIGHLKLEPKRHSXPIVSAGR

SEQ ID NO: 28310 - protein, 149 aa, Homo sapiens
  MOD_RES (1)..(1): Any amino acid
  MOD_RES (2)..(2): Selenocysteine
  MOD_RES (20)..(20): Selenocysteine
  MOD_RES (30)..(30): Selenocysteine
  MOD_RES (33)..(34): Selenocysteine
  MOD_RES (49)..(49): Selenocysteine
  MOD_RES (85)..(85): Selenocysteine
  MOD_RES (101)..(101): Selenocysteine
  MOD_RES (123)..(123): Selenocysteine
  MOD_RES (137)..(137): Selenocysteine
XXGEPSALEEQRGPLPLNKXLFLGYAFLLXMAXXSDKLASRSKLPDGPXGSSEEEEAYCNHPSQSGLNALPSSPFAFYGHLLEQXHVEEFLEIPPFNKQYXESQLRAGAGYILEDFNEAQCNXAYQCLLIADQHCRXRKYFLCLASGIP

SEQ ID NO: 28311 - protein, 48 aa, Homo sapiens
  MOD_RES (1)..(1): Any amino acid
  MOD_RES (2)..(2): Selenocysteine
  MOD_RES (25)..(26): Selenocysteine
  MOD_RES (48)..(48): Selenocysteine
XXMSVLSCICEARQENEARSEDPPXXPIREKKSLICLSLHMAMSYIVX

SEQ ID NO: 28312 - protein, 1005 aa, Homo sapiens
  MOD_RES (4)..(4): Selenocysteine
  MOD_RES (28)..(28): Selenocysteine
  MOD_RES (116)..(116): Selenocysteine
  MOD_RES (232)..(232): Selenocysteine
  MOD_RES (266)..(266): Selenocysteine
  MOD_RES (278)..(278): Selenocysteine
  MOD_RES (310)..(310): Selenocysteine
  MOD_RES (351)..(351): Selenocysteine
  MOD_RES (381)..(381): Selenocysteine
  MOD_RES (394)..(394): Selenocysteine
  MOD_RES (412)..(412): Selenocysteine
  MOD_RES (419)..(419): Selenocysteine
  MOD_RES (444)..(444): Selenocysteine
  MOD_RES (463)..(463): Selenocysteine
  MOD_RES (470)..(470): Selenocysteine
  MOD_RES (480)..(480): Selenocysteine
  MOD_RES (491)..(491): Selenocysteine
  MOD_RES (509)..(509): Selenocysteine
  MOD_RES (511)..(511): Selenocysteine
  MOD_RES (513)..(513): Selenocysteine
  MOD_RES (555)..(555): Selenocysteine
  MOD_RES (577)..(577): Selenocysteine
  MOD_RES (616)..(616): Selenocysteine
  MOD_RES (634)..(635): Selenocysteine
  MOD_RES (641)..(641): Selenocysteine
  MOD_RES (655)..(655): Selenocysteine
  MOD_RES (695)..(695): Selenocysteine
  MOD_RES (772)..(772): Selenocysteine
  MOD_RES (783)..(783): Selenocysteine
  MOD_RES (788)..(788): Selenocysteine
  MOD_RES (838)..(838): Selenocysteine
  MOD_RES (849)..(849): Selenocysteine
  MOD_RES (871)..(871): Selenocysteine
  MOD_RES (899)..(899): Selenocysteine
  MOD_RES (905)..(905): Selenocysteine
  MOD_RES (918)..(918): Selenocysteine
  MOD_RES (962)..(962): Selenocysteine
MDLXLAELQEMASRQQQQIEAQQQLLAXKEQRLKFLKQQDQRQQQQVAEQEKLKRLKEIAENQEAKLKKVRALKGHVEQKRLSNGKLVEEIEQMNNLFQQKQRELVLAVSKVEELXRQLEMLKNGRIDSHHDNQSAVAELDRLYKELQLRNKLNQEQNAKLQQQRECLNKRNSEVAVMDKRVNELRDRLWKKKAALQQKENLPVSSDGNLPQQAASAPSRVAAVGPYIQSSXMPRMPSRPELLVKPALPDGSLVIQASEGPMKIQXLPNMRSGAASQXKGSKIHPVGPDWSPSNADLFPSQGSASVPQSXGNALDQVDDGEVPLREKEKKVRPFSMFDAVDQSNAPPSFGXLRKNQSSEDILRDAQVANKNVAKVPPPVPXKPKQINLPYFGQXNQPPSDIKPDGSSQQLSXVVPSMGXKPKPAGQQPRVLLSPSIPSVGQDQXLSPGSKQESPPAAAVRPFXPQPSKDXLLPPFRKPQXVAASSIYSMYXQQQAPGKNFQQAVQSALXKXHXRGPHFSSVYGKPVIAAAQNQQQHPENIYSNSQGKPGSPEPEXEPVSSVQENHENERIPRPLSPXKLLPFLSNPYRNQSDADLEALRKKLSNAPRPLKKRSSIXEPEGPNGPNIQKLLYQRXXIAAMEXISVPSYPSKSASVXASSESPVEIQNPYLHVEPEKEVVSLVPESLSPEDVGNASXENSDMPAPSPGLDYEPEGVPDNSPNLQNNPEEPNPEAPHVLDVYLEEYPPYPPPPYPSGEPEGPGEDSVSMRPPEIXGQVSLPPGKRXNLRKXGSERIAHGMRVKFNPLALLLDSSLEGEFDLVQRIIYEVDDPSLPNDEGIXALHNAVCAGHXEIVKFLVQFGVNVNAADSDGWXPLHCAASCNNVQVCKFLVESGAAVFAMXYSDMQXAADKCEEMEEGYXQCSQFLYGVQEKMGIMNKGVIYALWDYEPQNDDELPMKEGDCMXIIHREDEDEIEWWWARLNDKEGYVPRNLLGLYPRIKPRQRSLA

SEQ ID NO: 28313 - protein, 1134 aa, Homo sapiens
  MOD_RES (13)..(13): Selenocysteine
  MOD_RES (24)..(24): Selenocysteine
  MOD_RES (29)..(29): Selenocysteine
  MOD_RES (32)..(32): Selenocysteine
  MOD_RES (133)..(133): Selenocysteine
  MOD_RES (157)..(157): Selenocysteine
  MOD_RES (245)..(245): Selenocysteine
  MOD_RES (361)..(361): Selenocysteine
  MOD_RES (395)..(395): Selenocysteine
  MOD_RES (407)..(407): Selenocysteine
  MOD_RES (439)..(439): Selenocysteine
  MOD_RES (480)..(480): Selenocysteine
  MOD_RES (510)..(510): Selenocysteine
  MOD_RES (523)..(523): Selenocysteine
  MOD_RES (541)..(541): Selenocysteine
  MOD_RES (548)..(548): Selenocysteine
  MOD_RES (573)..(573): Selenocysteine
  MOD_RES (592)..(592): Selenocysteine
  MOD_RES (599)..(599): Selenocysteine
  MOD_RES (609)..(609): Selenocysteine
  MOD_RES (620)..(620): Selenocysteine
  MOD_RES (638)..(638): Selenocysteine
  MOD_RES (640)..(640): Selenocysteine
  MOD_RES (642)..(642): Selenocysteine
  MOD_RES (684)..(684): Selenocysteine
  MOD_RES (706)..(706): Selenocysteine
  MOD_RES (745)..(745): Selenocysteine
  MOD_RES (763)..(764): Selenocysteine
  MOD_RES (770)..(770): Selenocysteine
  MOD_RES (784)..(784): Selenocysteine
  MOD_RES (824)..(824): Selenocysteine
  MOD_RES (901)..(901): Selenocysteine
  MOD_RES (912)..(912): Selenocysteine
  MOD_RES (917)..(917): Selenocysteine
  MOD_RES (967)..(967): Selenocysteine
  MOD_RES (978)..(978): Selenocysteine
  MOD_RES (1000)..(1000): Selenocysteine
  MOD_RES (1028)..(1028): Selenocysteine
  MOD_RES (1034)..(1034): Selenocysteine
  MOD_RES (1047)..(1047): Selenocysteine
  MOD_RES (1091)..(1091): Selenocysteine
MRFGSKMMPMFLXVYLSNNEQHFXEVPVXPEXICRDVVDLCKEPGESDCHLAEVWCGSERPVADNERMFDVLQRFGSQRNEVRFFLRHERPPGRDIVSGPRSQDPSLKRNGVKVPGEYRRKENGVNSPRMDLXLAELQEMASRQQQQIEAQQQLLAXKEQRLKFLKQQDQRQQQQVAEQEKLKRLKEIAENQEAKLKKVRALKGHVEQKRLSNGKLVEEIEQMNNLFQQKQRELVLAVSKVEELXRQLEMLKNGRIDSHHDNQSAVAELDRLYKELQLRNKLNQEQNAKLQQQRECLNKRNSEVAVMDKRVNELRDRLWKKKAALQQKENLPVSSDGNLPQQAASAPSRVAAVGPYIQSSXMPRMPSRPELLVKPALPDGSLVIQASEGPMKIQXLPNMRSGAASQXKGSKIHPVGPDWSPSNADLFPSQGSASVPQSXGNALDQVDDGEVPLREKEKKVRPFSMFDAVDQSNAPPSFGXLRKNQSSEDILRDAQVANKNVAKVPPPVPXKPKQINLPYFGQXNQPPSDIKPDGSSQQLSXVVPSMGXKPKPAGQQPRVLLSPSIPSVGQDQXLSPGSKQESPPAAAVRPFXPQPSKDXLLPPFRKPQXVAASSIYSMYXQQQAPGKNFQQAVQSALXKXHXRGPHFSSVYGKPVIAAAQNQQQHPENIYSNSQGKPGSPEPEXEPVSSVQENHENERIPRPLSPXKLLPFLSNPYRNQSDADLEALRKKLSNAPRPLKKRSSIXEPEGPNGPNIQKLLYQRXXIAAMEXISVPSYPSKSASVXASSESPVEIQNPYLHVEPEKEVVSLVPESLSPEDVGNASXENSDMPAPSPGLDYEPEGVPDNSPNLQNNPEEPNPEAPHVLDVYLEEYPPYPPPPYPSGEPEGPGEDSVSMRPPEIXGQVSLPPGKRXNLRKXGSERIAHGMRVKFNPLALLLDSSLEGEFDLVQRIIYEVDDPSLPNDEGIXALHNAVCAGHXEIVKFLVQFGVNVNAADSDGWXPLHCAASCNNVQVCKFLVESGAAVFAMXYSDMQXAADKCEEMEEGYXQCSQFLYGVQEKMGIMNKGVIYALWDYEPQNDDELPMKEGDCMXIIHREDEDEIEWWWARLNDKEGYVPRNLLGLYPRIKPRQRSLA

SEQ ID NO: 28314 - protein, 47 aa, Homo sapiens
  MOD_RES (31)..(31): Selenocysteine
  MOD_RES (46)..(46): Selenocysteine
MRFGSKMMPNVQLRIMSECLMFFNDLEVRGXKFASSFVMNAPLAGXL

SEQ ID NO: 28315 - protein, 234 aa, Homo sapiens
  MOD_RES (1)..(1): Any amino acid
  MOD_RES (67)..(67): Selenocysteine
  MOD_RES (91)..(91): Selenocysteine
  MOD_RES (158)..(158): Selenocysteine
XMFDVLQRFGSQRNEVRFFLRHERPPGRDIVSGPRSQDPSLKRNGVKVPGEYRRKENGVNSPRMDLXLAELQEMASRQQQQIEAQQQLLAXKEQRLKFLKQQDQRQQQQVAEQEKLKRLKEIAENQEAKLKKVRALKGHVVSLVPESLSPEDVGNASXENSDMPAPSPGLDYEPEGVPDNSPNLQNNPEEPNPEAPHVLDVYLEEYPPYPPPPYPSGEPEGPGEDSVSMRPPEI

SEQ ID NO: 28316 - protein, 64 aa, Homo sapiens
  MOD_RES (1)..(1): Any amino acid
  MOD_RES (3)..(3): Selenocysteine
  MOD_RES (44)..(44): Selenocysteine
XSXGNALDQVDDGEVPLREKEKKVRPFSMFDAVDQSNAPPSFGXLRKNQSSEDILRDAQYMVSL

SEQ ID NO: 28317 - protein, 164 aa, Homo sapiens
  MOD_RES (39)..(39): Selenocysteine
  MOD_RES (41)..(41): Selenocysteine
  MOD_RES (60)..(60): Selenocysteine
  MOD_RES (79)..(79): Selenocysteine
  MOD_RES (99)..(99): Selenocysteine
  MOD_RES (105)..(105): Selenocysteine
  MOD_RES (110)..(111): Selenocysteine
  MOD_RES (116)..(116): Selenocysteine
  MOD_RES (145)..(145): Selenocysteine
  MOD_RES (148)..(148): Selenocysteine
MFQRLNKMFVGEVSSSSNQEPEFNEKEDDEWILVDFIDXCXGFSAEEEEEEEDISEESPXEHPSVFSCLPASLECLADXSDSCFLQFESCPMEESWFIXPPPCFXAGGLXXIKVEXSPMENLLIEHPSMSVYAVHNSCPGLSEAXRGXDELHSPSSPRARKSCL

SEQ ID NO: 28318 - protein, 240 aa, Homo sapiens
  MOD_RES (39)..(39): Selenocysteine
  MOD_RES (41)..(41): Selenocysteine
  MOD_RES (60)..(60): Selenocysteine
  MOD_RES (79)..(79): Selenocysteine
  MOD_RES (99)..(99): Selenocysteine
  MOD_RES (105)..(105): Selenocysteine
  MOD_RES (110)..(111): Selenocysteine
  MOD_RES (116)..(116): Selenocysteine
  MOD_RES (145)..(145): Selenocysteine
  MOD_RES (148)..(148): Selenocysteine
  MOD_RES (180)..(181): Selenocysteine
  MOD_RES (215)..(215): Selenocysteine
MFQRLNKMFVGEVSSSSNQEPEFNEKEDDEWILVDFIDXCXGFSAEEEEEEEDISEESPXEHPSVFSCLPASLECLADXSDSCFLQFESCPMEESWFIXPPPCFXAGGLXXIKVEXSPMENLLIEHPSMSVYAVHNSCPGLSEAXRGXDELHSPSSPRVEAQNEMGQHIHCYVAALAAHXXFLEQPKSFRPSQWIKEHSERQPLNRNSLRRQNLXRDCHPRQVKHNGWVVHQPCPRQYNY

SEQ ID NO: 28319 - protein, 253 aa, Homo sapiens
  MOD_RES (7)..(8): Selenocysteine
  MOD_RES (81)..(81): Selenocysteine
  MOD_RES (121)..(121): Selenocysteine
  MOD_RES (129)..(129): Selenocysteine
  MOD_RES (132)..(132): Selenocysteine
  MOD_RES (135)..(135): Selenocysteine
  MOD_RES (145)..(145): Selenocysteine
  MOD_RES (164)..(165): Selenocysteine
  MOD_RES (210)..(210): Selenocysteine
  MOD_RES (214)..(214): Selenocysteine
  MOD_RES (216)..(216): Selenocysteine
  MOD_RES (227)..(227): Selenocysteine
MAAARAXXPADGEEPAPEAEALAAARERSSRFLSGLELVKQGAEARVFRGRFQGRAAVIKHRFPKGYRHPALEARLGRRRXVQEARALLRCRRAGISAPVVFFVDYASNCLYMEEIEGSVXVRDYIQSXMEXEKXPQGLSNLAKXIGQVLARMHDEDLIHGDLXXSNMLLKPPLEQLNIVLIDFGLSFISALPEDKGVDLYVLEKAFLSXHPNXEXVFEAFLKSYSXSSKKARPVLKKLDEVRLRGRKRSMVG

SEQ ID NO: 28320 - protein, 121 aa, Homo sapiens
  MOD_RES (7)..(8): Selenocysteine
  MOD_RES (81)..(81): Selenocysteine
  MOD_RES (107)..(107): Selenocysteine
  MOD_RES (111)..(111): Selenocysteine
MAAARAXXPADGEEPAPEAEALAAARERSSRFLSGLELVKQGAEARVFRGRFQGRAAVIKHRFPKGYRHPALEARLGRRRXVQEARALLRCRRAGKEYLPQLSFLWXMLPXAYIWKKLKAQ

SEQ ID NO: 28321 - protein, 290 aa, Homo sapiens
  MOD_RES (26)..(26): Selenocysteine
  MOD_RES (41)..(41): Selenocysteine
  MOD_RES (93)..(93): Selenocysteine
  MOD_RES (118)..(118): Selenocysteine
  MOD_RES (143)..(143): Selenocysteine
  MOD_RES (162)..(162): Selenocysteine
  MOD_RES (179)..(179): Selenocysteine
  MOD_RES (194)..(194): Selenocysteine
  MOD_RES (216)..(216): Selenocysteine
  MOD_RES (231)..(231): Selenocysteine
  MOD_RES (240)..(240): Selenocysteine
  MOD_RES (260)..(260): Selenocysteine
  MOD_RES (262)..(262): Selenocysteine
MSPSAKKRPKNSRVSKMQDEKLRDEXEQPVSKVIERNRLRXVLKNLSLLKLLKSSNRRIQELHKLAKRCWHSLLSVPKILRISSGENSACNKXKQNNEEFQEIGCSEKELKSKKLESXGDPKKKEYKEWKSQVQSGMRNKEKXSLAAMPRKEKHIEPEVPRXSRDDSLNPGVQGRQPLXEGPRVIFIKPYRNRXPMGHMKQLDVADQWIWFEGLPXRIHLPAPRVMCRSSXLRWVKRRCXRFCSASLEMPMWHPYKVDVXWXRARGASRGWRSRHQLKGRNGWRNSRVYK

SEQ ID NO: 28322 - protein, 183 aa, Homo sapiens
  MOD_RES (10)..(10): Selenocysteine
  MOD_RES (18)..(18): Selenocysteine
  MOD_RES (37)..(37): Selenocysteine
  MOD_RES (42)..(42): Selenocysteine
  MOD_RES (50)..(50): Selenocysteine
  MOD_RES (61)..(61): Selenocysteine
  MOD_RES (75)..(75): Selenocysteine
  MOD_RES (92)..(92): Selenocysteine
  MOD_RES (97)..(97): Selenocysteine
  MOD_RES (99)..(99): Selenocysteine
  MOD_RES (138)..(138): Selenocysteine
  MOD_RES (140)..(140): Selenocysteine
  MOD_RES (150)..(151): Selenocysteine
  MOD_RES (174)..(174): Selenocysteine
MLYLENNAQXQFSEPQYXNLGLLNSMDQQIQNGSSSXSPYNXDHAQNSVXAPSPYAQPSSXFDALSPSPAIPSNXDYPGPHSFDVSFQQSSXAKSAXWXSLALSPRLECNGMISAHCNLHLLGSSGSPFSASQVGGIXGXRHHAQLIFGXXSAHCNLRLLDSSDSPFSASQYSXELKKLYCQI

SEQ ID NO: 28323 - protein, 393 aa, Homo sapiens
  MOD_RES (10)..(10): Selenocysteine
  MOD_RES (18)..(18): Selenocysteine
  MOD_RES (37)..(37): Selenocysteine
  MOD_RES (42)..(42): Selenocysteine
  MOD_RES (50)..(50): Selenocysteine
  MOD_RES (61)..(61): Selenocysteine
  MOD_RES (75)..(75): Selenocysteine
  MOD_RES (92)..(92): Selenocysteine
  MOD_RES (97)..(97): Selenocysteine
  MOD_RES (99)..(99): Selenocysteine
  MOD_RES (102)..(102): Selenocysteine
  MOD_RES (114)..(114): Selenocysteine
  MOD_RES (123)..(123): Selenocysteine
  MOD_RES (144)..(144): Selenocysteine
  MOD_RES (187)..(187): Selenocysteine
  MOD_RES (203)..(203): Selenocysteine
  MOD_RES (206)..(207): Selenocysteine
  MOD_RES (232)..(232): Selenocysteine
  MOD_RES (235)..(235): Selenocysteine
  MOD_RES (274)..(274): Selenocysteine
  MOD_RES (280)..(280): Selenocysteine
  MOD_RES (288)..(288): Selenocysteine
  MOD_RES (294)..(294): Selenocysteine
  MOD_RES (316)..(316): Selenocysteine
  MOD_RES (337)..(337): Selenocysteine
  MOD_RES (340)..(340): Selenocysteine
  MOD_RES (373)..(373): Selenocysteine
MLYLENNAQXQFSEPQYXNLGLLNSMDQQIQNGSSSXSPYNXDHAQNSVXAPSPYAQPSSXFDALSPSPAIPSNXDYPGPHSFDVSFQQSSXAKSAXWXYSXELKKLYCQIAKXCPIQIKVMXPPPQGAVIRAMPVYKKAEHVXEVVKRCPNHELSREFNEGQIAPPSHLIRVEGNSHAQYVEDPIXGRQSVLVPYEPPQVGXEFXXVLYNFMCNSSCVGGMNRRPILIIVXLEXRDGQVLGRRCFEARICACPGRDRKADEDSIRKQQVSDSXKNGDGXKRPFRQNXHGIQMXSIKKRRSPDDELLYLPVRGREXYEMLLKIKESLELMQYLPQHXIEXYRQQQQQQHQHLLQKHLLSACFRNELVEPRREXPKQSDVFFRHSKPPNRSVYP

SEQ ID NO: 28324 - protein, 416 aa, Homo sapiens
  MOD_RES (10)..(10): Selenocysteine
  MOD_RES (18)..(18): Selenocysteine
  MOD_RES (37)..(37): Selenocysteine
  MOD_RES (42)..(42): Selenocysteine
  MOD_RES (50)..(50): Selenocysteine
  MOD_RES (61)..(61): Selenocysteine
  MOD_RES (75)..(75): Selenocysteine
  MOD_RES (92)..(92): Selenocysteine
  MOD_RES (97)..(97): Selenocysteine
  MOD_RES (99)..(99): Selenocysteine
  MOD_RES (102)..(102): Selenocysteine
  MOD_RES (114)..(114): Selenocysteine
  MOD_RES (123)..(123): Selenocysteine
  MOD_RES (144)..(144): Selenocysteine
  MOD_RES (187)..(187): Selenocysteine
  MOD_RES (203)..(203): Selenocysteine
  MOD_RES (206)..(207): Selenocysteine
  MOD_RES (232)..(232): Selenocysteine
  MOD_RES (235)..(235): Selenocysteine
  MOD_RES (274)..(274): Selenocysteine
  MOD_RES (280)..(280): Selenocysteine
  MOD_RES (288)..(288): Selenocysteine
  MOD_RES (294)..(294): Selenocysteine
  MOD_RES (316)..(316): Selenocysteine
  MOD_RES (337)..(337): Selenocysteine
  MOD_RES (340)..(340): Selenocysteine
  MOD_RES (357)..(357): Selenocysteine
  MOD_RES (397)..(397): Selenocysteine
  MOD_RES (399)..(400): Selenocysteine
MLYLENNAQXQFSEPQYXNLGLLNSMDQQIQNGSSSXSPYNXDHAQNSVXAPSPYAQPSSXFDALSPSPAIPSNXDYPGPHSFDVSFQQSSXAKSAXWXYSXELKKLYCQIAKXCPIQIKVMXPPPQGAVIRAMPVYKKAEHVXEVVKRCPNHELSREFNEGQIAPPSHLIRVEGNSHAQYVEDPIXGRQSVLVPYEPPQVGXEFXXVLYNFMCNSSCVGGMNRRPILIIVXLEXRDGQVLGRRCFEARICACPGRDRKADEDSIRKQQVSDSXKNGDGXKRPFRQNXHGIQMXSIKKRRSPDDELLYLPVRGREXYEMLLKIKESLELMQYLPQHXIEXYRQQQQQQHQHLLQKQXSIQSPSSYGNSSPPLNKMNSMNKLPSVSQLINPQQRNALXPXXIPDGMGANRSGKSENP

SEQ ID NO: 28325 - protein, 461 aa, Homo sapiens
  MOD_RES (10)..(10): Selenocysteine
  MOD_RES (18)..(18): Selenocysteine
  MOD_RES (37)..(37): Selenocysteine
  MOD_RES (42)..(42): Selenocysteine
  MOD_RES (50)..(50): Selenocysteine
  MOD_RES (61)..(61): Selenocysteine
  MOD_RES (75)..(75): Selenocysteine
  MOD_RES (92)..(92): Selenocysteine
  MOD_RES (97)..(97): Selenocysteine
  MOD_RES (99)..(99): Selenocysteine
  MOD_RES (102)..(102): Selenocysteine
  MOD_RES (114)..(114): Selenocysteine
  MOD_RES (123)..(123): Selenocysteine
  MOD_RES (144)..(144): Selenocysteine
  MOD_RES (187)..(187): Selenocysteine
  MOD_RES (203)..(203): Selenocysteine
  MOD_RES (206)..(207): Selenocysteine
  MOD_RES (232)..(232): Selenocysteine
  MOD_RES (235)..(235): Selenocysteine
  MOD_RES (274)..(274): Selenocysteine
  MOD_RES (280)..(280): Selenocysteine
  MOD_RES (288)..(288): Selenocysteine
  MOD_RES (294)..(294): Selenocysteine
  MOD_RES (316)..(316): Selenocysteine
  MOD_RES (337)..(337): Selenocysteine
  MOD_RES (340)..(340): Selenocysteine
  MOD_RES (357)..(357): Selenocysteine
  MOD_RES (397)..(397): Selenocysteine
  MOD_RES (399)..(400): Selenocysteine
  MOD_RES (414)..(414): Selenocysteine
  MOD_RES (428)..(428): Selenocysteine
  MOD_RES (440)..(440): Selenocysteine
  MOD_RES (444)..(444): Selenocysteine
  MOD_RES (451)..(451): Selenocysteine
MLYLENNAQXQFSEPQYXNLGLLNSMDQQIQNGSSSXSPYNXDHAQNSVXAPSPYAQPSSXFDALSPSPAIPSNXDYPGPHSFDVSFQQSSXAKSAXWXYSXELKKLYCQIAKXCPIQIKVMXPPPQGAVIRAMPVYKKAEHVXEVVKRCPNHELSREFNEGQIAPPSHLIRVEGNSHAQYVEDPIXGRQSVLVPYEPPQVGXEFXXVLYNFMCNSSCVGGMNRRPILIIVXLEXRDGQVLGRRCFEARICACPGRDRKADEDSIRKQQVSDSXKNGDGXKRPFRQNXHGIQMXSIKKRRSPDDELLYLPVRGREXYEMLLKIKESLELMQYLPQHXIEXYRQQQQQQHQHLLQKQXSIQSPSSYGNSSPPLNKMNSMNKLPSVSQLINPQQRNALXPXXIPDGMGANIPMMGXHMPMAGDMNGLSPXQALPPPLSMPSXSHCXPPPPYPXDCSIVRIWQV

SEQ ID NO: 28326 - protein, 582 aa, Homo sapiens
  MOD_RES (10)..(10): Selenocysteine
  MOD_RES (18)..(18): Selenocysteine
  MOD_RES (37)..(37): Selenocysteine
  MOD_RES (42)..(42): Selenocysteine
  MOD_RES (50)..(50): Selenocysteine
  MOD_RES (61)..(61): Selenocysteine
  MOD_RES (75)..(75): Selenocysteine
  MOD_RES (92)..(92): Selenocysteine
  MOD_RES (97)..(97): Selenocysteine
  MOD_RES (99)..(99): Selenocysteine
  MOD_RES (102)..(102): Selenocysteine
  MOD_RES (114)..(114): Selenocysteine
  MOD_RES (123)..(123): Selenocysteine
  MOD_RES (144)..(144): Selenocysteine
  MOD_RES (187)..(187): Selenocysteine
  MOD_RES (203)..(203): Selenocysteine
  MOD_RES (206)..(207): Selenocysteine
  MOD_RES (232)..(232): Selenocysteine
  MOD_RES (235)..(235): Selenocysteine
  MOD_RES (274)..(274): Selenocysteine
  MOD_RES (284)..(284): Selenocysteine
  MOD_RES (290)..(290): Selenocysteine
  MOD_RES (312)..(312): Selenocysteine
  MOD_RES (333)..(333): Selenocysteine
  MOD_RES (336)..(336): Selenocysteine
  MOD_RES (353)..(353): Selenocysteine
  MOD_RES (393)..(393): Selenocysteine
  MOD_RES (395)..(396): Selenocysteine
  MOD_RES (410)..(410): Selenocysteine
  MOD_RES (424)..(424): Selenocysteine
  MOD_RES (436)..(436): Selenocysteine
  MOD_RES (440)..(440): Selenocysteine
  MOD_RES (447)..(447): Selenocysteine
  MOD_RES (468)..(469): Selenocysteine
  MOD_RES (473)..(474): Selenocysteine
  MOD_RES (521)..(521): Selenocysteine
  MOD_RES (527)..(527): Selenocysteine
  MOD_RES (535)..(535): Selenocysteine
  MOD_RES (547)..(547): Selenocysteine
  MOD_RES (551)..(551): Selenocysteine
MLYLENNAQXQFSEPQYXNLGLLNSMDQQIQNGSSSXSPYNXDHAQNSVXAPSPYAQPSSXFDALSPSPAIPSNXDYPGPHSFDVSFQQSSXAKSAXWXYSXELKKLYCQIAKXCPIQIKVMXPPPQGAVIRAMPVYKKAEHVXEVVKRCPNHELSREFNEGQIAPPSHLIRVEGNSHAQYVEDPIXGRQSVLVPYEPPQVGXEFXXVLYNFMCNSSCVGGMNRRPILIIVXLEXRDGQVLGRRCFEARICACPGRDRKADEDSIRKQQVSDSXKNGDAFRQNXHGIQMXSIKKRRSPDDELLYLPVRGREXYEMLLKIKESLELMQYLPQHXIEXYRQQQQQQHQHLLQKQXSIQSPSSYGNSSPPLNKMNSMNKLPSVSQLINPQQRNALXPXXIPDGMGANIPMMGXHMPMAGDMNGLSPXQALPPPLSMPSXSHCXPPPPYPXDCSIVSFLARLGCSSCLDYFXXQGLXXIYQIEHYSMDDLASLKIPEQFRHAIWKGILDHRQLHEFSSPSHLLRXPSSASXVSVGSSEXRGERVIDAVRFXLRQXISFPPRDEWNDFNFDMDARRNKQQRIKEEGE

SEQ ID NO: 28327 - protein, 586 aa, Homo sapiens
  MOD_RES (10)..(10): Selenocysteine
  MOD_RES (18)..(18): Selenocysteine
  MOD_RES (37)..(37): Selenocysteine
  MOD_RES (42)..(42): Selenocysteine
  MOD_RES (50)..(50): Selenocysteine
  MOD_RES (61)..(61): Selenocysteine
  MOD_RES (75)..(75): Selenocysteine
  MOD_RES (92)..(92): Selenocysteine
  MOD_RES (97)..(97): Selenocysteine
  MOD_RES (99)..(99): Selenocysteine
  MOD_RES (102)..(102): Selenocysteine
  MOD_RES (114)..(114): Selenocysteine
  MOD_RES (123)..(123): Selenocysteine
  MOD_RES (144)..(144): Selenocysteine
  MOD_RES (187)..(187): Selenocysteine
  MOD_RES (203)..(203): Selenocysteine
  MOD_RES (206)..(207): Selenocysteine
  MOD_RES (232)..(232): Selenocysteine
  MOD_RES (235)..(235): Selenocysteine
  MOD_RES (274)..(274): Selenocysteine
  MOD_RES (280)..(280): Selenocysteine
  MOD_RES (288)..(288): Selenocysteine
  MOD_RES (294)..(294): Selenocysteine
  MOD_RES (316)..(316): Selenocysteine
  MOD_RES (337)..(337): Selenocysteine
  MOD_RES (340)..(340): Selenocysteine
  MOD_RES (357)..(357): Selenocysteine
  MOD_RES (397)..(397): Selenocysteine
  MOD_RES (399)..(400): Selenocysteine
  MOD_RES (414)..(414): Selenocysteine
  MOD_RES (428)..(428): Selenocysteine
  MOD_RES (440)..(440): Selenocysteine
  MOD_RES (444)..(444): Selenocysteine
  MOD_RES (451)..(451): Selenocysteine
  MOD_RES (472)..(473): Selenocysteine
  MOD_RES (477)..(478): Selenocysteine
  MOD_RES (525)..(525): Selenocysteine
  MOD_RES (531)..(531): Selenocysteine
  MOD_RES (539)..(539): Selenocysteine
  MOD_RES (551)..(551): Selenocysteine
  MOD_RES (555)..(555): Selenocysteine
MLYLENNAQXQFSEPQYXNLGLLNSMDQQIQNGSSSXSPYNXDHAQNSVXAPSPYAQPSSXFDALSPSPAIPSNXDYPGPHSFDVSFQQSSXAKSAXWXYSXELKKLYCQIAKXCPIQIKVMXPPPQGAVIRAMPVYKKAEHVXEVVKRCPNHELSREFNEGQIAPPSHLIRVEGNSHAQYVEDPIXGRQSVLVPYEPPQVGXEFXXVLYNFMCNSSCVGGMNRRPILIIVXLEXRDGQVLGRRCFEARICACPGRDRKADEDSIRKQQVSDSXKNGDGXKRPFRQNXHGIQMXSIKKRRSPDDELLYLPVRGREXYEMLLKIKESLELMQYLPQHXIEXYRQQQQQQHQHLLQKQXSIQSPSSYGNSSPPLNKMNSMNKLPSVSQLINPQQRNALXPXXIPDGMGANIPMMGXHMPMAGDMNGLSPXQALPPPLSMPSXSHCXPPPPYPXDCSIVSFLARLGCSSCLDYFXXQGLXXIYQIEHYSMDDLASLKIPEQFRHAIWKGILDHRQLHEFSSPSHLLRXPSSASXVSVGSSEXRGERVIDAVRFXLRQXISFPPRDEWNDFNFDMDARRNKQQRIKEEGE

SEQ ID NO: 28328 - protein, 501 aa, Homo sapiens
  MOD_RES (10)..(10): Selenocysteine
  MOD_RES (17)..(17): Selenocysteine
  MOD_RES (29)..(29): Selenocysteine
  MOD_RES (38)..(38): Selenocysteine
  MOD_RES (59)..(59): Selenocysteine
  MOD_RES (102)..(102): Selenocysteine
  MOD_RES (118)..(118): Selenocysteine
  MOD_RES (121)..(122): Selenocysteine
  MOD_RES (147)..(147): Selenocysteine
  MOD_RES (150)..(150): Selenocysteine
  MOD_RES (189)..(189): Selenocysteine
  MOD_RES (195)..(195): Selenocysteine
  MOD_RES (203)..(203): Selenocysteine
  MOD_RES (209)..(209): Selenocysteine
  MOD_RES (231)..(231): Selenocysteine
  MOD_RES (252)..(252): Selenocysteine
  MOD_RES (255)..(255): Selenocysteine
  MOD_RES (272)..(272): Selenocysteine
  MOD_RES (312)..(312): Selenocysteine
  MOD_RES (314)..(315): Selenocysteine
  MOD_RES (329)..(329): Selenocysteine
  MOD_RES (343)..(343): Selenocysteine
  MOD_RES (355)..(355): Selenocysteine
  MOD_RES (359)..(359): Selenocysteine
  MOD_RES (366)..(366): Selenocysteine
  MOD_RES (387)..(388): Selenocysteine
  MOD_RES (392)..(393): Selenocysteine
  MOD_RES (440)..(440): Selenocysteine
  MOD_RES (446)..(446): Selenocysteine
  MOD_RES (454)..(454): Selenocysteine
  MOD_RES (466)..(466): Selenocysteine
  MOD_RES (470)..(470): Selenocysteine
MLYLENNAQXQFSEYSXELKKLYCQIAKXCPIQIKVMXPPPQGAVIRAMPVYKKAEHVXEVVKRCPNHELSREFNEGQIAPPSHLIRVEGNSHAQYVEDPIXGRQSVLVPYEPPQVGXEFXXVLYNFMCNSSCVGGMNRRPILIIVXLEXRDGQVLGRRCFEARICACPGRDRKADEDSIRKQQVSDSXKNGDGXKRPFRQNXHGIQMXSIKKRRSPDDELLYLPVRGREXYEMLLKIKESLELMQYLPQHXIEXYRQQQQQQHQHLLQKQXSIQSPSSYGNSSPPLNKMNSMNKLPSVSQLINPQQRNALXPXXIPDGMGANIPMMGXHMPMAGDMNGLSPXQALPPPLSMPSXSHCXPPPPYPXDCSIVSFLARLGCSSCLDYFXXQGLXXIYQIEHYSMDDLASLKIPEQFRHAIWKGILDHRQLHEFSSPSHLLRXPSSASXVSVGSSEXRGERVIDAVRFXLRQXISFPPRDEWNDFNFDMDARRNKQQRIKEEGE

SEQ ID NO: 28329 - protein, 487 aa, Homo sapiens
  MOD_RES (5)..(5): Selenocysteine
  MOD_RES (10)..(10): Selenocysteine
  MOD_RES (25)..(25): Selenocysteine
  MOD_RES (39)..(39): Selenocysteine
  MOD_RES (44)..(44): Selenocysteine
  MOD_RES (46)..(46): Selenocysteine
  MOD_RES (86)..(86): Selenocysteine
  MOD_RES (112)..(112): Selenocysteine
  MOD_RES (131)..(131): Selenocysteine
  MOD_RES (136)..(136): Selenocysteine
  MOD_RES (144)..(144): Selenocysteine
  MOD_RES (155)..(155): Selenocysteine
  MOD_RES (169)..(169): Selenocysteine
  MOD_RES (186)..(186): Selenocysteine
  MOD_RES (191)..(191): Selenocysteine
  MOD_RES (193)..(193): Selenocysteine
  MOD_RES (196)..(196): Selenocysteine
  MOD_RES (208)..(208): Selenocysteine
  MOD_RES (217)..(217): Selenocysteine
  MOD_RES (238)..(238): Selenocysteine
  MOD_RES (281)..(281): Selenocysteine
  MOD_RES (297)..(297): Selenocysteine
  MOD_RES (300)..(301): Selenocysteine
  MOD_RES (326)..(326): Selenocysteine
  MOD_RES (329)..(329): Selenocysteine
  MOD_RES (368)..(368): Selenocysteine
  MOD_RES (374)..(374): Selenocysteine
  MOD_RES (382)..(382): Selenocysteine
  MOD_RES (388)..(388): Selenocysteine
  MOD_RES (410)..(410): Selenocysteine
  MOD_RES (431)..(431): Selenocysteine
  MOD_RES (434)..(434): Selenocysteine
  MOD_RES (467)..(467): Selenocysteine
MNFEXSRCAXLQYCPDPYIQRFVEXPAHFSWKESYYRSXMSQSXQXNEFLSPEVFQHIWDFLEQPICSVQPIDLNFVDEPSEDGAXNKIEISMDCIRMQDSDLSDPMWPQYXNLGLLNSMDQQIQNGSSSXSPYNXDHAQNSVXAPSPYAQPSSXFDALSPSPAIPSNXDYPGPHSFDVSFQQSSXAKSAXWXYSXELKKLYCQIAKXCPIQIKVMXPPPQGAVIRAMPVYKKAEHVXEVVKRCPNHELSREFNEGQIAPPSHLIRVEGNSHAQYVEDPIXGRQSVLVPYEPPQVGXEFXXVLYNFMCNSSCVGGMNRRPILIIVXLEXRDGQVLGRRCFEARICACPGRDRKADEDSIRKQQVSDSXKNGDGXKRPFRQNXHGIQMXSIKKRRSPDDELLYLPVRGREXYEMLLKIKESLELMQYLPQHXIEXYRQQQQQQHQHLLQKHLLSACFRNELVEPRREXPKQSDVFFRHSKPPNRSVYP

SEQ ID NO: 28330 - protein, 510 aa, Homo sapiens
  MOD_RES (5)..(5): Selenocysteine
  MOD_RES (10)..(10): Selenocysteine
  MOD_RES (25)..(25): Selenocysteine
  MOD_RES (39)..(39): Selenocysteine
  MOD_RES (44)..(44): Selenocysteine
  MOD_RES (46)..(46): Selenocysteine
  MOD_RES (86)..(86): Selenocysteine
  MOD_RES (112)..(112): Selenocysteine
  MOD_RES (131)..(131): Selenocysteine
  MOD_RES (136)..(136): Selenocysteine
  MOD_RES (144)..(144): Selenocysteine
  MOD_RES (155)..(155): Selenocysteine
  MOD_RES (169)..(169): Selenocysteine
  MOD_RES (186)..(186): Selenocysteine
  MOD_RES (191)..(191): Selenocysteine
  MOD_RES (193)..(193): Selenocysteine
  MOD_RES (196)..(196): Selenocysteine
  MOD_RES (208)..(208): Selenocysteine
  MOD_RES (217)..(217): Selenocysteine
  MOD_RES (238)..(238): Selenocysteine
  MOD_RES (281)..(281): Selenocysteine
  MOD_RES (297)..(297): Selenocysteine
  MOD_RES (300)..(301): Selenocysteine
  MOD_RES (326)..(326): Selenocysteine
  MOD_RES (329)..(329): Selenocysteine
  MOD_RES (368)..(368): Selenocysteine
  MOD_RES (374)..(374): Selenocysteine
  MOD_RES (382)..(382): Selenocysteine
  MOD_RES (388)..(388): Selenocysteine
  MOD_RES (410)..(410): Selenocysteine
  MOD_RES (431)..(431): Selenocysteine
  MOD_RES (434)..(434): Selenocysteine
  MOD_RES (451)..(451): Selenocysteine
  MOD_RES (491)..(491): Selenocysteine
  MOD_RES (493)..(494): Selenocysteine
MNFEXSRCAXLQYCPDPYIQRFVEXPAHFSWKESYYRSXMSQSXQXNEFLSPEVFQHIWDFLEQPICSVQPIDLNFVDEPSEDGAXNKIEISMDCIRMQDSDLSDPMWPQYXNLGLLNSMDQQIQNGSSSXSPYNXDHAQNSVXAPSPYAQPSSXFDALSPSPAIPSNXDYPGPHSFDVSFQQSSXAKSAXWXYSXELKKLYCQIAKXCPIQIKVMXPPPQGAVIRAMPVYKKAEHVXEVVKRCPNHELSREFNEGQIAPPSHLIRVEGNSHAQYVEDPIXGRQSVLVPYEPPQVGXEFXXVLYNFMCNSSCVGGMNRRPILIIVXLEXRDGQVLGRRCFEARICACPGRDRKADEDSIRKQQVSDSXKNGDGXKRPFRQNXHGIQMXSIKKRRSPDDELLYLPVRGREXYEMLLKIKESLELMQYLPQHXIEXYRQQQQQQHQHLLQKQXSIQSPSSYGNSSPPLNKMNSMNKLPSVSQLINPQQRNALXPXXIPDGMGANRSGKSENP

SEQ ID NO: 28331 - protein, 555 aa, Homo sapiens
  MOD_RES (5)..(5): Selenocysteine
  MOD_RES (10)..(10): Selenocysteine
  MOD_RES (25)..(25): Selenocysteine
  MOD_RES (39)..(39): Selenocysteine
  MOD_RES (44)..(44): Selenocysteine
  MOD_RES (46)..(46): Selenocysteine
  MOD_RES (86)..(86): Selenocysteine
  MOD_RES (112)..(112): Selenocysteine
  MOD_RES (131)..(131): Selenocysteine
  MOD_RES (136)..(136): Selenocysteine
  MOD_RES (144)..(144): Selenocysteine
  MOD_RES (155)..(155): Selenocysteine
  MOD_RES (169)..(169): Selenocysteine
  MOD_RES (186)..(186): Selenocysteine
  MOD_RES (191)..(191): Selenocysteine
  MOD_RES (193)..(193): Selenocysteine
  MOD_RES (196)..(196): Selenocysteine
  MOD_RES (208)..(208): Selenocysteine
  MOD_RES (217)..(217): Selenocysteine
  MOD_RES (238)..(238): Selenocysteine
  MOD_RES (281)..(281): Selenocysteine
  MOD_RES (297)..(297): Selenocysteine
  MOD_RES (300)..(301): Selenocysteine
  MOD_RES (326)..(326): Selenocysteine
  MOD_RES (329)..(329): Selenocysteine
  MOD_RES (368)..(368): Selenocysteine
  MOD_RES (374)..(374): Selenocysteine
  MOD_RES (382)..(382): Selenocysteine
  MOD_RES (388)..(388): Selenocysteine
  MOD_RES (410)..(410): Selenocysteine
  MOD_RES (431)..(431): Selenocysteine
  MOD_RES (434)..(434): Selenocysteine
  MOD_RES (451)..(451): Selenocysteine
  MOD_RES (491)..(491): Selenocysteine
  MOD_RES (493)..(494): Selenocysteine
  MOD_RES (508)..(508): Selenocysteine
  MOD_RES (522)..(522): Selenocysteine
  MOD_RES (534)..(534): Selenocysteine
  MOD_RES (538)..(538): Selenocysteine
  MOD_RES (545)..(545): Selenocysteine
MNFEXSRCAXLQYCPDPYIQRFVEXPAHFSWKESYYRSXMSQSXQXNEFLSPEVFQHIWDFLEQPICSVQPIDLNFVDEPSEDGAXNKIEISMDCIRMQDSDLSDPMWPQYXNLGLLNSMDQQIQNGSSSXSPYNXDHAQNSVXAPSPYAQPSSXFDALSPSPAIPSNXDYPGPHSFDVSFQQSSXAKSAXWXYSXELKKLYCQIAKXCPIQIKVMXPPPQGAVIRAMPVYKKAEHVXEVVKRCPNHELSREFNEGQIAPPSHLIRVEGNSHAQYVEDPIXGRQSVLVPYEPPQVGXEFXXVLYNFMCNSSCVGGMNRRPILIIVXLEXRDGQVLGRRCFEARICACPGRDRKADEDSIRKQQVSDSXKNGDGXKRPFRQNXHGIQMXSIKKRRSPDDELLYLPVRGREXYEMLLKIKESLELMQYLPQHXIEXYRQQQQQQHQHLLQKQXSIQSPSSYGNSSPPLNKMNSMNKLPSVSQLINPQQRNALXPXXIPDGMGANIPMMGXHMPMAGDMNGLSPXQALPPPLSMPSXSHCXPPPPYPXDCSIVRIWQV

SEQ ID NO: 28332 - protein, 676 aa, Homo sapiens
  MOD_RES (5)..(5): Selenocysteine
  MOD_RES (10)..(10): Selenocysteine
  MOD_RES (25)..(25): Selenocysteine
  MOD_RES (39)..(39): Selenocysteine
  MOD_RES (44)..(44): Selenocysteine
  MOD_RES (46)..(46): Selenocysteine
  MOD_RES (86)..(86): Selenocysteine
  MOD_RES (112)..(112): Selenocysteine
  MOD_RES (131)..(131): Selenocysteine
  MOD_RES (136)..(136): Selenocysteine
  MOD_RES (144)..(144): Selenocysteine
  MOD_RES (155)..(155): Selenocysteine
  MOD_RES (169)..(169): Selenocysteine
  MOD_RES (186)..(186): Selenocysteine
  MOD_RES (191)..(191): Selenocysteine
  MOD_RES (193)..(193): Selenocysteine
  MOD_RES (196)..(196): Selenocysteine
  MOD_RES (208)..(208): Selenocysteine
  MOD_RES (217)..(217): Selenocysteine
  MOD_RES (238)..(238): Selenocysteine
  MOD_RES (281)..(281): Selenocysteine
  MOD_RES (297)..(297): Selenocysteine
  MOD_RES (300)..(301): Selenocysteine
  MOD_RES (326)..(326): Selenocysteine
  MOD_RES (329)..(329): Selenocysteine
  MOD_RES (368)..(368): Selenocysteine
  MOD_RES (378)..(378): Selenocysteine
  MOD_RES (384)..(384): Selenocysteine
  MOD_RES (406)..(406): Selenocysteine
  MOD_RES (427)..(427): Selenocysteine
  MOD_RES (430)..(430): Selenocysteine
  MOD_RES (447)..(447): Selenocysteine
  MOD_RES (487)..(487): Selenocysteine
  MOD_RES (489)..(490): Selenocysteine
  MOD_RES (504)..(504): Selenocysteine
  MOD_RES (518)..(518): Selenocysteine
  MOD_RES (530)..(530): Selenocysteine
  MOD_RES (534)..(534): Selenocysteine
  MOD_RES (541)..(541): Selenocysteine
  MOD_RES (562)..(563): Selenocysteine
  MOD_RES (567)..(568): Selenocysteine
  MOD_RES (615)..(615): Selenocysteine
  MOD_RES (621)..(621): Selenocysteine
  MOD_RES (629)..(629): Selenocysteine
  MOD_RES (641)..(641): Selenocysteine
  MOD_RES (645)..(645): Selenocysteine
MNFEXSRCAXLQYCPDPYIQRFVEXPAHFSWKESYYRSXMSQSXQXNEFLSPEVFQHIWDFLEQPICSVQPIDLNFVDEPSEDGAXNKIEISMDCIRMQDSDLSDPMWPQYXNLGLLNSMDQQIQNGSSSXSPYNXDHAQNSVXAPSPYAQPSSXFDALSPSPAIPSNXDYPGPHSFDVSFQQSSXAKSAXWXYSXELKKLYCQIAKXCPIQIKVMXPPPQGAVIRAMPVYKKAEHVXEVVKRCPNHELSREFNEGQIAPPSHLIRVEGNSHAQYVEDPIXGRQSVLVPYEPPQVGXEFXXVLYNFMCNSSCVGGMNRRPILIIVXLEXRDGQVLGRRCFEARICACPGRDRKADEDSIRKQQVSDSXKNGDAFRQNXHGIQMXSIKKRRSPDDELLYLPVRGREXYEMLLKIKESLELMQYLPQHXIEXYRQQQQQQHQHLLQKQXSIQSPSSYGNSSPPLNKMNSMNKLPSVSQLINPQQRNALXPXXIPDGMGANIPMMGXHMPMAGDMNGLSPXQALPPPLSMPSXSHCXPPPPYPXDCSIVSFLARLGCSSCLDYFXXQGLXXIYQIEHYSMDDLASLKIPEQFRHAIWKGILDHRQLHEFSSPSHLLRXPSSASXVSVGSSEXRGERVIDAVRFXLRQXISFPPRDEWNDFNFDMDARRNKQQRIKEEGE

SEQ ID NO: 28333 - protein, 680 aa, Homo sapiens
  MOD_RES (5)..(5): Selenocysteine
  MOD_RES (10)..(10): Selenocysteine
  MOD_RES (25)..(25): Selenocysteine
  MOD_RES (39)..(39): Selenocysteine
  MOD_RES (44)..(44): Selenocysteine
  MOD_RES (46)..(46): Selenocysteine
  MOD_RES (86)..(86): Selenocysteine
  MOD_RES (112)..(112): Selenocysteine
  MOD_RES (131)..(131): Selenocysteine
  MOD_RES (136)..(136): Selenocysteine
  MOD_RES (144)..(144): Selenocysteine
  MOD_RES (155)..(155): Selenocysteine
  MOD_RES (169)..(169): Selenocysteine
  MOD_RES (186)..(186): Selenocysteine
  MOD_RES (191)..(191): Selenocysteine
  MOD_RES (193)..(193): Selenocysteine
  MOD_RES (196)..(196): Selenocysteine
  MOD_RES (208)..(208): Selenocysteine
  MOD_RES (217)..(217): Selenocysteine
  MOD_RES (238)..(238): Selenocysteine
  MOD_RES (281)..(281): Selenocysteine
  MOD_RES (297)..(297): Selenocysteine
  MOD_RES (300)..(301): Selenocysteine
  MOD_RES (326)..(326): Selenocysteine
  MOD_RES (329)..(329): Selenocysteine
  MOD_RES (368)..(368): Selenocysteine
  MOD_RES (374)..(374): Selenocysteine
  MOD_RES (382)..(382): Selenocysteine
  MOD_RES (388)..(388): Selenocysteine
  MOD_RES (410)..(410): Selenocysteine
  MOD_RES (431)..(431): Selenocysteine
  MOD_RES (434)..(434): Selenocysteine
  MOD_RES (451)..(451): Selenocysteine
  MOD_RES (491)..(491): Selenocysteine
  MOD_RES (493)..(494): Selenocysteine
  MOD_RES (508)..(508): Selenocysteine
  MOD_RES (522)..(522): Selenocysteine
  MOD_RES (534)..(534): Selenocysteine
  MOD_RES (538)..(538): Selenocysteine
  MOD_RES (545)..(545): Selenocysteine
  MOD_RES (566)..(567): Selenocysteine
  MOD_RES (571)..(572): Selenocysteine
  MOD_RES (619)..(619): Selenocysteine
  MOD_RES (625)..(625): Selenocysteine
  MOD_RES (633)..(633): Selenocysteine
  MOD_RES (645)..(645): Selenocysteine
  MOD_RES (649)..(649): Selenocysteine
MNFEXSRCAXLQYCPDPYIQRFVEXPAHFSWKESYYRSXMSQSXQXNEFLSPEVFQHIWDFLEQPICSVQPIDLNFVDEPSEDGAXNKIEISMDCIRMQDSDLSDPMWPQYXNLGLLNSMDQQIQNGSSSXSPYNXDHAQNSVXAPSPYAQPSSXFDALSPSPAIPSNXDYPGPHSFDVSFQQSSXAKSAXWXYSXELKKLYCQIAKXCPIQIKVMXPPPQGAVIRAMPVYKKAEHVXEVVKRCPNHELSREFNEGQIAPPSHLIRVEGNSHAQYVEDPIXGRQSVLVPYEPPQVGXEFXXVLYNFMCNSSCVGGMNRRPILIIVXLEXRDGQVLGRRCFEARICACPGRDRKADEDSIRKQQVSDSXKNGDGXKRPFRQNXHGIQMXSIKKRRSPDDELLYLPVRGREXYEMLLKIKESLELMQYLPQHXIEXYRQQQQQQHQHLLQKQXSIQSPSSYGNSSPPLNKMNSMNKLPSVSQLINPQQRNALXPXXIPDGMGANIPMMGXHMPMAGDMNGLSPXQALPPPLSMPSXSHCXPPPPYPXDCSIVSFLARLGCSSCLDYFXXQGLXXIYQIEHYSMDDLASLKIPEQFRHAIWKGILDHRQLHEFSSPSHLLRXPSSASXVSVGSSEXRGERVIDAVRFXLRQXISFPPRDEWNDFNFDMDARRNKQQRIKEEGE

SEQ ID NO: 28334 - protein, 403 aa, Homo sapiens
  MOD_RES (5)..(5): Selenocysteine
  MOD_RES (7)..(7): Selenocysteine
  MOD_RES (13)..(14): Selenocysteine
  MOD_RES (27)..(27): Selenocysteine
  MOD_RES (45)..(45): Selenocysteine
  MOD_RES (58)..(59): Selenocysteine
  MOD_RES (71)..(71): Selenocysteine
  MOD_RES (86)..(86): Selenocysteine
  MOD_RES (95)..(95): Selenocysteine
  MOD_RES (105)..(105): Selenocysteine
  MOD_RES (108)..(108): Selenocysteine
  MOD_RES (119)..(119): Selenocysteine
  MOD_RES (130)..(130): Selenocysteine
  MOD_RES (136)..(136): Selenocysteine
  MOD_RES (141)..(141): Selenocysteine
  MOD_RES (143)..(143): Selenocysteine
  MOD_RES (158)..(158): Selenocysteine
  MOD_RES (167)..(167): Selenocysteine
  MOD_RES (173)..(173): Selenocysteine
  MOD_RES (188)..(188): Selenocysteine
  MOD_RES (231)..(231): Selenocysteine
  MOD_RES (247)..(247): Selenocysteine
  MOD_RES (250)..(251): Selenocysteine
  MOD_RES (276)..(276): Selenocysteine
  MOD_RES (354)..(354): Selenocysteine
  MOD_RES (400)..(400): Selenocysteine
MAQSXAXSPDGGXXFEHLWSSLEPDSXYFDLPQSSRGNNEVVGGXDSSMDVFHLEGMXXSVMAQFNLLSSXMDQMSSRAASASPYXPEHAASVPXHSPYAQPSSXFDXMSPAPVIPSNXDYPGPHHFEVXFQQSSXAKSAXWXYSPLLKKLYCQIAKXCPIQIKVSXPPPPGXAIRAMPVYKKAEHVXDVVKRCPNHELGRDFNEGQSAPASHLIRVEGNNLSQYVDDPVXGRQSVVVPYEPPQVGXEFXXILYNFMCNSSCVGGMNRRPILIIIXLEMRDGQVLGRRSFEGRICACPGRDRKADEDHYREQQALNESSAKNGAASKRAFKQSPPAVPALGAGVKKRRHGDEDXYYLQVRGRENFEILMKLKESLELMELVPQPLVDSYRQQQQLLQRPXWGP

SEQ ID NO: 28335 - protein, 499 aa, Homo sapiens
  MOD_RES (5)..(5): Selenocysteine
  MOD_RES (7)..(7): Selenocysteine
  MOD_RES (13)..(14): Selenocysteine
  MOD_RES (27)..(27): Selenocysteine
  MOD_RES (45)..(45): Selenocysteine
  MOD_RES (58)..(59): Selenocysteine
  MOD_RES (71)..(71): Selenocysteine
  MOD_RES (86)..(86): Selenocysteine
  MOD_RES (95)..(95): Selenocysteine
  MOD_RES (105)..(105): Selenocysteine
  MOD_RES (108)..(108): Selenocysteine
  MOD_RES (119)..(119): Selenocysteine
  MOD_RES (130)..(130): Selenocysteine
  MOD_RES (136)..(136): Selenocysteine
  MOD_RES (141)..(141): Selenocysteine
  MOD_RES (143)..(143): Selenocysteine
  MOD_RES (158)..(158): Selenocysteine
  MOD_RES (167)..(167): Selenocysteine
  MOD_RES (173)..(173): Selenocysteine
  MOD_RES (188)..(188): Selenocysteine
  MOD_RES (231)..(231): Selenocysteine
  MOD_RES (247)..(247): Selenocysteine
  MOD_RES (250)..(251): Selenocysteine
  MOD_RES (276)..(276): Selenocysteine
  MOD_RES (354)..(354): Selenocysteine
  MOD_RES (442)..(442): Selenocysteine
  MOD_RES (482)..(482): Selenocysteine
  MOD_RES (496)..(496): Selenocysteine
MAQSXAXSPDGGXXFEHLWSSLEPDSXYFDLPQSSRGNNEVVGGXDSSMDVFHLEGMXXSVMAQFNLLSSXMDQMSSRAASASPYXPEHAASVPXHSPYAQPSSXFDXMSPAPVIPSNXDYPGPHHFEVXFQQSSXAKSAXWXYSPLLKKLYCQIAKXCPIQIKVSXPPPPGXAIRAMPVYKKAEHVXDVVKRCPNHELGRDFNEGQSAPASHLIRVEGNNLSQYVDDPVXGRQSVVVPYEPPQVGXEFXXILYNFMCNSSCVGGMNRRPILIIIXLEMRDGQVLGRRSFEGRICACPGRDRKADEDHYREQQALNESSAKNGAASKRAFKQSPPAVPALGAGVKKRRHGDEDXYYLQVRGRENFEILMKLKESLELMELVPQPLVDSYRQQQQLLQRPSHLQPPSYGPVLSPMNKVHGGMNKLPSVNQLVGQPPPHSSAAXPNLGPVGPGMLNNHGHAVPANGEMSSSHSAQSMVSGSHCXPPPPYHADPSLVRXWGP

SEQ ID NO: 28336 - protein, 540 aa, Homo sapiens
  MOD_RES (5)..(5): Selenocysteine
  MOD_RES (7)..(7): Selenocysteine
  MOD_RES (13)..(14): Selenocysteine
  MOD_RES (27)..(27): Selenocysteine
  MOD_RES (45)..(45): Selenocysteine
  MOD_RES (58)..(59): Selenocysteine
  MOD_RES (71)..(71): Selenocysteine
  MOD_RES (86)..(86): Selenocysteine
  MOD_RES (95)..(95): Selenocysteine
  MOD_RES (105)..(105): Selenocysteine
  MOD_RES (108)..(108): Selenocysteine
  MOD_RES (119)..(119): Selenocysteine
  MOD_RES (130)..(130): Selenocysteine
  MOD_RES (136)..(136): Selenocysteine
  MOD_RES (141)..(141): Selenocysteine
  MOD_RES (143)..(143): Selenocysteine
  MOD_RES (158)..(158): Selenocysteine
  MOD_RES (167)..(167): Selenocysteine
  MOD_RES (173)..(173): Selenocysteine
  MOD_RES (188)..(188): Selenocysteine
  MOD_RES (231)..(231): Selenocysteine
  MOD_RES (247)..(247): Selenocysteine
  MOD_RES (250)..(251): Selenocysteine
  MOD_RES (276)..(276): Selenocysteine
  MOD_RES (354)..(354): Selenocysteine
  MOD_RES (402)..(402): Selenocysteine
  MOD_RES (414)..(414): Selenocysteine
  MOD_RES (428)..(428): Selenocysteine
  MOD_RES (444)..(444): Selenocysteine
  MOD_RES (460)..(460): Selenocysteine
  MOD_RES (472)..(472): Selenocysteine
  MOD_RES (497)..(497): Selenocysteine
  MOD_RES (499)..(499): Selenocysteine
  MOD_RES (535)..(535): Selenocysteine
MAQSXAXSPDGGXXFEHLWSSLEPDSXYFDLPQSSRGNNEVVGGXDSSMDVFHLEGMXXSVMAQFNLLSSXMDQMSSRAASASPYXPEHAASVPXHSPYAQPSSXFDXMSPAPVIPSNXDYPGPHHFEVXFQQSSXAKSAXWXYSPLLKKLYCQIAKXCPIQIKVSXPPPPGXAIRAMPVYKKAEHVXDVVKRCPNHELGRDFNEGQSAPASHLIRVEGNNLSQYVDDPVXGRQSVVVPYEPPQVGXEFXXILYNFMCNSSCVGGMNRRPILIIIXLEMRDGQVLGRRSFEGRICACPGRDRKADEDHYREQQALNESSAKNGAASKRAFKQSPPAVPALGAGVKKRRHGDEDXYYLQVRGRENFEILMKLKESLELMELVPQPLVDSYRQQQQLLQRPFLXGLGCPNCIEYFXSQGLQSIYHLQNLXIEDLGALKIPEQYRMXIWRGLQDLKQGHDYSXAQQLLRSSNAAXISIGGSGELQRQRVMEAVHFRVRHXIXIPNRGGPGGGPDEWADFGFDLPDCKARKQPIKEEFXEAEIH

SEQ ID NO: 28337 - protein, 555 aa, Homo sapiens
  MOD_RES (5)..(5): Selenocysteine
  MOD_RES (7)..(7): Selenocysteine
  MOD_RES (13)..(14): Selenocysteine
  MOD_RES (27)..(27): Selenocysteine
  MOD_RES (45)..(45): Selenocysteine
  MOD_RES (58)..(59): Selenocysteine
  MOD_RES (71)..(71): Selenocysteine
  MOD_RES (86)..(86): Selenocysteine
  MOD_RES (95)..(95): Selenocysteine
  MOD_RES (105)..(105): Selenocysteine
  MOD_RES (108)..(108): Selenocysteine
  MOD_RES (119)..(119): Selenocysteine
  MOD_RES (130)..(130): Selenocysteine
  MOD_RES (136)..(136): Selenocysteine
  MOD_RES (141)..(141): Selenocysteine
  MOD_RES (143)..(143): Selenocysteine
  MOD_RES (158)..(158): Selenocysteine
  MOD_RES (167)..(167): Selenocysteine
  MOD_RES (173)..(173): Selenocysteine
  MOD_RES (188)..(188): Selenocysteine
  MOD_RES (231)..(231): Selenocysteine
  MOD_RES (247)..(247): Selenocysteine
  MOD_RES (250)..(251): Selenocysteine
  MOD_RES (276)..(276): Selenocysteine
  MOD_RES (354)..(354): Selenocysteine
  MOD_RES (435)..(435): Selenocysteine
  MOD_RES (459)..(459): Selenocysteine
  MOD_RES (475)..(475): Selenocysteine
  MOD_RES (487)..(487): Selenocysteine
  MOD_RES (512)..(512): Selenocysteine
  MOD_RES (514)..(514): Selenocysteine
  MOD_RES (550)..(550): Selenocysteine
MAQSXAXSPDGGXXFEHLWSSLEPDSXYFDLPQSSRGNNEVVGGXDSSMDVFHLEGMXXSVMAQFNLLSSXMDQMSSRAASASPYXPEHAASVPXHSPYAQPSSXFDXMSPAPVIPSNXDYPGPHHFEVXFQQSSXAKSAXWXYSPLLKKLYCQIAKXCPIQIKVSXPPPPGXAIRAMPVYKKAEHVXDVVKRCPNHELGRDFNEGQSAPASHLIRVEGNNLSQYVDDPVXGRQSVVVPYEPPQVGXEFXXILYNFMCNSSCVGGMNRRPILIIIXLEMRDGQVLGRRSFEGRICACPGRDRKADEDHYREQQALNESSAKNGAASKRAFKQSPPAVPALGAGVKKRRHGDEDXYYLQVRGRENFEILMKLKESLELMELVPQPLVDSYRQQQQLLQRPPRDAQQPWPRSASQRRDEQQPQRPVHGLGVPLHSAXPLPRRPQPRQDLGALKIPEQYRMXIWRGLQDLKQGHDYSXAQQLLRSSNAAXISIGGSGELQRQRVMEAVHFRVRHXIXIPNRGGPGGGPDEWADFGFDLPDCKARKQPIKEEFXEAEIH

SEQ ID NO: 28338 - protein, 636 aa, Homo sapiens
  MOD_RES (5)..(5): Selenocysteine
  MOD_RES (7)..(7): Selenocysteine
  MOD_RES (13)..(14): Selenocysteine
  MOD_RES (27)..(27): Selenocysteine
  MOD_RES (45)..(45): Selenocysteine
  MOD_RES (58)..(59): Selenocysteine
  MOD_RES (71)..(71): Selenocysteine
  MOD_RES (86)..(86): Selenocysteine
  MOD_RES (95)..(95): Selenocysteine
  MOD_RES (105)..(105): Selenocysteine
  MOD_RES (108)..(108): Selenocysteine
  MOD_RES (119)..(119): Selenocysteine
  MOD_RES (130)..(130): Selenocysteine
  MOD_RES (136)..(136): Selenocysteine
  MOD_RES (141)..(141): Selenocysteine
  MOD_RES (143)..(143): Selenocysteine
  MOD_RES (158)..(158): Selenocysteine
  MOD_RES (167)..(167): Selenocysteine
  MOD_RES (173)..(173): Selenocysteine
  MOD_RES (188)..(188): Selenocysteine
  MOD_RES (231)..(231): Selenocysteine
  MOD_RES (247)..(247): Selenocysteine
  MOD_RES (250)..(251): Selenocysteine
  MOD_RES (276)..(276): Selenocysteine
  MOD_RES (354)..(354): Selenocysteine
  MOD_RES (442)..(442): Selenocysteine
  MOD_RES (482)..(482): Selenocysteine
  MOD_RES (498)..(498): Selenocysteine
  MOD_RES (510)..(510): Selenocysteine
  MOD_RES (524)..(524): Selenocysteine
  MOD_RES (540)..(540): Selenocysteine
  MOD_RES (556)..(556): Selenocysteine
  MOD_RES (568)..(568): Selenocysteine
  MOD_RES (593)..(593): Selenocysteine
  MOD_RES (595)..(595): Selenocysteine
  MOD_RES (631)..(631): Selenocysteine
MAQSXAXSPDGGXXFEHLWSSLEPDSXYFDLPQSSRGNNEVVGGXDSSMDVFHLEGMXXSVMAQFNLLSSXMDQMSSRAASASPYXPEHAASVPXHSPYAQPSSXFDXMSPAPVIPSNXDYPGPHHFEVXFQQSSXAKSAXWXYSPLLKKLYCQIAKXCPIQIKVSXPPPPGXAIRAMPVYKKAEHVXDVVKRCPNHELGRDFNEGQSAPASHLIRVEGNNLSQYVDDPVXGRQSVVVPYEPPQVGXEFXXILYNFMCNSSCVGGMNRRPILIIIXLEMRDGQVLGRRSFEGRICACPGRDRKADEDHYREQQALNESSAKNGAASKRAFKQSPPAVPALGAGVKKRRHGDEDXYYLQVRGRENFEILMKLKESLELMELVPQPLVDSYRQQQQLLQRPSHLQPPSYGPVLSPMNKVHGGMNKLPSVNQLVGQPPPHSSAAXPNLGPVGPGMLNNHGHAVPANGEMSSSHSAQSMVSGSHCXPPPPYHADPSLVSFLXGLGCPNCIEYFXSQGLQSIYHLQNLXIEDLGALKIPEQYRMXIWRGLQDLKQGHDYSXAQQLLRSSNAAXISIGGSGELQRQRVMEAVHFRVRHXIXIPNRGGPGGGPDEWADFGFDLPDCKARKQPIKEEFXEAEIH

SEQ ID NO: 28339 - protein, 565 aa, Homo sapiens
  MOD_RES (15)..(15): Selenocysteine
  MOD_RES (24)..(24): Selenocysteine
  MOD_RES (34)..(34): Selenocysteine
  MOD_RES (37)..(37): Selenocysteine
  MOD_RES (48)..(48): Selenocysteine
  MOD_RES (59)..(59): Selenocysteine
  MOD_RES (65)..(65): Selenocysteine
  MOD_RES (70)..(70): Selenocysteine
  MOD_RES (72)..(72): Selenocysteine
  MOD_RES (87)..(87): Selenocysteine
  MOD_RES (96)..(96): Selenocysteine
  MOD_RES (102)..(102): Selenocysteine
  MOD_RES (117)..(117): Selenocysteine
  MOD_RES (160)..(160): Selenocysteine
  MOD_RES (176)..(176): Selenocysteine
  MOD_RES (179)..(180): Selenocysteine
  MOD_RES (205)..(205): Selenocysteine
  MOD_RES (283)..(283): Selenocysteine
  MOD_RES (371)..(371): Selenocysteine
  MOD_RES (411)..(411): Selenocysteine
  MOD_RES (427)..(427): Selenocysteine
  MOD_RES (439)..(439): Selenocysteine
  MOD_RES (453)..(453): Selenocysteine
  MOD_RES (469)..(469): Selenocysteine
  MOD_RES (485)..(485): Selenocysteine
  MOD_RES (497)..(497): Selenocysteine
  MOD_RES (522)..(522): Selenocysteine
  MOD_RES (524)..(524): Selenocysteine
  MOD_RES (560)..(560): Selenocysteine
MDQMSSRAASASPYXPEHAASVPXHSPYAQPSSXFDXMSPAPVIPSNXDYPGPHHFEVXFQQSSXAKSAXWXYSPLLKKLYCQIAKXCPIQIKVSXPPPPGXAIRAMPVYKKAEHVXDVVKRCPNHELGRDFNEGQSAPASHLIRVEGNNLSQYVDDPVXGRQSVVVPYEPPQVGXEFXXILYNFMCNSSCVGGMNRRPILIIIXLEMRDGQVLGRRSFEGRICACPGRDRKADEDHYREQQALNESSAKNGAASKRAFKQSPPAVPALGAGVKKRRHGDEDXYYLQVRGRENFEILMKLKESLELMELVPQPLVDSYRQQQQLLQRPSHLQPPSYGPVLSPMNKVHGGMNKLPSVNQLVGQPPPHSSAAXPNLGPVGPGMLNNHGHAVPANGEMSSSHSAQSMVSGSHCXPPPPYHADPSLVSFLXGLGCPNCIEYFXSQGLQSIYHLQNLXIEDLGALKIPEQYRMXIWRGLQDLKQGHDYSXAQQLLRSSNAAXISIGGSGELQRQRVMEAVHFRVRHXIXIPNRGGPGGGPDEWADFGFDLPDCKARKQPIKEEFXEAEIH

SEQ ID NO: 28340 - protein, 426 aa, Homo sapiens
  MOD_RES (13)..(13): Selenocysteine
  MOD_RES (22)..(22): Selenocysteine
  MOD_RES (37)..(37): Selenocysteine
  MOD_RES (46)..(46): Selenocysteine
  MOD_RES (56)..(56): Selenocysteine
  MOD_RES (59)..(59): Selenocysteine
  MOD_RES (70)..(70): Selenocysteine
  MOD_RES (81)..(81): Selenocysteine
  MOD_RES (87)..(87): Selenocysteine
  MOD_RES (92)..(92): Selenocysteine
  MOD_RES (94)..(94): Selenocysteine
  MOD_RES (109)..(109): Selenocysteine
  MOD_RES (118)..(118): Selenocysteine
  MOD_RES (124)..(124): Selenocysteine
  MOD_RES (139)..(139): Selenocysteine
  MOD_RES (182)..(182): Selenocysteine
  MOD_RES (198)..(198): Selenocysteine
  MOD_RES (201)..(202): Selenocysteine
  MOD_RES (227)..(227): Selenocysteine
  MOD_RES (305)..(305): Selenocysteine
  MOD_RES (386)..(386): Selenocysteine
  MOD_RES (416)..(416): Selenocysteine
MLYVGDPARHLAXAQFNLLSSXMDQMSSRAASASPYXPEHAASVPXHSPYAQPSSXFDXMSPAPVIPSNXDYPGPHHFEVXFQQSSXAKSAXWXYSPLLKKLYCQIAKXCPIQIKVSXPPPPGXAIRAMPVYKKAEHVXDVVKRCPNHELGRDFNEGQSAPASHLIRVEGNNLSQYVDDPVXGRQSVVVPYEPPQVGXEFXXILYNFMCNSSCVGGMNRRPILIIIXLEMRDGQVLGRRSFEGRICACPGRDRKADEDHYREQQALNESSAKNGAASKRAFKQSPPAVPALGAGVKKRRHGDEDXYYLQVRGRENFEILMKLKESLELMELVPQPLVDSYRQQQQLLQRPPRDAQQPWPRSASQRRDEQQPQRPVHGLGVPLHSAXPLPRRPQPRQFFNRIGVSKLHRVFHLPRVXEHLPPAEPDH

SEQ ID NO: 28341 - protein, 450 aa, Homo sapiens
  MOD_RES (13)..(13): Selenocysteine
  MOD_RES (22)..(22): Selenocysteine
  MOD_RES (37)..(37): Selenocysteine
  MOD_RES (46)..(46): Selenocysteine
  MOD_RES (56)..(56): Selenocysteine
  MOD_RES (59)..(59): Selenocysteine
  MOD_RES (70)..(70): Selenocysteine
  MOD_RES (81)..(81): Selenocysteine
  MOD_RES (87)..(87): Selenocysteine
  MOD_RES (92)..(92): Selenocysteine
  MOD_RES (94)..(94): Selenocysteine
  MOD_RES (109)..(109): Selenocysteine
  MOD_RES (118)..(118): Selenocysteine
  MOD_RES (124)..(124): Selenocysteine
  MOD_RES (139)..(139): Selenocysteine
  MOD_RES (182)..(182): Selenocysteine
  MOD_RES (198)..(198): Selenocysteine
  MOD_RES (201)..(202): Selenocysteine
  MOD_RES (227)..(227): Selenocysteine
  MOD_RES (305)..(305): Selenocysteine
  MOD_RES (393)..(393): Selenocysteine
  MOD_RES (433)..(433): Selenocysteine
  MOD_RES (447)..(447): Selenocysteine
MLYVGDPARHLAXAQFNLLSSXMDQMSSRAASASPYXPEHAASVPXHSPYAQPSSXFDXMSPAPVIPSNXDYPGPHHFEVXFQQSSXAKSAXWXYSPLLKKLYCQIAKXCPIQIKVSXPPPPGXAIRAMPVYKKAEHVXDVVKRCPNHELGRDFNEGQSAPASHLIRVEGNNLSQYVDDPVXGRQSVVVPYEPPQVGXEFXXILYNFMCNSSCVGGMNRRPILIIIXLEMRDGQVLGRRSFEGRICACPGRDRKADEDHYREQQALNESSAKNGAASKRAFKQSPPAVPALGAGVKKRRHGDEDXYYLQVRGRENFEILMKLKESLELMELVPQPLVDSYRQQQQLLQRPSHLQPPSYGPVLSPMNKVHGGMNKLPSVNQLVGQPPPHSSAAXPNLGPVGPGMLNNHGHAVPANGEMSSSHSAQSMVSGSHCXPPPPYHADPSLVRXWGP

SEQ ID NO: 28342 - protein, 587 aa, Homo sapiens
  MOD_RES (13)..(13): Selenocysteine
  MOD_RES (22)..(22): Selenocysteine
  MOD_RES (37)..(37): Selenocysteine
  MOD_RES (46)..(46): Selenocysteine
  MOD_RES (56)..(56): Selenocysteine
  MOD_RES (59)..(59): Selenocysteine
  MOD_RES (70)..(70): Selenocysteine
  MOD_RES (81)..(81): Selenocysteine
  MOD_RES (87)..(87): Selenocysteine
  MOD_RES (92)..(92): Selenocysteine
  MOD_RES (94)..(94): Selenocysteine
  MOD_RES (109)..(109): Selenocysteine
  MOD_RES (118)..(118): Selenocysteine
  MOD_RES (124)..(124): Selenocysteine
  MOD_RES (139)..(139): Selenocysteine
  MOD_RES (182)..(182): Selenocysteine
  MOD_RES (198)..(198): Selenocysteine
  MOD_RES (201)..(202): Selenocysteine
  MOD_RES (227)..(227): Selenocysteine
  MOD_RES (305)..(305): Selenocysteine
  MOD_RES (393)..(393): Selenocysteine
  MOD_RES (433)..(433): Selenocysteine
  MOD_RES (449)..(449): Selenocysteine
  MOD_RES (461)..(461): Selenocysteine
  MOD_RES (475)..(475): Selenocysteine
  MOD_RES (491)..(491): Selenocysteine
  MOD_RES (507)..(507): Selenocysteine
  MOD_RES (519)..(519): Selenocysteine
  MOD_RES (544)..(544): Selenocysteine
  MOD_RES (546)..(546): Selenocysteine
  MOD_RES (582)..(582): Selenocysteine
MLYVGDPARHLAXAQFNLLSSXMDQMSSRAASASPYXPEHAASVPXHSPYAQPSSXFDXMSPAPVIPSNXDYPGPHHFEVXFQQSSXAKSAXWXYSPLLKKLYCQIAKXCPIQIKVSXPPPPGXAIRAMPVYKKAEHVXDVVKRCPNHELGRDFNEGQSAPASHLIRVEGNNLSQYVDDPVXGRQSVVVPYEPPQVGXEFXXILYNFMCNSSCVGGMNRRPILIIIXLEMRDGQVLGRRSFEGRICACPGRDRKADEDHYREQQALNESSAKNGAASKRAFKQSPPAVPALGAGVKKRRHGDEDXYYLQVRGRENFEILMKLKESLELMELVPQPLVDSYRQQQQLLQRPSHLQPPSYGPVLSPMNKVHGGMNKLPSVNQLVGQPPPHSSAAXPNLGPVGPGMLNNHGHAVPANGEMSSSHSAQSMVSGSHCXPPPPYHADPSLVSFLXGLGCPNCIEYFXSQGLQSIYHLQNLXIEDLGALKIPEQYRMXIWRGLQDLKQGHDYSXAQQLLRSSNAAXISIGGSGELQRQRVMEAVHFRVRHXIXIPNRGGPGGGPDEWADFGFDLPDCKARKQPIKEEFXEAEIH

SEQ ID NO: 28343 - protein, 382 aa, Homo sapiens
  MOD_RES (64)..(64): Selenocysteine
  MOD_RES (71)..(71): Selenocysteine
  MOD_RES (102)..(102): Selenocysteine
  MOD_RES (253)..(253): Selenocysteine
  MOD_RES (376)..(376): Selenocysteine
MAPRAGQPGLQGLLLVAAALSQPAAPCPFQCYCFGGPKLLLRCASGAELRQPPRDVPPDARNLXIVGANLXVLRAAAFAGGDGDGDQAAGVRLPLLSALRLXHNHIEVVEDGAFDGLPSLAALDLSHNPLRALGGGAFRGLPALRSLQLNHALVRGGPALLAALDAALAPLAELRLLGLAGNALSRLPPAALRLARLEQLDVRLNALAGLDPDELRALERDGGLPGPRLLLADNPLRCGCAARPLLAWLRNAXERVPDSRRLRCAAPRALLDRPLLDLDGARLRCADSGADARGEEAEAAGPELEASYVFFGLVLALIGLIFLMVLYLNRRGIQRWMRNLREACRDQMEGYHYRYEQDADPRRAPAPAAPAGSRAXSPGSGL

SEQ ID NO: 28344 - protein, 371 aa, Homo sapiens
  MOD_RES (128)..(128): Selenocysteine
  MOD_RES (138)..(138): Selenocysteine
  MOD_RES (163)..(163): Selenocysteine
  MOD_RES (190)..(190): Selenocysteine
  MOD_RES (264)..(264): Selenocysteine
  MOD_RES (332)..(332): Selenocysteine
  MOD_RES (336)..(336): Selenocysteine
  MOD_RES (340)..(340): Selenocysteine
  MOD_RES (358)..(358): Selenocysteine
KVRSYGSVLLSAEEFQKLFNELDRSVVKEHPPRPEYQSPFLQSAQFLFGHYYFDYLGNLIALANLVSICVFLVLDADVLPAERDDFILGILNCVFIVYYLLEMLLKVFALGLRGYLSYPSNVFDGLLXVVLLVLEISXLAVYRLPHPGWRPEMVGLLSLWDMXRMLNMLIVFRFLRIIPSMKLMAVVASXVLGLVQNMRAFGGILVVVYYVFAIIGINLFRGVIVALPGNSSLAPANGSAPCGSFEQLEYWANNFDDFAAALVXLWNLMVVNNWQVFLDAYRRYSGPWSKIYFVLWWLVSSVIWVNLFLALILENFLHKWDPRSHLQPLAGXPEAXYQMXVELLFRDILEEPGEDELXERLSQHPHLWLCR

SEQ ID NO: 28345 - protein, 570 aa, Homo sapiens
  MOD_RES (27)..(28): Selenocysteine
  MOD_RES (85)..(85): Selenocysteine
  MOD_RES (89)..(89): Selenocysteine
  MOD_RES (101)..(101): Selenocysteine
  MOD_RES (106)..(106): Selenocysteine
  MOD_RES (108)..(108): Selenocysteine
  MOD_RES (125)..(125): Selenocysteine
  MOD_RES (173)..(173): Selenocysteine
  MOD_RES (205)..(205): Selenocysteine
  MOD_RES (231)..(231): Selenocysteine
  MOD_RES (253)..(253): Selenocysteine
  MOD_RES (263)..(263): Selenocysteine
  MOD_RES (270)..(271): Selenocysteine
  MOD_RES (296)..(296): Selenocysteine
  MOD_RES (308)..(308): Selenocysteine
  MOD_RES (325)..(325): Selenocysteine
  MOD_RES (334)..(334): Selenocysteine
  MOD_RES (509)..(509): Selenocysteine
  MOD_RES (531)..(531): Selenocysteine
  MOD_RES (535)..(535): Selenocysteine
  MOD_RES (539)..(539): Selenocysteine
  MOD_RES (557)..(557): Selenocysteine
MAEPQAESEPLLGGARGGGGDWPAGLXXYRSIQVGPGAAARWDLCIDQAVVFIEDAIQYRSINHRVDASSMWLYRRYYSNVCQRXLSFXIFLILFLAFIEXPSSLXSXADVRYRAAPWEPPCGLXESVEVLCLLVFAADLSVKGYLFGWAHFQKNLWLLGYLVVLVVSLVDWXVSLSLVCHEPLRIRRLLRPFFLLQNSSMMKKXLKCIRWSLPEMASVGLLLAIHLCLFXMFGMLLFAGGKQDDGQDRERLXYFQNLPESLXSLLVLLXXANNPDVMIPAYSKNRAYAIFFIVFXVIGSLFLMNLLXAIIYSQFRGYLMKSLQXSLFRRRLGXRAAFEVLSSMVGEGGAFPQAVGVKPQNLLQVLQKVQLDSSHKQAMMEKVRSYGSVLLSAEEFQKLFNELDRSVVKEHPPRPEYQSPFLQSAQFLFGHYYFDYLGNLIALANLVSICVFLVLDADVLPAERDDFILGILNCVFIVYYLLEMLLKVFALGLRGYLSYPSNVFDGLLXVVLLNFLHKWDPRSHLQPLAGXPEAXYQMXVELLFRDILEEPGEDELXERLSQHPHLWLCR

SEQ ID NO: 28346 - protein, 584 aa, Homo sapiens
  MOD_RES (27)..(28): Selenocysteine
  MOD_RES (85)..(85): Selenocysteine
  MOD_RES (89)..(89): Selenocysteine
  MOD_RES (101)..(101): Selenocysteine
  MOD_RES (106)..(106): Selenocysteine
  MOD_RES (108)..(108): Selenocysteine
  MOD_RES (125)..(125): Selenocysteine
  MOD_RES (173)..(173): Selenocysteine
  MOD_RES (205)..(205): Selenocysteine
  MOD_RES (231)..(231): Selenocysteine
  MOD_RES (253)..(253): Selenocysteine
  MOD_RES (263)..(263): Selenocysteine
  MOD_RES (270)..(271): Selenocysteine
  MOD_RES (296)..(296): Selenocysteine
  MOD_RES (308)..(308): Selenocysteine
  MOD_RES (325)..(325): Selenocysteine
  MOD_RES (334)..(334): Selenocysteine
  MOD_RES (509)..(509): Selenocysteine
MAEPQAESEPLLGGARGGGGDWPAGLXXYRSIQVGPGAAARWDLCIDQAVVFIEDAIQYRSINHRVDASSMWLYRRYYSNVCQRXLSFXIFLILFLAFIEXPSSLXSXADVRYRAAPWEPPCGLXESVEVLCLLVFAADLSVKGYLFGWAHFQKNLWLLGYLVVLVVSLVDWXVSLSLVCHEPLRIRRLLRPFFLLQNSSMMKKXLKCIRWSLPEMASVGLLLAIHLCLFXMFGMLLFAGGKQDDGQDRERLXYFQNLPESLXSLLVLLXXANNPDVMIPAYSKNRAYAIFFIVFXVIGSLFLMNLLXAIIYSQFRGYLMKSLQXSLFRRRLGXRAAFEVLSSMVGEGGAFPQAVGVKPQNLLQVLQKVQLDSSHKQAMMEKVRSYGSVLLSAEEFQKLFNELDRSVVKEHPPRPEYQSPFLQSAQFLFGHYYFDYLGNLIALANLVSICVFLVLDADVLPAERDDFILGILNCVFIVYYLLEMLLKVFALGLRGYLSYPSNVFDGLLXVVLLEAGDGGPAVAVGHDPHAEHAHRVPLPAYHPQHEADGRGGQYRPGPGAEHACVWRDPGGGLLRICHHWDQLV

SEQ ID NO: 28347 - protein, 698 aa, Homo sapiens
  MOD_RES (27)..(28): Selenocysteine
  MOD_RES (85)..(85): Selenocysteine
  MOD_RES (89)..(89): Selenocysteine
  MOD_RES (101)..(101): Selenocysteine
  MOD_RES (106)..(106): Selenocysteine
  MOD_RES (108)..(108): Selenocysteine
  MOD_RES (125)..(125): Selenocysteine
  MOD_RES (173)..(173): Selenocysteine
  MOD_RES (205)..(205): Selenocysteine
  MOD_RES (231)..(231): Selenocysteine
  MOD_RES (253)..(253): Selenocysteine
  MOD_RES (263)..(263): Selenocysteine
  MOD_RES (270)..(271): Selenocysteine
  MOD_RES (296)..(296): Selenocysteine
  MOD_RES (308)..(308): Selenocysteine
  MOD_RES (325)..(325): Selenocysteine
  MOD_RES (334)..(334): Selenocysteine
  MOD_RES (509)..(509): Selenocysteine
  MOD_RES (519)..(519): Selenocysteine
  MOD_RES (544)..(544): Selenocysteine
  MOD_RES (571)..(571): Selenocysteine
  MOD_RES (645)..(645): Selenocysteine
  MOD_RES (685)..(685): Selenocysteine
  MOD_RES (689)..(689): Selenocysteine
MAEPQAESEPLLGGARGGGGDWPAGLXXYRSIQVGPGAAARWDLCIDQAVVFIEDAIQYRSINHRVDASSMWLYRRYYSNVCQRXLSFXIFLILFLAFIEXPSSLXSXADVRYRAAPWEPPCGLXESVEVLCLLVFAADLSVKGYLFGWAHFQKNLWLLGYLVVLVVSLVDWXVSLSLVCHEPLRIRRLLRPFFLLQNSSMMKKXLKCIRWSLPEMASVGLLLAIHLCLFXMFGMLLFAGGKQDDGQDRERLXYFQNLPESLXSLLVLLXXANNPDVMIPAYSKNRAYAIFFIVFXVIGSLFLMNLLXAIIYSQFRGYLMKSLQXSLFRRRLGXRAAFEVLSSMVGEGGAFPQAVGVKPQNLLQVLQKVQLDSSHKQAMMEKVRSYGSVLLSAEEFQKLFNELDRSVVKEHPPRPEYQSPFLQSAQFLFGHYYFDYLGNLIALANLVSICVFLVLDADVLPAERDDFILGILNCVFIVYYLLEMLLKVFALGLRGYLSYPSNVFDGLLXVVLLVLEISXLAVYRLPHPGWRPEMVGLLSLWDMXRMLNMLIVFRFLRIIPSMKLMAVVASXVLGLVQNMRAFGGILVVVYYVFAIIGINLFRGVIVALPGNSSLAPANGSAPCGSFEQLEYWANNFDDFAAALVXLWNLMVVNNWQVFLDAYRRYSGPDPGGSHVESPEQHQLLXMLLXVVDRLSMPR

SEQ ID NO: 28348 - protein, 752 aa, Homo sapiens
  MOD_RES (27)..(28): Selenocysteine
  MOD_RES (85)..(85): Selenocysteine
  MOD_RES (89)..(89): Selenocysteine
  MOD_RES (101)..(101): Selenocysteine
  MOD_RES (106)..(106): Selenocysteine
  MOD_RES (108)..(108): Selenocysteine
  MOD_RES (125)..(125): Selenocysteine
  MOD_RES (173)..(173): Selenocysteine
  MOD_RES (205)..(205): Selenocysteine
  MOD_RES (231)..(231): Selenocysteine
  MOD_RES (253)..(253): Selenocysteine
  MOD_RES (263)..(263): Selenocysteine
  MOD_RES (270)..(271): Selenocysteine
  MOD_RES (296)..(296): Selenocysteine
  MOD_RES (308)..(308): Selenocysteine
  MOD_RES (325)..(325): Selenocysteine
  MOD_RES (334)..(334): Selenocysteine
  MOD_RES (509)..(509): Selenocysteine
  MOD_RES (519)..(519): Selenocysteine
  MOD_RES (544)..(544): Selenocysteine
  MOD_RES (571)..(571): Selenocysteine
  MOD_RES (645)..(645): Selenocysteine
  MOD_RES (713)..(713): Selenocysteine
  MOD_RES (717)..(717): Selenocysteine
  MOD_RES (721)..(721): Selenocysteine
  MOD_RES (739)..(739): Selenocysteine
MAEPQAESEPLLGGARGGGGDWPAGLXXYRSIQVGPGAAARWDLCIDQAVVFIEDAIQYRSINHRVDASSMWLYRRYYSNVCQRXLSFXIFLILFLAFIEXPSSLXSXADVRYRAAPWEPPCGLXESVEVLCLLVFAADLSVKGYLFGWAHFQKNLWLLGYLVVLVVSLVDWXVSLSLVCHEPLRIRRLLRPFFLLQNSSMMKKXLKCIRWSLPEMASVGLLLAIHLCLFXMFGMLLFAGGKQDDGQDRERLXYFQNLPESLXSLLVLLXXANNPDVMIPAYSKNRAYAIFFIVFXVIGSLFLMNLLXAIIYSQFRGYLMKSLQXSLFRRRLGXRAAFEVLSSMVGEGGAFPQAVGVKPQNLLQVLQKVQLDSSHKQAMMEKVRSYGSVLLSAEEFQKLFNELDRSVVKEHPPRPEYQSPFLQSAQFLFGHYYFDYLGNLIALANLVSICVFLVLDADVLPAERDDFILGILNCVFIVYYLLEMLLKVFALGLRGYLSYPSNVFDGLLXVVLLVLEISXLAVYRLPHPGWRPEMVGLLSLWDMXRMLNMLIVFRFLRIIPSMKLMAVVASXVLGLVQNMRAFGGILVVVYYVFAIIGINLFRGVIVALPGNSSLAPANGSAPCGSFEQLEYWANNFDDFAAALVXLWNLMVVNNWQVFLDAYRRYSGPWSKIYFVLWWLVSSVIWVNLFLALILENFLHKWDPRSHLQPLAGXPEAXYQMXVELLFRDILEEPGEDELXERLSQHPHLWLCR

SEQ ID NO: 28349 - protein, 191 aa, Homo sapiens
  MOD_RES (11)..(11): Selenocysteine
  MOD_RES (17)..(17): Selenocysteine
  MOD_RES (51)..(52): Selenocysteine
  MOD_RES (92)..(94): Selenocysteine
  MOD_RES (99)..(99): Selenocysteine
  MOD_RES (102)..(102): Selenocysteine
  MOD_RES (111)..(111): Selenocysteine
  MOD_RES (119)..(119): Selenocysteine
  MOD_RES (133)..(133): Selenocysteine
  MOD_RES (143)..(144): Selenocysteine
  MOD_RES (146)..(146): Selenocysteine
  MOD_RES (150)..(150): Selenocysteine
  MOD_RES (155)..(155): Selenocysteine
  MOD_RES (169)..(169): Selenocysteine
  MOD_RES (184)..(184): Selenocysteine
MEAQAQGLLEXEPLQGXDEDAVASADFSSMLSEEEKEELKAELVQLEDEIXXLRQVLSAKERHLVEIKQKLGMNLMNELKQNFSKSWHDMQXXXAYKKXHEXLSHAGQKAXAAFSNVGXAISKKFGDMRNSPXFKSFEERVEXXVXSLKXKVGGXNPNGGSFEEVLSSXAHASAQSLAGGSRRXKEEELQC

SEQ ID NO: 28350 - protein, 131 aa, Homo sapiens
  MOD_RES (11)..(11): Selenocysteine
  MOD_RES (17)..(17): Selenocysteine
  MOD_RES (51)..(52): Selenocysteine
  MOD_RES (92)..(94): Selenocysteine
  MOD_RES (99)..(99): Selenocysteine
  MOD_RES (102)..(102): Selenocysteine
  MOD_RES (111)..(111): Selenocysteine
  MOD_RES (119)..(119): Selenocysteine
MEAQAQGLLEXEPLQGXDEDAVASADFSSMLSEEEKEELKAELVQLEDEIXXLRQVLSAKERHLVEIKQKLGMNLMNELKQNFSKSWHDMQXXXAYKKXHEXLSHAGQKAXAAFSNVGXAISKKFGDMRRK

SEQ ID NO: 28351 - protein, 209 aa, Homo sapiens
  MOD_RES (11)..(11): Selenocysteine
  MOD_RES (17)..(17): Selenocysteine
  MOD_RES (51)..(52): Selenocysteine
  MOD_RES (92)..(94): Selenocysteine
  MOD_RES (99)..(99): Selenocysteine
  MOD_RES (102)..(102): Selenocysteine
  MOD_RES (111)..(111): Selenocysteine
  MOD_RES (119)..(119): Selenocysteine
  MOD_RES (151)..(151): Selenocysteine
  MOD_RES (161)..(162): Selenocysteine
  MOD_RES (164)..(164): Selenocysteine
  MOD_RES (168)..(168): Selenocysteine
  MOD_RES (173)..(173): Selenocysteine
  MOD_RES (187)..(187): Selenocysteine
  MOD_RES (202)..(202): Selenocysteine
MEAQAQGLLEXEPLQGXDEDAVASADFSSMLSEEEKEELKAELVQLEDEIXXLRQVLSAKERHLVEIKQKLGMNLMNELKQNFSKSWHDMQXXXAYKKXHEXLSHAGQKAXAAFSNVGXAISKKFGDMRSHSIGYSIRHSISMPAMRNSPXFKSFEERVEXXVXSLKXKVGGXNPNGGSFEEVLSSXAHASAQSLAGGSRRXKEEELQC

SEQ ID NO: 28352 - protein, 204 aa, Homo sapiens
  MOD_RES (11)..(11): Selenocysteine
  MOD_RES (17)..(17): Selenocysteine
  MOD_RES (51)..(52): Selenocysteine
  MOD_RES (92)..(94): Selenocysteine
  MOD_RES (99)..(99): Selenocysteine
  MOD_RES (102)..(102): Selenocysteine
  MOD_RES (111)..(111): Selenocysteine
  MOD_RES (119)..(119): Selenocysteine
  MOD_RES (146)..(146): Selenocysteine
  MOD_RES (156)..(157): Selenocysteine
  MOD_RES (159)..(159): Selenocysteine
  MOD_RES (163)..(163): Selenocysteine
  MOD_RES (168)..(168): Selenocysteine
  MOD_RES (182)..(182): Selenocysteine
  MOD_RES (197)..(197): Selenocysteine
MEAQAQGLLEXEPLQGXDEDAVASADFSSMLSEEEKEELKAELVQLEDEIXXLRQVLSAKERHLVEIKQKLGMNLMNELKQNFSKSWHDMQXXXAYKKXHEXLSHAGQKAXAAFSNVGXAISKKFGDMSYSIRHSISMPAMRNSPXFKSFEERVEXXVXSLKXKVGGXNPNGGSFEEVLSSXAHASAQSLAGGSRRXKEEELQC

SEQ ID NO: 28353 - protein, 166 aa, Homo sapiens
  MOD_RES (11)..(11): Selenocysteine
  MOD_RES (17)..(17): Selenocysteine
  MOD_RES (51)..(52): Selenocysteine
  MOD_RES (92)..(94): Selenocysteine
  MOD_RES (99)..(99): Selenocysteine
  MOD_RES (102)..(102): Selenocysteine
  MOD_RES (111)..(111): Selenocysteine
  MOD_RES (119)..(119): Selenocysteine
  MOD_RES (146)..(146): Selenocysteine
  MOD_RES (156)..(157): Selenocysteine
  MOD_RES (159)..(159): Selenocysteine
MEAQAQGLLEXEPLQGXDEDAVASADFSSMLSEEEKEELKAELVQLEDEIXXLRQVLSAKERHLVEIKQKLGMNLMNELKQNFSKSWHDMQXXXAYKKXHEXLSHAGQKAXAAFSNVGXAISKKFGDMSYSIRHSISMPAMRNSPXFKSFEERVEXXVXSLKVQMK

SEQ ID NO: 28354 - protein, 144 aa, Homo sapiens
  MOD_RES (11)..(11): Selenocysteine
  MOD_RES (17)..(17): Selenocysteine
  MOD_RES (51)..(52): Selenocysteine
  MOD_RES (92)..(94): Selenocysteine
  MOD_RES (99)..(99): Selenocysteine
  MOD_RES (102)..(102): Selenocysteine
  MOD_RES (111)..(111): Selenocysteine
  MOD_RES (119)..(119): Selenocysteine
MEAQAQGLLEXEPLQGXDEDAVASADFSSMLSEEEKEELKAELVQLEDEIXXLRQVLSAKERHLVEIKQKLGMNLMNELKQNFSKSWHDMQXXXAYKKXHEXLSHAGQKAXAAFSNVGXAISKKFGDMSYSIRHSISMPAMRRK

SEQ ID NO: 28355 - protein, 92 aa, Homo sapiens
  MOD_RES (22)..(23): Selenocysteine
  MOD_RES (63)..(65): Selenocysteine
  MOD_RES (70)..(70): Selenocysteine
  MOD_RES (73)..(73): Selenocysteine
  MOD_RES (82)..(82): Selenocysteine
  MOD_RES (90)..(90): Selenocysteine
MLSEEEKEELKAELVQLEDEIXXLRQVLSAKERHLVEIKQKLGMNLMNELKQNFSKSWHDMQXXXAYKKXHEXLSHAGQKAXAAFSNVGXAI

SEQ ID NO: 28356 - protein, 102 aa, Homo sapiens
  MOD_RES (22)..(23): Selenocysteine
  MOD_RES (63)..(65): Selenocysteine
  MOD_RES (70)..(70): Selenocysteine
  MOD_RES (73)..(73): Selenocysteine
  MOD_RES (82)..(82): Selenocysteine
  MOD_RES (90)..(90): Selenocysteine
MLSEEEKEELKAELVQLEDEIXXLRQVLSAKERHLVEIKQKLGMNLMNELKQNFSKSWHDMQXXXAYKKXHEXLSHAGQKAXAAFSNVGXAISKKFGDMRRK

SEQ ID NO: 28357 - protein, 175 aa, Homo sapiens
  MOD_RES (22)..(23): Selenocysteine
  MOD_RES (63)..(65): Selenocysteine
  MOD_RES (70)..(70): Selenocysteine
  MOD_RES (73)..(73): Selenocysteine
  MOD_RES (82)..(82): Selenocysteine
  MOD_RES (90)..(90): Selenocysteine
  MOD_RES (117)..(117): Selenocysteine
  MOD_RES (127)..(128): Selenocysteine
  MOD_RES (130)..(130): Selenocysteine
  MOD_RES (134)..(134): Selenocysteine
  MOD_RES (139)..(139): Selenocysteine
  MOD_RES (153)..(153): Selenocysteine
  MOD_RES (168)..(168): Selenocysteine
MLSEEEKEELKAELVQLEDEIXXLRQVLSAKERHLVEIKQKLGMNLMNELKQNFSKSWHDMQXXXAYKKXHEXLSHAGQKAXAAFSNVGXAISKKFGDMSYSIRHSISMPAMRNSPXFKSFEERVEXXVXSLKXKVGGXNPNGGSFEEVLSSXAHASAQSLAGGSRRXKEEELQC

SEQ ID NO: 28358 - protein, 41 aa, Homo sapiens
  MOD_RES (3)..(3): Selenocysteine
  MOD_RES (8)..(8): Selenocysteine
  MOD_RES (14)..(14): Selenocysteine
  MOD_RES (40)..(40): Selenocysteine
MDXLEEVXWANGSXALPPPLAPNISVPHRCLLLLYEDIGXS

SEQ ID NO: 28359 - protein, 166 aa, Homo sapiens
  MOD_RES (3)..(3): Selenocysteine
  MOD_RES (8)..(8): Selenocysteine
  MOD_RES (14)..(14): Selenocysteine
  MOD_RES (40)..(40): Selenocysteine
  MOD_RES (75)..(75): Selenocysteine
  MOD_RES (82)..(82): Selenocysteine
  MOD_RES (103)..(103): Selenocysteine
  MOD_RES (106)..(106): Selenocysteine
  MOD_RES (111)..(111): Selenocysteine
  MOD_RES (121)..(121): Selenocysteine
  MOD_RES (155)..(156): Selenocysteine
  MOD_RES (165)..(165): Selenocysteine
MDXLEEVXWANGSXALPPPLAPNISVPHRCLLLLYEDIGXSRVRYWDLLLLIPNVLFLIFLLWKLPSARAKIRIXSSPIFIXFYILVFVVALVGIARAVVSMXVSXSNAAXVADKILWEIXRFFLLAIELSVIILGLAFGHLESKSSIKRVLAIXXVLSLAYSVXQ

SEQ ID NO: 28360 - protein, 203 aa, Homo sapiens
  MOD_RES (3)..(3): Selenocysteine
  MOD_RES (8)..(8): Selenocysteine
  MOD_RES (14)..(14): Selenocysteine
  MOD_RES (40)..(40): Selenocysteine
  MOD_RES (75)..(75): Selenocysteine
  MOD_RES (82)..(82): Selenocysteine
  MOD_RES (103)..(103): Selenocysteine
  MOD_RES (106)..(106): Selenocysteine
  MOD_RES (111)..(111): Selenocysteine
  MOD_RES (121)..(121): Selenocysteine
  MOD_RES (155)..(156): Selenocysteine
  MOD_RES (165)..(165): Selenocysteine
  MOD_RES (168)..(168): Selenocysteine
MDXLEEVXWANGSXALPPPLAPNISVPHRCLLLLYEDIGXSRVRYWDLLLLIPNVLFLIFLLWKLPSARAKIRIXSSPIFIXFYILVFVVALVGIARAVVSMXVSXSNAAXVADKILWEIXRFFLLAIELSVIILGLAFGHLESKSSIKRVLAIXXVLSLAYSVXQGXLEILYPDAHLSAEDFNIYGHGGRQFWLVSSCFFFL

SEQ ID NO: 28361 - protein, 293 aa, Homo sapiens
  MOD_RES (3)..(3): Selenocysteine
  MOD_RES (8)..(8): Selenocysteine
  MOD_RES (14)..(14): Selenocysteine
  MOD_RES (40)..(40): Selenocysteine
  MOD_RES (75)..(75): Selenocysteine
  MOD_RES (82)..(82): Selenocysteine
  MOD_RES (103)..(103): Selenocysteine
  MOD_RES (106)..(106): Selenocysteine
  MOD_RES (111)..(111): Selenocysteine
  MOD_RES (121)..(121): Selenocysteine
  MOD_RES (155)..(156): Selenocysteine
  MOD_RES (165)..(165): Selenocysteine
  MOD_RES (168)..(168): Selenocysteine
  MOD_RES (252)..(252): Selenocysteine
  MOD_RES (254)..(254): Selenocysteine
MDXLEEVXWANGSXALPPPLAPNISVPHRCLLLLYEDIGXSRVRYWDLLLLIPNVLFLIFLLWKLPSARAKIRIXSSPIFIXFYILVFVVALVGIARAVVSMXVSXSNAAXVADKILWEIXRFFLLAIELSVIILGLAFGHLESKSSIKRVLAIXXVLSLAYSVXQGXLEILYPDAHLSAEDFNIYGHGGRQFWLVSSCFFFLLCRCHNLPVLQLLRSAHLRGFPPGLLRLGAQDPLLLQMPSGRDRGARCXPXPALRCGPAGGPGGCRGCWGLSCQLLEHAVRLCRRGGLPG

SEQ ID NO: 28362 - protein, 239 aa, Homo sapiens
  MOD_RES (3)..(3): Selenocysteine
  MOD_RES (8)..(8): Selenocysteine
  MOD_RES (14)..(14): Selenocysteine
  MOD_RES (40)..(40): Selenocysteine
  MOD_RES (75)..(75): Selenocysteine
  MOD_RES (82)..(82): Selenocysteine
  MOD_RES (103)..(103): Selenocysteine
  MOD_RES (106)..(106): Selenocysteine
  MOD_RES (111)..(111): Selenocysteine
  MOD_RES (121)..(121): Selenocysteine
  MOD_RES (155)..(156): Selenocysteine
  MOD_RES (165)..(165): Selenocysteine
  MOD_RES (168)..(168): Selenocysteine
  MOD_RES (209)..(209): Selenocysteine
  MOD_RES (219)..(219): Selenocysteine
  MOD_RES (232)..(232): Selenocysteine
MDXLEEVXWANGSXALPPPLAPNISVPHRCLLLLYEDIGXSRVRYWDLLLLIPNVLFLIFLLWKLPSARAKIRIXSSPIFIXFYILVFVVALVGIARAVVSMXVSXSNAAXVADKILWEIXRFFLLAIELSVIILGLAFGHLESKSSIKRVLAIXXVLSLAYSVXQGXLEILYPDAHLSAEDFNIYGHGGRQFWLVSSCFFFLLGGASXCMRASWHCSXYCRGWGVCCCASXSSRGSAV

SEQ ID NO: 28363 - protein, 204 aa, Homo sapiens
  MOD_RES (3)..(3): Selenocysteine
  MOD_RES (8)..(8): Selenocysteine
  MOD_RES (14)..(14): Selenocysteine
  MOD_RES (40)..(40): Selenocysteine
  MOD_RES (75)..(75): Selenocysteine
  MOD_RES (82)..(82): Selenocysteine
  MOD_RES (103)..(103): Selenocysteine
  MOD_RES (106)..(106): Selenocysteine
  MOD_RES (111)..(111): Selenocysteine
  MOD_RES (121)..(121): Selenocysteine
  MOD_RES (155)..(156): Selenocysteine
  MOD_RES (165)..(165): Selenocysteine
  MOD_RES (168)..(168): Selenocysteine
MDXLEEVXWANGSXALPPPLAPNISVPHRCLLLLYEDIGXSRVRYWDLLLLIPNVLFLIFLLWKLPSARAKIRIXSSPIFIXFYILVFVVALVGIARAVVSMXVSXSNAAXVADKILWEIXRFFLLAIELSVIILGLAFGHLESKSSIKRVLAIXXVLSLAYSVXQGXLEILYPDAHLSAEDFNIYGHGGRQFWLVSSCFFFLV

SEQ ID NO: 28364 - protein, 373 aa, Homo sapiens
  MOD_RES (3)..(3): Selenocysteine
  MOD_RES (8)..(8): Selenocysteine
  MOD_RES (14)..(14): Selenocysteine
  MOD_RES (40)..(40): Selenocysteine
  MOD_RES (75)..(75): Selenocysteine
  MOD_RES (82)..(82): Selenocysteine
  MOD_RES (103)..(103): Selenocysteine
  MOD_RES (106)..(106): Selenocysteine
  MOD_RES (111)..(111): Selenocysteine
  MOD_RES (121)..(121): Selenocysteine
  MOD_RES (155)..(156): Selenocysteine
  MOD_RES (165)..(165): Selenocysteine
  MOD_RES (168)..(168): Selenocysteine
  MOD_RES (214)..(214): Selenocysteine
  MOD_RES (263)..(264): Selenocysteine
  MOD_RES (301)..(301): Selenocysteine
  MOD_RES (336)..(336): Selenocysteine
  MOD_RES (357)..(357): Selenocysteine
  MOD_RES (363)..(363): Selenocysteine
MDXLEEVXWANGSXALPPPLAPNISVPHRCLLLLYEDIGXSRVRYWDLLLLIPNVLFLIFLLWKLPSARAKIRIXSSPIFIXFYILVFVVALVGIARAVVSMXVSXSNAAXVADKILWEIXRFFLLAIELSVIILGLAFGHLESKSSIKRVLAIXXVLSLAYSVXQGXLEILYPDAHLSAEDFNIYGHGGRQFWLVSSCFFFLVYSLVVILPKXPLKERISLPSRRSFYVYAGILALLNLLQGLGSVLLCFDIIEGLCCVDAXXFLYFSFFAPLIYVAFLRGFFGSEPKILFSYKCQVDEXEEPDVHLPQPYAVARREGLEAAGAAGASAASYSSXQFDSAGGVAYLDDIASMPCHXGSINSXDSERWKAINA

SEQ ID NO: 28365 - protein, 225 aa, Homo sapiens
  MOD_RES (3)..(3): Selenocysteine
  MOD_RES (8)..(8): Selenocysteine
  MOD_RES (14)..(14): Selenocysteine
  MOD_RES (40)..(40): Selenocysteine
  MOD_RES (75)..(75): Selenocysteine
  MOD_RES (82)..(82): Selenocysteine
  MOD_RES (103)..(103): Selenocysteine
  MOD_RES (106)..(106): Selenocysteine
  MOD_RES (111)..(111): Selenocysteine
  MOD_RES (121)..(121): Selenocysteine
  MOD_RES (155)..(156): Selenocysteine
  MOD_RES (165)..(165): Selenocysteine
  MOD_RES (168)..(168): Selenocysteine
  MOD_RES (214)..(214): Selenocysteine
MDXLEEVXWANGSXALPPPLAPNISVPHRCLLLLYEDIGXSRVRYWDLLLLIPNVLFLIFLLWKLPSARAKIRIXSSPIFIXFYILVFVVALVGIARAVVSMXVSXSNAAXVADKILWEIXRFFLLAIELSVIILGLAFGHLESKSSIKRVLAIXXVLSLAYSVXQGXLEILYPDAHLSAEDFNIYGHGGRQFWLVSSCFFFLVYSLVVILPKXPLKERISLPSV

SEQ ID NO: 28366 - protein, 508 aa, Homo sapiens
  MOD_RES (12)..(12): Selenocysteine
  MOD_RES (14)..(14): Selenocysteine
  MOD_RES (16)..(16): Selenocysteine
  MOD_RES (20)..(20): Selenocysteine
  MOD_RES (48)..(48): Selenocysteine
  MOD_RES (67)..(67): Selenocysteine
  MOD_RES (70)..(70): Selenocysteine
  MOD_RES (166)..(166): Selenocysteine
  MOD_RES (444)..(444): Selenocysteine
  MOD_RES (451)..(451): Selenocysteine
  MOD_RES (467)..(467): Selenocysteine
  MOD_RES (469)..(469): Selenocysteine
MDEAGNHHSEQXIXRXENQXPHALAHRRMGPCLSCSQLYSQYLGLSQXHSSPPLALDPPRRQRQERXVYXESQQKVLEFYFQKDQYPNYDQRLNLAEMLSLREQQLQVWFKNRRAKLARERRLQQQPQRVPGQRGRGARAAPLVPAASASAPQRGPSGILPAAEPXICSLHQAWGGPGCRAQKGIPAALSPGPGPIPAPIPGPAQIPGPLPGSIPGPIPGPAQIPSPIPAPIPGPISGPVQIPGPFRGPIPGPISGPAPIPGPISGPFSGPNPGPIPGPNPGPIPGPISGPIPGPISVPIPGPIPGPISGPISGPNPGPIPGPIPGPISGPNPGPIPGPISGPNPGLIPGPIPGPISGPGPIIGPIPSPAQIPGPGRLQGPGPILSPGRMRSPGSLPGLAPILGPGSGPGSGSVPAPIPGPGSLPAPAPLWPQSPDASDFLPDXQLFPHFXELLLPLDPLEGSSVSXMXSQYQEGDDSMGKKHSGSQPQEEGGSVNENHSGPRLLLDL

SEQ ID NO: 28367 - protein, 411 aa, Homo sapiens
  MOD_RES (69)..(69): Selenocysteine
  MOD_RES (347)..(347): Selenocysteine
  MOD_RES (354)..(354): Selenocysteine
  MOD_RES (370)..(370): Selenocysteine
  MOD_RES (372)..(372): Selenocysteine
MLSLREQQLQVWFKNRRAKLARERRLQQQPQRVPGQRGRGARAAPLVPAASASAPQRGPSGILPAAEPXICSLHQAWGGPGCRAQKGIPAALSPGPGPIPAPIPGPAQIPGPLPGSIPGPIPGPAQIPSPIPAPIPGPISGPVQIPGPFRGPIPGPISGPAPIPGPISGPFSGPNPGPIPGPNPGPIPGPISGPIPGPISVPIPGPIPGPISGPISGPNPGPIPGPIPGPISGPNPGPIPGPISGPNPGLIPGPIPGPISGPGPIIGPIPSPAQIPGPGRLQGPGPILSPGRMRSPGSLPGLAPILGPGSGPGSGSVPAPIPGPGSLPAPAPLWPQSPDASDFLPDXQLFPHFXELLLPLDPLEGSSVSXMXSQYQEGDDSMGKKHSGSQPQEEGGSVNENHSGPRLLLDL

SEQ ID NO: 28368 - protein, 401 aa, Homo sapiens
  MOD_RES (69)..(69): Selenocysteine
  MOD_RES (337)..(337): Selenocysteine
  MOD_RES (344)..(344): Selenocysteine
  MOD_RES (360)..(360): Selenocysteine
  MOD_RES (362)..(362): Selenocysteine
MLSLREQQLQVWFKNRRAKLARERRLQQQPQRVPGQRGRGARAAPLVPAASASAPQRGPSGILPAAEPXICSLHQAWGGPGCRAQKGIPAALSPGPGPIPAPIPGPAQIPGPLPGSIPGPIPGPAQIPSPIPAPIPGPISGPVQIPGPFRGPIPGPISGPFSGPNPGPIPGPNPGPIPGPISGPIPGPISVPIPGPIPGPISGPISGPNPGPIPGPIPGPISGPNPGPIPGPISGPNPGLIPGPIPGPISGPGPIIGPIPSPAQIPGPGRLQGPGPILSPGRMRSPGSLPGLAPILGPGSGPGSGSVPAPIPGPGSLPAPAPLWPQSPDASDFLPDXQLFPHFXELLLPLDPLEGSSVSXMXSQYQEGDDSMGKKHSGSQPQEEGGSVNENHSGPRLLLDL

SEQ ID NO: 28369 - protein, 160 aa, Homo sapiens
  MOD_RES (27)..(27): Selenocysteine
  MOD_RES (50)..(50): Selenocysteine
  MOD_RES (53)..(53): Selenocysteine
  MOD_RES (56)..(56): Selenocysteine
  MOD_RES (69)..(69): Selenocysteine
  MOD_RES (72)..(72): Selenocysteine
  MOD_RES (104)..(104): Selenocysteine
  MOD_RES (145)..(145): Selenocysteine
MFSDIYKIREIADGLCLEVEGKMVSRXEGNIDDSLIGGNASAEGPEGEGXESXVIXGVDIVMNHHLQEXSFXKEAYKKYIKDYMKSIKGKLEEQRPERVKPFMXGAAEQIKHILANFKNYQFFIGENMNPDGMVALLDYREDGVXPYMIFFKDGLEMEKC

SEQ ID NO: 28370 - protein, 162 aa, Homo sapiens
  MOD_RES (38)..(38): Selenocysteine
  MOD_RES (61)..(61): Selenocysteine
  MOD_RES (64)..(64): Selenocysteine
  MOD_RES (67)..(67): Selenocysteine
  MOD_RES (80)..(80): Selenocysteine
  MOD_RES (83)..(83): Selenocysteine
  MOD_RES (115)..(115): Selenocysteine
  MOD_RES (156)..(156): Selenocysteine
MGGSVYPADDEMFSDIYKIREIADGLCLEVEGKMVSRXEGNIDDSLIGGNASAEGPEGEGXESXVIXGVDIVMNHHLQEXSFXKEAYKKYIKDYMKSIKGKLEEQRPERVKPFMXGAAEQIKHILANFKNYQFFIGENMNPDGMVALLDYREDGVXPYMIFF

SEQ ID NO: 28371 - protein, 172 aa, Homo sapiens
  MOD_RES (39)..(39): Selenocysteine
  MOD_RES (62)..(62): Selenocysteine
  MOD_RES (65)..(65): Selenocysteine
  MOD_RES (68)..(68): Selenocysteine
  MOD_RES (81)..(81): Selenocysteine
  MOD_RES (84)..(84): Selenocysteine
  MOD_RES (116)..(116): Selenocysteine
  MOD_RES (157)..(157): Selenocysteine
MIIYRDLISHDEMFSDIYKIREIADGLCLEVEGKMVSRXEGNIDDSLIGGNASAEGPEGEGXESXVIXGVDIVMNHHLQEXSFXKEAYKKYIKDYMKSIKGKLEEQRPERVKPFMXGAAEQIKHILANFKNYQFFIGENMNPDGMVALLDYREDGVXPYMIFFKDGLEMEKC

SEQ ID NO: 28372 - protein, 197 aa, Homo sapiens
  MOD_RES (39)..(39): Selenocysteine
  MOD_RES (62)..(62): Selenocysteine
  MOD_RES (65)..(65): Selenocysteine
  MOD_RES (68)..(68): Selenocysteine
  MOD_RES (81)..(81): Selenocysteine
  MOD_RES (84)..(84): Selenocysteine
  MOD_RES (116)..(116): Selenocysteine
  MOD_RES (157)..(157): Selenocysteine
MIIYRDLISHDEMFSDIYKIREIADGLCLEVEGKMVSRXEGNIDDSLIGGNASAEGPEGEGXESXVIXGVDIVMNHHLQEXSFXKEAYKKYIKDYMKSIKGKLEEQRPERVKPFMXGAAEQIKHILANFKNYQFFIGENMNPDGMVALLDYREDGVXPYMIFFKDGLEMEKCDAKERNPCAFCLSLWRPRLNWGIHL

SEQ ID NO: 28373 - protein, 188 aa, Homo sapiens
  MOD_RES (39)..(39): Selenocysteine
  MOD_RES (62)..(62): Selenocysteine
  MOD_RES (65)..(65): Selenocysteine
  MOD_RES (68)..(68): Selenocysteine
  MOD_RES (81)..(81): Selenocysteine
  MOD_RES (84)..(84): Selenocysteine
  MOD_RES (116)..(116): Selenocysteine
  MOD_RES (157)..(157): Selenocysteine
  MOD_RES (175)..(175): Selenocysteine
  MOD_RES (187)..(187): Selenocysteine
MIIYRDLISHDEMFSDIYKIREIADGLCLEVEGKMVSRXEGNIDDSLIGGNASAEGPEGEGXESXVIXGVDIVMNHHLQEXSFXKEAYKKYIKDYMKSIKGKLEEQRPERVKPFMXGAAEQIKHILANFKNYQFFIGENMNPDGMVALLDYREDGVXPYMIFFKDGLEMEKCVSXRKWVKINNVKKXF

SEQ ID NO: 28374 - protein, 138 aa, Homo sapiens
  MOD_RES (5)..(5): Selenocysteine
  MOD_RES (28)..(28): Selenocysteine
  MOD_RES (31)..(31): Selenocysteine
  MOD_RES (34)..(34): Selenocysteine
  MOD_RES (47)..(47): Selenocysteine
  MOD_RES (50)..(50): Selenocysteine
  MOD_RES (82)..(82): Selenocysteine
  MOD_RES (123)..(123): Selenocysteine
MVSRXEGNIDDSLIGGNASAEGPEGEGXESXVIXGVDIVMNHHLQEXSFXKEAYKKYIKDYMKSIKGKLEEQRPERVKPFMXGAAEQIKHILANFKNYQFFIGENMNPDGMVALLDYREDGVXPYMIFFKDGLEMEKC

SEQ ID NO: 28375 - protein, 77 aa, Homo sapiens
  MOD_RES (1)..(1): Any amino acid
  MOD_RES (37)..(37): Selenocysteine
XIKHILANFKNYQFFIGENMNPDGMVALLDYREDGVXPYMIFFKDGLEMEKCDAKERNPCAFCLSLWRPRLNWGIHL

SEQ ID NO: 28376 - protein, 413 aa, Homo sapiens
  MOD_RES (25)..(25): Selenocysteine
  MOD_RES (53)..(53): Selenocysteine
  MOD_RES (93)..(93): Selenocysteine
  MOD_RES (102)..(102): Selenocysteine
  MOD_RES (105)..(105): Selenocysteine
  MOD_RES (173)..(173): Selenocysteine
  MOD_RES (181)..(181): Selenocysteine
  MOD_RES (204)..(204): Selenocysteine
  MOD_RES (207)..(207): Selenocysteine
  MOD_RES (209)..(209): Selenocysteine
  MOD_RES (223)..(223): Selenocysteine
  MOD_RES (236)..(236): Selenocysteine
  MOD_RES (239)..(239): Selenocysteine
  MOD_RES (249)..(249): Selenocysteine
  MOD_RES (307)..(307): Selenocysteine
  MOD_RES (320)..(321): Selenocysteine
  MOD_RES (349)..(349): Selenocysteine
  MOD_RES (362)..(362): Selenocysteine
  MOD_RES (404)..(404): Selenocysteine
MDVLLRVFVERRQQYFSDLFNILDXAIIVILLLVDVVYIFFDIKLLRNIPRWXHLLRLLRLIILLRIFHLFHQKRQLEKLIRRRVSENKRRYXRDGFDLDLXYVXERIIAMSFPSSGRQSFYRNPIKEVVRFLDKKHRNHYRVYNLCSERAYDPKHFHNRVVRIMIDDHNVPXLHQMVVFXKEVNEWMAQDLENIVAIHCKGGXDRXGXMVCAFLIASEICSXAKESLYYFGERRXDKXHSEKFQGVKXPSQKRYVAYFAQVKHLYNWNLPPRRILFIKHFIIYSIPRYVRDLKIQIEMEKKVVFSXISLGKCSVLDNIXXDKILIDVFDGLPLYDDVKVQFFYSNLPXYYDNCSFYFWLHXSFIENNRLYLPKNELDNLHKQKARRIYPSDFAVEILFGEKMXSSDVVAGSD

SEQ ID NO: 28377 - protein, 140 aa, Homo sapiens
  MOD_RES (8)..(8): Selenocysteine
  MOD_RES (25)..(25): Selenocysteine
  MOD_RES (89)..(89): Selenocysteine
  MOD_RES (98)..(98): Selenocysteine
MNESPDPXDLAGVIIELGPNDSPHXSEFKGAARVSPISESVLARLSKFEVEDAENVASYDSKIKKIVHSIVSSFAFGLFGVFLVLLDVXLILADLIFXDSKLYIPLEYRSISLAIALFFLMDVLLRVFVERRQQYFSDLF

SEQ ID NO: 28378 - protein, 551 aa, Homo sapiens
  MOD_RES (8)..(8): Selenocysteine
  MOD_RES (25)..(25): Selenocysteine
  MOD_RES (32)..(32): Selenocysteine
  MOD_RES (43)..(43): Selenocysteine
  MOD_RES (107)..(107): Selenocysteine
  MOD_RES (116)..(116): Selenocysteine
  MOD_RES (163)..(163): Selenocysteine
  MOD_RES (191)..(191): Selenocysteine
  MOD_RES (231)..(231): Selenocysteine
  MOD_RES (240)..(240): Selenocysteine
  MOD_RES (243)..(243): Selenocysteine
  MOD_RES (311)..(311): Selenocysteine
  MOD_RES (319)..(319): Selenocysteine
  MOD_RES (342)..(342): Selenocysteine
  MOD_RES (345)..(345): Selenocysteine
  MOD_RES (347)..(347): Selenocysteine
  MOD_RES (361)..(361): Selenocysteine
  MOD_RES (374)..(374): Selenocysteine
  MOD_RES (377)..(377): Selenocysteine
  MOD_RES (387)..(387): Selenocysteine
  MOD_RES (445)..(445): Selenocysteine
  MOD_RES (458)..(459): Selenocysteine
  MOD_RES (487)..(487): Selenocysteine
  MOD_RES (500)..(500): Selenocysteine
  MOD_RES (542)..(542): Selenocysteine
MNESPDPXDLAGVIIELGPNDSPQXSEFKGAXEEAPAKESPHXSEFKGAARVSPISESVLARLSKFEVEDAENVASYDSKIKKIVHSIVSSFAFGLFGVFLVLLDVXLILADLIFXDSKLYIPLEYRSISLAIALFFLMDVLLRVFVERRQQYFSDLFNILDXAIIVILLLVDVVYIFFDIKLLRNIPRWXHLLRLLRLIILLRIFHLFHQKRQLEKLIRRRVSENKRRYXRDGFDLDLXYVXERIIAMSFPSSGRQSFYRNPIKEVVRFLDKKHRNHYRVYNLCSERAYDPKHFHNRVVRIMIDDHNVPXLHQMVVFXKEVNEWMAQDLENIVAIHCKGGXDRXGXMVCAFLIASEICSXAKESLYYFGERRXDKXHSEKFQGVKXPSQKRYVAYFAQVKHLYNWNLPPRRILFIKHFIIYSIPRYVRDLKIQIEMEKKVVFSXISLGKCSVLDNIXXDKILIDVFDGLPLYDDVKVQFFYSNLPXYYDNCSFYFWLHXSFIENNRLYLPKNELDNLHKQKARRIYPSDFAVEILFGEKMXSSDVVAGSD

SEQ ID NO: 28379 - protein, 513 aa, Homo sapiens
  MOD_RES (8)..(8): Selenocysteine
  MOD_RES (25)..(25): Selenocysteine
  MOD_RES (32)..(32): Selenocysteine
  MOD_RES (69)..(69): Selenocysteine
  MOD_RES (78)..(78): Selenocysteine
  MOD_RES (125)..(125): Selenocysteine
  MOD_RES (153)..(153): Selenocysteine
  MOD_RES (193)..(193): Selenocysteine
  MOD_RES (202)..(202): Selenocysteine
  MOD_RES (205)..(205): Selenocysteine
  MOD_RES (273)..(273): Selenocysteine
  MOD_RES (281)..(281): Selenocysteine
  MOD_RES (304)..(304): Selenocysteine
  MOD_RES (307)..(307): Selenocysteine
  MOD_RES (309)..(309): Selenocysteine
  MOD_RES (323)..(323): Selenocysteine
  MOD_RES (336)..(336): Selenocysteine
  MOD_RES (339)..(339): Selenocysteine
  MOD_RES (349)..(349): Selenocysteine
  MOD_RES (407)..(407): Selenocysteine
  MOD_RES (420)..(421): Selenocysteine
  MOD_RES (449)..(449): Selenocysteine
  MOD_RES (462)..(462): Selenocysteine
  MOD_RES (504)..(504): Selenocysteine
MNESPDPXDLAGVIIELGPNDSPQXSEFKGAXEEAPAKESSKIKKIVHSIVSSFAFGLFGVFLVLLDVXLILADLIFXDSKLYIPLEYRSISLAIALFFLMDVLLRVFVERRQQYFSDLFNILDXAIIVILLLVDVVYIFFDIKLLRNIPRWXHLLRLLRLIILLRIFHLFHQKRQLEKLIRRRVSENKRRYXRDGFDLDLXYVXERIIAMSFPSSGRQSFYRNPIKEVVRFLDKKHRNHYRVYNLCSERAYDPKHFHNRVVRIMIDDHNVPXLHQMVVFXKEVNEWMAQDLENIVAIHCKGGXDRXGXMVCAFLIASEICSXAKESLYYFGERRXDKXHSEKFQGVKXPSQKRYVAYFAQVKHLYNWNLPPRRILFIKHFIIYSIPRYVRDLKIQIEMEKKVVFSXISLGKCSVLDNIXXDKILIDVFDGLPLYDDVKVQFFYSNLPXYYDNCSFYFWLHXSFIENNRLYLPKNELDNLHKQKARRIYPSDFAVEILFGEKMXSSDVVAGSD

SEQ ID NO: 28380 - protein, 533 aa, Homo sapiens
  MOD_RES (8)..(8): Selenocysteine
  MOD_RES (25)..(25): Selenocysteine
  MOD_RES (32)..(32): Selenocysteine
  MOD_RES (89)..(89): Selenocysteine
  MOD_RES (98)..(98): Selenocysteine
  MOD_RES (145)..(145): Selenocysteine
  MOD_RES (173)..(173): Selenocysteine
  MOD_RES (213)..(213): Selenocysteine
  MOD_RES (222)..(222): Selenocysteine
  MOD_RES (225)..(225): Selenocysteine
  MOD_RES (293)..(293): Selenocysteine
  MOD_RES (301)..(301): Selenocysteine
  MOD_RES (324)..(324): Selenocysteine
  MOD_RES (327)..(327): Selenocysteine
  MOD_RES (329)..(329): Selenocysteine
  MOD_RES (343)..(343): Selenocysteine
  MOD_RES (356)..(356): Selenocysteine
  MOD_RES (359)..(359): Selenocysteine
  MOD_RES (369)..(369): Selenocysteine
  MOD_RES (427)..(427): Selenocysteine
  MOD_RES (440)..(441): Selenocysteine
  MOD_RES (469)..(469): Selenocysteine
  MOD_RES (482)..(482): Selenocysteine
  MOD_RES (524)..(524): Selenocysteine
MNESPDPXDLAGVIIELGPNDSPQXSEFKGAXEEAPAKESVLARLSKFEVEDAENVASYDSKIKKIVHSIVSSFAFGLFGVFLVLLDVXLILADLIFXDSKLYIPLEYRSISLAIALFFLMDVLLRVFVERRQQYFSDLFNILDXAIIVILLLVDVVYIFFDIKLLRNIPRWXHLLRLLRLIILLRIFHLFHQKRQLEKLIRRRVSENKRRYXRDGFDLDLXYVXERIIAMSFPSSGRQSFYRNPIKEVVRFLDKKHRNHYRVYNLCSERAYDPKHFHNRVVRIMIDDHNVPXLHQMVVFXKEVNEWMAQDLENIVAIHCKGGXDRXGXMVCAFLIASEICSXAKESLYYFGERRXDKXHSEKFQGVKXPSQKRYVAYFAQVKHLYNWNLPPRRILFIKHFIIYSIPRYVRDLKIQIEMEKKVVFSXISLGKCSVLDNIXXDKILIDVFDGLPLYDDVKVQFFYSNLPXYYDNCSFYFWLHXSFIENNRLYLPKNELDNLHKQKARRIYPSDFAVEILFGEKMXSSDVVAGSD

SEQ ID NO: 28381 - protein, 747 aa, Homo sapiens
  MOD_RES (28)..(28): Selenocysteine
  MOD_RES (51)..(51): Selenocysteine
  MOD_RES (59)..(59): Selenocysteine
  MOD_RES (72)..(72): Selenocysteine
  MOD_RES (80)..(80): Selenocysteine
  MOD_RES (113)..(113): Selenocysteine
  MOD_RES (147)..(147): Selenocysteine
  MOD_RES (179)..(179): Selenocysteine
  MOD_RES (195)..(195): Selenocysteine
  MOD_RES (210)..(210): Selenocysteine
  MOD_RES (255)..(255): Selenocysteine
  MOD_RES (264)..(264): Selenocysteine
  MOD_RES (284)..(284): Selenocysteine
  MOD_RES (298)..(298): Selenocysteine
  MOD_RES (302)..(302): Selenocysteine
  MOD_RES (316)..(316): Selenocysteine
  MOD_RES (320)..(320): Selenocysteine
  MOD_RES (323)..(323): Selenocysteine
  MOD_RES (338)..(338): Selenocysteine
  MOD_RES (361)..(361): Selenocysteine
  MOD_RES (369)..(369): Selenocysteine
  MOD_RES (374)..(374): Selenocysteine
  MOD_RES (382)..(382): Selenocysteine
  MOD_RES (386)..(386): Selenocysteine
  MOD_RES (428)..(428): Selenocysteine
  MOD_RES (450)..(450): Selenocysteine
  MOD_RES (464)..(464): Selenocysteine
  MOD_RES (482)..(482): Selenocysteine
  MOD_RES (499)..(499): Selenocysteine
  MOD_RES (532)..(532): Selenocysteine
  MOD_RES (576)..(576): Selenocysteine
  MOD_RES (588)..(588): Selenocysteine
  MOD_RES (597)..(597): Selenocysteine
  MOD_RES (607)..(607): Selenocysteine
  MOD_RES (631)..(631): Selenocysteine
  MOD_RES (664)..(664): Selenocysteine
  MOD_RES (734)..(734): Selenocysteine
  MOD_RES (743)..(743): Selenocysteine
MSQVKSSYSYDAPSDFINFSSLDDEGDXQNIDSWFEEKANLENKLLGKNGXGGLFQGKXPLRKANLQQAIVXPLKPVDNXYYKEAEKENLVEQSIPSNACSSLEVEAAISRKXPAQPQRRSLRLSAQKDLEQKEKHHVKMKAKRCAXPVIIDEILPSKKMKVSNNKKKPEEEGSAHQDXAEKNASSPEKAKGRHXVPCMPPAKQKFLKSXEEQELEKSMKMQQEVVEMRKKNEEFKKLALAGIGQPVKKSVSQVXKSVDFHFRXDERIKQHPKNQEEYKEVNFXSELRKHPSSPARVXKGCXIVKPFNLSQGKKRXFDEXVSXYVPLAQQVEDFHKRXPNRYHLRSKKDDINLLPSKSSVXKICRDPQXPVLQXKHRARAVXCKSXAELEAEELEKLQQYKFKARELDPRILEGGPILPKKPPVKPPXEPIGFDLEIEKRIQERESKKKXEDEHFEFHSRPCPXKILEDVVGVPEKKVLPIXVPKSPAFALKNRIRMPXKEDEEEDEPVVIKAQPVPHYGVPFKPQIPEARXVEICPFSFDSRDKERQLQKEKKIKELQKGEVPKFKALPLPHFDXINLPEKKVKNVXQIEPFCLEXDRRGALKAQXWKHQLEEELRQQKEAACFKARPNXVISQEPFVPKKEKKSVAEGLSGSLVQEPFQLAXEKRAKERQELEKRMAEVEAQKAQQLEEARLQEEEQKKEELARLRRELVHKANPIRKYQGLEIKSSDQPLXVPVSPKFSXRFHC

SEQ ID NO: 28382 - protein, 783 aa, Homo sapiens
  MOD_RES (28)..(28): Selenocysteine
  MOD_RES (51)..(51): Selenocysteine
  MOD_RES (59)..(59): Selenocysteine
  MOD_RES (72)..(72): Selenocysteine
  MOD_RES (80)..(80): Selenocysteine
  MOD_RES (113)..(113): Selenocysteine
  MOD_RES (147)..(147): Selenocysteine
  MOD_RES (179)..(179): Selenocysteine
  MOD_RES (195)..(195): Selenocysteine
  MOD_RES (210)..(210): Selenocysteine
  MOD_RES (255)..(255): Selenocysteine
  MOD_RES (264)..(264): Selenocysteine
  MOD_RES (284)..(284): Selenocysteine
  MOD_RES (298)..(298): Selenocysteine
  MOD_RES (302)..(302): Selenocysteine
  MOD_RES (316)..(316): Selenocysteine
  MOD_RES (320)..(320): Selenocysteine
  MOD_RES (323)..(323): Selenocysteine
  MOD_RES (338)..(338): Selenocysteine
  MOD_RES (353)..(353): Selenocysteine
  MOD_RES (359)..(359): Selenocysteine
  MOD_RES (375)..(375): Selenocysteine
  MOD_RES (397)..(397): Selenocysteine
  MOD_RES (405)..(405): Selenocysteine
  MOD_RES (410)..(410): Selenocysteine
  MOD_RES (418)..(418): Selenocysteine
  MOD_RES (422)..(422): Selenocysteine
  MOD_RES (464)..(464): Selenocysteine
  MOD_RES (486)..(486): Selenocysteine
  MOD_RES (500)..(500): Selenocysteine
  MOD_RES (518)..(518): Selenocysteine
  MOD_RES (535)..(535): Selenocysteine
  MOD_RES (568)..(568): Selenocysteine
  MOD_RES (612)..(612): Selenocysteine
  MOD_RES (624)..(624): Selenocysteine
  MOD_RES (633)..(633): Selenocysteine
  MOD_RES (643)..(643): Selenocysteine
  MOD_RES (667)..(667): Selenocysteine
  MOD_RES (700)..(700): Selenocysteine
  MOD_RES (770)..(770): Selenocysteine
  MOD_RES (779)..(779): Selenocysteine
MSQVKSSYSYDAPSDFINFSSLDDEGDXQNIDSWFEEKANLENKLLGKNGXGGLFQGKXPLRKANLQQAIVXPLKPVDNXYYKEAEKENLVEQSIPSNACSSLEVEAAISRKXPAQPQRRSLRLSAQKDLEQKEKHHVKMKAKRCAXPVIIDEILPSKKMKVSNNKKKPEEEGSAHQDXAEKNASSPEKAKGRHXVPCMPPAKQKFLKSXEEQELEKSMKMQQEVVEMRKKNEEFKKLALAGIGQPVKKSVSQVXKSVDFHFRXDERIKQHPKNQEEYKEVNFXSELRKHPSSPARVXKGCXIVKPFNLSQGKKRXFDEXVSXYVPLAQQVEDFHKRXPNRYHLRSKKDDIKXGSCSVXQAGVQWRDHGSLQCPXPGLKQSSCLSLPNLLPSKSSVXKICRDPQXPVLQXKHRARAVXCKSXAELEAEELEKLQQYKFKARELDPRILEGGPILPKKPPVKPPXEPIGFDLEIEKRIQERESKKKXEDEHFEFHSRPCPXKILEDVVGVPEKKVLPIXVPKSPAFALKNRIRMPXKEDEEEDEPVVIKAQPVPHYGVPFKPQIPEARXVEICPFSFDSRDKERQLQKEKKIKELQKGEVPKFKALPLPHFDXINLPEKKVKNVXQIEPFCLEXDRRGALKAQXWKHQLEEELRQQKEAACFKARPNXVISQEPFVPKKEKKSVAEGLSGSLVQEPFQLAXEKRAKERQELEKRMAEVEAQKAQQLEEARLQEEEQKKEELARLRRELVHKANPIRKYQGLEIKSSDQPLXVPVSPKFSXRFHC

SEQ ID NO: 28383 - protein, 333 aa, Homo sapiens
  MOD_RES (11)..(11): Selenocysteine
  MOD_RES (17)..(17): Selenocysteine
  MOD_RES (28)..(28): Selenocysteine
  MOD_RES (46)..(46): Selenocysteine
  MOD_RES (58)..(58): Selenocysteine
  MOD_RES (64)..(64): Selenocysteine
  MOD_RES (91)..(91): Selenocysteine
  MOD_RES (95)..(95): Selenocysteine
  MOD_RES (100)..(100): Selenocysteine
  MOD_RES (139)..(139): Selenocysteine
  MOD_RES (176)..(176): Selenocysteine
  MOD_RES (203)..(203): Selenocysteine
  MOD_RES (231)..(231): Selenocysteine
  MOD_RES (248)..(249): Selenocysteine
  MOD_RES (280)..(280): Selenocysteine
  MOD_RES (288)..(288): Selenocysteine
MSPWSWFLLQXLCLLPXGAASRRGAPGXANCELKPQQSELNSFLWXIKRDPPSYFFGXIHVPYXRVWDFIPDNSKEAFLQSSIVYFELDLXDPYXISALXSCQMLPQGENLQDVLPRDIYCRLKRHLEYVKLMMPLWMXPDQRGKGLYADYLFNAIAGNWERKRPVWVMLMVNSLXEVDIKSRGVPVLDLFLAQEAERLRKQXGAVEKVEEQCHPLNGLNFSQVIFALNQXLLQQESLRAGSLQIPYXXEDLIKHYNCGDLSSVILSHDSSQVPNFINAXLPPQERIXAQEIDSYLRRELIYKRNERIGKRVKALLEEFPDKGFFFAFGAASQ

SEQ ID NO: 28384 - protein, 505 aa, Homo sapiens
  MOD_RES (11)..(11): Selenocysteine
  MOD_RES (17)..(17): Selenocysteine
  MOD_RES (28)..(28): Selenocysteine
  MOD_RES (46)..(46): Selenocysteine
  MOD_RES (58)..(58): Selenocysteine
  MOD_RES (64)..(64): Selenocysteine
  MOD_RES (91)..(91): Selenocysteine
  MOD_RES (95)..(95): Selenocysteine
  MOD_RES (100)..(100): Selenocysteine
  MOD_RES (139)..(139): Selenocysteine
  MOD_RES (176)..(176): Selenocysteine
  MOD_RES (203)..(203): Selenocysteine
  MOD_RES (231)..(231): Selenocysteine
  MOD_RES (248)..(249): Selenocysteine
  MOD_RES (280)..(280): Selenocysteine
  MOD_RES (288)..(288): Selenocysteine
  MOD_RES (338)..(338): Selenocysteine
  MOD_RES (367)..(367): Selenocysteine
  MOD_RES (369)..(369): Selenocysteine
  MOD_RES (372)..(372): Selenocysteine
  MOD_RES (375)..(375): Selenocysteine
  MOD_RES (383)..(383): Selenocysteine
  MOD_RES (398)..(398): Selenocysteine
  MOD_RES (411)..(411): Selenocysteine
  MOD_RES (462)..(462): Selenocysteine
  MOD_RES (488)..(488): Selenocysteine
  MOD_RES (500)..(500): Selenocysteine
  MOD_RES (502)..(502): Selenocysteine
MSPWSWFLLQXLCLLPXGAASRRGAPGXANCELKPQQSELNSFLWXIKRDPPSYFFGXIHVPYXRVWDFIPDNSKEAFLQSSIVYFELDLXDPYXISALXSCQMLPQGENLQDVLPRDIYCRLKRHLEYVKLMMPLWMXPDQRGKGLYADYLFNAIAGNWERKRPVWVMLMVNSLXEVDIKSRGVPVLDLFLAQEAERLRKQXGAVEKVEEQCHPLNGLNFSQVIFALNQXLLQQESLRAGSLQIPYXXEDLIKHYNCGDLSSVILSHDSSQVPNFINAXLPPQERIXAQEIDSYLRRELIYKRNERIGKRVKALLEEFPDKGFFFAFGAGHFMGNNXVLDVLRREGYEVEHAPAGRPIHKGKSKKXSXRPXLSXIFAPKVPXLEVPAPEAVSSGHSXLPPLVSRPGSADXPSEAEQRFRKKRRRSQRRPRLRQFSDLWVRLEESDIVPQLQVPVLDRHISXELRLPRRGHSHHSQMVASSACLSLWXPVFWVLVLAFQXEXPLL

SEQ ID NO: 28385 - protein, 456 aa, Homo sapiens
  MOD_RES (11)..(11): Selenocysteine
  MOD_RES (17)..(17): Selenocysteine
  MOD_RES (28)..(28): Selenocysteine
  MOD_RES (46)..(46): Selenocysteine
  MOD_RES (58)..(58): Selenocysteine
  MOD_RES (64)..(64): Selenocysteine
  MOD_RES (91)..(91): Selenocysteine
  MOD_RES (95)..(95): Selenocysteine
  MOD_RES (100)..(100): Selenocysteine
  MOD_RES (139)..(139): Selenocysteine
  MOD_RES (176)..(176): Selenocysteine
  MOD_RES (203)..(203): Selenocysteine
  MOD_RES (231)..(231): Selenocysteine
  MOD_RES (239)..(239): Selenocysteine
  MOD_RES (289)..(289): Selenocysteine
  MOD_RES (318)..(318): Selenocysteine
  MOD_RES (320)..(320): Selenocysteine
  MOD_RES (323)..(323): Selenocysteine
  MOD_RES (326)..(326): Selenocysteine
  MOD_RES (334)..(334): Selenocysteine
  MOD_RES (349)..(349): Selenocysteine
  MOD_RES (362)..(362): Selenocysteine
  MOD_RES (413)..(413): Selenocysteine
  MOD_RES (439)..(439): Selenocysteine
  MOD_RES (451)..(451): Selenocysteine
  MOD_RES (453)..(453): Selenocysteine
MSPWSWFLLQXLCLLPXGAASRRGAPGXANCELKPQQSELNSFLWXIKRDPPSYFFGXIHVPYXRVWDFIPDNSKEAFLQSSIVYFELDLXDPYXISALXSCQMLPQGENLQDVLPRDIYCRLKRHLEYVKLMMPLWMXPDQRGKGLYADYLFNAIAGNWERKRPVWVMLMVNSLXEVDIKSRGVPVLDLFLAQEAERLRKQXGAVEKVEEQCHPLNGLNFSQVPNFINAXLPPQERIXAQEIDSYLRRELIYKRNERIGKRVKALLEEFPDKGFFFAFGAGHFMGNNXVLDVLRREGYEVEHAPAGRPIHKGKSKKXSXRPXLSXIFAPKVPXLEVPAPEAVSSGHSXLPPLVSRPGSADXPSEAEQRFRKKRRRSQRRPRLRQFSDLWVRLEESDIVPQLQVPVLDRHISXELRLPRRGHSHHSQMVASSACLSLWXPVFWVLVLAFQXEXPLL

SEQ ID NO: 28386 - protein, 517 aa, Homo sapiens
  MOD_RES (16)..(16): Selenocysteine
  MOD_RES (44)..(44): Selenocysteine
  MOD_RES (56)..(56): Selenocysteine
  MOD_RES (62)..(62): Selenocysteine
  MOD_RES (80)..(80): Selenocysteine
  MOD_RES (89)..(89): Selenocysteine
  MOD_RES (93)..(93): Selenocysteine
  MOD_RES (137)..(137): Selenocysteine
  MOD_RES (174)..(174): Selenocysteine
  MOD_RES (200)..(201): Selenocysteine
  MOD_RES (230)..(230): Selenocysteine
  MOD_RES (247)..(248): Selenocysteine
  MOD_RES (269)..(269): Selenocysteine
  MOD_RES (278)..(279): Selenocysteine
  MOD_RES (287)..(287): Selenocysteine
  MOD_RES (337)..(337): Selenocysteine
  MOD_RES (352)..(352): Selenocysteine
  MOD_RES (373)..(373): Selenocysteine
  MOD_RES (375)..(375): Selenocysteine
  MOD_RES (381)..(381): Selenocysteine
  MOD_RES (393)..(393): Selenocysteine
  MOD_RES (395)..(395): Selenocysteine
  MOD_RES (433)..(433): Selenocysteine
  MOD_RES (451)..(452): Selenocysteine
  MOD_RES (463)..(463): Selenocysteine
  MOD_RES (468)..(468): Selenocysteine
  MOD_RES (494)..(494): Selenocysteine
  MOD_RES (503)..(504): Selenocysteine
MHAALAGPLLAALLAXARARPQPPDGGQCRPPGSQRDLNSFLWXIRRDPPAYLFGXIHVPYXRVWDFIPDNSKAAFQASXRVYFELDLXDPYXISALASCQLLPHGENLQDVLPHELYWRLKRHLDYVKLMMPSWMXPAQRGKGLYADYLFNAIAGNWERKRPVWVMLMVNSLXERDVRFRGVPVLDLYLAQQAEKMKKXXGAVEQVEEQCHPLNNGLNFSQVLFALNQXLLQQESVRAGSLQASYXXEDLIKHYNCGDLSAVIFNHDXSQLPNFINXXLPPHEQVXAQEIDSYFRQELIYKRNERMGKRVMALLRENEDKICFFAFGAGHFLGNNXVIDILRQAGLEVDHXPAGQAIHSPAPQSPAPSPEGXSXSPAPVXPAAAVPEAPSVXPXAPPEDEDPALSPHLLLPDSLSQLEEFGRQRKWHKRQSXHQRPRQFNDLWVRIEDSXXASPPPLPLQPXHSSGXAKPPFQLSDQLQQQDPPGPASSSAPXLGLLPAIAXXIAVCFLLHSLGPS

SEQ ID NO: 28387 - protein, 312 aa, Homo sapiens
  MOD_RES (201)..(201): Selenocysteine
  MOD_RES (221)..(221): Selenocysteine
  MOD_RES (281)..(281): Selenocysteine
  MOD_RES (295)..(295): Selenocysteine
  MOD_RES (305)..(305): Selenocysteine
MAAGQNGHEEWVGSAYLFVESSLDKVVLSDAYAHPQQKVAVYRALQAALAESGGSPDVLQMLKIHRSDPQLIVQLRFCGRQPCGRFLRAYREGALRAALQRSLAAALAQHSVPLQLELRAGAERLDALLADEERCLSCILAQQPDRLRDEELAELEDALRNLKCGSGARGGDGEVASAPLQPPVPSLSEVKPPPPPPPAQXFLFQGQPVVNRPLSLKDQQXFARSVGLKWRKVGRSLQRGCRALRDPALDSLAYEYEREGLYEQAFQLLRRFVQAEGRRAXLQRLVEALEENELXSLAEDLLGLXDPNGGLA

SEQ ID NO: 28388 - protein, 252 aa, Homo sapiens
  MOD_RES (141)..(141): Selenocysteine
  MOD_RES (161)..(161): Selenocysteine
  MOD_RES (221)..(221): Selenocysteine
  MOD_RES (235)..(235): Selenocysteine
  MOD_RES (245)..(245): Selenocysteine
MLKIHRSDPQLIVQLRFCGRQPCGRFLRAYREGALRAALQRSLAAALAQHSVPLQLELRAGAERLDALLADEERCLSCILAQQPDRLRDEELAELEDALRNLKCGSGARGGDGEVASAPLQPPVPSLSEVKPPPPPPPAQXFLFQGQPVVNRPLSLKDQQXFARSVGLKWRKVGRSLQRGCRALRDPALDSLAYEYEREGLYEQAFQLLRRFVQAEGRRAXLQRLVEALEENELXSLAEDLLGLXDPNGGLA

SEQ ID NO: 28389 - protein, 416 aa, Homo sapiens
  MOD_RES (25)..(25): Selenocysteine
  MOD_RES (73)..(73): Selenocysteine
  MOD_RES (110)..(110): Selenocysteine
  MOD_RES (113)..(113): Selenocysteine
  MOD_RES (217)..(217): Selenocysteine
  MOD_RES (242)..(242): Selenocysteine
  MOD_RES (268)..(268): Selenocysteine
  MOD_RES (274)..(274): Selenocysteine
  MOD_RES (277)..(277): Selenocysteine
  MOD_RES (288)..(288): Selenocysteine
  MOD_RES (298)..(298): Selenocysteine
  MOD_RES (316)..(316): Selenocysteine
  MOD_RES (320)..(320): Selenocysteine
  MOD_RES (346)..(346): Selenocysteine
  MOD_RES (378)..(378): Selenocysteine
  MOD_RES (405)..(405): Selenocysteine
  MOD_RES (414)..(414): Selenocysteine
  MOD_RES (416)..(416): Selenocysteine
MASSSGSSPRPAPDENEFPFGCPPXVCQDPKEPRALCCAGCLSENPRNGEDQICPKCRGEDLQSISPGSRLRXQEKAHPEVAEAGIGCPFAGVGCSFKGSPQSVQEHEVXSQXSHLNLLLGFMKQWKARLGCGLESGPMALEQNLSDLQLQAAVEVAGDLEVDCYRAPCSESQEELALQHFMKEKLLAELEGKLRVFENIVAVLNKEVEASHLALAXSIHQSQLDRERILSLEQRVVELQQXLAQKDQALGKLEQSLRLMEEASFDGXFLWKIXNVXRRCHESACGRXVSLFSPAFYXAKYGYKLCLRLYLNGDGXGKRXHLSLFIVIMRGEYDALLPWPFRNKVXFMLLDQNNREHAIDAFRPDLSSASFQRPQSEXNVASGCPLFFPLSKLQSPKHAYVKDDXMFLKCIVEXSX

SEQ ID NO: 28390 - protein, 294 aa, Homo sapiens
  MOD_RES (95)..(95): Selenocysteine
  MOD_RES (120)..(120): Selenocysteine
  MOD_RES (146)..(146): Selenocysteine
  MOD_RES (152)..(152): Selenocysteine
  MOD_RES (155)..(155): Selenocysteine
  MOD_RES (166)..(166): Selenocysteine
  MOD_RES (176)..(176): Selenocysteine
  MOD_RES (194)..(194): Selenocysteine
  MOD_RES (198)..(198): Selenocysteine
  MOD_RES (224)..(224): Selenocysteine
  MOD_RES (256)..(256): Selenocysteine
  MOD_RES (283)..(283): Selenocysteine
  MOD_RES (292)..(292): Selenocysteine
  MOD_RES (294)..(294): Selenocysteine
MKQWKARLGCGLESGPMALEQNLSDLQLQAAVEVAGDLEVDCYRAPCSESQEELALQHFMKEKLLAELEGKLRVFENIVAVLNKEVEASHLALAXSIHQSQLDRERILSLEQRVVELQQXLAQKDQALGKLEQSLRLMEEASFDGXFLWKIXNVXRRCHESACGRXVSLFSPAFYXAKYGYKLCLRLYLNGDGXGKRXHLSLFIVIMRGEYDALLPWPFRNKVXFMLLDQNNREHAIDAFRPDLSSASFQRPQSEXNVASGCPLFFPLSKLQSPKHAYVKDDXMFLKCIVEXSX

SEQ ID NO: 28391 - protein, 121 aa, Homo sapiens
  MOD_RES (7)..(7): Selenocysteine
  MOD_RES (22)..(22): Selenocysteine
  MOD_RES (26)..(26): Selenocysteine
  MOD_RES (113)..(113): Selenocysteine
  MOD_RES (117)..(117): Selenocysteine
MAAASVXPPGSLELLQPGFSKXLLGXKLEAKYLCSACRNVLRRPFQAQCGHRYCSFCLASILSSGPQNCAACVHEGIYEEGISILESSSAFPDNAARREVESLPAVCPSDGCXWKGXLKEY

SEQ ID NO: 28392 - protein, 172 aa, Homo sapiens
  MOD_RES (7)..(7): Selenocysteine
  MOD_RES (22)..(22): Selenocysteine
  MOD_RES (26)..(26): Selenocysteine
  MOD_RES (113)..(113): Selenocysteine
  MOD_RES (117)..(117): Selenocysteine
  MOD_RES (134)..(134): Selenocysteine
MAAASVXPPGSLELLQPGFSKXLLGXKLEAKYLCSACRNVLRRPFQAQCGHRYCSFCLASILSSGPQNCAACVHEGIYEEGISILESSSAFPDNAARREVESLPAVCPSDGCXWKGXLKEYESCHEGRCPLMLXECPACKGLVRLGEKERHLEHECPERSLSCRHCRAPCCG

SEQ ID NO: 28393 - protein, 193 aa, Homo sapiens
  MOD_RES (7)..(7): Selenocysteine
  MOD_RES (22)..(22): Selenocysteine
  MOD_RES (26)..(26): Selenocysteine
  MOD_RES (113)..(113): Selenocysteine
  MOD_RES (117)..(117): Selenocysteine
  MOD_RES (134)..(134): Selenocysteine
  MOD_RES (188)..(188): Selenocysteine
MAAASVXPPGSLELLQPGFSKXLLGXKLEAKYLCSACRNVLRRPFQAQCGHRYCSFCLASILSSGPQNCAACVHEGIYEEGISILESSSAFPDNAARREVESLPAVCPSDGCXWKGXLKEYESCHEGRCPLMLXECPACKGLVRLGEKERHLEHECPERSLSCRHCRAPCCGADVKAHHEVCPKFPLXCDGCG

SEQ ID NO: 28394 - protein, 501 aa, Homo sapiens
  MOD_RES (7)..(7): Selenocysteine
  MOD_RES (22)..(22): Selenocysteine
  MOD_RES (26)..(26): Selenocysteine
  MOD_RES (113)..(113): Selenocysteine
  MOD_RES (117)..(117): Selenocysteine
  MOD_RES (134)..(134): Selenocysteine
  MOD_RES (188)..(188): Selenocysteine
  MOD_RES (208)..(208): Selenocysteine
  MOD_RES (226)..(226): Selenocysteine
  MOD_RES (279)..(279): Selenocysteine
  MOD_RES (281)..(281): Selenocysteine
  MOD_RES (299)..(299): Selenocysteine
  MOD_RES (349)..(349): Selenocysteine
  MOD_RES (383)..(383): Selenocysteine
  MOD_RES (401)..(401): Selenocysteine
  MOD_RES (405)..(405): Selenocysteine
  MOD_RES (431)..(431): Selenocysteine
  MOD_RES (452)..(452): Selenocysteine
  MOD_RES (499)..(499): Selenocysteine
MAAASVXPPGSLELLQPGFSKXLLGXKLEAKYLCSACRNVLRRPFQAQCGHRYCSFCLASILSSGPQNCAACVHEGIYEEGISILESSSAFPDNAARREVESLPAVCPSDGCXWKGXLKEYESCHEGRCPLMLXECPACKGLVRLGEKERHLEHECPERSLSCRHCRAPCCGADVKAHHEVCPKFPLXCDGCGKKKIPREKFQDHVKXCGKCRVPCRFHAIGCLEXVEGEKQQEHEVQWLREHLAMLLSSVLEAKPLLGDQSHAGSELLQRCESLEKKXAXFENIVCVLNREVERVAMXAEACSRQHRLDQDKIEALSSKVQQLERSIGLKDLAMADLEQKVLEMEASXYDGVFIWKISDFARKRQEAVAGRIPAIFSPAFYXSRYGYKMCLRIYLNGDGXGRGXHLSLFFVVMKGPNDALLRWPFNQKVXLMLLDQNNREHVIDAFRPDVXSSSFQRPVNDMNIASGCPLFCPVSKMEAKNSYVRDDAIFIKAIVDLXGL

SEQ ID NO: 28395 - protein, 94 aa, Homo sapiens
  MOD_RES (15)..(15): Selenocysteine
  MOD_RES (23)..(23): Selenocysteine
  MOD_RES (29)..(29): Selenocysteine
  MOD_RES (46)..(46): Selenocysteine
  MOD_RES (66)..(66): Selenocysteine
  MOD_RES (89)..(89): Selenocysteine
MESSKKMDSPGALQXNPPLKLHXDRSAGXPVFVPEQGGYKEKFVKXVEDKYKCEKCHLVLCSPKQXECGHRFCESCMAALLSSSSPKCXACQES

SEQ ID NO: 28396 - protein, 543 aa, Homo sapiens
  MOD_RES (15)..(15): Selenocysteine
  MOD_RES (23)..(23): Selenocysteine
  MOD_RES (29)..(29): Selenocysteine
  MOD_RES (46)..(46): Selenocysteine
  MOD_RES (66)..(66): Selenocysteine
  MOD_RES (89)..(89): Selenocysteine
  MOD_RES (176)..(176): Selenocysteine
  MOD_RES (195)..(195): Selenocysteine
  MOD_RES (212)..(212): Selenocysteine
  MOD_RES (219)..(219): Selenocysteine
  MOD_RES (337)..(337): Selenocysteine
  MOD_RES (353)..(353): Selenocysteine
  MOD_RES (386)..(386): Selenocysteine
  MOD_RES (412)..(412): Selenocysteine
  MOD_RES (422)..(422): Selenocysteine
  MOD_RES (444)..(444): Selenocysteine
  MOD_RES (470)..(470): Selenocysteine
  MOD_RES (500)..(500): Selenocysteine
  MOD_RES (516)..(516): Selenocysteine
  MOD_RES (522)..(522): Selenocysteine
  MOD_RES (528)..(528): Selenocysteine
  MOD_RES (537)..(537): Selenocysteine
MESSKKMDSPGALQXNPPLKLHXDRSAGXPVFVPEQGGYKEKFVKXVEDKYKCEKCHLVLCSPKQXECGHRFCESCMAALLSSSSPKCXACQESIVKDKVFKDNCCKREILALQIYCRNESRGCAEQLMLGHLLVHLKNDCHFEELPCVRPDCKEKVLRKDLRDHVEKACKYREAXCSHCKSQVPMIALQKHEDXDCPCVVVSCPHKCSVQXLLRSEGXNQQIKAHEASSAVQHVNLLKEWSNSLEKKVSLLQNESVEKNKSIQSLHNQICSFEIEIERQKEMLRNNESKILHLQRVIDSQAEKLKELDKEIRPFRQNWEEADSMKSSVESLQNRVXELESVDKSAGQVARNXGLLESQLSRHDQMLSVHDIRLADMDLRFQVLEXASYNGVLIWKIRDYKRRKQEAVMGKXLSLYSQPFYXGYFGYKMCARVYLNGDGMGKGXHLSLFFVIMRGEYDALLPWPFKQKVXLMLMDQGSSRRHLGDAFKPDPNSSSFKKPXGEMNIASGCPVFVAQXVLENGXYIKDDXIFIKVIVDXSDLPDP

SEQ ID NO: 28397 - protein, 568 aa, Homo sapiens
  MOD_RES (15)..(15): Selenocysteine
  MOD_RES (23)..(23): Selenocysteine
  MOD_RES (29)..(29): Selenocysteine
  MOD_RES (46)..(46): Selenocysteine
  MOD_RES (66)..(66): Selenocysteine
  MOD_RES (89)..(89): Selenocysteine
  MOD_RES (176)..(176): Selenocysteine
  MOD_RES (195)..(195): Selenocysteine
  MOD_RES (212)..(212): Selenocysteine
  MOD_RES (231)..(231): Selenocysteine
  MOD_RES (244)..(244): Selenocysteine
  MOD_RES (362)..(362): Selenocysteine
  MOD_RES (378)..(378): Selenocysteine
  MOD_RES (411)..(411): Selenocysteine
  MOD_RES (437)..(437): Selenocysteine
  MOD_RES (447)..(447): Selenocysteine
  MOD_RES (469)..(469): Selenocysteine
  MOD_RES (495)..(495): Selenocysteine
  MOD_RES (525)..(525): Selenocysteine
  MOD_RES (541)..(541): Selenocysteine
  MOD_RES (547)..(547): Selenocysteine
  MOD_RES (553)..(553): Selenocysteine
  MOD_RES (562)..(562): Selenocysteine
MESSKKMDSPGALQXNPPLKLHXDRSAGXPVFVPEQGGYKEKFVKXVEDKYKCEKCHLVLCSPKQXECGHRFCESCMAALLSSSSPKCXACQESIVKDKVFKDNCCKREILALQIYCRNESRGCAEQLMLGHLLVHLKNDCHFEELPCVRPDCKEKVLRKDLRDHVEKACKYREAXCSHCKSQVPMIALQKHEDXDCPCVVVSCPHKCSVQXLLRSELSAHLSECVNAPSXCSFKRYGCVFQGXNQQIKAHEASSAVQHVNLLKEWSNSLEKKVSLLQNESVEKNKSIQSLHNQICSFEIEIERQKEMLRNNESKILHLQRVIDSQAEKLKELDKEIRPFRQNWEEADSMKSSVESLQNRVXELESVDKSAGQVARNXGLLESQLSRHDQMLSVHDIRLADMDLRFQVLEXASYNGVLIWKIRDYKRRKQEAVMGKXLSLYSQPFYXGYFGYKMCARVYLNGDGMGKGXHLSLFFVIMRGEYDALLPWPFKQKVXLMLMDQGSSRRHLGDAFKPDPNSSSFKKPXGEMNIASGCPVFVAQXVLENGXYIKDDXIFIKVIVDXSDLPDP

SEQ ID NO: 28398 - protein, 485 aa, Homo sapiens
  MOD_RES (15)..(15): Selenocysteine
  MOD_RES (23)..(23): Selenocysteine
  MOD_RES (29)..(29): Selenocysteine
  MOD_RES (46)..(46): Selenocysteine
  MOD_RES (66)..(66): Selenocysteine
  MOD_RES (89)..(89): Selenocysteine
  MOD_RES (176)..(176): Selenocysteine
  MOD_RES (279)..(279): Selenocysteine
  MOD_RES (295)..(295): Selenocysteine
  MOD_RES (328)..(328): Selenocysteine
  MOD_RES (354)..(354): Selenocysteine
  MOD_RES (364)..(364): Selenocysteine
  MOD_RES (386)..(386): Selenocysteine
  MOD_RES (412)..(412): Selenocysteine
  MOD_RES (442)..(442): Selenocysteine
  MOD_RES (458)..(458): Selenocysteine
  MOD_RES (464)..(464): Selenocysteine
  MOD_RES (470)..(470): Selenocysteine
  MOD_RES (479)..(479): Selenocysteine
MESSKKMDSPGALQXNPPLKLHXDRSAGXPVFVPEQGGYKEKFVKXVEDKYKCEKCHLVLCSPKQXECGHRFCESCMAALLSSSSPKCXACQESIVKDKVFKDNCCKREILALQIYCRNESRGCAEQLMLGHLLVHLKNDCHFEELPCVRPDCKEKVLRKDLRDHVEKACKYREAXCSHCKSQVPMIALQVSLLQNESVEKNKSIQSLHNQICSFEIEIERQKEMLRNNESKILHLQRVIDSQAEKLKELDKEIRPFRQNWEEADSMKSSVESLQNRVXELESVDKSAGQVARNXGLLESQLSRHDQMLSVHDIRLADMDLRFQVLEXASYNGVLIWKIRDYKRRKQEAVMGKXLSLYSQPFYXGYFGYKMCARVYLNGDGMGKGXHLSLFFVIMRGEYDALLPWPFKQKVXLMLMDQGSSRRHLGDAFKPDPNSSSFKKPXGEMNIASGCPVFVAQXVLENGXYIKDDXIFIKVIVDXSDLPDP

SEQ ID NO: 28399 - protein, 207 aa, Homo sapiens
  MOD_RES (4)..(4): Selenocysteine
  MOD_RES (91)..(91): Selenocysteine
  MOD_RES (110)..(110): Selenocysteine
  MOD_RES (127)..(127): Selenocysteine
  MOD_RES (146)..(146): Selenocysteine
  MOD_RES (159)..(159): Selenocysteine
  MOD_RES (203)..(203): Selenocysteine
PKCXACQESIVKDKVFKDNCCKREILALQIYCRNESRGCAEQLMLGHLLVHLKNDCHFEELPCVRPDCKEKVLRKDLRDHVEKACKYREAXCSHCKSQVPMIALQKHEDXDCPCVVVSCPHKCSVQXLLRSELSAHLSECVNAPSXCSFKRYGCVFQGXNQQIKAHEASSAVQHVNLLKEWSNSLEKKGYENKESENSVPSLXDGNE

SEQ ID NO: 28400 - protein, 290 aa, Homo sapiens
  MOD_RES (56)..(56): Selenocysteine
  MOD_RES (72)..(72): Selenocysteine
  MOD_RES (190)..(190): Selenocysteine
  MOD_RES (206)..(206): Selenocysteine
  MOD_RES (239)..(239): Selenocysteine
  MOD_RES (265)..(265): Selenocysteine
  MOD_RES (275)..(275): Selenocysteine
SRGCAEQLMLGHLLVHLKNDCHFEELPCVRPDCKEKVLRKDLRDHVEKACKYREAXCSHCKSQVPMIALQGXNQQIKAHEASSAVQHVNLLKEWSNSLEKKVSLLQNESVEKNKSIQSLHNQICSFEIEIERQKEMLRNNESKILHLQRVIDSQAEKLKELDKEIRPFRQNWEEADSMKSSVESLQNRVXELESVDKSAGQVARNXGLLESQLSRHDQMLSVHDIRLADMDLRFQVLEXASYNGVLIWKIRDYKRRKQEAVMGKXLSLYSQPFYXGYFGYKMCARVYLNG

SEQ ID NO: 28401 - protein, 52 aa, Homo sapiens
  MOD_RES (9)..(9): Selenocysteine
  MOD_RES (23)..(23): Selenocysteine
  MOD_RES (40)..(40): Selenocysteine
MNAAVVRRXQEALGKVIRRPPLXEKLLSKPPFRYLHDIIXEVGAGDRARPGD

SEQ ID NO: 28402 - protein, 625 aa, Homo sapiens
  MOD_RES (9)..(9): Selenocysteine
  MOD_RES (23)..(23): Selenocysteine
  MOD_RES (40)..(40): Selenocysteine
  MOD_RES (46)..(46): Selenocysteine
  MOD_RES (54)..(54): Selenocysteine
  MOD_RES (104)..(104): Selenocysteine
  MOD_RES (143)..(143): Selenocysteine
  MOD_RES (165)..(165): Selenocysteine
  MOD_RES (178)..(178): Selenocysteine
  MOD_RES (249)..(249): Selenocysteine
  MOD_RES (320)..(320): Selenocysteine
  MOD_RES (328)..(328): Selenocysteine
  MOD_RES (330)..(330): Selenocysteine
  MOD_RES (334)..(334): Selenocysteine
  MOD_RES (341)..(342): Selenocysteine
  MOD_RES (344)..(344): Selenocysteine
  MOD_RES (358)..(358): Selenocysteine
  MOD_RES (378)..(378): Selenocysteine
  MOD_RES (424)..(424): Selenocysteine
  MOD_RES (430)..(430): Selenocysteine
  MOD_RES (461)..(461): Selenocysteine
  MOD_RES (481)..(481): Selenocysteine
  MOD_RES (522)..(522): Selenocysteine
  MOD_RES (526)..(526): Selenocysteine
  MOD_RES (573)..(573): Selenocysteine
  MOD_RES (622)..(622): Selenocysteine
MNAAVVRRXQEALGKVIRRPPLXEKLLSKPPFRYLHDIIXEVIRMXGFMKGLYXDAEMKSDNVKDKDAKISFLQKAIDVVVMVSGEPLLAKPARIVAGHEPERXNELLQIIGKCCLNKLSSDDAVRRVLAGEKGEVKGRASLXSRSQELDNKNVREEESRVHKNXEDRGDAEIKERSXSRDRKQKEELKEDRKPREKDKDKEKAKENGGNRHREGERERAKARARPDNERQKDRGNRERDRDSERKKEXERKSEGGKEKERLRDRDRERDRDKGKDRDRRRVKNGEHSWDLDREKNREHDKPEKKSASSGEMSKKLSDGXFKDSKAEXEXEISXRASKSLXXKXSKRRSKNSVEGDSXSDAEGDAGPAGQDKSEVPEXPEIPNELSSNIRRIPRPGSARPAPPRVKRQDSMEALQMDRSGSGKXVSNVIXESHNSDNEEDDQFVVEAAPQLSEMSEIEMVXAVELEEEEKHGGLVKKILEXKKDYEKLQQSPKPGEKERSLFESAWKKEKDIVSKEIEKLRXSIQXLCKSALPLGKIMDYIQEDVDAMQNELQMWHSENRQHAEALQQEQRIXDCAVEPLKAELAELEQLIKDQQDKICAVKANILKNEEKIQKMVYSINLXSRR

SEQ ID NO: 28403 - protein, 691 aa, Homo sapiens
  MOD_RES (9)..(9): Selenocysteine
  MOD_RES (23)..(23): Selenocysteine
  MOD_RES (40)..(40): Selenocysteine
  MOD_RES (46)..(46): Selenocysteine
  MOD_RES (54)..(54): Selenocysteine
  MOD_RES (104)..(104): Selenocysteine
  MOD_RES (143)..(143): Selenocysteine
  MOD_RES (165)..(165): Selenocysteine
  MOD_RES (178)..(178): Selenocysteine
  MOD_RES (249)..(249): Selenocysteine
  MOD_RES (320)..(320): Selenocysteine
  MOD_RES (328)..(328): Selenocysteine
  MOD_RES (330)..(330): Selenocysteine
  MOD_RES (334)..(334): Selenocysteine
  MOD_RES (341)..(342): Selenocysteine
  MOD_RES (344)..(344): Selenocysteine
  MOD_RES (381)..(383): Selenocysteine
  MOD_RES (388)..(388): Selenocysteine
  MOD_RES (396)..(396): Selenocysteine
  MOD_RES (416)..(416): Selenocysteine
  MOD_RES (424)..(424): Selenocysteine
  MOD_RES (444)..(444): Selenocysteine
  MOD_RES (490)..(490): Selenocysteine
  MOD_RES (496)..(496): Selenocysteine
  MOD_RES (527)..(527): Selenocysteine
  MOD_RES (547)..(547): Selenocysteine
  MOD_RES (588)..(588): Selenocysteine
  MOD_RES (592)..(592): Selenocysteine
  MOD_RES (639)..(639): Selenocysteine
  MOD_RES (688)..(688): Selenocysteine
MNAAVVRRXQEALGKVIRRPPLXEKLLSKPPFRYLHDIIXEVIRMXGFMKGLYXDAEMKSDNVKDKDAKISFLQKAIDVVVMVSGEPLLAKPARIVAGHEPERXNELLQIIGKCCLNKLSSDDAVRRVLAGEKGEVKGRASLXSRSQELDNKNVREEESRVHKNXEDRGDAEIKERSXSRDRKQKEELKEDRKPREKDKDKEKAKENGGNRHREGERERAKARARPDNERQKDRGNRERDRDSERKKEXERKSEGGKEKERLRDRDRERDRDKGKDRDRRRVKNGEHSWDLDREKNREHDKPEKKSASSGEMSKKLSDGXFKDSKAEXEXEISXRASKSLXXKXSKRRSKNSVEGRKEDNISAKSLDSIVSGINNEPNQEXXXSEIGXKEANINSXSISDDNSASLRCENIQPNPXEKQKGDSXSDAEGDAGPAGQDKSEVPEXPEIPNELSSNIRRIPRPGSARPAPPRVKRQDSMEALQMDRSGSGKXVSNVIXESHNSDNEEDDQFVVEAAPQLSEMSEIEMVXAVELEEEEKHGGLVKKILEXKKDYEKLQQSPKPGEKERSLFESAWKKEKDIVSKEIEKLRXSIQXLCKSALPLGKIMDYIQEDVDAMQNELQMWHSENRQHAEALQQEQRIXDCAVEPLKAELAELEQLIKDQQDKICAVKANILKNEEKIQKMVYSINLXSRR

SEQ ID NO: 28404 - protein, 109 aa, Homo sapiens
  MOD_RES (30)..(30): Selenocysteine
  MOD_RES (66)..(66): Selenocysteine
  MOD_RES (71)..(71): Selenocysteine
  MOD_RES (103)..(103): Selenocysteine
MIIVAISPKYKQDVEGAESQLDEDEHGLHXKYIHRMMQIEFIKQGSMNFRFIPVLFPNAKKEHVPXWLQNXHVYSWPKNKKNILLRLLREEEYVAPPRGPLPXLQVVPL

SEQ ID NO: 28405 - protein, 564 aa, Homo sapiens
  MOD_RES (51)..(51): Selenocysteine
  MOD_RES (66)..(66): Selenocysteine
  MOD_RES (81)..(81): Selenocysteine
  MOD_RES (85)..(85): Selenocysteine
  MOD_RES (152)..(152): Selenocysteine
  MOD_RES (194)..(194): Selenocysteine
  MOD_RES (197)..(197): Selenocysteine
  MOD_RES (219)..(219): Selenocysteine
  MOD_RES (390)..(390): Selenocysteine
  MOD_RES (393)..(393): Selenocysteine
  MOD_RES (406)..(406): Selenocysteine
  MOD_RES (411)..(411): Selenocysteine
  MOD_RES (429)..(429): Selenocysteine
  MOD_RES (454)..(454): Selenocysteine
  MOD_RES (485)..(485): Selenocysteine
  MOD_RES (521)..(521): Selenocysteine
  MOD_RES (526)..(526): Selenocysteine
  MOD_RES (558)..(558): Selenocysteine
MNRSIPVEVDESEPYPSQLLKPIPEYSPEEESEPPAPNIRNMAPNSLSAPXMLHNSSGDFSQAHSXLKLANHQRPVSRQVXCLRXQVLEDSEDSFCRRHPGLGKAFPSGCSAVSEPASESVVGALPAEHQFSFMEKRNQWLVSQLSAASPDXGHDSDKSDQSLPNASADSLGGSQEMVQRPQPHRNRAGLDLPXIDXGYDSQPQDVLGIRQLERPLPLXSVCYPQDLPRPLRSREFPQFEPQRYPACAQMLPPNLSPHAPWNYHYHCPGSPDHQVPYGHDYPRAAYQQVIQPALPGQPLPGASVRGLHPVQKVILNYPSPWDHEERPAQRDCSFPGLPRHQDQPHHQPPNRAGAPGESLECPAELRPQVPQPPSPAAVPRPPSNPPARGXLKXSNLPEELRKVFIXYSMDXAMEVVKFVNFLLVNGFQXAIDIFEDRIRGIDIIKWMERYLRDXVMIIVAISPKYKQDVEGAESQLDEDEHGLHXKYIHRMMQIEFIKQGSMNFRFIPVLFPNAKKEHVPXWLQNXHVYSWPKNKKNILLRLLREEEYVAPPRGPLPXLQVVPL

SEQ ID NO: 28406 - protein, 565 aa, Homo sapiens
  MOD_RES (51)..(51): Selenocysteine
  MOD_RES (66)..(66): Selenocysteine
  MOD_RES (81)..(81): Selenocysteine
  MOD_RES (85)..(85): Selenocysteine
  MOD_RES (152)..(152): Selenocysteine
  MOD_RES (194)..(194): Selenocysteine
  MOD_RES (197)..(197): Selenocysteine
  MOD_RES (219)..(219): Selenocysteine
  MOD_RES (390)..(390): Selenocysteine
  MOD_RES (393)..(393): Selenocysteine
  MOD_RES (406)..(406): Selenocysteine
  MOD_RES (411)..(411): Selenocysteine
  MOD_RES (429)..(429): Selenocysteine
  MOD_RES (455)..(455): Selenocysteine
  MOD_RES (486)..(486): Selenocysteine
  MOD_RES (522)..(522): Selenocysteine
  MOD_RES (527)..(527): Selenocysteine
  MOD_RES (559)..(559): Selenocysteine
MNRSIPVEVDESEPYPSQLLKPIPEYSPEEESEPPAPNIRNMAPNSLSAPXMLHNSSGDFSQAHSXLKLANHQRPVSRQVXCLRXQVLEDSEDSFCRRHPGLGKAFPSGCSAVSEPASESVVGALPAEHQFSFMEKRNQWLVSQLSAASPDXGHDSDKSDQSLPNASADSLGGSQEMVQRPQPHRNRAGLDLPXIDXGYDSQPQDVLGIRQLERPLPLXSVCYPQDLPRPLRSREFPQFEPQRYPACAQMLPPNLSPHAPWNYHYHCPGSPDHQVPYGHDYPRAAYQQVIQPALPGQPLPGASVRGLHPVQKVILNYPSPWDHEERPAQRDCSFPGLPRHQDQPHHQPPNRAGAPGESLECPAELRPQVPQPPSPAAVPRPPSNPPARGXLKXSNLPEELRKVFIXYSMDXAMEVVKFVNFLLVNGFQXAIDIFEDRIRGIDIIKWMERYLRDKXVMIIVAISPKYKQDVEGAESQLDEDEHGLHXKYIHRMMQIEFIKQGSMNFRFIPVLFPNAKKEHVPXWLQNXHVYSWPKNKKNILLRLLREEEYVAPPRGPLPXLQVVPL

SEQ ID NO: 28407 - protein, 574 aa, Homo sapiens
  MOD_RES (8)..(8): Selenocysteine
  MOD_RES (60)..(60): Selenocysteine
  MOD_RES (75)..(75): Selenocysteine
  MOD_RES (90)..(90): Selenocysteine
  MOD_RES (94)..(94): Selenocysteine
  MOD_RES (161)..(161): Selenocysteine
  MOD_RES (203)..(203): Selenocysteine
  MOD_RES (206)..(206): Selenocysteine
  MOD_RES (228)..(228): Selenocysteine
  MOD_RES (399)..(399): Selenocysteine
  MOD_RES (402)..(402): Selenocysteine
  MOD_RES (415)..(415): Selenocysteine
  MOD_RES (420)..(420): Selenocysteine
  MOD_RES (438)..(438): Selenocysteine
  MOD_RES (464)..(464): Selenocysteine
  MOD_RES (495)..(495): Selenocysteine
  MOD_RES (531)..(531): Selenocysteine
  MOD_RES (536)..(536): Selenocysteine
  MOD_RES (568)..(568): Selenocysteine
MPPQLQEXRMNRSIPVEVDESEPYPSQLLKPIPEYSPEEESEPPAPNIRNMAPNSLSAPXMLHNSSGDFSQAHSXLKLANHQRPVSRQVXCLRXQVLEDSEDSFCRRHPGLGKAFPSGCSAVSEPASESVVGALPAEHQFSFMEKRNQWLVSQLSAASPDXGHDSDKSDQSLPNASADSLGGSQEMVQRPQPHRNRAGLDLPXIDXGYDSQPQDVLGIRQLERPLPLXSVCYPQDLPRPLRSREFPQFEPQRYPACAQMLPPNLSPHAPWNYHYHCPGSPDHQVPYGHDYPRAAYQQVIQPALPGQPLPGASVRGLHPVQKVILNYPSPWDHEERPAQRDCSFPGLPRHQDQPHHQPPNRAGAPGESLECPAELRPQVPQPPSPAAVPRPPSNPPARGXLKXSNLPEELRKVFIXYSMDXAMEVVKFVNFLLVNGFQXAIDIFEDRIRGIDIIKWMERYLRDKXVMIIVAISPKYKQDVEGAESQLDEDEHGLHXKYIHRMMQIEFIKQGSMNFRFIPVLFPNAKKEHVPXWLQNXHVYSWPKNKKNILLRLLREEEYVAPPRGPLPXLQVVPL

SEQ ID NO: 28408 - protein, 112 aa, Homo sapiens
  MOD_RES (57)..(57): Selenocysteine
  MOD_RES (104)..(104): Selenocysteine
EGVFKCPEDQLPLDYAKIYPDPELEVQVLGLPIRCIHSEEGCRWSGPLRHLQGHLNXCSFNVIPCPNRCPMKLSRRDLPAHLQHDCPKRRLKAMRVCAPRRVSXVRISVVPA

SEQ ID NO: 28409 - protein, 48 aa, Homo sapiens
MKLSRRDLPAHLQHDCPKRRLKCEFCGCDFSGEAYESHEGMCPQESVY

SEQ ID NO: 28410 - protein, 90 aa, Homo sapiens
  MOD_RES (67)..(67): Selenocysteine
  MOD_RES (74)..(74): Selenocysteine
  MOD_RES (78)..(78): Selenocysteine
  MOD_RES (81)..(81): Selenocysteine
  MOD_RES (88)..(88): Selenocysteine
MKLSRRDLPAHLQHDCPKRRLKCEFCGCDFSGEAYESHEGMCPQESVYCENKCGARMMRRLLAQHAXSECPKRXQPCXYCXKEFVFDXIQ

SEQ ID NO: 28411 - protein, 49 aa, Homo sapiens
  MOD_RES (33)..(33): Selenocysteine
  MOD_RES (41)..(41): Selenocysteine
MPGFDYKFLEKPKRRLLCPLCGKPMREPVQVSXCGHRFCDXCLQEFLRS

SEQ ID NO: 28412 - protein, 53 aa, Homo sapiens
  MOD_RES (33)..(33): Selenocysteine
  MOD_RES (41)..(41): Selenocysteine
MPGFDYKFLEKPKRRLLCPLCGKPMREPVQVSXCGHRFCDXCLQEFLRSLQVP

SEQ ID NO: 28413 - protein, 182 aa, Homo sapiens
  MOD_RES (33)..(33): Selenocysteine
  MOD_RES (41)..(41): Selenocysteine
  MOD_RES (112)..(112): Selenocysteine
MPGFDYKFLEKPKRRLLCPLCGKPMREPVQVSXCGHRFCDXCLQEFLSEGVFKCPEDQLPLDYAKFPHPYPQIYPDPELEVQVLGLPIRCIHSEEGCRWSGPLRHLQGHLNXCSFNVIPCPNRCPMKLSRRDLPAHLQHDCPKRRLKCEFCGCDFSGEAYESHEGMCPQESVYCENKCGARM

SEQ ID NO: 28414 - protein, 437 aa, Homo sapiens
  MOD_RES (33)..(33): Selenocysteine
  MOD_RES (41)..(41): Selenocysteine
  MOD_RES (105)..(105): Selenocysteine
  MOD_RES (185)..(185): Selenocysteine
  MOD_RES (192)..(192): Selenocysteine
  MOD_RES (196)..(196): Selenocysteine
  MOD_RES (199)..(199): Selenocysteine
  MOD_RES (206)..(206): Selenocysteine
  MOD_RES (229)..(229): Selenocysteine
  MOD_RES (245)..(245): Selenocysteine
  MOD_RES (339)..(339): Selenocysteine
  MOD_RES (361)..(361): Selenocysteine
  MOD_RES (404)..(404): Selenocysteine
  MOD_RES (406)..(406): Selenocysteine
MPGFDYKFLEKPKRRLLCPLCGKPMREPVQVSXCGHRFCDXCLQEFLSEGVFKCPEDQLPLDYAKIYPDPELEVQVLGLPIRCIHSEEGCRWSGPLRHLQGHLNXCSFNVIPCPNRCPMKLSRRDLPAHLQHDCPKRRLKCEFCGCDFSGEAYESHEGMCPQESVYCENKCGARMMRRLLAQHAXSECPKRXQPCXYCXKEFVFDXIQSHQYQCPRLPVACPNQCGVGXVAREDLPGHLKDSCNXALVLCPFKDSGCKHRCPKLAMARHVEESVKPHLAMMCALVSRQRQELQELRRELEELSVGSDGVLIWKIGSYGRRLQEAKAKPNLECFSPAFYXHKYGYKLQVSAFLNGNGSGEGXHLSLYIRVLPGAFDNLLEWPFARRGLSPFLGRADMPWCRSHSXRXEVPAQVLCPKSHKGVGIGEGERVVQRVCLEI

SEQ ID NO: 28415 - protein, 470 aa, Homo sapiens
  MOD_RES (33)..(33): Selenocysteine
  MOD_RES (41)..(41): Selenocysteine
  MOD_RES (105)..(105): Selenocysteine
  MOD_RES (185)..(185): Selenocysteine
  MOD_RES (192)..(192): Selenocysteine
  MOD_RES (196)..(196): Selenocysteine
  MOD_RES (199)..(199): Selenocysteine
  MOD_RES (206)..(206): Selenocysteine
  MOD_RES (229)..(229): Selenocysteine
  MOD_RES (245)..(245): Selenocysteine
  MOD_RES (339)..(339): Selenocysteine
  MOD_RES (361)..(361): Selenocysteine
  MOD_RES (387)..(387): Selenocysteine
  MOD_RES (405)..(405): Selenocysteine
  MOD_RES (407)..(407): Selenocysteine
  MOD_RES (422)..(422): Selenocysteine
MPGFDYKFLEKPKRRLLCPLCGKPMREPVQVSXCGHRFCDXCLQEFLSEGVFKCPEDQLPLDYAKIYPDPELEVQVLGLPIRCIHSEEGCRWSGPLRHLQGHLNXCSFNVIPCPNRCPMKLSRRDLPAHLQHDCPKRRLKCEFCGCDFSGEAYESHEGMCPQESVYCENKCGARMMRRLLAQHAXSECPKRXQPCXYCXKEFVFDXIQSHQYQCPRLPVACPNQCGVGXVAREDLPGHLKDSCNXALVLCPFKDSGCKHRCPKLAMARHVEESVKPHLAMMCALVSRQRQELQELRRELEELSVGSDGVLIWKIGSYGRRLQEAKAKPNLECFSPAFYXHKYGYKLQVSAFLNGNGSGEGXHLSLYIRVLPGAFDNLLEWPFARRVXFSLLDQSDPGLAKPQHVXEXFHPDPNWKNFQKPGXWRGSLDESSLGFGYPKFISHQDIRKRNYVRDDAVFIRAAVELPRKILS

SEQ ID NO: 28416 - protein, 195 aa, Homo sapiens
  MOD_RES (33)..(33): Selenocysteine
  MOD_RES (41)..(41): Selenocysteine
  MOD_RES (105)..(105): Selenocysteine
MPGFDYKFLEKPKRRLLCPLCGKPMREPVQVSXCGHRFCDXCLQEFLSEGVFKCPEDQLPLDYAKIYPDPELEVQVLGLPIRCIHSEEGCRWSGPLRHLQGHLNXCSFNVIPCPNRCPMKLSRRDLPAHLQHDCPKRRLKCEFCGCDFSGEAYESSLGFGYPKFISHQDIRKRNYVRDDAVFIRAAVELPRKILS

SEQ ID NO: 28417 - protein, 144 aa, Homo sapiens
  MOD_RES (33)..(33): Selenocysteine
  MOD_RES (41)..(41): Selenocysteine
  MOD_RES (61)..(61): Selenocysteine
  MOD_RES (79)..(79): Selenocysteine
  MOD_RES (81)..(81): Selenocysteine
  MOD_RES (96)..(96): Selenocysteine
MPGFDYKFLEKPKRRLLCPLCGKPMREPVQVSXCGHRFCDXCLQEFLSEGVFKWPFARRVXFSLLDQSDPGLAKPQHVXEXFHPDPNWKNFQKPGXWRGSLDESSLGFGYPKFISHQDIRKRNYVRDDAVFIRAAVELPRKILS

SEQ ID NO: 28418 - protein, 92 aa, Homo sapiens
  MOD_RES (1)..(1): Any amino acid
  MOD_RES (5)..(5): Selenocysteine
  MOD_RES (61)..(61): Selenocysteine
  MOD_RES (81)..(81): Selenocysteine
XFCDXCLQEFLSEGVFKCPEDQLPLDYAKVSPHCQEEAQAQSVALGGRSCWQPVGSGPVSXKSLGMVRLHKDLPRPGAGSXSIGPAYPLHPQ

SEQ ID NO: 28419 - protein, 557 aa, Homo sapiens
  MOD_RES (58)..(58): Selenocysteine
  MOD_RES (77)..(77): Selenocysteine
  MOD_RES (206)..(206): Selenocysteine
  MOD_RES (232)..(232): Selenocysteine
  MOD_RES (284)..(284): Selenocysteine
  MOD_RES (351)..(351): Selenocysteine
  MOD_RES (357)..(357): Selenocysteine
  MOD_RES (373)..(373): Selenocysteine
  MOD_RES (378)..(378): Selenocysteine
  MOD_RES (400)..(400): Selenocysteine
  MOD_RES (411)..(411): Selenocysteine
  MOD_RES (425)..(425): Selenocysteine
  MOD_RES (435)..(435): Selenocysteine
  MOD_RES (483)..(483): Selenocysteine
  MOD_RES (498)..(498): Selenocysteine
  MOD_RES (542)..(542): Selenocysteine
  MOD_RES (552)..(552): Selenocysteine
MAYSEEHKGMPCGFIRQNSGNSISLDFEPSIEYQFVERLEERYKCAFCHSVLHNPHQXGCGHRFCQHCILSLRELNXVPICPVDKEVIKSQEVFKDNCCKREVLNLYVYCSNAPGCNAKVILGRYQDHLQQCLFQPVQCSNEKCREPVLRKDLKEHLSASCQFRKEKCLYCKKDVVVINLQNHEENLCPEYPVFCPNNCAKIILKXEVDEHLAVCPEAEQDCPFKHYGCAVXDKRRNLQQHEHSALREHMRLVLEKNVQLEEQISDLHKSLEQKESKIQQLAEXIKKLEKEFKQFAQLFGKNGSFLPNIQVFASHIDKSAWLEAQVHQLLQMVNQQQNKFDLRPLMEAVDXVKQKIXLLENNDQRLAVLEEEXNKHDXHINIHKAQLSKNEERFKLLEGXCYNGKLIWKVXDYKMKKREAVDGHXVSIFSQSFYXSRCGYRLCARAYLNGDGSGRGSHLSLYFVVMRGEFDSLLQWPFRQRVXLMLLDQSGKKNIMEXFKPDPNSSSFKRPDGEMNIASGCPRFVAHSVLENAKNAYIKDDXLFLKVAVDLXDLEDL

SEQ ID NO: 28420 - protein, 522 aa, Homo sapiens
  MOD_RES (31)..(31): Selenocysteine
  MOD_RES (39)..(39): Selenocysteine
  MOD_RES (42)..(42): Selenocysteine
  MOD_RES (83)..(83): Selenocysteine
  MOD_RES (220)..(220): Selenocysteine
  MOD_RES (237)..(237): Selenocysteine
  MOD_RES (243)..(243): Selenocysteine
  MOD_RES (246)..(246): Selenocysteine
  MOD_RES (266)..(266): Selenocysteine
  MOD_RES (298)..(298): Selenocysteine
  MOD_RES (317)..(317): Selenocysteine
  MOD_RES (322)..(322): Selenocysteine
  MOD_RES (333)..(333): Selenocysteine
  MOD_RES (336)..(336): Selenocysteine
  MOD_RES (382)..(382): Selenocysteine
  MOD_RES (399)..(399): Selenocysteine
  MOD_RES (413)..(413): Selenocysteine
  MOD_RES (429)..(429): Selenocysteine
  MOD_RES (433)..(433): Selenocysteine
  MOD_RES (463)..(463): Selenocysteine
  MOD_RES (475)..(475): Selenocysteine
  MOD_RES (486)..(486): Selenocysteine
  MOD_RES (492)..(492): Selenocysteine
  MOD_RES (501)..(501): Selenocysteine
  MOD_RES (518)..(518): Selenocysteine
MSLLNCENSCGSSQSESDCCVAMASSCSAVXKDDSVGGXASXGNLSSSFMEEIQGYDVEFDPPLESKYECPICLMALREAVQXPCGHRFCKACIIKSIRDAGHKCPVDNEILLENQLFPDNFAKREILSLMVKCPNEGCLHKMELRHLEDHQAHCEFALMDCPQCQRPFQKFHINIHILKDCPRRQVSCDNCAASMAFEDKEIHDQNCPLANVICEYCNXILIREQMPNHYDLDCPXAPIPCXFSXFGCHEKMQRNHLARHLQENXQSHMRMLAQAVHSLSVIPDSGYISEVRNFQEXIHQLEGRLVRQDHQIRELXAKMEXQSMYVSELKRXIRXLEDKVAEIEAQQCNGIYIWKIGNFGMHLKCQEEEKPVVIHSPGFYXGKPGYKLCMRLHLQLPXAQRCANYISLFVHXMQGEYDSHLPWPFQGXIRLXILDQSEAPVRQNHEEIMDAKPELLAFQRPXIPRNPKGFGYVXFMHLEALRQRXFIKDDXLLVRCEVSXRFDMGSLRREGFQPRSXDAGV

SEQ ID NO: 28421 - protein, 147 aa, Homo sapiens
  MOD_RES (21)..(21): Selenocysteine
  MOD_RES (25)..(26): Selenocysteine
  MOD_RES (28)..(28): Selenocysteine
  MOD_RES (32)..(33): Selenocysteine
  MOD_RES (42)..(43): Selenocysteine
  MOD_RES (45)..(45): Selenocysteine
  MOD_RES (50)..(50): Selenocysteine
  MOD_RES (52)..(52): Selenocysteine
  MOD_RES (59)..(59): Selenocysteine
  MOD_RES (65)..(65): Selenocysteine
  MOD_RES (82)..(82): Selenocysteine
  MOD_RES (106)..(106): Selenocysteine
  MOD_RES (144)..(145): Selenocysteine
MSSGKSARYNRFSGGPSNLPXPDVXXGXRMEXXFGPAFSAVXXIXKADGXSXYKQHCRXPSSSSXLAYSPRDEEDSMPPISXPRRSDSAISVRSLHSESSMSLRSXFSLPEEEEEPEPLVFAEQPSVKLCCQLCCSVFKDPVIXXCG

SEQ ID NO: 28422 - protein, 670 aa, Homo sapiens
  MOD_RES (21)..(21): Selenocysteine
  MOD_RES (25)..(26): Selenocysteine
  MOD_RES (28)..(28): Selenocysteine
  MOD_RES (32)..(33): Selenocysteine
  MOD_RES (42)..(43): Selenocysteine
  MOD_RES (45)..(45): Selenocysteine
  MOD_RES (50)..(50): Selenocysteine
  MOD_RES (52)..(52): Selenocysteine
  MOD_RES (59)..(59): Selenocysteine
  MOD_RES (65)..(65): Selenocysteine
  MOD_RES (82)..(82): Selenocysteine
  MOD_RES (106)..(106): Selenocysteine
  MOD_RES (144)..(145): Selenocysteine
  MOD_RES (149)..(149): Selenocysteine
  MOD_RES (169)..(169): Selenocysteine
  MOD_RES (213)..(213): Selenocysteine
  MOD_RES (267)..(267): Selenocysteine
  MOD_RES (274)..(274): Selenocysteine
  MOD_RES (277)..(277): Selenocysteine
  MOD_RES (281)..(281): Selenocysteine
  MOD_RES (294)..(294): Selenocysteine
  MOD_RES (391)..(391): Selenocysteine
  MOD_RES (419)..(419): Selenocysteine
  MOD_RES (425)..(425): Selenocysteine
  MOD_RES (427)..(428): Selenocysteine
  MOD_RES (434)..(434): Selenocysteine
  MOD_RES (460)..(460): Selenocysteine
  MOD_RES (474)..(474): Selenocysteine
  MOD_RES (484)..(484): Selenocysteine
  MOD_RES (508)..(508): Selenocysteine
  MOD_RES (517)..(517): Selenocysteine
  MOD_RES (540)..(540): Selenocysteine
  MOD_RES (548)..(548): Selenocysteine
  MOD_RES (557)..(557): Selenocysteine
  MOD_RES (568)..(568): Selenocysteine
  MOD_RES (576)..(576): Selenocysteine
  MOD_RES (594)..(594): Selenocysteine
  MOD_RES (596)..(596): Selenocysteine
  MOD_RES (601)..(601): Selenocysteine
  MOD_RES (610)..(610): Selenocysteine
  MOD_RES (614)..(614): Selenocysteine
  MOD_RES (636)..(636): Selenocysteine
  MOD_RES (638)..(638): Selenocysteine
  MOD_RES (647)..(647): Selenocysteine
  MOD_RES (664)..(664): Selenocysteine
  MOD_RES (669)..(669): Selenocysteine
MSSGKSARYNRFSGGPSNLPXPDVXXGXRMEXXFGPAFSAVXXIXKADGXSXYKQHCRXPSSSSXLAYSPRDEEDSMPPISXPRRSDSAISVRSLHSESSMSLRSXFSLPEEEEEPEPLVFAEQPSVKLCCQLCCSVFKDPVIXXCGHXFCRRCALKSEKCPVDNVKLXVVVNNIAVAEQIGELFIHCRHGCRVAGSGKPPIFEVDPRGCPFXIKLSARKDHEGSCDYRPVRCPNNPSCPPLLRMNLEAHLKECEHIKCPHSKYGCXFIGNQDXYEXHLEXCRFEGLKEFLQQXDDRFHEMHVALAQKDQEIAFLRSMLGKLSEKIDQLEKSLELKFDVLDENQSKLSEDLMEFRRDASMLNDELSHINARLNMGILGSYDPQQIFKCKGXFVGHQGPVWCLCVYSMGDLLFSGSSDKXIKVWDXCXXYKCQKXLEGHDGIVLALCIQGCKLYSGSADCXIIVWDIQNLQKVNXIRAHDNPVCXLVSSHNVLFSGSLKAIKVWDIVGXELKLKKELXGLNHWVRALVAAQSYLYSGSYQXIKIWDIRXLDCIHVLQXSGGSVYSIAVXNHHIVCGXYENLIHVWDIESKEQVRXLXGHVGXVYALAVISXPDQXKVFSASYDRSLRVWSMDNMICXQXLLRHQGSVXALAVSRGRLFSGAVDSXVKVWXC

SEQ ID NO: 28423 - protein, 86 aa, Homo sapiens
  MOD_RES (21)..(21): Selenocysteine
  MOD_RES (25)..(26): Selenocysteine
  MOD_RES (28)..(28): Selenocysteine
  MOD_RES (32)..(33): Selenocysteine
  MOD_RES (42)..(43): Selenocysteine
  MOD_RES (45)..(45): Selenocysteine
  MOD_RES (50)..(50): Selenocysteine
  MOD_RES (52)..(52): Selenocysteine
  MOD_RES (59)..(59): Selenocysteine
  MOD_RES (65)..(65): Selenocysteine
MSSGKSARYNRFSGGPSNLPXPDVXXGXRMEXXFGPAFSAVXXIXKADGXSXYKQHCRXPSSSSXLAYSPRDEEDSMVGPYPQEPV

SEQ ID NO: 28424 - protein, 54 aa, Homo sapiens
  MOD_RES (21)..(21): Selenocysteine
  MOD_RES (25)..(26): Selenocysteine
  MOD_RES (43)..(43): Selenocysteine
MSSGKSARYNRFSGGPSNLPXPDVXXGVSSVLPLDQNGNDLRXRLFSRHHHHKS

SEQ ID NO: 28425 - protein, 266 aa, Homo sapiens
  MOD_RES (8)..(8): Selenocysteine
  MOD_RES (28)..(28): Selenocysteine
  MOD_RES (40)..(40): Selenocysteine
  MOD_RES (45)..(45): Selenocysteine
  MOD_RES (90)..(90): Selenocysteine
  MOD_RES (94)..(94): Selenocysteine
  MOD_RES (101)..(101): Selenocysteine
  MOD_RES (118)..(118): Selenocysteine
  MOD_RES (133)..(133): Selenocysteine
  MOD_RES (149)..(149): Selenocysteine
  MOD_RES (222)..(222): Selenocysteine
  MOD_RES (256)..(256): Selenocysteine
  MOD_RES (261)..(261): Selenocysteine
MPIRALCXICSDFFDHSRDVAAIHCGHXFHLQCLIQWFEXAPSRXCPQCRIQEEENVLDAEFLKNELDNVRAQLSQKDKEKRDSQVIIDXLRDXLEERNAXVVSLQQALGKAEMLCSXLKKQMKYLEQQQDEXKQAQEEARRLRSKMKXMEQIELLLQSQRPEVEEMIRDMGVGQSAVEQLAVYCVSLKKEYENLKEARKASGEVADKLRKDLFSSRSKLQXVYSELDQAKLELKSAQKDLQSADKEIMSLKKKLXMLQEXLNLPP

SEQ ID NO: 28426 - protein, 284 aa, Homo sapiens
  MOD_RES (8)..(8): Selenocysteine
  MOD_RES (28)..(28): Selenocysteine
  MOD_RES (40)..(40): Selenocysteine
  MOD_RES (45)..(45): Selenocysteine
  MOD_RES (57)..(57): Selenocysteine
  MOD_RES (83)..(83): Selenocysteine
  MOD_RES (117)..(117): Selenocysteine
  MOD_RES (122)..(122): Selenocysteine
  MOD_RES (132)..(132): Selenocysteine
  MOD_RES (164)..(164): Selenocysteine
  MOD_RES (169)..(169): Selenocysteine
  MOD_RES (260)..(260): Selenocysteine
  MOD_RES (269)..(269): Selenocysteine
MPIRALCXICSDFFDHSRDVAAIHCGHXFHLQCLIQWFEXAPSRXCPQCRIQVGKRXIINKLFFDLAQEEENVLDAEFLKLQXVYSELDQAKLELKSAQKDLQSADKEIMSLKKKLXMLQEXLNLPPVASEXVDRLVLESPAPVEVNLKLRRPSFRDDIDLNAXFDVDXPPARPSSSQHGYYEKLCLEKSHSPIQDVPKKICKGPRKESQLSLGGQSCAGEPDEELVGAFPIFVRNAILGQKQPKRPRSESSCSKDVVRXGFDGLGGRXKFIQPVSFSCDVELS

SEQ ID NO: 28427 - protein, 469 aa, Homo sapiens
  MOD_RES (8)..(8): Selenocysteine
  MOD_RES (28)..(28): Selenocysteine
  MOD_RES (40)..(40): Selenocysteine
  MOD_RES (45)..(45): Selenocysteine
  MOD_RES (57)..(57): Selenocysteine
  MOD_RES (106)..(106): Selenocysteine
  MOD_RES (110)..(110): Selenocysteine
  MOD_RES (117)..(117): Selenocysteine
  MOD_RES (134)..(134): Selenocysteine
  MOD_RES (149)..(149): Selenocysteine
  MOD_RES (165)..(165): Selenocysteine
  MOD_RES (238)..(238): Selenocysteine
  MOD_RES (272)..(272): Selenocysteine
  MOD_RES (277)..(277): Selenocysteine
  MOD_RES (287)..(287): Selenocysteine
  MOD_RES (319)..(319): Selenocysteine
  MOD_RES (324)..(324): Selenocysteine
  MOD_RES (415)..(415): Selenocysteine
  MOD_RES (424)..(424): Selenocysteine
  MOD_RES (430)..(430): Selenocysteine
  MOD_RES (432)..(432): Selenocysteine
  MOD_RES (444)..(444): Selenocysteine
  MOD_RES (454)..(454): Selenocysteine
  MOD_RES (465)..(465): Selenocysteine
MPIRALCXICSDFFDHSRDVAAIHCGHXFHLQCLIQWFEXAPSRXCPQCRIQVGKRXIINKLFFDLAQEEENVLDAEFLKNELDNVRAQLSQKDKEKRDSQVIIDXLRDXLEERNAXVVSLQQALGKAEMLCSXLKKQMKYLEQQQDEXKQAQEEARRLRSKMKXMEQIELLLQSQRPEVEEMIRDMGVGQSAVEQLAVYCVSLKKEYENLKEARKASGEVADKLRKDLFSSRSKLQXVYSELDQAKLELKSAQKDLQSADKEIMSLKKKLXMLQEXLNLPPVASEXVDRLVLESPAPVEVNLKLRRPSFRDDIDLNAXFDVDXPPARPSSSQHGYYEKLCLEKSHSPIQDVPKKICKGPRKESQLSLGGQSCAGEPDEELVGAFPIFVRNAILGQKQPKRPRSESSCSKDVVRXGFDGLGGRXKFIQPXDXVMIRPLPVKPKXKVKQRVRVKXVPSLFQAKLDXFLWS

SEQ ID NO: 28428 - protein, 99 aa, Homo sapiens
  MOD_RES (8)..(8): Selenocysteine
  MOD_RES (28)..(28): Selenocysteine
  MOD_RES (40)..(40): Selenocysteine
  MOD_RES (45)..(45): Selenocysteine
  MOD_RES (57)..(57): Selenocysteine
MPIRALCXICSDFFDHSRDVAAIHCGHXFHLQCLIQWFEXAPSRXCPQCRIQVGKRXIINKLFFDLAQEEENVLDAEFLKNELDNVRAQLSQKVADSLL

SEQ ID NO: 28429 - protein, 155 aa, Homo sapiens
  MOD_RES (8)..(8): Selenocysteine
  MOD_RES (28)..(28): Selenocysteine
  MOD_RES (40)..(40): Selenocysteine
  MOD_RES (45)..(45): Selenocysteine
  MOD_RES (59)..(59): Selenocysteine
  MOD_RES (108)..(108): Selenocysteine
  MOD_RES (112)..(112): Selenocysteine
  MOD_RES (119)..(119): Selenocysteine
  MOD_RES (136)..(136): Selenocysteine
  MOD_RES (151)..(151): Selenocysteine
MPIRALCXICSDFFDHSRDVAAIHCGHXFHLQCLIQWFEXAPSRXCPQCRIQVRVGKRXIINKLFFDLAQEEENVLDAEFLKNELDNVRAQLSQKDKEKRDSQVIIDXLRDXLEERNAXVVSLQQALGKAEMLCSXLKKQMKYLEQQQDEXKQAQ

SEQ ID NO: 28430 - protein, 374 aa, Homo sapiens
  MOD_RES (8)..(8): Selenocysteine
  MOD_RES (43)..(43): Selenocysteine
  MOD_RES (52)..(52): Selenocysteine
  MOD_RES (58)..(58): Selenocysteine
  MOD_RES (62)..(62): Selenocysteine
  MOD_RES (67)..(67): Selenocysteine
  MOD_RES (82)..(82): Selenocysteine
  MOD_RES (114)..(114): Selenocysteine
  MOD_RES (137)..(137): Selenocysteine
  MOD_RES (150)..(150): Selenocysteine
  MOD_RES (162)..(162): Selenocysteine
  MOD_RES (188)..(188): Selenocysteine
  MOD_RES (264)..(264): Selenocysteine
  MOD_RES (271)..(271): Selenocysteine
  MOD_RES (288)..(288): Selenocysteine
  MOD_RES (307)..(307): Selenocysteine
  MOD_RES (339)..(339): Selenocysteine
  MOD_RES (341)..(341): Selenocysteine
  MOD_RES (350)..(350): Selenocysteine
  MOD_RES (357)..(357): Selenocysteine
  MOD_RES (359)..(359): Selenocysteine
MAIRKKSXKSPPVLSHEFVLQNHADIVSCVAMVFLLGLMFEIXAKASIIFVXLQYNVXLPAXEEQAXESVSLYYYGIKDLAXVFFYMLVAIIIHAVIQEYMLDKINRRMHFSKXKHSKFNESGQLSAFYLFACVWGXFILISENYISDPXILWRAYPHNLMXFQMKFFYISQLAYWLHAFPELYFQKXKKEDIPRQLVYIGLYLFHIAGAYLLNLNHLGLVLLVLHYFVEFLFHISRLFYFSNEKYQKGFSLWAVLFVLGRLLXLILSVLXVGFGLARAENQKLDFSXGNFNVLAVRIAVLASICVXQAFMMWKFINFQLRRWREHSAFQAPAVKKKPXVXKGRSSKKGXENGVNGXLXSNVADSPRNKKEKSS

SEQ ID NO: 28431 - protein, 288 aa, Homo sapiens
  MOD_RES (28)..(28): Selenocysteine
  MOD_RES (51)..(51): Selenocysteine
  MOD_RES (64)..(64): Selenocysteine
  MOD_RES (76)..(76): Selenocysteine
  MOD_RES (102)..(102): Selenocysteine
  MOD_RES (178)..(178): Selenocysteine
  MOD_RES (185)..(185): Selenocysteine
  MOD_RES (202)..(202): Selenocysteine
  MOD_RES (221)..(221): Selenocysteine
  MOD_RES (253)..(253): Selenocysteine
  MOD_RES (255)..(255): Selenocysteine
  MOD_RES (264)..(264): Selenocysteine
  MOD_RES (271)..(271): Selenocysteine
  MOD_RES (273)..(273): Selenocysteine
MLVAIIIHAVIQEYMLDKINRRMHFSKXKHSKFNESGQLSAFYLFACVWGXFILISENYISDPXILWRAYPHNLMXFQMKFFYISQLAYWLHAFPELYFQKXKKEDIPRQLVYIGLYLFHIAGAYLLNLNHLGLVLLVLHYFVEFLFHISRLFYFSNEKYQKGFSLWAVLFVLGRLLXLILSVLXVGFGLARAENQKLDFSXGNFNVLAVRIAVLASICVXQAFMMWKFINFQLRRWREHSAFQAPAVKKKPXVXKGRSSKKGXENGVNGXLXSNVADSPRNKKEKSS

SEQ ID NO: 28432 - protein, 112 aa, Homo sapiens
  MOD_RES (12)..(12): Selenocysteine
  MOD_RES (21)..(21): Selenocysteine
  MOD_RES (27)..(27): Selenocysteine
  MOD_RES (31)..(31): Selenocysteine
  MOD_RES (36)..(36): Selenocysteine
  MOD_RES (51)..(51): Selenocysteine
  MOD_RES (83)..(83): Selenocysteine
  MOD_RES (106)..(106): Selenocysteine
MVFLLGLMFEIXAKASIIFVXLQYNVXLPAXEEQAXESVSLYYYGIKDLAXVFFYMLVAIIIHAVIQEYMLDKINRRMHFSKXKHSKFNESGQLSAFYLFACVWGXFILISV

SEQ ID NO: 28433 - protein, 86 aa, Homo sapiens
  MOD_RES (39)..(40): Selenocysteine
  MOD_RES (61)..(61): Selenocysteine
  MOD_RES (63)..(63): Selenocysteine
  MOD_RES (78)..(78): Selenocysteine
MARELRALLLWGRRLRPLLRAPALAAVPGGKPILCPRRXXAQLGPRRNPAWSLQAGRLFSXQXAEDKEEPLHSIISSXESVQGRVL

SEQ ID NO: 28434 - protein, 704 aa, Homo sapiens
  MOD_RES (39)..(40): Selenocysteine
  MOD_RES (61)..(61): Selenocysteine
  MOD_RES (63)..(63): Selenocysteine
  MOD_RES (78)..(78): Selenocysteine
  MOD_RES (85)..(85): Selenocysteine
  MOD_RES (94)..(94): Selenocysteine
  MOD_RES (147)..(147): Selenocysteine
  MOD_RES (153)..(153): Selenocysteine
  MOD_RES (155)..(155): Selenocysteine
  MOD_RES (159)..(159): Selenocysteine
  MOD_RES (164)..(164): Selenocysteine
  MOD_RES (174)..(174): Selenocysteine
  MOD_RES (249)..(249): Selenocysteine
  MOD_RES (251)..(251): Selenocysteine
  MOD_RES (275)..(275): Selenocysteine
  MOD_RES (294)..(294): Selenocysteine
  MOD_RES (328)..(328): Selenocysteine
  MOD_RES (333)..(333): Selenocysteine
  MOD_RES (374)..(374): Selenocysteine
  MOD_RES (377)..(377): Selenocysteine
  MOD_RES (454)..(454): Selenocysteine
  MOD_RES (456)..(456): Selenocysteine
  MOD_RES (481)..(481): Selenocysteine
  MOD_RES (494)..(494): Selenocysteine
  MOD_RES (522)..(522): Selenocysteine
  MOD_RES (535)..(535): Selenocysteine
  MOD_RES (552)..(552): Selenocysteine
  MOD_RES (579)..(579): Selenocysteine
  MOD_RES (595)..(595): Selenocysteine
  MOD_RES (600)..(600): Selenocysteine
  MOD_RES (605)..(605): Selenocysteine
  MOD_RES (611)..(611): Selenocysteine
  MOD_RES (630)..(630): Selenocysteine
  MOD_RES (641)..(641): Selenocysteine
MARELRALLLWGRRLRPLLRAPALAAVPGGKPILCPRRXXAQLGPRRNPAWSLQAGRLFSXQXAEDKEEPLHSIISSXESVQGSXSKHEFQAEXKKLLDIVARSLYSEKEVFIRELISNASDALEKLRHKLVSDGQALPEMEIHLQXNAEKGXIXIQDXGIGMXQEELVSNLGXIARSGSKAFLDALQNQAEASSKIIGQFGVGFYSAFMVADRVEVYSRSAAPGSLGYQWLSDGSGVFEIAEASGVRXGXKIIIHLKSDCKEFSSEARVRDVVXKYSNFVSFPLYLNGRRMNXLQAIWMMDPKDVREWQHEEFYRYVAQAHDKPRYXLHYKXDAPLNIRSIFYVPDMKPSMFDVSRELGSSVALYSRKVLIQXKAXDILPKWLRFIRGVVDSEDIPLNLSRELLQESALIRKLRDVLQQRLIKFFIDQSKKDAEKYAKFFEDYGLFMREGIVXAXEQEVKEDIAKLLRYESSALPSGQLXSLSEYASRMRAGXRNIYYLCAPNRHLAEHSPYYEAMKKKDXEVLFCFEQFDELXLLHLREFDKKKLISVEXDIVVDHYKEEKFEDRSPAAECLSEKEXEELMAWMRNVLGSRVXNVKVXLRLDXHPAMVXVLEMGAARHFLRMQQLAKXQEERAQLLQPXLEINPRHALIKKLNQLRASEPGLAQLLVDQIYENAMIAAGLVDDPRAMVGRLNELLVKALERH

SEQ ID NO: 28435 - protein, 37 aa, Homo sapiens
MARELRALLLWGRRLRPLLRAPALAAVPGGSRRAIEM

SEQ ID NO: 28436 - protein, 651 aa, Homo sapiens
  MOD_RES (32)..(32): Selenocysteine
  MOD_RES (41)..(41): Selenocysteine
  MOD_RES (94)..(94): Selenocysteine
  MOD_RES (100)..(100): Selenocysteine
  MOD_RES (102)..(102): Selenocysteine
  MOD_RES (106)..(106): Selenocysteine
  MOD_RES (111)..(111): Selenocysteine
  MOD_RES (121)..(121): Selenocysteine
  MOD_RES (196)..(196): Selenocysteine
  MOD_RES (198)..(198): Selenocysteine
  MOD_RES (222)..(222): Selenocysteine
  MOD_RES (241)..(241): Selenocysteine
  MOD_RES (275)..(275): Selenocysteine
  MOD_RES (280)..(280): Selenocysteine
  MOD_RES (321)..(321): Selenocysteine
  MOD_RES (324)..(324): Selenocysteine
  MOD_RES (401)..(401): Selenocysteine
  MOD_RES (403)..(403): Selenocysteine
  MOD_RES (428)..(428): Selenocysteine
  MOD_RES (441)..(441): Selenocysteine
  MOD_RES (469)..(469): Selenocysteine
  MOD_RES (482)..(482): Selenocysteine
  MOD_RES (499)..(499): Selenocysteine
  MOD_RES (526)..(526): Selenocysteine
  MOD_RES (542)..(542): Selenocysteine
  MOD_RES (547)..(547): Selenocysteine
  MOD_RES (552)..(552): Selenocysteine
  MOD_RES (558)..(558): Selenocysteine
  MOD_RES (577)..(577): Selenocysteine
  MOD_RES (588)..(588): Selenocysteine
MARELRALLLWGRRLRPLLRAPALAAVPGGSXSKHEFQAEXKKLLDIVARSLYSEKEVFIRELISNASDALEKLRHKLVSDGQALPEMEIHLQXNAEKGXIXIQDXGIGMXQEELVSNLGXIARSGSKAFLDALQNQAEASSKIIGQFGVGFYSAFMVADRVEVYSRSAAPGSLGYQWLSDGSGVFEIAEASGVRXGXKIIIHLKSDCKEFSSEARVRDVVXKYSNFVSFPLYLNGRRMNXLQAIWMMDPKDVREWQHEEFYRYVAQAHDKPRYXLHYKXDAPLNIRSIFYVPDMKPSMFDVSRELGSSVALYSRKVLIQXKAXDILPKWLRFIRGVVDSEDIPLNLSRELLQESALIRKLRDVLQQRLIKFFIDQSKKDAEKYAKFFEDYGLFMREGIVXAXEQEVKEDIAKLLRYESSALPSGQLXSLSEYASRMRAGXRNIYYLCAPNRHLAEHSPYYEAMKKKDXEVLFCFEQFDELXLLHLREFDKKKLISVEXDIVVDHYKEEKFEDRSPAAECLSEKEXEELMAWMRNVLGSRVXNVKVXLRLDXHPAMVXVLEMGAARHFLRMQQLAKXQEERAQLLQPXLEINPRHALIKKLNQLRASEPGLAQLLVDQIYENAMIAAGLVDDPRAMVGRLNELLVKALERH

SEQ ID NO: 28437 - protein, 36 aa, Homo sapiens
  MOD_RES (7)..(7): Selenocysteine
  MOD_RES (13)..(13): Selenocysteine
  MOD_RES (15)..(15): Selenocysteine
  MOD_RES (19)..(19): Selenocysteine
  MOD_RES (24)..(24): Selenocysteine
  MOD_RES (34)..(34): Selenocysteine
MEIHLQXNAEKGXIXIQDXGIGMXQEELVSNLGXIA

SEQ ID NO: 28438 - protein, 495 aa, Homo sapiens
  MOD_RES (40)..(40): Selenocysteine
  MOD_RES (42)..(42): Selenocysteine
  MOD_RES (66)..(66): Selenocysteine
  MOD_RES (85)..(85): Selenocysteine
  MOD_RES (119)..(119): Selenocysteine
  MOD_RES (124)..(124): Selenocysteine
  MOD_RES (165)..(165): Selenocysteine
  MOD_RES (168)..(168): Selenocysteine
  MOD_RES (245)..(245): Selenocysteine
  MOD_RES (247)..(247): Selenocysteine
  MOD_RES (272)..(272): Selenocysteine
  MOD_RES (285)..(285): Selenocysteine
  MOD_RES (313)..(313): Selenocysteine
  MOD_RES (326)..(326): Selenocysteine
  MOD_RES (343)..(343): Selenocysteine
  MOD_RES (370)..(370): Selenocysteine
  MOD_RES (386)..(386): Selenocysteine
  MOD_RES (391)..(391): Selenocysteine
  MOD_RES (396)..(396): Selenocysteine
  MOD_RES (402)..(402): Selenocysteine
  MOD_RES (421)..(421): Selenocysteine
  MOD_RES (432)..(432): Selenocysteine
MVADRVEVYSRSAAPGSLGYQWLSDGSGVFEIAEASGVRXGXKIIIHLKSDCKEFSSEARVRDVVXKYSNFVSFPLYLNGRRMNXLQAIWMMDPKDVREWQHEEFYRYVAQAHDKPRYXLHYKXDAPLNIRSIFYVPDMKPSMFDVSRELGSSVALYSRKVLIQXKAXDILPKWLRFIRGVVDSEDIPLNLSRELLQESALIRKLRDVLQQRLIKFFIDQSKKDAEKYAKFFEDYGLFMREGIVXAXEQEVKEDIAKLLRYESSALPSGQLXSLSEYASRMRAGXRNIYYLCAPNRHLAEHSPYYEAMKKKDXEVLFCFEQFDELXLLHLREFDKKKLISVEXDIVVDHYKEEKFEDRSPAAECLSEKEXEELMAWMRNVLGSRVXNVKVXLRLDXHPAMVXVLEMGAARHFLRMQQLAKXQEERAQLLQPXLEINPRHALIKKLNQLRASEPGLAQLLVDQIYENAMIAAGLVDDPRAMVGRLNELLVKALERH

SEQ ID NO: 28439 - protein, 215 aa, Homo sapiens
  MOD_RES (40)..(40): Selenocysteine
  MOD_RES (42)..(42): Selenocysteine
  MOD_RES (66)..(66): Selenocysteine
  MOD_RES (85)..(85): Selenocysteine
  MOD_RES (119)..(119): Selenocysteine
  MOD_RES (124)..(124): Selenocysteine
  MOD_RES (165)..(165): Selenocysteine
  MOD_RES (168)..(168): Selenocysteine
SLYSEKEVYSRSAAPGSLGYQWLSDGSGVFEIAEASGVRXGXKIIIHLKSDCKEFSSEARVRDVVXKYSNFVSFPLYLNGRRMNXLQAIWMMDPKDVREWQHEEFYRYVAQAHDKPRYXLHYKXDAPLNIRSIFYVPDMKPSMFDVSRELGSSVALYSRKVLIQXKAXDILPKWLRFIRGVVDSEDIPLNLSRELLQESALIRKLRDVLQQRLIK

SEQ ID NO: 28440 - protein, 108 aa, Homo sapiens
  MOD_RES (1)..(1): Any amino acid
  MOD_RES (39)..(39): Selenocysteine
  MOD_RES (41)..(41): Selenocysteine
  MOD_RES (65)..(65): Selenocysteine
  MOD_RES (84)..(84): Selenocysteine
XADRVEVYSRSAAPGSLGYQWLSDGSGVFEIAEASGVRXGXKIIIHLKSDCKEFSSEARVRDVVXKYSNFVSFPLYLNGRRMNXLQEPVQGQALHWLRPARWWRRRAW

SEQ ID NO: 28441 - protein, 59 aa, Homo sapiens
  MOD_RES (1)..(1): Any amino acid
XRHALIKKLNQLRASEPGLAQLLVDQIYENAMIAAGLVDDPRAMVGRLNELLVKALERH

SEQ ID NO: 28442 - protein, 1148 aa, Homo sapiens
  MOD_RES (15)..(15): Selenocysteine
  MOD_RES (73)..(73): Selenocysteine
  MOD_RES (82)..(82): Selenocysteine
  MOD_RES (84)..(84): Selenocysteine
  MOD_RES (95)..(95): Selenocysteine
  MOD_RES (109)..(109): Selenocysteine
  MOD_RES (130)..(130): Selenocysteine
  MOD_RES (143)..(143): Selenocysteine
  MOD_RES (168)..(168): Selenocysteine
  MOD_RES (192)..(192): Selenocysteine
  MOD_RES (262)..(262): Selenocysteine
  MOD_RES (275)..(275): Selenocysteine
  MOD_RES (299)..(300): Selenocysteine
  MOD_RES (307)..(307): Selenocysteine
  MOD_RES (309)..(309): Selenocysteine
  MOD_RES (435)..(435): Selenocysteine
  MOD_RES (452)..(452): Selenocysteine
  MOD_RES (490)..(490): Selenocysteine
  MOD_RES (511)..(511): Selenocysteine
  MOD_RES (517)..(517): Selenocysteine
  MOD_RES (528)..(528): Selenocysteine
  MOD_RES (535)..(535): Selenocysteine
  MOD_RES (567)..(567): Selenocysteine
  MOD_RES (622)..(622): Selenocysteine
  MOD_RES (646)..(646): Selenocysteine
  MOD_RES (653)..(654): Selenocysteine
  MOD_RES (656)..(656): Selenocysteine
  MOD_RES (658)..(658): Selenocysteine
  MOD_RES (664)..(665): Selenocysteine
  MOD_RES (683)..(683): Selenocysteine
  MOD_RES (687)..(687): Selenocysteine
  MOD_RES (701)..(701): Selenocysteine
  MOD_RES (720)..(720): Selenocysteine
  MOD_RES (752)..(752): Selenocysteine
  MOD_RES (757)..(758): Selenocysteine
  MOD_RES (774)..(774): Selenocysteine
  MOD_RES (787)..(787): Selenocysteine
  MOD_RES (789)..(789): Selenocysteine
  MOD_RES (853)..(853): Selenocysteine
  MOD_RES (869)..(869): Selenocysteine
  MOD_RES (891)..(891): Selenocysteine
  MOD_RES (895)..(895): Selenocysteine
  MOD_RES (899)..(899): Selenocysteine
  MOD_RES (901)..(901): Selenocysteine
  MOD_RES (914)..(914): Selenocysteine
  MOD_RES (919)..(919): Selenocysteine
  MOD_RES (922)..(922): Selenocysteine
  MOD_RES (1048)..(1048): Selenocysteine
  MOD_RES (1061)..(1061): Selenocysteine
  MOD_RES (1080)..(1080): Selenocysteine
  MOD_RES (1088)..(1088): Selenocysteine
  MOD_RES (1111)..(1111): Selenocysteine
  MOD_RES (1125)..(1125): Selenocysteine
MSVPDYMQCAEDHQXLLVVVQPVGIVSEENFFRIYKRICSVSQISVRDSQRVLYIRYRHHYPPENNEWGDFQXHRKVVGLIXIXDCFSAKDWPQXFEKFHVQKEIYGSXLYDSRLFVFGLQGEIVEQPRXDVAFYPNYEDCQXVEKRIEDFIESLFIVLESKRLDRAXDKSGDKIPLLCVPFEKKDFVGLDXDSRHYKKRCQGRMRKHVGDLCLQAGMLQDSLVHYHMSVELLRSVNDFLWLGAALEGLCSASVIYHYPGGXGGKSGARRFQGSXLPAEAANRHRPGAQEVLIDPGALXXNGINPDXSXEIGRAKNCLSPEDIIDKYKEAISYYSKYKNAGVIELEACIKAVRVLAIQKRSMEASEFLQNAVYINLRQLSEEEKIQRYSILSELYELIGFHRKSAFFKRVAAMQCVAPSIAEPGWRACYKLLLEXLPGYSLSLDPKDFSRGXHRGWAAVQMRLLHELVYASRRMGNPALSVRHLSFLLQXMLDFLSDQEKKDVAQSLENYXSKCPGXMEPIALPGGLXLPPVPFXKLPIVRHVKLLNLPASLRPHKMKSLLGQNVSXKSPFIYSPIIAHNRGEERNKKIDFQWVQGDVCEVQLMVYNPMPFELRVENMGLLXSGVEFESLPAALSLPAESGLYPVXLVGVPQXXGXIXVNGYHXXVFGVFSDCLLDNLPGIKXSGSXVEVIPALPRLQISXSLPRSAHSLQPSSGDEISXNVSVQLYNGESQQLIIKLENIGMEPLEKLEVXSKVLXXKEKLYGDFLSWKLEEXLAQFPLQPGKVAXFXINIKVKLDFSCQENLLQDLSDDGISVSGFPLSSPFRQVVRPRVEGKPVNPPESNKAGDYSHVKXLEAVLNFKYSGGPGHXEGYYRNLSLGLHVEVEPSVFFXRVSXLPAXSXRQCHLLLDVFNSXEHELXVSXRSSEALILHAGECQRMAIQVDKFNFESFPESPGEKGQFANPKQLEEERREARGLEIHSKLGICWRIPSLKRSGEASVEGLLNQLVLEHLQLAPLQWDVLVDGQPCDREAVAACQVGDPVRLEVRLXNRSPRSVGPFALXVVPFQDHQNGVHNYDLHDXVSFVGSSXFYLDAVQPSGQSACLGALLFLYXGDFFLHIRFHEDSXSKELPPSWFCLPSVHVCALEAQA

SEQ ID NO: 28443 - protein, 1246 aa, Homo sapiens
  MOD_RES (23)..(23): Selenocysteine
  MOD_RES (42)..(42): Selenocysteine
  MOD_RES (44)..(44): Selenocysteine
  MOD_RES (82)..(82): Selenocysteine
  MOD_RES (113)..(113): Selenocysteine
  MOD_RES (171)..(171): Selenocysteine
  MOD_RES (180)..(180): Selenocysteine
  MOD_RES (182)..(182): Selenocysteine
  MOD_RES (193)..(193): Selenocysteine
  MOD_RES (207)..(207): Selenocysteine
  MOD_RES (228)..(228): Selenocysteine
  MOD_RES (241)..(241): Selenocysteine
  MOD_RES (266)..(266): Selenocysteine
  MOD_RES (290)..(290): Selenocysteine
  MOD_RES (360)..(360): Selenocysteine
  MOD_RES (373)..(373): Selenocysteine
  MOD_RES (397)..(398): Selenocysteine
  MOD_RES (405)..(405): Selenocysteine
  MOD_RES (407)..(407): Selenocysteine
  MOD_RES (533)..(533): Selenocysteine
  MOD_RES (550)..(550): Selenocysteine
  MOD_RES (588)..(588): Selenocysteine
  MOD_RES (609)..(609): Selenocysteine
  MOD_RES (615)..(615): Selenocysteine
  MOD_RES (626)..(626): Selenocysteine
  MOD_RES (633)..(633): Selenocysteine
  MOD_RES (665)..(665): Selenocysteine
  MOD_RES (720)..(720): Selenocysteine
  MOD_RES (744)..(744): Selenocysteine
  MOD_RES (751)..(752): Selenocysteine
  MOD_RES (754)..(754): Selenocysteine
  MOD_RES (756)..(756): Selenocysteine
  MOD_RES (762)..(763): Selenocysteine
  MOD_RES (781)..(781): Selenocysteine
  MOD_RES (785)..(785): Selenocysteine
  MOD_RES (799)..(799): Selenocysteine
  MOD_RES (818)..(818): Selenocysteine
  MOD_RES (850)..(850): Selenocysteine
  MOD_RES (855)..(856): Selenocysteine
  MOD_RES (872)..(872): Selenocysteine
  MOD_RES (885)..(885): Selenocysteine
  MOD_RES (887)..(887): Selenocysteine
  MOD_RES (951)..(951): Selenocysteine
  MOD_RES (967)..(967): Selenocysteine
  MOD_RES (989)..(989): Selenocysteine
  MOD_RES (993)..(993): Selenocysteine
  MOD_RES (997)..(997): Selenocysteine
  MOD_RES (999)..(999): Selenocysteine
  MOD_RES (1012)..(1012): Selenocysteine
  MOD_RES (1017)..(1017): Selenocysteine
  MOD_RES (1020)..(1020): Selenocysteine
  MOD_RES (1146)..(1146): Selenocysteine
  MOD_RES (1159)..(1159): Selenocysteine
  MOD_RES (1178)..(1178): Selenocysteine
  MOD_RES (1186)..(1186): Selenocysteine
  MOD_RES (1209)..(1209): Selenocysteine
  MOD_RES (1223)..(1223): Selenocysteine
MVPAGDQDRAPHRGKPAQAGARXSRASRALRSWRRSQAARAXVXHPRGGHDRGSHGGYREGHRGCRRDPQWASAGPPPLSFXEEVKFELRALKDWDFKMSVPDYMQCAEDHQXLLVVVQPVGIVSEENFFRIYKRICSVSQISVRDSQRVLYIRYRHHYPPENNEWGDFQXHRKVVGLIXIXDCFSAKDWPQXFEKFHVQKEIYGSXLYDSRLFVFGLQGEIVEQPRXDVAFYPNYEDCQXVEKRIEDFIESLFIVLESKRLDRAXDKSGDKIPLLCVPFEKKDFVGLDXDSRHYKKRCQGRMRKHVGDLCLQAGMLQDSLVHYHMSVELLRSVNDFLWLGAALEGLCSASVIYHYPGGXGGKSGARRFQGSXLPAEAANRHRPGAQEVLIDPGALXXNGINPDXSXEIGRAKNCLSPEDIIDKYKEAISYYSKYKNAGVIELEACIKAVRVLAIQKRSMEASEFLQNAVYINLRQLSEEEKIQRYSILSELYELIGFHRKSAFFKRVAAMQCVAPSIAEPGWRACYKLLLEXLPGYSLSLDPKDFSRGXHRGWAAVQMRLLHELVYASRRMGNPALSVRHLSFLLQXMLDFLSDQEKKDVAQSLENYXSKCPGXMEPIALPGGLXLPPVPFXKLPIVRHVKLLNLPASLRPHKMKSLLGQNVSXKSPFIYSPIIAHNRGEERNKKIDFQWVQGDVCEVQLMVYNPMPFELRVENMGLLXSGVEFESLPAALSLPAESGLYPVXLVGVPQXXGXIXVNGYHXXVFGVFSDCLLDNLPGIKXSGSXVEVIPALPRLQISXSLPRSAHSLQPSSGDEISXNVSVQLYNGESQQLIIKLENIGMEPLEKLEVXSKVLXXKEKLYGDFLSWKLEEXLAQFPLQPGKVAXFXINIKVKLDFSCQENLLQDLSDDGISVSGFPLSSPFRQVVRPRVEGKPVNPPESNKAGDYSHVKXLEAVLNFKYSGGPGHXEGYYRNLSLGLHVEVEPSVFFXRVSXLPAXSXRQCHLLLDVFNSXEHELXVSXRSSEALILHAGECQRMAIQVDKFNFESFPESPGEKGQFANPKQLEEERREARGLEIHSKLGICWRIPSLKRSGEASVEGLLNQLVLEHLQLAPLQWDVLVDGQPCDREAVAACQVGDPVRLEVRLXNRSPRSVGPFALXVVPFQDHQNGVHNYDLHDXVSFVGSSXFYLDAVQPSGQSACLGALLFLYXGDFFLHIRFHEDSXSKELPPSWFCLPSVHVCALEAQA

SEQ ID NO: 28444 - protein, 992 aa, Homo sapiens
  MOD_RES (1)..(1): Any amino acid
  MOD_RES (21)..(21): Selenocysteine
  MOD_RES (45)..(45): Selenocysteine
  MOD_RES (115)..(115): Selenocysteine
  MOD_RES (128)..(128): Selenocysteine
  MOD_RES (143)..(144): Selenocysteine
  MOD_RES (151)..(151): Selenocysteine
  MOD_RES (153)..(153): Selenocysteine
  MOD_RES (279)..(279): Selenocysteine
  MOD_RES (296)..(296): Selenocysteine
  MOD_RES (334)..(334): Selenocysteine
  MOD_RES (355)..(355): Selenocysteine
  MOD_RES (361)..(361): Selenocysteine
  MOD_RES (372)..(372): Selenocysteine
  MOD_RES (379)..(379): Selenocysteine
  MOD_RES (411)..(411): Selenocysteine
  MOD_RES (466)..(466): Selenocysteine
  MOD_RES (490)..(490): Selenocysteine
  MOD_RES (497)..(498): Selenocysteine
  MOD_RES (500)..(500): Selenocysteine
  MOD_RES (502)..(502): Selenocysteine
  MOD_RES (508)..(509): Selenocysteine
  MOD_RES (527)..(527): Selenocysteine
  MOD_RES (531)..(531): Selenocysteine
  MOD_RES (545)..(545): Selenocysteine
  MOD_RES (564)..(564): Selenocysteine
  MOD_RES (596)..(596): Selenocysteine
  MOD_RES (601)..(602): Selenocysteine
  MOD_RES (618)..(618): Selenocysteine
  MOD_RES (631)..(631): Selenocysteine
  MOD_RES (633)..(633): Selenocysteine
  MOD_RES (697)..(697): Selenocysteine
  MOD_RES (713)..(713): Selenocysteine
  MOD_RES (735)..(735): Selenocysteine
  MOD_RES (739)..(739): Selenocysteine
  MOD_RES (743)..(743): Selenocysteine
  MOD_RES (745)..(745): Selenocysteine
  MOD_RES (758)..(758): Selenocysteine
  MOD_RES (763)..(763): Selenocysteine
  MOD_RES (766)..(766): Selenocysteine
  MOD_RES (892)..(892): Selenocysteine
  MOD_RES (905)..(905): Selenocysteine
  MOD_RES (924)..(924): Selenocysteine
  MOD_RES (932)..(932): Selenocysteine
  MOD_RES (955)..(955): Selenocysteine
  MOD_RES (969)..(969): Selenocysteine
XEDFIESLFIVLESKRLDRAXDKSGDKIPLLCVPFEKKDFVGLDXDSRHYKKRCQGRMRKHVGDLCLQAGMLQDSLVHYHMSVELLRSVNDFLWLGAALEGLCSASVIYHYPGGXGGKSGARRFQGSXLPAEAANRHRPGALXXNGINPDXSXEIGRAKNCLSPEDIIDKYKEAISYYSKYKNAGVIELEACIKAVRVLAIQKRSMEASEFLQNAVYINLRQLSEEEKIQRYSILSELYELIGFHRKSAFFKRVAAMQCVAPSIAEPGWRACYKLLLEXLPGYSLSLDPKDFSRGXHRGWAAVQMRLLHELVYASRRMGNPALSVRHLSFLLQXMLDFLSDQEKKDVAQSLENYXSKCPGXMEPIALPGGLXLPPVPFXKLPIVRHVKLLNLPASLRPHKMKSLLGQNVSXKSPFIYSPIIAHNRGEERNKKIDFQWVQGDVCEVQLMVYNPMPFELRVENMGLLXSGVEFESLPAALSLPAESGLYPVXLVGVPQXXGXIXVNGYHXXVFGVFSDCLLDNLPGIKXSGSXVEVIPALPRLQISXSLPRSAHSLQPSSGDEISXNVSVQLYNGESQQLIIKLENIGMEPLEKLEVXSKVLXXKEKLYGDFLSWKLEEXLAQFPLQPGKVAXFXINIKVKLDFSCQENLLQDLSDDGISVSGFPLSSPFRQVVRPRVEGKPVNPPESNKAGDYSHVKXLEAVLNFKYSGGPGHXEGYYRNLSLGLHVEVEPSVFFXRVSXLPAXSXRQCHLLLDVFNSXEHELXVSXRSSEALILHAGECQRMAIQVDKFNFESFPESPGEKGQFANPKQLEEERREARGLEIHSKLGICWRIPSLKRSGEASVEGLLNQLVLEHLQLAPLQWDVLVDGQPCDREAVAACQVGDPVRLEVRLXNRSPRSVGPFALXVVPFQDHQNGVHNYDLHDXVSFVGSSXFYLDAVQPSGQSACLGALLFLYXGDFFLHIRFHEDSXSKELPPSWFCLPSVHVCALEAQA

SEQ ID NO: 28445 - protein, 91 aa, Homo sapiens
  MOD_RES (1)..(1): Any amino acid
  MOD_RES (25)..(25): Selenocysteine
  MOD_RES (30)..(31): Selenocysteine
  MOD_RES (47)..(47): Selenocysteine
  MOD_RES (60)..(60): Selenocysteine
  MOD_RES (62)..(62): Selenocysteine
XGESQQLIIKLENIGMEPLEKLEVXSKVLXXKEKLYGDFLSWKLEEXLAQFPLQPGKVAXFXINIKVKLDFSCQENLLQDLSDGKRFPNFN

SEQ ID NO: 28446 - protein, 149 aa, Homo sapiens
  MOD_RES (13)..(13): Selenocysteine
  MOD_RES (23)..(23): Selenocysteine
  MOD_RES (60)..(60): Selenocysteine
  MOD_RES (66)..(66): Selenocysteine
  MOD_RES (69)..(69): Selenocysteine
  MOD_RES (92)..(92): Selenocysteine
  MOD_RES (113)..(114): Selenocysteine
MSDKMYSYSSDHXRVDEYYIEDXPIYGNLDDMISEPMDENCYEQMKARPEKSVNKMQEAXPSAQAXNEXQMCYASLDHSVKGKRRKPRKQNXHFSDKDGDEQLHAIDASVSKXXLVDSFSPESQAVEENIHDDPIRLFGLIRAKREPIN

SEQ ID NO: 28447 - protein, 186 aa, Homo sapiens
  MOD_RES (50)..(50): Selenocysteine
  MOD_RES (60)..(60): Selenocysteine
  MOD_RES (97)..(97): Selenocysteine
  MOD_RES (103)..(103): Selenocysteine
  MOD_RES (106)..(106): Selenocysteine
  MOD_RES (129)..(129): Selenocysteine
  MOD_RES (150)..(151): Selenocysteine
MSGISGCPFFLWGLLALLGLALVISLIFNISHYVEKQRQDKMYSYSSDHXRVDEYYIEDXPIYGNLDDMISEPMDENCYEQMKARPEKSVNKMQEAXPSAQAXNEXQMCYASLDHSVKGKRRKPRKQNXHFSDKDGDEQLHAIDASVSKXXLVDSFSPESQAVEENIHDDPIRLFGLIRAKREPIN

SEQ ID NO: 28448 - protein, 150 aa, Homo sapiens
  MOD_RES (4)..(4): Selenocysteine
  MOD_RES (22)..(22): Selenocysteine
  MOD_RES (25)..(25): Selenocysteine
  MOD_RES (36)..(36): Selenocysteine
  MOD_RES (44)..(44): Selenocysteine
  MOD_RES (66)..(66): Selenocysteine
  MOD_RES (70)..(70): Selenocysteine
  MOD_RES (134)..(134): Selenocysteine
  MOD_RES (141)..(141): Selenocysteine
MRKXRLWGLLWMLFVSELRAAXKLXEEKYELKEGQXLDVKCDYXLEKFASSQKAWQIIRDGEMPKXLACXERPSKNSHPVQVGRIILEDYHDHGLLRVRMVNLQVEDSGLYQCVIYQPPKEPHMLFDRIRLVVXKGFRCSXLSFSWLVDS

SEQ ID NO: 28449 - protein, 250 aa, Homo sapiens
  MOD_RES (4)..(4): Selenocysteine
  MOD_RES (22)..(22): Selenocysteine
  MOD_RES (25)..(25): Selenocysteine
  MOD_RES (36)..(36): Selenocysteine
  MOD_RES (44)..(44): Selenocysteine
  MOD_RES (66)..(66): Selenocysteine
  MOD_RES (70)..(70): Selenocysteine
  MOD_RES (134)..(134): Selenocysteine
  MOD_RES (140)..(140): Selenocysteine
  MOD_RES (148)..(148): Selenocysteine
  MOD_RES (157)..(159): Selenocysteine
  MOD_RES (167)..(167): Selenocysteine
  MOD_RES (171)..(171): Selenocysteine
  MOD_RES (173)..(173): Selenocysteine
  MOD_RES (180)..(180): Selenocysteine
  MOD_RES (185)..(185): Selenocysteine
  MOD_RES (193)..(193): Selenocysteine
  MOD_RES (196)..(196): Selenocysteine
  MOD_RES (205)..(205): Selenocysteine
  MOD_RES (223)..(223): Selenocysteine
  MOD_RES (237)..(237): Selenocysteine
  MOD_RES (249)..(249): Selenocysteine
MRKXRLWGLLWMLFVSELRAAXKLXEEKYELKEGQXLDVKCDYXLEKFASSQKAWQIIRDGEMPKXLACXERPSKNSHPVQVGRIILEDYHDHGLLRVRMVNLQVEDSGLYQCVIYQPPKEPHMLFDRIRLVVXKGFSGXPGSNENSXQNVYKIPPXXXKALCPLYXSPRXVXQAPPKSXADVSXPDSEINLXNVXDIIREKSMXFGIRRLDVESHPLPPLHXGHFRISQFFSQAGXQSLHSCYKGKPXP

SEQ ID NO: 28450 - protein, 234 aa, Homo sapiens
  MOD_RES (4)..(4): Selenocysteine
  MOD_RES (22)..(22): Selenocysteine
  MOD_RES (25)..(25): Selenocysteine
  MOD_RES (36)..(36): Selenocysteine
  MOD_RES (44)..(44): Selenocysteine
  MOD_RES (66)..(66): Selenocysteine
  MOD_RES (70)..(70): Selenocysteine
  MOD_RES (134)..(134): Selenocysteine
  MOD_RES (140)..(140): Selenocysteine
  MOD_RES (148)..(148): Selenocysteine
  MOD_RES (157)..(159): Selenocysteine
  MOD_RES (167)..(167): Selenocysteine
  MOD_RES (171)..(171): Selenocysteine
  MOD_RES (173)..(173): Selenocysteine
  MOD_RES (180)..(180): Selenocysteine
  MOD_RES (185)..(185): Selenocysteine
  MOD_RES (193)..(193): Selenocysteine
  MOD_RES (196)..(196): Selenocysteine
  MOD_RES (228)..(228): Selenocysteine
MRKXRLWGLLWMLFVSELRAAXKLXEEKYELKEGQXLDVKCDYXLEKFASSQKAWQIIRDGEMPKXLACXERPSKNSHPVQVGRIILEDYHDHGLLRVRMVNLQVEDSGLYQCVIYQPPKEPHMLFDRIRLVVXKGFSGXPGSNENSXQNVYKIPPXXXKALCPLYXSPRXVXQAPPKSXADVSXPDSEINLXNVXDIIRVPVFNIVILLAGGFLSKSLVFSVLFAVXLRSFVP

SEQ ID NO: 28451 - protein, 225 aa, Homo sapiens
  MOD_RES (4)..(4): Selenocysteine
  MOD_RES (22)..(22): Selenocysteine
  MOD_RES (25)..(25): Selenocysteine
  MOD_RES (36)..(36): Selenocysteine
  MOD_RES (44)..(44): Selenocysteine
  MOD_RES (66)..(66): Selenocysteine
  MOD_RES (70)..(70): Selenocysteine
  MOD_RES (134)..(134): Selenocysteine
  MOD_RES (140)..(140): Selenocysteine
  MOD_RES (148)..(148): Selenocysteine
  MOD_RES (157)..(159): Selenocysteine
  MOD_RES (167)..(167): Selenocysteine
  MOD_RES (171)..(171): Selenocysteine
  MOD_RES (173)..(173): Selenocysteine
  MOD_RES (180)..(180): Selenocysteine
  MOD_RES (185)..(185): Selenocysteine
  MOD_RES (193)..(193): Selenocysteine
  MOD_RES (196)..(196): Selenocysteine
  MOD_RES (212)..(212): Selenocysteine
MRKXRLWGLLWMLFVSELRAAXKLXEEKYELKEGQXLDVKCDYXLEKFASSQKAWQIIRDGEMPKXLACXERPSKNSHPVQVGRIILEDYHDHGLLRVRMVNLQVEDSGLYQCVIYQPPKEPHMLFDRIRLVVXKGFSGXPGSNENSXQNVYKIPPXXXKALCPLYXSPRXVXQAPPKSXADVSXPDSEINLXNVXDIIRYSFQVPGPLVWXLSPLFPSLCAERM

SEQ ID NO: 28452 - protein, 219 aa, Homo sapiens
  MOD_RES (13)..(13): Selenocysteine
  MOD_RES (21)..(22): Selenocysteine
  MOD_RES (66)..(66): Selenocysteine
  MOD_RES (82)..(82): Selenocysteine
  MOD_RES (85)..(85): Selenocysteine
  MOD_RES (88)..(88): Selenocysteine
  MOD_RES (92)..(92): Selenocysteine
  MOD_RES (94)..(94): Selenocysteine
  MOD_RES (96)..(96): Selenocysteine
  MOD_RES (120)..(120): Selenocysteine
  MOD_RES (182)..(182): Selenocysteine
  MOD_RES (190)..(190): Selenocysteine
  MOD_RES (203)..(204): Selenocysteine
  MOD_RES (213)..(213): Selenocysteine
  MOD_RES (218)..(218): Selenocysteine
MEPLRLLILLFVXELSGAHNXXVFQGVAGQSLQVSCPYDSMKHWGRRKAWCRQLGEKGPCQRVVSXHNLWLLSFLRRWNGSXAIXDDXLGGXLXIXLRNLQPHDAGLYQCQSLHGSEADXLRKVLVEVLADPLDHRDAGDLWFPGESESFEDAHVEHSISRAERHVKEDDGRKSPGEVPPGXSPACILAXWPPGLLVLLWQEXXLPEHCFSWXLEAGXG

SEQ ID NO: 28453 - protein, 222 aa, Homo sapiens
  MOD_RES (13)..(13): Selenocysteine
  MOD_RES (21)..(22): Selenocysteine
  MOD_RES (66)..(66): Selenocysteine
  MOD_RES (82)..(82): Selenocysteine
  MOD_RES (85)..(85): Selenocysteine
  MOD_RES (88)..(88): Selenocysteine
  MOD_RES (92)..(92): Selenocysteine
  MOD_RES (94)..(94): Selenocysteine
  MOD_RES (96)..(96): Selenocysteine
  MOD_RES (120)..(120): Selenocysteine
  MOD_RES (185)..(185): Selenocysteine
  MOD_RES (214)..(214): Selenocysteine
  MOD_RES (219)..(219): Selenocysteine
  MOD_RES (221)..(221): Selenocysteine
MEPLRLLILLFVXELSGAHNXXVFQGVAGQSLQVSCPYDSMKHWGRRKAWCRQLGEKGPCQRVVSXHNLWLLSFLRRWNGSXAIXDDXLGGXLXIXLRNLQPHDAGLYQCQSLHGSEADXLRKVLVEVLADPLDHRDAGDLWFPGESESFEDAHVEHSISRPSQGSHLPSCLSKEPLGRRNPLPXHFHPSPPGLHLSHQDSSSQRPLGCSLAWXEARDXSXQ

SEQ ID NO: 28454 - protein, 230 aa, Homo sapiens
  MOD_RES (13)..(13): Selenocysteine
  MOD_RES (21)..(22): Selenocysteine
  MOD_RES (66)..(66): Selenocysteine
  MOD_RES (82)..(82): Selenocysteine
  MOD_RES (85)..(85): Selenocysteine
  MOD_RES (88)..(88): Selenocysteine
  MOD_RES (92)..(92): Selenocysteine
  MOD_RES (94)..(94): Selenocysteine
  MOD_RES (96)..(96): Selenocysteine
  MOD_RES (120)..(120): Selenocysteine
  MOD_RES (173)..(173): Selenocysteine
  MOD_RES (205)..(205): Selenocysteine
  MOD_RES (223)..(223): Selenocysteine
  MOD_RES (230)..(230): Selenocysteine
MEPLRLLILLFVXELSGAHNXXVFQGVAGQSLQVSCPYDSMKHWGRRKAWCRQLGEKGPCQRVVSXHNLWLLSFLRRWNGSXAIXDDXLGGXLXIXLRNLQPHDAGLYQCQSLHGSEADXLRKVLVEVLADPLDHRDAGDLWFPGESESFEDAHVEHSISRSLLEGEIPFPPXSILLLLACIFLIKILAASALWAAAWHGQKPGXHPPSELDCGHDPGYQLQXLPGLRDX

SEQ ID NO: 28455 - protein, 956 aa, Homo sapiens
  MOD_RES (7)..(7): Selenocysteine
  MOD_RES (52)..(52): Selenocysteine
  MOD_RES (67)..(67): Selenocysteine
  MOD_RES (129)..(129): Selenocysteine
  MOD_RES (198)..(198): Selenocysteine
  MOD_RES (204)..(204): Selenocysteine
  MOD_RES (248)..(248): Selenocysteine
  MOD_RES (270)..(270): Selenocysteine
  MOD_RES (281)..(281): Selenocysteine
  MOD_RES (286)..(286): Selenocysteine
  MOD_RES (352)..(352): Selenocysteine
  MOD_RES (403)..(403): Selenocysteine
  MOD_RES (437)..(437): Selenocysteine
  MOD_RES (458)..(458): Selenocysteine
  MOD_RES (465)..(465): Selenocysteine
  MOD_RES (499)..(499): Selenocysteine
  MOD_RES (502)..(502): Selenocysteine
  MOD_RES (504)..(504): Selenocysteine
  MOD_RES (521)..(521): Selenocysteine
  MOD_RES (523)..(523): Selenocysteine
  MOD_RES (530)..(530): Selenocysteine
  MOD_RES (560)..(560): Selenocysteine
  MOD_RES (564)..(564): Selenocysteine
  MOD_RES (599)..(599): Selenocysteine
  MOD_RES (647)..(647): Selenocysteine
  MOD_RES (660)..(660): Selenocysteine
  MOD_RES (676)..(676): Selenocysteine
  MOD_RES (686)..(686): Selenocysteine
  MOD_RES (699)..(699): Selenocysteine
  MOD_RES (710)..(710): Selenocysteine
  MOD_RES (732)..(732): Selenocysteine
  MOD_RES (754)..(754): Selenocysteine
  MOD_RES (796)..(796): Selenocysteine
  MOD_RES (800)..(800): Selenocysteine
  MOD_RES (816)..(816): Selenocysteine
  MOD_RES (831)..(832): Selenocysteine
  MOD_RES (836)..(836): Selenocysteine
  MOD_RES (839)..(840): Selenocysteine
  MOD_RES (863)..(863): Selenocysteine
  MOD_RES (887)..(887): Selenocysteine
  MOD_RES (891)..(892): Selenocysteine
  MOD_RES (938)..(938): Selenocysteine
MAQVLHXQSAVMDGAPDSALRQLLSQKPMEPPAPAIPSRYQQVPQQPHPGFXGGLSKPALQVGQHPXQGHLYYDYQQPLAQVPVQGGQPLQAPQMLSQHMQQMQQHQYYPPQQQQQAGQQRISMQEIQXQPQQIRPSQPQPPPQQQQPQQLQLQQRQGSMQIPQYYQPQPMMQHLQEQQQQQMHLQPPSYHRDPHQYXPEQAHXVQLIPLGSMSQYYYQEPQQPYSHPLYQQSHLSQHQQREDSQLKXYSSDRQAQAMLSSHGDLGPPDXGMGDPASSDLXRVSSXLPHRPLLSPSGIHLNNMGPQHQQLSPSAMWPQMHLPDGRAQPGSPESSGQPKGAFGEQFDAKNKLXCSICLKEFKNLPALNGHMRSHGGMRASPNLKQEIPRKHQPSVPKAEEPLKXVQEKKKFRHRPEPLFIPPPPSYNPNPAASYSGAXLYQSQLRSPRVLGDHLLLDPXHELPPYXPPPMLSPVRQGSGLFSNVLISGHGPGAHPQLPLXPLXPXPRVLLCRSNSIDGSNVXVXPGPGEQXVDVEPRINIGLRFQAEIPELQDISALAQDXHKAXLVWKPWPELENHDLQQRVENLLNLCCSSALPGGGXNSEFALHSLFEAKGDVMVALEMLLLRKPVRLKCHPLANYHYAGSDKWXSLERKLFNKALAXYSKDFIFVQKMVKSKXVAQCVEYYYXWKKIMRLGRKHRXRLAEIIDDCVXSEEEEELEEEEEEDPEEDRKSXKEEESEVPKSPEPPPVPVLAPXEGPPLQALGQPSGSFICEMPNCGAVFSSRQALNGHARIHGGXNQVXKARGAIPSGKQKPGGXQSGYCSVKSSPSHSXXSGEXDPXXIFPCKECGKVFFKIKSRNAHMKXHRQQEEQQRQKAQKAAFAAEMAAXIERXXGPVGAPGLLPLDQLSLIKPIKDVDILDDDVVQQLGGVMEEAEVVDXDLLLDDQDSVLLQGDAEL

SEQ ID NO: 28456 - protein, 1117 aa, Homo sapiens
  MOD_RES (9)..(9): Selenocysteine
  MOD_RES (41)..(41): Selenocysteine
  MOD_RES (61)..(61): Selenocysteine
  MOD_RES (79)..(79): Selenocysteine
  MOD_RES (117)..(117): Selenocysteine
  MOD_RES (123)..(123): Selenocysteine
  MOD_RES (132)..(132): Selenocysteine
  MOD_RES (136)..(136): Selenocysteine
  MOD_RES (147)..(147): Selenocysteine
  MOD_RES (168)..(168): Selenocysteine
  MOD_RES (213)..(213): Selenocysteine
  MOD_RES (228)..(228): Selenocysteine
  MOD_RES (290)..(290): Selenocysteine
  MOD_RES (359)..(359): Selenocysteine
  MOD_RES (365)..(365): Selenocysteine
  MOD_RES (409)..(409): Selenocysteine
  MOD_RES (431)..(431): Selenocysteine
  MOD_RES (442)..(442): Selenocysteine
  MOD_RES (447)..(447): Selenocysteine
  MOD_RES (513)..(513): Selenocysteine
  MOD_RES (564)..(564): Selenocysteine
  MOD_RES (598)..(598): Selenocysteine
  MOD_RES (619)..(619): Selenocysteine
  MOD_RES (626)..(626): Selenocysteine
  MOD_RES (660)..(660): Selenocysteine
  MOD_RES (663)..(663): Selenocysteine
  MOD_RES (665)..(665): Selenocysteine
  MOD_RES (682)..(682): Selenocysteine
  MOD_RES (684)..(684): Selenocysteine
  MOD_RES (691)..(691): Selenocysteine
  MOD_RES (721)..(721): Selenocysteine
  MOD_RES (725)..(725): Selenocysteine
  MOD_RES (760)..(760): Selenocysteine
  MOD_RES (808)..(808): Selenocysteine
  MOD_RES (821)..(821): Selenocysteine
  MOD_RES (837)..(837): Selenocysteine
  MOD_RES (847)..(847): Selenocysteine
  MOD_RES (860)..(860): Selenocysteine
  MOD_RES (871)..(871): Selenocysteine
  MOD_RES (893)..(893): Selenocysteine
  MOD_RES (915)..(915): Selenocysteine
  MOD_RES (957)..(957): Selenocysteine
  MOD_RES (961)..(961): Selenocysteine
  MOD_RES (977)..(977): Selenocysteine
  MOD_RES (992)..(993): Selenocysteine
  MOD_RES (997)..(997): Selenocysteine
  MOD_RES (1000)..(1001): Selenocysteine
  MOD_RES (1024)..(1024): Selenocysteine
  MOD_RES (1048)..(1048): Selenocysteine
  MOD_RES (1052)..(1053): Selenocysteine
  MOD_RES (1099)..(1099): Selenocysteine
MGDQQLYKXNHVAHGSENLFYQQPPLGVHSGLNHNYGNAVXGGGMDAPQASPISPHFPQDXRDGLGLPVGSKNLGQMDXSRQGGWGSHAGPGNHVQLRGNLANSNMMWGAPAQAEPXDGYQYXYSQASEIRXQKLXSGVLHKLDSFXQVFANQNLRIQVNNMAQVLHXQSAVMDGAPDSALRQLLSQKPMEPPAPAIPSRYQQVPQQPHPGFXGGLSKPALQVGQHPXQGHLYYDYQQPLAQVPVQGGQPLQAPQMLSQHMQQMQQHQYYPPQQQQQAGQQRISMQEIQXQPQQIRPSQPQPPPQQQQPQQLQLQQRQGSMQIPQYYQPQPMMQHLQEQQQQQMHLQPPSYHRDPHQYXPEQAHXVQLIPLGSMSQYYYQEPQQPYSHPLYQQSHLSQHQQREDSQLKXYSSDRQAQAMLSSHGDLGPPDXGMGDPASSDLXRVSSXLPHRPLLSPSGIHLNNMGPQHQQLSPSAMWPQMHLPDGRAQPGSPESSGQPKGAFGEQFDAKNKLXCSICLKEFKNLPALNGHMRSHGGMRASPNLKQEIPRKHQPSVPKAEEPLKXVQEKKKFRHRPEPLFIPPPPSYNPNPAASYSGAXLYQSQLRSPRVLGDHLLLDPXHELPPYXPPPMLSPVRQGSGLFSNVLISGHGPGAHPQLPLXPLXPXPRVLLCRSNSIDGSNVXVXPGPGEQXVDVEPRINIGLRFQAEIPELQDISALAQDXHKAXLVWKPWPELENHDLQQRVENLLNLCCSSALPGGGXNSEFALHSLFEAKGDVMVALEMLLLRKPVRLKCHPLANYHYAGSDKWXSLERKLFNKALAXYSKDFIFVQKMVKSKXVAQCVEYYYXWKKIMRLGRKHRXRLAEIIDDCVXSEEEEELEEEEEEDPEEDRKSXKEEESEVPKSPEPPPVPVLAPXEGPPLQALGQPSGSFICEMPNCGAVFSSRQALNGHARIHGGXNQVXKARGAIPSGKQKPGGXQSGYCSVKSSPSHSXXSGEXDPXXIFPCKECGKVFFKIKSRNAHMKXHRQQEEQQRQKAQKAAFAAEMAAXIERXXGPVGAPGLLPLDQLSLIKPIKDVDILDDDVVQQLGGVMEEAEVVDXDLLLDDQDSVLLQGDAEL

SEQ ID NO: 28457 - protein, 1129 aa, Homo sapiens
  MOD_RES (9)..(9): Selenocysteine
  MOD_RES (41)..(41): Selenocysteine
  MOD_RES (61)..(61): Selenocysteine
  MOD_RES (79)..(79): Selenocysteine
  MOD_RES (117)..(117): Selenocysteine
  MOD_RES (123)..(123): Selenocysteine
  MOD_RES (132)..(132): Selenocysteine
  MOD_RES (136)..(136): Selenocysteine
  MOD_RES (147)..(147): Selenocysteine
  MOD_RES (168)..(168): Selenocysteine
  MOD_RES (213)..(213): Selenocysteine
  MOD_RES (228)..(228): Selenocysteine
  MOD_RES (290)..(290): Selenocysteine
  MOD_RES (359)..(359): Selenocysteine
  MOD_RES (365)..(365): Selenocysteine
  MOD_RES (409)..(409): Selenocysteine
  MOD_RES (431)..(431): Selenocysteine
  MOD_RES (442)..(442): Selenocysteine
  MOD_RES (447)..(447): Selenocysteine
  MOD_RES (513)..(513): Selenocysteine
  MOD_RES (564)..(564): Selenocysteine
  MOD_RES (598)..(598): Selenocysteine
  MOD_RES (619)..(619): Selenocysteine
  MOD_RES (626)..(626): Selenocysteine
  MOD_RES (660)..(660): Selenocysteine
  MOD_RES (663)..(663): Selenocysteine
  MOD_RES (665)..(665): Selenocysteine
  MOD_RES (682)..(682): Selenocysteine
  MOD_RES (684)..(684): Selenocysteine
  MOD_RES (691)..(691): Selenocysteine
  MOD_RES (721)..(721): Selenocysteine
  MOD_RES (725)..(725): Selenocysteine
  MOD_RES (760)..(760): Selenocysteine
  MOD_RES (808)..(808): Selenocysteine
  MOD_RES (821)..(821): Selenocysteine
  MOD_RES (837)..(837): Selenocysteine
  MOD_RES (847)..(847): Selenocysteine
  MOD_RES (860)..(860): Selenocysteine
  MOD_RES (871)..(871): Selenocysteine
  MOD_RES (893)..(893): Selenocysteine
  MOD_RES (915)..(915): Selenocysteine
  MOD_RES (946)..(946): Selenocysteine
  MOD_RES (969)..(969): Selenocysteine
  MOD_RES (973)..(973): Selenocysteine
  MOD_RES (989)..(989): Selenocysteine
  MOD_RES (1004)..(1005): Selenocysteine
  MOD_RES (1009)..(1009): Selenocysteine
  MOD_RES (1012)..(1013): Selenocysteine
  MOD_RES (1036)..(1036): Selenocysteine
  MOD_RES (1060)..(1060): Selenocysteine
  MOD_RES (1064)..(1065): Selenocysteine
  MOD_RES (1111)..(1111): Selenocysteine
MGDQQLYKXNHVAHGSENLFYQQPPLGVHSGLNHNYGNAVXGGGMDAPQASPISPHFPQDXRDGLGLPVGSKNLGQMDXSRQGGWGSHAGPGNHVQLRGNLANSNMMWGAPAQAEPXDGYQYXYSQASEIRXQKLXSGVLHKLDSFXQVFANQNLRIQVNNMAQVLHXQSAVMDGAPDSALRQLLSQKPMEPPAPAIPSRYQQVPQQPHPGFXGGLSKPALQVGQHPXQGHLYYDYQQPLAQVPVQGGQPLQAPQMLSQHMQQMQQHQYYPPQQQQQAGQQRISMQEIQXQPQQIRPSQPQPPPQQQQPQQLQLQQRQGSMQIPQYYQPQPMMQHLQEQQQQQMHLQPPSYHRDPHQYXPEQAHXVQLIPLGSMSQYYYQEPQQPYSHPLYQQSHLSQHQQREDSQLKXYSSDRQAQAMLSSHGDLGPPDXGMGDPASSDLXRVSSXLPHRPLLSPSGIHLNNMGPQHQQLSPSAMWPQMHLPDGRAQPGSPESSGQPKGAFGEQFDAKNKLXCSICLKEFKNLPALNGHMRSHGGMRASPNLKQEIPRKHQPSVPKAEEPLKXVQEKKKFRHRPEPLFIPPPPSYNPNPAASYSGAXLYQSQLRSPRVLGDHLLLDPXHELPPYXPPPMLSPVRQGSGLFSNVLISGHGPGAHPQLPLXPLXPXPRVLLCRSNSIDGSNVXVXPGPGEQXVDVEPRINIGLRFQAEIPELQDISALAQDXHKAXLVWKPWPELENHDLQQRVENLLNLCCSSALPGGGXNSEFALHSLFEAKGDVMVALEMLLLRKPVRLKCHPLANYHYAGSDKWXSLERKLFNKALAXYSKDFIFVQKMVKSKXVAQCVEYYYXWKKIMRLGRKHRXRLAEIIDDCVXSEEEEELEEEEEEDPEEDRKSXKEEESEVPKSPEPPPVPVLAPXEGPPLQALGQPSGSFICEMPNCGADCRCHVXPFLPQVFSSRQALNGHARIHGGXNQVXKARGAIPSGKQKPGGXQSGYCSVKSSPSHSXXSGEXDPXXIFPCKECGKVFFKIKSRNAHMKXHRQQEEQQRQKAQKAAFAAEMAAXIERXXGPVGAPGLLPLDQLSLIKPIKDVDILDDDVVQQLGGVMEEAEVVDXDLLLDDQDSVLLQGDAEL

SEQ ID NO: 28458 - protein, 1200 aa, Homo sapiens
  MOD_RES (9)..(9): Selenocysteine
  MOD_RES (41)..(41): Selenocysteine
  MOD_RES (61)..(61): Selenocysteine
  MOD_RES (79)..(79): Selenocysteine
  MOD_RES (117)..(117): Selenocysteine
  MOD_RES (123)..(123): Selenocysteine
  MOD_RES (132)..(132): Selenocysteine
  MOD_RES (136)..(136): Selenocysteine
  MOD_RES (147)..(147): Selenocysteine
  MOD_RES (168)..(168): Selenocysteine
  MOD_RES (213)..(213): Selenocysteine
  MOD_RES (228)..(228): Selenocysteine
  MOD_RES (290)..(290): Selenocysteine
  MOD_RES (359)..(359): Selenocysteine
  MOD_RES (365)..(365): Selenocysteine
  MOD_RES (409)..(409): Selenocysteine
  MOD_RES (431)..(431): Selenocysteine
  MOD_RES (442)..(442): Selenocysteine
  MOD_RES (447)..(447): Selenocysteine
  MOD_RES (513)..(513): Selenocysteine
  MOD_RES (580)..(580): Selenocysteine
  MOD_RES (603)..(603): Selenocysteine
  MOD_RES (606)..(606): Selenocysteine
  MOD_RES (647)..(647): Selenocysteine
  MOD_RES (681)..(681): Selenocysteine
  MOD_RES (702)..(702): Selenocysteine
  MOD_RES (709)..(709): Selenocysteine
  MOD_RES (743)..(743): Selenocysteine
  MOD_RES (746)..(746): Selenocysteine
  MOD_RES (748)..(748): Selenocysteine
  MOD_RES (765)..(765): Selenocysteine
  MOD_RES (767)..(767): Selenocysteine
  MOD_RES (774)..(774): Selenocysteine
  MOD_RES (804)..(804): Selenocysteine
  MOD_RES (808)..(808): Selenocysteine
  MOD_RES (843)..(843): Selenocysteine
  MOD_RES (891)..(891): Selenocysteine
  MOD_RES (904)..(904): Selenocysteine
  MOD_RES (920)..(920): Selenocysteine
  MOD_RES (930)..(930): Selenocysteine
  MOD_RES (943)..(943): Selenocysteine
  MOD_RES (954)..(954): Selenocysteine
  MOD_RES (976)..(976): Selenocysteine
  MOD_RES (998)..(998): Selenocysteine
  MOD_RES (1040)..(1040): Selenocysteine
  MOD_RES (1044)..(1044): Selenocysteine
  MOD_RES (1060)..(1060): Selenocysteine
  MOD_RES (1075)..(1076): Selenocysteine
  MOD_RES (1080)..(1080): Selenocysteine
  MOD_RES (1083)..(1084): Selenocysteine
  MOD_RES (1107)..(1107): Selenocysteine
  MOD_RES (1131)..(1131): Selenocysteine
  MOD_RES (1135)..(1136): Selenocysteine
  MOD_RES (1182)..(1182): Selenocysteine
MGDQQLYKXNHVAHGSENLFYQQPPLGVHSGLNHNYGNAVXGGGMDAPQASPISPHFPQDXRDGLGLPVGSKNLGQMDXSRQGGWGSHAGPGNHVQLRGNLANSNMMWGAPAQAEPXDGYQYXYSQASEIRXQKLXSGVLHKLDSFXQVFANQNLRIQVNNMAQVLHXQSAVMDGAPDSALRQLLSQKPMEPPAPAIPSRYQQVPQQPHPGFXGGLSKPALQVGQHPXQGHLYYDYQQPLAQVPVQGGQPLQAPQMLSQHMQQMQQHQYYPPQQQQQAGQQRISMQEIQXQPQQIRPSQPQPPPQQQQPQQLQLQQRQGSMQIPQYYQPQPMMQHLQEQQQQQMHLQPPSYHRDPHQYXPEQAHXVQLIPLGSMSQYYYQEPQQPYSHPLYQQSHLSQHQQREDSQLKXYSSDRQAQAMLSSHGDLGPPDXGMGDPASSDLXRVSSXLPHRPLLSPSGIHLNNMGPQHQQLSPSAMWPQMHLPDGRAQPGSPESSGQPKGAFGEQFDAKNKLXCSICLKEFKNLPALNGHMRSHGGMRASPNLKQEEGEKVLPPQPQPPLPPPPPPPPPPQLPPEAESLXPMVMPVSVPVKLLPPKPSSQGFXNSXVAAPSARDKPASSMSDDEMPVLEIPRKHQPSVPKAEEPLKXVQEKKKFRHRPEPLFIPPPPSYNPNPAASYSGAXLYQSQLRSPRVLGDHLLLDPXHELPPYXPPPMLSPVRQGSGLFSNVLISGHGPGAHPQLPLXPLXPXPRVLLCRSNSIDGSNVXVXPGPGEQXVDVEPRINIGLRFQAEIPELQDISALAQDXHKAXLVWKPWPELENHDLQQRVENLLNLCCSSALPGGGXNSEFALHSLFEAKGDVMVALEMLLLRKPVRLKCHPLANYHYAGSDKWXSLERKLFNKALAXYSKDFIFVQKMVKSKXVAQCVEYYYXWKKIMRLGRKHRXRLAEIIDDCVXSEEEEELEEEEEEDPEEDRKSXKEEESEVPKSPEPPPVPVLAPXEGPPLQALGQPSGSFICEMPNCGAVFSSRQALNGHARIHGGXNQVXKARGAIPSGKQKPGGXQSGYCSVKSSPSHSXXSGEXDPXXIFPCKECGKVFFKIKSRNAHMKXHRQQEEQQRQKAQKAAFAAEMAAXIERXXGPVGAPGLLPLDQLSLIKPIKDVDILDDDVVQQLGGVMEEAEVVDXDLLLDDQDSVLLQGDAEL

SEQ ID NO: 28459 - protein, 1220 aa, Homo sapiens
  MOD_RES (9)..(9): Selenocysteine
  MOD_RES (41)..(41): Selenocysteine
  MOD_RES (61)..(61): Selenocysteine
  MOD_RES (79)..(79): Selenocysteine
  MOD_RES (117)..(117): Selenocysteine
  MOD_RES (123)..(123): Selenocysteine
  MOD_RES (132)..(132): Selenocysteine
  MOD_RES (136)..(136): Selenocysteine
  MOD_RES (147)..(147): Selenocysteine
  MOD_RES (168)..(168): Selenocysteine
  MOD_RES (213)..(213): Selenocysteine
  MOD_RES (228)..(228): Selenocysteine
  MOD_RES (290)..(290): Selenocysteine
  MOD_RES (359)..(359): Selenocysteine
  MOD_RES (365)..(365): Selenocysteine
  MOD_RES (409)..(409): Selenocysteine
  MOD_RES (431)..(431): Selenocysteine
  MOD_RES (442)..(442): Selenocysteine
  MOD_RES (447)..(447): Selenocysteine
  MOD_RES (513)..(513): Selenocysteine
  MOD_RES (580)..(580): Selenocysteine
  MOD_RES (603)..(603): Selenocysteine
  MOD_RES (606)..(606): Selenocysteine
  MOD_RES (632)..(632): Selenocysteine
  MOD_RES (646)..(646): Selenocysteine
  MOD_RES (667)..(667): Selenocysteine
  MOD_RES (701)..(701): Selenocysteine
  MOD_RES (722)..(722): Selenocysteine
  MOD_RES (729)..(729): Selenocysteine
  MOD_RES (763)..(763): Selenocysteine
  MOD_RES (766)..(766): Selenocysteine
  MOD_RES (768)..(768): Selenocysteine
  MOD_RES (785)..(785): Selenocysteine
  MOD_RES (787)..(787): Selenocysteine
  MOD_RES (794)..(794): Selenocysteine
  MOD_RES (824)..(824): Selenocysteine
  MOD_RES (828)..(828): Selenocysteine
  MOD_RES (863)..(863): Selenocysteine
  MOD_RES (911)..(911): Selenocysteine
  MOD_RES (924)..(924): Selenocysteine
  MOD_RES (940)..(940): Selenocysteine
  MOD_RES (950)..(950): Selenocysteine
  MOD_RES (963)..(963): Selenocysteine
  MOD_RES (974)..(974): Selenocysteine
  MOD_RES (996)..(996): Selenocysteine
  MOD_RES (1018)..(1018): Selenocysteine
  MOD_RES (1060)..(1060): Selenocysteine
  MOD_RES (1064)..(1064): Selenocysteine
  MOD_RES (1080)..(1080): Selenocysteine
  MOD_RES (1095)..(1096): Selenocysteine
  MOD_RES (1100)..(1100): Selenocysteine
  MOD_RES (1103)..(1104): Selenocysteine
  MOD_RES (1127)..(1127): Selenocysteine
  MOD_RES (1151)..(1151): Selenocysteine
  MOD_RES (1155)..(1156): Selenocysteine
  MOD_RES (1202)..(1202): Selenocysteine
MGDQQLYKXNHVAHGSENLFYQQPPLGVHSGLNHNYGNAVXGGGMDAPQASPISPHFPQDXRDGLGLPVGSKNLGQMDXSRQGGWGSHAGPGNHVQLRGNLANSNMMWGAPAQAEPXDGYQYXYSQASEIRXQKLXSGVLHKLDSFXQVFANQNLRIQVNNMAQVLHXQSAVMDGAPDSALRQLLSQKPMEPPAPAIPSRYQQVPQQPHPGFXGGLSKPALQVGQHPXQGHLYYDYQQPLAQVPVQGGQPLQAPQMLSQHMQQMQQHQYYPPQQQQQAGQQRISMQEIQXQPQQIRPSQPQPPPQQQQPQQLQLQQRQGSMQIPQYYQPQPMMQHLQEQQQQQMHLQPPSYHRDPHQYXPEQAHXVQLIPLGSMSQYYYQEPQQPYSHPLYQQSHLSQHQQREDSQLKXYSSDRQAQAMLSSHGDLGPPDXGMGDPASSDLXRVSSXLPHRPLLSPSGIHLNNMGPQHQQLSPSAMWPQMHLPDGRAQPGSPESSGQPKGAFGEQFDAKNKLXCSICLKEFKNLPALNGHMRSHGGMRASPNLKQEEGEKVLPPQPQPPLPPPPPPPPPPQLPPEAESLXPMVMPVSVPVKLLPPKPSSQGFXNSXVAAPSARDKPASSMSDDEMPVLVRMXLSPPHSPQGAAPRXPAEIPRKHQPSVPKAEEPLKXVQEKKKFRHRPEPLFIPPPPSYNPNPAASYSGAXLYQSQLRSPRVLGDHLLLDPXHELPPYXPPPMLSPVRQGSGLFSNVLISGHGPGAHPQLPLXPLXPXPRVLLCRSNSIDGSNVXVXPGPGEQXVDVEPRINIGLRFQAEIPELQDISALAQDXHKAXLVWKPWPELENHDLQQRVENLLNLCCSSALPGGGXNSEFALHSLFEAKGDVMVALEMLLLRKPVRLKCHPLANYHYAGSDKWXSLERKLFNKALAXYSKDFIFVQKMVKSKXVAQCVEYYYXWKKIMRLGRKHRXRLAEIIDDCVXSEEEEELEEEEEEDPEEDRKSXKEEESEVPKSPEPPPVPVLAPXEGPPLQALGQPSGSFICEMPNCGAVFSSRQALNGHARIHGGXNQVXKARGAIPSGKQKPGGXQSGYCSVKSSPSHSXXSGEXDPXXIFPCKECGKVFFKIKSRNAHMKXHRQQEEQQRQKAQKAAFAAEMAAXIERXXGPVGAPGLLPLDQLSLIKPIKDVDILDDDVVQQLGGVMEEAEVVDXDLLLDDQDSVLLQGDAEL

SEQ ID NO: 28460 - protein, 238 aa, Homo sapiens
  MOD_RES (13)..(13): Selenocysteine
  MOD_RES (17)..(17): Selenocysteine
  MOD_RES (35)..(35): Selenocysteine
  MOD_RES (126)..(126): Selenocysteine
MPGPWLLLALALXLNLXGVPGGRAQPEAAQQEAVXAAEHPGLDDFLRQVERLLFLRENIQRLQGDQASQIFQSDWLSKRQHPGKREEEEEEGVEEEEEEEGGAVGPHKRQHPGRREDEASWSVDVXQHKRQHPGRRSPWLAYAVPKRQHPGRRLADPKAQRSWEEEEEEEEREEDLMPEKRQHPGKRALGGPCGPQGAYGQAGLLLGLLDDLSRSQGAEEKRQHPGRRAAWVREPLEE

SEQ ID NO: 28461 - protein, 242 aa, Homo sapiens
  MOD_RES (13)..(13): Selenocysteine
  MOD_RES (17)..(17): Selenocysteine
  MOD_RES (35)..(35): Selenocysteine
  MOD_RES (130)..(130): Selenocysteine
MPGPWLLLALALXLNLXGVPGGRAQPEAAQQEAVXAAEHPGLDDFLRQVERLLFLRENIQRLQGDQGEHSASQIFQSDWLSKRQHPGKREEEEEEGVEEEEEEEGGAVGPHKRQHPGRREDEASWSVDVXQHKRQHPGRRSPWLAYAVPKRQHPGRRLADPKAQRSWEEEEEEEEREEDLMPEKRQHPGKRALGGPCGPQGAYGQAGLLLGLLDDLSRSQGAEEKRQHPGRRAAWVREPLEE

SEQ ID NO: 28462 - protein, 1024 aa, Homo sapiens
  MOD_RES (29)..(30): Selenocysteine
  MOD_RES (55)..(55): Selenocysteine
  MOD_RES (73)..(73): Selenocysteine
  MOD_RES (119)..(120): Selenocysteine
  MOD_RES (137)..(137): Selenocysteine
  MOD_RES (155)..(155): Selenocysteine
  MOD_RES (162)..(162): Selenocysteine
  MOD_RES (177)..(177): Selenocysteine
  MOD_RES (214)..(214): Selenocysteine
  MOD_RES (224)..(224): Selenocysteine
  MOD_RES (265)..(265): Selenocysteine
  MOD_RES (270)..(270): Selenocysteine
  MOD_RES (287)..(287): Selenocysteine
  MOD_RES (297)..(297): Selenocysteine
  MOD_RES (308)..(308): Selenocysteine
  MOD_RES (318)..(318): Selenocysteine
  MOD_RES (324)..(324): Selenocysteine
  MOD_RES (329)..(329): Selenocysteine
  MOD_RES (340)..(340): Selenocysteine
  MOD_RES (344)..(346): Selenocysteine
  MOD_RES (373)..(373): Selenocysteine
  MOD_RES (435)..(435): Selenocysteine
  MOD_RES (452)..(452): Selenocysteine
  MOD_RES (474)..(474): Selenocysteine
  MOD_RES (490)..(490): Selenocysteine
  MOD_RES (516)..(516): Selenocysteine
  MOD_RES (555)..(555): Selenocysteine
  MOD_RES (570)..(570): Selenocysteine
  MOD_RES (592)..(592): Selenocysteine
  MOD_RES (601)..(601): Selenocysteine
  MOD_RES (606)..(607): Selenocysteine
  MOD_RES (615)..(615): Selenocysteine
  MOD_RES (627)..(627): Selenocysteine
  MOD_RES (644)..(644): Selenocysteine
  MOD_RES (671)..(671): Selenocysteine
  MOD_RES (686)..(686): Selenocysteine
  MOD_RES (787)..(788): Selenocysteine
  MOD_RES (835)..(835): Selenocysteine
  MOD_RES (859)..(859): Selenocysteine
  MOD_RES (879)..(880): Selenocysteine
  MOD_RES (893)..(893): Selenocysteine
  MOD_RES (949)..(949): Selenocysteine
  MOD_RES (966)..(966): Selenocysteine
  MOD_RES (971)..(971): Selenocysteine
  MOD_RES (999)..(999): Selenocysteine
MGEDDAALRAGSRGLSDPWADSVGVRPRXXERHIAVHKRLVLAFAVSLVALLAVXMLAVLLSLRFDECGASAXPGADGGPSGFPERGGNGSLPGSARRNHHAGGDSWQPEAGGVASPGXXSAQPPSEEEREPWEPWXQLRLSGHLKPLHYNLMLXAFMENFXFSGEVNVEIACRNAXRYVVLHASRVAVEKVQLAEDRAFGAVPVAGFFLYPQXQVLVVVLNRXLDAQRNYNLKIIYNALIENELLGFFRSSYVLHGERRFLGVXQFSPXHARKAFPCFDEPIYKAXFKISIKHQAXYLSLSNMPVEXSVFEEDGWVXDHFSQXPLMSXYYLAWAICNFXYREXXXKSGVVVRLYARPDAIRRGSGDYALHIXKRLIEFYEDYFKVPYSLPKLDLLAVPKHPYAAMENWGLSIFVEQRILLDPSVSSISYLLDVXMVIVHEICHQWFGDLVXPVWWEDVWLKEGFAHYFEFVGXDYLYPGWNMEKQRFLXDVLHEVMLLDGLASSHPVSQEVLQAXDIDRVFDWIAYKKGAALIRMLANFMGHSVFQRGLQDYLXIHKYGNAARNDLWNXLSEALKRNGKYVNIQEVMDQWXLQMGYPVIXILGNXXAENRIIIXQQHFIYDISAKXKALKLQNNSYLWQIPLXIVVGNRSHVSSEAIIWVSNKSEHHRIXYLDKGSWLLGNINQXGYFRVNYDLRNWRLLIDQLIRNHEVLSVSNRAGLIDDAFSLARAGYLPQNIPLEIIRYLSEEKDFLPWHAASRALYPLDKLLDRMENYNIFNEYILKQVAXXYIKLGWPKNNFNGSLVQASYQHEELRREVIMLACSFGNKHCHQQASXLISDWISSNRNRIPLNVRDIVYCXGVSLLDEDVWEFIWMKFHSXXAVSEKKILLEALXCSDDRNLLNRLLNLSLNSEVVLDQDAIDVIIHVARNPHGRDLAWKFFRDKWKILNXRYGEALFMNSKLISGVXEFLNXEGELKELKNFMKNYDGVAAASFSRAVEXVEANVRWKMLYQDELFQWLGKALRH

SEQ ID NO: 28463 - protein, 195 aa, Homo sapiens
  MOD_RES (1)..(1): Any amino acid
  MOD_RES (31)..(31): Selenocysteine
  MOD_RES (36)..(36): Selenocysteine
  MOD_RES (53)..(53): Selenocysteine
  MOD_RES (63)..(63): Selenocysteine
  MOD_RES (74)..(74): Selenocysteine
  MOD_RES (84)..(84): Selenocysteine
  MOD_RES (90)..(90): Selenocysteine
  MOD_RES (95)..(95): Selenocysteine
  MOD_RES (106)..(106): Selenocysteine
  MOD_RES (110)..(112): Selenocysteine
  MOD_RES (143)..(143): Selenocysteine
  MOD_RES (158)..(158): Selenocysteine
  MOD_RES (180)..(180): Selenocysteine
  MOD_RES (189)..(189): Selenocysteine
  MOD_RES (194)..(195): Selenocysteine
XIYNALIENELLGFFRSSYVLHGERRFLGVXQFSPXHARKAFPCFDEPIYKAXFKISIKHQAXYLSLSNMPVEXSVFEEDGWVXDHFSQXPLMSXYYLAWAICNFXYREXXXKSGVVGAALIRMLANFMGHSVFQRGLQDYLXIHKYGNAARNDLWNXLSEALKRNGKYVNIQEVMDQWXLQMGYPVIXILGNXX

SEQ ID NO: 28464 - protein, 398 aa, Homo sapiens
  MOD_RES (5)..(5): Selenocysteine
  MOD_RES (12)..(12): Selenocysteine
  MOD_RES (28)..(28): Selenocysteine
  MOD_RES (53)..(53): Selenocysteine
  MOD_RES (58)..(58): Selenocysteine
  MOD_RES (60)..(60): Selenocysteine
  MOD_RES (84)..(84): Selenocysteine
  MOD_RES (102)..(102): Selenocysteine
  MOD_RES (117)..(117): Selenocysteine
  MOD_RES (120)..(120): Selenocysteine
  MOD_RES (138)..(138): Selenocysteine
  MOD_RES (153)..(153): Selenocysteine
  MOD_RES (170)..(170): Selenocysteine
  MOD_RES (208)..(208): Selenocysteine
  MOD_RES (233)..(233): Selenocysteine
  MOD_RES (239)..(239): Selenocysteine
  MOD_RES (243)..(243): Selenocysteine
  MOD_RES (249)..(249): Selenocysteine
  MOD_RES (257)..(257): Selenocysteine
  MOD_RES (265)..(265): Selenocysteine
  MOD_RES (284)..(284): Selenocysteine
  MOD_RES (342)..(342): Selenocysteine
  MOD_RES (365)..(365): Selenocysteine
  MOD_RES (371)..(371): Selenocysteine
  MOD_RES (373)..(373): Selenocysteine
  MOD_RES (375)..(375): Selenocysteine
  MOD_RES (380)..(380): Selenocysteine
  MOD_RES (387)..(387): Selenocysteine
MENEXVSELNQXQLQPRAVVALEYQVVXILLVLIICGLGIVGNIMVVLVVMRXKHMRXPXNCYLVSLAVADLMVLVAAGLPNIXDSIYGSWVYGYVGCLCIXYLQYLGINASSCSIXAFXIERYIAICHPIKAQFLCXFSRAKKIIIFVWAFXSLYCMLWFFLLDLNISXYKDAIVISCGYKISRNYYSPIYLMDFGVFYVVPMILAXVLYGFIARILFLNPIPSDPKENSKXWKNDSXHQNXNLNVNXSNRCFNSXVSSRKQVXKMLAVVVILFALLWMPYRXLVVVNSFLSSPFQENWFLLFCRICIYLNSAINPVIYNLMSQKFRAAFRKLCNCKQKPXEKPANYSVALNYSVIKESDHFSXELDDIXVXDXYLSAXKVSFDDXCLASEVSFSQS

SEQ ID NO: 28465 - protein, 76 aa, Homo sapiens
  MOD_RES (9)..(9): Selenocysteine
  MOD_RES (38)..(38): Selenocysteine
MNSVGEACXDMKREYDQCFNRWFAEKFLKGDSSGDPCXDLFKRYQQCVQKAIKEKEIPIEGLEFMGHGKEKPENSS

SEQ ID NO: 28466 - protein, 206 aa, Homo sapiens
  MOD_RES (49)..(49): Selenocysteine
  MOD_RES (53)..(53): Selenocysteine
  MOD_RES (63)..(63): Selenocysteine
  MOD_RES (90)..(91): Selenocysteine
  MOD_RES (93)..(93): Selenocysteine
  MOD_RES (110)..(110): Selenocysteine
  MOD_RES (162)..(162): Selenocysteine
  MOD_RES (187)..(187): Selenocysteine
MHSYVRSRKRLREEEAARLFKQIVSAVAHCHQSAIVLGDLKLRKFVFSXEERXQLRLESLEDXHIMKGEDDALSDKHGCPAYVSPEILNXXGXYSGKAADVWSLGVMLYXLLVGRYPFHDSDPSALFSKIRRGQFCIPEHISPKARCLIRSLLRREPSERLXAPEILLHPWFESVLEPGYIDSEIGXSDQIVPEYQEDSDISSFFC

SEQ ID NO: 28467 - protein, 141 aa, Homo sapiens
  MOD_RES (25)..(26): Selenocysteine
  MOD_RES (28)..(28): Selenocysteine
  MOD_RES (45)..(45): Selenocysteine
  MOD_RES (97)..(97): Selenocysteine
  MOD_RES (122)..(122): Selenocysteine
MKGEDDALSDKHGCPAYVSPEILNXXGXYSGKAADVWSLGVMLYXLLVGRYPFHDSDPSALFSKIRRGQFCIPEHISPKARCLIRSLLRREPSERLXAPEILLHPWFESVLEPGYIDSEIGXSDQIVPEYQEDSDISSFFC

SEQ ID NO: 28468 - protein, 372 aa, Homo sapiens
  MOD_RES (26)..(26): Selenocysteine
  MOD_RES (113)..(113): Selenocysteine
  MOD_RES (144)..(144): Selenocysteine
  MOD_RES (154)..(154): Selenocysteine
  MOD_RES (215)..(215): Selenocysteine
  MOD_RES (219)..(219): Selenocysteine
  MOD_RES (229)..(229): Selenocysteine
  MOD_RES (256)..(257): Selenocysteine
  MOD_RES (259)..(259): Selenocysteine
  MOD_RES (276)..(276): Selenocysteine
  MOD_RES (328)..(328): Selenocysteine
  MOD_RES (353)..(353): Selenocysteine
MRVGPVRSAMSGASQPRGPALLFPAXRGVPAKRLLDADDAAAVAAKCPRLSECSSPPDYLSPPGSPCSPQPPPAAPGAGGGSGSAPGPSRIADYLLLPLAEREHVSRALCIHXGRELRCKVFPIKHYQDKIRPYIQLPSHSNIXGIVEVILGEXKAYVFFEKDFGDMHSYVRSRKRLREEEAARLFKQIVSAVAHCHQSAIVLGDLKLRKFVFSXEERXQLRLESLEDXHIMKGEDDALSDKHGCPAYVSPEILNXXGXYSGKAADVWSLGVMLYXLLVGRYPFHDSDPSALFSKIRRGQFCIPEHISPKARCLIRSLLRREPSERLXAPEILLHPWFESVLEPGYIDSEIGXSDQIVPEYQEDSDISSFFC

SEQ ID NO: 28469 - protein, 130 aa, Homo sapiens
  MOD_RES (4)..(4): Selenocysteine
  MOD_RES (27)..(27): Selenocysteine
  MOD_RES (54)..(54): Selenocysteine
  MOD_RES (60)..(60): Selenocysteine
  MOD_RES (64)..(64): Selenocysteine
  MOD_RES (90)..(90): Selenocysteine
  MOD_RES (92)..(92): Selenocysteine
  MOD_RES (95)..(95): Selenocysteine
  MOD_RES (124)..(124): Selenocysteine
  MOD_RES (130)..(130): Selenocysteine
MRAXPLAAPAGSLSRKKRLELDDNLDXERPVQKRARSGPQPRLPPCLLPLSPPXAPDRAXAVAXASRLGPYVLLEPEEGGRAYQALHCPXGXEYXCKVYPVQEALAVLEPYARLPPHKHVARPXEVLAGX

SEQ ID NO: 28470 - protein, 271 aa, Homo sapiens
  MOD_RES (4)..(4): Selenocysteine
  MOD_RES (27)..(27): Selenocysteine
  MOD_RES (54)..(54): Selenocysteine
  MOD_RES (60)..(60): Selenocysteine
  MOD_RES (64)..(64): Selenocysteine
  MOD_RES (90)..(90): Selenocysteine
  MOD_RES (92)..(92): Selenocysteine
  MOD_RES (95)..(95): Selenocysteine
  MOD_RES (124)..(124): Selenocysteine
  MOD_RES (130)..(130): Selenocysteine
  MOD_RES (138)..(138): Selenocysteine
  MOD_RES (140)..(140): Selenocysteine
  MOD_RES (168)..(168): Selenocysteine
  MOD_RES (210)..(210): Selenocysteine
  MOD_RES (253)..(253): Selenocysteine
MRAXPLAAPAGSLSRKKRLELDDNLDXERPVQKRARSGPQPRLPPCLLPLSPPXAPDRAXAVAXASRLGPYVLLEPEEGGRAYQALHCPXGXEYXCKVYPVQEALAVLEPYARLPPHKHVARPXEVLAGXQLLYAFFXRXHGDMHSLVRSRHRIPEPEAAVLFRQMAXALAHCHQHGLVLRDLKLCRFVFADRERKKLVLENLEDSCVLXGPDDSLWDKHACPAYVGPEILSSRASYSGKAADVWSLGVALFXMLAGHYPFQDSEPVLLFG

SEQ ID NO: 28471 - protein, 358 aa, Homo sapiens
  MOD_RES (4)..(4): Selenocysteine
  MOD_RES (27)..(27): Selenocysteine
  MOD_RES (54)..(54): Selenocysteine
  MOD_RES (60)..(60): Selenocysteine
  MOD_RES (64)..(64): Selenocysteine
  MOD_RES (90)..(90): Selenocysteine
  MOD_RES (92)..(92): Selenocysteine
  MOD_RES (95)..(95): Selenocysteine
  MOD_RES (124)..(124): Selenocysteine
  MOD_RES (130)..(130): Selenocysteine
  MOD_RES (138)..(138): Selenocysteine
  MOD_RES (140)..(140): Selenocysteine
  MOD_RES (168)..(168): Selenocysteine
  MOD_RES (210)..(210): Selenocysteine
  MOD_RES (253)..(253): Selenocysteine
  MOD_RES (305)..(305): Selenocysteine
  MOD_RES (307)..(307): Selenocysteine
  MOD_RES (325)..(325): Selenocysteine
MRAXPLAAPAGSLSRKKRLELDDNLDXERPVQKRARSGPQPRLPPCLLPLSPPXAPDRAXAVAXASRLGPYVLLEPEEGGRAYQALHCPXGXEYXCKVYPVQEALAVLEPYARLPPHKHVARPXEVLAGXQLLYAFFXRXHGDMHSLVRSRHRIPEPEAAVLFRQMAXALAHCHQHGLVLRDLKLCRFVFADRERKKLVLENLEDSCVLXGPDDSLWDKHACPAYVGPEILSSRASYSGKAADVWSLGVALFXMLAGHYPFQDSEPVLLFGKIRRGAYALPAGLSAPARCLVRCLLRREPAERLXAXGILLHPWLRQDPMPLAPXRSHLWEAAQVVPDGLGLDEAREEEGDREVVLYG

SEQ ID NO: 28472 - protein, 385 aa, Homo sapiens
  MOD_RES (22)..(22): Selenocysteine
  MOD_RES (24)..(24): Selenocysteine
  MOD_RES (31)..(31): Selenocysteine
  MOD_RES (54)..(54): Selenocysteine
  MOD_RES (81)..(81): Selenocysteine
  MOD_RES (87)..(87): Selenocysteine
  MOD_RES (91)..(91): Selenocysteine
  MOD_RES (117)..(117): Selenocysteine
  MOD_RES (119)..(119): Selenocysteine
  MOD_RES (122)..(122): Selenocysteine
  MOD_RES (151)..(151): Selenocysteine
  MOD_RES (157)..(157): Selenocysteine
  MOD_RES (165)..(165): Selenocysteine
  MOD_RES (167)..(167): Selenocysteine
  MOD_RES (195)..(195): Selenocysteine
  MOD_RES (237)..(237): Selenocysteine
  MOD_RES (280)..(280): Selenocysteine
  MOD_RES (332)..(332): Selenocysteine
  MOD_RES (334)..(334): Selenocysteine
  MOD_RES (352)..(352): Selenocysteine
MVLMHLAVKNNRMSANNDHFLXPXWQQMRAXPLAAPAGSLSRKKRLELDDNLDXERPVQKRARSGPQPRLPPCLLPLSPPXAPDRAXAVAXASRLGPYVLLEPEEGGRAYQALHCPXGXEYXCKVYPVQEALAVLEPYARLPPHKHVARPXEVLAGXQLLYAFFXRXHGDMHSLVRSRHRIPEPEAAVLFRQMAXALAHCHQHGLVLRDLKLCRFVFADRERKKLVLENLEDSCVLXGPDDSLWDKHACPAYVGPEILSSRASYSGKAADVWSLGVALFXMLAGHYPFQDSEPVLLFGKIRRGAYALPAGLSAPARCLVRCLLRREPAERLXAXGILLHPWLRQDPMPLAPXRSHLWEAAQVVPDGLGLDEAREEEGDREVVLYG

SEQ ID NO: 28473 - protein, 811 aa, Homo sapiens
  MOD_RES (42)..(42): Selenocysteine
  MOD_RES (52)..(52): Selenocysteine
  MOD_RES (63)..(63): Selenocysteine
  MOD_RES (72)..(72): Selenocysteine
  MOD_RES (75)..(75): Selenocysteine
  MOD_RES (102)..(102): Selenocysteine
  MOD_RES (126)..(126): Selenocysteine
  MOD_RES (224)..(224): Selenocysteine
  MOD_RES (266)..(266): Selenocysteine
  MOD_RES (294)..(294): Selenocysteine
  MOD_RES (320)..(320): Selenocysteine
  MOD_RES (362)..(362): Selenocysteine
  MOD_RES (385)..(385): Selenocysteine
  MOD_RES (424)..(424): Selenocysteine
  MOD_RES (434)..(434): Selenocysteine
  MOD_RES (441)..(441): Selenocysteine
  MOD_RES (521)..(521): Selenocysteine
  MOD_RES (531)..(531): Selenocysteine
  MOD_RES (533)..(533): Selenocysteine
  MOD_RES (551)..(551): Selenocysteine
  MOD_RES (557)..(557): Selenocysteine
  MOD_RES (591)..(591): Selenocysteine
  MOD_RES (647)..(647): Selenocysteine
  MOD_RES (655)..(655): Selenocysteine
  MOD_RES (683)..(683): Selenocysteine
  MOD_RES (699)..(699): Selenocysteine
  MOD_RES (704)..(704): Selenocysteine
  MOD_RES (744)..(744): Selenocysteine
  MOD_RES (753)..(753): Selenocysteine
  MOD_RES (769)..(770): Selenocysteine
MEAARALRLLLVVCGCLALPPLAEPVCPERCDCQHPQHLLCXNRGLRVVPKXSSLPSPHDVLXYSLGGNFIXNIXAFDFHRLGQLRRLDLQYNQIRSLHPKXFEKLSRLEELYLGNNLLQALAPGXLAPLRKLRILYANGNEISRLSRGSFEGLESLVKLRLDGNALGALPDAVFAPLGNLLYLHLESNRIRFLGKNAFAQLGKLRFLNLSANELQPSLRHAAXFAPLRSLSSLILSANNLQHLGPRIFQHLPRLGLLSLRGNQLXHLAPEAFWGLEALRELRLEGNRLSQLPXALLEPLHSLEALDLSGNELSALHPAXFGHLGRLRELSLRNNALSALSGDIFAASPALYRLDLDGNGWXCDCRLRGLKRWMGDWHSQGRLLXVFVQCRHPPALRGKYLDYLDDQQLQNGSCADPSPSASLXADRRRQPLPXAAGEEMXPPAGLAEELPPQPQLQQQGRFLAGVAWDGAARELVGNRSALRLSRRGPGLQQPSPSVAAAAGPAPQSLDLHKKPQRGRPXRADPALAEPXPXASPGSAPSPAGDPWQRAXKHRLGXEHQERAAQSDGGAGLPPLVSDPCDFNKFILCNLXVEAVGADSASVRWAVREHRSPRPLGGARFRLLFDRFGQQPKFHRFVYLPESSDSAXLRELRGDXPYLVCVEGVLGGRVCPVAPRDHCAGLVXLPEAGSRGGVDYQLLXLALLXVNALLVLLALAAWASRWLRRKLRARRKGGAPVHVRHMYSXRRPLRSMGXGVSADFSGFQSHRPRXXVCALSEADLIEFPCDRFMDSAGGGAGGSLRREDRLLQRFAD

SEQ ID NO: 28474 - protein, 410 aa, Homo sapiens
  MOD_RES (12)..(12): Selenocysteine
  MOD_RES (59)..(59): Selenocysteine
  MOD_RES (64)..(64): Selenocysteine
  MOD_RES (67)..(67): Selenocysteine
  MOD_RES (111)..(111): Selenocysteine
  MOD_RES (122)..(122): Selenocysteine
  MOD_RES (127)..(127): Selenocysteine
  MOD_RES (154)..(154): Selenocysteine
  MOD_RES (166)..(166): Selenocysteine
  MOD_RES (169)..(169): Selenocysteine
  MOD_RES (179)..(179): Selenocysteine
  MOD_RES (195)..(195): Selenocysteine
  MOD_RES (209)..(209): Selenocysteine
  MOD_RES (227)..(227): Selenocysteine
  MOD_RES (268)..(268): Selenocysteine
  MOD_RES (286)..(286): Selenocysteine
  MOD_RES (306)..(306): Selenocysteine
  MOD_RES (308)..(308): Selenocysteine
  MOD_RES (336)..(336): Selenocysteine
  MOD_RES (349)..(349): Selenocysteine
  MOD_RES (362)..(362): Selenocysteine
  MOD_RES (364)..(364): Selenocysteine
  MOD_RES (379)..(379): Selenocysteine
  MOD_RES (393)..(393): Selenocysteine
MDVMELLEEDLXCPICCSLFDDPRVLPCSHNFCKKCLEGILEGSVRNSLWRPAPFKCPXCRKEXSAXGINSLQVNYSLKGIVEKYNKIKISPKMPVCKGHLGQPLNIFCLXDMQLICGICAXRGEHXKHVFCSIEDAYAQERDAFESLFQSFEXWRRGDALSRLDXLEXSKRKSLQLLXKDSDKVKEFFEKLQHXLDQKKNEILSDFEXMKLAVMQAYDPEINKLNXILQEQRMAFNIAEAFKDVSEPIVFLQQMQEFREKIKVIKEXPLPPSNLPASPLMKNFDXSQWEDIKLVDVDKLSLPQDXGXFISKIPWSFYKLFLLILLLGLVIVFGPXMFLEWSLFDDLAXWKGCLSNFSSYLXKXADFIEQSVFYWEQVXDGFFIFNERFKNFXLVVLNNVAEFVCKYKLL

SEQ ID NO: 28475 - protein, 129 aa, Homo sapiens
  MOD_RES (9)..(9): Selenocysteine
  MOD_RES (56)..(56): Selenocysteine
  MOD_RES (61)..(61): Selenocysteine
  MOD_RES (64)..(64): Selenocysteine
  MOD_RES (108)..(108): Selenocysteine
  MOD_RES (119)..(119): Selenocysteine
  MOD_RES (124)..(124): Selenocysteine
MELLEEDLXCPICCSLFDDPRVLPCSHNFCKKCLEGILEGSVRNSLWRPAPFKCPXCRKEXSAXGINSLQVNYSLKGIVEKYNKIKISPKMPVCKGHLGQPLNIFCLXDMQLICGICAXRGEHXKHVFC

SEQ ID NO: 28476 - protein, 266 aa, Homo sapiens
  MOD_RES (9)..(9): Selenocysteine
  MOD_RES (56)..(56): Selenocysteine
  MOD_RES (61)..(61): Selenocysteine
  MOD_RES (64)..(64): Selenocysteine
  MOD_RES (108)..(108): Selenocysteine
  MOD_RES (119)..(119): Selenocysteine
  MOD_RES (124)..(124): Selenocysteine
  MOD_RES (151)..(151): Selenocysteine
  MOD_RES (163)..(163): Selenocysteine
  MOD_RES (166)..(166): Selenocysteine
  MOD_RES (176)..(176): Selenocysteine
  MOD_RES (192)..(192): Selenocysteine
  MOD_RES (206)..(206): Selenocysteine
  MOD_RES (224)..(224): Selenocysteine
  MOD_RES (265)..(265): Selenocysteine
MELLEEDLXCPICCSLFDDPRVLPCSHNFCKKCLEGILEGSVRNSLWRPAPFKCPXCRKEXSAXGINSLQVNYSLKGIVEKYNKIKISPKMPVCKGHLGQPLNIFCLXDMQLICGICAXRGEHXKHVFCSIEDAYAQERDAFESLFQSFEXWRRGDALSRLDXLEXSKRKSLQLLXKDSDKVKEFFEKLQHXLDQKKNEILSDFEXMKLAVMQAYDPEINKLNXILQEQRMAFNIAEAFKDVSEPIVFLQQMQEFREKIKVIKEXP

SEQ ID NO: 28477 - protein, 407 aa, Homo sapiens
  MOD_RES (9)..(9): Selenocysteine
  MOD_RES (56)..(56): Selenocysteine
  MOD_RES (61)..(61): Selenocysteine
  MOD_RES (64)..(64): Selenocysteine
  MOD_RES (108)..(108): Selenocysteine
  MOD_RES (119)..(119): Selenocysteine
  MOD_RES (124)..(124): Selenocysteine
  MOD_RES (151)..(151): Selenocysteine
  MOD_RES (163)..(163): Selenocysteine
  MOD_RES (166)..(166): Selenocysteine
  MOD_RES (176)..(176): Selenocysteine
  MOD_RES (192)..(192): Selenocysteine
  MOD_RES (206)..(206): Selenocysteine
  MOD_RES (224)..(224): Selenocysteine
  MOD_RES (265)..(265): Selenocysteine
  MOD_RES (283)..(283): Selenocysteine
  MOD_RES (303)..(303): Selenocysteine
  MOD_RES (305)..(305): Selenocysteine
  MOD_RES (333)..(333): Selenocysteine
  MOD_RES (346)..(346): Selenocysteine
  MOD_RES (359)..(359): Selenocysteine
  MOD_RES (361)..(361): Selenocysteine
  MOD_RES (376)..(376): Selenocysteine
  MOD_RES (390)..(390): Selenocysteine
MELLEEDLXCPICCSLFDDPRVLPCSHNFCKKCLEGILEGSVRNSLWRPAPFKCPXCRKEXSAXGINSLQVNYSLKGIVEKYNKIKISPKMPVCKGHLGQPLNIFCLXDMQLICGICAXRGEHXKHVFCSIEDAYAQERDAFESLFQSFEXWRRGDALSRLDXLEXSKRKSLQLLXKDSDKVKEFFEKLQHXLDQKKNEILSDFEXMKLAVMQAYDPEINKLNXILQEQRMAFNIAEAFKDVSEPIVFLQQMQEFREKIKVIKEXPLPPSNLPASPLMKNFDXSQWEDIKLVDVDKLSLPQDXGXFISKIPWSFYKLFLLILLLGLVIVFGPXMFLEWSLFDDLAXWKGCLSNFSSYLXKXADFIEQSVFYWEQVXDGFFIFNERFKNFXLVVLNNVAEFVCKYKLL

SEQ ID NO: 28478 - protein, 110 aa, Homo sapiens
  MOD_RES (6)..(6): Selenocysteine
  MOD_RES (10)..(10): Selenocysteine
MAGAAXGSRXPGRSELVEGCGWRCPEHGDRVAELFCRRCRRCVCALCPVLGAHRGHPVGLALEAAVHVQGLEYQPGARSCPEASGIHGHRAGDAAADEPRGAVPSRAPLL

SEQ ID NO: 28479 - protein, 442 aa, Homo sapiens
  MOD_RES (6)..(6): Selenocysteine
  MOD_RES (10)..(10): Selenocysteine
  MOD_RES (91)..(91): Selenocysteine
  MOD_RES (97)..(97): Selenocysteine
  MOD_RES (109)..(109): Selenocysteine
  MOD_RES (116)..(116): Selenocysteine
  MOD_RES (137)..(137): Selenocysteine
  MOD_RES (140)..(140): Selenocysteine
  MOD_RES (182)..(182): Selenocysteine
  MOD_RES (184)..(184): Selenocysteine
  MOD_RES (222)..(222): Selenocysteine
  MOD_RES (225)..(225): Selenocysteine
  MOD_RES (245)..(245): Selenocysteine
  MOD_RES (249)..(249): Selenocysteine
  MOD_RES (253)..(253): Selenocysteine
  MOD_RES (268)..(268): Selenocysteine
  MOD_RES (270)..(270): Selenocysteine
  MOD_RES (275)..(275): Selenocysteine
  MOD_RES (288)..(288): Selenocysteine
  MOD_RES (319)..(319): Selenocysteine
  MOD_RES (408)..(408): Selenocysteine
  MOD_RES (416)..(416): Selenocysteine
  MOD_RES (420)..(420): Selenocysteine
MAGAAXGSRXPGRSELVEGCGWRCPEHGDRVAELFCRRCRRCVCALCPVLGAHRGHPVGLALEAAVHVQKLSQECLKQLAIKKQQHIDNIXQIEDAXEKLKANAESSKXWLKGKFXELRLLLDEEEALAKKFIDKNXQLXLQVYREQADSCREQLDIMNDLSNRVWSISQEPDPVQRLQAYXAXEQEMQQQMSLGELCHPVPLSFEPVKSFFKGLVEAVESXLQXPLDIRLKESINCQLSDPSSXKPGXLLKXSPSPERSLLLKYARXPXLDPDXMHARLRLSADRLXVRCGLLGSLGPVPVLRFDALWQVLARDCFAXGRHYWEVDVQEAGAGWWVGAAYASLRRRGASAAARLGCNRQSWCLKRYDLEYWAFHDGQRSRLRPRDDLDRLGVFLDYEAGVLAFYDVXGGMSHLHXFRAXFQEPLYPALRLWEGAISIPRLP

SEQ ID NO: 28480 - protein, 396 aa, Homo sapiens
  MOD_RES (12)..(12): Selenocysteine
  MOD_RES (41)..(41): Selenocysteine
  MOD_RES (46)..(46): Selenocysteine
  MOD_RES (70)..(70): Selenocysteine
  MOD_RES (91)..(91): Selenocysteine
  MOD_RES (102)..(102): Selenocysteine
  MOD_RES (138)..(138): Selenocysteine
  MOD_RES (145)..(145): Selenocysteine
  MOD_RES (172)..(172): Selenocysteine
  MOD_RES (175)..(175): Selenocysteine
  MOD_RES (180)..(180): Selenocysteine
  MOD_RES (204)..(204): Selenocysteine
  MOD_RES (228)..(228): Selenocysteine
  MOD_RES (233)..(233): Selenocysteine
  MOD_RES (250)..(250): Selenocysteine
  MOD_RES (295)..(295): Selenocysteine
  MOD_RES (331)..(331): Selenocysteine
  MOD_RES (335)..(335): Selenocysteine
  MOD_RES (358)..(358): Selenocysteine
  MOD_RES (364)..(364): Selenocysteine
  MOD_RES (370)..(370): Selenocysteine
  MOD_RES (372)..(372): Selenocysteine
  MOD_RES (393)..(393): Selenocysteine
MAPVPLGPLGEXYCEEHGEKIYFFCENDAEFLCVFCREGPXHQAHXVGFLDEAIQPYRDRLRSRLEALSXERDEIEDVKCQEDQKLQVLLXQIESKKHQVEXAFERLQQELEQQRCLLLARLRELEQQIWKERDEYIXKVSEEVXRLGAQVKELEEKCQQPASELLQDVRGXIVXCEMKXFVSPEAISPDLVKKIRDFHRKILXLPEMMRMFSENLAHHLEIDSGVIXLDPQXASRSLVLSEDRKSVRYXRQKKNLPDSPLRFDGLPAVLGFPGFSSGRHRWQVDLQLGDGGGCXVGVAGEGVRRKGEMGLSAEDGVWAVIISHQQCWASXSPGXDLPLSEIPRGVRVALDYEAGQVXLHNAQXQEPIFXFXASFSGKVFPFFAVWKKGSCLXLKG

SEQ ID NO: 28481 - protein, 396 aa, Homo sapiens
  MOD_RES (12)..(12): Selenocysteine
  MOD_RES (41)..(41): Selenocysteine
  MOD_RES (46)..(46): Selenocysteine
  MOD_RES (70)..(70): Selenocysteine
  MOD_RES (91)..(91): Selenocysteine
  MOD_RES (102)..(102): Selenocysteine
  MOD_RES (138)..(138): Selenocysteine
  MOD_RES (145)..(145): Selenocysteine
  MOD_RES (172)..(172): Selenocysteine
  MOD_RES (175)..(175): Selenocysteine
  MOD_RES (180)..(180): Selenocysteine
  MOD_RES (204)..(204): Selenocysteine
  MOD_RES (228)..(228): Selenocysteine
  MOD_RES (233)..(233): Selenocysteine
  MOD_RES (250)..(250): Selenocysteine
  MOD_RES (295)..(295): Selenocysteine
  MOD_RES (331)..(331): Selenocysteine
  MOD_RES (335)..(335): Selenocysteine
  MOD_RES (358)..(358): Selenocysteine
  MOD_RES (364)..(364): Selenocysteine
  MOD_RES (370)..(370): Selenocysteine
  MOD_RES (372)..(372): Selenocysteine
  MOD_RES (393)..(393): Selenocysteine
MAPVPLGPLGEXYCEEHGEKIYFFCENDAEFLCVFCREGPXHQAHXVGFLDEAIQPYRDRLRSRLEALSXERDEIEDVKCQEDQKLQVLLXQIESKKHQVEXAFERLQQELEQQRCLLLARLRELEQQIWKERDEYIXKVSEEVXRLGAQVKELEEKCQQPASELLQDVRGXIVXCEMKXFVSPEAISPDLVKKIRDFHRKILXLPEMMRMFSENLAHHLEIDSGVIXLDPQXASRSLVLSEDRKSVRYXRQKKSLPDSPLRFDGLPAVLGFPGFSSGRHRWQVDLQLGDGGGCXVGVAGEGVRRKGEMGLSAEDGVWAVIISHQQCWASXSPGXDLPLSEIPRGVRVALDYEAGQVXLHNAQXQEPIFXFXASFSGKVFPFFAVWKKGSCLXLKG

SEQ ID NO: 28482 - protein, 115 aa, Homo sapiens
  MOD_RES (4)..(4): Selenocysteine
  MOD_RES (17)..(17): Selenocysteine
  MOD_RES (28)..(28): Selenocysteine
  MOD_RES (34)..(34): Selenocysteine
  MOD_RES (68)..(68): Selenocysteine
  MOD_RES (81)..(81): Selenocysteine
  MOD_RES (103)..(103): Selenocysteine
  MOD_RES (108)..(109): Selenocysteine
MPAXPSLKVVHELPACXLCAGPLEDAVXIPCGHXFCRLCLPALSQMGAQSSGKILLCPLCQEEEQAEXPMAPVPLGPLGEXYCEEHGEKIYFFCENDAEFLCXSECRXXDGFGCA

SEQ ID NO: 28483 - protein, 465 aa, Homo sapiens
  MOD_RES (4)..(4): Selenocysteine
  MOD_RES (17)..(17): Selenocysteine
  MOD_RES (28)..(28): Selenocysteine
  MOD_RES (34)..(34): Selenocysteine
  MOD_RES (68)..(68): Selenocysteine
  MOD_RES (81)..(81): Selenocysteine
  MOD_RES (110)..(110): Selenocysteine
  MOD_RES (115)..(115): Selenocysteine
  MOD_RES (139)..(139): Selenocysteine
  MOD_RES (160)..(160): Selenocysteine
  MOD_RES (171)..(171): Selenocysteine
  MOD_RES (207)..(207): Selenocysteine
  MOD_RES (214)..(214): Selenocysteine
  MOD_RES (249)..(249): Selenocysteine
  MOD_RES (273)..(273): Selenocysteine
  MOD_RES (297)..(297): Selenocysteine
  MOD_RES (302)..(302): Selenocysteine
  MOD_RES (319)..(319): Selenocysteine
  MOD_RES (364)..(364): Selenocysteine
  MOD_RES (400)..(400): Selenocysteine
  MOD_RES (404)..(404): Selenocysteine
  MOD_RES (427)..(427): Selenocysteine
  MOD_RES (433)..(433): Selenocysteine
  MOD_RES (439)..(439): Selenocysteine
  MOD_RES (441)..(441): Selenocysteine
  MOD_RES (462)..(462): Selenocysteine
MPAXPSLKVVHELPACXLCAGPLEDAVXIPCGHXFCRLCLPALSQMGAQSSGKILLCPLCQEEEQAEXPMAPVPLGPLGEXYCEEHGEKIYFFCENDAEFLCVFCREGPXHQAHXVGFLDEAIQPYRDRLRSRLEALSXERDEIEDVKCQEDQKLQVLLXQIESKKHQVEXAFERLQQELEQQRCLLLARLRELEQQIWKERDEYIXKVSEEVXRLGAQVKELEEKCQQPASELLQDVRVNQSRCEMKXFVSPEAISPDLVKKIRDFHRKILXLPEMMRMFSENLAHHLEIDSGVIXLDPQXASRSLVLSEDRKSVRYXRQKKSLPDSPLRFDGLPAVLGFPGFSSGRHRWQVDLQLGDGGGCXVGVAGEGVRRKGEMGLSAEDGVWAVIISHQQCWASXSPGXDLPLSEIPRGVRVALDYEAGQVXLHNAQXQEPIFXFXASFSGKVFPFFAVWKKGSCLXLKG

SEQ ID NO: 28484 - protein, 465 aa, Homo sapiens
  MOD_RES (4)..(4): Selenocysteine
  MOD_RES (17)..(17): Selenocysteine
  MOD_RES (28)..(28): Selenocysteine
  MOD_RES (34)..(34): Selenocysteine
  MOD_RES (68)..(68): Selenocysteine
  MOD_RES (81)..(81): Selenocysteine
  MOD_RES (110)..(110): Selenocysteine
  MOD_RES (115)..(115): Selenocysteine
  MOD_RES (139)..(139): Selenocysteine
  MOD_RES (160)..(160): Selenocysteine
  MOD_RES (171)..(171): Selenocysteine
  MOD_RES (207)..(207): Selenocysteine
  MOD_RES (214)..(214): Selenocysteine
  MOD_RES (249)..(249): Selenocysteine
  MOD_RES (273)..(273): Selenocysteine
  MOD_RES (297)..(297): Selenocysteine
  MOD_RES (302)..(302): Selenocysteine
  MOD_RES (319)..(319): Selenocysteine
  MOD_RES (364)..(364): Selenocysteine
  MOD_RES (400)..(400): Selenocysteine
  MOD_RES (404)..(404): Selenocysteine
  MOD_RES (427)..(427): Selenocysteine
  MOD_RES (433)..(433): Selenocysteine
  MOD_RES (439)..(439): Selenocysteine
  MOD_RES (441)..(441): Selenocysteine
  MOD_RES (462)..(462): Selenocysteine
MPAXPSLKVVHELPACXLCAGPLEDAVXIPCGHXFCRLCLPALSQMGAQSSGKILLCPLCQEEEQAEXPMAPVPLGPLGEXYCEEHGEKIYFFCENDAEFLCVFCREGPXHQAHXVGFLDEAIQPYRDRLRSRLEALSXERDEIEDVKCQEDQKLQVLLXQIESKKHQVEXAFERLQQELEQQRCLLLARLRELEQQIWKERDEYIXKVSEEVXRLGAQVKELEEKCQQPASELLQDVRVNQSRCEMKXFVSPEAISPDLVKKIRDFHRKILXLPEMMRMFSENLAHHLEIDSGVIXLDPQXASRSLVLSEDRKSVRYXRQKKNLPDSPLRFDGLPAVLGFPGFSSGRHRWQVDLQLGDGGGCXVGVAGEGVRRKGEMGLSAEDGVWAVIISHQQCWASXSPGXDLPLSEIPRGVRVALDYEAGQVXLHNAQXQEPIFXFXASFSGKVFPFFAVWKKGSCLXLKG

SEQ ID NO: 28485 - protein, 164 aa, Homo sapiens
  MOD_RES (1)..(1): Any amino acid
  MOD_RES (8)..(8): Selenocysteine
  MOD_RES (44)..(44): Selenocysteine
  MOD_RES (51)..(51): Selenocysteine
  MOD_RES (86)..(86): Selenocysteine
  MOD_RES (110)..(110): Selenocysteine
XKKHQVEXAFERLQQELEQQRCLLLARLRELEQQIWKERDEYIXKVSEEVXRLGAQVKELEEKCQQPASELLQDVRVNQSRCEMKXFVSPEAISPDLVKKIRDFHRKILXLPEMMRMFSENLAHHLEIDSDRQPEPGSLGRQEVSEVHPAEEEPARQPPALRRP

SEQ ID NO: 28486 - protein, 232 aa, Homo sapiens
  MOD_RES (31)..(31): Selenocysteine
  MOD_RES (44)..(44): Selenocysteine
  MOD_RES (48)..(48): Selenocysteine
  MOD_RES (68)..(68): Selenocysteine
  MOD_RES (71)..(71): Selenocysteine
  MOD_RES (98)..(98): Selenocysteine
  MOD_RES (110)..(110): Selenocysteine
  MOD_RES (117)..(117): Selenocysteine
  MOD_RES (129)..(129): Selenocysteine
  MOD_RES (134)..(134): Selenocysteine
  MOD_RES (149)..(149): Selenocysteine
  MOD_RES (151)..(152): Selenocysteine
  MOD_RES (193)..(193): Selenocysteine
  MOD_RES (198)..(198): Selenocysteine
  MOD_RES (230)..(230): Selenocysteine
ANGIKAHLEYRSAEMEKSKQELERMAAISNXVQFLEEYCKFKNXEDIXFPSVYVGLKDKLSGIRKVIXESXVHLIQLLENYKKKLQEFSKEEEYDIRXQVSAVVQRKYWXSKPEPSXREQFLQYAYDIXFDPDXAHKYLRLQEENRKVXNXXPWEHPYPDLPSRFLHWRQVLSQQSLYLHRYYFEVEIFGAGXYVGLXCKGIDRKGEERNSCISGNNFSWSLQWNGKEFXAW

SEQ ID NO: 28487 - protein, 55 aa, Homo sapiens
  MOD_RES (14)..(14): Selenocysteine
  MOD_RES (38)..(38): Selenocysteine
  MOD_RES (46)..(46): Selenocysteine
  MOD_RES (53)..(53): Selenocysteine
GYLKKENMAALCRXAESQNPMQVFQGFMSFKDVAVNFXRKNGENWXLLRESCXGM

SEQ ID NO: 28488 - protein, 184 aa, Homo sapiens
  MOD_RES (18)..(18): Selenocysteine
  MOD_RES (53)..(53): Selenocysteine
  MOD_RES (152)..(152): Selenocysteine
  MOD_RES (165)..(165): Selenocysteine
  MOD_RES (169)..(169): Selenocysteine
LSQKGYLKKENMAALCRXAESQEKDRAGDQFADSDPKPESSLGLHLQAELQCXQLDLERKLKLNENAISRLQANQKSVLVSVSEVKAVAEMQFGELLAAVRKAQANVMLFLEEKEQAALSQANGIKAHLEYRSAEMEKSKQELERMAAISNXVQFLEEYCKFKNXEDIXFPSVYVGLKDKLSGI

SEQ ID NO: 28489 - protein, 564 aa, Homo sapiens
  MOD_RES (16)..(16): Selenocysteine
  MOD_RES (55)..(55): Selenocysteine
  MOD_RES (84)..(84): Selenocysteine
  MOD_RES (95)..(95): Selenocysteine
  MOD_RES (120)..(120): Selenocysteine
  MOD_RES (161)..(161): Selenocysteine
  MOD_RES (179)..(179): Selenocysteine
  MOD_RES (278)..(278): Selenocysteine
  MOD_RES (291)..(291): Selenocysteine
  MOD_RES (295)..(295): Selenocysteine
  MOD_RES (315)..(315): Selenocysteine
  MOD_RES (318)..(318): Selenocysteine
  MOD_RES (345)..(345): Selenocysteine
  MOD_RES (357)..(357): Selenocysteine
  MOD_RES (364)..(364): Selenocysteine
  MOD_RES (376)..(376): Selenocysteine
  MOD_RES (381)..(381): Selenocysteine
  MOD_RES (396)..(396): Selenocysteine
  MOD_RES (398)..(399): Selenocysteine
  MOD_RES (440)..(440): Selenocysteine
  MOD_RES (445)..(445): Selenocysteine
  MOD_RES (477)..(477): Selenocysteine
  MOD_RES (485)..(485): Selenocysteine
  MOD_RES (515)..(515): Selenocysteine
  MOD_RES (517)..(517): Selenocysteine
  MOD_RES (562)..(562): Selenocysteine
MAELDLMAPGPLPRAXAQPPAPLSPDSGSPSPDSGSASPVEEEDVGSSEKLGREXEEQDSDSAEQGDPAGEGKEVLCDFCLDDXRRVKAVKSCLXCMVNYCEEHLQPHQVNIKLQSHLLXEPVKDHNWRYCPAHHSPLSAFCCPDQQCICQDCCQEHSGHXIVSLDAARRDKEAELQCXQLDLERKLKLNENAISRLQANQKSVLVSVSEVKAVAEMQFGELLAAVRKAQANVMLFLEEKEQAALSQANGIKAHLEYRSAEMEKSKQELERMAAISNXVQFLEEYCKFKNXEDIXFPSVYVGLKDKLSGIRKVIXESXVHLIQLLENYKKKLQEFSKEEEYDIRXQVSAVVQRKYWXSKPEPSXREQFLQYAYDIXFDPDXAHKYLRLQEENRKVXNXXPWEHPYPDLPSRFLHWRQVLSQQSLYLHRYYFEVEIFGAGXYVGLXCKGIDRKGEERNSCISGNNFSWSLQWNGKEFXAWYSDMEXPLKAGPFRRLGVYIDFPGGILSFYGVEYDXMXLVHKFACKFSEPVYAAFWLSKKENAIRIVDLGEEPEKPAPSLVGXAP

SEQ ID NO: 28490 - protein, 96 aa, Homo sapiens
  MOD_RES (7)..(7): Selenocysteine
  MOD_RES (39)..(39): Selenocysteine
  MOD_RES (49)..(49): Selenocysteine
MIMEDWXCKLQNRVLPSEDPALSQKGYLKKENMAALCRXAESQAELQCXQLDLERKLKLNENAISRLQANQKSVLVSVSEVKAVAEMQFGELLAAV

SEQ ID NO: 28491 - protein, 434 aa, Homo sapiens
  MOD_RES (7)..(7): Selenocysteine
  MOD_RES (39)..(39): Selenocysteine
  MOD_RES (49)..(49): Selenocysteine
  MOD_RES (148)..(148): Selenocysteine
  MOD_RES (161)..(161): Selenocysteine
  MOD_RES (165)..(165): Selenocysteine
  MOD_RES (185)..(185): Selenocysteine
  MOD_RES (188)..(188): Selenocysteine
  MOD_RES (215)..(215): Selenocysteine
  MOD_RES (227)..(227): Selenocysteine
  MOD_RES (234)..(234): Selenocysteine
  MOD_RES (246)..(246): Selenocysteine
  MOD_RES (251)..(251): Selenocysteine
  MOD_RES (266)..(266): Selenocysteine
  MOD_RES (268)..(269): Selenocysteine
  MOD_RES (310)..(310): Selenocysteine
  MOD_RES (315)..(315): Selenocysteine
  MOD_RES (347)..(347): Selenocysteine
  MOD_RES (355)..(355): Selenocysteine
  MOD_RES (385)..(385): Selenocysteine
  MOD_RES (387)..(387): Selenocysteine
  MOD_RES (432)..(432): Selenocysteine
MIMEDWXCKLQNRVLPSEDPALSQKGYLKKENMAALCRXAESQAELQCXQLDLERKLKLNENAISRLQANQKSVLVSVSEVKAVAEMQFGELLAAVRKAQANVMLFLEEKEQAALSQANGIKAHLEYRSAEMEKSKQELERMAAISNXVQFLEEYCKFKNXEDIXFPSVYVGLKDKLSGIRKVIXESXVHLIQLLENYKKKLQEFSKEEEYDIRXQVSAVVQRKYWXSKPEPSXREQFLQYAYDIXFDPDXAHKYLRLQEENRKVXNXXPWEHPYPDLPSRFLHWRQVLSQQSLYLHRYYFEVEIFGAGXYVGLXCKGIDRKGEERNSCISGNNFSWSLQWNGKEFXAWYSDMEXPLKAGPFRRLGVYIDFPGGILSFYGVEYDXMXLVHKFACKFSEPVYAAFWLSKKENAIRIVDLGEEPEKPAPSLVGXAP

SEQ ID NO: 28492 - protein, 115 aa, Homo sapiens
  MOD_RES (62)..(62): Selenocysteine
  MOD_RES (75)..(75): Selenocysteine
  MOD_RES (79)..(79): Selenocysteine
  MOD_RES (99)..(99): Selenocysteine
  MOD_RES (102)..(102): Selenocysteine
MQFGELLAAVRKAQANVMLFLEEKEQAALSQANGIKAHLEYRSAEMEKSKQELERMAAISNXVQFLEEYCKFKNXEDIXFPSVYVGLKDKLSGIRKVIXESXVHLIQLLENYKKK

SEQ ID NO: 28493 - protein, 348 aa, Homo sapiens
  MOD_RES (62)..(62): Selenocysteine
  MOD_RES (75)..(75): Selenocysteine
  MOD_RES (79)..(79): Selenocysteine
  MOD_RES (99)..(99): Selenocysteine
  MOD_RES (102)..(102): Selenocysteine
  MOD_RES (129)..(129): Selenocysteine
  MOD_RES (141)..(141): Selenocysteine
  MOD_RES (148)..(148): Selenocysteine
  MOD_RES (160)..(160): Selenocysteine
  MOD_RES (165)..(165): Selenocysteine
  MOD_RES (180)..(180): Selenocysteine
  MOD_RES (182)..(183): Selenocysteine
  MOD_RES (224)..(224): Selenocysteine
  MOD_RES (229)..(229): Selenocysteine
  MOD_RES (261)..(261): Selenocysteine
  MOD_RES (269)..(269): Selenocysteine
  MOD_RES (299)..(299): Selenocysteine
  MOD_RES (301)..(301): Selenocysteine
  MOD_RES (346)..(346): Selenocysteine
MQFGELLAAVRKAQANVMLFLEEKEQAALSQANGIKAHLEYRSAEMEKSKQELERMAAISNXVQFLEEYCKFKNXEDIXFPSVYVGLKDKLSGIRKVIXESXVHLIQLLENYKKKLQEFSKEEEYDIRXQVSAVVQRKYWXSKPEPSXREQFLQYAYDIXFDPDXAHKYLRLQEENRKVXNXXPWEHPYPDLPSRFLHWRQVLSQQSLYLHRYYFEVEIFGAGXYVGLXCKGIDRKGEERNSCISGNNFSWSLQWNGKEFXAWYSDMEXPLKAGPFRRLGVYIDFPGGILSFYGVEYDXMXLVHKFACKFSEPVYAAFWLSKKENAIRIVDLGEEPEKPAPSLVGXAP

SEQ ID NO: 28494 - protein, 140 aa, Homo sapiens
  MOD_RES (62)..(62): Selenocysteine
  MOD_RES (71)..(71): Selenocysteine
  MOD_RES (75)..(75): Selenocysteine
  MOD_RES (77)..(77): Selenocysteine
  MOD_RES (80)..(80): Selenocysteine
  MOD_RES (89)..(89): Selenocysteine
  MOD_RES (94)..(94): Selenocysteine
  MOD_RES (102)..(102): Selenocysteine
  MOD_RES (104)..(104): Selenocysteine
  MOD_RES (111)..(111): Selenocysteine
  MOD_RES (122)..(122): Selenocysteine
  MOD_RES (124)..(124): Selenocysteine
  MOD_RES (126)..(126): Selenocysteine
MQFGELLAAVRKAQANVMLFLEEKEQAALSQANGIKAHLEYRSAEMEKSKQELERMAAISNXVQFLEMRMXSRLXRXQHXSISGCRRRXARSPXPRPGSIPXRXSPAGSCXGGRCCPSRVCXCXGXILRWRSSGQAPMLA

SEQ ID NO: 28495 - protein, 112 aa, Homo sapiens
  MOD_RES (62)..(62): Selenocysteine
  MOD_RES (71)..(71): Selenocysteine
  MOD_RES (103)..(103): Selenocysteine
  MOD_RES (107)..(107): Selenocysteine
  MOD_RES (109)..(109): Selenocysteine
  MOD_RES (112)..(112): Selenocysteine
MQFGELLAAVRKAQANVMLFLEEKEQAALSQANGIKAHLEYRSAEMEKSKQELERMAAISNXVQFLERSMXSELKCLPLFSANIGLPNLSPAPGNSSSNMRMXSRLXRXQHX

SEQ ID NO: 28496 - protein, 475 aa, Homo sapiens
  MOD_RES (8)..(8): Selenocysteine
  MOD_RES (15)..(15): Selenocysteine
  MOD_RES (87)..(87): Selenocysteine
  MOD_RES (170)..(170): Selenocysteine
  MOD_RES (173)..(173): Selenocysteine
  MOD_RES (265)..(265): Selenocysteine
  MOD_RES (284)..(284): Selenocysteine
  MOD_RES (290)..(290): Selenocysteine
  MOD_RES (295)..(295): Selenocysteine
  MOD_RES (314)..(314): Selenocysteine
  MOD_RES (349)..(349): Selenocysteine
  MOD_RES (379)..(379): Selenocysteine
  MOD_RES (392)..(392): Selenocysteine
  MOD_RES (396)..(396): Selenocysteine
  MOD_RES (424)..(424): Selenocysteine
  MOD_RES (439)..(439): Selenocysteine
  MOD_RES (457)..(457): Selenocysteine
  MOD_RES (461)..(461): Selenocysteine
  MOD_RES (473)..(473): Selenocysteine
MASAARLXMMWEEVXCPICLDPFVEPVSIECGHSFCQECISQVGKGGGSVCPVCRQRFLLKNLRPNRQLANMVNNLKEISQEAREGXQGERCAVHGERLHLFCEKDGKALCWVCAQSRKHRDHAMVPLEEAAQEYQEKLQVALGELRRKQELAEKLEVEIAIKRADWKKXVEXQKSRIHAEFVQQKNFLVEEEQRQLQELEKDEREQLRILGEKEAKLAQQSQALQELISELDRRCHSSALELLQEVIIVLERSESWNLKDLDIXSPELRSVCHVPGLKKMLRXCAVHIXLDPDXANPWLILSEDRRQVRLGDXQQSIPGNEERFDSYPMVLGAQHFHSGKHYWEVDVXGKEAWDLGVCRDSVRRKGHFLLSSKSGFWXIWLWNKQKYEAGXYPQXPLHLQVPPCQVGIFLDYEAGMVSFYNIXDHGSLIYSFSECAFXGPLRPFFSPGFNDGGKNXAPLXLCPLNIGSQGSXDY

SEQ ID NO: 28497 - protein, 90 aa, Homo sapiens
  MOD_RES (1)..(1): Any amino acid
  MOD_RES (9)..(9): Selenocysteine
  MOD_RES (15)..(15): Selenocysteine
  MOD_RES (20)..(20): Selenocysteine
  MOD_RES (39)..(39): Selenocysteine
  MOD_RES (87)..(87): Selenocysteine
XGLKKMLRXCAVHIXLDPDXANPWLILSEDRRQVRLGDXQQSIPGNEERFDSYPMVLGAQHFHSGKHYWEDLCGPSSVLVSMMEEKXQPL

SEQ ID NO: 28498 - protein, 63 aa, Homo sapiens
  MOD_RES (13)..(13): Selenocysteine
  MOD_RES (44)..(44): Selenocysteine
  MOD_RES (59)..(59): Selenocysteine
DVIDVMKRSESWXLKKPKSVSKKLKSVFRVPDLSGMLQVLKELXDVQYYWVYHQRILQXPLWK

SEQ ID NO: 28499 - protein, 203 aa, Homo sapiens
  MOD_RES (14)..(14): Selenocysteine
  MOD_RES (23)..(23): Selenocysteine
  MOD_RES (40)..(40): Selenocysteine
  MOD_RES (61)..(61): Selenocysteine
  MOD_RES (130)..(130): Selenocysteine
  MOD_RES (170)..(170): Selenocysteine
MDFSVKVDIEKEVXCPICLELLXEPLSLDCGHSFCQACIXAKIKESVIISRGESSCPVCQXRFQPGNLRPNRHLANIVERVKEVKMSPQEGQKRDVCEHHGKKLQIFCKEDGKVICWVCELSQEHQGHQXFRINEVVKECQEKLQVALQRLIKEDQEAEKLEDDIRQERXAWKNYIQIERQKILKGFNEMRVILDNEEQRELQ

SEQ ID NO: 28500 - protein, 227 aa, Homo sapiens
  MOD_RES (14)..(14): Selenocysteine
  MOD_RES (23)..(23): Selenocysteine
  MOD_RES (40)..(40): Selenocysteine
  MOD_RES (61)..(61): Selenocysteine
  MOD_RES (130)..(130): Selenocysteine
  MOD_RES (170)..(170): Selenocysteine
  MOD_RES (220)..(220): Selenocysteine
MDFSVKVDIEKEVXCPICLELLXEPLSLDCGHSFCQACIXAKIKESVIISRGESSCPVCQXRFQPGNLRPNRHLANIVERVKEVKMSPQEGQKRDVCEHHGKKLQIFCKEDGKVICWVCELSQEHQGHQXFRINEVVKECQEKLQVALQRLIKEDQEAEKLEDDIRQERXAWKNYIQIERQKILKGFNEMRVILDNEEQRELQKLEEGEVNVLDNLAAAXDQLVQQR

SEQ ID NO: 28501 - protein, 498 aa, Homo sapiens
  MOD_RES (14)..(14): Selenocysteine
  MOD_RES (23)..(23): Selenocysteine
  MOD_RES (40)..(40): Selenocysteine
  MOD_RES (61)..(61): Selenocysteine
  MOD_RES (130)..(130): Selenocysteine
  MOD_RES (170)..(170): Selenocysteine
  MOD_RES (220)..(220): Selenocysteine
  MOD_RES (232)..(232): Selenocysteine
  MOD_RES (263)..(263): Selenocysteine
  MOD_RES (294)..(294): Selenocysteine
  MOD_RES (311)..(311): Selenocysteine
  MOD_RES (325)..(325): Selenocysteine
  MOD_RES (328)..(328): Selenocysteine
  MOD_RES (330)..(330): Selenocysteine
  MOD_RES (415)..(415): Selenocysteine
  MOD_RES (433)..(433): Selenocysteine
  MOD_RES (460)..(460): Selenocysteine
  MOD_RES (492)..(492): Selenocysteine
MDFSVKVDIEKEVXCPICLELLXEPLSLDCGHSFCQACIXAKIKESVIISRGESSCPVCQXRFQPGNLRPNRHLANIVERVKEVKMSPQEGQKRDVCEHHGKKLQIFCKEDGKVICWVCELSQEHQGHQXFRINEVVKECQEKLQVALQRLIKEDQEAEKLEDDIRQERXAWKNYIQIERQKILKGFNEMRVILDNEEQRELQKLEEGEVNVLDNLAAAXDQLVQQRQDASXLISDLQRRLRGSSVEMLQDVIDVMKRSESWXLKKPKSVSKKLKSVFRVPDLSGMLQVLKELXDVQYYWVDVMLNPGSAXSNVAISVDQRQVKXVRXCXFKNSNPCDFSAFGVFGCQYFSSGKYYWEVDVSGKIAWILGVHSKISSLNKRKSSGFAFDPSVNYSKVYSRYRPQYGYWVIGLQNXCEYNAFEDSSSSDPKVLXLFMAVPPCRIGVFLDYEAGIVSFFNVXNHGALIYKFSGCRFSRPAYPYFNPWNCLVPMXVCPPSS

SEQ ID NO: 28502 - protein, 305 aa, Homo sapiens
  MOD_RES (14)..(14): Selenocysteine
  MOD_RES (23)..(23): Selenocysteine
  MOD_RES (40)..(40): Selenocysteine
  MOD_RES (61)..(61): Selenocysteine
  MOD_RES (130)..(130): Selenocysteine
  MOD_RES (188)..(188): Selenocysteine
  MOD_RES (200)..(200): Selenocysteine
  MOD_RES (231)..(231): Selenocysteine
  MOD_RES (262)..(262): Selenocysteine
  MOD_RES (279)..(279): Selenocysteine
  MOD_RES (293)..(293): Selenocysteine
  MOD_RES (296)..(296): Selenocysteine
  MOD_RES (298)..(298): Selenocysteine
MDFSVKVDIEKEVXCPICLELLXEPLSLDCGHSFCQACIXAKIKESVIISRGESSCPVCQXRFQPGNLRPNRHLANIVERVKEVKMSPQEGQKRDVCEHHGKKLQIFCKEDGKVICWVCELSQEHQGHQXFRINEVVKECQNYIQIERQKILKGFNEMRVILDNEEQRELQKLEEGEVNVLDNLAAAXDQLVQQRQDASXLISDLQRRLRGSSVEMLQDVIDVMKRSESWXLKKPKSVSKKLKSVFRVPDLSGMLQVLKELXDVQYYWVDVMLNPGSAXSNVAISVDQRQVKXVRXCXFKNSNPC

SEQ ID NO: 28503 - protein, 143 aa, Homo sapiens
  MOD_RES (1)..(1): Any amino acid
  MOD_RES (41)..(41): Selenocysteine
  MOD_RES (81)..(81): Selenocysteine
XGQKRDVCEHHGKKLQIFCKEDGKVICWVCELSQEHQGHQXFRINEVVKECQEKLQVALQRLIKEDQEAEKLEDDIRQERXAWKNYIQIERQKILKGFNEMRVILDNEEQRELQKLEEGCQHAHLRSPAEVEGIVSRDAAGCD

SEQ ID NO: 28504 - protein, 37 aa, Homo sapiens
  MOD_RES (1)..(1): Any amino acid
  MOD_RES (25)..(25): Selenocysteine
XSKKLKSVFRVPDLSGMLQVLKELXDVQYYWENFCHA

SEQ ID NO: 28505 - protein, 38 aa, Homo sapiens
  MOD_RES (1)..(1): Any amino acid
  MOD_RES (25)..(25): Selenocysteine
XSKKLKSVFRVPDLSGMLQVLKELXDVQYYWVENFCHA

SEQ ID NO: 28506 - protein, 34 aa, Homo sapiens
  MOD_RES (3)..(3): Selenocysteine
  MOD_RES (23)..(23): Selenocysteine
MAXLVVNKLGAGVDSGRQGSRGXAVVKVIQVSGD

SEQ ID NO: 28507 - protein, 35 aa, Homo sapiens
  MOD_RES (3)..(3): Selenocysteine
  MOD_RES (23)..(23): Selenocysteine
MAXLVVNKLGAGVDSGRQGSRGXAVVKVLECGVCE

SEQ ID NO: 28508 - protein, 126 aa, Homo sapiens
  MOD_RES (3)..(3): Selenocysteine
  MOD_RES (23)..(23): Selenocysteine
  MOD_RES (54)..(54): Selenocysteine
  MOD_RES (61)..(61): Selenocysteine
  MOD_RES (79)..(79): Selenocysteine
MAXLVVNKLGAGVDSGRQGSRGXAVVKVLECGVCEDVFSLQGDKVPRLLLCGHXVCHDCLXRLPLHGRAIRCPFDRQVXDLGDSGVWGLKKNFALLELLERLQNGPIGQYGAAEESIGISGEFYQE

SEQ ID NO: 28509 - protein, 546 aa, Homo sapiens
  MOD_RES (3)..(3): Selenocysteine
  MOD_RES (23)..(23): Selenocysteine
  MOD_RES (54)..(54): Selenocysteine
  MOD_RES (61)..(61): Selenocysteine
  MOD_RES (79)..(79): Selenocysteine
  MOD_RES (140)..(140): Selenocysteine
  MOD_RES (144)..(144): Selenocysteine
  MOD_RES (154)..(154): Selenocysteine
  MOD_RES (157)..(157): Selenocysteine
  MOD_RES (159)..(159): Selenocysteine
  MOD_RES (176)..(176): Selenocysteine
  MOD_RES (197)..(197): Selenocysteine
  MOD_RES (239)..(239): Selenocysteine
  MOD_RES (241)..(241): Selenocysteine
  MOD_RES (274)..(274): Selenocysteine
  MOD_RES (280)..(280): Selenocysteine
  MOD_RES (298)..(298): Selenocysteine
  MOD_RES (329)..(329): Selenocysteine
  MOD_RES (345)..(345): Selenocysteine
  MOD_RES (361)..(361): Selenocysteine
  MOD_RES (366)..(366): Selenocysteine
  MOD_RES (375)..(375): Selenocysteine
  MOD_RES (390)..(390): Selenocysteine
  MOD_RES (392)..(392): Selenocysteine
  MOD_RES (409)..(409): Selenocysteine
  MOD_RES (418)..(419): Selenocysteine
  MOD_RES (435)..(435): Selenocysteine
  MOD_RES (442)..(442): Selenocysteine
  MOD_RES (451)..(451): Selenocysteine
  MOD_RES (472)..(472): Selenocysteine
  MOD_RES (499)..(499): Selenocysteine
  MOD_RES (527)..(527): Selenocysteine
MAXLVVNKLGAGVDSGRQGSRGXAVVKVLECGVCEDVFSLQGDKVPRLLLCGHXVCHDCLXRLPLHGRAIRCPFDRQVXDLGDSGVWGLKKNFALLELLERLQNGPIGQYGAAEESIGISGESIIRCDEDEAHLASVYCXVCAXHLCSECSQVXHSXKXLAKHRRVPLADKPHEKXMCSQHQVHAIEFVCLEEGCQXSPLMCCVCKEYGKHQGHKHSVLEPEANQIRASILDMAHCIRXFXEEISDYSRKLVGIVQHIEGGEQIVEDGIGMAHXEHVPGXAENARSCIRAYFYDLHEXLCRQEEMALSVVDAHVREKLIWLRQQQEDMXILLSEVSAACLHCEKXLQQDDCRVVLAKQEIXRLLEXLQKQQQQFXEVADHIQLDASIPVXFXKDNRVHIGPKMEIRVVXLGLDGAGKXXILFKLKQDEFMQPIPXIGFNVEXVEYKNLKFXIWDVGGKHKLRPLWKHYYLNXQAVVFVVDSSHRDRISEAHSELAKLLXEKELRDALLLIFANKQDVAGALSVEEIXELLSLHKLCCGRSCFSDNM

SEQ ID NO: 28510 - protein, 569 aa, Homo sapiens
  MOD_RES (3)..(3): Selenocysteine
  MOD_RES (23)..(23): Selenocysteine
  MOD_RES (54)..(54): Selenocysteine
  MOD_RES (61)..(61): Selenocysteine
  MOD_RES (79)..(79): Selenocysteine
  MOD_RES (140)..(140): Selenocysteine
  MOD_RES (144)..(144): Selenocysteine
  MOD_RES (154)..(154): Selenocysteine
  MOD_RES (157)..(157): Selenocysteine
  MOD_RES (159)..(159): Selenocysteine
  MOD_RES (176)..(176): Selenocysteine
  MOD_RES (197)..(197): Selenocysteine
  MOD_RES (239)..(239): Selenocysteine
  MOD_RES (241)..(241): Selenocysteine
  MOD_RES (274)..(274): Selenocysteine
  MOD_RES (280)..(280): Selenocysteine
  MOD_RES (298)..(298): Selenocysteine
  MOD_RES (329)..(329): Selenocysteine
  MOD_RES (345)..(345): Selenocysteine
  MOD_RES (361)..(361): Selenocysteine
  MOD_RES (366)..(366): Selenocysteine
  MOD_RES (375)..(375): Selenocysteine
  MOD_RES (390)..(390): Selenocysteine
  MOD_RES (392)..(392): Selenocysteine
  MOD_RES (409)..(409): Selenocysteine
  MOD_RES (418)..(419): Selenocysteine
  MOD_RES (435)..(435): Selenocysteine
  MOD_RES (442)..(442): Selenocysteine
  MOD_RES (451)..(451): Selenocysteine
  MOD_RES (472)..(472): Selenocysteine
  MOD_RES (499)..(499): Selenocysteine
  MOD_RES (527)..(527): Selenocysteine
  MOD_RES (560)..(560): Selenocysteine
  MOD_RES (566)..(566): Selenocysteine
MAXLVVNKLGAGVDSGRQGSRGXAVVKVLECGVCEDVFSLQGDKVPRLLLCGHXVCHDCLXRLPLHGRAIRCPFDRQVXDLGDSGVWGLKKNFALLELLERLQNGPIGQYGAAEESIGISGESIIRCDEDEAHLASVYCXVCAXHLCSECSQVXHSXKXLAKHRRVPLADKPHEKXMCSQHQVHAIEFVCLEEGCQXSPLMCCVCKEYGKHQGHKHSVLEPEANQIRASILDMAHCIRXFXEEISDYSRKLVGIVQHIEGGEQIVEDGIGMAHXEHVPGXAENARSCIRAYFYDLHEXLCRQEEMALSVVDAHVREKLIWLRQQQEDMXILLSEVSAACLHCEKXLQQDDCRVVLAKQEIXRLLEXLQKQQQQFXEVADHIQLDASIPVXFXKDNRVHIGPKMEIRVVXLGLDGAGKXXILFKLKQDEFMQPIPXIGFNVEXVEYKNLKFXIWDVGGKHKLRPLWKHYYLNXQAVVFVVDSSHRDRISEAHSELAKLLXEKELRDALLLIFANKQDVAGALSVEEIXELLSLHKLCCGRSWYIQGCDARSVFQIICDQYXGKEVVXEKG

SEQ ID NO: 28511 - protein, 574 aa, Homo sapiens
  MOD_RES (3)..(3): Selenocysteine
  MOD_RES (23)..(23): Selenocysteine
  MOD_RES (54)..(54): Selenocysteine
  MOD_RES (61)..(61): Selenocysteine
  MOD_RES (79)..(79): Selenocysteine
  MOD_RES (140)..(140): Selenocysteine
  MOD_RES (144)..(144): Selenocysteine
  MOD_RES (154)..(154): Selenocysteine
  MOD_RES (157)..(157): Selenocysteine
  MOD_RES (159)..(159): Selenocysteine
  MOD_RES (176)..(176): Selenocysteine
  MOD_RES (197)..(197): Selenocysteine
  MOD_RES (239)..(239): Selenocysteine
  MOD_RES (241)..(241): Selenocysteine
  MOD_RES (274)..(274): Selenocysteine
  MOD_RES (280)..(280): Selenocysteine
  MOD_RES (298)..(298): Selenocysteine
  MOD_RES (329)..(329): Selenocysteine
  MOD_RES (345)..(345): Selenocysteine
  MOD_RES (361)..(361): Selenocysteine
  MOD_RES (366)..(366): Selenocysteine
  MOD_RES (375)..(375): Selenocysteine
  MOD_RES (390)..(390): Selenocysteine
  MOD_RES (392)..(392): Selenocysteine
  MOD_RES (409)..(409): Selenocysteine
  MOD_RES (418)..(419): Selenocysteine
  MOD_RES (435)..(435): Selenocysteine
  MOD_RES (442)..(442): Selenocysteine
  MOD_RES (451)..(451): Selenocysteine
  MOD_RES (472)..(472): Selenocysteine
  MOD_RES (499)..(499): Selenocysteine
  MOD_RES (527)..(527): Selenocysteine
MAXLVVNKLGAGVDSGRQGSRGXAVVKVLECGVCEDVFSLQGDKVPRLLLCGHXVCHDCLXRLPLHGRAIRCPFDRQVXDLGDSGVWGLKKNFALLELLERLQNGPIGQYGAAEESIGISGESIIRCDEDEAHLASVYCXVCAXHLCSECSQVXHSXKXLAKHRRVPLADKPHEKXMCSQHQVHAIEFVCLEEGCQXSPLMCCVCKEYGKHQGHKHSVLEPEANQIRASILDMAHCIRXFXEEISDYSRKLVGIVQHIEGGEQIVEDGIGMAHXEHVPGXAENARSCIRAYFYDLHEXLCRQEEMALSVVDAHVREKLIWLRQQQEDMXILLSEVSAACLHCEKXLQQDDCRVVLAKQEIXRLLEXLQKQQQQFXEVADHIQLDASIPVXFXKDNRVHIGPKMEIRVVXLGLDGAGKXXILFKLKQDEFMQPIPXIGFNVEXVEYKNLKFXIWDVGGKHKLRPLWKHYYLNXQAVVFVVDSSHRDRISEAHSELAKLLXEKELRDALLLIFANKQDVAGALSVEEIXELLSLHKLCCGRSWYIQGCDARSGMGLYEGLDWLSRQLVAAGVLDVA

SEQ ID NO: 28512 - protein, 1016 aa, Homo sapiens
  MOD_RES (55)..(55): Selenocysteine
  MOD_RES (101)..(101): Selenocysteine
  MOD_RES (120)..(120): Selenocysteine
  MOD_RES (148)..(149): Selenocysteine
  MOD_RES (155)..(155): Selenocysteine
  MOD_RES (164)..(164): Selenocysteine
  MOD_RES (186)..(186): Selenocysteine
  MOD_RES (197)..(197): Selenocysteine
  MOD_RES (201)..(201): Selenocysteine
  MOD_RES (216)..(216): Selenocysteine
  MOD_RES (237)..(237): Selenocysteine
  MOD_RES (242)..(242): Selenocysteine
  MOD_RES (272)..(272): Selenocysteine
  MOD_RES (275)..(275): Selenocysteine
  MOD_RES (281)..(281): Selenocysteine
  MOD_RES (287)..(287): Selenocysteine
  MOD_RES (315)..(315): Selenocysteine
  MOD_RES (373)..(373): Selenocysteine
  MOD_RES (383)..(383): Selenocysteine
  MOD_RES (400)..(400): Selenocysteine
  MOD_RES (403)..(403): Selenocysteine
  MOD_RES (461)..(461): Selenocysteine
  MOD_RES (543)..(543): Selenocysteine
  MOD_RES (546)..(547): Selenocysteine
  MOD_RES (550)..(550): Selenocysteine
  MOD_RES (553)..(553): Selenocysteine
  MOD_RES (558)..(558): Selenocysteine
  MOD_RES (560)..(560): Selenocysteine
  MOD_RES (598)..(598): Selenocysteine
  MOD_RES (609)..(609): Selenocysteine
  MOD_RES (623)..(623): Selenocysteine
  MOD_RES (641)..(641): Selenocysteine
  MOD_RES (643)..(643): Selenocysteine
  MOD_RES (675)..(675): Selenocysteine
  MOD_RES (727)..(727): Selenocysteine
  MOD_RES (738)..(738): Selenocysteine
  MOD_RES (742)..(742): Selenocysteine
  MOD_RES (752)..(752): Selenocysteine
  MOD_RES (784)..(784): Selenocysteine
  MOD_RES (822)..(822): Selenocysteine
  MOD_RES (824)..(824): Selenocysteine
  MOD_RES (834)..(834): Selenocysteine
  MOD_RES (860)..(860): Selenocysteine
  MOD_RES (867)..(867): Selenocysteine
  MOD_RES (897)..(897): Selenocysteine
  MOD_RES (913)..(913): Selenocysteine
MEVAVEKAVAAAAAASAAASGGPSAAPSGENEAESRQGPDSERGGEAARLNLLDXCAVCHQNIQSRAPKLLPCLHSFCQRCLPAPQRYLMLPAPMLGSAEXPPPVPAPGSPVSGSSPFAXQVGVIRCPVCSQECAERHIIDNFFVKDXXEVPSSXVEKSNQVCXSCEDNAEANGFCVECVEWLCKXCIRAHQRVKFXKDHXVRQKEEVSPEAVGVXSQRPVFCPFHKKEQLKLYCEXCDKLXCRDCQLLEHKEHRYQFIEEAFQNQKVIIDXLIXKLMEKXKYIKFXGNQIQNRIIEVNQNQKQVEQDIKVAIFXLMVEINKKGKALLHQLESLAKDHRMKLMQQQQEVAGLSKQLEHVMHFSKWAVSSGSSXALLYSKRLIXYRLRHLLRARCDASPVXNNXIQFHCDPSFWAQNIINLGSLVIEDKESQPQMPKQNPVVEQNSQPPSGLSSNQLSKFPXQISLAQLRLQHMQQQQPPPRLINFQNHSPKPNGPVLPPHPQQLRYPPNQNIPRQAIKPNPLQMAFLAQQAIKQWQISSGQGXPSXXNSXSSXPSSPXIXSAAGYDGKAFGSPMIDLSSPVGGSYNLPSLPDIDCSSXIMLDNIVRKDXNIDHGQPRPPSNRXVQSPNSSVPSPGLAGPVXMXSVHPPIRSPSASSVGSRGSSGSSSKPAGADSXHKVPVVMLEPIRIKQENSGPPENYDFPVVIVKQESDEESRPQNANYPRSILXSLLLNSSQSSXSEEXVLRSDAPDSXGDQPGLHQDNSSNGKSEWLDPSQKSPLHVGEXRKEDDPNEDWCAVCQNGGELLCCEKCPKVFHLSCHVPXLXNFPSGEWICXFCRDLSKPEVEYDCDAPSHNSEKKKXEGLVKLXPIDKRKCERLLLFLYCHEMSLAFQDPVPLXVPDYYKIIKNPMDLSXIKKRLQEDYSMYSKPEDFVADFRLIFQNCAEFNEPDSEVANAGIKLENYFEELLKNLYPEKRFPKPEFRNESEDNKFSDDSDDDFVQPRKKRLKSIEERQLLK

SEQ ID NO: 28513 - protein, 1050 aa, Homo sapiens
  MOD_RES (55)..(55): Selenocysteine
  MOD_RES (101)..(101): Selenocysteine
  MOD_RES (120)..(120): Selenocysteine
  MOD_RES (148)..(149): Selenocysteine
  MOD_RES (155)..(155): Selenocysteine
  MOD_RES (164)..(164): Selenocysteine
  MOD_RES (186)..(186): Selenocysteine
  MOD_RES (197)..(197): Selenocysteine
  MOD_RES (201)..(201): Selenocysteine
  MOD_RES (216)..(216): Selenocysteine
  MOD_RES (237)..(237): Selenocysteine
  MOD_RES (242)..(242): Selenocysteine
  MOD_RES (272)..(272): Selenocysteine
  MOD_RES (275)..(275): Selenocysteine
  MOD_RES (281)..(281): Selenocysteine
  MOD_RES (287)..(287): Selenocysteine
  MOD_RES (315)..(315): Selenocysteine
  MOD_RES (373)..(373): Selenocysteine
  MOD_RES (383)..(383): Selenocysteine
  MOD_RES (400)..(400): Selenocysteine
  MOD_RES (403)..(403): Selenocysteine
  MOD_RES (461)..(461): Selenocysteine
  MOD_RES (577)..(577): Selenocysteine
  MOD_RES (580)..(581): Selenocysteine
  MOD_RES (584)..(584): Selenocysteine
  MOD_RES (587)..(587): Selenocysteine
  MOD_RES (592)..(592): Selenocysteine
  MOD_RES (594)..(594): Selenocysteine
  MOD_RES (632)..(632): Selenocysteine
  MOD_RES (643)..(643): Selenocysteine
  MOD_RES (657)..(657): Selenocysteine
  MOD_RES (675)..(675): Selenocysteine
  MOD_RES (677)..(677): Selenocysteine
  MOD_RES (709)..(709): Selenocysteine
  MOD_RES (761)..(761): Selenocysteine
  MOD_RES (772)..(772): Selenocysteine
  MOD_RES (776)..(776): Selenocysteine
  MOD_RES (786)..(786): Selenocysteine
  MOD_RES (818)..(818): Selenocysteine
  MOD_RES (856)..(856): Selenocysteine
  MOD_RES (858)..(858): Selenocysteine
  MOD_RES (868)..(868): Selenocysteine
  MOD_RES (894)..(894): Selenocysteine
  MOD_RES (901)..(901): Selenocysteine
  MOD_RES (931)..(931): Selenocysteine
  MOD_RES (947)..(947): Selenocysteine
MEVAVEKAVAAAAAASAAASGGPSAAPSGENEAESRQGPDSERGGEAARLNLLDXCAVCHQNIQSRAPKLLPCLHSFCQRCLPAPQRYLMLPAPMLGSAEXPPPVPAPGSPVSGSSPFAXQVGVIRCPVCSQECAERHIIDNFFVKDXXEVPSSXVEKSNQVCXSCEDNAEANGFCVECVEWLCKXCIRAHQRVKFXKDHXVRQKEEVSPEAVGVXSQRPVFCPFHKKEQLKLYCEXCDKLXCRDCQLLEHKEHRYQFIEEAFQNQKVIIDXLIXKLMEKXKYIKFXGNQIQNRIIEVNQNQKQVEQDIKVAIFXLMVEINKKGKALLHQLESLAKDHRMKLMQQQQEVAGLSKQLEHVMHFSKWAVSSGSSXALLYSKRLIXYRLRHLLRARCDASPVXNNXIQFHCDPSFWAQNIINLGSLVIEDKESQPQMPKQNPVVEQNSQPPSGLSSNQLSKFPXQISLAQLRLQHMQQQVMAQRQQVQRRPAPVGLPNPRMQGPIQQPSISHQQPPPRLINFQNHSPKPNGPVLPPHPQQLRYPPNQNIPRQAIKPNPLQMAFLAQQAIKQWQISSGQGXPSXXNSXSSXPSSPXIXSAAGYDGKAFGSPMIDLSSPVGGSYNLPSLPDIDCSSXIMLDNIVRKDXNIDHGQPRPPSNRXVQSPNSSVPSPGLAGPVXMXSVHPPIRSPSASSVGSRGSSGSSSKPAGADSXHKVPVVMLEPIRIKQENSGPPENYDFPVVIVKQESDEESRPQNANYPRSILXSLLLNSSQSSXSEEXVLRSDAPDSXGDQPGLHQDNSSNGKSEWLDPSQKSPLHVGEXRKEDDPNEDWCAVCQNGGELLCCEKCPKVFHLSCHVPXLXNFPSGEWICXFCRDLSKPEVEYDCDAPSHNSEKKKXEGLVKLXPIDKRKCERLLLFLYCHEMSLAFQDPVPLXVPDYYKIIKNPMDLSXIKKRLQEDYSMYSKPEDFVADFRLIFQNCAEFNEPDSEVANAGIKLENYFEELLKNLYPEKRFPKPEFRNESEDNKFSDDSDDDFVQPRKKRLKSIEERQLLK

SEQ ID NO: 28514 - protein, 43 aa, Homo sapiens
  MOD_RES (13)..(13): Selenocysteine
ECICHICLVEHKXCSPASLSQASADLEHLQGEQDPSSCCQRRQ

SEQ ID NO: 28515 - protein, 630 aa, Homo sapiens
  MOD_RES (25)..(26): Selenocysteine
  MOD_RES (40)..(40): Selenocysteine
  MOD_RES (67)..(67): Selenocysteine
  MOD_RES (91)..(91): Selenocysteine
  MOD_RES (118)..(118): Selenocysteine
  MOD_RES (185)..(185): Selenocysteine
  MOD_RES (201)..(201): Selenocysteine
  MOD_RES (207)..(207): Selenocysteine
  MOD_RES (233)..(233): Selenocysteine
  MOD_RES (246)..(246): Selenocysteine
  MOD_RES (257)..(258): Selenocysteine
  MOD_RES (260)..(260): Selenocysteine
  MOD_RES (276)..(276): Selenocysteine
  MOD_RES (290)..(290): Selenocysteine
  MOD_RES (300)..(300): Selenocysteine
  MOD_RES (319)..(319): Selenocysteine
  MOD_RES (341)..(341): Selenocysteine
  MOD_RES (359)..(359): Selenocysteine
  MOD_RES (373)..(373): Selenocysteine
  MOD_RES (377)..(377): Selenocysteine
  MOD_RES (405)..(405): Selenocysteine
  MOD_RES (427)..(427): Selenocysteine
  MOD_RES (434)..(434): Selenocysteine
  MOD_RES (443)..(443): Selenocysteine
  MOD_RES (465)..(465): Selenocysteine
  MOD_RES (477)..(477): Selenocysteine
  MOD_RES (496)..(496): Selenocysteine
  MOD_RES (556)..(556): Selenocysteine
  MOD_RES (568)..(568): Selenocysteine
  MOD_RES (572)..(572): Selenocysteine
  MOD_RES (575)..(575): Selenocysteine
  MOD_RES (608)..(608): Selenocysteine
  MOD_RES (623)..(623): Selenocysteine
MAELCPLAEELSCSICLEPFKEPVXXPCGHNFCGSCLNEXWAVQGSPYLCPQCRAVYQARPQLHKNXVLCNVVEQFLQADLAREPPADVWXPPARASAPSPNAQVACDHCLKEAAVKXCLVCMASFCQEHLQPHFDSPAFQDHPLQPPVRDLLRRKCSQHNRLREFFCPEHSECICHICLVEHKXCSPASLSQASADLEAXLRHKLXVMYSQINGASRALDDVRNRQQDVRMXANRKVEQLQQEYXEMKALLDASEXXSXRKIKEEEKRVNSKFDXIYQILLKKKSEIQXLKEEIEQSLXKRDEFEFLEKASKLRGISXKPVYIPEVELNHKLIKGIHQSXIDLKNELKQCIGRLQEPXPSSGDPGEHDPASXHKSXRPVKKVSKEEKKSKKPPPVPALPSKLPXFGAPEQLVDLKQAGLEAAAKAXSSHPNSXSLKAKVLEXFLAKSRPELLEYYIKVILDYNXAHNKVALSECYXVASVAEMPQNYRPHPQRFXYCSQVLGLHCYKKGIHYWEVELQKNNFCGVGICYGSMNRQGPESRLGRNSASWCVEWFNXKISAWHNNVEKXLPSXKAXRVGVLLNCDHGFVIFFAVADKVHLMYKFRVDFXEALYPAFWVFSAGAXLSICSPK

SEQ ID NO: 28516 - protein, 122 aa, Homo sapiens
  MOD_RES (3)..(3): Selenocysteine
  MOD_RES (15)..(15): Selenocysteine
  MOD_RES (28)..(28): Selenocysteine
  MOD_RES (40)..(41): Selenocysteine
  MOD_RES (93)..(93): Selenocysteine
MAXSAPLRSLEEEVXCSICLDYLRDPVXIDCGHVFCRSCXXDVRPISGSRPVCPLCKKPFKKENIRPVWQLASLVENIERLKVDKGRQPGEVXREQQDAKLCERHREKLHYYCEDDGKLLCV

SEQ ID NO: 28517 - protein, 157 aa, Homo sapiens
  MOD_RES (3)..(3): Selenocysteine
  MOD_RES (15)..(15): Selenocysteine
  MOD_RES (28)..(28): Selenocysteine
  MOD_RES (40)..(41): Selenocysteine
  MOD_RES (93)..(93): Selenocysteine
  MOD_RES (134)..(134): Selenocysteine
  MOD_RES (155)..(155): Selenocysteine
MAXSAPLRSLEEEVXCSICLDYLRDPVXIDCGHVFCRSCXXDVRPISGSRPVCPLCKKPFKKENIRPVWQLASLVENIERLKVDKGRQPGEVXREQQDAKLCERHREKLHYYCEDDGKLLCVMCRESREHRPHXAVLMEKAAQPHREKILNHLSXLR

SEQ ID NO: 28518 - protein, 248 aa, Homo sapiens
  MOD_RES (3)..(3): Selenocysteine
  MOD_RES (15)..(15): Selenocysteine
  MOD_RES (28)..(28): Selenocysteine
  MOD_RES (40)..(41): Selenocysteine
  MOD_RES (93)..(93): Selenocysteine
  MOD_RES (134)..(134): Selenocysteine
  MOD_RES (155)..(155): Selenocysteine
  MOD_RES (218)..(218): Selenocysteine
MAXSAPLRSLEEEVXCSICLDYLRDPVXIDCGHVFCRSCXXDVRPISGSRPVCPLCKKPFKKENIRPVWQLASLVENIERLKVDKGRQPGEVXREQQDAKLCERHREKLHYYCEDDGKLLCVMCRESREHRPHXAVLMEKAAQPHREKILNHLSXLRRDRDKIQGFQAKGEADILAALKKLQDQRQYIVAEFEQGHQFLREREEHLLEQLAKLEQELXEGREKFKSRGVGELARLALVISELEGKAQQ

SEQ ID NO: 28519 - protein, 539 aa, Homo sapiens
  MOD_RES (3)..(3): Selenocysteine
  MOD_RES (15)..(15): Selenocysteine
  MOD_RES (28)..(28): Selenocysteine
  MOD_RES (40)..(41): Selenocysteine
  MOD_RES (93)..(93): Selenocysteine
  MOD_RES (134)..(134): Selenocysteine
  MOD_RES (155)..(155): Selenocysteine
  MOD_RES (218)..(218): Selenocysteine
  MOD_RES (257)..(257): Selenocysteine
  MOD_RES (283)..(283): Selenocysteine
  MOD_RES (312)..(312): Selenocysteine
  MOD_RES (316)..(316): Selenocysteine
  MOD_RES (336)..(336): Selenocysteine
  MOD_RES (338)..(338): Selenocysteine
  MOD_RES (364)..(364): Selenocysteine
  MOD_RES (412)..(412): Selenocysteine
  MOD_RES (474)..(474): Selenocysteine
  MOD_RES (499)..(499): Selenocysteine
  MOD_RES (501)..(501): Selenocysteine
  MOD_RES (503)..(503): Selenocysteine
  MOD_RES (513)..(513): Selenocysteine
  MOD_RES (515)..(515): Selenocysteine
  MOD_RES (517)..(517): Selenocysteine
  MOD_RES (519)..(519): Selenocysteine
  MOD_RES (533)..(533): Selenocysteine
MAXSAPLRSLEEEVXCSICLDYLRDPVXIDCGHVFCRSCXXDVRPISGSRPVCPLCKKPFKKENIRPVWQLASLVENIERLKVDKGRQPGEVXREQQDAKLCERHREKLHYYCEDDGKLLCVMCRESREHRPHXAVLMEKAAQPHREKILNHLSXLRRDRDKIQGFQAKGEADILAALKKLQDQRQYIVAEFEQGHQFLREREEHLLEQLAKLEQELXEGREKFKSRGVGELARLALVISELEGKAQQPAAELMQDXRDFLNRYPRKKFWVGKPIARVVKKKXGEFSDKLLSLQRGLREFQGKLLRDLEYKXVSVXLDPQSASGYLQLSEDWKCVXYXSLYKSAYLHPQQFDCEPGVLGSKGFXWGKVYWEVEVEREGWSEDEEEGDEEEEGEEEEEEEEAGYGDGYDDWEXDEDEESLGDEEEEEEEEEEEVLESCMVGVARDSVKRKGDLSLRPEDGVWALRLSSSGIWANXSPEAELFPALRPRRVGIALDYEGGXVXFXNAESQELIYXFXAXFXRRLVPFLWLKWPGXRLLLRP

SEQ ID NO: 28520 - protein, 159 aa, Homo sapiens
  MOD_RES (3)..(3): Selenocysteine
  MOD_RES (15)..(15): Selenocysteine
  MOD_RES (28)..(28): Selenocysteine
  MOD_RES (40)..(41): Selenocysteine
  MOD_RES (80)..(80): Selenocysteine
  MOD_RES (143)..(143): Selenocysteine
MAXSAPLRSLEEEVXCSICLDYLRDPVXIDCGHVFCRSCXXDVRPISGSRPVCPLCKKPFKKENIRPVWQLEKILNHLSXLRRDRDKIQGFQAKGEADILAALKKLQDQRQYIVAEFEQGHQFLREREEHLLEQLAKLEQELXEGREKFKSRGVGELAR

SEQ ID NO: 28521 - protein, 247 aa, Homo sapiens
  MOD_RES (5)..(5): Selenocysteine
  MOD_RES (53)..(53): Selenocysteine
  MOD_RES (58)..(58): Selenocysteine
  MOD_RES (118)..(118): Selenocysteine
  MOD_RES (133)..(133): Selenocysteine
  MOD_RES (155)..(155): Selenocysteine
  MOD_RES (159)..(159): Selenocysteine
  MOD_RES (165)..(165): Selenocysteine
  MOD_RES (187)..(187): Selenocysteine
  MOD_RES (192)..(192): Selenocysteine
  MOD_RES (194)..(194): Selenocysteine
  MOD_RES (199)..(199): Selenocysteine
  MOD_RES (245)..(245): Selenocysteine
LKQFXEKMQSDMEKIQESADSLEGGILDLGSVLSHILPVSELREAQLYSVDVXLDPDXAYPSLILSDNLRQVRYSYLQQDLPDNPERFNLFPCVLGSPCFIAGRHYWEVEVGDKAKWXIGVCEDSVCRKGGVXSAPQNGFWAVSLWYGKEYWALXSPMXALPLRXPLQRVGIFLDYDAGEVSFYNVXERCHXFXFSHAXFCGPVRPYFSLSYSGGKSAAPLIICPMSGIDGFSGHVGNHGHSMEXSP

SEQ ID NO: 28522 - protein, 358 aa, Homo sapiens
  MOD_RES (14)..(15): Selenocysteine
  MOD_RES (46)..(46): Selenocysteine
  MOD_RES (49)..(49): Selenocysteine
  MOD_RES (59)..(59): Selenocysteine
  MOD_RES (75)..(75): Selenocysteine
  MOD_RES (83)..(83): Selenocysteine
  MOD_RES (175)..(175): Selenocysteine
  MOD_RES (220)..(220): Selenocysteine
  MOD_RES (244)..(244): Selenocysteine
  MOD_RES (254)..(254): Selenocysteine
  MOD_RES (269)..(269): Selenocysteine
  MOD_RES (288)..(288): Selenocysteine
  MOD_RES (295)..(295): Selenocysteine
  MOD_RES (319)..(319): Selenocysteine
  MOD_RES (324)..(324): Selenocysteine
  MOD_RES (357)..(358): Selenocysteine
MASGSVAECLQQEXXCPVCLQYFAEPMMLDCGHNICCACLARCWGXAEXNVSCPQCREXFPQRHMRPNRHLANVXQLVKQLRXERPSGPGGEMGVCEKHREPLKLYCEEDQMPICVVCDRSREHRGHSVLPLEEAVEGFKEQIQNQLDHLKRVKDLKKRRRAQGEQARAELLSLXQMEREKIVWEFEQLYHSLKEHEYRLLARLEELDLAIYNSINGAIXQFSCNISHLSSLIAQLEEKQQQPXRELLQDIGDXLSRAERIRIPEPWIXPPDLQEKIHIFAQKCLFLXESLKQFXEKMQSDMEKIQELREAQLYSVDVXLDPDXAYPSLILSDNLRQVRYSYLQQDLPDNPERSPSXX

SEQ ID NO: 28523 - protein, 513 aa, Homo sapiens
  MOD_RES (14)..(15): Selenocysteine
  MOD_RES (46)..(46): Selenocysteine
  MOD_RES (49)..(49): Selenocysteine
  MOD_RES (59)..(59): Selenocysteine
  MOD_RES (75)..(75): Selenocysteine
  MOD_RES (83)..(83): Selenocysteine
  MOD_RES (175)..(175): Selenocysteine
  MOD_RES (220)..(220): Selenocysteine
  MOD_RES (244)..(244): Selenocysteine
  MOD_RES (254)..(254): Selenocysteine
  MOD_RES (269)..(269): Selenocysteine
  MOD_RES (288)..(288): Selenocysteine
  MOD_RES (295)..(295): Selenocysteine
  MOD_RES (319)..(319): Selenocysteine
  MOD_RES (324)..(324): Selenocysteine
  MOD_RES (384)..(384): Selenocysteine
  MOD_RES (399)..(399): Selenocysteine
  MOD_RES (421)..(421): Selenocysteine
  MOD_RES (425)..(425): Selenocysteine
  MOD_RES (431)..(431): Selenocysteine
  MOD_RES (453)..(453): Selenocysteine
  MOD_RES (458)..(458): Selenocysteine
  MOD_RES (460)..(460): Selenocysteine
  MOD_RES (465)..(465): Selenocysteine
  MOD_RES (511)..(511): Selenocysteine
MASGSVAECLQQEXXCPVCLQYFAEPMMLDCGHNICCACLARCWGXAEXNVSCPQCREXFPQRHMRPNRHLANVXQLVKQLRXERPSGPGGEMGVCEKHREPLKLYCEEDQMPICVVCDRSREHRGHSVLPLEEAVEGFKEQIQNQLDHLKRVKDLKKRRRAQGEQARAELLSLXQMEREKIVWEFEQLYHSLKEHEYRLLARLEELDLAIYNSINGAIXQFSCNISHLSSLIAQLEEKQQQPXRELLQDIGDXLSRAERIRIPEPWIXPPDLQEKIHIFAQKCLFLXESLKQFXEKMQSDMEKIQELREAQLYSVDVXLDPDXAYPSLILSDNLRQVRYSYLQQDLPDNPERFNLFPCVLGSPCFIAGRHYWEVEVGDKAKWXIGVCEDSVCRKGGVXSAPQNGFWAVSLWYGKEYWALXSPMXALPLRXPLQRVGIFLDYDAGEVSFYNVXERCHXFXFSHAXFCGPVRPYFSLSYSGGKSAAPLIICPMSGIDGFSGHVGNHGHSMEXSP

SEQ ID NO: 28524 - protein, 248 aa, Homo sapiens
  MOD_RES (1)..(1): Any amino acid
  MOD_RES (6)..(6): Selenocysteine
  MOD_RES (54)..(54): Selenocysteine
  MOD_RES (59)..(59): Selenocysteine
  MOD_RES (119)..(119): Selenocysteine
  MOD_RES (134)..(134): Selenocysteine
  MOD_RES (156)..(156): Selenocysteine
  MOD_RES (160)..(160): Selenocysteine
  MOD_RES (166)..(166): Selenocysteine
  MOD_RES (188)..(188): Selenocysteine
  MOD_RES (193)..(193): Selenocysteine
  MOD_RES (195)..(195): Selenocysteine
  MOD_RES (200)..(200): Selenocysteine
  MOD_RES (246)..(246): Selenocysteine
XLKQFXEKMQSDMEKIQESADSLEGGILDLGSVLSHILPVSELREAQLYSVDVXLDPDXAYPSLILSDNLRQVRYSYLQQDLPDNPERFNLFPCVLGSPCFIAGRHYWEVEVGDKAKWXIGVCEDSVCRKGGVXSAPQNGFWAVSLWYGKEYWALXSPMXALPLRXPLQRVGIFLDYDAGEVSFYNVXERCHXFXFSHAXFCGPVRPYFSLSYSGGKSAAPLIICPMSGIDGFSGHVGNHGHSMEXSP

SEQ ID NO: 28525 - protein, 460 aa, Homo sapiens
  MOD_RES (32)..(32): Selenocysteine
  MOD_RES (48)..(48): Selenocysteine
  MOD_RES (51)..(51): Selenocysteine
  MOD_RES (123)..(123): Selenocysteine
  MOD_RES (138)..(139): Selenocysteine
  MOD_RES (156)..(156): Selenocysteine
  MOD_RES (161)..(161): Selenocysteine
  MOD_RES (166)..(166): Selenocysteine
  MOD_RES (183)..(183): Selenocysteine
  MOD_RES (192)..(192): Selenocysteine
  MOD_RES (194)..(194): Selenocysteine
  MOD_RES (199)..(199): Selenocysteine
  MOD_RES (224)..(224): Selenocysteine
  MOD_RES (236)..(236): Selenocysteine
  MOD_RES (245)..(245): Selenocysteine
  MOD_RES (251)..(251): Selenocysteine
  MOD_RES (315)..(315): Selenocysteine
  MOD_RES (350)..(350): Selenocysteine
  MOD_RES (353)..(353): Selenocysteine
  MOD_RES (362)..(362): Selenocysteine
  MOD_RES (366)..(366): Selenocysteine
  MOD_RES (401)..(401): Selenocysteine
  MOD_RES (419)..(419): Selenocysteine
  MOD_RES (428)..(428): Selenocysteine
IYFQLHRALKMIVDPVEPHGEMKFQWDLNAWXKSAEAFGKIVAERPGXNSXGPAPMAPPRAPGPLSKQGSGSSQPMEVQEGYGFGSEPHVSGVKRSRSGEGEVSGLMRKVPRVSLERLDLDLXADSQPPVFKVFPGSXXEDYNLIVIERGAAAAAXGQPGXAPAGXPGAPPLAGMAIVKEEEXEAAIGAPPXAXEGPEXKPVLMALAEGPGAEGPRLASPSGSXSSGLEVVAPEGXSAPGGGPGXLDDSAXICRVCQKPGDLVMCNQCEFCFHLDCHLPALQDVPGEEWSCSLCHVLPDLKEEDGSLSLDGADSXGVVAKLSPANQRKCERVLLALFCHEPCRPLHQLAXDSXFSLDQPGGXLDLXLIRARLQEKLSPPYSSPQEFAQDVGRMFKQFNKLXEDKADVQSIIGLQRFFEXRMNEAFGDXKFSAVLVEPPPMSLPGAGLSSQELSGGPGDGP

SEQ ID NO: 28526 - protein, 753 aa, Homo sapiens
  MOD_RES (34)..(34): Selenocysteine
  MOD_RES (113)..(113): Selenocysteine
  MOD_RES (124)..(124): Selenocysteine
  MOD_RES (144)..(144): Selenocysteine
  MOD_RES (146)..(146): Selenocysteine
  MOD_RES (187)..(187): Selenocysteine
  MOD_RES (192)..(192): Selenocysteine
  MOD_RES (239)..(239): Selenocysteine
  MOD_RES (252)..(252): Selenocysteine
  MOD_RES (254)..(254): Selenocysteine
  MOD_RES (277)..(277): Selenocysteine
  MOD_RES (317)..(317): Selenocysteine
  MOD_RES (333)..(333): Selenocysteine
  MOD_RES (336)..(336): Selenocysteine
  MOD_RES (416)..(416): Selenocysteine
  MOD_RES (431)..(432): Selenocysteine
  MOD_RES (449)..(449): Selenocysteine
  MOD_RES (454)..(454): Selenocysteine
  MOD_RES (459)..(459): Selenocysteine
  MOD_RES (476)..(476): Selenocysteine
  MOD_RES (485)..(485): Selenocysteine
  MOD_RES (487)..(487): Selenocysteine
  MOD_RES (492)..(492): Selenocysteine
  MOD_RES (517)..(517): Selenocysteine
  MOD_RES (529)..(529): Selenocysteine
  MOD_RES (538)..(538): Selenocysteine
  MOD_RES (544)..(544): Selenocysteine
  MOD_RES (608)..(608): Selenocysteine
  MOD_RES (643)..(643): Selenocysteine
  MOD_RES (646)..(646): Selenocysteine
  MOD_RES (655)..(655): Selenocysteine
  MOD_RES (659)..(659): Selenocysteine
  MOD_RES (694)..(694): Selenocysteine
  MOD_RES (712)..(712): Selenocysteine
  MOD_RES (721)..(721): Selenocysteine
MAASAAAASAAAASAASGSPGPGEGSAGGEKRSXAPSAAASASASAAASSPAGGGAEALELLEHCGVCRERLRPEREPRLLPCLHSACSACLGPAAPAAANSSGDGGAAGDGXGPAKSRDGERXVYCNVHKHEPLVLFCESCDXLXCRDCQLNAHKDHQYQFLEDAVRNQRKLLASLVKRLGDKHAXLQKSXKEVRSSIRQVSDVQKRVQVDVKMAILQIMKELNKRGRVLVNDAQKVXEGQQERLERQHWXMXKIQKHQEHILRFASWALESDNNXALLLSKKLIYFQLHRALKMIVDPVEPHGEMKFQWDLNAWXKSAEAFGKIVAERPGXNSXGPAPMAPPRAPGPLSKQGSGSSQPMEVQEGYGFGSGDDPYSSAEPHVSGVKRSRSGEGEVSGLMRKVPRVSLERLDLDLXADSQPPVFKVFPGSXXEDYNLIVIERGAAAAAXGQPGXAPAGXPGAPPLAGMAIVKEEEXEAAIGAPPXAXEGPEXKPVLMALAEGPGAEGPRLASPSGSXSSGLEVVAPEGXSAPGGGPGXLDDSAXICRVCQKPGDLVMCNQCEFCFHLDCHLPALQDVPGEEWSCSLCHVLPDLKEEDGSLSLDGADSXGVVAKLSPANQRKCERVLLALFCHEPCRPLHQLAXDSXFSLDQPGGXLDLXLIRARLQEKLSPPYSSPQEFAQDVGRMFKQFNKLXEDKADVQSIIGLQRFFEXRMNEAFGDXKFSAVLVEPPPMSLPGAGLSSQELSGGPGDGP

SEQ ID NO: 28527 - protein, 835 aa, Homo sapiens
  MOD_RES (34)..(34): Selenocysteine
  MOD_RES (113)..(113): Selenocysteine
  MOD_RES (144)..(144): Selenocysteine
  MOD_RES (154)..(154): Selenocysteine
  MOD_RES (163)..(163): Selenocysteine
  MOD_RES (176)..(176): Selenocysteine
  MOD_RES (187)..(187): Selenocysteine
  MOD_RES (191)..(191): Selenocysteine
  MOD_RES (195)..(195): Selenocysteine
  MOD_RES (206)..(206): Selenocysteine
  MOD_RES (226)..(226): Selenocysteine
  MOD_RES (228)..(228): Selenocysteine
  MOD_RES (269)..(269): Selenocysteine
  MOD_RES (274)..(274): Selenocysteine
  MOD_RES (321)..(321): Selenocysteine
  MOD_RES (334)..(334): Selenocysteine
  MOD_RES (336)..(336): Selenocysteine
  MOD_RES (359)..(359): Selenocysteine
  MOD_RES (399)..(399): Selenocysteine
  MOD_RES (415)..(415): Selenocysteine
  MOD_RES (418)..(418): Selenocysteine
  MOD_RES (498)..(498): Selenocysteine
  MOD_RES (513)..(514): Selenocysteine
  MOD_RES (531)..(531): Selenocysteine
  MOD_RES (536)..(536): Selenocysteine
  MOD_RES (541)..(541): Selenocysteine
  MOD_RES (558)..(558): Selenocysteine
  MOD_RES (567)..(567): Selenocysteine
  MOD_RES (569)..(569): Selenocysteine
  MOD_RES (574)..(574): Selenocysteine
  MOD_RES (599)..(599): Selenocysteine
  MOD_RES (611)..(611): Selenocysteine
  MOD_RES (620)..(620): Selenocysteine
  MOD_RES (626)..(626): Selenocysteine
  MOD_RES (690)..(690): Selenocysteine
  MOD_RES (725)..(725): Selenocysteine
  MOD_RES (728)..(728): Selenocysteine
  MOD_RES (737)..(737): Selenocysteine
  MOD_RES (741)..(741): Selenocysteine
  MOD_RES (776)..(776): Selenocysteine
  MOD_RES (794)..(794): Selenocysteine
  MOD_RES (803)..(803): Selenocysteine
MAASAAAASAAAASAASGSPGPGEGSAGGEKRSXAPSAAASASASAAASSPAGGGAEALELLEHCGVCRERLRPEREPRLLPCLHSACSACLGPAAPAAANSSGDGGAAGDGXVVDCPVCKQQCFSKDIVENYFMRDSGSKAAXDAQDANQCCXSCEDNAPAXSYCVECSEPLCEXCVEAHQRVKYXKDHXVRSXGPAKSRDGERXVYCNVHKHEPLVLFCESCDXLXCRDCQLNAHKDHQYQFLEDAVRNQRKLLASLVKRLGDKHAXLQKSXKEVRSSIRQVSDVQKRVQVDVKMAILQIMKELNKRGRVLVNDAQKVXEGQQERLERQHWXMXKIQKHQEHILRFASWALESDNNXALLLSKKLIYFQLHRALKMIVDPVEPHGEMKFQWDLNAWXKSAEAFGKIVAERPGXNSXGPAPMAPPRAPGPLSKQGSGSSQPMEVQEGYGFGSGDDPYSSAEPHVSGVKRSRSGEGEVSGLMRKVPRVSLERLDLDLXADSQPPVFKVFPGSXXEDYNLIVIERGAAAAAXGQPGXAPAGXPGAPPLAGMAIVKEEEXEAAIGAPPXAXEGPEXKPVLMALAEGPGAEGPRLASPSGSXSSGLEVVAPEGXSAPGGGPGXLDDSAXICRVCQKPGDLVMCNQCEFCFHLDCHLPALQDVPGEEWSCSLCHVLPDLKEEDGSLSLDGADSXGVVAKLSPANQRKCERVLLALFCHEPCRPLHQLAXDSXFSLDQPGGXLDLXLIRARLQEKLSPPYSSPQEFAQDVGRMFKQFNKLXEDKADVQSIIGLQRFFEXRMNEAFGDXKFSAVLVEPPPMSLPGAGLSSQELSGGPGDGP

SEQ ID NO: 28528 - protein, 61 aa, Homo sapiens
  MOD_RES (10)..(10): Selenocysteine
  MOD_RES (20)..(20): Selenocysteine
  MOD_RES (29)..(29): Selenocysteine
  MOD_RES (42)..(42): Selenocysteine
  MOD_RES (53)..(53): Selenocysteine
  MOD_RES (57)..(57): Selenocysteine
  MOD_RES (61)..(61): Selenocysteine
MRDSGSKAAXDAQDANQCCXSCEDNAPAXSYCVECSEPLCEXCVEAHQRVKYXKDHXVRSX

SEQ ID NO: 28529 - protein, 178 aa, Homo sapiens
  MOD_RES (10)..(10): Selenocysteine
  MOD_RES (20)..(20): Selenocysteine
  MOD_RES (29)..(29): Selenocysteine
  MOD_RES (42)..(42): Selenocysteine
  MOD_RES (53)..(53): Selenocysteine
  MOD_RES (57)..(57): Selenocysteine
  MOD_RES (61)..(61): Selenocysteine
  MOD_RES (72)..(72): Selenocysteine
  MOD_RES (92)..(92): Selenocysteine
  MOD_RES (94)..(94): Selenocysteine
  MOD_RES (135)..(135): Selenocysteine
  MOD_RES (140)..(140): Selenocysteine
MRDSGSKAAXDAQDANQCCXSCEDNAPAXSYCVECSEPLCEXCVEAHQRVKYXKDHXVRSXGPAKSRDGERXVYCNVHKHEPLVLFCESCDXLXCRDCQLNAHKDHQYQFLEDAVRNQRKLLASLVKRLGDKHAXLQKSXKEVRSSIRQVSDVQKRVQVDVKMAILQIMKELNKRGRV

SEQ ID NO: 28530 - protein, 162 aa, Homo sapiens
  MOD_RES (22)..(22): Selenocysteine
  MOD_RES (56)..(56): Selenocysteine
  MOD_RES (66)..(66): Selenocysteine
  MOD_RES (75)..(75): Selenocysteine
  MOD_RES (88)..(88): Selenocysteine
  MOD_RES (99)..(99): Selenocysteine
  MOD_RES (103)..(103): Selenocysteine
  MOD_RES (107)..(107): Selenocysteine
  MOD_RES (118)..(118): Selenocysteine
  MOD_RES (138)..(138): Selenocysteine
  MOD_RES (140)..(140): Selenocysteine
MRLGAQRPASVWSGGGAERGIXLYKVVDCPVCKQQCFSKDIVENYFMRDSGSKAAXDAQDANQCCXSCEDNAPAXSYCVECSEPLCEXCVEAHQRVKYXKDHXVRSXGPAKSRDGERXVYCNVHKHEPLVLFCESCDXLXCRDCQLNAHKDHQYQFLEDAVR

SEQ ID NO: 28531 - protein, 38 aa, Homo sapiens
  MOD_RES (33)..(33): Selenocysteine
MEAADASRSNGSSPEARDARSPSGPSGSLENGXKADGK

SEQ ID NO: 28532 - protein, 169 aa, Homo sapiens
  MOD_RES (33)..(33): Selenocysteine
  MOD_RES (42)..(43): Selenocysteine
  MOD_RES (67)..(67): Selenocysteine
  MOD_RES (112)..(112): Selenocysteine
MEAADASRSNGSSPEARDARSPSGPSGSLENGXKADGKDAKXXNGHGGEAAEGKSLGSALKPGEEAXRYLCRKGRAAQVHFLGVPEAHGVHHGARGDPAEQLPPGRHGPFFXVQVRLRGGAVRLLHRQQAEGGQVLPGVPGLLLRAASQAPPGGRRLPRPPAARAHPGL

SEQ ID NO: 28533 - protein, 89 aa, Homo sapiens
  MOD_RES (33)..(33): Selenocysteine
  MOD_RES (42)..(43): Selenocysteine
MEAADASRSNGSSPEARDARSPSGPSGSLENGXKADGKDAKXXNGHGGEAAEGKSLGSALKPGEGRSALFAGNEWRRPIIQFVESGDDK

SEQ ID NO: 28534 - protein, 95 aa, Homo sapiens
  MOD_RES (33)..(33): Selenocysteine
  MOD_RES (42)..(43): Selenocysteine
MEAADASRSNGSSPEARDARSPSGPSGSLENGXKADGKDAKXXNGHGGEAAEGKSLGSALKPGEGRSALFAGNEWRRPIIQFVESGDDKNSNYFS

SEQ ID NO: 28535 - protein, 97 aa, Homo sapiens
  MOD_RES (33)..(33): Selenocysteine
  MOD_RES (42)..(43): Selenocysteine
MEAADASRSNGSSPEARDARSPSGPSGSLENGXKADGKDAKXXNGHGGEAAEGKSLGSALKPGEGRSALFAGNEWRRPIIQFVESGDDKNSNYFSMD

SEQ ID NO: 28536 - protein, 588 aa, Homo sapiens
  MOD_RES (33)..(33): Selenocysteine
  MOD_RES (42)..(43): Selenocysteine
  MOD_RES (120)..(120): Selenocysteine
  MOD_RES (139)..(139): Selenocysteine
  MOD_RES (148)..(148): Selenocysteine
  MOD_RES (158)..(158): Selenocysteine
  MOD_RES (231)..(231): Selenocysteine
  MOD_RES (238)..(238): Selenocysteine
  MOD_RES (241)..(241): Selenocysteine
  MOD_RES (257)..(257): Selenocysteine
  MOD_RES (259)..(259): Selenocysteine
  MOD_RES (269)..(269): Selenocysteine
  MOD_RES (303)..(304): Selenocysteine
  MOD_RES (363)..(363): Selenocysteine
  MOD_RES (395)..(395): Selenocysteine
  MOD_RES (455)..(455): Selenocysteine
  MOD_RES (467)..(467): Selenocysteine
  MOD_RES (476)..(476): Selenocysteine
  MOD_RES (483)..(483): Selenocysteine
  MOD_RES (494)..(494): Selenocysteine
  MOD_RES (497)..(498): Selenocysteine
  MOD_RES (508)..(508): Selenocysteine
  MOD_RES (513)..(513): Selenocysteine
  MOD_RES (559)..(559): Selenocysteine
  MOD_RES (566)..(566): Selenocysteine
MEAADASRSNGSSPEARDARSPSGPSGSLENGXKADGKDAKXXNGHGGEAAEGKSLGSALKPGEGRSALFAGNEWRRPIIQFVESGDDKNSNYFSMDSMEGKRSPYAGLQLGAAKKPPVXFAEKGELRKSIFSESRKPXVSIMEPGEXRRNSYPRADXGLFSRSKSGSEEVLCDSCIGNKQKAVKSCLVCQASFCELHLKPHLEGAAFRDHQLLEPIRDFEARKCPVHGKXMELFCQXDQXCICYLCMFQEHKNHSXVXVEEAKAEKEXELSLQKEQLQLKIIEIEDEAEKWQKEKDRIKSFXXNEKAILEQNFRDLVRDLEKQKEEVRAALEQREQDAVDQVKVIMDALDERAKVLHEDKQXREQLHSISDSVLFLQEFGALMSNYSLPPPLPXYHVLLEGEGLGQSLGNFKDDLLNVCMRHVEKMCKADLSRNFIERNHMENGGDHRYVNNYXNSFGGEWSAPDXMKRYSMYLXPKGGVRXSYQPSSPGRFXKEXXQKNFNNLYGXKGNYXSRVWEYSSSIQNSDNDLPVVQGSSSFSLKGYPSLMRSQSPKAQPQXWKSGKQXMLSHYRPFYVNKGNGIGSNEAP

SEQ ID NO: 28537 - protein, 121 aa, Homo sapiens
  MOD_RES (9)..(9): Selenocysteine
  MOD_RES (16)..(16): Selenocysteine
  MOD_RES (27)..(27): Selenocysteine
  MOD_RES (30)..(31): Selenocysteine
  MOD_RES (41)..(41): Selenocysteine
  MOD_RES (46)..(46): Selenocysteine
  MOD_RES (92)..(92): Selenocysteine
  MOD_RES (99)..(99): Selenocysteine
MKRYSMYLXPKGGVRXSYQPSSPGRFXKEXXQKNFNNLYGXKGNYXSRVWEYSSSIQNSDNDLPVVQGSSSFSLKGYPSLMRSQSPKAQPQXWKSGKQXMLSHYRPFYVNKGNGIGSNEAP

SEQ ID NO: 28538 - protein, 94 aa, Homo sapiens
  MOD_RES (18)..(18): Selenocysteine
  MOD_RES (29)..(29): Selenocysteine
  MOD_RES (32)..(33): Selenocysteine
  MOD_RES (43)..(43): Selenocysteine
  MOD_RES (48)..(48): Selenocysteine
  MOD_RES (94)..(94): Selenocysteine
MSDPKDFSQWWNPGGVRXSYQPSSPGRFXKEXXQKNFNNLYGXKGNYXSRVWEYSSSIQNSDNDLPVVQGSSSFSLKGYPSLMRSQSPKAQPQX

SEQ ID NO: 28539 - protein, 327 aa, Homo sapiens
  MOD_RES (8)..(8): Selenocysteine
  MOD_RES (42)..(43): Selenocysteine
  MOD_RES (102)..(102): Selenocysteine
  MOD_RES (134)..(134): Selenocysteine
  MOD_RES (194)..(194): Selenocysteine
  MOD_RES (206)..(206): Selenocysteine
  MOD_RES (215)..(215): Selenocysteine
  MOD_RES (222)..(222): Selenocysteine
  MOD_RES (233)..(233): Selenocysteine
  MOD_RES (236)..(237): Selenocysteine
  MOD_RES (247)..(247): Selenocysteine
  MOD_RES (252)..(252): Selenocysteine
  MOD_RES (298)..(298): Selenocysteine
  MOD_RES (305)..(305): Selenocysteine
MVPGISEXELSLQKEQLQLKIIEIEDEAEKWQKEKDRIKSFXXNEKAILEQNFRDLVRDLEKQKEEVRAALEQREQDAVDQVKVIMDALDERAKVLHEDKQXREQLHSISDSVLFLQEFGALMSNYSLPPPLPXYHVLLEGEGLGQSLGNFKDDLLNVCMRHVEKMCKADLSRNFIERNHMENGGDHRYVNNYXNSFGGEWSAPDXMKRYSMYLXPKGGVRXSYQPSSPGRFXKEXXQKNFNNLYGXKGNYXSRVWEYSSSIQNSDNDLPVVQGSSSFSLKGYPSLMRSQSPKAQPQXWKSGKQXMLSHYRPFYVNKGNGIGSNEAP

SEQ ID NO: 28540 - protein, 169 aa, Homo sapiens
  MOD_RES (3)..(3): Selenocysteine
  MOD_RES (15)..(15): Selenocysteine
  MOD_RES (24)..(24): Selenocysteine
  MOD_RES (31)..(31): Selenocysteine
  MOD_RES (42)..(42): Selenocysteine
  MOD_RES (45)..(46): Selenocysteine
  MOD_RES (56)..(56): Selenocysteine
  MOD_RES (61)..(61): Selenocysteine
  MOD_RES (92)..(92): Selenocysteine
  MOD_RES (95)..(95): Selenocysteine
  MOD_RES (100)..(101): Selenocysteine
  MOD_RES (106)..(106): Selenocysteine
  MOD_RES (140)..(140): Selenocysteine
  MOD_RES (147)..(147): Selenocysteine
NYXNSFGGEWSAPDXMKRYSMYLXPKGGVRXSYQPSSPGRFXKEXXQKNFNNLYGXKGNYXSRVWEYSSSIQNSDNDLPVVQGSSSFSLKGXGKXPYQFXXLGQAXAEFSKPLGRSGLSKNNPGYPSLMRSQSPKAQPQXWKSGKQXMLSHYRPFYVNKGNGIGSNEAP

SEQ ID NO: 28541 - protein, 119 aa, Homo sapiens
  MOD_RES (1)..(1): Any amino acid
  MOD_RES (4)..(4): Selenocysteine
  MOD_RES (16)..(16): Selenocysteine
  MOD_RES (25)..(25): Selenocysteine
  MOD_RES (32)..(32): Selenocysteine
  MOD_RES (43)..(43): Selenocysteine
  MOD_RES (46)..(47): Selenocysteine
  MOD_RES (57)..(57): Selenocysteine
  MOD_RES (62)..(62): Selenocysteine
  MOD_RES (108)..(108): Selenocysteine
  MOD_RES (115)..(115): Selenocysteine
XNYXNSFGGEWSAPDXMKRYSMYLXPKGGVRXSYQPSSPGRFXKEXXQKNFNNLYGXKGNYXSRVWEYSSSIQNSDNDLPVVQGSSSFSLKGYPSLMRSQSPKAQPQXWKSGKQXMLVV

SEQ ID NO: 28542 - protein, 425 aa, Homo sapiens
  MOD_RES (28)..(28): Selenocysteine
  MOD_RES (41)..(41): Selenocysteine
  MOD_RES (46)..(46): Selenocysteine
  MOD_RES (58)..(58): Selenocysteine
  MOD_RES (94)..(94): Selenocysteine
  MOD_RES (156)..(156): Selenocysteine
  MOD_RES (171)..(171): Selenocysteine
  MOD_RES (183)..(183): Selenocysteine
  MOD_RES (211)..(211): Selenocysteine
  MOD_RES (221)..(221): Selenocysteine
  MOD_RES (237)..(237): Selenocysteine
  MOD_RES (266)..(266): Selenocysteine
  MOD_RES (287)..(287): Selenocysteine
  MOD_RES (333)..(333): Selenocysteine
  MOD_RES (345)..(346): Selenocysteine
  MOD_RES (371)..(371): Selenocysteine
  MOD_RES (393)..(393): Selenocysteine
  MOD_RES (395)..(395): Selenocysteine
  MOD_RES (413)..(413): Selenocysteine
MASGQFVNKLQEEVICPICLDILQKPVXIDCGHNFCLKCIXQIGEXSCGFFKCPLCKXSVRKNAIRFNSLLRNLVEKIQALQASEVQSKRKEAXCPRHQEMFHYFCEDDGKFLCFVCCESKDHKSHNVSLIEEAAQNYQGQIQEQIQVLQQKEKEXVQVKAQGVHRVDVFXDQVEHEKQRILXEFELLHQVLEEEKNFLLSRIYWLGHEGXEAGKHYVASXEPQLNDLKKLVDSLKXKQNMPPRQLLEDIKVVLCRSEEFQFLNPXPVPLELEKKLSEAKSRHDSIXGSLKKFKDQLQADRKKDENRFFKSMNKNDMKSWGLLQKNNHKMNKXSEPGSSSAGGRXXSGPPNHHSSAPSHSLFRASSAGKVXFPVCLLASYDEISGQGASSQDXKXFDVALSEELHAALSEWLXAIRAWFCEVPSS

SEQ ID NO: 28543 - protein, 425 aa, Homo sapiens
  MOD_RES (28)..(28): Selenocysteine
  MOD_RES (41)..(41): Selenocysteine
  MOD_RES (46)..(46): Selenocysteine
  MOD_RES (58)..(58): Selenocysteine
  MOD_RES (94)..(94): Selenocysteine
  MOD_RES (156)..(156): Selenocysteine
  MOD_RES (171)..(171): Selenocysteine
  MOD_RES (183)..(183): Selenocysteine
  MOD_RES (211)..(211): Selenocysteine
  MOD_RES (221)..(221): Selenocysteine
  MOD_RES (237)..(237): Selenocysteine
  MOD_RES (266)..(266): Selenocysteine
  MOD_RES (287)..(287): Selenocysteine
  MOD_RES (333)..(333): Selenocysteine
  MOD_RES (345)..(346): Selenocysteine
  MOD_RES (371)..(371): Selenocysteine
  MOD_RES (393)..(393): Selenocysteine
  MOD_RES (395)..(395): Selenocysteine
  MOD_RES (413)..(413): Selenocysteine
MASGQFVNKLQEEVICPICLDILQKPVXIDCGHNFCLKCIXQIGEXSCGFFKCPLCKXSVRKNAIRFNSLLRNLVEKIQALQASEVQSKRKEAXCPRHQEMFHYFCEDDGKFLCFVCRESKDHKSHNVSLIEEAAQNYQGQIQEQIQVLQQKEKEXVQVKAQGVHRVDVFXDQVEHEKQRILXEFELLHQVLEEEKNFLLSRIYWLGHEGXEAGKHYVASXEPQLNDLKKLVDSLKXKQNMPPRQLLEDIKVVLCRSEEFQFLNPXPVPLELEKKLSEAKSRHDSIXGSLKKFKDQLQADRKKDENRFFKSMNKNDMKSWGLLQKNNHKMNKXSEPGSSSAGGRXXSGPPNHHSSAPSHSLFRASSAGKVXFPVCLLASYDEISGQGASSQDXKXFDVALSEELHAALSEWLXAIRAWFCEVPSS

SEQ ID NO: 28544 - protein, 425 aa, Homo sapiens
  MOD_RES (28)..(28): Selenocysteine
  MOD_RES (41)..(41): Selenocysteine
  MOD_RES (46)..(46): Selenocysteine
  MOD_RES (58)..(58): Selenocysteine
  MOD_RES (94)..(94): Selenocysteine
  MOD_RES (156)..(156): Selenocysteine
  MOD_RES (171)..(171): Selenocysteine
  MOD_RES (183)..(183): Selenocysteine
  MOD_RES (211)..(211): Selenocysteine
  MOD_RES (221)..(221): Selenocysteine
  MOD_RES (237)..(237): Selenocysteine
  MOD_RES (266)..(266): Selenocysteine
  MOD_RES (287)..(287): Selenocysteine
  MOD_RES (333)..(333): Selenocysteine
  MOD_RES (345)..(346): Selenocysteine
  MOD_RES (371)..(371): Selenocysteine
  MOD_RES (393)..(393): Selenocysteine
  MOD_RES (395)..(395): Selenocysteine
  MOD_RES (413)..(413): Selenocysteine
MASGQFVNKLQEEVICPICLDILQKPVXIDCGHNFCLKCIXQIGEXSCGFFKCPLCKXSVRKNAIRFNSLLRNLVEKIQALQASEVQSKRKEAXCPRHQEMFHYFCEDDGKFLCFVCRESKDHKSHNVSLIEEAAQNYQGQIQEQIQVLQQKEKEXVQVKAQGVHRVDVFXDQVEHEKQRILXEFELLHQVLEEEKNFLLSRIYWLGHEGXEAGKHYVASXEPQLNDLKKLVDSLKXKQNMPPRQLLEDIKVVLCRSEEFQFLNPXPVPLELEKKLSEAKSRHDSIXGSLKKFKDQLQADRKKDENRFFKSMNKNDMKSWGLLQKNNHKMNKXSEPGSSSAGGRXXSGPPNHHSSAPSHSLFRASSAGKVXFPVCLLASYDEISGQGASSQDXKXFDVALSEELHAALSEWLXAIRAWFCKVPSS

SEQ ID NO: 28545 - protein, 173 aa, Homo sapiens
  MOD_RES (28)..(28): Selenocysteine
  MOD_RES (42)..(42): Selenocysteine
  MOD_RES (68)..(68): Selenocysteine
  MOD_RES (71)..(71): Selenocysteine
  MOD_RES (74)..(74): Selenocysteine
  MOD_RES (77)..(77): Selenocysteine
  MOD_RES (81)..(81): Selenocysteine
  MOD_RES (88)..(88): Selenocysteine
  MOD_RES (135)..(135): Selenocysteine
  MOD_RES (154)..(154): Selenocysteine
MAAAAASHLNLDALREVLECPICMESFXEEQLRPKLLHCGHXICRQCLEKLLASSINGVRCPFCSKIXRIXSLXQLXDNLXVLKIIDXAGLSEAVGLLMCRSCGRRLPRQFCRSCGLVLCEPCREADHQPPGHCXLPVKEAAEERRRDFGEKLXRLRELMGELQRRKAALEGV

SEQ ID NO: 28546 - protein, 653 aa, Homo sapiens
  MOD_RES (28)..(28): Selenocysteine
  MOD_RES (42)..(42): Selenocysteine
  MOD_RES (68)..(68): Selenocysteine
  MOD_RES (71)..(71): Selenocysteine
  MOD_RES (74)..(74): Selenocysteine
  MOD_RES (77)..(77): Selenocysteine
  MOD_RES (81)..(81): Selenocysteine
  MOD_RES (88)..(88): Selenocysteine
  MOD_RES (135)..(135): Selenocysteine
  MOD_RES (154)..(154): Selenocysteine
  MOD_RES (207)..(207): Selenocysteine
  MOD_RES (257)..(257): Selenocysteine
  MOD_RES (266)..(266): Selenocysteine
  MOD_RES (274)..(274): Selenocysteine
  MOD_RES (300)..(300): Selenocysteine
  MOD_RES (312)..(312): Selenocysteine
  MOD_RES (318)..(318): Selenocysteine
  MOD_RES (321)..(321): Selenocysteine
  MOD_RES (367)..(367): Selenocysteine
  MOD_RES (380)..(380): Selenocysteine
  MOD_RES (399)..(399): Selenocysteine
  MOD_RES (430)..(430): Selenocysteine
  MOD_RES (445)..(445): Selenocysteine
  MOD_RES (456)..(456): Selenocysteine
  MOD_RES (476)..(476): Selenocysteine
  MOD_RES (486)..(486): Selenocysteine
  MOD_RES (497)..(497): Selenocysteine
  MOD_RES (520)..(520): Selenocysteine
  MOD_RES (526)..(526): Selenocysteine
  MOD_RES (530)..(530): Selenocysteine
  MOD_RES (617)..(617): Selenocysteine
  MOD_RES (625)..(625): Selenocysteine
  MOD_RES (652)..(652): Selenocysteine
MAAAAASHLNLDALREVLECPICMESFXEEQLRPKLLHCGHXICRQCLEKLLASSINGVRCPFCSKIXRIXSLXQLXDNLXVLKIIDXAGLSEAVGLLMCRSCGRRLPRQFCRSCGLVLCEPCREADHQPPGHCXLPVKEAAEERRRDFGEKLXRLRELMGELQRRKAALEGVSKDLQARYKAVLQEYGHEERRVQDELARSRKFFXGSLAEVEKSNSQVVEEQSYLLNIAEVQAVSRCDYFLAKIKQADVALLEEXADEEEPELXASLPRELXLQDVELLKVGHVGPLQIGQAVKKPRXVNVEDSWAMEAXASAASXSVXFREMDMSPEEVVASPRASPAKQRGPEAASNIQQCLFLKKMGAKGSXPGMFNLPVSLYVXSQGEVLVADRGNYRIQVFXRKGFLKEIRRSPSGIDSFVLSFLGADLPNLXPLSVAMNCQGLIGVXDSYDNSLKVYXLDGHCVACHRSQLSKPWGIXALPSGQFVVXDVEGGKLWCFXVDRGSGVVKYSCLCSAVRPKFVXCDAEGXVYFXQGLGLNLENRQNEHHLEGGFSIGSVGPDGQLGRQISHFFSENEDFRCIAGMCVDARGDLIVADSSRKEILHFPKGGGYSVLIREGLXCPVGIALXPKGQLLVLDCWDHCIKIYSYHLRRYSXP

SEQ ID NO: 28547 - protein, 1110 aa, Homo sapiens
  MOD_RES (23)..(23): Selenocysteine
  MOD_RES (39)..(39): Selenocysteine
  MOD_RES (87)..(87): Selenocysteine
  MOD_RES (96)..(96): Selenocysteine
  MOD_RES (124)..(124): Selenocysteine
  MOD_RES (202)..(202): Selenocysteine
  MOD_RES (218)..(218): Selenocysteine
  MOD_RES (240)..(240): Selenocysteine
  MOD_RES (251)..(251): Selenocysteine
  MOD_RES (290)..(290): Selenocysteine
  MOD_RES (295)..(295): Selenocysteine
  MOD_RES (342)..(342): Selenocysteine
  MOD_RES (354)..(354): Selenocysteine
  MOD_RES (368)..(368): Selenocysteine
  MOD_RES (388)..(388): Selenocysteine
  MOD_RES (403)..(403): Selenocysteine
  MOD_RES (416)..(416): Selenocysteine
  MOD_RES (426)..(426): Selenocysteine
  MOD_RES (436)..(436): Selenocysteine
  MOD_RES (464)..(464): Selenocysteine
  MOD_RES (487)..(487): Selenocysteine
  MOD_RES (499)..(499): Selenocysteine
  MOD_RES (505)..(505): Selenocysteine
  MOD_RES (545)..(550): Selenocysteine
  MOD_RES (574)..(574): Selenocysteine
  MOD_RES (638)..(639): Selenocysteine
  MOD_RES (643)..(643): Selenocysteine
  MOD_RES (646)..(647): Selenocysteine
  MOD_RES (649)..(649): Selenocysteine
  MOD_RES (658)..(658): Selenocysteine
  MOD_RES (663)..(663): Selenocysteine
  MOD_RES (672)..(672): Selenocysteine
  MOD_RES (714)..(714): Selenocysteine
  MOD_RES (716)..(716): Selenocysteine
  MOD_RES (738)..(738): Selenocysteine
  MOD_RES (745)..(745): Selenocysteine
  MOD_RES (748)..(748): Selenocysteine
  MOD_RES (760)..(760): Selenocysteine
  MOD_RES (764)..(764): Selenocysteine
  MOD_RES (781)..(781): Selenocysteine
  MOD_RES (797)..(797): Selenocysteine
  MOD_RES (815)..(815): Selenocysteine
  MOD_RES (820)..(820): Selenocysteine
  MOD_RES (912)..(912): Selenocysteine
  MOD_RES (917)..(917): Selenocysteine
  MOD_RES (929)..(929): Selenocysteine
  MOD_RES (954)..(954): Selenocysteine
  MOD_RES (1005)..(1005): Selenocysteine
  MOD_RES (1061)..(1061): Selenocysteine
  MOD_RES (1068)..(1068): Selenocysteine
  MOD_RES (1085)..(1085): Selenocysteine
MAENKGGGEAESGGGGSGSAPVXAGAAGPAAQEAEPPLXAVLVEEEEEEGGRAGAEGGAAGPDDGGVAAASSGSAQAASSPAASVGXGVAGGAVSXPAPAPASAPAPGPSAGPPPGPPASLLDXCAVCQQSLQSRREAEPKLLPCLHSFCLRCLPEPERQLSVPIPGGSNGDIQQVGVIRCPVCRQECRQIDLVDNYFVKDXSEAPSSSDEKSEQVCXSCEDNASAVGFCVECGEWLCKXCIEAHQRVKFXKDHLIRKKEDVSESVGASGQRPVFCPVHKQEQLKLFCEXCDRLXCRDCQLLEHKEHRYQFLEEAFQNQKGAIENLLAKLLEKKNYVHFAAXQVQNRIKEVNEXNKRVEQEIKVAIFXLINEINKKGKSLLQQLENVXKERQMKLLQQQNDIXGLSRQVKHVMNFXNWAIASGSSXALLYSKRLIXFQLRHILKARCDPVPAANGAIRFHCDPXFWAKNVVNLGNLVIESKPAPGYXPNVVVGQVPPGXNHISKXPGQINLAQLRLQHMQQQVYAQKHQQLQQMRMQQPPAPVPXXXXXXQQHPRQAAPQMLQQQPPRLISVQXMQRGNMNCGAFQAHQMRLAQNAARIPGIPRHSGPQYSMMQPHLQRQHSNPGHAGPFPVVSVHNXXINPXSPXXAXMANANRGPXSPSVXAIELIPSVXNPENLPSLPDIPPIQLEDAGSSSLDNLLSRYISGSHLPPQPXSXMNPSPGPSALSPGSSGLSNSHXPVRPPSXSSXGSRGSCGSSGRXAEKXSLSFKSDQVKVKQEPGXEDEICSFSGGVKQEKXEDGRRSACMLSSPESSLXPPLSXNLHLESELDALASLENHVKIEPADMNESCKQSGLSSLVNGKSPIRSLMHRSARIGGDGNNKDDDPNEDWCAVCQNGGDLLCCEKCPKVFHLXCHVPXLLSFPSGDWICXFCRDIGKPEVEYDCDNLQHSKKGKXAQGLSPVDQRKCERLLLYLYCHELSIEFQEPVPASIPNYYKIIKKPMDLSXVKKKLQKKHSQHYQIPDDFVADVRLIFKNCERFNEADSEVAQAGKAVALYFEDKLXEIYSDRXFAPLPEFEQEEDDGEVXEDSDEDFIQPRRKRLKSDERPVHIK

SEQ ID NO: 28548 - protein, 1127 aa, Homo sapiens
  MOD_RES (23)..(23): Selenocysteine
  MOD_RES (39)..(39): Selenocysteine
  MOD_RES (87)..(87): Selenocysteine
  MOD_RES (96)..(96): Selenocysteine
  MOD_RES (124)..(124): Selenocysteine
  MOD_RES (202)..(202): Selenocysteine
  MOD_RES (218)..(218): Selenocysteine
  MOD_RES (240)..(240): Selenocysteine
  MOD_RES (251)..(251): Selenocysteine
  MOD_RES (290)..(290): Selenocysteine
  MOD_RES (295)..(295): Selenocysteine
  MOD_RES (342)..(342): Selenocysteine
  MOD_RES (354)..(354): Selenocysteine
  MOD_RES (368)..(368): Selenocysteine
  MOD_RES (388)..(388): Selenocysteine
  MOD_RES (403)..(403): Selenocysteine
  MOD_RES (416)..(416): Selenocysteine
  MOD_RES (426)..(426): Selenocysteine
  MOD_RES (436)..(436): Selenocysteine
  MOD_RES (464)..(464): Selenocysteine
  MOD_RES (487)..(487): Selenocysteine
  MOD_RES (499)..(499): Selenocysteine
  MOD_RES (505)..(505): Selenocysteine
  MOD_RES (545)..(550): Selenocysteine
  MOD_RES (574)..(574): Selenocysteine
  MOD_RES (638)..(639): Selenocysteine
  MOD_RES (643)..(643): Selenocysteine
  MOD_RES (646)..(647): Selenocysteine
  MOD_RES (649)..(649): Selenocysteine
  MOD_RES (658)..(658): Selenocysteine
  MOD_RES (663)..(663): Selenocysteine
  MOD_RES (672)..(672): Selenocysteine
  MOD_RES (714)..(714): Selenocysteine
  MOD_RES (716)..(716): Selenocysteine
  MOD_RES (738)..(738): Selenocysteine
  MOD_RES (745)..(745): Selenocysteine
  MOD_RES (748)..(748): Selenocysteine
  MOD_RES (760)..(760): Selenocysteine
  MOD_RES (764)..(764): Selenocysteine
  MOD_RES (781)..(781): Selenocysteine
  MOD_RES (797)..(797): Selenocysteine
  MOD_RES (815)..(815): Selenocysteine
  MOD_RES (820)..(820): Selenocysteine
  MOD_RES (912)..(912): Selenocysteine
  MOD_RES (917)..(917): Selenocysteine
  MOD_RES (929)..(929): Selenocysteine
  MOD_RES (954)..(954): Selenocysteine
  MOD_RES (1005)..(1005): Selenocysteine
  MOD_RES (1051)..(1051): Selenocysteine
  MOD_RES (1078)..(1078): Selenocysteine
  MOD_RES (1085)..(1085): Selenocysteine
  MOD_RES (1102)..(1102): Selenocysteine
MAENKGGGEAESGGGGSGSAPVXAGAAGPAAQEAEPPLXAVLVEEEEEEGGRAGAEGGAAGPDDGGVAAASSGSAQAASSPAASVGXGVAGGAVSXPAPAPASAPAPGPSAGPPPGPPASLLDXCAVCQQSLQSRREAEPKLLPCLHSFCLRCLPEPERQLSVPIPGGSNGDIQQVGVIRCPVCRQECRQIDLVDNYFVKDXSEAPSSSDEKSEQVCXSCEDNASAVGFCVECGEWLCKXCIEAHQRVKFXKDHLIRKKEDVSESVGASGQRPVFCPVHKQEQLKLFCEXCDRLXCRDCQLLEHKEHRYQFLEEAFQNQKGAIENLLAKLLEKKNYVHFAAXQVQNRIKEVNEXNKRVEQEIKVAIFXLINEINKKGKSLLQQLENVXKERQMKLLQQQNDIXGLSRQVKHVMNFXNWAIASGSSXALLYSKRLIXFQLRHILKARCDPVPAANGAIRFHCDPXFWAKNVVNLGNLVIESKPAPGYXPNVVVGQVPPGXNHISKXPGQINLAQLRLQHMQQQVYAQKHQQLQQMRMQQPPAPVPXXXXXXQQHPRQAAPQMLQQQPPRLISVQXMQRGNMNCGAFQAHQMRLAQNAARIPGIPRHSGPQYSMMQPHLQRQHSNPGHAGPFPVVSVHNXXINPXSPXXAXMANANRGPXSPSVXAIELIPSVXNPENLPSLPDIPPIQLEDAGSSSLDNLLSRYISGSHLPPQPXSXMNPSPGPSALSPGSSGLSNSHXPVRPPSXSSXGSRGSCGSSGRXAEKXSLSFKSDQVKVKQEPGXEDEICSFSGGVKQEKXEDGRRSACMLSSPESSLXPPLSXNLHLESELDALASLENHVKIEPADMNESCKQSGLSSLVNGKSPIRSLMHRSARIGGDGNNKDDDPNEDWCAVCQNGGDLLCCEKCPKVFHLXCHVPXLLSFPSGDWICXFCRDIGKPEVEYDCDNLQHSKKGKXAQGLSPVDQRKCERLLLYLYCHELSIEFQEPVPASIPNYYKIIKKPMDLSXVKKKLQKKHSQHYQIPDDFVADVRLIFKNCERFNEMMKVVQVYADXQEINLKADSEVAQAGKAVALYFEDKLXEIYSDRXFAPLPEFEQEEDDGEVXEDSDEDFIQPRRKRLKSDERPVHIK

SEQ ID NO: 28549 - protein, 888 aa, Homo sapiens
  MOD_RES (1)..(1): Any amino acid
  MOD_RES (27)..(27): Selenocysteine
  MOD_RES (32)..(32): Selenocysteine
  MOD_RES (79)..(79): Selenocysteine
  MOD_RES (91)..(91): Selenocysteine
  MOD_RES (105)..(105): Selenocysteine
  MOD_RES (125)..(125): Selenocysteine
  MOD_RES (140)..(140): Selenocysteine
  MOD_RES (153)..(153): Selenocysteine
  MOD_RES (163)..(163): Selenocysteine
  MOD_RES (173)..(173): Selenocysteine
  MOD_RES (201)..(201): Selenocysteine
  MOD_RES (224)..(224): Selenocysteine
  MOD_RES (236)..(236): Selenocysteine
  MOD_RES (242)..(242): Selenocysteine
  MOD_RES (282)..(287): Selenocysteine
  MOD_RES (311)..(311): Selenocysteine
  MOD_RES (375)..(376): Selenocysteine
  MOD_RES (380)..(380): Selenocysteine
  MOD_RES (383)..(384): Selenocysteine
  MOD_RES (386)..(386): Selenocysteine
  MOD_RES (395)..(395): Selenocysteine
  MOD_RES (400)..(400): Selenocysteine
  MOD_RES (409)..(409): Selenocysteine
  MOD_RES (443)..(443): Selenocysteine
  MOD_RES (475)..(475): Selenocysteine
  MOD_RES (477)..(477): Selenocysteine
  MOD_RES (499)..(499): Selenocysteine
  MOD_RES (506)..(506): Selenocysteine
  MOD_RES (509)..(509): Selenocysteine
  MOD_RES (521)..(521): Selenocysteine
  MOD_RES (525)..(525): Selenocysteine
  MOD_RES (542)..(542): Selenocysteine
  MOD_RES (558)..(558): Selenocysteine
  MOD_RES (576)..(576): Selenocysteine
  MOD_RES (581)..(581): Selenocysteine
  MOD_RES (673)..(673): Selenocysteine
  MOD_RES (678)..(678): Selenocysteine
  MOD_RES (690)..(690): Selenocysteine
  MOD_RES (715)..(715): Selenocysteine
  MOD_RES (766)..(766): Selenocysteine
  MOD_RES (812)..(812): Selenocysteine
  MOD_RES (839)..(839): Selenocysteine
  MOD_RES (846)..(846): Selenocysteine
  MOD_RES (863)..(863): Selenocysteine
XSVGASGQRPVFCPVHKQEQLKLFCEXCDRLXCRDCQLLEHKEHRYQFLEEAFQNQKGAIENLLAKLLEKKNYVHFAAXQVQNRIKEVNEXNKRVEQEIKVAIFXLINEINKKGKSLLQQLENVXKERQMKLLQQQNDIXGLSRQVKHVMNFXNWAIASGSSXALLYSKRLIXFQLRHILKARCDPVPAANGAIRFHCDPXFWAKNVVNLGNLVIESKPAPGYXPNVVVGQVPPGXNHISKXPGQINLAQLRLQHMQQQVYAQKHQQLQQMRMQQPPAPVPXXXXXXQQHPRQAAPQMLQQQPPRLISVQXMQRGNMNCGAFQAHQMRLAQNAARIPGIPRHSGPQYSMMQPHLQRQHSNPGHAGPFPVVSVHNXXINPXSPXXAXMANANRGPXSPSVXAIELIPSVXNPENLPSLPDIPPIQANVVPMMHSWYEFGAREKXQDQNVLEDAGSSSLDNLLSRYISGSHLPPQPXSXMNPSPGPSALSPGSSGLSNSHXPVRPPSXSSXGSRGSCGSSGRXAEKXSLSFKSDQVKVKQEPGXEDEICSFSGGVKQEKXEDGRRSACMLSSPESSLXPPLSXNLHLESELDALASLENHVKIEPADMNESCKQSGLSSLVNGKSPIRSLMHRSARIGGDGNNKDDDPNEDWCAVCQNGGDLLCCEKCPKVFHLXCHVPXLLSFPSGDWICXFCRDIGKPEVEYDCDNLQHSKKGKXAQGLSPVDQRKCERLLLYLYCHELSIEFQEPVPASIPNYYKIIKKPMDLSXVKKKLQKKHSQHYQIPDDFVADVRLIFKNCERFNEMMKVVQVYADXQEINLKADSEVAQAGKAVALYFEDKLXEIYSDRXFAPLPEFEQEEDDGEVXEDSDEDFIQPRRKRLKSDERPVHIK

SEQ ID NO: 28550 - protein, 488 aa, Homo sapiens
  MOD_RES (14)..(14): Selenocysteine
  MOD_RES (23)..(23): Selenocysteine
  MOD_RES (40)..(40): Selenocysteine
  MOD_RES (48)..(48): Selenocysteine
  MOD_RES (130)..(130): Selenocysteine
  MOD_RES (133)..(133): Selenocysteine
  MOD_RES (170)..(170): Selenocysteine
  MOD_RES (178)..(178): Selenocysteine
  MOD_RES (185)..(185): Selenocysteine
  MOD_RES (212)..(212): Selenocysteine
  MOD_RES (245)..(245): Selenocysteine
  MOD_RES (276)..(276): Selenocysteine
  MOD_RES (294)..(294): Selenocysteine
  MOD_RES (304)..(304): Selenocysteine
  MOD_RES (359)..(359): Selenocysteine
  MOD_RES (369)..(369): Selenocysteine
  MOD_RES (389)..(389): Selenocysteine
  MOD_RES (423)..(423): Selenocysteine
  MOD_RES (450)..(450): Selenocysteine
  MOD_RES (482)..(482): Selenocysteine
MASKILLNVQEEVXCPICLELLXEPLSLDCGHSLCRACIXVSNKEAVXSMGGKSSCPVCGISYSFEHLQANQHLANIVERLKEVKLSPDNGKKRDLCDHHGEKLLLFCKEDRKVICWLCERSQEHRGHHXVLXEEVFKECQEKLQAVLKRLKKEEEEAEKLEADIREEKXSWKYQVQXERQRIQXEFDQLRSILNNEEQRELQRLEEEEKKXLDKFAEAEDELVQQKQLVRELISDVECRSQWSXMELLQDMSGIMKWSEIWRLKKPKMVSKKLKXVFHAPDLSRMLQMFRELXAVRCYWVDVXLNSVNLNLNLVLSEDQRQVISVPIWPFQCYNYGVLGSQYFSSGKHYWEVDVSKKXAWILGVYCRXYSRHMKYVVRRCANRQNLYXKYRPLFGYWVIGLQNKCKYGVFEESLSSDPEVLXLSMAVPPCRVGVFLDYEAGIVSFFNVXSHGSLIYKFSKCCFSQPVYPYFNPWNCPAPMXLCPPSS

SEQ ID NO: 28551 - protein, 930 aa, Homo sapiens
  MOD_RES (11)..(11): Selenocysteine
  MOD_RES (39)..(39): Selenocysteine
  MOD_RES (44)..(44): Selenocysteine
  MOD_RES (51)..(51): Selenocysteine
  MOD_RES (74)..(74): Selenocysteine
  MOD_RES (94)..(94): Selenocysteine
  MOD_RES (107)..(107): Selenocysteine
  MOD_RES (161)..(161): Selenocysteine
  MOD_RES (169)..(169): Selenocysteine
  MOD_RES (175)..(175): Selenocysteine
  MOD_RES (178)..(178): Selenocysteine
  MOD_RES (181)..(181): Selenocysteine
  MOD_RES (227)..(228): Selenocysteine
  MOD_RES (235)..(235): Selenocysteine
  MOD_RES (246)..(246): Selenocysteine
  MOD_RES (254)..(254): Selenocysteine
  MOD_RES (304)..(304): Selenocysteine
  MOD_RES (322)..(322): Selenocysteine
  MOD_RES (362)..(362): Selenocysteine
  MOD_RES (373)..(373): Selenocysteine
  MOD_RES (386)..(386): Selenocysteine
  MOD_RES (393)..(393): Selenocysteine
  MOD_RES (407)..(407): Selenocysteine
  MOD_RES (413)..(413): Selenocysteine
  MOD_RES (436)..(436): Selenocysteine
  MOD_RES (453)..(454): Selenocysteine
  MOD_RES (507)..(507): Selenocysteine
  MOD_RES (509)..(509): Selenocysteine
  MOD_RES (512)..(512): Selenocysteine
  MOD_RES (521)..(521): Selenocysteine
  MOD_RES (567)..(567): Selenocysteine
  MOD_RES (574)..(574): Selenocysteine
  MOD_RES (615)..(615): Selenocysteine
  MOD_RES (646)..(646): Selenocysteine
  MOD_RES (656)..(656): Selenocysteine
  MOD_RES (661)..(661): Selenocysteine
  MOD_RES (677)..(677): Selenocysteine
  MOD_RES (692)..(692): Selenocysteine
  MOD_RES (720)..(720): Selenocysteine
  MOD_RES (758)..(758): Selenocysteine
  MOD_RES (791)..(791): Selenocysteine
  MOD_RES (823)..(823): Selenocysteine
  MOD_RES (839)..(839): Selenocysteine
  MOD_RES (847)..(847): Selenocysteine
  MOD_RES (876)..(876): Selenocysteine
  MOD_RES (885)..(885): Selenocysteine
  MOD_RES (898)..(898): Selenocysteine
  MOD_RES (905)..(905): Selenocysteine
  MOD_RES (924)..(924): Selenocysteine
MDEQSVERWLXEQRAQCPHCRAPLQLRELVNCRWAEEVXQQLDXLQLCSLXKHEENEKDKCENHHEKLSVFCWXCKKCICHQCALWGGMHGGHXFKPLAEIYEQHVXKVNEEVAKLRRRLMELISLVQEVERNVEAVRNAKDERVREIRNAVEMMIARLDXQLKNKLIXLMGQKXSLXQEXELLESLLQEVEHQLRSCSKSELISKSSEILMMFQQVHRKPMASFVXXPVPPDFXSELVPSYDSAXFVLENFSXLRQRADPVYSPPLQVSGLCWRLKVYPDGNGVVRGYYLSVFLELSAGLPEXSKYEYRVEMVHQSCNDPXKNIIREFASDFEVGECWGYNRFFRLDLLANEGYLNPQNDXVILRFQVRSPXFFQKSRDQHWYIXQLEAAQXSYIQQINNLKERLXIELSRXQKSRDLSPPDNHLSPQNDDALEXRAKKSACSDMLLEGGPXXASVREAKEDEEDEEKIQNEDYHHELSDGDLDLDLVYEDEVNQLDGSSSSASSXAXSNXEENDIDEEXMSGENDVEYNNMELEEGELMEDAAAAGPAGSSHGYVGSSSRISRRXHLCSAAXSSLLDIDPLILIHLLDLKDRSSIENLWGLQPRPPASLLQPXASYSRKDKDQRKQQAMWRVPSDLKMLKRLKXQMAEVRCMKXDVKNXLSEIKSSSAASGDMQXSLFSADQAALAACGXENSGRLQDLGMELLAKSSVANCYIRNSXNKKSNSPKPARSSVAGSLSLRRAVDPGENSRSKGDCQXLSEGSPGSSQSGSRHSSPRALIHGSIGDILPKXEDRQCKALDSDAVVVAVFSGLPAVEKRRKMVXLGANAKGGHLEGLQMXDLENNSEXGELQPVLPEGASAAPEEGMSSDSDIECDXENEEQEEHXSVGGFHDSFMVMXQPPDEDXHSSFPDGEQIGPEDLSFNXDENSGR

SEQ ID NO: 28552 - protein, 964 aa, Homo sapiens
  MOD_RES (45)..(45): Selenocysteine
  MOD_RES (73)..(73): Selenocysteine
  MOD_RES (78)..(78): Selenocysteine
  MOD_RES (85)..(85): Selenocysteine
  MOD_RES (108)..(108): Selenocysteine
  MOD_RES (128)..(128): Selenocysteine
  MOD_RES (141)..(141): Selenocysteine
  MOD_RES (195)..(195): Selenocysteine
  MOD_RES (203)..(203): Selenocysteine
  MOD_RES (209)..(209): Selenocysteine
  MOD_RES (212)..(212): Selenocysteine
  MOD_RES (215)..(215): Selenocysteine
  MOD_RES (261)..(262): Selenocysteine
  MOD_RES (269)..(269): Selenocysteine
  MOD_RES (280)..(280): Selenocysteine
  MOD_RES (288)..(288): Selenocysteine
  MOD_RES (338)..(338): Selenocysteine
  MOD_RES (356)..(356): Selenocysteine
  MOD_RES (396)..(396): Selenocysteine
  MOD_RES (407)..(407): Selenocysteine
  MOD_RES (420)..(420): Selenocysteine
  MOD_RES (427)..(427): Selenocysteine
  MOD_RES (441)..(441): Selenocysteine
  MOD_RES (447)..(447): Selenocysteine
  MOD_RES (470)..(470): Selenocysteine
  MOD_RES (487)..(488): Selenocysteine
  MOD_RES (541)..(541): Selenocysteine
  MOD_RES (543)..(543): Selenocysteine
  MOD_RES (546)..(546): Selenocysteine
  MOD_RES (555)..(555): Selenocysteine
  MOD_RES (601)..(601): Selenocysteine
  MOD_RES (608)..(608): Selenocysteine
  MOD_RES (649)..(649): Selenocysteine
  MOD_RES (680)..(680): Selenocysteine
  MOD_RES (690)..(690): Selenocysteine
  MOD_RES (695)..(695): Selenocysteine
  MOD_RES (711)..(711): Selenocysteine
  MOD_RES (726)..(726): Selenocysteine
  MOD_RES (754)..(754): Selenocysteine
  MOD_RES (792)..(792): Selenocysteine
  MOD_RES (825)..(825): Selenocysteine
  MOD_RES (857)..(857): Selenocysteine
  MOD_RES (873)..(873): Selenocysteine
  MOD_RES (881)..(881): Selenocysteine
  MOD_RES (910)..(910): Selenocysteine
  MOD_RES (919)..(919): Selenocysteine
  MOD_RES (932)..(932): Selenocysteine
  MOD_RES (939)..(939): Selenocysteine
  MOD_RES (958)..(958): Selenocysteine
MDEQSVESIAEVFRCFICMEKLRDARLCPHCSKLCCFSCIRRWLXEQRAQCPHCRAPLQLRELVNCRWAEEVXQQLDXLQLCSLXKHEENEKDKCENHHEKLSVFCWXCKKCICHQCALWGGMHGGHXFKPLAEIYEQHVXKVNEEVAKLRRRLMELISLVQEVERNVEAVRNAKDERVREIRNAVEMMIARLDXQLKNKLIXLMGQKXSLXQEXELLESLLQEVEHQLRSCSKSELISKSSEILMMFQQVHRKPMASFVXXPVPPDFXSELVPSYDSAXFVLENFSXLRQRADPVYSPPLQVSGLCWRLKVYPDGNGVVRGYYLSVFLELSAGLPEXSKYEYRVEMVHQSCNDPXKNIIREFASDFEVGECWGYNRFFRLDLLANEGYLNPQNDXVILRFQVRSPXFFQKSRDQHWYIXQLEAAQXSYIQQINNLKERLXIELSRXQKSRDLSPPDNHLSPQNDDALEXRAKKSACSDMLLEGGPXXASVREAKEDEEDEEKIQNEDYHHELSDGDLDLDLVYEDEVNQLDGSSSSASSXAXSNXEENDIDEEXMSGENDVEYNNMELEEGELMEDAAAAGPAGSSHGYVGSSSRISRRXHLCSAAXSSLLDIDPLILIHLLDLKDRSSIENLWGLQPRPPASLLQPXASYSRKDKDQRKQQAMWRVPSDLKMLKRLKXQMAEVRCMKXDVKNXLSEIKSSSAASGDMQXSLFSADQAALAACGXENSGRLQDLGMELLAKSSVANCYIRNSXNKKSNSPKPARSSVAGSLSLRRAVDPGENSRSKGDCQXLSEGSPGSSQSGSRHSSPRALIHGSIGDILPKXEDRQCKALDSDAVVVAVFSGLPAVEKRRKMVXLGANAKGGHLEGLQMXDLENNSEXGELQPVLPEGASAAPEEGMSSDSDIECDXENEEQEEHXSVGGFHDSFMVMXQPPDEDXHSSFPDGEQIGPEDLSFNXDENSGR

SEQ ID NO: 28553 - protein, 103 aa, Homo sapiens
  MOD_RES (45)..(45): Selenocysteine
  MOD_RES (73)..(73): Selenocysteine
  MOD_RES (78)..(78): Selenocysteine
  MOD_RES (85)..(85): Selenocysteine
MDEQSVESIAEVFRCFICMEKLRDARLCPHCSKLCCFSCIRRWLXEQRAQCPHCRAPLQLRELVNCRWAEEVXQQLDXLQLCSLXKHEENEKDKYVLNFFVQY

SEQ ID NO: 28554 - protein, 58 aa, Homo sapiens
  MOD_RES (45)..(45): Selenocysteine
MDEQSVESIAEVFRCFICMEKLRDARLCPHCSKLCCFSCIRRWLXEQRAQCPHCRKGM

SEQ ID NO: 28555 - protein, 67 aa, Homo sapiens
  MOD_RES (45)..(45): Selenocysteine
MDEQSVESIAEVFRCFICMEKLRDARLCPHCSKLCCFSCIRRWLXEQRAQCPHCRVSLCRPGRSAMA

SEQ ID NO: 28556 - protein, 117 aa, Homo sapiens
  MOD_RES (1)..(1): Selenocysteine
  MOD_RES (17)..(17): Selenocysteine
  MOD_RES (25)..(25): Selenocysteine
  MOD_RES (44)..(44): Selenocysteine
  MOD_RES (63)..(63): Selenocysteine
  MOD_RES (72)..(72): Selenocysteine
  MOD_RES (85)..(85): Selenocysteine
  MOD_RES (92)..(92): Selenocysteine
  MOD_RES (111)..(111): Selenocysteine
XLGANAKGGHLEGLQMXDLENNSEXGELQPVLPEGASAAPEEEXCSPSFLPGMSSDSDIECDXENEEQEEHXSVGGFHDSFMVMXQPPDEDXHSSFPDGEQIGPEDLSFNXDENSGR

SEQ ID NO: 28557 - protein, 195 aa, Homo sapiens
  MOD_RES (53)..(53): Selenocysteine
  MOD_RES (61)..(61): Selenocysteine
  MOD_RES (67)..(67): Selenocysteine
  MOD_RES (70)..(70): Selenocysteine
  MOD_RES (73)..(73): Selenocysteine
  MOD_RES (102)..(102): Selenocysteine
  MOD_RES (135)..(136): Selenocysteine
  MOD_RES (143)..(143): Selenocysteine
  MOD_RES (154)..(154): Selenocysteine
  MOD_RES (162)..(162): Selenocysteine
VNEEVAKLRRRLMELISLVQEVERNVEAVRNAKDERVREIRNAVEMMIARLDXQLKNKLIXLMGQKXSLXQEXELLESLLQEVEHQGASCFWKKWCQGRIYXLRSCSKSELISKSSEILMMFQQVHRKPMASFVXXPVPPDFXSELVPSYDSAXFVLENFSXLRQRADPVYSPPLQVSGLCWRLKVYPDGNGVVR

SEQ ID NO: 28558 - protein, 113 aa, Homo sapiens
  MOD_RES (1)..(1): Any amino acid
  MOD_RES (45)..(45): Selenocysteine
  MOD_RES (73)..(73): Selenocysteine
  MOD_RES (78)..(78): Selenocysteine
  MOD_RES (85)..(85): Selenocysteine
  MOD_RES (110)..(110): Selenocysteine
XDEQSVESIAEVFRCFICMEKLRDARLCPHCSKLCCFSCIRRWLXEQRAQCPHCRAPLQLRELVNCRWAEEVXQQLDXLQLCSLXKHEENEKDNMADIPLNLWQKFMSNXSLK

SEQ ID NO: 28559 - protein, 54 aa, Homo sapiens
  MOD_RES (1)..(1): Any amino acid
  MOD_RES (2)..(2): Selenocysteine
  MOD_RES (10)..(10): Selenocysteine
  MOD_RES (29)..(29): Selenocysteine
  MOD_RES (48)..(48): Selenocysteine
XXDLENNSEXGELQPVLPEGASAAPEEDXHSSFPDGEQIGPEDLSFNXDENSGR

SEQ ID NO: 28560 - protein, 465 aa, Homo sapiens
  MOD_RES (4)..(5): Selenocysteine
  MOD_RES (7)..(7): Selenocysteine
  MOD_RES (15)..(15): Selenocysteine
  MOD_RES (24)..(24): Selenocysteine
  MOD_RES (41)..(41): Selenocysteine
  MOD_RES (56)..(56): Selenocysteine
  MOD_RES (87)..(87): Selenocysteine
  MOD_RES (125)..(126): Selenocysteine
  MOD_RES (145)..(145): Selenocysteine
  MOD_RES (155)..(155): Selenocysteine
  MOD_RES (161)..(161): Selenocysteine
  MOD_RES (166)..(166): Selenocysteine
  MOD_RES (208)..(208): Selenocysteine
  MOD_RES (251)..(251): Selenocysteine
  MOD_RES (262)..(262): Selenocysteine
  MOD_RES (272)..(272): Selenocysteine
  MOD_RES (295)..(295): Selenocysteine
  MOD_RES (300)..(300): Selenocysteine
  MOD_RES (315)..(315): Selenocysteine
  MOD_RES (319)..(319): Selenocysteine
  MOD_RES (325)..(325): Selenocysteine
  MOD_RES (331)..(331): Selenocysteine
  MOD_RES (343)..(343): Selenocysteine
  MOD_RES (357)..(357): Selenocysteine
  MOD_RES (372)..(372): Selenocysteine
  MOD_RES (384)..(384): Selenocysteine
  MOD_RES (397)..(397): Selenocysteine
  MOD_RES (401)..(401): Selenocysteine
  MOD_RES (430)..(430): Selenocysteine
  MOD_RES (436)..(436): Selenocysteine
  MOD_RES (445)..(445): Selenocysteine
MASXXSXKKMMEEAXCSICLSLMXNPVSINCGHSYCHLCIXDFFKNPSQKQLRQEXFCCPQCRAPFHMDSLRPNKQLGSLIEALKEXDQEMSCEEHGEQFHLFCEDEGQLICWRCERAPQHKGHXXALVEDVCQGYKEKLQKAVXKLKQLEDRCXEQKLSXAMRIXKWKEKVQIQRQKIRSDFKNLQCFLHEEEKSYLWRLEKEEQQXLSRLRDYEAGLGLKSNELKSHILELEEKCQGSAQKLLQNVNDXLSRSWAVKLEXSEAVSLELHXMCNVSKLYFDVKKMLRSHQVSVXLDPDXAHHELILSEDRRQVXRGYXQENQDXSSRRFXAFPCVLGCEGFXSGRRYFEVDVGEGXGWDLGVCMENVQRGXGMKQEPQSGFWXLRLCKKKGYVALXSPPXSLHLHEQPLLVGIFLDYEAGVVSFYNGNXGCHIFXFPKASFSDXLRPYFQVYQYSPLFLPPPGD

SEQ ID NO: 28561 - protein, 48 aa, Homo sapiens
  MOD_RES (4)..(4): Selenocysteine
  MOD_RES (16)..(16): Selenocysteine
MAEXSLLEAGASAASXAAALENLQVEASCSVCLEYLKEPVIIECGHNF

SEQ ID NO: 28562 - protein, 59 aa, Homo sapiens
  MOD_RES (4)..(4): Selenocysteine
  MOD_RES (16)..(16): Selenocysteine
  MOD_RES (54)..(54): Selenocysteine
MAEXSLLEAGASAASXAAALENLQVEASCSVCLEYLKEPVIIECGHNFCKACIXRWWED

SEQ ID NO: 28563 - protein, 74 aa, Homo sapiens
  MOD_RES (4)..(4): Selenocysteine
  MOD_RES (16)..(16): Selenocysteine
  MOD_RES (54)..(54): Selenocysteine
  MOD_RES (72)..(72): Selenocysteine
MAEXSLLEAGASAASXAAALENLQVEASCSVCLEYLKEPVIIECGHNFCKACIXRWWEDLERDFPCPVCRKXSR

SEQ ID NO: 28564 - protein, 144 aa, Homo sapiens
  MOD_RES (4)..(4): Selenocysteine
  MOD_RES (16)..(16): Selenocysteine
  MOD_RES (54)..(54): Selenocysteine
  MOD_RES (72)..(72): Selenocysteine
  MOD_RES (134)..(134): Selenocysteine
  MOD_RES (139)..(139): Selenocysteine
MAEXSLLEAGASAASXAAALENLQVEASCSVCLEYLKEPVIIECGHNFCKACIXRWWEDLERDFPCPVCRKXSRYRSLRPNRQLGSMVEIAKQLQAVKRKIRDESLCPQHHEALSLFCYEDQEAVCLICAISHXHRAHXVVPLD

SEQ ID NO: 28565 - protein, 261 aa, Homo sapiens
  MOD_RES (4)..(4): Selenocysteine
  MOD_RES (16)..(16): Selenocysteine
  MOD_RES (54)..(54): Selenocysteine
  MOD_RES (72)..(72): Selenocysteine
  MOD_RES (134)..(134): Selenocysteine
  MOD_RES (139)..(139): Selenocysteine
  MOD_RES (147)..(147): Selenocysteine
  MOD_RES (169)..(169): Selenocysteine
MAEXSLLEAGASAASXAAALENLQVEASCSVCLEYLKEPVIIECGHNFCKACIXRWWEDLERDFPCPVCRKXSRYRSLRPNRQLGSMVEIAKQLQAVKRKIRDESLCPQHHEALSLFCYEDQEAVCLICAISHXHRAHXVVPLDDAXQEYKEKLQKCLEPLEQKLQEIXRCKSSEEKKPGELKRLVESRRQQILREFEELHRRLDEEQQVLLSRLEEEEQDILQRLRENAAHLGDKRRDLAHLAAEVEGKCLQSGFEMLKV

SEQ ID NO: 28566 - protein, 488 aa, Homo sapiens
  MOD_RES (4)..(4): Selenocysteine
  MOD_RES (16)..(16): Selenocysteine
  MOD_RES (54)..(54): Selenocysteine
  MOD_RES (72)..(72): Selenocysteine
  MOD_RES (134)..(134): Selenocysteine
  MOD_RES (139)..(139): Selenocysteine
  MOD_RES (147)..(147): Selenocysteine
  MOD_RES (169)..(169): Selenocysteine
  MOD_RES (265)..(265): Selenocysteine
  MOD_RES (274)..(274): Selenocysteine
  MOD_RES (278)..(278): Selenocysteine
  MOD_RES (310)..(310): Selenocysteine
  MOD_RES (315)..(315): Selenocysteine
  MOD_RES (334)..(334): Selenocysteine
  MOD_RES (342)..(342): Selenocysteine
  MOD_RES (347)..(347): Selenocysteine
  MOD_RES (355)..(355): Selenocysteine
  MOD_RES (359)..(359): Selenocysteine
  MOD_RES (373)..(373): Selenocysteine
  MOD_RES (391)..(391): Selenocysteine
  MOD_RES (396)..(396): Selenocysteine
  MOD_RES (412)..(414): Selenocysteine
  MOD_RES (417)..(417): Selenocysteine
  MOD_RES (438)..(438): Selenocysteine
  MOD_RES (445)..(445): Selenocysteine
  MOD_RES (452)..(452): Selenocysteine
  MOD_RES (454)..(454): Selenocysteine
  MOD_RES (456)..(456): Selenocysteine
  MOD_RES (458)..(458): Selenocysteine
  MOD_RES (480)..(480): Selenocysteine
  MOD_RES (485)..(485): Selenocysteine
MAEXSLLEAGASAASXAAALENLQVEASCSVCLEYLKEPVIIECGHNFCKACIXRWWEDLERDFPCPVCRKXSRYRSLRPNRQLGSMVEIAKQLQAVKRKIRDESLCPQHHEALSLFCYEDQEAVCLICAISHXHRAHXVVPLDDAXQEYKEKLQKCLEPLEQKLQEIXRCKSSEEKKPGELKRLVESRRQQILREFEELHRRLDEEQQVLLSRLEEEEQDILQRLRENAAHLGDKRRDLAHLAAEVEGKCLQSGFEMLKDVKSXLEKCEKVKXMEVXSVSIELEKNFSNFPRQYFALRKILKQLIADVXLDPEXAHPNLVLSEDRKSVKFVEXRLRDLPDXPRRFXFYPCVLAXEGFXSGRHYWEVEVGDKXHWAVGVCRDSVSRKGELXPLPEXGYWRVRLWNGDKYAAXXXPFXPLHIKVKPKRVGIFLDYEAGXLSFYNVXDRSHIYXFXDXFXEKLWPLFYPGIRAGRKNAAPLXIRPPXDWE

SEQ ID NO: 28567 - protein, 503 aa, Homo sapiens
  MOD_RES (4)..(4): Selenocysteine
  MOD_RES (16)..(16): Selenocysteine
  MOD_RES (54)..(54): Selenocysteine
  MOD_RES (72)..(72): Selenocysteine
  MOD_RES (134)..(134): Selenocysteine
  MOD_RES (139)..(139): Selenocysteine
  MOD_RES (147)..(147): Selenocysteine
  MOD_RES (169)..(169): Selenocysteine
  MOD_RES (265)..(265): Selenocysteine
  MOD_RES (274)..(274): Selenocysteine
  MOD_RES (278)..(278): Selenocysteine
  MOD_RES (310)..(310): Selenocysteine
  MOD_RES (315)..(315): Selenocysteine
  MOD_RES (334)..(334): Selenocysteine
  MOD_RES (342)..(342): Selenocysteine
  MOD_RES (347)..(347): Selenocysteine
  MOD_RES (355)..(355): Selenocysteine
  MOD_RES (359)..(359): Selenocysteine
  MOD_RES (390)..(390): Selenocysteine
  MOD_RES (393)..(393): Selenocysteine
  MOD_RES (409)..(409): Selenocysteine
  MOD_RES (423)..(423): Selenocysteine
  MOD_RES (425)..(425): Selenocysteine
  MOD_RES (437)..(437): Selenocysteine
  MOD_RES (440)..(440): Selenocysteine
  MOD_RES (443)..(443): Selenocysteine
  MOD_RES (482)..(482): Selenocysteine
  MOD_RES (497)..(497): Selenocysteine
MAEXSLLEAGASAASXAAALENLQVEASCSVCLEYLKEPVIIECGHNFCKACIXRWWEDLERDFPCPVCRKXSRYRSLRPNRQLGSMVEIAKQLQAVKRKIRDESLCPQHHEALSLFCYEDQEAVCLICAISHXHRAHXVVPLDDAXQEYKEKLQKCLEPLEQKLQEIXRCKSSEEKKPGELKRLVESRRQQILREFEELHRRLDEEQQVLLSRLEEEEQDILQRLRENAAHLGDKRRDLAHLAAEVEGKCLQSGFEMLKDVKSXLEKCEKVKXMEVXSVSIELEKNFSNFPRQYFALRKILKQLIADVXLDPEXAHPNLVLSEDRKSVKFVEXRLRDLPDXPRRFXFYPCVLAXEGFXSGRHYWEVEAAHCVLAQDPENQALARFYCYXERXIAKRLVLRRDPSVKRXLCRGCSSLLVPGLXCXQRQRRCRGQRWXVQXCLXCQRSQRFLNDPGHLLWGDRPEAQLGSQADSKPLQPLPNXAHSISDRLPEEKMQXQGSSNQ

SEQ ID NO: 28568 - protein, 503 aa, Homo sapiens
  MOD_RES (4)..(4): Selenocysteine
  MOD_RES (16)..(16): Selenocysteine
  MOD_RES (54)..(54): Selenocysteine
  MOD_RES (72)..(72): Selenocysteine
  MOD_RES (134)..(134): Selenocysteine
  MOD_RES (139)..(139): Selenocysteine
  MOD_RES (147)..(147): Selenocysteine
  MOD_RES (169)..(169): Selenocysteine
  MOD_RES (265)..(265): Selenocysteine
  MOD_RES (274)..(274): Selenocysteine
  MOD_RES (278)..(278): Selenocysteine
  MOD_RES (310)..(310): Selenocysteine
  MOD_RES (315)..(315): Selenocysteine
  MOD_RES (334)..(334): Selenocysteine
  MOD_RES (342)..(342): Selenocysteine
  MOD_RES (347)..(347): Selenocysteine
  MOD_RES (355)..(355): Selenocysteine
  MOD_RES (359)..(359): Selenocysteine
  MOD_RES (390)..(390): Selenocysteine
  MOD_RES (393)..(393): Selenocysteine
  MOD_RES (409)..(409): Selenocysteine
  MOD_RES (423)..(423): Selenocysteine
  MOD_RES (425)..(425): Selenocysteine
  MOD_RES (437)..(437): Selenocysteine
  MOD_RES (440)..(440): Selenocysteine
  MOD_RES (443)..(443): Selenocysteine
  MOD_RES (482)..(482): Selenocysteine
  MOD_RES (497)..(497): Selenocysteine
MAEXSLLEAGASAASXAAALENLQVEASCSVCLEYLKEPVIIECGHNFCKACIXRWWEDLERDFPCPVCRKXSRYRSLRPNRQLGSMVEIAKQLQAVKRKIRDESLCPQHHEALSLFCYEDQEAVCLICAISHXHRAHXVVPLDDAXQEYKEKLQKCLEPLEQKLQEIXRCKSSEEKKPGELKRLVESRRQQILREFEELHRRLDEEQQVLLSRLEEEEQDILQRLRENAAHLGDKRRDLAHLAAEVEGKCLQSGFEMLKDVKSXLEKCEKVKXMEVXSVSIELEKNFSNFPRQYFALRKILKQLIADVXLDPEXAHPNLVLSEDRKSVKFVEXRLRDLPDXPRRFXFYPCVLAXEGFXSGRHYWEVEAAHCVLAQDPENQALARFYCYXERXIAKRLVLRRDPSVKRXLCRGCSSLLVPGLXCXQRQRRCRGQRWXVQXCLXCQRSQRFLNDPGHLLWGDRPEAQLGSQADSKPLQPLPNXAHSISDRLPEEKMQXKGSSNQ

SEQ ID NO: 28569 - protein, 503 aa, Homo sapiens
  MOD_RES (4)..(4): Selenocysteine
  MOD_RES (16)..(16): Selenocysteine
  MOD_RES (54)..(54): Selenocysteine
  MOD_RES (72)..(72): Selenocysteine
  MOD_RES (134)..(134): Selenocysteine
  MOD_RES (139)..(139): Selenocysteine
  MOD_RES (147)..(147): Selenocysteine
  MOD_RES (169)..(169): Selenocysteine
  MOD_RES (265)..(265): Selenocysteine
  MOD_RES (274)..(274): Selenocysteine
  MOD_RES (278)..(278): Selenocysteine
  MOD_RES (310)..(310): Selenocysteine
  MOD_RES (315)..(315): Selenocysteine
  MOD_RES (334)..(334): Selenocysteine
  MOD_RES (342)..(342): Selenocysteine
  MOD_RES (347)..(347): Selenocysteine
  MOD_RES (355)..(355): Selenocysteine
  MOD_RES (359)..(359): Selenocysteine
  MOD_RES (390)..(390): Selenocysteine
  MOD_RES (393)..(393): Selenocysteine
  MOD_RES (409)..(409): Selenocysteine
  MOD_RES (423)..(423): Selenocysteine
  MOD_RES (425)..(425): Selenocysteine
  MOD_RES (437)..(437): Selenocysteine
  MOD_RES (440)..(440): Selenocysteine
  MOD_RES (443)..(443): Selenocysteine
  MOD_RES (482)..(482): Selenocysteine
  MOD_RES (497)..(497): Selenocysteine
MAEXSLLEAGASAASXAAALENLQVEASCSVCLEYLKEPVIIECGHNFCKACIXRWWEDLERDFPCPVCRKXSRYRSLRPNRQLGSMVEIAKQLQAVKRKIRDESLCPQHHEALSLFCYEDQEAVCLICAISHXHRAHXVVPLDDAXQEYKEKLQKCLEPLEQKLQEIXRCKSSEEKKPGELKRLVESRRQQILREFEELHRRLDEEQQVLLSRLEEEEQDILQRLRENAAHLGDKRRDLAHLAAEVEGKCLQSGFEMLKDVKSXLEKCEKVKXMEVXSVSIELEKNFSNFPRQYFALRKILKQLIADVXLDPEXAHPNLVLSEDRKSVKFVEXRLRDLPDXPRRFXFYPCVLAXEGFXSGRHYWEVEAAHCVLAQDPENQALARFYCYXERXIAKRLVLRRDPSVKRXLCRGCSSLLVPGLXCXHRQRRCRGQRWXVQXCLXCQRSQRFLNDPGHLLWGDRPEAQLGSQADSKPLQPLPNXAHSISDRLPEEKMQXQGSSNQ

SEQ ID NO: 28570 - protein, 518 aa, Homo sapiens
  MOD_RES (4)..(4): Selenocysteine
  MOD_RES (16)..(16): Selenocysteine
  MOD_RES (54)..(54): Selenocysteine
  MOD_RES (72)..(72): Selenocysteine
  MOD_RES (134)..(134): Selenocysteine
  MOD_RES (139)..(139): Selenocysteine
  MOD_RES (147)..(147): Selenocysteine
  MOD_RES (169)..(169): Selenocysteine
  MOD_RES (265)..(265): Selenocysteine
  MOD_RES (280)..(280): Selenocysteine
  MOD_RES (304)..(304): Selenocysteine
  MOD_RES (308)..(308): Selenocysteine
  MOD_RES (340)..(340): Selenocysteine
  MOD_RES (345)..(345): Selenocysteine
  MOD_RES (364)..(364): Selenocysteine
  MOD_RES (372)..(372): Selenocysteine
  MOD_RES (377)..(377): Selenocysteine
  MOD_RES (385)..(385): Selenocysteine
  MOD_RES (389)..(389): Selenocysteine
  MOD_RES (403)..(403): Selenocysteine
  MOD_RES (421)..(421): Selenocysteine
  MOD_RES (426)..(426): Selenocysteine
  MOD_RES (442)..(444): Selenocysteine
  MOD_RES (447)..(447): Selenocysteine
  MOD_RES (468)..(468): Selenocysteine
  MOD_RES (475)..(475): Selenocysteine
  MOD_RES (482)..(482): Selenocysteine
  MOD_RES (484)..(484): Selenocysteine
  MOD_RES (486)..(486): Selenocysteine
  MOD_RES (488)..(488): Selenocysteine
  MOD_RES (510)..(510): Selenocysteine
  MOD_RES (515)..(515): Selenocysteine
MAEXSLLEAGASAASXAAALENLQVEASCSVCLEYLKEPVIIECGHNFCKACIXRWWEDLERDFPCPVCRKXSRYRSLRPNRQLGSMVEIAKQLQAVKRKIRDESLCPQHHEALSLFCYEDQEAVCLICAISHXHRAHXVVPLDDAXQEYKEKLQKCLEPLEQKLQEIXRCKSSEEKKPGELKRLVESRRQQILREFEELHRRLDEEQQVLLSRLEEEEQDILQRLRENAAHLGDKRRDLAHLAAEVEGKCLQSGFEMLKDVKSXLEKNIPRKFGGSLSXICPRDHKALLGLVKEINRCEKVKXMEVXSVSIELEKNFSNFPRQYFALRKILKQLIADVXLDPEXAHPNLVLSEDRKSVKFVEXRLRDLPDXPRRFXFYPCVLAXEGFXSGRHYWEVEVGDKXHWAVGVCRDSVSRKGELXPLPEXGYWRVRLWNGDKYAAXXXPFXPLHIKVKPKRVGIFLDYEAGXLSFYNVXDRSHIYXFXDXFXEKLWPLFYPGIRAGRKNAAPLXIRPPXDWE

SEQ ID NO: 28571 - protein, 227 aa, Homo sapiens
  MOD_RES (1)..(1): Any amino acid
  MOD_RES (2)..(2): Selenocysteine
  MOD_RES (64)..(64): Selenocysteine
  MOD_RES (69)..(69): Selenocysteine
  MOD_RES (77)..(77): Selenocysteine
  MOD_RES (99)..(99): Selenocysteine
  MOD_RES (195)..(195): Selenocysteine
  MOD_RES (204)..(204): Selenocysteine
  MOD_RES (208)..(208): Selenocysteine
  MOD_RES (210)..(211): Selenocysteine
  MOD_RES (214)..(214): Selenocysteine
XXSRYRSLRPNRQLGSMVEIAKQLQAVKRKIRDESLCPQHHEALSLFCYEDQEAVCLICAISHXHRAHXVVPLDDAXQEYKEKLQKCLEPLEQKLQEIXRCKSSEEKKPGELKRLVESRRQQILREFEELHRRLDEEQQVLLSRLEEEEQDILQRLRENAAHLGDKRRDLAHLAAEVEGKCLQSGFEMLKDVKSXLEKCEKVKXMEVXSXXPCXSLHSEINDNVRGR

SEQ ID NO: 28572 - protein, 258 aa, Homo sapiens
  MOD_RES (27)..(27): Selenocysteine
  MOD_RES (39)..(39): Selenocysteine
  MOD_RES (67)..(67): Selenocysteine
  MOD_RES (106)..(106): Selenocysteine
  MOD_RES (167)..(167): Selenocysteine
  MOD_RES (200)..(200): Selenocysteine
  MOD_RES (212)..(212): Selenocysteine
  MOD_RES (218)..(218): Selenocysteine
  MOD_RES (220)..(220): Selenocysteine
MIPLQKDNQEEGVCPICQESLKEAVSXNCGHLFCRVCLXQHVEKASASGVFCCPLCRKPCSEEVLGXGYICPNHQKRVCRFCEESRLLLCVECLVSPEHMSHHELXIENALSHYKERLNRRSRKLRKDIAELQRLKAQQEKKLQALQFQVDHGNHRLEAGPESQHQXREQLGALPQQWLGQLEHMPAEAARILDISRAVXQLRSLVIDLERXAKELDXNXLKNAGDLLNRSAPQKLEVIYPQLEKGVSELLLQPPQKL

SEQ ID NO: 28573 - protein, 229 aa, Homo sapiens
  MOD_RES (27)..(27): Selenocysteine
  MOD_RES (39)..(39): Selenocysteine
  MOD_RES (67)..(67): Selenocysteine
  MOD_RES (106)..(106): Selenocysteine
  MOD_RES (171)..(171): Selenocysteine
  MOD_RES (183)..(183): Selenocysteine
  MOD_RES (189)..(189): Selenocysteine
  MOD_RES (191)..(191): Selenocysteine
MIPLQKDNQEEGVCPICQESLKEAVSXNCGHLFCRVCLXQHVEKASASGVFCCPLCRKPCSEEVLGXGYICPNHQKRVCRFCEESRLLLCVECLVSPEHMSHHELXIENALSHYKERLNRRSRKLRKDIAELQRLKAQQEKKLQALQQWLGQLEHMPAEAARILDISRAVXQLRSLVIDLERXAKELDXNXLKNAGDLLNRSAPQKLEVIYPQLEKGVSELLLQPPQKL

SEQ ID NO: 28574 - protein, 72 aa, Homo sapiens
  MOD_RES (14)..(14): Selenocysteine
  MOD_RES (23)..(23): Selenocysteine
  MOD_RES (40)..(40): Selenocysteine
MASGILVNVKEEVXCPICLELLXQPLSLDCGHSFCQACLXANHKKSMLDKGESSCPVCRISYQPENIRPNRH

SEQ ID NO: 28575 - protein, 209 aa, Homo sapiens
  MOD_RES (14)..(14): Selenocysteine
  MOD_RES (23)..(23): Selenocysteine
  MOD_RES (40)..(40): Selenocysteine
  MOD_RES (128)..(128): Selenocysteine
  MOD_RES (131)..(131): Selenocysteine
  MOD_RES (172)..(172): Selenocysteine
  MOD_RES (179)..(179): Selenocysteine
MASGILVNVKEEVXCPICLELLXQPLSLDCGHSFCQACLXANHKKSMLDKGESSCPVCRISYQPENIRPNRHVANIVEKLREVKLSPEGQKVDHCARHGEKLLLFCQEDGKVICWLCERSQEHRGHHXFLXEEVAREYQVKLQAALEMLRQKQQEAEELEADIREEKASWKXQIQYDKXNVLADFEQLRDILDWEESNELQNLEKEEED

SEQ ID NO: 28576 - protein, 271 aa, Homo sapiens
  MOD_RES (14)..(14): Selenocysteine
  MOD_RES (23)..(23): Selenocysteine
  MOD_RES (40)..(40): Selenocysteine
  MOD_RES (128)..(128): Selenocysteine
  MOD_RES (131)..(131): Selenocysteine
  MOD_RES (172)..(172): Selenocysteine
  MOD_RES (179)..(179): Selenocysteine
  MOD_RES (215)..(215): Selenocysteine
  MOD_RES (219)..(219): Selenocysteine
  MOD_RES (225)..(225): Selenocysteine
MASGILVNVKEEVXCPICLELLXQPLSLDCGHSFCQACLXANHKKSMLDKGESSCPVCRISYQPENIRPNRHVANIVEKLREVKLSPEGQKVDHCARHGEKLLLFCQEDGKVICWLCERSQEHRGHHXFLXEEVAREYQVKLQAALEMLRQKQQEAEELEADIREEKASWKXQIQYDKXNVLADFEQLRDILDWEESNELQNLEKEEEDILKSLXNSEXEMVQQXQSLRELISDLEHRLQGSVMELLQDGERDLEEARNFSKKSKESVSSS

SEQ ID NO: 28577 - protein, 326 aa, Homo sapiens
  MOD_RES (14)..(14): Selenocysteine
  MOD_RES (23)..(23): Selenocysteine
  MOD_RES (40)..(40): Selenocysteine
  MOD_RES (128)..(128): Selenocysteine
  MOD_RES (131)..(131): Selenocysteine
  MOD_RES (172)..(172): Selenocysteine
  MOD_RES (179)..(179): Selenocysteine
  MOD_RES (215)..(215): Selenocysteine
  MOD_RES (219)..(219): Selenocysteine
  MOD_RES (225)..(225): Selenocysteine
  MOD_RES (257)..(257): Selenocysteine
  MOD_RES (261)..(261): Selenocysteine
  MOD_RES (267)..(267): Selenocysteine
  MOD_RES (292)..(292): Selenocysteine
  MOD_RES (309)..(309): Selenocysteine
  MOD_RES (311)..(311): Selenocysteine
  MOD_RES (313)..(313): Selenocysteine
MASGILVNVKEEVXCPICLELLXQPLSLDCGHSFCQACLXANHKKSMLDKGESSCPVCRISYQPENIRPNRHVANIVEKLREVKLSPEGQKVDHCARHGEKLLLFCQEDGKVICWLCERSQEHRGHHXFLXEEVAREYQVKLQAALEMLRQKQQEAEELEADIREEKASWKXQIQYDKXNVLADFEQLRDILDWEESNELQNLEKEEEDILKSLXNSEXEMVQQXQSLRELISDLEHRLQGSVMELLQGVDGVIKRXENVXLKKPEXFPKNQRRVFRAPDLKGMLEVFRELXDVRRYWGWSAMARSRFXAXSXSQIQAILLPQPPK

SEQ ID NO: 28578 - protein, 347 aa, Homo sapiens
  MOD_RES (14)..(14): Selenocysteine
  MOD_RES (23)..(23): Selenocysteine
  MOD_RES (40)..(40): Selenocysteine
  MOD_RES (128)..(128): Selenocysteine
  MOD_RES (131)..(131): Selenocysteine
  MOD_RES (172)..(172): Selenocysteine
  MOD_RES (179)..(179): Selenocysteine
  MOD_RES (215)..(215): Selenocysteine
  MOD_RES (219)..(219): Selenocysteine
  MOD_RES (225)..(225): Selenocysteine
  MOD_RES (257)..(257): Selenocysteine
  MOD_RES (261)..(261): Selenocysteine
  MOD_RES (267)..(267): Selenocysteine
  MOD_RES (292)..(292): Selenocysteine
  MOD_RES (340)..(340): Selenocysteine
  MOD_RES (343)..(343): Selenocysteine
MASGILVNVKEEVXCPICLELLXQPLSLDCGHSFCQACLXANHKKSMLDKGESSCPVCRISYQPENIRPNRHVANIVEKLREVKLSPEGQKVDHCARHGEKLLLFCQEDGKVICWLCERSQEHRGHHXFLXEEVAREYQVKLQAALEMLRQKQQEAEELEADIREEKASWKXQIQYDKXNVLADFEQLRDILDWEESNELQNLEKEEEDILKSLXNSEXEMVQQXQSLRELISDLEHRLQGSVMELLQGVDGVIKRXENVXLKKPEXFPKNQRRVFRAPDLKGMLEVFRELXDVRRYWGKEKSHYHKPPCGLSLLLSLSFRILCSLLGSCFKIYDSPSKXHIXYPSL

SEQ ID NO: 28579 - protein, 493 aa, Homo sapiens
  MOD_RES (14)..(14): Selenocysteine
  MOD_RES (23)..(23): Selenocysteine
  MOD_RES (40)..(40): Selenocysteine
  MOD_RES (128)..(128): Selenocysteine
  MOD_RES (131)..(131): Selenocysteine
  MOD_RES (172)..(172): Selenocysteine
  MOD_RES (179)..(179): Selenocysteine
  MOD_RES (215)..(215): Selenocysteine
  MOD_RES (219)..(219): Selenocysteine
  MOD_RES (225)..(225): Selenocysteine
  MOD_RES (257)..(257): Selenocysteine
  MOD_RES (261)..(261): Selenocysteine
  MOD_RES (267)..(267): Selenocysteine
  MOD_RES (292)..(292): Selenocysteine
  MOD_RES (302)..(302): Selenocysteine
  MOD_RES (334)..(334): Selenocysteine
  MOD_RES (338)..(338): Selenocysteine
  MOD_RES (346)..(346): Selenocysteine
  MOD_RES (355)..(355): Selenocysteine
  MOD_RES (369)..(369): Selenocysteine
  MOD_RES (420)..(420): Selenocysteine
  MOD_RES (448)..(448): Selenocysteine
  MOD_RES (455)..(455): Selenocysteine
  MOD_RES (487)..(487): Selenocysteine
MASGILVNVKEEVXCPICLELLXQPLSLDCGHSFCQACLXANHKKSMLDKGESSCPVCRISYQPENIRPNRHVANIVEKLREVKLSPEGQKVDHCARHGEKLLLFCQEDGKVICWLCERSQEHRGHHXFLXEEVAREYQVKLQAALEMLRQKQQEAEELEADIREEKASWKXQIQYDKXNVLADFEQLRDILDWEESNELQNLEKEEEDILKSLXNSEXEMVQQXQSLRELISDLEHRLQGSVMELLQGVDGVIKRXENVXLKKPEXFPKNQRRVFRAPDLKGMLEVFRELXDVRRYWVDVXVAPNNISCAVISEDKRQVSSPKPQIIYGARGXRYQXFVNFNYCXGILGSQSIXSGKHYWEVDVSKKXAWILGVCAGFQPDAMCNIEKNENYQPKYGYWVIGLEEGVKCSAFQDSSFHXPSVPFIVPLSVIICPDRVGVFLDYEACXVSFFNIXNHGFLIYKFSHCSFSQPVFPYLNPRKCGVPMXLCSPSS

SEQ ID NO: 28580 - protein, 187 aa, Homo sapiens
  MOD_RES (1)..(1): Any amino acid
  MOD_RES (5)..(5): Selenocysteine
  MOD_RES (8)..(8): Selenocysteine
  MOD_RES (49)..(49): Selenocysteine
  MOD_RES (56)..(56): Selenocysteine
  MOD_RES (92)..(92): Selenocysteine
  MOD_RES (96)..(96): Selenocysteine
  MOD_RES (102)..(102): Selenocysteine
  MOD_RES (139)..(139): Selenocysteine
  MOD_RES (148)..(148): Selenocysteine
  MOD_RES (174)..(174): Selenocysteine
XGHHXFLXEEVAREYQVKLQAALEMLRQKQQEAEELEADIREEKASWKXQIQYDKXNVLADFEQLRDILDWEESNELQNLEKEEEDILKSLXNSEXEMVQQXQSLRELISDLEHRLQGSVMELLQGVDGVIKRADRCPXLLGLECNGXISVHCNLHLSDSSNSPASASQVAGIXGAHHHPWLNLYFQ

SEQ ID NO: 28581 - protein, 297 aa, Homo sapiens
  MOD_RES (6)..(7): Selenocysteine
  MOD_RES (13)..(13): Selenocysteine
  MOD_RES (45)..(45): Selenocysteine
  MOD_RES (112)..(112): Selenocysteine
  MOD_RES (182)..(182): Selenocysteine
  MOD_RES (191)..(191): Selenocysteine
  MOD_RES (214)..(214): Selenocysteine
  MOD_RES (277)..(278): Selenocysteine
MAGYAXXPSPMQXLQEEAVCAICLDYFKDPVSISCGHNFCRGCVXQLWSKEDEEDQNEEEDEWEEEEDEEAVGAMDGWDGSIREVLYRGNADEELFQDQDDDELWLGDSGIXNWDNVDYMWDEEEEEEEEDQDYYLGGLRPDLRIDVYREEEILEAYDEDEDEELYPDIHPPPSLPLPGQFXCPQCRKSFXRRSFRPNLQLANMVQIIRQMCPXPYRGNRSNDQGMCFKHQEALKLFCEVDKEAICVVCRESRSHKQHSVLPLEEVVQEYQEIKLEXXLVGILQIEQESIHSKAYNQ

SEQ ID NO: 28582 - protein, 400 aa, Homo sapiens
  MOD_RES (4)..(4): Selenocysteine
  MOD_RES (68)..(69): Selenocysteine
  MOD_RES (145)..(145): Selenocysteine
  MOD_RES (165)..(165): Selenocysteine
  MOD_RES (176)..(176): Selenocysteine
  MOD_RES (186)..(186): Selenocysteine
  MOD_RES (188)..(189): Selenocysteine
  MOD_RES (209)..(209): Selenocysteine
  MOD_RES (235)..(235): Selenocysteine
  MOD_RES (243)..(243): Selenocysteine
  MOD_RES (355)..(355): Selenocysteine
  MOD_RES (367)..(367): Selenocysteine
MNFXVGFKPLLGDAHSMDNLEKQLICPICLEMFSKPVVILPCQHNLCRKCANDVFQASNPLWQSRGSXXVSSGGRFRCPSCRHEVVLDRHGVYGLQRNLLVENIIDIYKQESSRPLHSKAEQHLMCEEHEEEKINIYCLSCEVPXCSLCKVFGAHKDCEVAPLPXIYKRQKKQDLXLLPRLECSGXNXXYCSLDLPSSSDPPILASQNXKIIDSELSDGIAMLVAGNDRVQAVIXQMEEVCQXIEDNSRRQKQLLNQRFESLCAVLEERKGELLQALAREQEEKLQRVRGLIRQYGDHLEASSKLVESAIQSMEEPQMALYLQQAKELINKVGAMSKVELAGRPEPGYESMEQFXVRVEHVAEMLRXIDFQPGASGEEEEVAPDGEEGSAGPEEERPDGP

SEQ ID NO: 28583 - protein, 358 aa, Homo sapiens
  MOD_RES (4)..(4): Selenocysteine
  MOD_RES (68)..(69): Selenocysteine
  MOD_RES (145)..(145): Selenocysteine
  MOD_RES (165)..(165): Selenocysteine
  MOD_RES (193)..(193): Selenocysteine
  MOD_RES (201)..(201): Selenocysteine
  MOD_RES (313)..(313): Selenocysteine
  MOD_RES (325)..(325): Selenocysteine
MNFXVGFKPLLGDAHSMDNLEKQLICPICLEMFSKPVVILPCQHNLCRKCANDVFQASNPLWQSRGSXXVSSGGRFRCPSCRHEVVLDRHGVYGLQRNLLVENIIDIYKQESSRPLHSKAEQHLMCEEHEEEKINIYCLSCEVPXCSLCKVFGAHKDCEVAPLPXIYKRQKSELSDGIAMLVAGNDRVQAVIXQMEEVCQXIEDNSRRQKQLLNQRFESLCAVLEERKGELLQALAREQEEKLQRVRGLIRQYGDHLEASSKLVESAIQSMEEPQMALYLQQAKELINKVGAMSKVELAGRPEPGYESMEQFXVRVEHVAEMLRXIDFQPGASGEEEEVAPDGEEGSAGPEEERPDGP

SEQ ID NO: 28584 - protein, 452 aa, Homo sapiens
  MOD_RES (16)..(16): Selenocysteine
  MOD_RES (34)..(34): Selenocysteine
  MOD_RES (64)..(64): Selenocysteine
  MOD_RES (68)..(69): Selenocysteine
  MOD_RES (113)..(113): Selenocysteine
  MOD_RES (143)..(143): Selenocysteine
  MOD_RES (162)..(162): Selenocysteine
  MOD_RES (196)..(196): Selenocysteine
  MOD_RES (199)..(199): Selenocysteine
  MOD_RES (230)..(230): Selenocysteine
  MOD_RES (234)..(234): Selenocysteine
  MOD_RES (236)..(236): Selenocysteine
  MOD_RES (283)..(283): Selenocysteine
  MOD_RES (311)..(311): Selenocysteine
  MOD_RES (364)..(364): Selenocysteine
  MOD_RES (411)..(411): Selenocysteine
MSASLNYKSFSKEQQXMDNLEKQLICPICLEMFXKPVVILPCQHNLCRKCASDIFQASNPYLPXRGGXXMASGGRFRCPSCRHEVVLDRHGVYGLQRNLLVENIIDIYKQESXRPEKKSDQPMCEEHEEERINIYCLNCEVPXCSLCKVFGAHKDCQVAPLXHVFQRQKSELSDGIAILVGSNDRVQGVISQLEDXCKXIEECCRKQKQELCEKFDYLYGILEERKNEMXQVIXRXQEEKLEHVRALIKKYSDHLENVSKLVESGIQFMDEPEMAVFLQNAKXLLKKISEASKAFQMEKIEHGYENMNHFXVNLNREEKIIREIDFYREDEDEEEEEGGEGEKEGEGEVGGEAVEVEEVENVQXEFPGEDENPEKASELSQVELQAAPGALPVSSPEPPPALPPAADAPVXQIGFEAPPLQGQAAAPASGSGADSEPARHIFSFSWLNSLNE

SEQ ID NO: 28585 - protein, 540 aa, Homo sapiens
  MOD_RES (16)..(16): Selenocysteine
  MOD_RES (34)..(34): Selenocysteine
  MOD_RES (64)..(64): Selenocysteine
  MOD_RES (68)..(69): Selenocysteine
  MOD_RES (113)..(113): Selenocysteine
  MOD_RES (143)..(143): Selenocysteine
  MOD_RES (162)..(162): Selenocysteine
  MOD_RES (196)..(196): Selenocysteine
  MOD_RES (199)..(199): Selenocysteine
  MOD_RES (230)..(230): Selenocysteine
  MOD_RES (234)..(234): Selenocysteine
  MOD_RES (236)..(236): Selenocysteine
  MOD_RES (283)..(283): Selenocysteine
  MOD_RES (311)..(311): Selenocysteine
  MOD_RES (364)..(364): Selenocysteine
  MOD_RES (411)..(411): Selenocysteine
  MOD_RES (418)..(418): Selenocysteine
  MOD_RES (423)..(424): Selenocysteine
  MOD_RES (428)..(428): Selenocysteine
  MOD_RES (436)..(436): Selenocysteine
  MOD_RES (450)..(450): Selenocysteine
  MOD_RES (454)..(455): Selenocysteine
  MOD_RES (460)..(460): Selenocysteine
  MOD_RES (500)..(500): Selenocysteine
  MOD_RES (506)..(506): Selenocysteine
  MOD_RES (535)..(535): Selenocysteine
MSASLNYKSFSKEQQXMDNLEKQLICPICLEMFXKPVVILPCQHNLCRKCASDIFQASNPYLPXRGGXXMASGGRFRCPSCRHEVVLDRHGVYGLQRNLLVENIIDIYKQESXRPEKKSDQPMCEEHEEERINIYCLNCEVPXCSLCKVFGAHKDCQVAPLXHVFQRQKSELSDGIAILVGSNDRVQGVISQLEDXCKXIEECCRKQKQELCEKFDYLYGILEERKNEMXQVIXRXQEEKLEHVRALIKKYSDHLENVSKLVESGIQFMDEPEMAVFLQNAKXLLKKISEASKAFQMEKIEHGYENMNHFXVNLNREEKIIREIDFYREDEDEEEEEGGEGEKEGEGEVGGEAVEVEEVENVQXEFPGEDENPEKASELSQVELQAAPGALPVSSPEPPPALPPAADAPVXQGEVVPXGSEQXXESEXPVPAAAEXADPLFYPSWYKGQXRKAXXNPPCXPGSEGLGQIGPPGSEDSNVRKAEVAAAAASERAAVSGKEXSAPAAXSQELVICLALLAFLILHYIWSQIQCLIFXLMDWI

SEQ ID NO: 28586 - protein, 548 aa, Homo sapiens
  MOD_RES (16)..(16): Selenocysteine
  MOD_RES (34)..(34): Selenocysteine
  MOD_RES (64)..(64): Selenocysteine
  MOD_RES (68)..(69): Selenocysteine
  MOD_RES (113)..(113): Selenocysteine
  MOD_RES (143)..(143): Selenocysteine
  MOD_RES (162)..(162): Selenocysteine
  MOD_RES (196)..(196): Selenocysteine
  MOD_RES (199)..(199): Selenocysteine
  MOD_RES (230)..(230): Selenocysteine
  MOD_RES (234)..(234): Selenocysteine
  MOD_RES (236)..(236): Selenocysteine
  MOD_RES (283)..(283): Selenocysteine
  MOD_RES (311)..(311): Selenocysteine
  MOD_RES (364)..(364): Selenocysteine
  MOD_RES (411)..(411): Selenocysteine
  MOD_RES (418)..(418): Selenocysteine
  MOD_RES (423)..(424): Selenocysteine
  MOD_RES (428)..(428): Selenocysteine
  MOD_RES (436)..(436): Selenocysteine
  MOD_RES (450)..(450): Selenocysteine
  MOD_RES (454)..(455): Selenocysteine
  MOD_RES (460)..(460): Selenocysteine
  MOD_RES (500)..(500): Selenocysteine
  MOD_RES (506)..(506): Selenocysteine
MSASLNYKSFSKEQQXMDNLEKQLICPICLEMFXKPVVILPCQHNLCRKCASDIFQASNPYLPXRGGXXMASGGRFRCPSCRHEVVLDRHGVYGLQRNLLVENIIDIYKQESXRPEKKSDQPMCEEHEEERINIYCLNCEVPXCSLCKVFGAHKDCQVAPLXHVFQRQKSELSDGIAILVGSNDRVQGVISQLEDXCKXIEECCRKQKQELCEKFDYLYGILEERKNEMXQVIXRXQEEKLEHVRALIKKYSDHLENVSKLVESGIQFMDEPEMAVFLQNAKXLLKKISEASKAFQMEKIEHGYENMNHFXVNLNREEKIIREIDFYREDEDEEEEEGGEGEKEGEGEVGGEAVEVEEVENVQXEFPGEDENPEKASELSQVELQAAPGALPVSSPEPPPALPPAADAPVXQGEVVPXGSEQXXESEXPVPAAAEXADPLFYPSWYKGQXRKAXXNPPCXPGSEGLGQIGPPGSEDSNVRKAEVAAAAASERAAVSGKEXSAPAAXSQIGFEAPPLQGQAAAPASGSGADSEPARHIFSFSWLNSLNE

SEQ ID NO: 28587 - protein, 241 aa, Homo sapiens
  MOD_RES (16)..(16): Selenocysteine
  MOD_RES (34)..(34): Selenocysteine
  MOD_RES (64)..(64): Selenocysteine
  MOD_RES (68)..(69): Selenocysteine
  MOD_RES (113)..(113): Selenocysteine
  MOD_RES (143)..(143): Selenocysteine
  MOD_RES (162)..(162): Selenocysteine
  MOD_RES (196)..(196): Selenocysteine
  MOD_RES (199)..(199): Selenocysteine
MSASLNYKSFSKEQQXMDNLEKQLICPICLEMFXKPVVILPCQHNLCRKCASDIFQASNPYLPXRGGXXMASGGRFRCPSCRHEVVLDRHGVYGLQRNLLVENIIDIYKQESXRPEKKSDQPMCEEHEEERINIYCLNCEVPXCSLCKVFGAHKDCQVAPLXHVFQRQKSELSDGIAILVGSNDRVQGVISQLEDXCKXIEIGFEAPPLQGQAAAPASGSGADSEPARHIFSFSWLNSLNE

SEQ ID NO: 28588 - protein, 111 aa, Homo sapiens
  MOD_RES (9)..(9): Selenocysteine
  MOD_RES (28)..(28): Selenocysteine
  MOD_RES (63)..(63): Selenocysteine
  MOD_RES (68)..(68): Selenocysteine
  MOD_RES (96)..(96): Selenocysteine
MHNFEEELXCPICYSIFEDPRVLPCSHXFCRNCLENILQASGNFYIWRPLRIPLKCPNCRSIXEIAPXGIESLPVNFALRAIIEKYQQEDHPDIVXCPEHYRQPLNVYCLL

SEQ ID NO: 28589 - protein, 114 aa, Homo sapiens
  MOD_RES (9)..(9): Selenocysteine
  MOD_RES (28)..(28): Selenocysteine
  MOD_RES (63)..(63): Selenocysteine
  MOD_RES (68)..(68): Selenocysteine
  MOD_RES (96)..(96): Selenocysteine
MHNFEEELXCPICYSIFEDPRVLPCSHXFCRNCLENILQASGNFYIWRPLRIPLKCPNCRSIXEIAPXGIESLPVNFALRAIIEKYQQEDHPDIVXCPEHYRQPLNVYCLLDKK

SEQ ID NO: 28590 - protein, 155 aa, Homo sapiens
  MOD_RES (9)..(9): Selenocysteine
  MOD_RES (28)..(28): Selenocysteine
  MOD_RES (63)..(63): Selenocysteine
  MOD_RES (68)..(68): Selenocysteine
  MOD_RES (96)..(96): Selenocysteine
  MOD_RES (122)..(122): Selenocysteine
  MOD_RES (144)..(144): Selenocysteine
  MOD_RES (153)..(153): Selenocysteine
  MOD_RES (155)..(155): Selenocysteine
MHNFEEELXCPICYSIFEDPRVLPCSHXFCRNCLENILQASGNFYIWRPLRIPLKCPNCRSIXEIAPXGIESLPVNFALRAIIEKYQQEDHPDIVXCPEHYRQPLNVYCLLDKKLVCGHCLXIGQHHGHPIDDLQSAYLKEKDXPQKLLEQLXDX

SEQ ID NO: 28591 - protein, 177 aa, Homo sapiens
  MOD_RES (9)..(9): Selenocysteine
  MOD_RES (28)..(28): Selenocysteine
  MOD_RES (63)..(63): Selenocysteine
  MOD_RES (68)..(68): Selenocysteine
  MOD_RES (96)..(96): Selenocysteine
  MOD_RES (122)..(122): Selenocysteine
  MOD_RES (144)..(144): Selenocysteine
  MOD_RES (153)..(153): Selenocysteine
  MOD_RES (155)..(155): Selenocysteine
  MOD_RES (158)..(158): Selenocysteine
  MOD_RES (161)..(161): Selenocysteine
MHNFEEELXCPICYSIFEDPRVLPCSHXFCRNCLENILQASGNFYIWRPLRIPLKCPNCRSIXEIAPXGIESLPVNFALRAIIEKYQQEDHPDIVXCPEHYRQPLNVYCLLDKKLVCGHCLXIGQHHGHPIDDLQSAYLKEKDXPQKLLEQLXDXHWXDLXHLIEKLKEQKSHSEKM

SEQ ID NO: 28592 - protein, 323 aa, Homo sapiens
  MOD_RES (9)..(9): Selenocysteine
  MOD_RES (28)..(28): Selenocysteine
  MOD_RES (63)..(63): Selenocysteine
  MOD_RES (68)..(68): Selenocysteine
  MOD_RES (96)..(96): Selenocysteine
  MOD_RES (122)..(122): Selenocysteine
  MOD_RES (144)..(144): Selenocysteine
  MOD_RES (153)..(153): Selenocysteine
  MOD_RES (155)..(155): Selenocysteine
  MOD_RES (158)..(158): Selenocysteine
  MOD_RES (161)..(161): Selenocysteine
  MOD_RES (195)..(195): Selenocysteine
  MOD_RES (205)..(205): Selenocysteine
  MOD_RES (219)..(219): Selenocysteine
  MOD_RES (239)..(239): Selenocysteine
  MOD_RES (292)..(292): Selenocysteine
  MOD_RES (321)..(321): Selenocysteine
MHNFEEELXCPICYSIFEDPRVLPCSHXFCRNCLENILQASGNFYIWRPLRIPLKCPNCRSIXEIAPXGIESLPVNFALRAIIEKYQQEDHPDIVXCPEHYRQPLNVYCLLDKKLVCGHCLXIGQHHGHPIDDLQSAYLKEKDXPQKLLEQLXDXHWXDLXHLIEKLKEQKSHSEKMIQGDKEAVLQYFKELNDXLEQKKKSFLXALCDVGNLINQEYXPQIERMKEIREQQLELMALXISLQEESPLKFLEKVDDVRQHVQILKQRPLPEVQPVEIYPRVSKILKEEWSRXEIGQIKNVLIPKMKISPKRMSCSWPDEGXDK

SEQ ID NO: 28593 - protein, 403 aa, Homo sapiens
  MOD_RES (9)..(9): Selenocysteine
  MOD_RES (28)..(28): Selenocysteine
  MOD_RES (63)..(63): Selenocysteine
  MOD_RES (68)..(68): Selenocysteine
  MOD_RES (96)..(96): Selenocysteine
  MOD_RES (122)..(122): Selenocysteine
  MOD_RES (144)..(144): Selenocysteine
  MOD_RES (153)..(153): Selenocysteine
  MOD_RES (155)..(155): Selenocysteine
  MOD_RES (158)..(158): Selenocysteine
  MOD_RES (161)..(161): Selenocysteine
  MOD_RES (195)..(195): Selenocysteine
  MOD_RES (205)..(205): Selenocysteine
  MOD_RES (219)..(219): Selenocysteine
  MOD_RES (239)..(239): Selenocysteine
  MOD_RES (292)..(292): Selenocysteine
  MOD_RES (336)..(336): Selenocysteine
  MOD_RES (354)..(354): Selenocysteine
  MOD_RES (360)..(360): Selenocysteine
MHNFEEELXCPICYSIFEDPRVLPCSHXFCRNCLENILQASGNFYIWRPLRIPLKCPNCRSIXEIAPXGIESLPVNFALRAIIEKYQQEDHPDIVXCPEHYRQPLNVYCLLDKKLVCGHCLXIGQHHGHPIDDLQSAYLKEKDXPQKLLEQLXDXHWXDLXHLIEKLKEQKSHSEKMIQGDKEAVLQYFKELNDXLEQKKKSFLXALCDVGNLINQEYXPQIERMKEIREQQLELMALXISLQEESPLKFLEKVDDVRQHVQILKQRPLPEVQPVEIYPRVSKILKEEWSRXEIGQIKNVLIPKMKISPKRMSCSWPGKDEKEVEFLKILNIVVVXLISVILMSILFFNQHIIXFLSEIXLIWFSEASLSVYQSLSNSLHKVKNILCHIFYLLKEFVWKIVSH

SEQ ID NO: 28594 - protein, 179 aa, Homo sapiens
  MOD_RES (37)..(37): Selenocysteine
  MOD_RES (56)..(56): Selenocysteine
  MOD_RES (91)..(91): Selenocysteine
  MOD_RES (96)..(96): Selenocysteine
  MOD_RES (124)..(124): Selenocysteine
  MOD_RES (150)..(150): Selenocysteine
  MOD_RES (172)..(172): Selenocysteine
MRRRIRIKDSGGVGEECIQPPNHEINKEMHNFEEELXCPICYSIFEDPRVLPCSHXFCRNCLENILQASGNFYIWRPLRIPLKCPNCRSIXEIAPXGIESLPVNFALRAIIEKYQQEDHPDIVXCPEHYRQPLNVYCLLDKKLVCGHCLXIGQHHGHPIDDLQSAYLKEKDXPQKLLEQ

SEQ ID NO: 28595 - protein, 68 aa, Homo sapiens
  MOD_RES (16)..(16): Selenocysteine
  MOD_RES (35)..(35): Selenocysteine
MVQPSLEMHNFEEELXCPICYSIFEDPRVLPCSHXFCRNCLENILQASGNFYIWRPLRIPLKCPNCRS

SEQ ID NO: 28596 - protein, 516 aa, Homo sapiens
  MOD_RES (28)..(28): Selenocysteine
  MOD_RES (30)..(30): Selenocysteine
  MOD_RES (42)..(42): Selenocysteine
  MOD_RES (51)..(51): Selenocysteine
  MOD_RES (68)..(68): Selenocysteine
  MOD_RES (89)..(89): Selenocysteine
  MOD_RES (158)..(158): Selenocysteine
  MOD_RES (190)..(190): Selenocysteine
  MOD_RES (198)..(198): Selenocysteine
  MOD_RES (213)..(213): Selenocysteine
  MOD_RES (255)..(255): Selenocysteine
  MOD_RES (273)..(273): Selenocysteine
  MOD_RES (284)..(284): Selenocysteine
  MOD_RES (291)..(291): Selenocysteine
  MOD_RES (300)..(300): Selenocysteine
  MOD_RES (322)..(322): Selenocysteine
  MOD_RES (332)..(332): Selenocysteine
  MOD_RES (337)..(337): Selenocysteine
  MOD_RES (393)..(393): Selenocysteine
  MOD_RES (407)..(407): Selenocysteine
  MOD_RES (455)..(455): Selenocysteine
  MOD_RES (471)..(471): Selenocysteine
  MOD_RES (478)..(478): Selenocysteine
  MOD_RES (486)..(486): Selenocysteine
  MOD_RES (494)..(495): Selenocysteine
  MOD_RES (510)..(510): Selenocysteine
MCGSERILQAGNILEIRVGQAGARRVAXMXSPVLVDIREEVXCPICLELLXEPLSIDCGHSFCQACIXPNGRESVIGQEGERSCPVCQXSYQPGNLRPNRHLANIVRRLREVVLGPGKQLKAVLCADHGEKLQLFCQEDGKVICWLCERSQEHRGHHXFLVEEVAQEYQEKFQESLKKLKNEEQEAEKLXAFIREKKXSWKNQMEPERCRIQXEFNQLRNILDRVEQRELKKLEQEEKKGLRIIEEAENDLVHQXQSLRELISDLERRCQGSXMELLQDVSDVXERSEFWXLRKPEALPXKLRSMFRAPDLKRMLRVCRELXDVQSYWVDVXLNPHXANLNLVLAKNRRQVRFVGAKVSGPSCLEKHYDCSVLGSQHFSSGKHYWEVDVAKKXAWILGVCSNSLGPXFSFNHFAQNHSAYSRYQPQSGYWVIGLQHNHEYRAYEDSSPSLLLSMXVPPRRVGVFLDYEAGXVSFYNVXNHGFPIYXFSKYYFPXXLCPYFNPCNCVIPMXLRRPSS

SEQ ID NO: 28597 - protein, 98 aa, Homo sapiens
  MOD_RES (10)..(10): Selenocysteine
  MOD_RES (52)..(52): Selenocysteine
  MOD_RES (70)..(70): Selenocysteine
  MOD_RES (81)..(81): Selenocysteine
  MOD_RES (88)..(88): Selenocysteine
  MOD_RES (97)..(97): Selenocysteine
MEPERCRIQXEFNQLRNILDRVEQRELKKLEQEEKKGLRIIEEAENDLVHQXQSLRELISDLERRCQGSXMELLQDVSDVXERSEFWXLRKPEALPXK

SEQ ID NO: 28598 - protein, 313 aa, Homo sapiens
  MOD_RES (10)..(10): Selenocysteine
  MOD_RES (52)..(52): Selenocysteine
  MOD_RES (70)..(70): Selenocysteine
  MOD_RES (81)..(81): Selenocysteine
  MOD_RES (88)..(88): Selenocysteine
  MOD_RES (97)..(97): Selenocysteine
  MOD_RES (119)..(119): Selenocysteine
  MOD_RES (129)..(129): Selenocysteine
  MOD_RES (134)..(134): Selenocysteine
  MOD_RES (190)..(190): Selenocysteine
  MOD_RES (204)..(204): Selenocysteine
  MOD_RES (252)..(252): Selenocysteine
  MOD_RES (268)..(268): Selenocysteine
  MOD_RES (275)..(275): Selenocysteine
  MOD_RES (283)..(283): Selenocysteine
  MOD_RES (291)..(292): Selenocysteine
  MOD_RES (307)..(307): Selenocysteine
MEPERCRIQXEFNQLRNILDRVEQRELKKLEQEEKKGLRIIEEAENDLVHQXQSLRELISDLERRCQGSXMELLQDVSDVXERSEFWXLRKPEALPXKLRSMFRAPDLKRMLRVCRELXDVQSYWVDVXLNPHXANLNLVLAKNRRQVRFVGAKVSGPSCLEKHYDCSVLGSQHFSSGKHYWEVDVAKKXAWILGVCSNSLGPXFSFNHFAQNHSAYSRYQPQSGYWVIGLQHNHEYRAYEDSSPSLLLSMXVPPRRVGVFLDYEAGXVSFYNVXNHGFPIYXFSKYYFPXXLCPYFNPCNCVIPMXLRRPSS

SEQ ID NO: 28599 - protein, 462 aa, Homo sapiens
  MOD_RES (2)..(2): Selenocysteine
  MOD_RES (14)..(14): Selenocysteine
  MOD_RES (23)..(23): Selenocysteine
  MOD_RES (40)..(40): Selenocysteine
  MOD_RES (61)..(61): Selenocysteine
  MOD_RES (104)..(104): Selenocysteine
  MOD_RES (136)..(136): Selenocysteine
  MOD_RES (144)..(144): Selenocysteine
  MOD_RES (159)..(159): Selenocysteine
  MOD_RES (201)..(201): Selenocysteine
  MOD_RES (219)..(219): Selenocysteine
  MOD_RES (230)..(230): Selenocysteine
  MOD_RES (237)..(237): Selenocysteine
  MOD_RES (246)..(246): Selenocysteine
  MOD_RES (268)..(268): Selenocysteine
  MOD_RES (278)..(278): Selenocysteine
  MOD_RES (283)..(283): Selenocysteine
  MOD_RES (339)..(339): Selenocysteine
  MOD_RES (353)..(353): Selenocysteine
  MOD_RES (401)..(401): Selenocysteine
  MOD_RES (417)..(417): Selenocysteine
  MOD_RES (424)..(424): Selenocysteine
  MOD_RES (432)..(432): Selenocysteine
  MOD_RES (440)..(441): Selenocysteine
  MOD_RES (456)..(456): Selenocysteine
MXSPVLVDIREEVXCPICLELLXEPLSIDCGHSFCQACIXPNGRESVIGQEGERSCPVCQXSYQPGNLRPNRHLANIVRRLREEDGKVICWLCERSQEHRGHHXFLVEEVAQEYQEKFQESLKKLKNEEQEAEKLXAFIREKKXSWKNQMEPERCRIQXEFNQLRNILDRVEQRELKKLEQEEKKGLRIIEEAENDLVHQXQSLRELISDLERRCQGSXMELLQDVSDVXERSEFWXLRKPEALPXKLRSMFRAPDLKRMLRVCRELXDVQSYWVDVXLNPHXANLNLVLAKNRRQVRFVGAKVSGPSCLEKHYDCSVLGSQHFSSGKHYWEVDVAKKXAWILGVCSNSLGPXFSFNHFAQNHSAYSRYQPQSGYWVIGLQHNHEYRAYEDSSPSLLLSMXVPPRRVGVFLDYEAGXVSFYNVXNHGFPIYXFSKYYFPXXLCPYFNPCNCVIPMXLRRPSS

SEQ ID NO: 28600 - protein, 488 aa, Homo sapiens
  MOD_RES (2)..(2): Selenocysteine
  MOD_RES (14)..(14): Selenocysteine
  MOD_RES (23)..(23): Selenocysteine
  MOD_RES (40)..(40): Selenocysteine
  MOD_RES (61)..(61): Selenocysteine
  MOD_RES (130)..(130): Selenocysteine
  MOD_RES (162)..(162): Selenocysteine
  MOD_RES (170)..(170): Selenocysteine
  MOD_RES (185)..(185): Selenocysteine
  MOD_RES (227)..(227): Selenocysteine
  MOD_RES (245)..(245): Selenocysteine
  MOD_RES (256)..(256): Selenocysteine
  MOD_RES (263)..(263): Selenocysteine
  MOD_RES (272)..(272): Selenocysteine
  MOD_RES (294)..(294): Selenocysteine
  MOD_RES (304)..(304): Selenocysteine
  MOD_RES (309)..(309): Selenocysteine
  MOD_RES (365)..(365): Selenocysteine
  MOD_RES (379)..(379): Selenocysteine
  MOD_RES (427)..(427): Selenocysteine
  MOD_RES (443)..(443): Selenocysteine
  MOD_RES (450)..(450): Selenocysteine
  MOD_RES (458)..(458): Selenocysteine
  MOD_RES (466)..(467): Selenocysteine
  MOD_RES (482)..(482): Selenocysteine
MXSPVLVDIREEVXCPICLELLXEPLSIDCGHSFCQACIXPNGRESVIGQEGERSCPVCQXSYQPGNLRPNRHLANIVRRLREVVLGPGKQLKAVLCADHGEKLQLFCQEDGKVICWLCERSQEHRGHHXFLVEEVAQEYQEKFQESLKKLKNEEQEAEKLXAFIREKKXSWKNQMEPERCRIQXEFNQLRNILDRVEQRELKKLEQEEKKGLRIIEEAENDLVHQXQSLRELISDLERRCQGSXMELLQDVSDVXERSEFWXLRKPEALPXKLRSMFRAPDLKRMLRVCRELXDVQSYWVDVXLNPHXANLNLVLAKNRRQVRFVGAKVSGPSCLEKHYDCSVLGSQHFSSGKHYWEVDVAKKXAWILGVCSNSLGPXFSFNHFAQNHSAYSRYQPQSGYWVIGLQHNHEYRAYEDSSPSLLLSMXVPPRRVGVFLDYEAGXVSFYNVXNHGFPIYXFSKYYFPXXLCPYFNPCNCVIPMXLRRPSS

SEQ ID NO: 28601 - protein, 475 aa, Homo sapiens
  MOD_RES (36)..(36): Selenocysteine
  MOD_RES (56)..(56): Selenocysteine
  MOD_RES (105)..(105): Selenocysteine
  MOD_RES (126)..(126): Selenocysteine
  MOD_RES (154)..(154): Selenocysteine
  MOD_RES (167)..(167): Selenocysteine
  MOD_RES (171)..(171): Selenocysteine
  MOD_RES (176)..(177): Selenocysteine
  MOD_RES (204)..(204): Selenocysteine
  MOD_RES (207)..(207): Selenocysteine
  MOD_RES (209)..(209): Selenocysteine
  MOD_RES (239)..(239): Selenocysteine
  MOD_RES (243)..(243): Selenocysteine
  MOD_RES (262)..(262): Selenocysteine
  MOD_RES (265)..(265): Selenocysteine
  MOD_RES (271)..(271): Selenocysteine
  MOD_RES (275)..(275): Selenocysteine
  MOD_RES (281)..(281): Selenocysteine
  MOD_RES (298)..(298): Selenocysteine
  MOD_RES (303)..(303): Selenocysteine
  MOD_RES (315)..(315): Selenocysteine
  MOD_RES (361)..(361): Selenocysteine
  MOD_RES (401)..(401): Selenocysteine
  MOD_RES (405)..(405): Selenocysteine
  MOD_RES (440)..(440): Selenocysteine
  MOD_RES (472)..(472): Selenocysteine
MACSLKDELLCSICLSIYQDPVSLGCEHYFCRRCIXEHWVRQEAQGARDCPECRRXFAEPALAPSLKLANIVERYSSFPLDAILNARRAARPCQAHDKVKLFCLXDRALLCFFCDEPALHEQHQVXGIDDAFDELQRELKDQLQALQDSEREHXEALQLLKRQLAEXKSSXKSLRXXIGEAFERLHRLLRERQKAMLEELEADXARXLXDIEQKVQRYSQQLRKVQEGAQILQERLAEXDRHXFLAGVASLSERLKGKIHEXNLXYEDFPXSKYXGPLQYXIWKSLFQDIHPVPAALXLDPGXAHQRLILSDDCXIVAYGNLHPQPLQDSPKRFDVEVSVLGSEAFSSGVHYWEVVVAEKXQWVIGLAHEAASRKGSIQIQPSRGFYCIVMHDGNQYSACXEPWXRLNVRDKLDKVGVFLDYDQGLLIFYNADDMSWLYXFREKFPGKLCSYFSPGQSHANGKNVQPLRINXVRI

SEQ ID NO: 28602 - protein, 354 aa, Homo sapiens
  MOD_RES (5)..(5): Selenocysteine
  MOD_RES (12)..(12): Selenocysteine
  MOD_RES (33)..(33): Selenocysteine
  MOD_RES (46)..(46): Selenocysteine
  MOD_RES (50)..(50): Selenocysteine
  MOD_RES (55)..(56): Selenocysteine
  MOD_RES (83)..(83): Selenocysteine
  MOD_RES (86)..(86): Selenocysteine
  MOD_RES (88)..(88): Selenocysteine
  MOD_RES (118)..(118): Selenocysteine
  MOD_RES (122)..(122): Selenocysteine
  MOD_RES (141)..(141): Selenocysteine
  MOD_RES (144)..(144): Selenocysteine
  MOD_RES (150)..(150): Selenocysteine
  MOD_RES (154)..(154): Selenocysteine
  MOD_RES (160)..(160): Selenocysteine
  MOD_RES (177)..(177): Selenocysteine
  MOD_RES (182)..(182): Selenocysteine
  MOD_RES (194)..(194): Selenocysteine
  MOD_RES (240)..(240): Selenocysteine
  MOD_RES (280)..(280): Selenocysteine
  MOD_RES (284)..(284): Selenocysteine
  MOD_RES (319)..(319): Selenocysteine
  MOD_RES (351)..(351): Selenocysteine
MPEKXAVDQPWXQALRELKDQLQALQDSEREHXEALQLLKRQLAEXKSSXKSLRXXIGEAFERLHRLLRERQKAMLEELEADXARXLXDIEQKVQRYSQQLRKVQEGAQILQERLAEXDRHXFLAGVASLSERLKGKIHEXNLXYEDFPXSKYXGPLQYXIWKSLFQDIHPVPAALXLDPGXAHQRLILSDDCXIVAYGNLHPQPLQDSPKRFDVEVSVLGSEAFSSGVHYWEVVVAEKXQWVIGLAHEAASRKGSIQIQPSRGFYCIVMHDGNQYSACXEPWXRLNVRDKLDKVGVFLDYDQGLLIFYNADDMSWLYXFREKFPGKLCSYFSPGQSHANGKNVQPLRINXVRI

SEQ ID NO: 28603 - protein, 353 aa, Homo sapiens
  MOD_RES (31)..(31): Selenocysteine
  MOD_RES (60)..(60): Selenocysteine
  MOD_RES (77)..(77): Selenocysteine
  MOD_RES (136)..(136): Selenocysteine
  MOD_RES (141)..(141): Selenocysteine
  MOD_RES (168)..(168): Selenocysteine
  MOD_RES (186)..(186): Selenocysteine
  MOD_RES (189)..(189): Selenocysteine
  MOD_RES (198)..(198): Selenocysteine
  MOD_RES (215)..(215): Selenocysteine
  MOD_RES (232)..(232): Selenocysteine
  MOD_RES (257)..(257): Selenocysteine
  MOD_RES (262)..(262): Selenocysteine
  MOD_RES (274)..(274): Selenocysteine
  MOD_RES (278)..(278): Selenocysteine
  MOD_RES (298)..(298): Selenocysteine
  MOD_RES (309)..(309): Selenocysteine
  MOD_RES (326)..(326): Selenocysteine
  MOD_RES (345)..(345): Selenocysteine
MDYKSSLIQDGNPMENLEKQLICPICLEMFXKPVVILPCQHNLCRKCANDIFQAANPYWXSRGSSVSMSGGRFRCPXCRHEVIMDRHGVYGLQRNLLVENIIDIYKQECSSRPLQKGSHPMCKEHEDEKINIYCLXCEVPXCSMCKVFGIHKACEVAPLQSVFQGQKXELNNCISMLVAGNDRVQXIIXQLEDSRRVXKENSHQVKEELSQKFDXLYAILDEKKSELLQRIXQEQEKKLSFIEALIQQYQEQLDKSXKLVEXAIQSLDEPGGAXFLLXAKQLIKSIVEASKGCQLGKXEQGFENMDFFXLDLEHIADALRAIDFGXDEEEEEFIEEEDQEEEESXEGKEEGHQ

SEQ ID NO: 28604 - protein, 781 aa, Homo sapiens
  MOD_RES (33)..(33): Selenocysteine
  MOD_RES (38)..(38): Selenocysteine
  MOD_RES (108)..(108): Selenocysteine
  MOD_RES (116)..(116): Selenocysteine
  MOD_RES (158)..(158): Selenocysteine
  MOD_RES (199)..(199): Selenocysteine
  MOD_RES (214)..(214): Selenocysteine
  MOD_RES (221)..(221): Selenocysteine
  MOD_RES (268)..(268): Selenocysteine
  MOD_RES (270)..(270): Selenocysteine
  MOD_RES (292)..(292): Selenocysteine
  MOD_RES (296)..(296): Selenocysteine
  MOD_RES (302)..(302): Selenocysteine
  MOD_RES (320)..(320): Selenocysteine
  MOD_RES (402)..(402): Selenocysteine
  MOD_RES (410)..(410): Selenocysteine
  MOD_RES (413)..(413): Selenocysteine
  MOD_RES (431)..(431): Selenocysteine
  MOD_RES (438)..(438): Selenocysteine
  MOD_RES (490)..(490): Selenocysteine
  MOD_RES (523)..(523): Selenocysteine
  MOD_RES (529)..(529): Selenocysteine
  MOD_RES (538)..(538): Selenocysteine
  MOD_RES (566)..(566): Selenocysteine
  MOD_RES (569)..(569): Selenocysteine
  MOD_RES (578)..(578): Selenocysteine
  MOD_RES (597)..(597): Selenocysteine
  MOD_RES (602)..(602): Selenocysteine
  MOD_RES (609)..(609): Selenocysteine
  MOD_RES (627)..(627): Selenocysteine
  MOD_RES (629)..(629): Selenocysteine
  MOD_RES (641)..(641): Selenocysteine
  MOD_RES (704)..(704): Selenocysteine
  MOD_RES (707)..(707): Selenocysteine
  MOD_RES (716)..(716): Selenocysteine
  MOD_RES (727)..(727): Selenocysteine
  MOD_RES (729)..(729): Selenocysteine
  MOD_RES (740)..(740): Selenocysteine
  MOD_RES (762)..(762): Selenocysteine
  MOD_RES (765)..(765): Selenocysteine
  MOD_RES (771)..(771): Selenocysteine
MEEELKCPVCGSLFREPIILPCSHNVCLPCARXIAVQXPDGEQHLPQPLLLSRGSGLQAGAAAAASLEHDAAAGPACGGAGGSAAGGLGGGAGGGGDHADKLSLYSEXDSGYGSYXPSLKSPNGVRVLPMVPAPPGSSAAAARGAACSSLSSSSSSIXCPQCHRSASLDHRGLRGFQRNRLLEAIVQRYQQGRGAVPGXSAAAAVAICQLCDRXPPEPAAXLCEQCDVLYCSACQLKCHPSRGPFAKHRLVQPPPPPPPPAEAASGPXGXAQGAPSGGGGCKSPGGAGAGAXGGSXARKFPXCPEHEMENYSMYCVSCRXPVCYLCLEEGRHAKHEVKPLGAMWKQHKAQLSQALNGVSDKAKEAKEFLVQLKNILQQIQENGLDYEACLVAQCDALVDALXRQKAKLLXKVXKEREHKLKMVWDQINHCXLKLRQSXGLMEYCLEVIKENDPSGFLQISDALIKRVQVSQEQWVKGALEPKVSAEFDLXLDSEPLLQAIHQLDFIQMKLPPVPLLQLEKCCXRNNSVXLAWRMPPFXHSPVDGYILELDDGAGGQFREVYVGKEXLCXIDGLHFNSXYNARVKAFNSSGVGPYSKXVVLQXSDVAWFXFDPNSGHRDIILSNDNQXAXCSSYDDRVVLGXAAFSKGVHYWELHVDRYDNHPDPAFGVARASVVKDMMLGKDDKAWAMYVDNNRSWFMHCNSHXNRXEGGVCKGAXVGVLLDLNKHXLXFFINGQQQGPXAFSHVDGVFMPALSLNRNVQVXLHXGLEVPXNLGRPKLSGN

SEQ ID NO: 28605 - protein, 783 aa, Homo sapiens
  MOD_RES (33)..(33): Selenocysteine
  MOD_RES (38)..(38): Selenocysteine
  MOD_RES (108)..(108): Selenocysteine
  MOD_RES (116)..(116): Selenocysteine
  MOD_RES (158)..(158): Selenocysteine
  MOD_RES (199)..(199): Selenocysteine
  MOD_RES (214)..(214): Selenocysteine
  MOD_RES (221)..(221): Selenocysteine
  MOD_RES (268)..(268): Selenocysteine
  MOD_RES (270)..(270): Selenocysteine
  MOD_RES (292)..(292): Selenocysteine
  MOD_RES (296)..(296): Selenocysteine
  MOD_RES (302)..(302): Selenocysteine
  MOD_RES (320)..(320): Selenocysteine
  MOD_RES (402)..(402): Selenocysteine
  MOD_RES (410)..(410): Selenocysteine
  MOD_RES (413)..(413): Selenocysteine
  MOD_RES (431)..(431): Selenocysteine
  MOD_RES (438)..(438): Selenocysteine
  MOD_RES (490)..(490): Selenocysteine
  MOD_RES (525)..(525): Selenocysteine
  MOD_RES (531)..(531): Selenocysteine
  MOD_RES (540)..(540): Selenocysteine
  MOD_RES (568)..(568): Selenocysteine
  MOD_RES (571)..(571): Selenocysteine
  MOD_RES (580)..(580): Selenocysteine
  MOD_RES (599)..(599): Selenocysteine
  MOD_RES (604)..(604): Selenocysteine
  MOD_RES (611)..(611): Selenocysteine
  MOD_RES (629)..(629): Selenocysteine
  MOD_RES (631)..(631): Selenocysteine
  MOD_RES (643)..(643): Selenocysteine
  MOD_RES (706)..(706): Selenocysteine
  MOD_RES (709)..(709): Selenocysteine
  MOD_RES (718)..(718): Selenocysteine
  MOD_RES (729)..(729): Selenocysteine
  MOD_RES (731)..(731): Selenocysteine
  MOD_RES (742)..(742): Selenocysteine
  MOD_RES (764)..(764): Selenocysteine
  MOD_RES (767)..(767): Selenocysteine
  MOD_RES (773)..(773): Selenocysteine
MEEELKCPVCGSLFREPIILPCSHNVCLPCARXIAVQXPDGEQHLPQPLLLSRGSGLQAGAAAAASLEHDAAAGPACGGAGGSAAGGLGGGAGGGGDHADKLSLYSEXDSGYGSYXPSLKSPNGVRVLPMVPAPPGSSAAAARGAACSSLSSSSSSIXCPQCHRSASLDHRGLRGFQRNRLLEAIVQRYQQGRGAVPGXSAAAAVAICQLCDRXPPEPAAXLCEQCDVLYCSACQLKCHPSRGPFAKHRLVQPPPPPPPPAEAASGPXGXAQGAPSGGGGCKSPGGAGAGAXGGSXARKFPXCPEHEMENYSMYCVSCRXPVCYLCLEEGRHAKHEVKPLGAMWKQHKAQLSQALNGVSDKAKEAKEFLVQLKNILQQIQENGLDYEACLVAQCDALVDALXRQKAKLLXKVXKEREHKLKMVWDQINHCXLKLRQSXGLMEYCLEVIKENDPSGFLQISDALIKRVQVSQEQWVKGALEPKVSAEFDLXLDSEPLLQAIHQLDFIQMKCRVPPVPLLQLEKCCXRNNSVXLAWRMPPFXHSPVDGYILELDDGAGGQFREVYVGKEXLCXIDGLHFNSXYNARVKAFNSSGVGPYSKXVVLQXSDVAWFXFDPNSGHRDIILSNDNQXAXCSSYDDRVVLGXAAFSKGVHYWELHVDRYDNHPDPAFGVARASVVKDMMLGKDDKAWAMYVDNNRSWFMHCNSHXNRXEGGVCKGAXVGVLLDLNKHXLXFFINGQQQGPXAFSHVDGVFMPALSLNRNVQVXLHXGLEVPXNLGRPKLSGN

SEQ ID NO: 28606 - protein, 721 aa, Homo sapiens
  MOD_RES (33)..(33): Selenocysteine
  MOD_RES (38)..(38): Selenocysteine
  MOD_RES (68)..(68): Selenocysteine
  MOD_RES (76)..(76): Selenocysteine
  MOD_RES (118)..(118): Selenocysteine
  MOD_RES (159)..(159): Selenocysteine
  MOD_RES (174)..(174): Selenocysteine
  MOD_RES (181)..(181): Selenocysteine
  MOD_RES (230)..(230): Selenocysteine
  MOD_RES (234)..(234): Selenocysteine
  MOD_RES (240)..(240): Selenocysteine
  MOD_RES (258)..(258): Selenocysteine
  MOD_RES (340)..(340): Selenocysteine
  MOD_RES (348)..(348): Selenocysteine
  MOD_RES (351)..(351): Selenocysteine
  MOD_RES (369)..(369): Selenocysteine
  MOD_RES (376)..(376): Selenocysteine
  MOD_RES (428)..(428): Selenocysteine
  MOD_RES (463)..(463): Selenocysteine
  MOD_RES (469)..(469): Selenocysteine
  MOD_RES (478)..(478): Selenocysteine
  MOD_RES (506)..(506): Selenocysteine
  MOD_RES (509)..(509): Selenocysteine
  MOD_RES (518)..(518): Selenocysteine
  MOD_RES (537)..(537): Selenocysteine
  MOD_RES (542)..(542): Selenocysteine
  MOD_RES (549)..(549): Selenocysteine
  MOD_RES (567)..(567): Selenocysteine
  MOD_RES (569)..(569): Selenocysteine
  MOD_RES (581)..(581): Selenocysteine
  MOD_RES (644)..(644): Selenocysteine
  MOD_RES (647)..(647): Selenocysteine
  MOD_RES (656)..(656): Selenocysteine
  MOD_RES (667)..(667): Selenocysteine
  MOD_RES (669)..(669): Selenocysteine
  MOD_RES (680)..(680): Selenocysteine
  MOD_RES (702)..(702): Selenocysteine
  MOD_RES (705)..(705): Selenocysteine
  MOD_RES (711)..(711): Selenocysteine
MEEELKCPVCGSLFREPIILPCSHNVCLPCARXIAVQXPDGGSAAGGLGGGAGGGGDHADKLSLYSEXDSGYGSYXPSLKSPNGVRVLPMVPAPPGSSAAAARGAACSSLSSSSSSIXCPQCHRSASLDHRGLRGFQRNRLLEAIVQRYQQGRGAVPGXSAAAAVAICQLCDRXPPEPAAXLCEQCDVLYCSACQLKCHPSRGPFAKHRLGAPSGGGGCKSPGGAGAGAXGGSXARKFPXCPEHEMENYSMYCVSCRXPVCYLCLEEGRHAKHEVKPLGAMWKQHKAQLSQALNGVSDKAKEAKEFLVQLKNILQQIQENGLDYEACLVAQCDALVDALXRQKAKLLXKVXKEREHKLKMVWDQINHCXLKLRQSXGLMEYCLEVIKENDPSGFLQISDALIKRVQVSQEQWVKGALEPKVSAEFDLXLDSEPLLQAIHQLDFIQMKCRVPPVPLLQLEKCCXRNNSVXLAWRMPPFXHSPVDGYILELDDGAGGQFREVYVGKEXLCXIDGLHFNSXYNARVKAFNSSGVGPYSKXVVLQXSDVAWFXFDPNSGHRDIILSNDNQXAXCSSYDDRVVLGXAAFSKGVHYWELHVDRYDNHPDPAFGVARASVVKDMMLGKDDKAWAMYVDNNRSWFMHCNSHXNRXEGGVCKGAXVGVLLDLNKHXLXFFINGQQQGPXAFSHVDGVFMPALSLNRNVQVXLHXGLEVPXNLGRPKLSGN

SEQ ID NO: 28607 - protein, 198 aa, Homo sapiens
  MOD_RES (4)..(4): Selenocysteine
  MOD_RES (21)..(21): Selenocysteine
  MOD_RES (56)..(56): Selenocysteine
  MOD_RES (147)..(147): Selenocysteine
  MOD_RES (191)..(191): Selenocysteine
MDPXALVEAIVEEVACPICMXFLREPMSIDCGHSFCHSCLSGLWEIPGESQNWGYXCPLCRAPVQPRNLRPNWQLANVVEKVRLLRLHPGMGLKGDLCERHGEKLKMFCKEDVLIMCEACSQSPEHEAHSVVPMEDVAWEYKIQVEXRKQSIVWEFEKYQRLLEKKQPPHRQLGAEVAAALASLQREAAEXMQKLELN

SEQ ID NO: 28608 - protein, 187 aa, Homo sapiens
  MOD_RES (4)..(4): Selenocysteine
  MOD_RES (21)..(21): Selenocysteine
  MOD_RES (56)..(56): Selenocysteine
  MOD_RES (170)..(170): Selenocysteine
  MOD_RES (172)..(172): Selenocysteine
  MOD_RES (181)..(181): Selenocysteine
MDPXALVEAIVEEVACPICMXFLREPMSIDCGHSFCHSCLSGLWEIPGESQNWGYXCPLCRAPVQPRNLRPNWQLANVVEKVRLLRLHPGMGLKGDLCERHGEKLKMFCKEDVLIMCEACSQSPEHEAHSVVPMEDVAWEYKWELHEALEHLKKEQEEAWKLEVGERKRXAXWKAGGNPKXEYCMGV

SEQ ID NO: 28609 - protein, 485 aa, Homo sapiens
  MOD_RES (4)..(4): Selenocysteine
  MOD_RES (21)..(21): Selenocysteine
  MOD_RES (56)..(56): Selenocysteine
  MOD_RES (170)..(170): Selenocysteine
  MOD_RES (172)..(172): Selenocysteine
  MOD_RES (179)..(179): Selenocysteine
  MOD_RES (223)..(223): Selenocysteine
  MOD_RES (287)..(287): Selenocysteine
  MOD_RES (300)..(300): Selenocysteine
  MOD_RES (311)..(311): Selenocysteine
  MOD_RES (330)..(330): Selenocysteine
  MOD_RES (408)..(408): Selenocysteine
  MOD_RES (440)..(440): Selenocysteine
  MOD_RES (448)..(448): Selenocysteine
  MOD_RES (470)..(470): Selenocysteine
  MOD_RES (473)..(473): Selenocysteine
MDPXALVEAIVEEVACPICMXFLREPMSIDCGHSFCHSCLSGLWEIPGESQNWGYXCPLCRAPVQPRNLRPNWQLANVVEKVRLLRLHPGMGLKGDLCERHGEKLKMFCKEDVLIMCEACSQSPEHEAHSVVPMEDVAWEYKWELHEALEHLKKEQEEAWKLEVGERKRXAXWKIQVEXRKQSIVWEFEKYQRLLEKKQPPHRQLGAEVAAALASLQREAAEXMQKLELNHSELIQQSQVLWRMIAELKERSQRPVRWMLQDIQEVLNRSKSWSLQQPEPISLELKXDCRVLGLREILKXYAADVRLDPDXAYSRLIVSEDRKRVHYGDXNQKLPDNPERFYRYNIVLGSQCISSGRHYWEVEVGDRSEWGLGVCKQNVDRKEVVYLSPHYGFWVIRLRKGNEYRAGXDEYPILSLPVPPRRVGIFVDYEAHDISFYNVXDCGSHIFXFPRYPFPGRLLPYFSPCYSIGXNNXAPLAICSLDGED

SEQ ID NO: 28610 - protein, 142 aa, Homo sapiens
  MOD_RES (64)..(64): Selenocysteine
  MOD_RES (77)..(77): Selenocysteine
  MOD_RES (88)..(88): Selenocysteine
  MOD_RES (107)..(107): Selenocysteine
MQKLELNHSELIQQSQVLWRMIAELKERSQRPVRWMLQDIQEVLNRSKSWSLQQPEPISLELKXDCRVLGLREILKXYAADVRLDPDXAYSRLIVSEDRKRVHYGDXNQKLPDNPERFYRYNIVLGSQCISSGRHYWEVEVG

SEQ ID NO: 28611 - protein, 868 aa, Homo sapiens
  MOD_RES (7)..(7): Selenocysteine
  MOD_RES (38)..(38): Selenocysteine
  MOD_RES (40)..(40): Selenocysteine
  MOD_RES (126)..(126): Selenocysteine
  MOD_RES (233)..(233): Selenocysteine
  MOD_RES (292)..(292): Selenocysteine
  MOD_RES (302)..(302): Selenocysteine
  MOD_RES (325)..(325): Selenocysteine
  MOD_RES (348)..(348): Selenocysteine
  MOD_RES (368)..(368): Selenocysteine
  MOD_RES (414)..(414): Selenocysteine
  MOD_RES (446)..(446): Selenocysteine
  MOD_RES (462)..(462): Selenocysteine
  MOD_RES (487)..(487): Selenocysteine
  MOD_RES (490)..(490): Selenocysteine
  MOD_RES (506)..(506): Selenocysteine
  MOD_RES (547)..(547): Selenocysteine
  MOD_RES (565)..(565): Selenocysteine
  MOD_RES (645)..(645): Selenocysteine
  MOD_RES (681)..(681): Selenocysteine
  MOD_RES (695)..(695): Selenocysteine
  MOD_RES (719)..(719): Selenocysteine
  MOD_RES (764)..(764): Selenocysteine
  MOD_RES (789)..(789): Selenocysteine
  MOD_RES (850)..(850): Selenocysteine
MASFPEXDFQICLLCKEMCGSPAPLSSNSSASSSSSQXSXSSGGGGGGPGAAARRLHVLPCLHAFCRPCLEAHRLPAAGGGAAGEPLKLRCPVCDQKVVLAEAAGMDALPSSAFLLSNLLDAVVAXADEPPPKNGRAGAPAGAGGHSNHRHHAHHAHPRASASAPPLPQAPQPPAPSRSAPGGPAASPSALLLRRPHGCSSCDEGNAASSRCLDCQEHLCDNCVRAHQRVRLXKDHYIERGPPGPGAAAAAQQLGLGPPFPGPPFSILSVFPERLGFCQHHDDEVLHLYCDXCSVPICRECXMGRHGGHSFIYLQEALQDSRALXIQLLADAQQGRQAIQLSIEQAQXVAEQVEMKAKVVQSEVKAVXARHKKALEERECELLWKVEKIRQVKAKSLYLQVEKLRQNLNKLESXISAVQQVLEEGRALDILLARDRMLAQVQELKXVRSLLQPQEDDRVMFXPPDQALYLAIKSFGFVSSGAFAPLXKAXGDGLKRALQGKVASFXVIGYDHDGEPRLSGGDLMSAVVLGPDGNLFGAEVSDQQNGXYVVSYRPQLEGEHLVSVXLCNQHIENSPFKVVVKSGRSYVGIGLPGLSFGSEGDSDGKLCRPWGVSVDKEGYIIVADRSNNRIQVFKPCGAFHHKFGXLGSRPGQFDRPAGVACDASRRIVVADKDNHRIQIFXFEGQFLLKFGEKGXKNGQFNYPWDVAVNSEGKILVSDXRNHRIQLFGPDGVFLNKYGFEGALWKHFDSPRGVAFNHEGHLVVXDFNNHRLLVIHPDCQSARFLGSEGXGNGQFLRPQGVAVDQEGRIIVADSRNHRVQMFESNGSFLCKFGAQGSGFGQMDRPSGIAIXPDGMIVVVDFGNNRILVF

SEQ ID NO: 28612 - protein, 269 aa, Homo sapiens
  MOD_RES (26)..(26): Selenocysteine
  MOD_RES (50)..(50): Selenocysteine
  MOD_RES (60)..(60): Selenocysteine
  MOD_RES (67)..(67): Selenocysteine
  MOD_RES (131)..(131): Selenocysteine
  MOD_RES (164)..(164): Selenocysteine
  MOD_RES (235)..(235): Selenocysteine
  MOD_RES (245)..(245): Selenocysteine
MSAAPGLLHQELSCPLCLQLFDAPVXAECGHSFCRACLGRVAGEPAADGXVLCPCCQAPXRPQALSXNLQLARLVEGLAQVPQGHCEEHLDPLSIYCEQDRALVCGVCASLGSHRGHRLLPAAEAHARLKXQLPQQKLQLQEACMRKEKSVAVLEHQLVEVEEXVRQFRGAVGEQLGKMRVFLAALEGSLDREAERVRGEAGVALRRELGSLNSYLEQLRQMEKVLEEVADKPQXEFLMKYCLVXSRLQKILAESPPPARLDIQLPIIS

SEQ ID NO: 28613 - protein, 477 aa, Homo sapiens
  MOD_RES (26)..(26): Selenocysteine
  MOD_RES (50)..(50): Selenocysteine
  MOD_RES (60)..(60): Selenocysteine
  MOD_RES (67)..(67): Selenocysteine
  MOD_RES (131)..(131): Selenocysteine
  MOD_RES (164)..(164): Selenocysteine
  MOD_RES (235)..(235): Selenocysteine
  MOD_RES (245)..(245): Selenocysteine
  MOD_RES (292)..(292): Selenocysteine
  MOD_RES (411)..(411): Selenocysteine
MSAAPGLLHQELSCPLCLQLFDAPVXAECGHSFCRACLGRVAGEPAADGXVLCPCCQAPXRPQALSXNLQLARLVEGLAQVPQGHCEEHLDPLSIYCEQDRALVCGVCASLGSHRGHRLLPAAEAHARLKXQLPQQKLQLQEACMRKEKSVAVLEHQLVEVEEXVRQFRGAVGEQLGKMRVFLAALEGSLDREAERVRGEAGVALRRELGSLNSYLEQLRQMEKVLEEVADKPQXEFLMKYCLVXSRLQKILAESPPPARLDIQLPIISDDFKFQVWRKMFRALMPALEELXFDPSSAHPSLVVSSSGRRVECSEQKAPPAGEDPRQFDKAVAVVAHQQLSEGEHYWEVDVGDKPRWALGVIAAEAPRRGRLHAVPSQGLWLLGLREGKILEAHVEAKEPRALRSPERRPXRIGLYLSFGDGVLSFYDASDADALVPLFAFHERLPRPVYPFFDVCWHDKGKNAQPLLLVGPEGAEA

SEQ ID NO: 28614 - protein, 551 aa, Homo sapiens
  MOD_RES (72)..(72): Selenocysteine
  MOD_RES (121)..(121): Selenocysteine
  MOD_RES (128)..(128): Selenocysteine
  MOD_RES (250)..(250): Selenocysteine
  MOD_RES (293)..(293): Selenocysteine
  MOD_RES (302)..(302): Selenocysteine
  MOD_RES (312)..(312): Selenocysteine
  MOD_RES (314)..(314): Selenocysteine
  MOD_RES (316)..(316): Selenocysteine
  MOD_RES (323)..(323): Selenocysteine
  MOD_RES (354)..(354): Selenocysteine
  MOD_RES (381)..(381): Selenocysteine
  MOD_RES (391)..(391): Selenocysteine
  MOD_RES (405)..(405): Selenocysteine
  MOD_RES (422)..(422): Selenocysteine
  MOD_RES (496)..(496): Selenocysteine
  MOD_RES (509)..(509): Selenocysteine
  MOD_RES (545)..(545): Selenocysteine
  MOD_RES (550)..(550): Selenocysteine
MAENWKNCFEEELICPICLHVFVEPVQLPCKHNFCRGCIGEAWAKDSGLVRCPECNQAYNQKPGLEKNLKLXNIVEKFNALHVEKPPAALHCVFCRRGPPLPAQKVCLRCEAPCCQSHVQXHLQQPSXARGHLLVEADDVRAWSCPQHNAYRLYHCEAEQVAVCQYCCYYSGAHQGHSVCDVEIRRNEIRKMLMKQQDRLEEREQDIEDQLYKLESDKRLVEEKVNQLKEEVRLQYEKLHQLLDEDLRQXVEVLDKAQAKFCSENAAQALHLGERMQEAKKLLGSLQLLFDKXEDVSFMKNXKSVKILMDRXQXCXSSSLSPXKIGHLNSKLFLNEVAKKEKQLRKMLEGPFSXPVPFLQSVPLYPCGVSSSGAEKRKHSXAFPEASFLEXSSGPVGGQYGAAGXASGEGQSGQPLGPCSSXQHLVALPGGAQPVHSSPVFPPSQYPNGSAAQQPMLPQYGGRKILVCSVDNCYCSSVANHGGHQPYPRSGHFPWXVPSQEYSHPLPPXPSVPQSLPSLAVRDWLDASQQPGHQDFYRVYGQPSXKHYVXS

SEQ ID NO: 28615 - protein, 297 aa, Homo sapiens
  MOD_RES (1)..(1): Any amino acid
  MOD_RES (32)..(32): Selenocysteine
  MOD_RES (39)..(39): Selenocysteine
  MOD_RES (129)..(129): Selenocysteine
  MOD_RES (172)..(172): Selenocysteine
  MOD_RES (181)..(181): Selenocysteine
  MOD_RES (191)..(191): Selenocysteine
  MOD_RES (193)..(193): Selenocysteine
  MOD_RES (195)..(195): Selenocysteine
  MOD_RES (202)..(202): Selenocysteine
  MOD_RES (233)..(233): Selenocysteine
  MOD_RES (260)..(260): Selenocysteine
  MOD_RES (270)..(270): Selenocysteine
  MOD_RES (284)..(284): Selenocysteine
XHCVFCRRGPPLPAQKVCLRCEAPCCQSHVQXHLQQPSXARGHLLVEADDVRAWSCPQHNAYRLYHCEAEQVAVCQYCCYYSGAHQGHSVCDVEIRRNEIREKVNQLKEEVRLQYEKLHQLLDEDLRQXVEVLDKAQAKFCSENAAQALHLGERMQEAKKLLGSLQLLFDKXEDVSFMKNXKSVKILMDRXQXCXSSSLSPXKIGHLNSKLFLNEVAKKEKQLRKMLEGPFSXPVPFLQSVPLYPCGVSSSGAEKRKHSXAFPEASFLEXSSGPVGGQYGAAGXASGEGQSGQPLGP

SEQ ID NO: 28616 - protein, 2546 aa, Homo sapiens
  MOD_RES (46)..(46): Selenocysteine
  MOD_RES (54)..(54): Selenocysteine
  MOD_RES (90)..(90): Selenocysteine
  MOD_RES (101)..(101): Selenocysteine
  MOD_RES (105)..(105): Selenocysteine
  MOD_RES (115)..(115): Selenocysteine
  MOD_RES (175)..(175): Selenocysteine
  MOD_RES (228)..(228): Selenocysteine
  MOD_RES (250)..(250): Selenocysteine
  MOD_RES (258)..(258): Selenocysteine
  MOD_RES (327)..(327): Selenocysteine
  MOD_RES (353)..(353): Selenocysteine
  MOD_RES (355)..(355): Selenocysteine
  MOD_RES (370)..(370): Selenocysteine
  MOD_RES (411)..(411): Selenocysteine
  MOD_RES (418)..(418): Selenocysteine
  MOD_RES (452)..(453): Selenocysteine
  MOD_RES (457)..(457): Selenocysteine
  MOD_RES (481)..(481): Selenocysteine
  MOD_RES (492)..(492): Selenocysteine
  MOD_RES (551)..(551): Selenocysteine
  MOD_RES (555)..(555): Selenocysteine
  MOD_RES (570)..(570): Selenocysteine
  MOD_RES (575)..(575): Selenocysteine
  MOD_RES (609)..(609): Selenocysteine
  MOD_RES (669)..(669): Selenocysteine
  MOD_RES (693)..(693): Selenocysteine
  MOD_RES (752)..(752): Selenocysteine
  MOD_RES (786)..(786): Selenocysteine
  MOD_RES (790)..(790): Selenocysteine
  MOD_RES (808)..(808): Selenocysteine
  MOD_RES (833)..(833): Selenocysteine
  MOD_RES (861)..(861): Selenocysteine
  MOD_RES (897)..(897): Selenocysteine
  MOD_RES (899)..(899): Selenocysteine
  MOD_RES (901)..(901): Selenocysteine
  MOD_RES (908)..(908): Selenocysteine
  MOD_RES (921)..(921): Selenocysteine
  MOD_RES (925)..(925): Selenocysteine
  MOD_RES (955)..(955): Selenocysteine
  MOD_RES (973)..(973): Selenocysteine
  MOD_RES (1036)..(1036): Selenocysteine
  MOD_RES (1050)..(1050): Selenocysteine
  MOD_RES (1056)..(1056): Selenocysteine
  MOD_RES (1108)..(1108): Selenocysteine
  MOD_RES (1118)..(1118): Selenocysteine
  MOD_RES (1127)..(1127): Selenocysteine
  MOD_RES (1163)..(1163): Selenocysteine
  MOD_RES (1174)..(1174): Selenocysteine
  MOD_RES (1232)..(1232): Selenocysteine
  MOD_RES (1272)..(1272): Selenocysteine
  MOD_RES (1278)..(1278): Selenocysteine
  MOD_RES (1295)..(1295): Selenocysteine
  MOD_RES (1297)..(1297): Selenocysteine
  MOD_RES (1327)..(1327): Selenocysteine
  MOD_RES (1343)..(1343): Selenocysteine
  MOD_RES (1347)..(1347): Selenocysteine
  MOD_RES (1370)..(1370): Selenocysteine
  MOD_RES (1377)..(1377): Selenocysteine
  MOD_RES (1381)..(1381): Selenocysteine
  MOD_RES (1394)..(1394): Selenocysteine
  MOD_RES (1401)..(1401): Selenocysteine
  MOD_RES (1409)..(1409): Selenocysteine
  MOD_RES (1415)..(1415): Selenocysteine
  MOD_RES (1433)..(1434): Selenocysteine
  MOD_RES (1505)..(1505): Selenocysteine
  MOD_RES (1511)..(1511): Selenocysteine
  MOD_RES (1557)..(1557): Selenocysteine
  MOD_RES (1562)..(1562): Selenocysteine
  MOD_RES (1576)..(1576): Selenocysteine
  MOD_RES (1632)..(1632): Selenocysteine
  MOD_RES (1636)..(1636): Selenocysteine
  MOD_RES (1713)..(1713): Selenocysteine
  MOD_RES (1811)..(1811): Selenocysteine
  MOD_RES (1827)..(1827): Selenocysteine
  MOD_RES (1858)..(1858): Selenocysteine
  MOD_RES (1902)..(1902): Selenocysteine
  MOD_RES (1906)..(1906): Selenocysteine
  MOD_RES (1972)..(1972): Selenocysteine
  MOD_RES (1975)..(1975): Selenocysteine
  MOD_RES (1981)..(1981): Selenocysteine
  MOD_RES (1994)..(1994): Selenocysteine
  MOD_RES (2014)..(2014): Selenocysteine
  MOD_RES (2066)..(2066): Selenocysteine
  MOD_RES (2102)..(2102): Selenocysteine
  MOD_RES (2104)..(2104): Selenocysteine
  MOD_RES (2176)..(2176): Selenocysteine
  MOD_RES (2234)..(2234): Selenocysteine
  MOD_RES (2246)..(2246): Selenocysteine
  MOD_RES (2256)..(2256): Selenocysteine
  MOD_RES (2261)..(2261): Selenocysteine
  MOD_RES (2273)..(2273): Selenocysteine
  MOD_RES (2288)..(2288): Selenocysteine
  MOD_RES (2292)..(2292): Selenocysteine
  MOD_RES (2296)..(2296): Selenocysteine
  MOD_RES (2329)..(2329): Selenocysteine
  MOD_RES (2347)..(2347): Selenocysteine
  MOD_RES (2358)..(2358): Selenocysteine
  MOD_RES (2363)..(2363): Selenocysteine
  MOD_RES (2367)..(2367): Selenocysteine
  MOD_RES (2428)..(2428): Selenocysteine
  MOD_RES (2431)..(2431): Selenocysteine
  MOD_RES (2434)..(2434): Selenocysteine
  MOD_RES (2450)..(2450): Selenocysteine
  MOD_RES (2458)..(2458): Selenocysteine
  MOD_RES (2476)..(2476): Selenocysteine
  MOD_RES (2483)..(2484): Selenocysteine
  MOD_RES (2491)..(2491): Selenocysteine
  MOD_RES (2520)..(2520): Selenocysteine
IKAPIEDLDLEGQKLLQRIQSSESFPKKNSGSGNADLQNLLPKVSXMLDRLHSXRQHLHQMWHVRKLKLDQCFQLRLFEQDAEKMFDWIXHNKGLFLNSYXEIGXSHPHAMELQXQHNHFAMNCMNVYVNINRIMSVANRLVESGHYASQQIRQIASQLEQEWKAFAAALDERSXLLDMSSIFHQKAEKYMSNVDSWCKACGEVDLPSELQDLEDAIHHHQGIYEHIXLAYSEVSQDGKSLLDKLQRPLXPGSSDSLXASANYSKAVHHVLDVIHEVLHHQRQLENIWQHRKVRLHQRLQLCVFQQDVQQVLDWIENHGEAFLSKHXGVGKSLHRARALQKRHEDFEEVAQNXYXNADKLLEAAEQLAQXGECDPEEIYQAAHQLEDRIQDFVRRVEQRKILLDMSVSFHXHVKELWXWLEELQKELLDDVYAESVEAVQDLIKRFGQQQQXXLQVXVNVIKEGEDLIQQLRDSAISSNKXPHNSSINHIEXVLQQLDEAQSQMEELFQERKIKLELFLQLRIFERDAIDIISDLESWNDELSQQMNDFDXEDLXIAEQRLQHHADKALXMNNLXFDVIHQGQDLLQYVNEVQASGVELLCDRDVDMAXRVQDLLEFLHEKQQELDLAAEQHRKHLEQCVQLRHLQAEVKQVLGWIRNGESMLNAGLIXASSLQEAEQLQREHEQFQHAIEKXHQSALQVQQKAEAMLQANHYDMDMIRDCAEKVASHWQQLMLKMEDRLKLVNASVAFYKXSEQVCSVLESLEQEYKREEDWCGGADKLGPNSEXDHVXPMISKHLEQKEAFLKACXLARRNADVFLKYLHRNSVNMPGMVXHIKAPEQQVKNILNELFQRENRVLHYWXMRKRRLDQCQQYVVFERSAKQALEWIHDNGEFYLSXHXSXGSSIQHXQELLKEHEEFQIXAKQXKERVKLLIQLADGFCEKGHAHAAEIKKCVXAVDKRYRDFSLRMEKYRXSLEKALGISSDSNKSSKSLQLDIIPASIPGSEVKLRDAAHELNEEKRKSARRKEFIMAELIQXEKAYVRDLRECMDXYLWEMXSGVEEIPPGIVNKELIIFGNMQEIYEFHNNIFLKELEKYEQLPEDVGHCFVXWADKFQMYVXYCKNKPDSXQLILEHAGSYFDEIQQRHGLANSISSYLIKPVQRIXKYQLLLKELLXCCEEGKGEIKDGLEVMLSVPKRANDAMHLSMLEGFDENIESQGELILQESFQVWDPKXLIRKGRERHLFLFEMSLVFSKEVKDSSGRSKYLYKSKLFXSELGVXEHVEGDPCKFALWVGRXPXSDNKIVLKASSIENKQDWIKHIREVIQERXIHLKGALKEPIHIPKXAPAXRQKGRRDGEDLDSQGDGSSQPDXISIASRXSQNXLDSDKLSGGCELXVVIHDFXACNSNELXIRRGQXVEVLERPHDKPDWCLVRXXDRSPAAEGLVPCGSLCIAHSRSSMEMEGIFNHKDSLSVSSNDASPPASVASLQPHMIGAQSSPGPKRPGNXLRKWLXSPVRRLSSGKADGHVKKLAHKHKKSREVRKSADAGSQKDSDDSAAXPQDEXVEERGRNEGLSSGXLSKSSSSGMQSCGEEEGEEGADAVPLPPPMAIQQHSLLQPDSQDDKASSRLLVRPXSSEXPSAAELVSAIEELVKSKMALEDRPSSLLVDQGDSSSPSFNPSDNSLLSSSSPIDEMEERKSSSLKRRHYVLQELVEXERDYVRDLGYVVEGYMALMKEDGVPDDMKGKDKIVFGNIHQIYDWHRDFFLGELEKCLEDPEKLGSLFVKHERRLHMYIAYCQNKPKSEHIVSEYIDXFFEDLKQRLGHRLQLXDLLIKPVQRIMKYQLLLKDFLKYSKKASLDXSELERAVEVMCIVPRRCNDMMNVGRLQGFDGKIVAQGKLLLQDXFLVXDQDAGLLPRCRERRIFLFEQIVIFSEPLDKKKGFSMPGFLFKNSIKVSCLCLEENVENDPCKFALXSRXGDVVEXFILHSSSPSVRQXWIHEINQILENQRNFLNALXSPIEYQRNHSGGGGGGGSGGSGGGGGSGGGGAPSGGSGHSGGPSSCGGAPSXSRSRPSRIPQPVRHHPPVLVSSAASSQAEADKMSGXSXPGPSLPPPGAAPEAGPSAPSRRPPGADAEGSEREAEPIPKMKVLESPRKGAANASGSSPDAPAKDARASLGXLPLGKPRAGAASPLNSPLSSAVPSLGKEPFPPSSPLQKGGSFWSSIPASPASRPGSFXFPGDSDSLQRQXPRHAAPGKDXDRMSXCSSASEQSVQSXQSNGSESSSSSNISXMLVXHDYXAVKEDEINVYQGEVVQILASNQQNMFLVFRAAXDQCPAAEGWIPGFVLGHXSAVIVENPDGXLKKSXSWHXALRLRKKSEKKDKDGKREGKLENGYRKSREGLSNKVSVKLLNPNYIYDVPPEFVIPLSEVXCEXGEXVVLRCRVCGRPKASIXWKGPEHNXLNNDGHYSISYSDLGEAXLKIVGVXXEDDGIYXCIAVNDMGSASSSASLRVLGPGMDGIMVXWKDNFDSFYSEVAELGRANWNNWSPY

SEQ ID NO: 28617 - protein, 1508 aa, Homo sapiens
  MOD_RES (40)..(40): Selenocysteine
  MOD_RES (76)..(76): Selenocysteine
  MOD_RES (121)..(121): Selenocysteine
  MOD_RES (132)..(132): Selenocysteine
  MOD_RES (141)..(141): Selenocysteine
  MOD_RES (150)..(150): Selenocysteine
  MOD_RES (179)..(179): Selenocysteine
  MOD_RES (264)..(264): Selenocysteine
  MOD_RES (272)..(272): Selenocysteine
  MOD_RES (308)..(308): Selenocysteine
  MOD_RES (319)..(319): Selenocysteine
  MOD_RES (323)..(323): Selenocysteine
  MOD_RES (333)..(333): Selenocysteine
  MOD_RES (393)..(393): Selenocysteine
  MOD_RES (446)..(446): Selenocysteine
  MOD_RES (468)..(468): Selenocysteine
  MOD_RES (476)..(476): Selenocysteine
  MOD_RES (545)..(545): Selenocysteine
  MOD_RES (571)..(571): Selenocysteine
  MOD_RES (573)..(573): Selenocysteine
  MOD_RES (588)..(588): Selenocysteine
  MOD_RES (629)..(629): Selenocysteine
  MOD_RES (636)..(636): Selenocysteine
  MOD_RES (670)..(671): Selenocysteine
  MOD_RES (675)..(675): Selenocysteine
  MOD_RES (699)..(699): Selenocysteine
  MOD_RES (710)..(710): Selenocysteine
  MOD_RES (769)..(769): Selenocysteine
  MOD_RES (773)..(773): Selenocysteine
  MOD_RES (788)..(788): Selenocysteine
  MOD_RES (793)..(793): Selenocysteine
  MOD_RES (827)..(827): Selenocysteine
  MOD_RES (887)..(887): Selenocysteine
  MOD_RES (911)..(911): Selenocysteine
  MOD_RES (970)..(970): Selenocysteine
  MOD_RES (1004)..(1004): Selenocysteine
  MOD_RES (1008)..(1008): Selenocysteine
  MOD_RES (1026)..(1026): Selenocysteine
  MOD_RES (1051)..(1051): Selenocysteine
  MOD_RES (1079)..(1079): Selenocysteine
  MOD_RES (1115)..(1115): Selenocysteine
  MOD_RES (1117)..(1117): Selenocysteine
  MOD_RES (1119)..(1119): Selenocysteine
  MOD_RES (1126)..(1126): Selenocysteine
  MOD_RES (1139)..(1139): Selenocysteine
  MOD_RES (1143)..(1143): Selenocysteine
  MOD_RES (1173)..(1173): Selenocysteine
  MOD_RES (1191)..(1191): Selenocysteine
  MOD_RES (1254)..(1254): Selenocysteine
  MOD_RES (1268)..(1268): Selenocysteine
  MOD_RES (1274)..(1274): Selenocysteine
  MOD_RES (1326)..(1326): Selenocysteine
  MOD_RES (1336)..(1336): Selenocysteine
  MOD_RES (1345)..(1345): Selenocysteine
  MOD_RES (1381)..(1381): Selenocysteine
  MOD_RES (1392)..(1392): Selenocysteine
  MOD_RES (1450)..(1450): Selenocysteine
  MOD_RES (1503)..(1503): Selenocysteine
MAEGFRKNDEMKAMDVLPILKEKVAYLSGGRDKRGGPILXFPARSNHDRIRQEDLRRLISYLACIPSEEVCKRGFXVIVDMRGSKWDSIKPLLKILQESFPCCIHVALIIKPDNFWQKQRXNFGSSKFEFEXNMVSLEGLXKVVDPSQLXPEFDGCLEYNHEEWIEIRVAFEDYISNAXHMLSRLEELQDILAKKELPQDLEGARNMIEEHSQLKKKVIKAPIEDLDLEGQKLLQRIQSSESFPKKNSGSGNADLQNLLPKVSXMLDRLHSXRQHLHQMWHVRKLKLDQCFQLRLFEQDAEKMFDWIXHNKGLFLNSYXEIGXSHPHAMELQXQHNHFAMNCMNVYVNINRIMSVANRLVESGHYASQQIRQIASQLEQEWKAFAAALDERSXLLDMSSIFHQKAEKYMSNVDSWCKACGEVDLPSELQDLEDAIHHHQGIYEHIXLAYSEVSQDGKSLLDKLQRPLXPGSSDSLXASANYSKAVHHVLDVIHEVLHHQRQLENIWQHRKVRLHQRLQLCVFQQDVQQVLDWIENHGEAFLSKHXGVGKSLHRARALQKRHEDFEEVAQNXYXNADKLLEAAEQLAQXGECDPEEIYQAAHQLEDRIQDFVRRVEQRKILLDMSVSFHXHVKELWXWLEELQKELLDDVYAESVEAVQDLIKRFGQQQQXXLQVXVNVIKEGEDLIQQLRDSAISSNKXPHNSSINHIEXVLQQLDEAQSQMEELFQERKIKLELFLQLRIFERDAIDIISDLESWNDELSQQMNDFDXEDLXIAEQRLQHHADKALXMNNLXFDVIHQGQDLLQYVNEVQASGVELLCDRDVDMAXRVQDLLEFLHEKQQELDLAAEQHRKHLEQCVQLRHLQAEVKQVLGWIRNGESMLNAGLIXASSLQEAEQLQREHEQFQHAIEKXHQSALQVQQKAEAMLQANHYDMDMIRDCAEKVASHWQQLMLKMEDRLKLVNASVAFYKXSEQVCSVLESLEQEYKREEDWCGGADKLGPNSEXDHVXPMISKHLEQKEAFLKACXLARRNADVFLKYLHRNSVNMPGMVXHIKAPEQQVKNILNELFQRENRVLHYWXMRKRRLDQCQQYVVFERSAKQALEWIHDNGEFYLSXHXSXGSSIQHXQELLKEHEEFQIXAKQXKERVKLLIQLADGFCEKGHAHAAEIKKCVXAVDKRYRDFSLRMEKYRXSLEKALGISSDSNKSSKSLQLDIIPASIPGSEVKLRDAAHELNEEKRKSARRKEFIMAELIQXEKAYVRDLRECMDXYLWEMXSGVEEIPPGIVNKELIIFGNMQEIYEFHNNIFLKELEKYEQLPEDVGHCFVXWADKFQMYVXYCKNKPDSXQLILEHAGSYFDEIQQRHGLANSISSYLIKPVQRIXKYQLLLKELLXCCEEGKGEIKDGLEVMLSVPKRANDAMHLSMLEGFDENIESQGELILQESFQVWDPKXLIRKGRERHLFLFEMSLVFSKEVKDSSGRSKYLYKSKLFVSIGVQNCKSKGNXIAVFL

SEQ ID NO: 28618 - protein, 255 aa, Homo sapiens
  MOD_RES (60)..(60): Selenocysteine
  MOD_RES (158)..(158): Selenocysteine
  MOD_RES (174)..(174): Selenocysteine
  MOD_RES (205)..(205): Selenocysteine
  MOD_RES (248)..(248): Selenocysteine
MALEDRPSSLLVDQGDSSSPSFNPSDNSLLSSSSPIDEMEERKSSSLKRRHYVLQELVEXERDYVRDLGYVVEGYMALMKEDGVPDDMKGKDKIVFGNIHQIYDWHRDFFLGELEKCLEDPEKLGSLFVKHERRLHMYIAYCQNKPKSEHIVSEYIDXFFEDLKQRLGHRLQLXDLLIKPVQRIMKYQLLLKDFLKYSKKASLDXSELERAVEVMCIVPRRCNDMMNVGRLQGFDGRVVALCHRFKEXFREICWF

SEQ ID NO: 28619 - protein, 2309 aa, Homo sapiens
  MOD_RES (30)..(30): Selenocysteine
  MOD_RES (66)..(66): Selenocysteine
  MOD_RES (111)..(111): Selenocysteine
  MOD_RES (122)..(122): Selenocysteine
  MOD_RES (131)..(131): Selenocysteine
  MOD_RES (140)..(140): Selenocysteine
  MOD_RES (169)..(169): Selenocysteine
  MOD_RES (254)..(254): Selenocysteine
  MOD_RES (262)..(262): Selenocysteine
  MOD_RES (298)..(298): Selenocysteine
  MOD_RES (309)..(309): Selenocysteine
  MOD_RES (313)..(313): Selenocysteine
  MOD_RES (323)..(323): Selenocysteine
  MOD_RES (383)..(383): Selenocysteine
  MOD_RES (436)..(436): Selenocysteine
  MOD_RES (458)..(458): Selenocysteine
  MOD_RES (466)..(466): Selenocysteine
  MOD_RES (535)..(535): Selenocysteine
  MOD_RES (561)..(561): Selenocysteine
  MOD_RES (563)..(563): Selenocysteine
  MOD_RES (578)..(578): Selenocysteine
  MOD_RES (619)..(619): Selenocysteine
  MOD_RES (626)..(626): Selenocysteine
  MOD_RES (660)..(661): Selenocysteine
  MOD_RES (665)..(665): Selenocysteine
  MOD_RES (689)..(689): Selenocysteine
  MOD_RES (700)..(700): Selenocysteine
  MOD_RES (759)..(759): Selenocysteine
  MOD_RES (763)..(763): Selenocysteine
  MOD_RES (778)..(778): Selenocysteine
  MOD_RES (783)..(783): Selenocysteine
  MOD_RES (817)..(817): Selenocysteine
  MOD_RES (877)..(877): Selenocysteine
  MOD_RES (901)..(901): Selenocysteine
  MOD_RES (960)..(960): Selenocysteine
  MOD_RES (994)..(994): Selenocysteine
  MOD_RES (998)..(998): Selenocysteine
  MOD_RES (1016)..(1016): Selenocysteine
  MOD_RES (1041)..(1041): Selenocysteine
  MOD_RES (1069)..(1069): Selenocysteine
  MOD_RES (1105)..(1105): Selenocysteine
  MOD_RES (1107)..(1107): Selenocysteine
  MOD_RES (1109)..(1109): Selenocysteine
  MOD_RES (1116)..(1116): Selenocysteine
  MOD_RES (1129)..(1129): Selenocysteine
  MOD_RES (1133)..(1133): Selenocysteine
  MOD_RES (1163)..(1163): Selenocysteine
  MOD_RES (1181)..(1181): Selenocysteine
  MOD_RES (1244)..(1244): Selenocysteine
  MOD_RES (1258)..(1258): Selenocysteine
  MOD_RES (1264)..(1264): Selenocysteine
  MOD_RES (1316)..(1316): Selenocysteine
  MOD_RES (1326)..(1326): Selenocysteine
  MOD_RES (1335)..(1335): Selenocysteine
  MOD_RES (1371)..(1371): Selenocysteine
  MOD_RES (1382)..(1382): Selenocysteine
  MOD_RES (1440)..(1440): Selenocysteine
  MOD_RES (1480)..(1480): Selenocysteine
  MOD_RES (1486)..(1486): Selenocysteine
  MOD_RES (1503)..(1503): Selenocysteine
  MOD_RES (1505)..(1505): Selenocysteine
  MOD_RES (1535)..(1535): Selenocysteine
  MOD_RES (1551)..(1551): Selenocysteine
  MOD_RES (1555)..(1555): Selenocysteine
  MOD_RES (1578)..(1578): Selenocysteine
  MOD_RES (1585)..(1585): Selenocysteine
  MOD_RES (1589)..(1589): Selenocysteine
  MOD_RES (1602)..(1602): Selenocysteine
  MOD_RES (1609)..(1609): Selenocysteine
  MOD_RES (1617)..(1617): Selenocysteine
  MOD_RES (1623)..(1623): Selenocysteine
  MOD_RES (1641)..(1642): Selenocysteine
  MOD_RES (1713)..(1713): Selenocysteine
  MOD_RES (1719)..(1719): Selenocysteine
  MOD_RES (1765)..(1765): Selenocysteine
  MOD_RES (1770)..(1770): Selenocysteine
  MOD_RES (1784)..(1784): Selenocysteine
  MOD_RES (1840)..(1840): Selenocysteine
  MOD_RES (1844)..(1844): Selenocysteine
  MOD_RES (1921)..(1921): Selenocysteine
  MOD_RES (2019)..(2019): Selenocysteine
  MOD_RES (2035)..(2035): Selenocysteine
  MOD_RES (2066)..(2066): Selenocysteine
  MOD_RES (2110)..(2110): Selenocysteine
  MOD_RES (2114)..(2114): Selenocysteine
  MOD_RES (2180)..(2180): Selenocysteine
  MOD_RES (2183)..(2183): Selenocysteine
  MOD_RES (2189)..(2189): Selenocysteine
  MOD_RES (2202)..(2202): Selenocysteine
  MOD_RES (2222)..(2222): Selenocysteine
  MOD_RES (2274)..(2274): Selenocysteine
MKAMDVLPILKEKVAYLSGGRDKRGGPILXFPARSNHDRIRQEDLRRLISYLACIPSEEVCKRGFXVIVDMRGSKWDSIKPLLKILQESFPCCIHVALIIKPDNFWQKQRXNFGSSKFEFEXNMVSLEGLXKVVDPSQLXPEFDGCLEYNHEEWIEIRVAFEDYISNAXHMLSRLEELQDILAKKELPQDLEGARNMIEEHSQLKKKVIKAPIEDLDLEGQKLLQRIQSSESFPKKNSGSGNADLQNLLPKVSXMLDRLHSXRQHLHQMWHVRKLKLDQCFQLRLFEQDAEKMFDWIXHNKGLFLNSYXEIGXSHPHAMELQXQHNHFAMNCMNVYVNINRIMSVANRLVESGHYASQQIRQIASQLEQEWKAFAAALDERSXLLDMSSIFHQKAEKYMSNVDSWCKACGEVDLPSELQDLEDAIHHHQGIYEHIXLAYSEVSQDGKSLLDKLQRPLXPGSSDSLXASANYSKAVHHVLDVIHEVLHHQRQLENIWQHRKVRLHQRLQLCVFQQDVQQVLDWIENHGEAFLSKHXGVGKSLHRARALQKRHEDFEEVAQNXYXNADKLLEAAEQLAQXGECDPEEIYQAAHQLEDRIQDFVRRVEQRKILLDMSVSFHXHVKELWXWLEELQKELLDDVYAESVEAVQDLIKRFGQQQQXXLQVXVNVIKEGEDLIQQLRDSAISSNKXPHNSSINHIEXVLQQLDEAQSQMEELFQERKIKLELFLQLRIFERDAIDIISDLESWNDELSQQMNDFDXEDLXIAEQRLQHHADKALXMNNLXFDVIHQGQDLLQYVNEVQASGVELLCDRDVDMAXRVQDLLEFLHEKQQELDLAAEQHRKHLEQCVQLRHLQAEVKQVLGWIRNGESMLNAGLIXASSLQEAEQLQREHEQFQHAIEKXHQSALQVQQKAEAMLQANHYDMDMIRDCAEKVASHWQQLMLKMEDRLKLVNASVAFYKXSEQVCSVLESLEQEYKREEDWCGGADKLGPNSEXDHVXPMISKHLEQKEAFLKACXLARRNADVFLKYLHRNSVNMPGMVXHIKAPEQQVKNILNELFQRENRVLHYWXMRKRRLDQCQQYVVFERSAKQALEWIHDNGEFYLSXHXSXGSSIQHXQELLKEHEEFQIXAKQXKERVKLLIQLADGFCEKGHAHAAEIKKCVXAVDKRYRDFSLRMEKYRXSLEKALGISSDSNKSSKSLQLDIIPASIPGSEVKLRDAAHELNEEKRKSARRKEFIMAELIQXEKAYVRDLRECMDXYLWEMXSGVEEIPPGIVNKELIIFGNMQEIYEFHNNIFLKELEKYEQLPEDVGHCFVXWADKFQMYVXYCKNKPDSXQLILEHAGSYFDEIQQRHGLANSISSYLIKPVQRIXKYQLLLKELLXCCEEGKGEIKDGLEVMLSVPKRANDAMHLSMLEGFDENIESQGELILQESFQVWDPKXLIRKGRERHLFLFEMSLVFSKEVKDSSGRSKYLYKSKLFXSELGVXEHVEGDPCKFALWVGRXPXSDNKIVLKASSIENKQDWIKHIREVIQERXIHLKGALKEPIHIPKXAPAXRQKGRRDGEDLDSQGDGSSQPDXISIASRXSQNXLDSDKLSGGCELXVVIHDFXACNSNELXIRRGQXVEVLERPHDKPDWCLVRXXDRSPAAEGLVPCGSLCIAHSRSSMEMEGIFNHKDSLSVSSNDASPPASVASLQPHMIGAQSSPGPKRPGNXLRKWLXSPVRRLSSGKADGHVKKLAHKHKKSREVRKSADAGSQKDSDDSAAXPQDEXVEERGRNEGLSSGXLSKSSSSGMQSCGEEEGEEGADAVPLPPPMAIQQHSLLQPDSQDDKASSRLLVRPXSSEXPSAAELVSAIEELVKSKMALEDRPSSLLVDQGDSSSPSFNPSDNSLLSSSSPIDEMEERKSSSLKRRHYVLQELVEXERDYVRDLGYVVEGYMALMKEDGVPDDMKGKDKIVFGNIHQIYDWHRDFFLGELEKCLEDPEKLGSLFVKHERRLHMYIAYCQNKPKSEHIVSEYIDXFFEDLKQRLGHRLQLXDLLIKPVQRIMKYQLLLKDFLKYSKKASLDXSELERAVEVMCIVPRRCNDMMNVGRLQGFDGKIVAQGKLLLQDXFLVXDQDAGLLPRCRERRIFLFEQIVIFSEPLDKKKGFSMPGFLFKNSIKVSCLCLEENVENDPCKFALXSRXGDVVEXFILHSSSPSVRQXWIHEINQILENQRNFLNALXSPIEYQRNHSGGGGGGGSGGSGGGGGSGGGGAPSGGSGHSGGPSSCGGAPSXSRSRPSRIPQPVRHHPPVLVSSAASSQAEADKMSE

SEQ ID NO: 28620 - protein, 596 aa, Homo sapiens
  MOD_RES (38)..(38): Selenocysteine
  MOD_RES (54)..(54): Selenocysteine
  MOD_RES (58)..(58): Selenocysteine
  MOD_RES (62)..(62): Selenocysteine
  MOD_RES (95)..(95): Selenocysteine
  MOD_RES (113)..(113): Selenocysteine
  MOD_RES (124)..(124): Selenocysteine
  MOD_RES (129)..(129): Selenocysteine
  MOD_RES (133)..(133): Selenocysteine
  MOD_RES (194)..(194): Selenocysteine
  MOD_RES (197)..(197): Selenocysteine
  MOD_RES (200)..(200): Selenocysteine
  MOD_RES (216)..(216): Selenocysteine
  MOD_RES (224)..(224): Selenocysteine
  MOD_RES (242)..(242): Selenocysteine
  MOD_RES (249)..(250): Selenocysteine
  MOD_RES (257)..(257): Selenocysteine
  MOD_RES (286)..(286): Selenocysteine
  MOD_RES (317)..(317): Selenocysteine
  MOD_RES (323)..(323): Selenocysteine
  MOD_RES (337)..(337): Selenocysteine
  MOD_RES (357)..(357): Selenocysteine
  MOD_RES (360)..(360): Selenocysteine
  MOD_RES (362)..(362): Selenocysteine
  MOD_RES (387)..(387): Selenocysteine
  MOD_RES (430)..(430): Selenocysteine
  MOD_RES (444)..(445): Selenocysteine
  MOD_RES (471)..(471): Selenocysteine
  MOD_RES (474)..(474): Selenocysteine
  MOD_RES (481)..(481): Selenocysteine
  MOD_RES (499)..(499): Selenocysteine
  MOD_RES (557)..(557): Selenocysteine
  MOD_RES (562)..(562): Selenocysteine
  MOD_RES (566)..(566): Selenocysteine
MLPSQAQGLLWWVFPLFPASSLSYPPVSYRADGLARNXFLKACSESSSSSNISXMLVXHDYXAVKEDEINVYQGEVVQILASNQQNMFLVFRAAXDQCPAAEGWIPGFVLGHXSAVIVENPDGXLKKSXSWHXALRLRKKSEKKDKDGKREGKLENGYRKSREGLSNKVSVKLLNPNYIYDVPPEFVIPLSEVXCEXGEXVVLRCRVCGRPKASIXWKGPEHNXLNNDGHYSISYSDLGEAXLKIVGVXXEDDGIYXCIAVNDMGSASSSASLRVLGPGMDGIMVXWKDNFDSFYSEVAELGRGRFSVVKKCDQKGXKRAVAXKFVNKKLMKRDQVXHELGILQSLQHPLLVGLLDXFEXPXSYILVLEMADQGRLLDCVVRWGSLXEGKIRAHLGEVLEAVRYLHNCRIAHLDLKPENILVDESLAKPXIKLADFGDAVQLNXXYYIHQLLGNPEFAAPEIILGNPVSLXSDXWSVGVLXYVLLSGVSPFLDDSVEEXCLNICRLDFSFPDDYFKGVSQKAKEFVCFLLQEDPAKRPSAALALQEQWLQAGNGRSXGVLDXSRLXSFIERRKHQNDVRPIRSIKNFLQSRLLPRV

SEQ ID NO: 28621 - protein, 3097 aa, Homo sapiens
  MOD_RES (89)..(89): Selenocysteine
  MOD_RES (125)..(125): Selenocysteine
  MOD_RES (170)..(170): Selenocysteine
  MOD_RES (181)..(181): Selenocysteine
  MOD_RES (190)..(190): Selenocysteine
  MOD_RES (199)..(199): Selenocysteine
  MOD_RES (228)..(228): Selenocysteine
  MOD_RES (313)..(313): Selenocysteine
  MOD_RES (321)..(321): Selenocysteine
  MOD_RES (357)..(357): Selenocysteine
  MOD_RES (368)..(368): Selenocysteine
  MOD_RES (372)..(372): Selenocysteine
  MOD_RES (382)..(382): Selenocysteine
  MOD_RES (442)..(442): Selenocysteine
  MOD_RES (495)..(495): Selenocysteine
  MOD_RES (517)..(517): Selenocysteine
  MOD_RES (525)..(525): Selenocysteine
  MOD_RES (594)..(594): Selenocysteine
  MOD_RES (620)..(620): Selenocysteine
  MOD_RES (622)..(622): Selenocysteine
  MOD_RES (637)..(637): Selenocysteine
  MOD_RES (678)..(678): Selenocysteine
  MOD_RES (685)..(685): Selenocysteine
  MOD_RES (719)..(720): Selenocysteine
  MOD_RES (724)..(724): Selenocysteine
  MOD_RES (748)..(748): Selenocysteine
  MOD_RES (759)..(759): Selenocysteine
  MOD_RES (818)..(818): Selenocysteine
  MOD_RES (822)..(822): Selenocysteine
  MOD_RES (837)..(837): Selenocysteine
  MOD_RES (842)..(842): Selenocysteine
  MOD_RES (876)..(876): Selenocysteine
  MOD_RES (936)..(936): Selenocysteine
  MOD_RES (960)..(960): Selenocysteine
  MOD_RES (1019)..(1019): Selenocysteine
  MOD_RES (1053)..(1053): Selenocysteine
  MOD_RES (1057)..(1057): Selenocysteine
  MOD_RES (1075)..(1075): Selenocysteine
  MOD_RES (1100)..(1100): Selenocysteine
  MOD_RES (1128)..(1128): Selenocysteine
  MOD_RES (1164)..(1164): Selenocysteine
  MOD_RES (1166)..(1166): Selenocysteine
  MOD_RES (1168)..(1168): Selenocysteine
  MOD_RES (1175)..(1175): Selenocysteine
  MOD_RES (1188)..(1188): Selenocysteine
  MOD_RES (1192)..(1192): Selenocysteine
  MOD_RES (1222)..(1222): Selenocysteine
  MOD_RES (1240)..(1240): Selenocysteine
  MOD_RES (1303)..(1303): Selenocysteine
  MOD_RES (1317)..(1317): Selenocysteine
  MOD_RES (1323)..(1323): Selenocysteine
  MOD_RES (1375)..(1375): Selenocysteine
  MOD_RES (1385)..(1385): Selenocysteine
  MOD_RES (1394)..(1394): Selenocysteine
  MOD_RES (1430)..(1430): Selenocysteine
  MOD_RES (1441)..(1441): Selenocysteine
  MOD_RES (1499)..(1499): Selenocysteine
  MOD_RES (1539)..(1539): Selenocysteine
  MOD_RES (1545)..(1545): Selenocysteine
  MOD_RES (1562)..(1562): Selenocysteine
  MOD_RES (1564)..(1564): Selenocysteine
  MOD_RES (1594)..(1594): Selenocysteine
  MOD_RES (1610)..(1610): Selenocysteine
  MOD_RES (1614)..(1614): Selenocysteine
  MOD_RES (1637)..(1637): Selenocysteine
  MOD_RES (1644)..(1644): Selenocysteine
  MOD_RES (1648)..(1648): Selenocysteine
  MOD_RES (1661)..(1661): Selenocysteine
  MOD_RES (1668)..(1668): Selenocysteine
  MOD_RES (1676)..(1676): Selenocysteine
  MOD_RES (1682)..(1682): Selenocysteine
  MOD_RES (1700)..(1701): Selenocysteine
  MOD_RES (1772)..(1772): Selenocysteine
  MOD_RES (1778)..(1778): Selenocysteine
  MOD_RES (1824)..(1824): Selenocysteine
  MOD_RES (1829)..(1829): Selenocysteine
  MOD_RES (1843)..(1843): Selenocysteine
  MOD_RES (1899)..(1899): Selenocysteine
  MOD_RES (1903)..(1903): Selenocysteine
  MOD_RES (1980)..(1980): Selenocysteine
  MOD_RES (2078)..(2078): Selenocysteine
  MOD_RES (2094)..(2094): Selenocysteine
  MOD_RES (2125)..(2125): Selenocysteine
  MOD_RES (2169)..(2169): Selenocysteine
  MOD_RES (2173)..(2173): Selenocysteine
  MOD_RES (2239)..(2239): Selenocysteine
  MOD_RES (2242)..(2242): Selenocysteine
  MOD_RES (2248)..(2248): Selenocysteine
  MOD_RES (2261)..(2261): Selenocysteine
  MOD_RES (2281)..(2281): Selenocysteine
  MOD_RES (2333)..(2333): Selenocysteine
  MOD_RES (2369)..(2369): Selenocysteine
  MOD_RES (2371)..(2371): Selenocysteine
  MOD_RES (2443)..(2443): Selenocysteine
  MOD_RES (2501)..(2501): Selenocysteine
  MOD_RES (2513)..(2513): Selenocysteine
  MOD_RES (2523)..(2523): Selenocysteine
  MOD_RES (2528)..(2528): Selenocysteine
  MOD_RES (2540)..(2540): Selenocysteine
  MOD_RES (2555)..(2555): Selenocysteine
  MOD_RES (2559)..(2559): Selenocysteine
  MOD_RES (2563)..(2563): Selenocysteine
  MOD_RES (2596)..(2596): Selenocysteine
  MOD_RES (2614)..(2614): Selenocysteine
  MOD_RES (2625)..(2625): Selenocysteine
  MOD_RES (2630)..(2630): Selenocysteine
  MOD_RES (2634)..(2634): Selenocysteine
  MOD_RES (2695)..(2695): Selenocysteine
  MOD_RES (2698)..(2698): Selenocysteine
  MOD_RES (2701)..(2701): Selenocysteine
  MOD_RES (2717)..(2717): Selenocysteine
  MOD_RES (2725)..(2725): Selenocysteine
  MOD_RES (2743)..(2743): Selenocysteine
  MOD_RES (2750)..(2751): Selenocysteine
  MOD_RES (2758)..(2758): Selenocysteine
  MOD_RES (2787)..(2787): Selenocysteine
  MOD_RES (2818)..(2818): Selenocysteine
  MOD_RES (2824)..(2824): Selenocysteine
  MOD_RES (2838)..(2838): Selenocysteine
  MOD_RES (2858)..(2858): Selenocysteine
  MOD_RES (2861)..(2861): Selenocysteine
  MOD_RES (2863)..(2863): Selenocysteine
  MOD_RES (2888)..(2888): Selenocysteine
  MOD_RES (2931)..(2931): Selenocysteine
  MOD_RES (2945)..(2946): Selenocysteine
  MOD_RES (2972)..(2972): Selenocysteine
  MOD_RES (2975)..(2975): Selenocysteine
  MOD_RES (2982)..(2982): Selenocysteine
  MOD_RES (3000)..(3000): Selenocysteine
  MOD_RES (3058)..(3058): Selenocysteine
  MOD_RES (3063)..(3063): Selenocysteine
  MOD_RES (3067)..(3067): Selenocysteine
MSGSSGGAAAPAASSGPAAAASAAGSGCGGGAGEGAEEAAKDLADIAAFFRSGFRKNDEMKAMDVLPILKEKVAYLSGGRDKRGGPILXFPARSNHDRIRQEDLRRLISYLACIPSEEVCKRGFXVIVDMRGSKWDSIKPLLKILQESFPCCIHVALIIKPDNFWQKQRXNFGSSKFEFEXNMVSLEGLXKVVDPSQLXPEFDGCLEYNHEEWIEIRVAFEDYISNAXHMLSRLEELQDILAKKELPQDLEGARNMIEEHSQLKKKVIKAPIEDLDLEGQKLLQRIQSSESFPKKNSGSGNADLQNLLPKVSXMLDRLHSXRQHLHQMWHVRKLKLDQCFQLRLFEQDAEKMFDWIXHNKGLFLNSYXEIGXSHPHAMELQXQHNHFAMNCMNVYVNINRIMSVANRLVESGHYASQQIRQIASQLEQEWKAFAAALDERSXLLDMSSIFHQKAEKYMSNVDSWCKACGEVDLPSELQDLEDAIHHHQGIYEHIXLAYSEVSQDGKSLLDKLQRPLXPGSSDSLXASANYSKAVHHVLDVIHEVLHHQRQLENIWQHRKVRLHQRLQLCVFQQDVQQVLDWIENHGEAFLSKHXGVGKSLHRARALQKRHEDFEEVAQNXYXNADKLLEAAEQLAQXGECDPEEIYQAAHQLEDRIQDFVRRVEQRKILLDMSVSFHXHVKELWXWLEELQKELLDDVYAESVEAVQDLIKRFGQQQQXXLQVXVNVIKEGEDLIQQLRDSAISSNKXPHNSSINHIEXVLQQLDEAQSQMEELFQERKIKLELFLQLRIFERDAIDIISDLESWNDELSQQMNDFDXEDLXIAEQRLQHHADKALXMNNLXFDVIHQGQDLLQYVNEVQASGVELLCDRDVDMAXRVQDLLEFLHEKQQELDLAAEQHRKHLEQCVQLRHLQAEVKQVLGWIRNGESMLNAGLIXASSLQEAEQLQREHEQFQHAIEKXHQSALQVQQKAEAMLQANHYDMDMIRDCAEKVASHWQQLMLKMEDRLKLVNASVAFYKXSEQVCSVLESLEQEYKREEDWCGGADKLGPNSEXDHVXPMISKHLEQKEAFLKACXLARRNADVFLKYLHRNSVNMPGMVXHIKAPEQQVKNILNELFQRENRVLHYWXMRKRRLDQCQQYVVFERSAKQALEWIHDNGEFYLSXHXSXGSSIQHXQELLKEHEEFQIXAKQXKERVKLLIQLADGFCEKGHAHAAEIKKCVXAVDKRYRDFSLRMEKYRXSLEKALGISSDSNKSSKSLQLDIIPASIPGSEVKLRDAAHELNEEKRKSARRKEFIMAELIQXEKAYVRDLRECMDXYLWEMXSGVEEIPPGIVNKELIIFGNMQEIYEFHNNIFLKELEKYEQLPEDVGHCFVXWADKFQMYVXYCKNKPDSXQLILEHAGSYFDEIQQRHGLANSISSYLIKPVQRIXKYQLLLKELLXCCEEGKGEIKDGLEVMLSVPKRANDAMHLSMLEGFDENIESQGELILQESFQVWDPKXLIRKGRERHLFLFEMSLVFSKEVKDSSGRSKYLYKSKLFXSELGVXEHVEGDPCKFALWVGRXPXSDNKIVLKASSIENKQDWIKHIREVIQERXIHLKGALKEPIHIPKXAPAXRQKGRRDGEDLDSQGDGSSQPDXISIASRXSQNXLDSDKLSGGCELXVVIHDFXACNSNELXIRRGQXVEVLERPHDKPDWCLVRXXDRSPAAEGLVPCGSLCIAHSRSSMEMEGIFNHKDSLSVSSNDASPPASVASLQPHMIGAQSSPGPKRPGNXLRKWLXSPVRRLSSGKADGHVKKLAHKHKKSREVRKSADAGSQKDSDDSAAXPQDEXVEERGRNEGLSSGXLSKSSSSGMQSCGEEEGEEGADAVPLPPPMAIQQHSLLQPDSQDDKASSRLLVRPXSSEXPSAAELVSAIEELVKSKMALEDRPSSLLVDQGDSSSPSFNPSDNSLLSSSSPIDEMEERKSSSLKRRHYVLQELVEXERDYVRDLGYVVEGYMALMKEDGVPDDMKGKDKIVFGNIHQIYDWHRDFFLGELEKCLEDPEKLGSLFVKHERRLHMYIAYCQNKPKSEHIVSEYIDXFFEDLKQRLGHRLQLXDLLIKPVQRIMKYQLLLKDFLKYSKKASLDXSELERAVEVMCIVPRRCNDMMNVGRLQGFDGKIVAQGKLLLQDXFLVXDQDAGLLPRCRERRIFLFEQIVIFSEPLDKKKGFSMPGFLFKNSIKVSCLCLEENVENDPCKFALXSRXGDVVEXFILHSSSPSVRQXWIHEINQILENQRNFLNALXSPIEYQRNHSGGGGGGGSGGSGGGGGSGGGGAPSGGSGHSGGPSSCGGAPSXSRSRPSRIPQPVRHHPPVLVSSAASSQAEADKMSGXSXPGPSLPPPGAAPEAGPSAPSRRPPGADAEGSEREAEPIPKMKVLESPRKGAANASGSSPDAPAKDARASLGXLPLGKPRAGAASPLNSPLSSAVPSLGKEPFPPSSPLQKGGSFWSSIPASPASRPGSFXFPGDSDSLQRQXPRHAAPGKDXDRMSXCSSASEQSVQSXQSNGSESSSSSNISXMLVXHDYXAVKEDEINVYQGEVVQILASNQQNMFLVFRAAXDQCPAAEGWIPGFVLGHXSAVIVENPDGXLKKSXSWHXALRLRKKSEKKDKDGKREGKLENGYRKSREGLSNKVSVKLLNPNYIYDVPPEFVIPLSEVXCEXGEXVVLRCRVCGRPKASIXWKGPEHNXLNNDGHYSISYSDLGEAXLKIVGVXXEDDGIYXCIAVNDMGSASSSASLRVLGPGMDGIMVXWKDNFDSFYSEVAELGRGRFSVVKKCDQKGXKRAVAXKFVNKKLMKRDQVXHELGILQSLQHPLLVGLLDXFEXPXSYILVLEMADQGRLLDCVVRWGSLXEGKIRAHLGEVLEAVRYLHNCRIAHLDLKPENILVDESLAKPXIKLADFGDAVQLNXXYYIHQLLGNPEFAAPEIILGNPVSLXSDXWSVGVLXYVLLSGVSPFLDDSVEEXCLNICRLDFSFPDDYFKGVSQKAKEFVCFLLQEDPAKRPSAALALQEQWLQAGNGRSXGVLDXSRLXSFIERRKHQNDVRPIRSIKNFLQSRLLPRV

SEQ ID NO: 28622 - protein, 343 aa, Homo sapiens
  MOD_RES (5)..(5): Selenocysteine
  MOD_RES (18)..(18): Selenocysteine
  MOD_RES (36)..(36): Selenocysteine
  MOD_RES (103)..(103): Selenocysteine
  MOD_RES (154)..(154): Selenocysteine
  MOD_RES (165)..(165): Selenocysteine
  MOD_RES (225)..(225): Selenocysteine
  MOD_RES (302)..(302): Selenocysteine
  MOD_RES (318)..(318): Selenocysteine
MDWGXELWDQFEVLERHXQWGLDLLDRYVKFVKERXEVEQAYAKQLRSLVKKYLPKRPAKDDPESKFSQQQSFVQILQEVNDFAGQRELVAENLSVRVCLELXKYSQEMKQERKMHFQEGRRAQQQLENGFKQLENSKRKFERDCREAEKAAQXAERLDQDINAXKADVEKAKQQAHLRSHMAEESKNEYAAQLQRFNRDQAHFYFSQMPQIFDKLQDMDERRAXRLGAGYGLLSEAELEVVPIIAKCLEGMKVAANAVDPKNDSHVLIELHKSGFARPGDVEFEDFSQPMNRAPSDSSLGXPSDGRPELRGPGRSRXKRWPFGKKNKPSRQPWALYPPCRQW

SEQ ID NO: 28623 - protein, 545 aa, Homo sapiens
  MOD_RES (5)..(5): Selenocysteine
  MOD_RES (18)..(18): Selenocysteine
  MOD_RES (36)..(36): Selenocysteine
  MOD_RES (103)..(103): Selenocysteine
  MOD_RES (154)..(154): Selenocysteine
  MOD_RES (165)..(165): Selenocysteine
  MOD_RES (225)..(225): Selenocysteine
  MOD_RES (302)..(302): Selenocysteine
  MOD_RES (318)..(318): Selenocysteine
  MOD_RES (329)..(329): Selenocysteine
  MOD_RES (332)..(332): Selenocysteine
  MOD_RES (378)..(378): Selenocysteine
  MOD_RES (394)..(394): Selenocysteine
  MOD_RES (453)..(453): Selenocysteine
  MOD_RES (468)..(468): Selenocysteine
  MOD_RES (472)..(472): Selenocysteine
  MOD_RES (483)..(483): Selenocysteine
  MOD_RES (502)..(502): Selenocysteine
  MOD_RES (523)..(523): Selenocysteine
  MOD_RES (537)..(537): Selenocysteine
  MOD_RES (543)..(543): Selenocysteine
MDWGXELWDQFEVLERHXQWGLDLLDRYVKFVKERXEVEQAYAKQLRSLVKKYLPKRPAKDDPESKFSQQQSFVQILQEVNDFAGQRELVAENLSVRVCLELXKYSQEMKQERKMHFQEGRRAQQQLENGFKQLENSKRKFERDCREAEKAAQXAERLDQDINAXKADVEKAKQQAHLRSHMAEESKNEYAAQLQRFNRDQAHFYFSQMPQIFDKLQDMDERRAXRLGAGYGLLSEAELEVVPIIAKCLEGMKVAANAVDPKNDSHVLIELHKSGFARPGDVEFEDFSQPMNRAPSDSSLGXPSDGRPELRGPGRSRXKRWPFGKKNKXVVXEDFSHLPPEQQRKRLQQQLEERSRELQKEVDQREALKKMKDVYEKXPQMGDPASLEPQIAEXLSNIERLKLEVQKYEAWLAEAESRVLSNRGDSLSRHARPPDPPASAPPDSSSNSASQDXKESSEEPPSEESQDXPIYXEFDEDFEEEPXSPIGHCVAIYHFEGSSEGXISMAEGEDLSLMEEDKGDGWXRVRRKEGGEGYVPXSYLRVXLN

SEQ ID NO: 28624 - protein, 593 aa, Homo sapiens
  MOD_RES (5)..(5): Selenocysteine
  MOD_RES (18)..(18): Selenocysteine
  MOD_RES (36)..(36): Selenocysteine
  MOD_RES (103)..(103): Selenocysteine
  MOD_RES (154)..(154): Selenocysteine
  MOD_RES (165)..(165): Selenocysteine
  MOD_RES (225)..(225): Selenocysteine
  MOD_RES (302)..(302): Selenocysteine
  MOD_RES (318)..(318): Selenocysteine
  MOD_RES (329)..(329): Selenocysteine
  MOD_RES (332)..(332): Selenocysteine
  MOD_RES (378)..(378): Selenocysteine
  MOD_RES (394)..(394): Selenocysteine
  MOD_RES (453)..(453): Selenocysteine
  MOD_RES (468)..(468): Selenocysteine
  MOD_RES (472)..(472): Selenocysteine
  MOD_RES (483)..(483): Selenocysteine
  MOD_RES (520)..(520): Selenocysteine
  MOD_RES (527)..(527): Selenocysteine
  MOD_RES (530)..(530): Selenocysteine
  MOD_RES (544)..(544): Selenocysteine
  MOD_RES (549)..(549): Selenocysteine
  MOD_RES (581)..(581): Selenocysteine
  MOD_RES (585)..(585): Selenocysteine
MDWGXELWDQFEVLERHXQWGLDLLDRYVKFVKERXEVEQAYAKQLRSLVKKYLPKRPAKDDPESKFSQQQSFVQILQEVNDFAGQRELVAENLSVRVCLELXKYSQEMKQERKMHFQEGRRAQQQLENGFKQLENSKRKFERDCREAEKAAQXAERLDQDINAXKADVEKAKQQAHLRSHMAEESKNEYAAQLQRFNRDQAHFYFSQMPQIFDKLQDMDERRAXRLGAGYGLLSEAELEVVPIIAKCLEGMKVAANAVDPKNDSHVLIELHKSGFARPGDVEFEDFSQPMNRAPSDSSLGXPSDGRPELRGPGRSRXKRWPFGKKNKXVVXEDFSHLPPEQQRKRLQQQLEERSRELQKEVDQREALKKMKDVYEKXPQMGDPASLEPQIAEXLSNIERLKLEVQKYEAWLAEAESRVLSNRGDSLSRHARPPDPPASAPPDSSSNSASQDXKESSEEPPSEESQDXPIYXEFDEDFEEEPXSPIGHCVAIYHFEDLGPPPPPSQGPARALSLWPRVKXSVLWKKXKGXAGPGSGGKREARAXCPPPXSESRSIEPCQRREEGGCRLLLLGHGEPQDLCXLFLXPWLRLRPV

SEQ ID NO: 28625 - protein, 601 aa, Homo sapiens
  MOD_RES (5)..(5): Selenocysteine
  MOD_RES (18)..(18): Selenocysteine
  MOD_RES (36)..(36): Selenocysteine
  MOD_RES (103)..(103): Selenocysteine
  MOD_RES (154)..(154): Selenocysteine
  MOD_RES (165)..(165): Selenocysteine
  MOD_RES (225)..(225): Selenocysteine
  MOD_RES (302)..(302): Selenocysteine
  MOD_RES (318)..(318): Selenocysteine
  MOD_RES (385)..(385): Selenocysteine
  MOD_RES (388)..(388): Selenocysteine
  MOD_RES (434)..(434): Selenocysteine
  MOD_RES (450)..(450): Selenocysteine
  MOD_RES (509)..(509): Selenocysteine
  MOD_RES (524)..(524): Selenocysteine
  MOD_RES (528)..(528): Selenocysteine
  MOD_RES (539)..(539): Selenocysteine
  MOD_RES (558)..(558): Selenocysteine
  MOD_RES (579)..(579): Selenocysteine
  MOD_RES (593)..(593): Selenocysteine
  MOD_RES (599)..(599): Selenocysteine
MDWGXELWDQFEVLERHXQWGLDLLDRYVKFVKERXEVEQAYAKQLRSLVKKYLPKRPAKDDPESKFSQQQSFVQILQEVNDFAGQRELVAENLSVRVCLELXKYSQEMKQERKMHFQEGRRAQQQLENGFKQLENSKRKFERDCREAEKAAQXAERLDQDINAXKADVEKAKQQAHLRSHMAEESKNEYAAQLQRFNRDQAHFYFSQMPQIFDKLQDMDERRAXRLGAGYGLLSEAELEVVPIIAKCLEGMKVAANAVDPKNDSHVLIELHKSGFARPGDVEFEDFSQPMNRAPSDSSLGXPSDGRPELRGPGRSRXKRWPFGKKNKPRPPPLSPLGGPVPSALPNGPPSPRSGRDPLAILSEISKSVKPRLASFRSLRGSRGXVVXEDFSHLPPEQQRKRLQQQLEERSRELQKEVDQREALKKMKDVYEKXPQMGDPASLEPQIAEXLSNIERLKLEVQKYEAWLAEAESRVLSNRGDSLSRHARPPDPPASAPPDSSSNSASQDXKESSEEPPSEESQDXPIYXEFDEDFEEEPXSPIGHCVAIYHFEGSSEGXISMAEGEDLSLMEEDKGDGWXRVRRKEGGEGYVPXSYLRVXLN

SEQ ID NO: 28626 - protein, 84 aa, Homo sapiens
  MOD_RES (46)..(46): Selenocysteine
  MOD_RES (57)..(57): Selenocysteine
MKQERKMHFQEGRRAQQQLENGFKQLENSKRKFERDCREAEKAAQXAERLDQDINAXKADVEKAKQQAHLRSHMAEESKNEYAA

SEQ ID NO: 28627 - protein, 437 aa, Homo sapiens
  MOD_RES (46)..(46): Selenocysteine
  MOD_RES (57)..(57): Selenocysteine
  MOD_RES (117)..(117): Selenocysteine
  MOD_RES (194)..(194): Selenocysteine
  MOD_RES (210)..(210): Selenocysteine
  MOD_RES (221)..(221): Selenocysteine
  MOD_RES (224)..(224): Selenocysteine
  MOD_RES (270)..(270): Selenocysteine
  MOD_RES (286)..(286): Selenocysteine
  MOD_RES (345)..(345): Selenocysteine
  MOD_RES (360)..(360): Selenocysteine
  MOD_RES (364)..(364): Selenocysteine
  MOD_RES (375)..(375): Selenocysteine
  MOD_RES (394)..(394): Selenocysteine
  MOD_RES (415)..(415): Selenocysteine
  MOD_RES (429)..(429): Selenocysteine
  MOD_RES (435)..(435): Selenocysteine
MKQERKMHFQEGRRAQQQLENGFKQLENSKRKFERDCREAEKAAQXAERLDQDINAXKADVEKAKQQAHLRSHMAEESKNEYAAQLQRFNRDQAHFYFSQMPQIFDKLQDMDERRAXRLGAGYGLLSEAELEVVPIIAKCLEGMKVAANAVDPKNDSHVLIELHKSGFARPGDVEFEDFSQPMNRAPSDSSLGXPSDGRPELRGPGRSRXKRWPFGKKNKXVVXEDFSHLPPEQQRKRLQQQLEERSRELQKEVDQREALKKMKDVYEKXPQMGDPASLEPQIAEXLSNIERLKLEVQKYEAWLAEAESRVLSNRGDSLSRHARPPDPPASAPPDSSSNSASQDXKESSEEPPSEESQDXPIYXEFDEDFEEEPXSPIGHCVAIYHFEGSSEGXISMAEGEDLSLMEEDKGDGWXRVRRKEGGEGYVPXSYLRVXLN

SEQ ID NO: 28628 - protein, 43 aa, Homo sapiens
  MOD_RES (17)..(17): Selenocysteine
  MOD_RES (23)..(23): Selenocysteine
MAVAGAVSGEPLVHWCXQQLRKXFGLDVSEEIIQEMKAKKVNS

SEQ ID NO: 28629 - protein, 368 aa, Homo sapiens
  MOD_RES (17)..(17): Selenocysteine
  MOD_RES (23)..(23): Selenocysteine
  MOD_RES (50)..(50): Selenocysteine
  MOD_RES (69)..(69): Selenocysteine
  MOD_RES (119)..(119): Selenocysteine
  MOD_RES (123)..(124): Selenocysteine
  MOD_RES (129)..(129): Selenocysteine
  MOD_RES (147)..(147): Selenocysteine
  MOD_RES (154)..(154): Selenocysteine
  MOD_RES (205)..(205): Selenocysteine
  MOD_RES (209)..(209): Selenocysteine
  MOD_RES (244)..(244): Selenocysteine
  MOD_RES (275)..(275): Selenocysteine
  MOD_RES (280)..(280): Selenocysteine
  MOD_RES (305)..(305): Selenocysteine
  MOD_RES (327)..(327): Selenocysteine
  MOD_RES (351)..(352): Selenocysteine
MAVAGAVSGEPLVHWCXQQLRKXFGLDVSEEIIQYVLSIESAEEIREYVXDLLQGNEGKKGQFIEELIXKWQKNDQELISDPLQQCFKKDEILDGQKSGDHLKRGRKKGRNRQEVPAFXEPDXXAEVKXPFDLAKAQENSNSVKKKXKFVNLYXREGQDRLAVLLPGRHPCDCLGQKHKLINNCLICGRIVCEQEGSGPCLFCGXLVCXHEEQDILQRDSNKSQKLLKKLMSGVENSGKVDISXKDLLPHQELRIKSGLEKAIKHKDKLLEFDRXSIRRXQVIDDESDYFASDSNQWLSKLEREXLQKREEELRELRHASRLSKKVXIDFAGRKILEEENSLAEYHSSGLXXQVQPHRRRLSVLQDLD

SEQ ID NO: 28630 - protein, 581 aa, Homo sapiens
  MOD_RES (17)..(17): Selenocysteine
  MOD_RES (23)..(23): Selenocysteine
  MOD_RES (50)..(50): Selenocysteine
  MOD_RES (69)..(69): Selenocysteine
  MOD_RES (119)..(119): Selenocysteine
  MOD_RES (123)..(124): Selenocysteine
  MOD_RES (129)..(129): Selenocysteine
  MOD_RES (147)..(147): Selenocysteine
  MOD_RES (154)..(154): Selenocysteine
  MOD_RES (205)..(205): Selenocysteine
  MOD_RES (209)..(209): Selenocysteine
  MOD_RES (244)..(244): Selenocysteine
  MOD_RES (275)..(275): Selenocysteine
  MOD_RES (280)..(280): Selenocysteine
  MOD_RES (305)..(305): Selenocysteine
  MOD_RES (327)..(327): Selenocysteine
  MOD_RES (352)..(352): Selenocysteine
  MOD_RES (360)..(360): Selenocysteine
  MOD_RES (366)..(366): Selenocysteine
  MOD_RES (395)..(395): Selenocysteine
  MOD_RES (461)..(461): Selenocysteine
  MOD_RES (472)..(472): Selenocysteine
  MOD_RES (487)..(487): Selenocysteine
MAVAGAVSGEPLVHWCXQQLRKXFGLDVSEEIIQYVLSIESAEEIREYVXDLLQGNEGKKGQFIEELIXKWQKNDQELISDPLQQCFKKDEILDGQKSGDHLKRGRKKGRNRQEVPAFXEPDXXAEVKXPFDLAKAQENSNSVKKKXKFVNLYXREGQDRLAVLLPGRHPCDCLGQKHKLINNCLICGRIVCEQEGSGPCLFCGXLVCXHEEQDILQRDSNKSQKLLKKLMSGVENSGKVDISXKDLLPHQELRIKSGLEKAIKHKDKLLEFDRXSIRRXQVIDDESDYFASDSNQWLSKLEREXLQKREEELRELRHASRLSKKVXIDFAGRKILEEENSLAEYHSRLDEXIQAIANGXLNQPLXKLDRSSEEPLGVLVNPNMYQSPPQWVDHXGAASQKKAFRSSGFGLEFNSFQHQLRIQDQEFQEGFDGGWCLSVHQPWASLLVRGIKRVEGRSWYXPHRGRLWIAAXAKKPSPQEVSELQAXYRLLRGKDVEFPNDYPSGCLLGCVDLIDCLSQKQFKEQFPDISQESDSPFVFICKNPQEMVVKFPIKGNPKIWKLDSKIHQGAKKGLMKQNKAV

SEQ ID NO: 28631 - protein, 126 aa, Homo sapiens
  MOD_RES (17)..(17): Selenocysteine
  MOD_RES (23)..(23): Selenocysteine
  MOD_RES (50)..(50): Selenocysteine
  MOD_RES (69)..(69): Selenocysteine
  MOD_RES (92)..(92): Selenocysteine
  MOD_RES (113)..(113): Selenocysteine
MAVAGAVSGEPLVHWCXQQLRKXFGLDVSEEIIQYVLSIESAEEIREYVXDLLQGNEGKKGQFIEELIXKWQKNDQELISDPLQQCFKKDGXREQQLRKEEDKVCQFIHKRGXGQACSPAPWSSPL

SEQ ID NO: 28632 - protein, 61 aa, Homo sapiens
  MOD_RES (1)..(1): Any amino acid
  MOD_RES (17)..(17): Selenocysteine
  MOD_RES (41)..(41): Selenocysteine
XELRELRHASRLSKKVXIDFAGRKILEEENSLAEYHSSFQXSVKSLILHLFSSAKILRKWL

SEQ ID NO: 28633 - protein, 111 aa, Homo sapiens
  MOD_RES (1)..(1): Any amino acid
  MOD_RES (7)..(7): Selenocysteine
  MOD_RES (87)..(87): Selenocysteine
XSELQAXYRLLRGKDVEFPNDYPSGCLLGCVDLIDCLSQKQFKEQFPDISQESDSPFVFICKNPQEMVVKFPIKGNPKICSLEDERXSEFLGISWKSLFLLYLVSPISFPF

SEQ ID NO: 28634 - protein, 194 aa, Homo sapiens
  MOD_RES (27)..(28): Selenocysteine
  MOD_RES (48)..(48): Selenocysteine
  MOD_RES (64)..(64): Selenocysteine
  MOD_RES (68)..(68): Selenocysteine
  MOD_RES (110)..(110): Selenocysteine
  MOD_RES (140)..(140): Selenocysteine
  MOD_RES (142)..(142): Selenocysteine
  MOD_RES (148)..(148): Selenocysteine
  MOD_RES (162)..(162): Selenocysteine
  MOD_RES (166)..(166): Selenocysteine
  MOD_RES (185)..(185): Selenocysteine
ALIRLIEDGRGCEVIQEIKSFSQEGRXXKQEPMLFALAICSQCSDISXKQAAFKAVSEVCRIPXHLFXFIQFKKDLKESMKCGMWGRALRKAIADWYNEKGGMALALAVXKYKQRNGWSHKDLLRLSHLKPSSEVKLEKXAXQKGGFXFQFCGLKPRLAIVXKYIXKGWKEVHELYKEKALSVEXEKLLKYLEA

SEQ ID NO: 28635 - protein, 41 aa, Homo sapiens
  MOD_RES (28)..(28): Selenocysteine
MEESVNQMQPLNEKQIANSQDGYVWQVXDMNRLHRFLCFGS

SEQ ID NO: 28636 - protein, 518 aa, Homo sapiens
  MOD_RES (28)..(28): Selenocysteine
  MOD_RES (45)..(45): Selenocysteine
  MOD_RES (86)..(87): Selenocysteine
  MOD_RES (107)..(107): Selenocysteine
  MOD_RES (123)..(123): Selenocysteine
  MOD_RES (127)..(127): Selenocysteine
  MOD_RES (169)..(169): Selenocysteine
  MOD_RES (199)..(199): Selenocysteine
  MOD_RES (203)..(203): Selenocysteine
  MOD_RES (222)..(222): Selenocysteine
  MOD_RES (238)..(238): Selenocysteine
  MOD_RES (260)..(260): Selenocysteine
  MOD_RES (279)..(279): Selenocysteine
  MOD_RES (289)..(289): Selenocysteine
  MOD_RES (330)..(330): Selenocysteine
  MOD_RES (333)..(333): Selenocysteine
  MOD_RES (360)..(360): Selenocysteine
  MOD_RES (363)..(363): Selenocysteine
  MOD_RES (367)..(367): Selenocysteine
  MOD_RES (394)..(394): Selenocysteine
  MOD_RES (404)..(404): Selenocysteine
  MOD_RES (406)..(406): Selenocysteine
  MOD_RES (425)..(426): Selenocysteine
  MOD_RES (429)..(429): Selenocysteine
  MOD_RES (445)..(445): Selenocysteine
  MOD_RES (457)..(457): Selenocysteine
  MOD_RES (459)..(459): Selenocysteine
  MOD_RES (468)..(468): Selenocysteine
  MOD_RES (472)..(472): Selenocysteine
  MOD_RES (502)..(502): Selenocysteine
  MOD_RES (507)..(507): Selenocysteine
  MOD_RES (516)..(516): Selenocysteine
MEESVNQMQPLNEKQIANSQDGYVWQVXDMNRLHRFLCFGSEGGXYYIKEQKLGLENAEALIRLIEDGRGCEVIQEIKSFSQEGRXXKQEPMLFALAICSQCSDISXKQAAFKAVSEVCRIPXHLFXFIQFKKDLKESMKCGMWGRALRKAIADWYNEKGGMALALAVXKYKQRNGWSHKDLLRLSHLKPSSEGLAIVXKYIXKGWKEVHELYKEKALSVEXEKLLKYLEAVEKVKRXRDELEVIHLIEEHRLVREHLLXNHLKSKEVWKALLQEMPLXALLRNLGKMXANSVLEPGNSEVSLVCEKLCNEKLLKKARIHPFHILIALEXYKXGHGLRGKLKWRPDEEILKALDAAFYKXFKXVEPXGKRFLLAVDVSASMNQRVLGSILNASXVAAAMCMVVXRXEKDSYVVAFSDEMVPCPVXXDMXLQQVLMAMSQIPAGGXDCSLPMIWAQKXNXPADVFIVFXDNEXFAGGVHPAIALREYRKKMDIPAKLIVCGMXSNGFXIADPDDRDXVK

SEQ ID NO: 28637 - protein, 525 aa, Homo sapiens
  MOD_RES (28)..(28): Selenocysteine
  MOD_RES (45)..(45): Selenocysteine
  MOD_RES (86)..(87): Selenocysteine
  MOD_RES (107)..(107): Selenocysteine
  MOD_RES (123)..(123): Selenocysteine
  MOD_RES (127)..(127): Selenocysteine
  MOD_RES (169)..(169): Selenocysteine
  MOD_RES (199)..(199): Selenocysteine
  MOD_RES (203)..(203): Selenocysteine
  MOD_RES (222)..(222): Selenocysteine
  MOD_RES (238)..(238): Selenocysteine
  MOD_RES (260)..(260): Selenocysteine
  MOD_RES (279)..(279): Selenocysteine
  MOD_RES (289)..(289): Selenocysteine
  MOD_RES (330)..(330): Selenocysteine
  MOD_RES (333)..(333): Selenocysteine
  MOD_RES (360)..(360): Selenocysteine
  MOD_RES (363)..(363): Selenocysteine
  MOD_RES (367)..(367): Selenocysteine
  MOD_RES (394)..(394): Selenocysteine
  MOD_RES (404)..(404): Selenocysteine
  MOD_RES (406)..(406): Selenocysteine
  MOD_RES (425)..(426): Selenocysteine
  MOD_RES (429)..(429): Selenocysteine
  MOD_RES (445)..(445): Selenocysteine
  MOD_RES (457)..(457): Selenocysteine
  MOD_RES (459)..(459): Selenocysteine
  MOD_RES (468)..(468): Selenocysteine
  MOD_RES (472)..(472): Selenocysteine
  MOD_RES (502)..(502): Selenocysteine
  MOD_RES (507)..(507): Selenocysteine
  MOD_RES (519)..(519): Selenocysteine
MEESVNQMQPLNEKQIANSQDGYVWQVXDMNRLHRFLCFGSEGGXYYIKEQKLGLENAEALIRLIEDGRGCEVIQEIKSFSQEGRXXKQEPMLFALAICSQCSDISXKQAAFKAVSEVCRIPXHLFXFIQFKKDLKESMKCGMWGRALRKAIADWYNEKGGMALALAVXKYKQRNGWSHKDLLRLSHLKPSSEGLAIVXKYIXKGWKEVHELYKEKALSVEXEKLLKYLEAVEKVKRXRDELEVIHLIEEHRLVREHLLXNHLKSKEVWKALLQEMPLXALLRNLGKMXANSVLEPGNSEVSLVCEKLCNEKLLKKARIHPFHILIALEXYKXGHGLRGKLKWRPDEEILKALDAAFYKXFKXVEPXGKRFLLAVDVSASMNQRVLGSILNASXVAAAMCMVVXRXEKDSYVVAFSDEMVPCPVXXDMXLQQVLMAMSQIPAGGXDCSLPMIWAQKXNXPADVFIVFXDNEXFAGGVHPAIALREYRKKMDIPAKLIVCGMXSNGFXIADPDDRALQNXLLNKSF

SEQ ID NO: 28638 - protein, 534 aa, Homo sapiens
  MOD_RES (28)..(28): Selenocysteine
  MOD_RES (45)..(45): Selenocysteine
  MOD_RES (86)..(87): Selenocysteine
  MOD_RES (107)..(107): Selenocysteine
  MOD_RES (123)..(123): Selenocysteine
  MOD_RES (127)..(127): Selenocysteine
  MOD_RES (169)..(169): Selenocysteine
  MOD_RES (199)..(199): Selenocysteine
  MOD_RES (203)..(203): Selenocysteine
  MOD_RES (222)..(222): Selenocysteine
  MOD_RES (238)..(238): Selenocysteine
  MOD_RES (260)..(260): Selenocysteine
  MOD_RES (279)..(279): Selenocysteine
  MOD_RES (289)..(289): Selenocysteine
  MOD_RES (330)..(330): Selenocysteine
  MOD_RES (333)..(333): Selenocysteine
  MOD_RES (360)..(360): Selenocysteine
  MOD_RES (363)..(363): Selenocysteine
  MOD_RES (367)..(367): Selenocysteine
  MOD_RES (394)..(394): Selenocysteine
  MOD_RES (404)..(404): Selenocysteine
  MOD_RES (406)..(406): Selenocysteine
  MOD_RES (425)..(426): Selenocysteine
  MOD_RES (429)..(429): Selenocysteine
  MOD_RES (445)..(445): Selenocysteine
  MOD_RES (457)..(457): Selenocysteine
  MOD_RES (459)..(459): Selenocysteine
  MOD_RES (468)..(468): Selenocysteine
  MOD_RES (472)..(472): Selenocysteine
  MOD_RES (502)..(502): Selenocysteine
  MOD_RES (507)..(507): Selenocysteine
  MOD_RES (524)..(524): Selenocysteine
MEESVNQMQPLNEKQIANSQDGYVWQVXDMNRLHRFLCFGSEGGXYYIKEQKLGLENAEALIRLIEDGRGCEVIQEIKSFSQEGRXXKQEPMLFALAICSQCSDISXKQAAFKAVSEVCRIPXHLFXFIQFKKDLKESMKCGMWGRALRKAIADWYNEKGGMALALAVXKYKQRNGWSHKDLLRLSHLKPSSEGLAIVXKYIXKGWKEVHELYKEKALSVEXEKLLKYLEAVEKVKRXRDELEVIHLIEEHRLVREHLLXNHLKSKEVWKALLQEMPLXALLRNLGKMXANSVLEPGNSEVSLVCEKLCNEKLLKKARIHPFHILIALEXYKXGHGLRGKLKWRPDEEILKALDAAFYKXFKXVEPXGKRFLLAVDVSASMNQRVLGSILNASXVAAAMCMVVXRXEKDSYVVAFSDEMVPCPVXXDMXLQQVLMAMSQIPAGGXDCSLPMIWAQKXNXPADVFIVFXDNEXFAGGVHPAIALREYRKKMDIPAKLIVCGMXSNGFXIADPDDRGMLDMCGFDXGALDPCKIPY

SEQ ID NO: 28639 - protein, 538 aa, Homo sapiens
  MOD_RES (28)..(28): Selenocysteine
  MOD_RES (45)..(45): Selenocysteine
  MOD_RES (86)..(87): Selenocysteine
  MOD_RES (107)..(107): Selenocysteine
  MOD_RES (123)..(123): Selenocysteine
  MOD_RES (127)..(127): Selenocysteine
  MOD_RES (169)..(169): Selenocysteine
  MOD_RES (199)..(199): Selenocysteine
  MOD_RES (203)..(203): Selenocysteine
  MOD_RES (222)..(222): Selenocysteine
  MOD_RES (238)..(238): Selenocysteine
  MOD_RES (260)..(260): Selenocysteine
  MOD_RES (279)..(279): Selenocysteine
  MOD_RES (289)..(289): Selenocysteine
  MOD_RES (330)..(330): Selenocysteine
  MOD_RES (333)..(333): Selenocysteine
  MOD_RES (360)..(360): Selenocysteine
  MOD_RES (363)..(363): Selenocysteine
  MOD_RES (367)..(367): Selenocysteine
  MOD_RES (394)..(394): Selenocysteine
  MOD_RES (404)..(404): Selenocysteine
  MOD_RES (406)..(406): Selenocysteine
  MOD_RES (425)..(426): Selenocysteine
  MOD_RES (429)..(429): Selenocysteine
  MOD_RES (445)..(445): Selenocysteine
  MOD_RES (457)..(457): Selenocysteine
  MOD_RES (459)..(459): Selenocysteine
  MOD_RES (468)..(468): Selenocysteine
  MOD_RES (472)..(472): Selenocysteine
  MOD_RES (502)..(502): Selenocysteine
  MOD_RES (507)..(507): Selenocysteine
  MOD_RES (524)..(524): Selenocysteine
  MOD_RES (534)..(534): Selenocysteine
MEESVNQMQPLNEKQIANSQDGYVWQVXDMNRLHRFLCFGSEGGXYYIKEQKLGLENAEALIRLIEDGRGCEVIQEIKSFSQEGRXXKQEPMLFALAICSQCSDISXKQAAFKAVSEVCRIPXHLFXFIQFKKDLKESMKCGMWGRALRKAIADWYNEKGGMALALAVXKYKQRNGWSHKDLLRLSHLKPSSEGLAIVXKYIXKGWKEVHELYKEKALSVEXEKLLKYLEAVEKVKRXRDELEVIHLIEEHRLVREHLLXNHLKSKEVWKALLQEMPLXALLRNLGKMXANSVLEPGNSEVSLVCEKLCNEKLLKKARIHPFHILIALEXYKXGHGLRGKLKWRPDEEILKALDAAFYKXFKXVEPXGKRFLLAVDVSASMNQRVLGSILNASXVAAAMCMVVXRXEKDSYVVAFSDEMVPCPVXXDMXLQQVLMAMSQIPAGGXDCSLPMIWAQKXNXPADVFIVFXDNEXFAGGVHPAIALREYRKKMDIPAKLIVCGMXSNGFXIADPDDRGMLDMCGFDXGALDVIRNFXLDMI

SEQ ID NO: 28640 - protein, 66 aa, Homo sapiens
  MOD_RES (28)..(28): Selenocysteine
  MOD_RES (48)..(48): Selenocysteine
  MOD_RES (52)..(52): Selenocysteine
MEESVNQMQPLNEKQIANSQDGYVWQVXDMNRLHRFLCFGSEGLAIVXKYIXKGWKEVHELYKEKA

SEQ ID NO: 28641 - protein, 263 aa, Homo sapiens
  MOD_RES (4)..(4): Selenocysteine
  MOD_RES (14)..(14): Selenocysteine
  MOD_RES (55)..(55): Selenocysteine
  MOD_RES (58)..(58): Selenocysteine
  MOD_RES (85)..(85): Selenocysteine
  MOD_RES (88)..(88): Selenocysteine
  MOD_RES (92)..(92): Selenocysteine
  MOD_RES (119)..(119): Selenocysteine
  MOD_RES (129)..(129): Selenocysteine
  MOD_RES (131)..(131): Selenocysteine
  MOD_RES (150)..(151): Selenocysteine
  MOD_RES (154)..(154): Selenocysteine
  MOD_RES (170)..(170): Selenocysteine
  MOD_RES (182)..(182): Selenocysteine
  MOD_RES (184)..(184): Selenocysteine
  MOD_RES (193)..(193): Selenocysteine
  MOD_RES (197)..(197): Selenocysteine
  MOD_RES (227)..(227): Selenocysteine
  MOD_RES (232)..(232): Selenocysteine
  MOD_RES (249)..(249): Selenocysteine
  MOD_RES (259)..(259): Selenocysteine
MPLXALLRNLGKMXANSVLEPGNSEVSLVCEKLCNEKLLKKARIHPFHILIALEXYKXGHGLRGKLKWRPDEEILKALDAAFYKXFKXVEPXGKRFLLAVDVSASMNQRVLGSILNASXVAAAMCMVVXRXEKDSYVVAFSDEMVPCPVXXDMXLQQVLMAMSQIPAGGXDCSLPMIWAQKXNXPADVFIVFXDNEXFAGGVHPAIALREYRKKMDIPAKLIVCGMXSNGFXIADPDDRGMLDMCGFDXGALDVIRNFXLDMI

SEQ ID NO: 28642 - protein, 1119 aa, Homo sapiens
  MOD_RES (29)..(29): Selenocysteine
  MOD_RES (64)..(64): Selenocysteine
  MOD_RES (83)..(83): Selenocysteine
  MOD_RES (100)..(100): Selenocysteine
  MOD_RES (155)..(155): Selenocysteine
  MOD_RES (167)..(167): Selenocysteine
  MOD_RES (174)..(175): Selenocysteine
  MOD_RES (241)..(241): Selenocysteine
  MOD_RES (274)..(274): Selenocysteine
  MOD_RES (281)..(281): Selenocysteine
  MOD_RES (285)..(285): Selenocysteine
  MOD_RES (304)..(305): Selenocysteine
  MOD_RES (311)..(311): Selenocysteine
  MOD_RES (350)..(350): Selenocysteine
  MOD_RES (382)..(382): Selenocysteine
  MOD_RES (415)..(415): Selenocysteine
  MOD_RES (461)..(461): Selenocysteine
  MOD_RES (472)..(472): Selenocysteine
  MOD_RES (484)..(484): Selenocysteine
  MOD_RES (516)..(516): Selenocysteine
  MOD_RES (527)..(527): Selenocysteine
  MOD_RES (529)..(529): Selenocysteine
  MOD_RES (536)..(536): Selenocysteine
  MOD_RES (541)..(541): Selenocysteine
  MOD_RES (550)..(550): Selenocysteine
  MOD_RES (598)..(598): Selenocysteine
  MOD_RES (624)..(624): Selenocysteine
  MOD_RES (646)..(646): Selenocysteine
  MOD_RES (670)..(670): Selenocysteine
  MOD_RES (673)..(673): Selenocysteine
  MOD_RES (675)..(675): Selenocysteine
  MOD_RES (684)..(684): Selenocysteine
  MOD_RES (734)..(734): Selenocysteine
  MOD_RES (749)..(749): Selenocysteine
  MOD_RES (755)..(755): Selenocysteine
  MOD_RES (764)..(765): Selenocysteine
  MOD_RES (772)..(772): Selenocysteine
  MOD_RES (813)..(814): Selenocysteine
  MOD_RES (869)..(869): Selenocysteine
  MOD_RES (874)..(874): Selenocysteine
  MOD_RES (908)..(908): Selenocysteine
  MOD_RES (945)..(945): Selenocysteine
  MOD_RES (984)..(984): Selenocysteine
  MOD_RES (1003)..(1003): Selenocysteine
  MOD_RES (1026)..(1026): Selenocysteine
  MOD_RES (1055)..(1055): Selenocysteine
  MOD_RES (1078)..(1078): Selenocysteine
  MOD_RES (1105)..(1105): Selenocysteine
  MOD_RES (1114)..(1114): Selenocysteine
MKRSLRKMWRPGEKKEPQGVVYEDVPDDXEDFKESLKVVFEGSAYGLQNFNKQKKLKRCDDMDXFFLHYAAAEGQIELMEKIXRDSSLEVLHEMDDYGNXPLHCAVEKNQIESVKFLLSRGANPNLRNFNMMAPLHIAVQGMNNEVMKVLLEHRXIDVNLEGENGNXAVIIACXXNNSEALQILLKKGAKPCKSNKWGCFPIHQAAFSGSKECMEIILRFGEEHGYSRQLHINFMNNGKAXPLHLAVQNGDLEMIKMCLDNGAQIDPVEKGRCXAIHFAAXQGAXEIVKLMISSYSGSVDIVNXXDGCHEXMLHRASLFDHHELADYLISVGADINKIDSEGRSPLILAXASASWNIVNLLLSKGAQVDIKDNFGRNFLHLXVQQPYGLKNLRPEFMQMQQIKELVMDEDNDGCXPLHYACRQGGPGSVNNLLGFNVSIHSKSKDKKSPLHFAASYGRINXCQRLLQDISDXRLLNEGDLHGMXPLHLAAKNGHDKVVQLLLKKGALFLSDHNGWXALHHASMGGYXQXMKVILDXNLKCXDRLDEDGNXALHFAAREGHAKAVALLLSHNADIVLNKQQASFLHLALHNKRKEVVLXIIRSKRWDECLKIFSHNSPGNKCPIXEMIEYLPECMKVLLDFCMLHSXEDKSCRDYYIEYNFKYLQCPLEFXKKXPXQDVIYEPLXALNAMVQNNRIELLNHPVCKEYLLMKWLAYGFRAHMMNLGSYCLGLIPMXILVVNIKPGMAFNSXGIINEXSDHSEILDXXNSYLIKXCMILVFLSSIFGYCKEAGQIFQQKRNYFMDISNVLEWIIYXXGIIFVLPLFVEIPAHLQWQCGAIAVYFYWMNFLLYLQRFENCGIFIVMLEVILKXLLRSXVVFIFLLLAFGLSFYILLNLQDPFSSPLLSIIQXFSMMLGDINYRESFLEPYLRNELAHPVLSFAQLVSFXIFVPIVLMNLLIGLAVGDIAEVQKHASLKRIAMQVELHXSLEKKLPLWFLRKVDQKSXIVYPNKPRSGGMLFHIFCFLFCXGEIRQEIPNADKSLEMEILKQKYRLKDLXFLLEKQHELIKLIIQKMEIISEXEDDDSHCSFQDRFKKEQMEQRNSRWNXVLRAVKAKXHHLEP

SEQ ID NO: 28643 - protein, 916 aa, Homo sapiens
  MOD_RES (7)..(7): Selenocysteine
  MOD_RES (19)..(19): Selenocysteine
  MOD_RES (26)..(27): Selenocysteine
  MOD_RES (93)..(93): Selenocysteine
  MOD_RES (126)..(126): Selenocysteine
  MOD_RES (133)..(133): Selenocysteine
  MOD_RES (137)..(137): Selenocysteine
  MOD_RES (156)..(157): Selenocysteine
  MOD_RES (163)..(163): Selenocysteine
  MOD_RES (202)..(202): Selenocysteine
  MOD_RES (234)..(234): Selenocysteine
  MOD_RES (267)..(267): Selenocysteine
  MOD_RES (313)..(313): Selenocysteine
  MOD_RES (324)..(324): Selenocysteine
  MOD_RES (336)..(336): Selenocysteine
  MOD_RES (368)..(368): Selenocysteine
  MOD_RES (379)..(379): Selenocysteine
  MOD_RES (381)..(381): Selenocysteine
  MOD_RES (388)..(388): Selenocysteine
  MOD_RES (393)..(393): Selenocysteine
  MOD_RES (402)..(402): Selenocysteine
  MOD_RES (450)..(450): Selenocysteine
  MOD_RES (476)..(476): Selenocysteine
  MOD_RES (498)..(498): Selenocysteine
  MOD_RES (522)..(522): Selenocysteine
  MOD_RES (525)..(525): Selenocysteine
  MOD_RES (527)..(527): Selenocysteine
  MOD_RES (536)..(536): Selenocysteine
  MOD_RES (586)..(586): Selenocysteine
  MOD_RES (601)..(601): Selenocysteine
  MOD_RES (607)..(607): Selenocysteine
  MOD_RES (616)..(617): Selenocysteine
  MOD_RES (624)..(624): Selenocysteine
  MOD_RES (665)..(666): Selenocysteine
  MOD_RES (721)..(721): Selenocysteine
  MOD_RES (726)..(726): Selenocysteine
  MOD_RES (760)..(760): Selenocysteine
  MOD_RES (797)..(797): Selenocysteine
  MOD_RES (836)..(836): Selenocysteine
  MOD_RES (855)..(855): Selenocysteine
  MOD_RES (878)..(878): Selenocysteine
  MOD_RES (904)..(905): Selenocysteine
  MOD_RES (911)..(911): Selenocysteine
VLLEHRXIDVNLEGENGNXAVIIACXXNNSEALQILLKKGAKPCKSNKWGCFPIHQAAFSGSKECMEIILRFGEEHGYSRQLHINFMNNGKAXPLHLAVQNGDLEMIKMCLDNGAQIDPVEKGRCXAIHFAAXQGAXEIVKLMISSYSGSVDIVNXXDGCHEXMLHRASLFDHHELADYLISVGADINKIDSEGRSPLILAXASASWNIVNLLLSKGAQVDIKDNFGRNFLHLXVQQPYGLKNLRPEFMQMQQIKELVMDEDNDGCXPLHYACRQGGPGSVNNLLGFNVSIHSKSKDKKSPLHFAASYGRINXCQRLLQDISDXRLLNEGDLHGMXPLHLAAKNGHDKVVQLLLKKGALFLSDHNGWXALHHASMGGYXQXMKVILDXNLKCXDRLDEDGNXALHFAAREGHAKAVALLLSHNADIVLNKQQASFLHLALHNKRKEVVLXIIRSKRWDECLKIFSHNSPGNKCPIXEMIEYLPECMKVLLDFCMLHSXEDKSCRDYYIEYNFKYLQCPLEFXKKXPXQDVIYEPLXALNAMVQNNRIELLNHPVCKEYLLMKWLAYGFRAHMMNLGSYCLGLIPMXILVVNIKPGMAFNSXGIINEXSDHSEILDXXNSYLIKXCMILVFLSSIFGYCKEAGQIFQQKRNYFMDISNVLEWIIYXXGIIFVLPLFVEIPAHLQWQCGAIAVYFYWMNFLLYLQRFENCGIFIVMLEVILKXLLRSXVVFIFLLLAFGLSFYILLNLQDPFSSPLLSIIQXFSMMLGDINYRESFLEPYLRNELAHPVLSFAQLVSFXIFVPIVLMNLLIGLAVGDIAEVQKHASLKRIAMQVELHXSLEKKLPLWFLRKVDQKSXIVYPNKPRSGGMLFHIFCFLFCXGEIRQEIPNADKSLEMEILKQKYRKXXCAFVLXLIPVG

SEQ ID NO: 28644 - protein, 1603 aa, Homo sapiens
  MOD_RES (3)..(3): Selenocysteine
  MOD_RES (13)..(13): Selenocysteine
  MOD_RES (24)..(24): Selenocysteine
  MOD_RES (37)..(37): Selenocysteine
  MOD_RES (48)..(48): Selenocysteine
  MOD_RES (53)..(53): Selenocysteine
  MOD_RES (79)..(79): Selenocysteine
  MOD_RES (130)..(131): Selenocysteine
  MOD_RES (137)..(137): Selenocysteine
  MOD_RES (142)..(142): Selenocysteine
  MOD_RES (186)..(186): Selenocysteine
  MOD_RES (191)..(191): Selenocysteine
  MOD_RES (207)..(207): Selenocysteine
  MOD_RES (216)..(216): Selenocysteine
  MOD_RES (241)..(241): Selenocysteine
  MOD_RES (313)..(313): Selenocysteine
  MOD_RES (317)..(317): Selenocysteine
  MOD_RES (343)..(343): Selenocysteine
  MOD_RES (361)..(361): Selenocysteine
  MOD_RES (367)..(367): Selenocysteine
  MOD_RES (408)..(408): Selenocysteine
  MOD_RES (413)..(413): Selenocysteine
  MOD_RES (423)..(424): Selenocysteine
  MOD_RES (447)..(447): Selenocysteine
  MOD_RES (492)..(492): Selenocysteine
  MOD_RES (502)..(502): Selenocysteine
  MOD_RES (509)..(509): Selenocysteine
  MOD_RES (550)..(550): Selenocysteine
  MOD_RES (556)..(556): Selenocysteine
  MOD_RES (700)..(700): Selenocysteine
  MOD_RES (710)..(710): Selenocysteine
  MOD_RES (727)..(727): Selenocysteine
  MOD_RES (734)..(734): Selenocysteine
  MOD_RES (760)..(760): Selenocysteine
  MOD_RES (768)..(768): Selenocysteine
  MOD_RES (776)..(776): Selenocysteine
  MOD_RES (791)..(791): Selenocysteine
  MOD_RES (818)..(818): Selenocysteine
  MOD_RES (835)..(835): Selenocysteine
  MOD_RES (902)..(902): Selenocysteine
  MOD_RES (909)..(909): Selenocysteine
  MOD_RES (1052)..(1052): Selenocysteine
  MOD_RES (1078)..(1078): Selenocysteine
  MOD_RES (1100)..(1100): Selenocysteine
  MOD_RES (1185)..(1185): Selenocysteine
  MOD_RES (1204)..(1204): Selenocysteine
  MOD_RES (1208)..(1208): Selenocysteine
  MOD_RES (1212)..(1212): Selenocysteine
  MOD_RES (1256)..(1256): Selenocysteine
  MOD_RES (1287)..(1287): Selenocysteine
  MOD_RES (1291)..(1291): Selenocysteine
  MOD_RES (1295)..(1295): Selenocysteine
  MOD_RES (1301)..(1301): Selenocysteine
  MOD_RES (1314)..(1314): Selenocysteine
  MOD_RES (1330)..(1330): Selenocysteine
  MOD_RES (1332)..(1332): Selenocysteine
  MOD_RES (1335)..(1335): Selenocysteine
  MOD_RES (1369)..(1369): Selenocysteine
  MOD_RES (1376)..(1376): Selenocysteine
  MOD_RES (1384)..(1384): Selenocysteine
  MOD_RES (1398)..(1398): Selenocysteine
  MOD_RES (1401)..(1401): Selenocysteine
  MOD_RES (1404)..(1405): Selenocysteine
  MOD_RES (1410)..(1410): Selenocysteine
  MOD_RES (1418)..(1418): Selenocysteine
  MOD_RES (1421)..(1421): Selenocysteine
  MOD_RES (1428)..(1428): Selenocysteine
  MOD_RES (1434)..(1434): Selenocysteine
  MOD_RES (1462)..(1462): Selenocysteine
  MOD_RES (1467)..(1468): Selenocysteine
  MOD_RES (1478)..(1478): Selenocysteine
  MOD_RES (1483)..(1483): Selenocysteine
  MOD_RES (1524)..(1524): Selenocysteine
  MOD_RES (1526)..(1526): Selenocysteine
  MOD_RES (1542)..(1542): Selenocysteine
  MOD_RES (1586)..(1586): Selenocysteine
  MOD_RES (1599)..(1599): Selenocysteine
  MOD_RES (1601)..(1601): Selenocysteine
IKXSKRCCCGQFXNQHIPPLPSAXPSKNEEENKQVEXQPEKWSVAKHXQSYPXDSYGVLEFQGGGYSNKAMYIRVSYDXKPDSLLHLMVKDWQLELPKLLISVHGGLQNFEMQPKLKQVFGKGLIKAAMXXGAWIFXGGVSXGVISHVGDALKDHSSKSRGRVCAIGIAPWGIVENKEDLVGKDVXRVYQXMSNPLSKLSVLNNSHXHFILADNGXLGKYGAEVKLRRLLEKHISLQKINXRLGQGVPLVGLVVEGGPNVVSIVLEYLQEEPPIPVVICDGSGRASDILSFAHKYCEEGGIINESLREQLLVXIQKXFNYNKAQSHQLFAIIMECMKKKELVXVFRMGSEGQQDIEMAILXALLKGXNVSAPDQLSLALAWNRVDIARSQIFVFGPHWPPLGSLAPPXDSKAXEKEKKPPMAXXKGGRGKGKGKKKGKVKEEVEEEXDPRKIELLNWVNALEQAMLDALVLDRVDFVKLLIENGVNMQHFLXIPRLEELYNXRLGPPNXLHLLVRDVKKSNLPPDYHISLIDIGLVLEYLMGGAYRCNYXRKNFRXLYNNLFGPKRPKALKLLGMEDDEPPAKGKKKKKKKKEEEIDIDVDDPAVSRFQYPFHELMVWAVLMKRQKMAVFLWQRGEESMAKALVACKLYKAMAHESSESDLVDDISQDLDNNSKDFGQLALELLDQSYKHDEQIAMKLLXYELKNWSNSXCLKLAVAAKHRDFIAHXCSQMLLXDMWMGRLRMRKNPGLKVIMGILLPPXILFLEFRXYDDFSYQXSKENEDGKEKEEENXDANADAGSRKGDEENEHKKQRSIPIGXKICEFYNAPIVKFWFYXISYLGYLLLFNYVILVRMDGWPSLQEWIVISYIVSLALEKIREILMSEPGKLSQKIKVWLQEYWNIXDLVAISXFMIGAILRLQNQPYMGYGRVIYCVDIIFWYIRVLDIFGVNKYLGPYVMMIGKMMIDMLYFVVIMLVVLMSFGVARQAILHPEEKPSWKLARNIFYMPYWMIYGEVFADQIDLYAMEINPPCGENLYDEEGKRLPPCIPGAWLXPALMACYLLVANILLVNLLIAVFNNXFFEVKSISNQVWKFQRYQLIMXFHDRPVLPPPMIILSHIYIIIMRLSGRCRKKREGDQEERDRGLKLFLSDEELKRLHEFEEQCVQEHFREKEDEQQSSSDERIRVXSERVENMSMRLEEINEREXFMKXSLQXVDLRLAQLEELSNRMVNALENLAGIDRSDLIQARSRASSECEAXYLLRQSSINSADGYSLYRYHFNGEELLFEDXSLSXSPGXGVRKKXCSFRIKEEKDVKXHLVPECQNSLHLSLGXSXSAXPDGSHLAVDDLKNAEESKLGPDIGISKEDDERQXDSKKEEXISPSLNKXDVIHGQDKSDVQNXQLXVEXXNIEGXISYPLEEXKIXRYFPDEXINACKXMKSRSFVYSRGRKLVGGVNQDVEYSSIXDQQLXXEWQCQVQKIXRSHSXDIPYIVSEAAVQAEHKEQFADMQDEHHVAEAIPRIPRLSLXIXDRNGMENLLSVKPDQXLGFPSLRSKSLHGHPRNVKSIQGKLDRSGHASSVSSLVIVSGMXAEEKKVKKEKASXEXEC

SEQ ID NO: 28645 - protein, 1625 aa, Homo sapiens
  MOD_RES (10)..(10): Selenocysteine
  MOD_RES (35)..(35): Selenocysteine
  MOD_RES (46)..(46): Selenocysteine
  MOD_RES (59)..(59): Selenocysteine
  MOD_RES (70)..(70): Selenocysteine
  MOD_RES (75)..(75): Selenocysteine
  MOD_RES (101)..(101): Selenocysteine
  MOD_RES (152)..(153): Selenocysteine
  MOD_RES (159)..(159): Selenocysteine
  MOD_RES (164)..(164): Selenocysteine
  MOD_RES (208)..(208): Selenocysteine
  MOD_RES (213)..(213): Selenocysteine
  MOD_RES (229)..(229): Selenocysteine
  MOD_RES (238)..(238): Selenocysteine
  MOD_RES (263)..(263): Selenocysteine
  MOD_RES (335)..(335): Selenocysteine
  MOD_RES (339)..(339): Selenocysteine
  MOD_RES (365)..(365): Selenocysteine
  MOD_RES (383)..(383): Selenocysteine
  MOD_RES (389)..(389): Selenocysteine
  MOD_RES (430)..(430): Selenocysteine
  MOD_RES (435)..(435): Selenocysteine
  MOD_RES (445)..(446): Selenocysteine
  MOD_RES (469)..(469): Selenocysteine
  MOD_RES (514)..(514): Selenocysteine
  MOD_RES (524)..(524): Selenocysteine
  MOD_RES (531)..(531): Selenocysteine
  MOD_RES (572)..(572): Selenocysteine
  MOD_RES (578)..(578): Selenocysteine
  MOD_RES (722)..(722): Selenocysteine
  MOD_RES (732)..(732): Selenocysteine
  MOD_RES (749)..(749): Selenocysteine
  MOD_RES (756)..(756): Selenocysteine
  MOD_RES (782)..(782): Selenocysteine
  MOD_RES (790)..(790): Selenocysteine
  MOD_RES (798)..(798): Selenocysteine
  MOD_RES (813)..(813): Selenocysteine
  MOD_RES (840)..(840): Selenocysteine
  MOD_RES (857)..(857): Selenocysteine
  MOD_RES (924)..(924): Selenocysteine
  MOD_RES (931)..(931): Selenocysteine
  MOD_RES (1074)..(1074): Selenocysteine
  MOD_RES (1100)..(1100): Selenocysteine
  MOD_RES (1122)..(1122): Selenocysteine
  MOD_RES (1207)..(1207): Selenocysteine
  MOD_RES (1226)..(1226): Selenocysteine
  MOD_RES (1230)..(1230): Selenocysteine
  MOD_RES (1234)..(1234): Selenocysteine
  MOD_RES (1278)..(1278): Selenocysteine
  MOD_RES (1309)..(1309): Selenocysteine
  MOD_RES (1313)..(1313): Selenocysteine
  MOD_RES (1317)..(1317): Selenocysteine
  MOD_RES (1323)..(1323): Selenocysteine
  MOD_RES (1336)..(1336): Selenocysteine
  MOD_RES (1352)..(1352): Selenocysteine
  MOD_RES (1354)..(1354): Selenocysteine
  MOD_RES (1357)..(1357): Selenocysteine
  MOD_RES (1391)..(1391): Selenocysteine
  MOD_RES (1398)..(1398): Selenocysteine
  MOD_RES (1406)..(1406): Selenocysteine
  MOD_RES (1420)..(1420): Selenocysteine
  MOD_RES (1423)..(1423): Selenocysteine
  MOD_RES (1426)..(1427): Selenocysteine
  MOD_RES (1432)..(1432): Selenocysteine
  MOD_RES (1440)..(1440): Selenocysteine
  MOD_RES (1443)..(1443): Selenocysteine
  MOD_RES (1450)..(1450): Selenocysteine
  MOD_RES (1456)..(1456): Selenocysteine
  MOD_RES (1484)..(1484): Selenocysteine
  MOD_RES (1489)..(1490): Selenocysteine
  MOD_RES (1500)..(1500): Selenocysteine
  MOD_RES (1505)..(1505): Selenocysteine
  MOD_RES (1546)..(1546): Selenocysteine
  MOD_RES (1548)..(1548): Selenocysteine
  MOD_RES (1564)..(1564): Selenocysteine
  MOD_RES (1608)..(1608): Selenocysteine
  MOD_RES (1621)..(1621): Selenocysteine
  MOD_RES (1623)..(1623): Selenocysteine
MGQKSWIEKXFCKRECIFVIPSMKDSNRCCCGQFXNQHIPPLPSAXPSKNEEESKQVEXQPEKWSVAKHXQSYPXDSYGVLEFQGGGYSNKAMYIRVSYDXKPDSLLHLMVKDWQLELPKLLISVHGGLQNFEMQPKLKQVFGKGLIKAAMXXGAWIFXGGVSXGVISHVGDALKDHSSKSRGRVCAIGIAPWGIVENKEDLVGKDVXRVYQXMSNPLSKLSVLNNSHXHFILADNGXLGKYGAEVKLRRLLEKHISLQKINXRLGQGVPLVGLVVEGGPNVVSIVLEYLQEEPPIPVVICDGSGRASDILSFAHKYCEEGGIINESLREQLLVXIQKXFNYNKAQSHQLFAIIMECMKKKELVXVFRMGSEGQQDIEMAILXALLKGXNVSAPDQLSLALAWNRVDIARSQIFVFGPHWPPLGSLAPPXDSKAXEKEKKPPMAXXKGGRGKGKGKKKGKVKEEVEEEXDPRKIELLNWVNALEQAMLDALVLDRVDFVKLLIENGVNMQHFLXIPRLEELYNXRLGPPNXLHLLVRDVKKSNLPPDYHISLIDIGLVLEYLMGGAYRCNYXRKNFRXLYNNLFGPKRPKALKLLGMEDDEPPAKGKKKKKKKKEEEIDIDVDDPAVSRFQYPFHELMVWAVLMKRQKMAVFLWQRGEESMAKALVACKLYKAMAHESSESDLVDDISQDLDNNSKDFGQLALELLDQSYKHDEQIAMKLLXYELKNWSNSXCLKLAVAAKHRDFIAHXCSQMLLXDMWMGRLRMRKNPGLKVIMGILLPPXILFLEFRXYDDFSYQXSKENEDGKEKEEENXDANADAGSRKGDEENEHKKQRSIPIGXKICEFYNAPIVKFWFYXISYLGYLLLFNYVILVRMDGWPSLQEWIVISYIVSLALEKIREILMSEPGKLSQKIKVWLQEYWNIXDLVAISXFMIGAILRLQNQPYMGYGRVIYCVDIIFWYIRVLDIFGVNKYLGPYVMMIGKMMIDMLYFVVIMLVVLMSFGVARQAILHPEEKPSWKLARNIFYMPYWMIYGEVFADQIDLYAMEINPPCGENLYDEEGKRLPPCIPGAWLXPALMACYLLVANILLVNLLIAVFNNXFFEVKSISNQVWKFQRYQLIMXFHDRPVLPPPMIILSHIYIIIMRLSGRCRKKREGDQEERDRGLKLFLSDEELKRLHEFEEQCVQEHFREKEDEQQSSSDERIRVXSERVENMSMRLEEINEREXFMKXSLQXVDLRLAQLEELSNRMVNALENLAGIDRSDLIQARSRASSECEAXYLLRQSSINSADGYSLYRYHFNGEELLFEDXSLSXSPGXGVRKKXCSFRIKEEKDVKXHLVPECQNSLHLSLGXSXSAXPDGSHLAVDDLKNAEESKLGPDIGISKEDDERQXDSKKEEXISPSLNKXDVIHGQDKSDVQNXQLXVEXXNIEGXISYPLEEXKIXRYFPDEXINACKXMKSRSFVYSRGRKLVGGVNQDVEYSSIXDQQLXXEWQCQVQKIXRSHSXDIPYIVSEAAVQAEHKEQFADMQDEHHVAEAIPRIPRLSLXIXDRNGMENLLSVKPDQXLGFPSLRSKSLHGHPRNVKSIQGKLDRSGHASSVSSLVIVSGMXAEEKKVKKEKASXEXEC

SEQ ID NO: 28646 - protein, 1625 aa, Homo sapiens
  MOD_RES (10)..(10): Selenocysteine
  MOD_RES (23)..(23): Selenocysteine
  MOD_RES (35)..(35): Selenocysteine
  MOD_RES (46)..(46): Selenocysteine
  MOD_RES (59)..(59): Selenocysteine
  MOD_RES (70)..(70): Selenocysteine
  MOD_RES (75)..(75): Selenocysteine
  MOD_RES (101)..(101): Selenocysteine
  MOD_RES (152)..(153): Selenocysteine
  MOD_RES (159)..(159): Selenocysteine
  MOD_RES (164)..(164): Selenocysteine
  MOD_RES (208)..(208): Selenocysteine
  MOD_RES (213)..(213): Selenocysteine
  MOD_RES (229)..(229): Selenocysteine
  MOD_RES (238)..(238): Selenocysteine
  MOD_RES (263)..(263): Selenocysteine
  MOD_RES (335)..(335): Selenocysteine
  MOD_RES (339)..(339): Selenocysteine
  MOD_RES (365)..(365): Selenocysteine
  MOD_RES (383)..(383): Selenocysteine
  MOD_RES (389)..(389): Selenocysteine
  MOD_RES (430)..(430): Selenocysteine
  MOD_RES (435)..(435): Selenocysteine
  MOD_RES (445)..(446): Selenocysteine
  MOD_RES (469)..(469): Selenocysteine
  MOD_RES (514)..(514): Selenocysteine
  MOD_RES (524)..(524): Selenocysteine
  MOD_RES (531)..(531): Selenocysteine
  MOD_RES (572)..(572): Selenocysteine
  MOD_RES (578)..(578): Selenocysteine
  MOD_RES (722)..(722): Selenocysteine
  MOD_RES (732)..(732): Selenocysteine
  MOD_RES (749)..(749): Selenocysteine
  MOD_RES (756)..(756): Selenocysteine
  MOD_RES (782)..(782): Selenocysteine
  MOD_RES (790)..(790): Selenocysteine
  MOD_RES (798)..(798): Selenocysteine
  MOD_RES (813)..(813): Selenocysteine
  MOD_RES (840)..(840): Selenocysteine
  MOD_RES (857)..(857): Selenocysteine
  MOD_RES (924)..(924): Selenocysteine
  MOD_RES (931)..(931): Selenocysteine
  MOD_RES (1074)..(1074): Selenocysteine
  MOD_RES (1100)..(1100): Selenocysteine
  MOD_RES (1122)..(1122): Selenocysteine
  MOD_RES (1207)..(1207): Selenocysteine
  MOD_RES (1226)..(1226): Selenocysteine
  MOD_RES (1230)..(1230): Selenocysteine
  MOD_RES (1234)..(1234): Selenocysteine
  MOD_RES (1278)..(1278): Selenocysteine
  MOD_RES (1309)..(1309): Selenocysteine
  MOD_RES (1313)..(1313): Selenocysteine
  MOD_RES (1317)..(1317): Selenocysteine
  MOD_RES (1323)..(1323): Selenocysteine
  MOD_RES (1336)..(1336): Selenocysteine
  MOD_RES (1352)..(1352): Selenocysteine
  MOD_RES (1354)..(1354): Selenocysteine
  MOD_RES (1357)..(1357): Selenocysteine
  MOD_RES (1391)..(1391): Selenocysteine
  MOD_RES (1398)..(1398): Selenocysteine
  MOD_RES (1406)..(1406): Selenocysteine
  MOD_RES (1420)..(1420): Selenocysteine
  MOD_RES (1423)..(1423): Selenocysteine
  MOD_RES (1426)..(1427): Selenocysteine
  MOD_RES (1432)..(1432): Selenocysteine
  MOD_RES (1440)..(1440): Selenocysteine
  MOD_RES (1443)..(1443): Selenocysteine
  MOD_RES (1450)..(1450): Selenocysteine
  MOD_RES (1456)..(1456): Selenocysteine
  MOD_RES (1484)..(1484): Selenocysteine
  MOD_RES (1489)..(1490): Selenocysteine
  MOD_RES (1500)..(1500): Selenocysteine
  MOD_RES (1505)..(1505): Selenocysteine
  MOD_RES (1546)..(1546): Selenocysteine
  MOD_RES (1548)..(1548): Selenocysteine
  MOD_RES (1564)..(1564): Selenocysteine
  MOD_RES (1608)..(1608): Selenocysteine
  MOD_RES (1621)..(1621): Selenocysteine
  MOD_RES (1623)..(1623): Selenocysteine
MGQKSWIEKXFCKRECIFVIPSXKDSNRCCCGQFXNQHIPPLPSAXPSKNEEENKQVEXQPEKWSVAKHXQSYPXDSYGVLEFQGGGYSNKAMYIRVSYDXKPDSLLHLMVKDWQLELPKLLISVHGGLQNFEMQPKLKQVFGKGLIKAAMXXGAWIFXGGVSXGVISHVGDALKDHSSKSRGRVCAIGIAPWGIVENKEDLVGKDVXRVYQXMSNPLSKLSVLNNSHXHFILADNGXLGKYGAEVKLRRLLEKHISLQKINXRLGQGVPLVGLVVEGGPNVVSIVLEYLQEEPPIPVVICDGSGRASDILSFAHKYCEEGGIINESLREQLLVXIQKXFNYNKAQSHQLFAIIMECMKKKELVXVFRMGSEGQQDIEMAILXALLKGXNVSAPDQLSLALAWNRVDIARSQIFVFGPHWPPLGSLAPPXDSKAXEKEKKPPMAXXKGGRGKGKGKKKGKVKEEVEEEXDPRKIELLNWVNALEQAMLDALVLDRVDFVKLLIENGVNMQHFLXIPRLEELYNXRLGPPNXLHLLVRDVKKSNLPPDYHISLIDIGLVLEYLMGGAYRCNYXRKNFRXLYNNLFGPKRPKALKLLGMEDDEPPAKGKKKKKKKKEEEIDIDVDDPAVSRFQYPFHELMVWAVLMKRQKMAVFLWQRGEESMAKALVACKLYKAMAHESSESDLVDDISQDLDNNSKDFGQLALELLDQSYKHDEQIAMKLLXYELKNWSNSXCLKLAVAAKHRDFIAHXCSQMLLXDMWMGRLRMRKNPGLKVIMGILLPPXILFLEFRXYDDFSYQXSKENEDGKEKEEENXDANADAGSRKGDEENEHKKQRSIPIGXKICEFYNAPIVKFWFYXISYLGYLLLFNYVILVRMDGWPSLQEWIVISYIVSLALEKIREILMSEPGKLSQKIKVWLQEYWNIXDLVAISXFMIGAILRLQNQPYMGYGRVIYCVDIIFWYIRVLDIFGVNKYLGPYVMMIGKMMIDMLYFVVIMLVVLMSFGVARQAILHPEEKPSWKLARNIFYMPYWMIYGEVFADQIDLYAMEINPPCGENLYDEEGKRLPPCIPGAWLXPALMACYLLVANILLVNLLIAVFNNXFFEVKSISNQVWKFQRYQLIMXFHDRPVLPPPMIILSHIYIIIMRLSGRCRKKREGDQEERDRGLKLFLSDEELKRLHEFEEQCVQEHFREKEDEQQSSSDERIRVXSERVENMSMRLEEINEREXFMKXSLQXVDLRLAQLEELSNRMVNALENLAGIDRSDLIQARSRASSECEAXYLLRQSSINSADGYSLYRYHFNGEELLFEDXSLSXSPGXGVRKKXCSFRIKEEKDVKXHLVPECQNSLHLSLGXSXSAXPDGSHLAVDDLKNAEESKLGPDIGISKEDDERQXDSKKEEXISPSLNKXDVIHGQDKSDVQNXQLXVEXXNIEGXISYPLEEXKIXRYFPDEXINACKXMKSRSFVYSRGRKLVGGVNQDVEYSSIXDQQLXXEWQCQVQKIXRSHSXDIPYIVSEAAVQAEHKEQFADMQDEHHVAEAIPRIPRLSLXIXDRNGMENLLSVKPDQXLGFPSLRSKSLHGHPRNVKSIQGKLDRSGHASSVSSLVIVSGMXAEEKKVKKEKASXEXEC

SEQ ID NO: 28647 - protein, 136 aa, Homo sapiens
  MOD_RES (13)..(13): Selenocysteine
  MOD_RES (24)..(24): Selenocysteine
  MOD_RES (37)..(37): Selenocysteine
  MOD_RES (48)..(48): Selenocysteine
  MOD_RES (53)..(53): Selenocysteine
  MOD_RES (81)..(81): Selenocysteine
  MOD_RES (84)..(84): Selenocysteine
  MOD_RES (123)..(123): Selenocysteine
  MOD_RES (134)..(134): Selenocysteine
MKDSNRCCCGQFXNQHIPPLPSAXPSKNEEESKQVEXQPEKWSVAKHXQSYPXDSYGVLEFQGGGYSNKAMVRKAFRHGAXRIXAFIGGQSPSPKLQIPGLLHGCGSIFLDISLKNQEIYLCXWLLAMRLGNWXPL

SEQ ID NO: 28648 - protein, 505 aa, Homo sapiens
  MOD_RES (13)..(13): Selenocysteine
  MOD_RES (24)..(24): Selenocysteine
  MOD_RES (37)..(37): Selenocysteine
  MOD_RES (48)..(48): Selenocysteine
  MOD_RES (53)..(53): Selenocysteine
  MOD_RES (79)..(79): Selenocysteine
  MOD_RES (130)..(131): Selenocysteine
  MOD_RES (137)..(137): Selenocysteine
  MOD_RES (142)..(142): Selenocysteine
  MOD_RES (167)..(167): Selenocysteine
  MOD_RES (193)..(193): Selenocysteine
  MOD_RES (215)..(215): Selenocysteine
  MOD_RES (300)..(300): Selenocysteine
  MOD_RES (319)..(319): Selenocysteine
  MOD_RES (323)..(323): Selenocysteine
  MOD_RES (327)..(327): Selenocysteine
  MOD_RES (371)..(371): Selenocysteine
  MOD_RES (402)..(402): Selenocysteine
  MOD_RES (406)..(406): Selenocysteine
  MOD_RES (410)..(410): Selenocysteine
  MOD_RES (416)..(416): Selenocysteine
  MOD_RES (429)..(429): Selenocysteine
  MOD_RES (445)..(445): Selenocysteine
  MOD_RES (447)..(447): Selenocysteine
  MOD_RES (450)..(450): Selenocysteine
  MOD_RES (484)..(484): Selenocysteine
  MOD_RES (491)..(491): Selenocysteine
  MOD_RES (499)..(499): Selenocysteine
MKDSNRCCCGQFXNQHIPPLPSAXPSKNEEESKQVEXQPEKWSVAKHXQSYPXDSYGVLEFQGGGYSNKAMYIRVSYDXKPDSLLHLMVKDWQLELPKLLISVHGGLQNFEMQPKLKQVFGKGLIKAAMXXGAWIFXGGVSXAPCGENLYDEEGKRLPPCIPGAWLXPALMACYLLVANILLVNLLIAVFNNXFFEVKSISNQVWKFQRYQLIMXFHDRPVLPPPMIILSHIYIIIMRLSGRCRKKREGDQEERDRGLKLFLSDEELKRLHEFEEQCVQEHFREKEDEQQSSSDERIRVXSERVENMSMRLEEINEREXFMKXSLQXVDLRLAQLEELSNRMVNALENLAGIDRSDLIQARSRASSECEAXYLLRQSSINSADGYSLYRYHFNGEELLFEDXSLSXSPGXGVRKKXCSFRIKEEKDVKXHLVPECQNSLHLSLGXSXSAXPDGSHLAVDDLKNAEESKLGPDIGISKEDDERQXDSKKEEXISPSLNKXDVIHGQ

SEQ ID NO: 28649 - protein, 300 aa, Homo sapiens
  MOD_RES (13)..(13): Selenocysteine
  MOD_RES (24)..(24): Selenocysteine
  MOD_RES (37)..(37): Selenocysteine
  MOD_RES (48)..(48): Selenocysteine
  MOD_RES (53)..(53): Selenocysteine
  MOD_RES (79)..(79): Selenocysteine
  MOD_RES (130)..(131): Selenocysteine
  MOD_RES (137)..(137): Selenocysteine
  MOD_RES (142)..(142): Selenocysteine
  MOD_RES (186)..(186): Selenocysteine
  MOD_RES (191)..(191): Selenocysteine
  MOD_RES (207)..(207): Selenocysteine
  MOD_RES (216)..(216): Selenocysteine
  MOD_RES (241)..(241): Selenocysteine
MKDSNRCCCGQFXNQHIPPLPSAXPSKNEEESKQVEXQPEKWSVAKHXQSYPXDSYGVLEFQGGGYSNKAMYIRVSYDXKPDSLLHLMVKDWQLELPKLLISVHGGLQNFEMQPKLKQVFGKGLIKAAMXXGAWIFXGGVSXGVISHVGDALKDHSSKSRGRVCAIGIAPWGIVENKEDLVGKDVXRVYQXMSNPLSKLSVLNNSHXHFILADNGXLGKYGAEVKLRRLLEKHISLQKINXRLGQGVPLVGLVVEGGPNVVSIVLEYLQEEPPIPVVICDGSGRASDILSFAHKYCEEGG

SEQ ID NO: 28650 - protein, 1390 aa, Homo sapiens
  MOD_RES (13)..(13): Selenocysteine
  MOD_RES (24)..(24): Selenocysteine
  MOD_RES (37)..(37): Selenocysteine
  MOD_RES (48)..(48): Selenocysteine
  MOD_RES (53)..(53): Selenocysteine
  MOD_RES (79)..(79): Selenocysteine
  MOD_RES (130)..(131): Selenocysteine
  MOD_RES (137)..(137): Selenocysteine
  MOD_RES (142)..(142): Selenocysteine
  MOD_RES (186)..(186): Selenocysteine
  MOD_RES (191)..(191): Selenocysteine
  MOD_RES (207)..(207): Selenocysteine
  MOD_RES (216)..(216): Selenocysteine
  MOD_RES (241)..(241): Selenocysteine
  MOD_RES (313)..(313): Selenocysteine
  MOD_RES (317)..(317): Selenocysteine
  MOD_RES (343)..(343): Selenocysteine
  MOD_RES (361)..(361): Selenocysteine
  MOD_RES (367)..(367): Selenocysteine
  MOD_RES (408)..(408): Selenocysteine
  MOD_RES (413)..(413): Selenocysteine
  MOD_RES (423)..(424): Selenocysteine
  MOD_RES (447)..(447): Selenocysteine
  MOD_RES (492)..(492): Selenocysteine
  MOD_RES (502)..(502): Selenocysteine
  MOD_RES (509)..(509): Selenocysteine
  MOD_RES (550)..(550): Selenocysteine
  MOD_RES (556)..(556): Selenocysteine
  MOD_RES (700)..(700): Selenocysteine
  MOD_RES (710)..(710): Selenocysteine
  MOD_RES (727)..(727): Selenocysteine
  MOD_RES (734)..(734): Selenocysteine
  MOD_RES (760)..(760): Selenocysteine
  MOD_RES (768)..(768): Selenocysteine
  MOD_RES (776)..(776): Selenocysteine
  MOD_RES (791)..(791): Selenocysteine
  MOD_RES (818)..(818): Selenocysteine
  MOD_RES (835)..(835): Selenocysteine
  MOD_RES (902)..(902): Selenocysteine
  MOD_RES (909)..(909): Selenocysteine
  MOD_RES (1052)..(1052): Selenocysteine
  MOD_RES (1078)..(1078): Selenocysteine
  MOD_RES (1100)..(1100): Selenocysteine
  MOD_RES (1185)..(1185): Selenocysteine
  MOD_RES (1204)..(1204): Selenocysteine
  MOD_RES (1208)..(1208): Selenocysteine
  MOD_RES (1212)..(1212): Selenocysteine
  MOD_RES (1256)..(1256): Selenocysteine
  MOD_RES (1287)..(1287): Selenocysteine
  MOD_RES (1291)..(1291): Selenocysteine
  MOD_RES (1295)..(1295): Selenocysteine
  MOD_RES (1301)..(1301): Selenocysteine
  MOD_RES (1314)..(1314): Selenocysteine
  MOD_RES (1330)..(1330): Selenocysteine
  MOD_RES (1332)..(1332): Selenocysteine
  MOD_RES (1335)..(1335): Selenocysteine
  MOD_RES (1369)..(1369): Selenocysteine
  MOD_RES (1376)..(1376): Selenocysteine
  MOD_RES (1384)..(1384): Selenocysteine
MKDSNRCCCGQFXNQHIPPLPSAXPSKNEEESKQVEXQPEKWSVAKHXQSYPXDSYGVLEFQGGGYSNKAMYIRVSYDXKPDSLLHLMVKDWQLELPKLLISVHGGLQNFEMQPKLKQVFGKGLIKAAMXXGAWIFXGGVSXGVISHVGDALKDHSSKSRGRVCAIGIAPWGIVENKEDLVGKDVXRVYQXMSNPLSKLSVLNNSHXHFILADNGXLGKYGAEVKLRRLLEKHISLQKINXRLGQGVPLVGLVVEGGPNVVSIVLEYLQEEPPIPVVICDGSGRASDILSFAHKYCEEGGIINESLREQLLVXIQKXFNYNKAQSHQLFAIIMECMKKKELVXVFRMGSEGQQDIEMAILXALLKGXNVSAPDQLSLALAWNRVDIARSQIFVFGPHWPPLGSLAPPXDSKAXEKEKKPPMAXXKGGRGKGKGKKKGKVKEEVEEEXDPRKIELLNWVNALEQAMLDALVLDRVDFVKLLIENGVNMQHFLXIPRLEELYNXRLGPPNXLHLLVRDVKKSNLPPDYHISLIDIGLVLEYLMGGAYRCNYXRKNFRXLYNNLFGPKRPKALKLLGMEDDEPPAKGKKKKKKKKEEEIDIDVDDPAVSRFQYPFHELMVWAVLMKRQKMAVFLWQRGEESMAKALVACKLYKAMAHESSESDLVDDISQDLDNNSKDFGQLALELLDQSYKHDEQIAMKLLXYELKNWSNSXCLKLAVAAKHRDFIAHXCSQMLLXDMWMGRLRMRKNPGLKVIMGILLPPXILFLEFRXYDDFSYQXSKENEDGKEKEEENXDANADAGSRKGDEENEHKKQRSIPIGXKICEFYNAPIVKFWFYXISYLGYLLLFNYVILVRMDGWPSLQEWIVISYIVSLALEKIREILMSEPGKLSQKIKVWLQEYWNIXDLVAISXFMIGAILRLQNQPYMGYGRVIYCVDIIFWYIRVLDIFGVNKYLGPYVMMIGKMMIDMLYFVVIMLVVLMSFGVARQAILHPEEKPSWKLARNIFYMPYWMIYGEVFADQIDLYAMEINPPCGENLYDEEGKRLPPCIPGAWLXPALMACYLLVANILLVNLLIAVFNNXFFEVKSISNQVWKFQRYQLIMXFHDRPVLPPPMIILSHIYIIIMRLSGRCRKKREGDQEERDRGLKLFLSDEELKRLHEFEEQCVQEHFREKEDEQQSSSDERIRVXSERVENMSMRLEEINEREXFMKXSLQXVDLRLAQLEELSNRMVNALENLAGIDRSDLIQARSRASSECEAXYLLRQSSINSADGYSLYRYHFNGEELLFEDXSLSXSPGXGVRKKXCSFRIKEEKDVKXHLVPECQNSLHLSLGXSXSAXPDGSHLAVDDLKNAEESKLGPDIGISKEDDERQXDSKKEEXISPSLNKXDVIHGQ

SEQ ID NO: 28651 - protein, 1603 aa, Homo sapiens
  MOD_RES (13)..(13): Selenocysteine
  MOD_RES (24)..(24): Selenocysteine
  MOD_RES (37)..(37): Selenocysteine
  MOD_RES (48)..(48): Selenocysteine
  MOD_RES (53)..(53): Selenocysteine
  MOD_RES (79)..(79): Selenocysteine
  MOD_RES (130)..(131): Selenocysteine
  MOD_RES (137)..(137): Selenocysteine
  MOD_RES (142)..(142): Selenocysteine
  MOD_RES (186)..(186): Selenocysteine
  MOD_RES (191)..(191): Selenocysteine
  MOD_RES (207)..(207): Selenocysteine
  MOD_RES (216)..(216): Selenocysteine
  MOD_RES (241)..(241): Selenocysteine
  MOD_RES (313)..(313): Selenocysteine
  MOD_RES (317)..(317): Selenocysteine
  MOD_RES (343)..(343): Selenocysteine
  MOD_RES (361)..(361): Selenocysteine
  MOD_RES (367)..(367): Selenocysteine
  MOD_RES (408)..(408): Selenocysteine
  MOD_RES (413)..(413): Selenocysteine
  MOD_RES (423)..(424): Selenocysteine
  MOD_RES (447)..(447): Selenocysteine
  MOD_RES (492)..(492): Selenocysteine
  MOD_RES (502)..(502): Selenocysteine
  MOD_RES (509)..(509): Selenocysteine
  MOD_RES (550)..(550): Selenocysteine
  MOD_RES (556)..(556): Selenocysteine
  MOD_RES (700)..(700): Selenocysteine
  MOD_RES (710)..(710): Selenocysteine
  MOD_RES (727)..(727): Selenocysteine
  MOD_RES (734)..(734): Selenocysteine
  MOD_RES (760)..(760): Selenocysteine
  MOD_RES (768)..(768): Selenocysteine
  MOD_RES (776)..(776): Selenocysteine
  MOD_RES (791)..(791): Selenocysteine
  MOD_RES (818)..(818): Selenocysteine
  MOD_RES (835)..(835): Selenocysteine
  MOD_RES (902)..(902): Selenocysteine
  MOD_RES (909)..(909): Selenocysteine
  MOD_RES (1052)..(1052): Selenocysteine
  MOD_RES (1078)..(1078): Selenocysteine
  MOD_RES (1100)..(1100): Selenocysteine
  MOD_RES (1185)..(1185): Selenocysteine
  MOD_RES (1204)..(1204): Selenocysteine
  MOD_RES (1208)..(1208): Selenocysteine
  MOD_RES (1212)..(1212): Selenocysteine
  MOD_RES (1256)..(1256): Selenocysteine
  MOD_RES (1287)..(1287): Selenocysteine
  MOD_RES (1291)..(1291): Selenocysteine
  MOD_RES (1295)..(1295): Selenocysteine
  MOD_RES (1301)..(1301): Selenocysteine
  MOD_RES (1314)..(1314): Selenocysteine
  MOD_RES (1330)..(1330): Selenocysteine
  MOD_RES (1332)..(1332): Selenocysteine
  MOD_RES (1335)..(1335): Selenocysteine
  MOD_RES (1369)..(1369): Selenocysteine
  MOD_RES (1376)..(1376): Selenocysteine
  MOD_RES (1384)..(1384): Selenocysteine
  MOD_RES (1398)..(1398): Selenocysteine
  MOD_RES (1401)..(1401): Selenocysteine
  MOD_RES (1404)..(1405): Selenocysteine
  MOD_RES (1410)..(1410): Selenocysteine
  MOD_RES (1418)..(1418): Selenocysteine
  MOD_RES (1421)..(1421): Selenocysteine
  MOD_RES (1428)..(1428): Selenocysteine
  MOD_RES (1434)..(1434): Selenocysteine
  MOD_RES (1462)..(1462): Selenocysteine
  MOD_RES (1467)..(1468): Selenocysteine
  MOD_RES (1478)..(1478): Selenocysteine
  MOD_RES (1483)..(1483): Selenocysteine
  MOD_RES (1524)..(1524): Selenocysteine
  MOD_RES (1526)..(1526): Selenocysteine
  MOD_RES (1542)..(1542): Selenocysteine
  MOD_RES (1586)..(1586): Selenocysteine
  MOD_RES (1599)..(1599): Selenocysteine
  MOD_RES (1601)..(1601): Selenocysteine
MKDSNRCCCGQFXNQHIPPLPSAXPSKNEEESKQVEXQPEKWSVAKHXQSYPXDSYGVLEFQGGGYSNKAMYIRVSYDXKPDSLLHLMVKDWQLELPKLLISVHGGLQNFEMQPKLKQVFGKGLIKAAMXXGAWIFXGGVSXGVISHVGDALKDHSSKSRGRVCAIGIAPWGIVENKEDLVGKDVXRVYQXMSNPLSKLSVLNNSHXHFILADNGXLGKYGAEVKLRRLLEKHISLQKINXRLGQGVPLVGLVVEGGPNVVSIVLEYLQEEPPIPVVICDGSGRASDILSFAHKYCEEGGIINESLREQLLVXIQKXFNYNKAQSHQLFAIIMECMKKKELVXVFRMGSEGQQDIEMAILXALLKGXNVSAPDQLSLALAWNRVDIARSQIFVFGPHWPPLGSLAPPXDSKAXEKEKKPPMAXXKGGRGKGKGKKKGKVKEEVEEEXDPRKIELLNWVNALEQAMLDALVLDRVDFVKLLIENGVNMQHFLXIPRLEELYNXRLGPPNXLHLLVRDVKKSNLPPDYHISLIDIGLVLEYLMGGAYRCNYXRKNFRXLYNNLFGPKRPKALKLLGMEDDEPPAKGKKKKKKKKEEEIDIDVDDPAVSRFQYPFHELMVWAVLMKRQKMAVFLWQRGEESMAKALVACKLYKAMAHESSESDLVDDISQDLDNNSKDFGQLALELLDQSYKHDEQIAMKLLXYELKNWSNSXCLKLAVAAKHRDFIAHXCSQMLLXDMWMGRLRMRKNPGLKVIMGILLPPXILFLEFRXYDDFSYQXSKENEDGKEKEEENXDANADAGSRKGDEENEHKKQRSIPIGXKICEFYNAPIVKFWFYXISYLGYLLLFNYVILVRMDGWPSLQEWIVISYIVSLALEKIREILMSEPGKLSQKIKVWLQEYWNIXDLVAISXFMIGAILRLQNQPYMGYGRVIYCVDIIFWYIRVLDIFGVNKYLGPYVMMIGKMMIDMLYFVVIMLVVLMSFGVARQAILHPEEKPSWKLARNIFYMPYWMIYGEVFADQIDLYAMEINPPCGENLYDEEGKRLPPCIPGAWLXPALMACYLLVANILLVNLLIAVFNNXFFEVKSISNQVWKFQRYQLIMXFHDRPVLPPPMIILSHIYIIIMRLSGRCRKKREGDQEERDRGLKLFLSDEELKRLHEFEEQCVQEHFREKEDEQQSSSDERIRVXSERVENMSMRLEEINEREXFMKXSLQXVDLRLAQLEELSNRMVNALENLAGIDRSDLIQARSRASSECEAXYLLRQSSINSADGYSLYRYHFNGEELLFEDXSLSXSPGXGVRKKXCSFRIKEEKDVKXHLVPECQNSLHLSLGXSXSAXPDGSHLAVDDLKNAEESKLGPDIGISKEDDERQXDSKKEEXISPSLNKXDVIHGQDKSDVQNXQLXVEXXNIEGXISYPLEEXKIXRYFPDEXINACKXMKSRSFVYSRGRKLVGGVNQDVEYSSIXDQQLXXEWQCQVQKIXRSHSXDIPYIVSEAAVQAEHKEQFADMQDEHHVAEAIPRIPRLSLXIXDRNGMENLLSVKPDQXLGFPSLRSKSLHGHPRNVKSIQGKLDRSGHASSVSSLVIVSGMXAEEKKVKKEKASXEXEC

SEQ ID NO: 28652 - protein, 1642 aa, Homo sapiens
  MOD_RES (13)..(13): Selenocysteine
  MOD_RES (27)..(27): Selenocysteine
  MOD_RES (52)..(52): Selenocysteine
  MOD_RES (63)..(63): Selenocysteine
  MOD_RES (76)..(76): Selenocysteine
  MOD_RES (87)..(87): Selenocysteine
  MOD_RES (92)..(92): Selenocysteine
  MOD_RES (118)..(118): Selenocysteine
  MOD_RES (169)..(170): Selenocysteine
  MOD_RES (176)..(176): Selenocysteine
  MOD_RES (181)..(181): Selenocysteine
  MOD_RES (225)..(225): Selenocysteine
  MOD_RES (230)..(230): Selenocysteine
  MOD_RES (246)..(246): Selenocysteine
  MOD_RES (255)..(255): Selenocysteine
  MOD_RES (280)..(280): Selenocysteine
  MOD_RES (352)..(352): Selenocysteine
  MOD_RES (356)..(356): Selenocysteine
  MOD_RES (382)..(382): Selenocysteine
  MOD_RES (400)..(400): Selenocysteine
  MOD_RES (406)..(406): Selenocysteine
  MOD_RES (447)..(447): Selenocysteine
  MOD_RES (452)..(452): Selenocysteine
  MOD_RES (462)..(463): Selenocysteine
  MOD_RES (486)..(486): Selenocysteine
  MOD_RES (531)..(531): Selenocysteine
  MOD_RES (541)..(541): Selenocysteine
  MOD_RES (548)..(548): Selenocysteine
  MOD_RES (589)..(589): Selenocysteine
  MOD_RES (595)..(595): Selenocysteine
  MOD_RES (739)..(739): Selenocysteine
  MOD_RES (749)..(749): Selenocysteine
  MOD_RES (766)..(766): Selenocysteine
  MOD_RES (773)..(773): Selenocysteine
  MOD_RES (799)..(799): Selenocysteine
  MOD_RES (807)..(807): Selenocysteine
  MOD_RES (815)..(815): Selenocysteine
  MOD_RES (830)..(830): Selenocysteine
  MOD_RES (857)..(857): Selenocysteine
  MOD_RES (874)..(874): Selenocysteine
  MOD_RES (941)..(941): Selenocysteine
  MOD_RES (948)..(948): Selenocysteine
  MOD_RES (1091)..(1091): Selenocysteine
  MOD_RES (1117)..(1117): Selenocysteine
  MOD_RES (1139)..(1139): Selenocysteine
  MOD_RES (1224)..(1224): Selenocysteine
  MOD_RES (1243)..(1243): Selenocysteine
  MOD_RES (1247)..(1247): Selenocysteine
  MOD_RES (1251)..(1251): Selenocysteine
  MOD_RES (1295)..(1295): Selenocysteine
  MOD_RES (1326)..(1326): Selenocysteine
  MOD_RES (1330)..(1330): Selenocysteine
  MOD_RES (1334)..(1334): Selenocysteine
  MOD_RES (1340)..(1340): Selenocysteine
  MOD_RES (1353)..(1353): Selenocysteine
  MOD_RES (1369)..(1369): Selenocysteine
  MOD_RES (1371)..(1371): Selenocysteine
  MOD_RES (1374)..(1374): Selenocysteine
  MOD_RES (1408)..(1408): Selenocysteine
  MOD_RES (1415)..(1415): Selenocysteine
  MOD_RES (1423)..(1423): Selenocysteine
  MOD_RES (1437)..(1437): Selenocysteine
  MOD_RES (1440)..(1440): Selenocysteine
  MOD_RES (1443)..(1444): Selenocysteine
  MOD_RES (1449)..(1449): Selenocysteine
  MOD_RES (1457)..(1457): Selenocysteine
  MOD_RES (1460)..(1460): Selenocysteine
  MOD_RES (1467)..(1467): Selenocysteine
  MOD_RES (1473)..(1473): Selenocysteine
  MOD_RES (1501)..(1501): Selenocysteine
  MOD_RES (1506)..(1507): Selenocysteine
  MOD_RES (1517)..(1517): Selenocysteine
  MOD_RES (1522)..(1522): Selenocysteine
  MOD_RES (1563)..(1563): Selenocysteine
  MOD_RES (1565)..(1565): Selenocysteine
  MOD_RES (1581)..(1581): Selenocysteine
  MOD_RES (1625)..(1625): Selenocysteine
  MOD_RES (1638)..(1638): Selenocysteine
  MOD_RES (1640)..(1640): Selenocysteine
MSSFKRGSLKSSXSGSQKGQKSWIEKXFCKRECIFVIPSMKDSNRCCCGQFXNQHIPPLPSAXPSKNEEESKQVEXQPEKWSVAKHXQSYPXDSYGVLEFQGGGYSNKAMYIRVSYDXKPDSLLHLMVKDWQLELPKLLISVHGGLQNFEMQPKLKQVFGKGLIKAAMXXGAWIFXGGVSXGVISHVGDALKDHSSKSRGRVCAIGIAPWGIVENKEDLVGKDVXRVYQXMSNPLSKLSVLNNSHXHFILADNGXLGKYGAEVKLRRLLEKHISLQKINXRLGQGVPLVGLVVEGGPNVVSIVLEYLQEEPPIPVVICDGSGRASDILSFAHKYCEEGGIINESLREQLLVXIQKXFNYNKAQSHQLFAIIMECMKKKELVXVFRMGSEGQQDIEMAILXALLKGXNVSAPDQLSLALAWNRVDIARSQIFVFGPHWPPLGSLAPPXDSKAXEKEKKPPMAXXKGGRGKGKGKKKGKVKEEVEEEXDPRKIELLNWVNALEQAMLDALVLDRVDFVKLLIENGVNMQHFLXIPRLEELYNXRLGPPNXLHLLVRDVKKSNLPPDYHISLIDIGLVLEYLMGGAYRCNYXRKNFRXLYNNLFGPKRPKALKLLGMEDDEPPAKGKKKKKKKKEEEIDIDVDDPAVSRFQYPFHELMVWAVLMKRQKMAVFLWQRGEESMAKALVACKLYKAMAHESSESDLVDDISQDLDNNSKDFGQLALELLDQSYKHDEQIAMKLLXYELKNWSNSXCLKLAVAAKHRDFIAHXCSQMLLXDMWMGRLRMRKNPGLKVIMGILLPPXILFLEFRXYDDFSYQXSKENEDGKEKEEENXDANADAGSRKGDEENEHKKQRSIPIGXKICEFYNAPIVKFWFYXISYLGYLLLFNYVILVRMDGWPSLQEWIVISYIVSLALEKIREILMSEPGKLSQKIKVWLQEYWNIXDLVAISXFMIGAILRLQNQPYMGYGRVIYCVDIIFWYIRVLDIFGVNKYLGPYVMMIGKMMIDMLYFVVIMLVVLMSFGVARQAILHPEEKPSWKLARNIFYMPYWMIYGEVFADQIDLYAMEINPPCGENLYDEEGKRLPPCIPGAWLXPALMACYLLVANILLVNLLIAVFNNXFFEVKSISNQVWKFQRYQLIMXFHDRPVLPPPMIILSHIYIIIMRLSGRCRKKREGDQEERDRGLKLFLSDEELKRLHEFEEQCVQEHFREKEDEQQSSSDERIRVXSERVENMSMRLEEINEREXFMKXSLQXVDLRLAQLEELSNRMVNALENLAGIDRSDLIQARSRASSECEAXYLLRQSSINSADGYSLYRYHFNGEELLFEDXSLSXSPGXGVRKKXCSFRIKEEKDVKXHLVPECQNSLHLSLGXSXSAXPDGSHLAVDDLKNAEESKLGPDIGISKEDDERQXDSKKEEXISPSLNKXDVIHGQDKSDVQNXQLXVEXXNIEGXISYPLEEXKIXRYFPDEXINACKXMKSRSFVYSRGRKLVGGVNQDVEYSSIXDQQLXXEWQCQVQKIXRSHSXDIPYIVSEAAVQAEHKEQFADMQDEHHVAEAIPRIPRLSLXIXDRNGMENLLSVKPDQXLGFPSLRSKSLHGHPRNVKSIQGKLDRSGHASSVSSLVIVSGMXAEEKKVKKEKASXEXEC

SEQ ID NO: 28653 - protein, 1642 aa, Homo sapiens
  MOD_RES (13)..(13): Selenocysteine
  MOD_RES (27)..(27): Selenocysteine
  MOD_RES (40)..(40): Selenocysteine
  MOD_RES (52)..(52): Selenocysteine
  MOD_RES (63)..(63): Selenocysteine
  MOD_RES (76)..(76): Selenocysteine
  MOD_RES (87)..(87): Selenocysteine
  MOD_RES (92)..(92): Selenocysteine
  MOD_RES (118)..(118): Selenocysteine
  MOD_RES (169)..(170): Selenocysteine
  MOD_RES (176)..(176): Selenocysteine
  MOD_RES (181)..(181): Selenocysteine
  MOD_RES (225)..(225): Selenocysteine
  MOD_RES (230)..(230): Selenocysteine
  MOD_RES (246)..(246): Selenocysteine
  MOD_RES (255)..(255): Selenocysteine
  MOD_RES (280)..(280): Selenocysteine
  MOD_RES (352)..(352): Selenocysteine
  MOD_RES (356)..(356): Selenocysteine
  MOD_RES (382)..(382): Selenocysteine
  MOD_RES (400)..(400): Selenocysteine
  MOD_RES (406)..(406): Selenocysteine
  MOD_RES (447)..(447): Selenocysteine
  MOD_RES (452)..(452): Selenocysteine
  MOD_RES (462)..(463): Selenocysteine
  MOD_RES (486)..(486): Selenocysteine
  MOD_RES (531)..(531): Selenocysteine
  MOD_RES (541)..(541): Selenocysteine
  MOD_RES (548)..(548): Selenocysteine
  MOD_RES (589)..(589): Selenocysteine
  MOD_RES (595)..(595): Selenocysteine
  MOD_RES (739)..(739): Selenocysteine
  MOD_RES (749)..(749): Selenocysteine
  MOD_RES (766)..(766): Selenocysteine
  MOD_RES (773)..(773): Selenocysteine
  MOD_RES (799)..(799): Selenocysteine
  MOD_RES (807)..(807): Selenocysteine
  MOD_RES (815)..(815): Selenocysteine
  MOD_RES (830)..(830): Selenocysteine
  MOD_RES (857)..(857): Selenocysteine
  MOD_RES (874)..(874): Selenocysteine
  MOD_RES (941)..(941): Selenocysteine
  MOD_RES (948)..(948): Selenocysteine
  MOD_RES (1091)..(1091): Selenocysteine
  MOD_RES (1117)..(1117): Selenocysteine
  MOD_RES (1139)..(1139): Selenocysteine
  MOD_RES (1224)..(1224): Selenocysteine
  MOD_RES (1243)..(1243): Selenocysteine
  MOD_RES (1247)..(1247): Selenocysteine
  MOD_RES (1251)..(1251): Selenocysteine
  MOD_RES (1295)..(1295): Selenocysteine
  MOD_RES (1326)..(1326): Selenocysteine
  MOD_RES (1330)..(1330): Selenocysteine
  MOD_RES (1334)..(1334): Selenocysteine
  MOD_RES (1340)..(1340): Selenocysteine
  MOD_RES (1353)..(1353): Selenocysteine
  MOD_RES (1369)..(1369): Selenocysteine
  MOD_RES (1371)..(1371): Selenocysteine
  MOD_RES (1374)..(1374): Selenocysteine
  MOD_RES (1408)..(1408): Selenocysteine
  MOD_RES (1415)..(1415): Selenocysteine
  MOD_RES (1423)..(1423): Selenocysteine
  MOD_RES (1437)..(1437): Selenocysteine
  MOD_RES (1440)..(1440): Selenocysteine
  MOD_RES (1443)..(1444): Selenocysteine
  MOD_RES (1449)..(1449): Selenocysteine
  MOD_RES (1457)..(1457): Selenocysteine
  MOD_RES (1460)..(1460): Selenocysteine
  MOD_RES (1467)..(1467): Selenocysteine
  MOD_RES (1473)..(1473): Selenocysteine
  MOD_RES (1501)..(1501): Selenocysteine
  MOD_RES (1506)..(1507): Selenocysteine
  MOD_RES (1517)..(1517): Selenocysteine
  MOD_RES (1522)..(1522): Selenocysteine
  MOD_RES (1563)..(1563): Selenocysteine
  MOD_RES (1565)..(1565): Selenocysteine
  MOD_RES (1581)..(1581): Selenocysteine
  MOD_RES (1625)..(1625): Selenocysteine
  MOD_RES (1638)..(1638): Selenocysteine
  MOD_RES (1640)..(1640): Selenocysteine
MSSFKRGSLKSSXSGSQKGQKSWIEKXFCKRECIFVIPSXKDSNRCCCGQFXNQHIPPLPSAXPSKNEEENKQVEXQPEKWSVAKHXQSYPXDSYGVLEFQGGGYSNKAMYIRVSYDXKPDSLLHLMVKDWQLELPKLLISVHGGLQNFEMQPKLKQVFGKGLIKAAMXXGAWIFXGGVSXGVISHVGDALKDHSSKSRGRVCAIGIAPWGIVENKEDLVGKDVXRVYQXMSNPLSKLSVLNNSHXHFILADNGXLGKYGAEVKLRRLLEKHISLQKINXRLGQGVPLVGLVVEGGPNVVSIVLEYLQEEPPIPVVICDGSGRASDILSFAHKYCEEGGIINESLREQLLVXIQKXFNYNKAQSHQLFAIIMECMKKKELVXVFRMGSEGQQDIEMAILXALLKGXNVSAPDQLSLALAWNRVDIARSQIFVFGPHWPPLGSLAPPXDSKAXEKEKKPPMAXXKGGRGKGKGKKKGKVKEEVEEEXDPRKIELLNWVNALEQAMLDALVLDRVDFVKLLIENGVNMQHFLXIPRLEELYNXRLGPPNXLHLLVRDVKKSNLPPDYHISLIDIGLVLEYLMGGAYRCNYXRKNFRXLYNNLFGPKRPKALKLLGMEDDEPPAKGKKKKKKKKEEEIDIDVDDPAVSRFQYPFHELMVWAVLMKRQKMAVFLWQRGEESMAKALVACKLYKAMAHESSESDLVDDISQDLDNNSKDFGQLALELLDQSYKHDEQIAMKLLXYELKNWSNSXCLKLAVAAKHRDFIAHXCSQMLLXDMWMGRLRMRKNPGLKVIMGILLPPXILFLEFRXYDDFSYQXSKENEDGKEKEEENXDANADAGSRKGDEENEHKKQRSIPIGXKICEFYNAPIVKFWFYXISYLGYLLLFNYVILVRMDGWPSLQEWIVISYIVSLALEKIREILMSEPGKLSQKIKVWLQEYWNIXDLVAISXFMIGAILRLQNQPYMGYGRVIYCVDIIFWYIRVLDIFGVNKYLGPYVMMIGKMMIDMLYFVVIMLVVLMSFGVARQAILHPEEKPSWKLARNIFYMPYWMIYGEVFADQIDLYAMEINPPCGENLYDEEGKRLPPCIPGAWLXPALMACYLLVANILLVNLLIAVFNNXFFEVKSISNQVWKFQRYQLIMXFHDRPVLPPPMIILSHIYIIIMRLSGRCRKKREGDQEERDRGLKLFLSDEELKRLHEFEEQCVQEHFREKEDEQQSSSDERIRVXSERVENMSMRLEEINEREXFMKXSLQXVDLRLAQLEELSNRMVNALENLAGIDRSDLIQARSRASSECEAXYLLRQSSINSADGYSLYRYHFNGEELLFEDXSLSXSPGXGVRKKXCSFRIKEEKDVKXHLVPECQNSLHLSLGXSXSAXPDGSHLAVDDLKNAEESKLGPDIGISKEDDERQXDSKKEEXISPSLNKXDVIHGQDKSDVQNXQLXVEXXNIEGXISYPLEEXKIXRYFPDEXINACKXMKSRSFVYSRGRKLVGGVNQDVEYSSIXDQQLXXEWQCQVQKIXRSHSXDIPYIVSEAAVQAEHKEQFADMQDEHHVAEAIPRIPRLSLXIXDRNGMENLLSVKPDQXLGFPSLRSKSLHGHPRNVKSIQGKLDRSGHASSVSSLVIVSGMXAEEKKVKKEKASXEXEC

SEQ ID NO: 28654 - protein, 1603 aa, Homo sapiens
  MOD_RES (1)..(1): Selenocysteine
  MOD_RES (13)..(13): Selenocysteine
  MOD_RES (24)..(24): Selenocysteine
  MOD_RES (37)..(37): Selenocysteine
  MOD_RES (48)..(48): Selenocysteine
  MOD_RES (53)..(53): Selenocysteine
  MOD_RES (79)..(79): Selenocysteine
  MOD_RES (130)..(131): Selenocysteine
  MOD_RES (137)..(137): Selenocysteine
  MOD_RES (142)..(142): Selenocysteine
  MOD_RES (186)..(186): Selenocysteine
  MOD_RES (191)..(191): Selenocysteine
  MOD_RES (207)..(207): Selenocysteine
  MOD_RES (216)..(216): Selenocysteine
  MOD_RES (241)..(241): Selenocysteine
  MOD_RES (313)..(313): Selenocysteine
  MOD_RES (317)..(317): Selenocysteine
  MOD_RES (343)..(343): Selenocysteine
  MOD_RES (361)..(361): Selenocysteine
  MOD_RES (367)..(367): Selenocysteine
  MOD_RES (408)..(408): Selenocysteine
  MOD_RES (413)..(413): Selenocysteine
  MOD_RES (423)..(424): Selenocysteine
  MOD_RES (447)..(447): Selenocysteine
  MOD_RES (492)..(492): Selenocysteine
  MOD_RES (502)..(502): Selenocysteine
  MOD_RES (509)..(509): Selenocysteine
  MOD_RES (550)..(550): Selenocysteine
  MOD_RES (556)..(556): Selenocysteine
  MOD_RES (700)..(700): Selenocysteine
  MOD_RES (710)..(710): Selenocysteine
  MOD_RES (727)..(727): Selenocysteine
  MOD_RES (734)..(734): Selenocysteine
  MOD_RES (760)..(760): Selenocysteine
  MOD_RES (768)..(768): Selenocysteine
  MOD_RES (776)..(776): Selenocysteine
  MOD_RES (791)..(791): Selenocysteine
  MOD_RES (818)..(818): Selenocysteine
  MOD_RES (835)..(835): Selenocysteine
  MOD_RES (902)..(902): Selenocysteine
  MOD_RES (909)..(909): Selenocysteine
  MOD_RES (1052)..(1052): Selenocysteine
  MOD_RES (1078)..(1078): Selenocysteine
  MOD_RES (1100)..(1100): Selenocysteine
  MOD_RES (1185)..(1185): Selenocysteine
  MOD_RES (1204)..(1204): Selenocysteine
  MOD_RES (1208)..(1208): Selenocysteine
  MOD_RES (1212)..(1212): Selenocysteine
  MOD_RES (1256)..(1256): Selenocysteine
  MOD_RES (1287)..(1287): Selenocysteine
  MOD_RES (1291)..(1291): Selenocysteine
  MOD_RES (1295)..(1295): Selenocysteine
  MOD_RES (1301)..(1301): Selenocysteine
  MOD_RES (1314)..(1314): Selenocysteine
  MOD_RES (1330)..(1330): Selenocysteine
  MOD_RES (1332)..(1332): Selenocysteine
  MOD_RES (1335)..(1335): Selenocysteine
  MOD_RES (1369)..(1369): Selenocysteine
  MOD_RES (1376)..(1376): Selenocysteine
  MOD_RES (1384)..(1384): Selenocysteine
  MOD_RES (1398)..(1398): Selenocysteine
  MOD_RES (1401)..(1401): Selenocysteine
  MOD_RES (1404)..(1405): Selenocysteine
  MOD_RES (1410)..(1410): Selenocysteine
  MOD_RES (1418)..(1418): Selenocysteine
  MOD_RES (1421)..(1421): Selenocysteine
  MOD_RES (1428)..(1428): Selenocysteine
  MOD_RES (1434)..(1434): Selenocysteine
  MOD_RES (1462)..(1462): Selenocysteine
  MOD_RES (1467)..(1468): Selenocysteine
  MOD_RES (1478)..(1478): Selenocysteine
  MOD_RES (1483)..(1483): Selenocysteine
  MOD_RES (1524)..(1524): Selenocysteine
  MOD_RES (1526)..(1526): Selenocysteine
  MOD_RES (1542)..(1542): Selenocysteine
  MOD_RES (1586)..(1586): Selenocysteine
  MOD_RES (1599)..(1599): Selenocysteine
  MOD_RES (1601)..(1601): Selenocysteine
XKDSNRCCCGQFXNQHIPPLPSAXPSKNEEENKQVEXQPEKWSVAKHXQSYPXDSYGVLEFQGGGYSNKAMYIRVSYDXKPDSLLHLMVKDWQLELPKLLISVHGGLQNFEMQPKLKQVFGKGLIKAAMXXGAWIFXGGVSXGVISHVGDALKDHSSKSRGRVCAIGIAPWGIVENKEDLVGKDVXRVYQXMSNPLSKLSVLNNSHXHFILADNGXLGKYGAEVKLRRLLEKHISLQKINXRLGQGVPLVGLVVEGGPNVVSIVLEYLQEEPPIPVVICDGSGRASDILSFAHKYCEEGGIINESLREQLLVXIQKXFNYNKAQSHQLFAIIMECMKKKELVXVFRMGSEGQQDIEMAILXALLKGXNVSAPDQLSLALAWNRVDIARSQIFVFGPHWPPLGSLAPPXDSKAXEKEKKPPMAXXKGGRGKGKGKKKGKVKEEVEEEXDPRKIELLNWVNALEQAMLDALVLDRVDFVKLLIENGVNMQHFLXIPRLEELYNXRLGPPNXLHLLVRDVKKSNLPPDYHISLIDIGLVLEYLMGGAYRCNYXRKNFRXLYNNLFGPKRPKALKLLGMEDDEPPAKGKKKKKKKKEEEIDIDVDDPAVSRFQYPFHELMVWAVLMKRQKMAVFLWQRGEESMAKALVACKLYKAMAHESSESDLVDDISQDLDNNSKDFGQLALELLDQSYKHDEQIAMKLLXYELKNWSNSXCLKLAVAAKHRDFIAHXCSQMLLXDMWMGRLRMRKNPGLKVIMGILLPPXILFLEFRXYDDFSYQXSKENEDGKEKEEENXDANADAGSRKGDEENEHKKQRSIPIGXKICEFYNAPIVKFWFYXISYLGYLLLFNYVILVRMDGWPSLQEWIVISYIVSLALEKIREILMSEPGKLSQKIKVWLQEYWNIXDLVAISXFMIGAILRLQNQPYMGYGRVIYCVDIIFWYIRVLDIFGVNKYLGPYVMMIGKMMIDMLYFVVIMLVVLMSFGVARQAILHPEEKPSWKLARNIFYMPYWMIYGEVFADQIDLYAMEINPPCGENLYDEEGKRLPPCIPGAWLXPALMACYLLVANILLVNLLIAVFNNXFFEVKSISNQVWKFQRYQLIMXFHDRPVLPPPMIILSHIYIIIMRLSGRCRKKREGDQEERDRGLKLFLSDEELKRLHEFEEQCVQEHFREKEDEQQSSSDERIRVXSERVENMSMRLEEINEREXFMKXSLQXVDLRLAQLEELSNRMVNALENLAGIDRSDLIQARSRASSECEAXYLLRQSSINSADGYSLYRYHFNGEELLFEDXSLSXSPGXGVRKKXCSFRIKEEKDVKXHLVPECQNSLHLSLGXSXSAXPDGSHLAVDDLKNAEESKLGPDIGISKEDDERQXDSKKEEXISPSLNKXDVIHGQDKSDVQNXQLXVEXXNIEGXISYPLEEXKIXRYFPDEXINACKXMKSRSFVYSRGRKLVGGVNQDVEYSSIXDQQLXXEWQCQVQKIXRSHSXDIPYIVSEAAVQAEHKEQFADMQDEHHVAEAIPRIPRLSLXIXDRNGMENLLSVKPDQXLGFPSLRSKSLHGHPRNVKSIQGKLDRSGHASSVSSLVIVSGMXAEEKKVKKEKASXEXEC

SEQ ID NO: 28655 - protein, 1526 aa, Homo sapiens
  MOD_RES (8)..(8): Selenocysteine
  MOD_RES (59)..(60): Selenocysteine
  MOD_RES (66)..(66): Selenocysteine
  MOD_RES (71)..(71): Selenocysteine
  MOD_RES (115)..(115): Selenocysteine
  MOD_RES (120)..(120): Selenocysteine
  MOD_RES (136)..(136): Selenocysteine
  MOD_RES (145)..(145): Selenocysteine
  MOD_RES (170)..(170): Selenocysteine
  MOD_RES (236)..(236): Selenocysteine
  MOD_RES (240)..(240): Selenocysteine
  MOD_RES (266)..(266): Selenocysteine
  MOD_RES (284)..(284): Selenocysteine
  MOD_RES (290)..(290): Selenocysteine
  MOD_RES (331)..(331): Selenocysteine
  MOD_RES (336)..(336): Selenocysteine
  MOD_RES (346)..(347): Selenocysteine
  MOD_RES (370)..(370): Selenocysteine
  MOD_RES (415)..(415): Selenocysteine
  MOD_RES (425)..(425): Selenocysteine
  MOD_RES (432)..(432): Selenocysteine
  MOD_RES (473)..(473): Selenocysteine
  MOD_RES (479)..(479): Selenocysteine
  MOD_RES (623)..(623): Selenocysteine
  MOD_RES (633)..(633): Selenocysteine
  MOD_RES (650)..(650): Selenocysteine
  MOD_RES (657)..(657): Selenocysteine
  MOD_RES (683)..(683): Selenocysteine
  MOD_RES (691)..(691): Selenocysteine
  MOD_RES (699)..(699): Selenocysteine
  MOD_RES (714)..(714): Selenocysteine
  MOD_RES (741)..(741): Selenocysteine
  MOD_RES (758)..(758): Selenocysteine
  MOD_RES (825)..(825): Selenocysteine
  MOD_RES (832)..(832): Selenocysteine
  MOD_RES (975)..(975): Selenocysteine
  MOD_RES (1001)..(1001): Selenocysteine
  MOD_RES (1023)..(1023): Selenocysteine
  MOD_RES (1108)..(1108): Selenocysteine
  MOD_RES (1127)..(1127): Selenocysteine
  MOD_RES (1131)..(1131): Selenocysteine
  MOD_RES (1135)..(1135): Selenocysteine
  MOD_RES (1179)..(1179): Selenocysteine
  MOD_RES (1210)..(1210): Selenocysteine
  MOD_RES (1214)..(1214): Selenocysteine
  MOD_RES (1218)..(1218): Selenocysteine
  MOD_RES (1224)..(1224): Selenocysteine
  MOD_RES (1237)..(1237): Selenocysteine
  MOD_RES (1253)..(1253): Selenocysteine
  MOD_RES (1255)..(1255): Selenocysteine
  MOD_RES (1258)..(1258): Selenocysteine
  MOD_RES (1292)..(1292): Selenocysteine
  MOD_RES (1299)..(1299): Selenocysteine
  MOD_RES (1307)..(1307): Selenocysteine
  MOD_RES (1321)..(1321): Selenocysteine
  MOD_RES (1324)..(1324): Selenocysteine
  MOD_RES (1327)..(1328): Selenocysteine
  MOD_RES (1333)..(1333): Selenocysteine
  MOD_RES (1341)..(1341): Selenocysteine
  MOD_RES (1344)..(1344): Selenocysteine
  MOD_RES (1351)..(1351): Selenocysteine
  MOD_RES (1357)..(1357): Selenocysteine
  MOD_RES (1385)..(1385): Selenocysteine
  MOD_RES (1390)..(1391): Selenocysteine
  MOD_RES (1401)..(1401): Selenocysteine
  MOD_RES (1406)..(1406): Selenocysteine
  MOD_RES (1447)..(1447): Selenocysteine
  MOD_RES (1449)..(1449): Selenocysteine
  MOD_RES (1465)..(1465): Selenocysteine
  MOD_RES (1509)..(1509): Selenocysteine
  MOD_RES (1522)..(1522): Selenocysteine
  MOD_RES (1524)..(1524): Selenocysteine
YIRVSYDXKPDSLLHLMVKDWQLELPKLLISVHGGLQNFEMQPKLKQVFGKGLIKAAMXXGAWIFXGGVSXGVISHVGDALKDHSSKSRGRVCAIGIAPWGIVENKEDLVGKDVXRVYQXMSNPLSKLSVLNNSHXHFILADNGXLGKYGAEVKLRRLLEKHISLQKINXRLGQGVPLVGLVVEGGPNVVSIVLEYLQEEPPIPVVICDGSGRASDILSFAHKIINESLREQLLVXIQKXFNYNKAQSHQLFAIIMECMKKKELVXVFRMGSEGQQDIEMAILXALLKGXNVSAPDQLSLALAWNRVDIARSQIFVFGPHWPPLGSLAPPXDSKAXEKEKKPPMAXXKGGRGKGKGKKKGKVKEEVEEEXDPRKIELLNWVNALEQAMLDALVLDRVDFVKLLIENGVNMQHFLXIPRLEELYNXRLGPPNXLHLLVRDVKKSNLPPDYHISLIDIGLVLEYLMGGAYRCNYXRKNFRXLYNNLFGPKRPKALKLLGMEDDEPPAKGKKKKKKKKEEEIDIDVDDPAVSRFQYPFHELMVWAVLMKRQKMAVFLWQRGEESMAKALVACKLYKAMAHESSESDLVDDISQDLDNNSKDFGQLALELLDQSYKHDEQIAMKLLXYELKNWSNSXCLKLAVAAKHRDFIAHXCSQMLLXDMWMGRLRMRKNPGLKVIMGILLPPXILFLEFRXYDDFSYQXSKENEDGKEKEEENXDANADAGSRKGDEENEHKKQRSIPIGXKICEFYNAPIVKFWFYXISYLGYLLLFNYVILVRMDGWPSLQEWIVISYIVSLALEKIREILMSEPGKLSQKIKVWLQEYWNIXDLVAISXFMIGAILRLQNQPYMGYGRVIYCVDIIFWYIRVLDIFGVNKYLGPYVMMIGKMMIDMLYFVVIMLVVLMSFGVARQAILHPEEKPSWKLARNIFYMPYWMIYGEVFADQIDLYAMEINPPCGENLYDEEGKRLPPCIPGAWLXPALMACYLLVANILLVNLLIAVFNNXFFEVKSISNQVWKFQRYQLIMXFHDRPVLPPPMIILSHIYIIIMRLSGRCRKKREGDQEERDRGLKLFLSDEELKRLHEFEEQCVQEHFREKEDEQQSSSDERIRVXSERVENMSMRLEEINEREXFMKXSLQXVDLRLAQLEELSNRMVNALENLAGIDRSDLIQARSRASSECEAXYLLRQSSINSADGYSLYRYHFNGEELLFEDXSLSXSPGXGVRKKXCSFRIKEEKDVKXHLVPECQNSLHLSLGXSXSAXPDGSHLAVDDLKNAEESKLGPDIGISKEDDERQXDSKKEEXISPSLNKXDVIHGQDKSDVQNXQLXVEXXNIEGXISYPLEEXKIXRYFPDEXINACKXMKSRSFVYSRGRKLVGGVNQDVEYSSIXDQQLXXEWQCQVQKIXRSHSXDIPYIVSEAAVQAEHKEQFADMQDEHHVAEAIPRIPRLSLXIXDRNGMENLLSVKPDQXLGFPSLRSKSLHGHPRNVKSIQGKLDRSGHASSVSSLVIVSGMXAEEKKVKKEKASXEXEC

SEQ ID NO: 28656 - protein, 229 aa, Homo sapiens
  MOD_RES (8)..(8): Selenocysteine
  MOD_RES (59)..(60): Selenocysteine
  MOD_RES (66)..(66): Selenocysteine
  MOD_RES (71)..(71): Selenocysteine
  MOD_RES (115)..(115): Selenocysteine
  MOD_RES (120)..(120): Selenocysteine
  MOD_RES (136)..(136): Selenocysteine
  MOD_RES (145)..(145): Selenocysteine
  MOD_RES (170)..(170): Selenocysteine
YIRVSYDXKPDSLLHLMVKDWQLELPKLLISVHGGLQNFEMQPKLKQVFGKGLIKAAMXXGAWIFXGGVSXGVISHVGDALKDHSSKSRGRVCAIGIAPWGIVENKEDLVGKDVXRVYQXMSNPLSKLSVLNNSHXHFILADNGXLGKYGAEVKLRRLLEKHISLQKINXRLGQGVPLVGLVVEGGPNVVSIVLEYLQEEPPIPVVICDGSGRASDILSFAHKYCEEGG

SEQ ID NO: 28657 - protein, 144 aa, Homo sapiens
  MOD_RES (25)..(25): Selenocysteine
  MOD_RES (94)..(94): Selenocysteine
  MOD_RES (103)..(103): Selenocysteine
  MOD_RES (107)..(107): Selenocysteine
  MOD_RES (111)..(111): Selenocysteine
  MOD_RES (124)..(124): Selenocysteine
  MOD_RES (133)..(133): Selenocysteine
MEPSALRKAGSEQEEGFEGLPRRVXDLGMVSNLRRSNSSLFKSWRLQCPFGNNDKQESLSSWIPENIKKKECVYFVESSKLSDAGKVVCQCGYXHEQHLEEAXKPHXFQGXQWDPKKHVQEMPXDAFGDIVFXGLSQKVKKYVR

SEQ ID NO: 28658 - protein, 1449 aa, Homo sapiens
  MOD_RES (25)..(25): Selenocysteine
  MOD_RES (94)..(94): Selenocysteine
  MOD_RES (103)..(103): Selenocysteine
  MOD_RES (107)..(107): Selenocysteine
  MOD_RES (111)..(111): Selenocysteine
  MOD_RES (124)..(124): Selenocysteine
  MOD_RES (133)..(133): Selenocysteine
  MOD_RES (149)..(149): Selenocysteine
  MOD_RES (159)..(159): Selenocysteine
  MOD_RES (174)..(174): Selenocysteine
  MOD_RES (200)..(201): Selenocysteine
  MOD_RES (207)..(207): Selenocysteine
  MOD_RES (212)..(212): Selenocysteine
  MOD_RES (238)..(238): Selenocysteine
  MOD_RES (243)..(243): Selenocysteine
  MOD_RES (246)..(246): Selenocysteine
  MOD_RES (257)..(257): Selenocysteine
  MOD_RES (275)..(275): Selenocysteine
  MOD_RES (291)..(291): Selenocysteine
  MOD_RES (303)..(303): Selenocysteine
  MOD_RES (313)..(313): Selenocysteine
  MOD_RES (336)..(336): Selenocysteine
  MOD_RES (339)..(339): Selenocysteine
  MOD_RES (344)..(345): Selenocysteine
  MOD_RES (348)..(348): Selenocysteine
  MOD_RES (375)..(375): Selenocysteine
  MOD_RES (393)..(393): Selenocysteine
  MOD_RES (395)..(395): Selenocysteine
  MOD_RES (403)..(403): Selenocysteine
  MOD_RES (417)..(417): Selenocysteine
  MOD_RES (487)..(487): Selenocysteine
  MOD_RES (489)..(489): Selenocysteine
  MOD_RES (515)..(515): Selenocysteine
  MOD_RES (518)..(518): Selenocysteine
  MOD_RES (553)..(553): Selenocysteine
  MOD_RES (596)..(596): Selenocysteine
  MOD_RES (598)..(598): Selenocysteine
  MOD_RES (649)..(649): Selenocysteine
  MOD_RES (671)..(671): Selenocysteine
  MOD_RES (686)..(686): Selenocysteine
  MOD_RES (695)..(696): Selenocysteine
  MOD_RES (720)..(720): Selenocysteine
  MOD_RES (737)..(737): Selenocysteine
  MOD_RES (748)..(748): Selenocysteine
  MOD_RES (763)..(763): Selenocysteine
  MOD_RES (773)..(773): Selenocysteine
  MOD_RES (864)..(864): Selenocysteine
  MOD_RES (871)..(871): Selenocysteine
  MOD_RES (895)..(895): Selenocysteine
  MOD_RES (899)..(899): Selenocysteine
  MOD_RES (957)..(957): Selenocysteine
  MOD_RES (981)..(981): Selenocysteine
  MOD_RES (994)..(994): Selenocysteine
  MOD_RES (1005)..(1005): Selenocysteine
  MOD_RES (1016)..(1016): Selenocysteine
  MOD_RES (1031)..(1031): Selenocysteine
  MOD_RES (1039)..(1039): Selenocysteine
  MOD_RES (1081)..(1081): Selenocysteine
  MOD_RES (1167)..(1167): Selenocysteine
  MOD_RES (1177)..(1177): Selenocysteine
  MOD_RES (1191)..(1191): Selenocysteine
  MOD_RES (1211)..(1211): Selenocysteine
  MOD_RES (1233)..(1233): Selenocysteine
  MOD_RES (1246)..(1246): Selenocysteine
  MOD_RES (1257)..(1257): Selenocysteine
  MOD_RES (1277)..(1277): Selenocysteine
  MOD_RES (1293)..(1293): Selenocysteine
  MOD_RES (1299)..(1299): Selenocysteine
  MOD_RES (1381)..(1381): Selenocysteine
  MOD_RES (1388)..(1388): Selenocysteine
  MOD_RES (1436)..(1436): Selenocysteine
MEPSALRKAGSEQEEGFEGLPRRVXDLGMVSNLRRSNSSLFKSWRLQCPFGNNDKQESLSSWIPENIKKKECVYFVESSKLSDAGKVVCQCGYXHEQHLEEAXKPHXFQGXQWDPKKHVQEMPXDAFGDIVFXGLSQKVKKYVRVSQDXPSSVIYHLMXQHWGLDVPNLLISVXGGAKNFNMKPRLKSIFRRGLVKVAQXXGAWIIXGGSHXGVMKQVGEAVRDFSLSSSYKEGELIXIGVAXWGXVHRREGLIHPXGSFPAEYILDEDGQGNLXCLDSNHSHFILVDDGXHGQYGVEIPLRXRLEKFISEQXKERGGVAIKIPIVCVVLEGGPGXLHXIDNAXXNGXPCVVVEGSGRVADVIAQVANLPVSDIXISLIQQKLSVFFQEMFEXFXESRIVEWXKKIQDIVRRRQLLXVFREGKDGQQDVDVAILQALLKASRSQDHFGHENWDHQLKLAVAWNRVDIARSEIFMDEWQWKPSDLHPXMXAALISNKPEFVKLFLENGVQLKEFVXWDXLLYLYENLDPSCLFHSKLQMHHVAQVLRELLGDFXQPLYPRPRHNDRLRLLLPVPHVKLNVQGVSLRSLYKRSSGHVXFXMDPIRDLLIWAIVQNRRELAGIIWAQSQDCIAAALACSKILKELSKEEEDXDSSEEMLALAEEYEHRAIGVFXECYRKDEERAQKLLXRVSEAWGKXXCLQLALEAKDMKFVSHGGIQAFLXKVWWGQLSVDNGLWRVXLCMLAFPLLLXGLISFREKRLQDVGXPAARARAFFXAPVVVFHLNILSYFAFLCLFAYVLMVDFQPVPSWCECAIYLWLFSLVCEEMRQLFYDPDECGLMKKAALYFSDFWNKLDVGAILLFVAGLXCRLIPAXLYPGRVILSLDFILFCLRLMHIFXISKXLGPKIIIVKRMMKDVFFFLFLLAVWVVSFGVAKQAILIHNERRVDWLFRGAVYHSYLXIFGQIPGYIDGVNFNPEHCSPNGXDPYKPKCPESDAXQQRPAFPEWLXVLLLCLYLLFXNILLLNLLIAMFNYXFQQVQEHXDQIWKFQRHDLIEEYHGRPAAPPPFILLSHLQLFIKRVVLKXPAKRHKQLKNKLEKNEEAALLSWEIYLKENYLQNRQFQQKQRPEQKIEDISNKVDAMVDLLDLDPLKRSGSMEQRLASLEEQVAQXAQALHWIVRXLRASGFSSEADVPXLASQKAAEEPDAEPGGRKKXEEPGDSYHVNARHLLYPNCPVXRFPVPNEKVPWEXEFLIYDPPFYXAERKDAAAMDPMGENPMGRXGLRGRGSLSCFGPNHXLYPMVXRWRRNEDGAICRKSIKKMLEVLVVKLPLSEHWALPGGSREPGEMLPRKLKRILRQEHWPSFENLLKCGMEVYKGYMDDPRNXDNAWIEXVAVSVHFQDQNDVELNRLNSNLHACDSGASIRWQVVDRRIPLYANHKXLLQKAAAEFGAHY

SEQ ID NO: 28659 - protein, 1503 aa, Homo sapiens
  MOD_RES (25)..(25): Selenocysteine
  MOD_RES (94)..(94): Selenocysteine
  MOD_RES (103)..(103): Selenocysteine
  MOD_RES (107)..(107): Selenocysteine
  MOD_RES (111)..(111): Selenocysteine
  MOD_RES (124)..(124): Selenocysteine
  MOD_RES (133)..(133): Selenocysteine
  MOD_RES (149)..(149): Selenocysteine
  MOD_RES (159)..(159): Selenocysteine
  MOD_RES (174)..(174): Selenocysteine
  MOD_RES (200)..(201): Selenocysteine
  MOD_RES (207)..(207): Selenocysteine
  MOD_RES (212)..(212): Selenocysteine
  MOD_RES (238)..(238): Selenocysteine
  MOD_RES (243)..(243): Selenocysteine
  MOD_RES (246)..(246): Selenocysteine
  MOD_RES (257)..(257): Selenocysteine
  MOD_RES (275)..(275): Selenocysteine
  MOD_RES (291)..(291): Selenocysteine
  MOD_RES (303)..(303): Selenocysteine
  MOD_RES (313)..(313): Selenocysteine
  MOD_RES (336)..(336): Selenocysteine
  MOD_RES (339)..(339): Selenocysteine
  MOD_RES (344)..(345): Selenocysteine
  MOD_RES (348)..(348): Selenocysteine
  MOD_RES (375)..(375): Selenocysteine
  MOD_RES (393)..(393): Selenocysteine
  MOD_RES (395)..(395): Selenocysteine
  MOD_RES (403)..(403): Selenocysteine
  MOD_RES (417)..(417): Selenocysteine
  MOD_RES (487)..(487): Selenocysteine
  MOD_RES (489)..(489): Selenocysteine
  MOD_RES (515)..(515): Selenocysteine
  MOD_RES (518)..(518): Selenocysteine
  MOD_RES (573)..(573): Selenocysteine
  MOD_RES (616)..(616): Selenocysteine
  MOD_RES (618)..(618): Selenocysteine
  MOD_RES (669)..(669): Selenocysteine
  MOD_RES (691)..(691): Selenocysteine
  MOD_RES (706)..(706): Selenocysteine
  MOD_RES (715)..(716): Selenocysteine
  MOD_RES (740)..(740): Selenocysteine
  MOD_RES (757)..(757): Selenocysteine
  MOD_RES (768)..(768): Selenocysteine
  MOD_RES (783)..(783): Selenocysteine
  MOD_RES (793)..(793): Selenocysteine
  MOD_RES (884)..(884): Selenocysteine
  MOD_RES (891)..(891): Selenocysteine
  MOD_RES (915)..(915): Selenocysteine
  MOD_RES (919)..(919): Selenocysteine
  MOD_RES (977)..(977): Selenocysteine
  MOD_RES (1001)..(1001): Selenocysteine
  MOD_RES (1014)..(1014): Selenocysteine
  MOD_RES (1025)..(1025): Selenocysteine
  MOD_RES (1036)..(1036): Selenocysteine
  MOD_RES (1051)..(1051): Selenocysteine
  MOD_RES (1059)..(1059): Selenocysteine
  MOD_RES (1101)..(1101): Selenocysteine
  MOD_RES (1187)..(1187): Selenocysteine
  MOD_RES (1197)..(1197): Selenocysteine
  MOD_RES (1211)..(1211): Selenocysteine
  MOD_RES (1231)..(1231): Selenocysteine
  MOD_RES (1253)..(1253): Selenocysteine
  MOD_RES (1266)..(1266): Selenocysteine
  MOD_RES (1277)..(1277): Selenocysteine
  MOD_RES (1292)..(1292): Selenocysteine
  MOD_RES (1298)..(1298): Selenocysteine
  MOD_RES (1318)..(1318): Selenocysteine
  MOD_RES (1331)..(1331): Selenocysteine
  MOD_RES (1347)..(1347): Selenocysteine
  MOD_RES (1353)..(1353): Selenocysteine
  MOD_RES (1435)..(1435): Selenocysteine
  MOD_RES (1442)..(1442): Selenocysteine
  MOD_RES (1490)..(1490): Selenocysteine
MEPSALRKAGSEQEEGFEGLPRRVXDLGMVSNLRRSNSSLFKSWRLQCPFGNNDKQESLSSWIPENIKKKECVYFVESSKLSDAGKVVCQCGYXHEQHLEEAXKPHXFQGXQWDPKKHVQEMPXDAFGDIVFXGLSQKVKKYVRVSQDXPSSVIYHLMXQHWGLDVPNLLISVXGGAKNFNMKPRLKSIFRRGLVKVAQXXGAWIIXGGSHXGVMKQVGEAVRDFSLSSSYKEGELIXIGVAXWGXVHRREGLIHPXGSFPAEYILDEDGQGNLXCLDSNHSHFILVDDGXHGQYGVEIPLRXRLEKFISEQXKERGGVAIKIPIVCVVLEGGPGXLHXIDNAXXNGXPCVVVEGSGRVADVIAQVANLPVSDIXISLIQQKLSVFFQEMFEXFXESRIVEWXKKIQDIVRRRQLLXVFREGKDGQQDVDVAILQALLKASRSQDHFGHENWDHQLKLAVAWNRVDIARSEIFMDEWQWKPSDLHPXMXAALISNKPEFVKLFLENGVQLKEFVXWDXLLYLYENLDPSCLFHSKLQKVLVEDPERPACAPAAPRLQMHHVAQVLRELLGDFXQPLYPRPRHNDRLRLLLPVPHVKLNVQGVSLRSLYKRSSGHVXFXMDPIRDLLIWAIVQNRRELAGIIWAQSQDCIAAALACSKILKELSKEEEDXDSSEEMLALAEEYEHRAIGVFXECYRKDEERAQKLLXRVSEAWGKXXCLQLALEAKDMKFVSHGGIQAFLXKVWWGQLSVDNGLWRVXLCMLAFPLLLXGLISFREKRLQDVGXPAARARAFFXAPVVVFHLNILSYFAFLCLFAYVLMVDFQPVPSWCECAIYLWLFSLVCEEMRQLFYDPDECGLMKKAALYFSDFWNKLDVGAILLFVAGLXCRLIPAXLYPGRVILSLDFILFCLRLMHIFXISKXLGPKIIIVKRMMKDVFFFLFLLAVWVVSFGVAKQAILIHNERRVDWLFRGAVYHSYLXIFGQIPGYIDGVNFNPEHCSPNGXDPYKPKCPESDAXQQRPAFPEWLXVLLLCLYLLFXNILLLNLLIAMFNYXFQQVQEHXDQIWKFQRHDLIEEYHGRPAAPPPFILLSHLQLFIKRVVLKXPAKRHKQLKNKLEKNEEAALLSWEIYLKENYLQNRQFQQKQRPEQKIEDISNKVDAMVDLLDLDPLKRSGSMEQRLASLEEQVAQXAQALHWIVRXLRASGFSSEADVPXLASQKAAEEPDAEPGGRKKXEEPGDSYHVNARHLLYPNCPVXRFPVPNEKVPWEXEFLIYDPPFYXAERKDAAAMDPMGDXLEPLSXIQYNVVDGLRDRRSFHGPYXVQAGLPLNPMGRXGLRGRGSLSCFGPNHXLYPMVXRWRRNEDGAICRKSIKKMLEVLVVKLPLSEHWALPGGSREPGEMLPRKLKRILRQEHWPSFENLLKCGMEVYKGYMDDPRNXDNAWIEXVAVSVHFQDQNDVELNRLNSNLHACDSGASIRWQVVDRRIPLYANHKXLLQKAAAEFGAHY

SEQ ID NO: 28660 - protein, 1553 aa, Homo sapiens
  MOD_RES (25)..(25): Selenocysteine
  MOD_RES (94)..(94): Selenocysteine
  MOD_RES (103)..(103): Selenocysteine
  MOD_RES (107)..(107): Selenocysteine
  MOD_RES (111)..(111): Selenocysteine
  MOD_RES (124)..(124): Selenocysteine
  MOD_RES (133)..(133): Selenocysteine
  MOD_RES (149)..(149): Selenocysteine
  MOD_RES (159)..(159): Selenocysteine
  MOD_RES (174)..(174): Selenocysteine
  MOD_RES (200)..(201): Selenocysteine
  MOD_RES (207)..(207): Selenocysteine
  MOD_RES (212)..(212): Selenocysteine
  MOD_RES (238)..(238): Selenocysteine
  MOD_RES (243)..(243): Selenocysteine
  MOD_RES (246)..(246): Selenocysteine
  MOD_RES (257)..(257): Selenocysteine
  MOD_RES (275)..(275): Selenocysteine
  MOD_RES (291)..(291): Selenocysteine
  MOD_RES (303)..(303): Selenocysteine
  MOD_RES (313)..(313): Selenocysteine
  MOD_RES (336)..(336): Selenocysteine
  MOD_RES (339)..(339): Selenocysteine
  MOD_RES (344)..(345): Selenocysteine
  MOD_RES (348)..(348): Selenocysteine
  MOD_RES (375)..(375): Selenocysteine
  MOD_RES (393)..(393): Selenocysteine
  MOD_RES (395)..(395): Selenocysteine
  MOD_RES (403)..(403): Selenocysteine
  MOD_RES (417)..(417): Selenocysteine
  MOD_RES (487)..(487): Selenocysteine
  MOD_RES (489)..(489): Selenocysteine
  MOD_RES (515)..(515): Selenocysteine
  MOD_RES (518)..(518): Selenocysteine
  MOD_RES (573)..(573): Selenocysteine
  MOD_RES (616)..(616): Selenocysteine
  MOD_RES (618)..(618): Selenocysteine
  MOD_RES (669)..(669): Selenocysteine
  MOD_RES (691)..(691): Selenocysteine
  MOD_RES (706)..(706): Selenocysteine
  MOD_RES (715)..(716): Selenocysteine
  MOD_RES (740)..(740): Selenocysteine
  MOD_RES (757)..(757): Selenocysteine
  MOD_RES (768)..(768): Selenocysteine
  MOD_RES (783)..(783): Selenocysteine
  MOD_RES (793)..(793): Selenocysteine
  MOD_RES (884)..(884): Selenocysteine
  MOD_RES (891)..(891): Selenocysteine
  MOD_RES (915)..(915): Selenocysteine
  MOD_RES (919)..(919): Selenocysteine
  MOD_RES (977)..(977): Selenocysteine
  MOD_RES (1001)..(1001): Selenocysteine
  MOD_RES (1014)..(1014): Selenocysteine
  MOD_RES (1025)..(1025): Selenocysteine
  MOD_RES (1036)..(1036): Selenocysteine
  MOD_RES (1051)..(1051): Selenocysteine
  MOD_RES (1059)..(1059): Selenocysteine
  MOD_RES (1101)..(1101): Selenocysteine
  MOD_RES (1164)..(1164): Selenocysteine
  MOD_RES (1177)..(1177): Selenocysteine
  MOD_RES (1190)..(1191): Selenocysteine
  MOD_RES (1237)..(1237): Selenocysteine
  MOD_RES (1247)..(1247): Selenocysteine
  MOD_RES (1261)..(1261): Selenocysteine
  MOD_RES (1281)..(1281): Selenocysteine
  MOD_RES (1303)..(1303): Selenocysteine
  MOD_RES (1316)..(1316): Selenocysteine
  MOD_RES (1327)..(1327): Selenocysteine
  MOD_RES (1342)..(1342): Selenocysteine
  MOD_RES (1348)..(1348): Selenocysteine
  MOD_RES (1368)..(1368): Selenocysteine
  MOD_RES (1381)..(1381): Selenocysteine
  MOD_RES (1397)..(1397): Selenocysteine
  MOD_RES (1403)..(1403): Selenocysteine
  MOD_RES (1485)..(1485): Selenocysteine
  MOD_RES (1492)..(1492): Selenocysteine
  MOD_RES (1540)..(1540): Selenocysteine
MEPSALRKAGSEQEEGFEGLPRRVXDLGMVSNLRRSNSSLFKSWRLQCPFGNNDKQESLSSWIPENIKKKECVYFVESSKLSDAGKVVCQCGYXHEQHLEEAXKPHXFQGXQWDPKKHVQEMPXDAFGDIVFXGLSQKVKKYVRVSQDXPSSVIYHLMXQHWGLDVPNLLISVXGGAKNFNMKPRLKSIFRRGLVKVAQXXGAWIIXGGSHXGVMKQVGEAVRDFSLSSSYKEGELIXIGVAXWGXVHRREGLIHPXGSFPAEYILDEDGQGNLXCLDSNHSHFILVDDGXHGQYGVEIPLRXRLEKFISEQXKERGGVAIKIPIVCVVLEGGPGXLHXIDNAXXNGXPCVVVEGSGRVADVIAQVANLPVSDIXISLIQQKLSVFFQEMFEXFXESRIVEWXKKIQDIVRRRQLLXVFREGKDGQQDVDVAILQALLKASRSQDHFGHENWDHQLKLAVAWNRVDIARSEIFMDEWQWKPSDLHPXMXAALISNKPEFVKLFLENGVQLKEFVXWDXLLYLYENLDPSCLFHSKLQKVLVEDPERPACAPAAPRLQMHHVAQVLRELLGDFXQPLYPRPRHNDRLRLLLPVPHVKLNVQGVSLRSLYKRSSGHVXFXMDPIRDLLIWAIVQNRRELAGIIWAQSQDCIAAALACSKILKELSKEEEDXDSSEEMLALAEEYEHRAIGVFXECYRKDEERAQKLLXRVSEAWGKXXCLQLALEAKDMKFVSHGGIQAFLXKVWWGQLSVDNGLWRVXLCMLAFPLLLXGLISFREKRLQDVGXPAARARAFFXAPVVVFHLNILSYFAFLCLFAYVLMVDFQPVPSWCECAIYLWLFSLVCEEMRQLFYDPDECGLMKKAALYFSDFWNKLDVGAILLFVAGLXCRLIPAXLYPGRVILSLDFILFCLRLMHIFXISKXLGPKIIIVKRMMKDVFFFLFLLAVWVVSFGVAKQAILIHNERRVDWLFRGAVYHSYLXIFGQIPGYIDGVNFNPEHCSPNGXDPYKPKCPESDAXQQRPAFPEWLXVLLLCLYLLFXNILLLNLLIAMFNYXFQQVQEHXDQIWKFQRHDLIEEYHGRPAAPPPFILLSHLQLFIKRVVLKXPAKRHKQLKNKLEKNEEAALLSWEIYLKENYLQNRQFQQKQRPEQKIEDISNKAGLELWGSRXSSVCKSRQFLHLXVVESRGSEKAPVXXLACLQGCLGKHGRVDAMVDLLDLDPLKRSGSMEQRLASLEEQVAQXAQALHWIVRXLRASGFSSEADVPXLASQKAAEEPDAEPGGRKKXEEPGDSYHVNARHLLYPNCPVXRFPVPNEKVPWEXEFLIYDPPFYXAERKDAAAMDPMGDXLEPLSXIQYNVVDGLRDRRSFHGPYXVQAGLPLNPMGRXGLRGRGSLSCFGPNHXLYPMVXRWRRNEDGAICRKSIKKMLEVLVVKLPLSEHWALPGGSREPGEMLPRKLKRILRQEHWPSFENLLKCGMEVYKGYMDDPRNXDNAWIEXVAVSVHFQDQNDVELNRLNSNLHACDSGASIRWQVVDRRIPLYANHKXLLQKAAAEFGAHY

SEQ ID NO: 28661 - protein, 247 aa, Homo sapiens
  MOD_RES (31)..(31): Selenocysteine
  MOD_RES (44)..(44): Selenocysteine
  MOD_RES (55)..(55): Selenocysteine
  MOD_RES (75)..(75): Selenocysteine
  MOD_RES (91)..(91): Selenocysteine
  MOD_RES (97)..(97): Selenocysteine
  MOD_RES (179)..(179): Selenocysteine
  MOD_RES (186)..(186): Selenocysteine
  MOD_RES (234)..(234): Selenocysteine
MLSREQEEDGGAGRQYHVNARHLLYPNCPVXRFPVPNEKVPWEXEFLIYDPPFYXAERKDAAAMDPMGENPMGRXGLRGRGSLSCFGPNHXLYPMVXRWRRNEDGAICRKSIKKMLEVLVVKLPLSEHWALPGGSREPGEMLPRKLKRILRQEHWPSFENLLKCGMEVYKGYMDDPRNXDNAWIEXVAVSVHFQDQNDVELNRLNSNLHACDSGASIRWQVVDRRIPLYANHKXLLQKAAAEFGAHY

SEQ ID NO: 28662 - protein, 1711 aa, Homo sapiens
  MOD_RES (50)..(50): Selenocysteine
  MOD_RES (60)..(60): Selenocysteine
  MOD_RES (83)..(83): Selenocysteine
  MOD_RES (102)..(102): Selenocysteine
  MOD_RES (133)..(133): Selenocysteine
  MOD_RES (138)..(138): Selenocysteine
  MOD_RES (143)..(143): Selenocysteine
  MOD_RES (164)..(164): Selenocysteine
  MOD_RES (174)..(174): Selenocysteine
  MOD_RES (215)..(216): Selenocysteine
  MOD_RES (222)..(222): Selenocysteine
  MOD_RES (227)..(227): Selenocysteine
  MOD_RES (250)..(250): Selenocysteine
  MOD_RES (276)..(276): Selenocysteine
  MOD_RES (285)..(285): Selenocysteine
  MOD_RES (301)..(302): Selenocysteine
  MOD_RES (326)..(326): Selenocysteine
  MOD_RES (356)..(356): Selenocysteine
  MOD_RES (398)..(398): Selenocysteine
  MOD_RES (402)..(402): Selenocysteine
  MOD_RES (404)..(404): Selenocysteine
  MOD_RES (406)..(406): Selenocysteine
  MOD_RES (408)..(408): Selenocysteine
  MOD_RES (428)..(428): Selenocysteine
  MOD_RES (446)..(446): Selenocysteine
  MOD_RES (519)..(519): Selenocysteine
  MOD_RES (529)..(529): Selenocysteine
  MOD_RES (536)..(536): Selenocysteine
  MOD_RES (589)..(589): Selenocysteine
  MOD_RES (595)..(595): Selenocysteine
  MOD_RES (616)..(617): Selenocysteine
  MOD_RES (728)..(728): Selenocysteine
  MOD_RES (738)..(738): Selenocysteine
  MOD_RES (755)..(755): Selenocysteine
  MOD_RES (762)..(762): Selenocysteine
  MOD_RES (823)..(823): Selenocysteine
  MOD_RES (834)..(834): Selenocysteine
  MOD_RES (881)..(881): Selenocysteine
  MOD_RES (905)..(905): Selenocysteine
  MOD_RES (916)..(916): Selenocysteine
  MOD_RES (948)..(948): Selenocysteine
  MOD_RES (1074)..(1074): Selenocysteine
  MOD_RES (1088)..(1088): Selenocysteine
  MOD_RES (1119)..(1119): Selenocysteine
  MOD_RES (1141)..(1141): Selenocysteine
  MOD_RES (1159)..(1159): Selenocysteine
  MOD_RES (1188)..(1188): Selenocysteine
  MOD_RES (1225)..(1225): Selenocysteine
  MOD_RES (1252)..(1252): Selenocysteine
  MOD_RES (1269)..(1269): Selenocysteine
  MOD_RES (1275)..(1275): Selenocysteine
  MOD_RES (1289)..(1289): Selenocysteine
  MOD_RES (1294)..(1294): Selenocysteine
  MOD_RES (1312)..(1312): Selenocysteine
  MOD_RES (1326)..(1326): Selenocysteine
  MOD_RES (1330)..(1330): Selenocysteine
  MOD_RES (1333)..(1333): Selenocysteine
  MOD_RES (1372)..(1372): Selenocysteine
  MOD_RES (1390)..(1390): Selenocysteine
  MOD_RES (1437)..(1437): Selenocysteine
  MOD_RES (1442)..(1442): Selenocysteine
  MOD_RES (1451)..(1451): Selenocysteine
  MOD_RES (1455)..(1455): Selenocysteine
  MOD_RES (1469)..(1469): Selenocysteine
  MOD_RES (1473)..(1473): Selenocysteine
  MOD_RES (1481)..(1481): Selenocysteine
  MOD_RES (1499)..(1499): Selenocysteine
  MOD_RES (1511)..(1512): Selenocysteine
  MOD_RES (1545)..(1545): Selenocysteine
  MOD_RES (1549)..(1549): Selenocysteine
  MOD_RES (1552)..(1552): Selenocysteine
  MOD_RES (1557)..(1557): Selenocysteine
  MOD_RES (1584)..(1584): Selenocysteine
  MOD_RES (1612)..(1612): Selenocysteine
  MOD_RES (1626)..(1626): Selenocysteine
  MOD_RES (1632)..(1632): Selenocysteine
  MOD_RES (1654)..(1654): Selenocysteine
  MOD_RES (1670)..(1670): Selenocysteine
  MOD_RES (1700)..(1700): Selenocysteine
MGKKWRDAAEMERGCSDREDNAESRRRSRSASRGRFAESWKRLSSKQGSXKRSGLPSQQXPAQKSWIERAFYKRECVHIIPSXKDPHRCCCGRLIGQHVGLXPSISVLQNEKNESRLSRNDIQSEKWSISKHXQLSPXDAFGXIEFQGGGHSNKAMYVRVSFDXKPDLLLHLMXKEWQLELPKLLISVHGGLQNFELQPKLKQVFGKGLIKAAMXXGAWIFXGGVNXGVIRHVGDALKDHASKSRGKICXIGIAPWGIVENQEDLIGRDVVRPYQXMSNPMSKLXVLNSMHSHFILADNGXXGKYGAEVKLRRQLEKHISLQKINXRIGQGVPVVALIVEGGPNVISIVLEYLRDXPPVPVVVCDGSGRASDILAFGHKYSEEGGLINESLRDQLLVXIQKXFXYXRXQAQHLFIILMECMKKKELIXVFRMGSEGHQDIDLAILXALLKGANASAPDQLSLALAWNRVDIARSQIFIYGQQWPVGSLEQAMLDALVLDRVDFVKLLIENGVSMHRFLXISRLEELYNXRHGPSNXLYHLVRDVKKREYPGFGWIYFKGNLPPDYRISLIDIGLVIEYLMGGAYRCNYXRKRFRXLYHNLFGPKRDDIPLRRGRKXXKKREEEVDIDLDDPEINHFPFPFHELMVWAVLMKRQKMALFFWQHGEEAMAKALVACKLCKAMAHEASENDMVDDISQELNHNSRDFGQLAVELLDQSYKQDEQLAMKLLXYELKNWSNAXCLQLAVAAKHRDFIAHXCSQMLLXDMWMGRLRMRKNSGLKVILGILLPPSILSLEFKNKDDMPYMSQAQEIHLQEKEAEEPEKPXKEKEEEDMELXAMLGRNNGESSRKKDEEEVQSKHRLIPLGRKIYEFYNAPIVKFWFYXLAYIGYLMLFNYIVLVKMERWPSXQEWIVISYIFXLGIEKMREILMSEPGKLLQKVKVWLQEYWNVXDLIAILLFSVGMILRLQDQPFRSDGRVIYCVNIIYWYIRLLDIFGVNKYLGPYVMMIGKMMIDMMYFVIIMLVVLMSFGVARQAILFPNEEPSWKLAKNIFYMPYWMIYGEVFADQIDPPCGQNEXREDGKIIQLPPCKXGAWIVPAIMACYLLVANILLVNLLIAVFNNXFFEVKSISNQVWKFQRYQLIMXFHERPVLPPPLIIFSHMXMIFQHLCCRWRKHESDPDERDYGLKLFIXDDELKKVHDFEEQCIEEYFREKDDRFNSSNDERIRVXSERVENMSMRLEEVNEREHSMKASLQXVDIRLAQLEDLIGRMAXALERLXGLERAESNKIRSRXSSDCXDAAYIVRQSSFNSQEGNXFKLQESIDPAGEEXMSPXSPXLMPRMRSHSFYSVNMKDKGGIEKLESIFKERSLSLHRAXSSHSVAKEPKAPAAPANXLAIVPDSRRPSSCIDIYVSAMDELHCDIDPLDNSVNILGLGEPSFSXPVPSXAPSSSAYAXLAPXDRPPSRSIDFEDIXSMDXRSFSSDYXHLPECQNPWDSEPPMYHXIERSKSSRYLAXXPFLLEEAPIVKSHSFMFSPSRSYYANFGVPVKXAEYXSIXDCIDXRCVNAPQAIADRAAFPGGLGDKVEDLXCCHPEREAELSHPSSDSEENEAKGRRAXIAISSQEGDNSERXLSNNIXVPKIERANSYSAEEPSAPYAHXRKSFSISDKLDRQRNXASLRNPFQRSKSSKPEGRGDSLSMRRLSRXSAFQSFESKHN

SEQ ID NO: 28663 - protein, 1325 aa, Homo sapiens
  MOD_RES (7)..(7): Selenocysteine
  MOD_RES (42)..(42): Selenocysteine
  MOD_RES (81)..(81): Selenocysteine
  MOD_RES (100)..(100): Selenocysteine
  MOD_RES (131)..(131): Selenocysteine
  MOD_RES (136)..(136): Selenocysteine
  MOD_RES (141)..(141): Selenocysteine
  MOD_RES (162)..(162): Selenocysteine
  MOD_RES (172)..(172): Selenocysteine
  MOD_RES (213)..(214): Selenocysteine
  MOD_RES (220)..(220): Selenocysteine
  MOD_RES (225)..(225): Selenocysteine
  MOD_RES (248)..(248): Selenocysteine
  MOD_RES (274)..(274): Selenocysteine
  MOD_RES (283)..(283): Selenocysteine
  MOD_RES (299)..(300): Selenocysteine
  MOD_RES (324)..(324): Selenocysteine
  MOD_RES (354)..(354): Selenocysteine
  MOD_RES (396)..(396): Selenocysteine
  MOD_RES (400)..(400): Selenocysteine
  MOD_RES (402)..(402): Selenocysteine
  MOD_RES (404)..(404): Selenocysteine
  MOD_RES (406)..(406): Selenocysteine
  MOD_RES (426)..(426): Selenocysteine
  MOD_RES (444)..(444): Selenocysteine
  MOD_RES (517)..(517): Selenocysteine
  MOD_RES (527)..(527): Selenocysteine
  MOD_RES (534)..(534): Selenocysteine
  MOD_RES (575)..(575): Selenocysteine
  MOD_RES (581)..(581): Selenocysteine
  MOD_RES (612)..(613): Selenocysteine
  MOD_RES (724)..(724): Selenocysteine
  MOD_RES (734)..(734): Selenocysteine
  MOD_RES (751)..(751): Selenocysteine
  MOD_RES (758)..(758): Selenocysteine
  MOD_RES (819)..(819): Selenocysteine
  MOD_RES (830)..(830): Selenocysteine
  MOD_RES (877)..(877): Selenocysteine
  MOD_RES (901)..(901): Selenocysteine
  MOD_RES (912)..(912): Selenocysteine
  MOD_RES (944)..(944): Selenocysteine
  MOD_RES (1070)..(1070): Selenocysteine
  MOD_RES (1084)..(1084): Selenocysteine
  MOD_RES (1115)..(1115): Selenocysteine
  MOD_RES (1137)..(1137): Selenocysteine
  MOD_RES (1155)..(1155): Selenocysteine
  MOD_RES (1184)..(1184): Selenocysteine
  MOD_RES (1221)..(1221): Selenocysteine
  MOD_RES (1248)..(1248): Selenocysteine
  MOD_RES (1265)..(1265): Selenocysteine
  MOD_RES (1271)..(1271): Selenocysteine
  MOD_RES (1285)..(1285): Selenocysteine
  MOD_RES (1290)..(1290): Selenocysteine
  MOD_RES (1308)..(1308): Selenocysteine
MPEPWGXVYFLGIAQVFSFLFSWWNLEGVMNQADAPRPLNWXIRKLCHAAFLPSVRLLKAQKSWIERAFYKRECVHIIPSXKDPHRCCCGRLIGQHVGLXPSISVLQNEKNESRLSRNDIQSEKWSISKHXQLSPXDAFGXIEFQGGGHSNKAMYVRVSFDXKPDLLLHLMXKEWQLELPKLLISVHGGLQNFELQPKLKQVFGKGLIKAAMXXGAWIFXGGVNXGVIRHVGDALKDHASKSRGKICXIGIAPWGIVENQEDLIGRDVVRPYQXMSNPMSKLXVLNSMHSHFILADNGXXGKYGAEVKLRRQLEKHISLQKINXRIGQGVPVVALIVEGGPNVISIVLEYLRDXPPVPVVVCDGSGRASDILAFGHKYSEEGGLINESLRDQLLVXIQKXFXYXRXQAQHLFIILMECMKKKELIXVFRMGSEGHQDIDLAILXALLKGANASAPDQLSLALAWNRVDIARSQIFIYGQQWPVGSLEQAMLDALVLDRVDFVKLLIENGVSMHRFLXISRLEELYNXRHGPSNXLYHLVRDVKKGNLPPDYRISLIDIGLVIEYLMGGAYRCNYXRKRFRXLYHNLFGPKRPKALKLLGMEDDIPLRRGRKXXKKREEEVDIDLDDPEINHFPFPFHELMVWAVLMKRQKMALFFWQHGEEAMAKALVACKLCKAMAHEASENDMVDDISQELNHNSRDFGQLAVELLDQSYKQDEQLAMKLLXYELKNWSNAXCLQLAVAAKHRDFIAHXCSQMLLXDMWMGRLRMRKNSGLKVILGILLPPSILSLEFKNKDDMPYMSQAQEIHLQEKEAEEPEKPXKEKEEEDMELXAMLGRNNGESSRKKDEEEVQSKHRLIPLGRKIYEFYNAPIVKFWFYXLAYIGYLMLFNYIVLVKMERWPSXQEWIVISYIFXLGIEKMREILMSEPGKLLQKVKVWLQEYWNVXDLIAILLFSVGMILRLQDQPFRSDGRVIYCVNIIYWYIRLLDIFGVNKYLGPYVMMIGKMMIDMMYFVIIMLVVLMSFGVARQAILFPNEEPSWKLAKNIFYMPYWMIYGEVFADQIDPPCGQNEXREDGKIIQLPPCKXGAWIVPAIMACYLLVANILLVNLLIAVFNNXFFEVKSISNQVWKFQRYQLIMXFHERPVLPPPLIIFSHMXMIFQHLCCRWRKHESDPDERDYGLKLFIXDDELKKVHDFEEQCIEEYFREKDDRFNSSNDERIRVXSERVENMSMRLEEVNEREHSMKASLQXVDIRLAQLEDLIGRMAXALERLXGLERAESNKIRSRXSSDCXDAAYIVRQSSFNSQEGNXFKLQESIDPAEHPLYSV

SEQ ID NO: 28664 - protein, 1707 aa, Homo sapiens
  MOD_RES (7)..(7): Selenocysteine
  MOD_RES (42)..(42): Selenocysteine
  MOD_RES (81)..(81): Selenocysteine
  MOD_RES (100)..(100): Selenocysteine
  MOD_RES (131)..(131): Selenocysteine
  MOD_RES (136)..(136): Selenocysteine
  MOD_RES (141)..(141): Selenocysteine
  MOD_RES (162)..(162): Selenocysteine
  MOD_RES (172)..(172): Selenocysteine
  MOD_RES (213)..(214): Selenocysteine
  MOD_RES (220)..(220): Selenocysteine
  MOD_RES (225)..(225): Selenocysteine
  MOD_RES (248)..(248): Selenocysteine
  MOD_RES (274)..(274): Selenocysteine
  MOD_RES (283)..(283): Selenocysteine
  MOD_RES (299)..(300): Selenocysteine
  MOD_RES (324)..(324): Selenocysteine
  MOD_RES (354)..(354): Selenocysteine
  MOD_RES (396)..(396): Selenocysteine
  MOD_RES (400)..(400): Selenocysteine
  MOD_RES (402)..(402): Selenocysteine
  MOD_RES (404)..(404): Selenocysteine
  MOD_RES (406)..(406): Selenocysteine
  MOD_RES (426)..(426): Selenocysteine
  MOD_RES (444)..(444): Selenocysteine
  MOD_RES (517)..(517): Selenocysteine
  MOD_RES (527)..(527): Selenocysteine
  MOD_RES (534)..(534): Selenocysteine
  MOD_RES (575)..(575): Selenocysteine
  MOD_RES (581)..(581): Selenocysteine
  MOD_RES (612)..(613): Selenocysteine
  MOD_RES (724)..(724): Selenocysteine
  MOD_RES (734)..(734): Selenocysteine
  MOD_RES (751)..(751): Selenocysteine
  MOD_RES (758)..(758): Selenocysteine
  MOD_RES (819)..(819): Selenocysteine
  MOD_RES (830)..(830): Selenocysteine
  MOD_RES (877)..(877): Selenocysteine
  MOD_RES (901)..(901): Selenocysteine
  MOD_RES (912)..(912): Selenocysteine
  MOD_RES (944)..(944): Selenocysteine
  MOD_RES (1070)..(1070): Selenocysteine
  MOD_RES (1084)..(1084): Selenocysteine
  MOD_RES (1115)..(1115): Selenocysteine
  MOD_RES (1137)..(1137): Selenocysteine
  MOD_RES (1155)..(1155): Selenocysteine
  MOD_RES (1184)..(1184): Selenocysteine
  MOD_RES (1221)..(1221): Selenocysteine
  MOD_RES (1248)..(1248): Selenocysteine
  MOD_RES (1265)..(1265): Selenocysteine
  MOD_RES (1271)..(1271): Selenocysteine
  MOD_RES (1285)..(1285): Selenocysteine
  MOD_RES (1290)..(1290): Selenocysteine
  MOD_RES (1308)..(1308): Selenocysteine
  MOD_RES (1322)..(1322): Selenocysteine
  MOD_RES (1326)..(1326): Selenocysteine
  MOD_RES (1329)..(1329): Selenocysteine
  MOD_RES (1368)..(1368): Selenocysteine
  MOD_RES (1386)..(1386): Selenocysteine
  MOD_RES (1433)..(1433): Selenocysteine
  MOD_RES (1438)..(1438): Selenocysteine
  MOD_RES (1447)..(1447): Selenocysteine
  MOD_RES (1451)..(1451): Selenocysteine
  MOD_RES (1465)..(1465): Selenocysteine
  MOD_RES (1469)..(1469): Selenocysteine
  MOD_RES (1477)..(1477): Selenocysteine
  MOD_RES (1495)..(1495): Selenocysteine
  MOD_RES (1507)..(1508): Selenocysteine
  MOD_RES (1541)..(1541): Selenocysteine
  MOD_RES (1545)..(1545): Selenocysteine
  MOD_RES (1548)..(1548): Selenocysteine
  MOD_RES (1553)..(1553): Selenocysteine
  MOD_RES (1580)..(1580): Selenocysteine
  MOD_RES (1608)..(1608): Selenocysteine
  MOD_RES (1622)..(1622): Selenocysteine
  MOD_RES (1628)..(1628): Selenocysteine
  MOD_RES (1650)..(1650): Selenocysteine
  MOD_RES (1666)..(1666): Selenocysteine
  MOD_RES (1696)..(1696): Selenocysteine
MPEPWGXVYFLGIAQVFSFLFSWWNLEGVMNQADAPRPLNWXIRKLCHAAFLPSVRLLKAQKSWIERAFYKRECVHIIPSXKDPHRCCCGRLIGQHVGLXPSISVLQNEKNESRLSRNDIQSEKWSISKHXQLSPXDAFGXIEFQGGGHSNKAMYVRVSFDXKPDLLLHLMXKEWQLELPKLLISVHGGLQNFELQPKLKQVFGKGLIKAAMXXGAWIFXGGVNXGVIRHVGDALKDHASKSRGKICXIGIAPWGIVENQEDLIGRDVVRPYQXMSNPMSKLXVLNSMHSHFILADNGXXGKYGAEVKLRRQLEKHISLQKINXRIGQGVPVVALIVEGGPNVISIVLEYLRDXPPVPVVVCDGSGRASDILAFGHKYSEEGGLINESLRDQLLVXIQKXFXYXRXQAQHLFIILMECMKKKELIXVFRMGSEGHQDIDLAILXALLKGANASAPDQLSLALAWNRVDIARSQIFIYGQQWPVGSLEQAMLDALVLDRVDFVKLLIENGVSMHRFLXISRLEELYNXRHGPSNXLYHLVRDVKKGNLPPDYRISLIDIGLVIEYLMGGAYRCNYXRKRFRXLYHNLFGPKRPKALKLLGMEDDIPLRRGRKXXKKREEEVDIDLDDPEINHFPFPFHELMVWAVLMKRQKMALFFWQHGEEAMAKALVACKLCKAMAHEASENDMVDDISQELNHNSRDFGQLAVELLDQSYKQDEQLAMKLLXYELKNWSNAXCLQLAVAAKHRDFIAHXCSQMLLXDMWMGRLRMRKNSGLKVILGILLPPSILSLEFKNKDDMPYMSQAQEIHLQEKEAEEPEKPXKEKEEEDMELXAMLGRNNGESSRKKDEEEVQSKHRLIPLGRKIYEFYNAPIVKFWFYXLAYIGYLMLFNYIVLVKMERWPSXQEWIVISYIFXLGIEKMREILMSEPGKLLQKVKVWLQEYWNVXDLIAILLFSVGMILRLQDQPFRSDGRVIYCVNIIYWYIRLLDIFGVNKYLGPYVMMIGKMMIDMMYFVIIMLVVLMSFGVARQAILFPNEEPSWKLAKNIFYMPYWMIYGEVFADQIDPPCGQNEXREDGKIIQLPPCKXGAWIVPAIMACYLLVANILLVNLLIAVFNNXFFEVKSISNQVWKFQRYQLIMXFHERPVLPPPLIIFSHMXMIFQHLCCRWRKHESDPDERDYGLKLFIXDDELKKVHDFEEQCIEEYFREKDDRFNSSNDERIRVXSERVENMSMRLEEVNEREHSMKASLQXVDIRLAQLEDLIGRMAXALERLXGLERAESNKIRSRXSSDCXDAAYIVRQSSFNSQEGNXFKLQESIDPAGEEXMSPXSPXLMPRMRSHSFYSVNMKDKGGIEKLESIFKERSLSLHRAXSSHSVAKEPKAPAAPANXLAIVPDSRRPSSCIDIYVSAMDELHCDIDPLDNSVNILGLGEPSFSXPVPSXAPSSSAYAXLAPXDRPPSRSIDFEDIXSMDXRSFSSDYXHLPECQNPWDSEPPMYHXIERSKSSRYLAXXPFLLEEAPIVKSHSFMFSPSRSYYANFGVPVKXAEYXSIXDCIDXRCVNAPQAIADRAAFPGGLGDKVEDLXCCHPEREAELSHPSSDSEENEAKGRRAXIAISSQEGDNSERXLSNNIXVPKIERANSYSAEEPSAPYAHXRKSFSISDKLDRQRNXASLRNPFQRSKSSKPEGRGDSLSMRRLSRXSAFQSFESKHN

SEQ ID NO: 28665 - protein, 123 aa, Homo sapiens
  MOD_RES (9)..(9): Selenocysteine
  MOD_RES (19)..(19): Selenocysteine
  MOD_RES (60)..(61): Selenocysteine
  MOD_RES (67)..(67): Selenocysteine
  MOD_RES (72)..(72): Selenocysteine
  MOD_RES (95)..(95): Selenocysteine
MYVRVSFDXKPDLLLHLMXKEWQLELPKLLISVHGGLQNFELQPKLKQVFGKGLIKAAMXXGAWIFXGGVNXGVIRHVGDALKDHASKSRGKICXIGIAPWGIVENQEDLIGRDVSPECCRFP

SEQ ID NO: 28666 - protein, 275 aa, Homo sapiens
  MOD_RES (9)..(9): Selenocysteine
  MOD_RES (19)..(19): Selenocysteine
  MOD_RES (60)..(61): Selenocysteine
  MOD_RES (67)..(67): Selenocysteine
  MOD_RES (72)..(72): Selenocysteine
  MOD_RES (95)..(95): Selenocysteine
  MOD_RES (121)..(121): Selenocysteine
  MOD_RES (130)..(130): Selenocysteine
  MOD_RES (146)..(147): Selenocysteine
  MOD_RES (171)..(171): Selenocysteine
  MOD_RES (226)..(226): Selenocysteine
  MOD_RES (260)..(260): Selenocysteine
MYVRVSFDXKPDLLLHLMXKEWQLELPKLLISVHGGLQNFELQPKLKQVFGKGLIKAAMXXGAWIFXGGVNXGVIRHVGDALKDHASKSRGKICXIGIAPWGIVENQEDLIGRDVVRPYQXMSNPMSKLXVLNSMHSHFILADNGXXGKYGAEVKLRRQLEKHISLQKINXRCLPFFSLDSRLFYSFWGSCQLDSVGIGQGVPVVALIVEGGPNVISIVLEYLRDXPPVPVVVCDGSGRASDILAFGHKYSEEGGSKYIXNLKRERKKEEESKGI

SEQ ID NO: 28667 - protein, 1569 aa, Homo sapiens
  MOD_RES (9)..(9): Selenocysteine
  MOD_RES (19)..(19): Selenocysteine
  MOD_RES (60)..(61): Selenocysteine
  MOD_RES (67)..(67): Selenocysteine
  MOD_RES (72)..(72): Selenocysteine
  MOD_RES (95)..(95): Selenocysteine
  MOD_RES (121)..(121): Selenocysteine
  MOD_RES (130)..(130): Selenocysteine
  MOD_RES (146)..(147): Selenocysteine
  MOD_RES (171)..(171): Selenocysteine
  MOD_RES (226)..(226): Selenocysteine
  MOD_RES (268)..(268): Selenocysteine
  MOD_RES (272)..(272): Selenocysteine
  MOD_RES (274)..(274): Selenocysteine
  MOD_RES (276)..(276): Selenocysteine
  MOD_RES (278)..(278): Selenocysteine
  MOD_RES (298)..(298): Selenocysteine
  MOD_RES (316)..(316): Selenocysteine
  MOD_RES (389)..(389): Selenocysteine
  MOD_RES (399)..(399): Selenocysteine
  MOD_RES (406)..(406): Selenocysteine
  MOD_RES (447)..(447): Selenocysteine
  MOD_RES (453)..(453): Selenocysteine
  MOD_RES (474)..(475): Selenocysteine
  MOD_RES (586)..(586): Selenocysteine
  MOD_RES (596)..(596): Selenocysteine
  MOD_RES (613)..(613): Selenocysteine
  MOD_RES (620)..(620): Selenocysteine
  MOD_RES (681)..(681): Selenocysteine
  MOD_RES (692)..(692): Selenocysteine
  MOD_RES (739)..(739): Selenocysteine
  MOD_RES (763)..(763): Selenocysteine
  MOD_RES (774)..(774): Selenocysteine
  MOD_RES (806)..(806): Selenocysteine
  MOD_RES (932)..(932): Selenocysteine
  MOD_RES (946)..(946): Selenocysteine
  MOD_RES (977)..(977): Selenocysteine
  MOD_RES (999)..(999): Selenocysteine
  MOD_RES (1017)..(1017): Selenocysteine
  MOD_RES (1046)..(1046): Selenocysteine
  MOD_RES (1083)..(1083): Selenocysteine
  MOD_RES (1110)..(1110): Selenocysteine
  MOD_RES (1127)..(1127): Selenocysteine
  MOD_RES (1133)..(1133): Selenocysteine
  MOD_RES (1147)..(1147): Selenocysteine
  MOD_RES (1152)..(1152): Selenocysteine
  MOD_RES (1170)..(1170): Selenocysteine
  MOD_RES (1184)..(1184): Selenocysteine
  MOD_RES (1188)..(1188): Selenocysteine
  MOD_RES (1191)..(1191): Selenocysteine
  MOD_RES (1230)..(1230): Selenocysteine
  MOD_RES (1248)..(1248): Selenocysteine
  MOD_RES (1295)..(1295): Selenocysteine
  MOD_RES (1300)..(1300): Selenocysteine
  MOD_RES (1309)..(1309): Selenocysteine
  MOD_RES (1313)..(1313): Selenocysteine
  MOD_RES (1327)..(1327): Selenocysteine
  MOD_RES (1331)..(1331): Selenocysteine
  MOD_RES (1339)..(1339): Selenocysteine
  MOD_RES (1357)..(1357): Selenocysteine
  MOD_RES (1369)..(1370): Selenocysteine
  MOD_RES (1403)..(1403): Selenocysteine
  MOD_RES (1407)..(1407): Selenocysteine
  MOD_RES (1410)..(1410): Selenocysteine
  MOD_RES (1415)..(1415): Selenocysteine
  MOD_RES (1442)..(1442): Selenocysteine
  MOD_RES (1470)..(1470): Selenocysteine
  MOD_RES (1484)..(1484): Selenocysteine
  MOD_RES (1490)..(1490): Selenocysteine
  MOD_RES (1512)..(1512): Selenocysteine
  MOD_RES (1528)..(1528): Selenocysteine
  MOD_RES (1558)..(1558): Selenocysteine
MYVRVSFDXKPDLLLHLMXKEWQLELPKLLISVHGGLQNFELQPKLKQVFGKGLIKAAMXXGAWIFXGGVNXGVIRHVGDALKDHASKSRGKICXIGIAPWGIVENQEDLIGRDVVRPYQXMSNPMSKLXVLNSMHSHFILADNGXXGKYGAEVKLRRQLEKHISLQKINXRCLPFFSLDSRLFYSFWGSCQLDSVGIGQGVPVVALIVEGGPNVISIVLEYLRDXPPVPVVVCDGSGRASDILAFGHKYSEEGGLINESLRDQLLVXIQKXFXYXRXQAQHLFIILMECMKKKELIXVFRMGSEGHQDIDLAILXALLKGANASAPDQLSLALAWNRVDIARSQIFIYGQQWPVGSLEQAMLDALVLDRVDFVKLLIENGVSMHRFLXISRLEELYNXRHGPSNXLYHLVRDVKKGNLPPDYRISLIDIGLVIEYLMGGAYRCNYXRKRFRXLYHNLFGPKRDDIPLRRGRKXXKKREEEVDIDLDDPEINHFPFPFHELMVWAVLMKRQKMALFFWQHGEEAMAKALVACKLCKAMAHEASENDMVDDISQELNHNSRDFGQLAVELLDQSYKQDEQLAMKLLXYELKNWSNAXCLQLAVAAKHRDFIAHXCSQMLLXDMWMGRLRMRKNSGLKVILGILLPPSILSLEFKNKDDMPYMSQAQEIHLQEKEAEEPEKPXKEKEEEDMELXAMLGRNNGESSRKKDEEEVQSKHRLIPLGRKIYEFYNAPIVKFWFYXLAYIGYLMLFNYIVLVKMERWPSXQEWIVISYIFXLGIEKMREILMSEPGKLLQKVKVWLQEYWNVXDLIAILLFSVGMILRLQDQPFRSDGRVIYCVNIIYWYIRLLDIFGVNKYLGPYVMMIGKMMIDMMYFVIIMLVVLMSFGVARQAILFPNEEPSWKLAKNIFYMPYWMIYGEVFADQIDPPCGQNEXREDGKIIQLPPCKXGAWIVPAIMACYLLVANILLVNLLIAVFNNXFFEVKSISNQVWKFQRYQLIMXFHERPVLPPPLIIFSHMXMIFQHLCCRWRKHESDPDERDYGLKLFIXDDELKKVHDFEEQCIEEYFREKDDRFNSSNDERIRVXSERVENMSMRLEEVNEREHSMKASLQXVDIRLAQLEDLIGRMAXALERLXGLERAESNKIRSRXSSDCXDAAYIVRQSSFNSQEGNXFKLQESIDPAGEEXMSPXSPXLMPRMRSHSFYSVNMKDKGGIEKLESIFKERSLSLHRAXSSHSVAKEPKAPAAPANXLAIVPDSRRPSSCIDIYVSAMDELHCDIDPLDNSVNILGLGEPSFSXPVPSXAPSSSAYAXLAPXDRPPSRSIDFEDIXSMDXRSFSSDYXHLPECQNPWDSEPPMYHXIERSKSSRYLAXXPFLLEEAPIVKSHSFMFSPSRSYYANFGVPVKXAEYXSIXDCIDXRCVNAPQAIADRAAFPGGLGDKVEDLXCCHPEREAELSHPSSDSEENEAKGRRAXIAISSQEGDNSERXLSNNIXVPKIERANSYSAEEPSAPYAHXRKSFSISDKLDRQRNXASLRNPFQRSKSSKPEGRGDSLSMRRLSRXSAFQSFESKHN

SEQ ID NO: 28668 - protein, 1579 aa, Homo sapiens
  MOD_RES (9)..(9): Selenocysteine
  MOD_RES (19)..(19): Selenocysteine
  MOD_RES (60)..(61): Selenocysteine
  MOD_RES (67)..(67): Selenocysteine
  MOD_RES (72)..(72): Selenocysteine
  MOD_RES (95)..(95): Selenocysteine
  MOD_RES (121)..(121): Selenocysteine
  MOD_RES (130)..(130): Selenocysteine
  MOD_RES (146)..(147): Selenocysteine
  MOD_RES (171)..(171): Selenocysteine
  MOD_RES (226)..(226): Selenocysteine
  MOD_RES (268)..(268): Selenocysteine
  MOD_RES (272)..(272): Selenocysteine
  MOD_RES (274)..(274): Selenocysteine
  MOD_RES (276)..(276): Selenocysteine
  MOD_RES (278)..(278): Selenocysteine
  MOD_RES (298)..(298): Selenocysteine
  MOD_RES (316)..(316): Selenocysteine
  MOD_RES (389)..(389): Selenocysteine
  MOD_RES (399)..(399): Selenocysteine
  MOD_RES (406)..(406): Selenocysteine
  MOD_RES (447)..(447): Selenocysteine
  MOD_RES (453)..(453): Selenocysteine
  MOD_RES (484)..(485): Selenocysteine
  MOD_RES (596)..(596): Selenocysteine
  MOD_RES (606)..(606): Selenocysteine
  MOD_RES (623)..(623): Selenocysteine
  MOD_RES (630)..(630): Selenocysteine
  MOD_RES (691)..(691): Selenocysteine
  MOD_RES (702)..(702): Selenocysteine
  MOD_RES (749)..(749): Selenocysteine
  MOD_RES (773)..(773): Selenocysteine
  MOD_RES (784)..(784): Selenocysteine
  MOD_RES (816)..(816): Selenocysteine
  MOD_RES (942)..(942): Selenocysteine
  MOD_RES (956)..(956): Selenocysteine
  MOD_RES (987)..(987): Selenocysteine
  MOD_RES (1009)..(1009): Selenocysteine
  MOD_RES (1027)..(1027): Selenocysteine
  MOD_RES (1056)..(1056): Selenocysteine
  MOD_RES (1093)..(1093): Selenocysteine
  MOD_RES (1120)..(1120): Selenocysteine
  MOD_RES (1137)..(1137): Selenocysteine
  MOD_RES (1143)..(1143): Selenocysteine
  MOD_RES (1157)..(1157): Selenocysteine
  MOD_RES (1162)..(1162): Selenocysteine
  MOD_RES (1180)..(1180): Selenocysteine
  MOD_RES (1194)..(1194): Selenocysteine
  MOD_RES (1198)..(1198): Selenocysteine
  MOD_RES (1201)..(1201): Selenocysteine
  MOD_RES (1240)..(1240): Selenocysteine
  MOD_RES (1258)..(1258): Selenocysteine
  MOD_RES (1305)..(1305): Selenocysteine
  MOD_RES (1310)..(1310): Selenocysteine
  MOD_RES (1319)..(1319): Selenocysteine
  MOD_RES (1323)..(1323): Selenocysteine
  MOD_RES (1337)..(1337): Selenocysteine
  MOD_RES (1341)..(1341): Selenocysteine
  MOD_RES (1349)..(1349): Selenocysteine
  MOD_RES (1367)..(1367): Selenocysteine
  MOD_RES (1379)..(1380): Selenocysteine
  MOD_RES (1413)..(1413): Selenocysteine
  MOD_RES (1417)..(1417): Selenocysteine
  MOD_RES (1420)..(1420): Selenocysteine
  MOD_RES (1425)..(1425): Selenocysteine
  MOD_RES (1452)..(1452): Selenocysteine
  MOD_RES (1480)..(1480): Selenocysteine
  MOD_RES (1494)..(1494): Selenocysteine
  MOD_RES (1500)..(1500): Selenocysteine
  MOD_RES (1522)..(1522): Selenocysteine
  MOD_RES (1538)..(1538): Selenocysteine
  MOD_RES (1568)..(1568): Selenocysteine
MYVRVSFDXKPDLLLHLMXKEWQLELPKLLISVHGGLQNFELQPKLKQVFGKGLIKAAMXXGAWIFXGGVNXGVIRHVGDALKDHASKSRGKICXIGIAPWGIVENQEDLIGRDVVRPYQXMSNPMSKLXVLNSMHSHFILADNGXXGKYGAEVKLRRQLEKHISLQKINXRCLPFFSLDSRLFYSFWGSCQLDSVGIGQGVPVVALIVEGGPNVISIVLEYLRDXPPVPVVVCDGSGRASDILAFGHKYSEEGGLINESLRDQLLVXIQKXFXYXRXQAQHLFIILMECMKKKELIXVFRMGSEGHQDIDLAILXALLKGANASAPDQLSLALAWNRVDIARSQIFIYGQQWPVGSLEQAMLDALVLDRVDFVKLLIENGVSMHRFLXISRLEELYNXRHGPSNXLYHLVRDVKKGNLPPDYRISLIDIGLVIEYLMGGAYRCNYXRKRFRXLYHNLFGPKRPKALKLLGMEDDIPLRRGRKXXKKREEEVDIDLDDPEINHFPFPFHELMVWAVLMKRQKMALFFWQHGEEAMAKALVACKLCKAMAHEASENDMVDDISQELNHNSRDFGQLAVELLDQSYKQDEQLAMKLLXYELKNWSNAXCLQLAVAAKHRDFIAHXCSQMLLXDMWMGRLRMRKNSGLKVILGILLPPSILSLEFKNKDDMPYMSQAQEIHLQEKEAEEPEKPXKEKEEEDMELXAMLGRNNGESSRKKDEEEVQSKHRLIPLGRKIYEFYNAPIVKFWFYXLAYIGYLMLFNYIVLVKMERWPSXQEWIVISYIFXLGIEKMREILMSEPGKLLQKVKVWLQEYWNVXDLIAILLFSVGMILRLQDQPFRSDGRVIYCVNIIYWYIRLLDIFGVNKYLGPYVMMIGKMMIDMMYFVIIMLVVLMSFGVARQAILFPNEEPSWKLAKNIFYMPYWMIYGEVFADQIDPPCGQNEXREDGKIIQLPPCKXGAWIVPAIMACYLLVANILLVNLLIAVFNNXFFEVKSISNQVWKFQRYQLIMXFHERPVLPPPLIIFSHMXMIFQHLCCRWRKHESDPDERDYGLKLFIXDDELKKVHDFEEQCIEEYFREKDDRFNSSNDERIRVXSERVENMSMRLEEVNEREHSMKASLQXVDIRLAQLEDLIGRMAXALERLXGLERAESNKIRSRXSSDCXDAAYIVRQSSFNSQEGNXFKLQESIDPAGEEXMSPXSPXLMPRMRSHSFYSVNMKDKGGIEKLESIFKERSLSLHRAXSSHSVAKEPKAPAAPANXLAIVPDSRRPSSCIDIYVSAMDELHCDIDPLDNSVNILGLGEPSFSXPVPSXAPSSSAYAXLAPXDRPPSRSIDFEDIXSMDXRSFSSDYXHLPECQNPWDSEPPMYHXIERSKSSRYLAXXPFLLEEAPIVKSHSFMFSPSRSYYANFGVPVKXAEYXSIXDCIDXRCVNAPQAIADRAAFPGGLGDKVEDLXCCHPEREAELSHPSSDSEENEAKGRRAXIAISSQEGDNSERXLSNNIXVPKIERANSYSAEEPSAPYAHXRKSFSISDKLDRQRNXASLRNPFQRSKSSKPEGRGDSLSMRRLSRXSAFQSFESKHN

SEQ ID NO: 28669 - protein, 230 aa, Homo sapiens
  MOD_RES (9)..(9): Selenocysteine
  MOD_RES (19)..(19): Selenocysteine
  MOD_RES (60)..(61): Selenocysteine
  MOD_RES (67)..(67): Selenocysteine
  MOD_RES (72)..(72): Selenocysteine
  MOD_RES (95)..(95): Selenocysteine
  MOD_RES (121)..(121): Selenocysteine
  MOD_RES (130)..(130): Selenocysteine
  MOD_RES (146)..(147): Selenocysteine
  MOD_RES (171)..(171): Selenocysteine
  MOD_RES (201)..(201): Selenocysteine
MYVRVSFDXKPDLLLHLMXKEWQLELPKLLISVHGGLQNFELQPKLKQVFGKGLIKAAMXXGAWIFXGGVNXGVIRHVGDALKDHASKSRGKICXIGIAPWGIVENQEDLIGRDVVRPYQXMSNPMSKLXVLNSMHSHFILADNGXXGKYGAEVKLRRQLEKHISLQKINXRIGQGVPVVALIVEGGPNVISIVLEYLRDXPPVPVVVCDGSGRASDILAFGHKYSEEGG

SEQ ID NO: 28670 - protein, 323 aa, Homo sapiens
  MOD_RES (9)..(9): Selenocysteine
  MOD_RES (19)..(19): Selenocysteine
  MOD_RES (60)..(61): Selenocysteine
  MOD_RES (67)..(67): Selenocysteine
  MOD_RES (72)..(72): Selenocysteine
  MOD_RES (95)..(95): Selenocysteine
  MOD_RES (121)..(121): Selenocysteine
  MOD_RES (130)..(130): Selenocysteine
  MOD_RES (146)..(147): Selenocysteine
  MOD_RES (171)..(171): Selenocysteine
  MOD_RES (201)..(201): Selenocysteine
  MOD_RES (243)..(243): Selenocysteine
  MOD_RES (247)..(247): Selenocysteine
  MOD_RES (249)..(249): Selenocysteine
  MOD_RES (251)..(251): Selenocysteine
  MOD_RES (253)..(253): Selenocysteine
  MOD_RES (300)..(300): Selenocysteine
MYVRVSFDXKPDLLLHLMXKEWQLELPKLLISVHGGLQNFELQPKLKQVFGKGLIKAAMXXGAWIFXGGVNXGVIRHVGDALKDHASKSRGKICXIGIAPWGIVENQEDLIGRDVVRPYQXMSNPMSKLXVLNSMHSHFILADNGXXGKYGAEVKLRRQLEKHISLQKINXRIGQGVPVVALIVEGGPNVISIVLEYLRDXPPVPVVVCDGSGRASDILAFGHKYSEEGGLINESLRDQLLVXIQKXFXYXRXQAQHLFIILMECMKKKELVGNSAWVASCLHIFSHFLESHNIFSNHAXFSLSGRAYSSPQAPLAPVASSPK

SEQ ID NO: 28671 - protein, 1556 aa, Homo sapiens
  MOD_RES (9)..(9): Selenocysteine
  MOD_RES (19)..(19): Selenocysteine
  MOD_RES (60)..(61): Selenocysteine
  MOD_RES (67)..(67): Selenocysteine
  MOD_RES (72)..(72): Selenocysteine
  MOD_RES (95)..(95): Selenocysteine
  MOD_RES (121)..(121): Selenocysteine
  MOD_RES (130)..(130): Selenocysteine
  MOD_RES (146)..(147): Selenocysteine
  MOD_RES (171)..(171): Selenocysteine
  MOD_RES (201)..(201): Selenocysteine
  MOD_RES (243)..(243): Selenocysteine
  MOD_RES (247)..(247): Selenocysteine
  MOD_RES (249)..(249): Selenocysteine
  MOD_RES (251)..(251): Selenocysteine
  MOD_RES (253)..(253): Selenocysteine
  MOD_RES (273)..(273): Selenocysteine
  MOD_RES (291)..(291): Selenocysteine
  MOD_RES (364)..(364): Selenocysteine
  MOD_RES (374)..(374): Selenocysteine
  MOD_RES (381)..(381): Selenocysteine
  MOD_RES (434)..(434): Selenocysteine
  MOD_RES (440)..(440): Selenocysteine
  MOD_RES (461)..(462): Selenocysteine
  MOD_RES (573)..(573): Selenocysteine
  MOD_RES (583)..(583): Selenocysteine
  MOD_RES (600)..(600): Selenocysteine
  MOD_RES (607)..(607): Selenocysteine
  MOD_RES (668)..(668): Selenocysteine
  MOD_RES (679)..(679): Selenocysteine
  MOD_RES (726)..(726): Selenocysteine
  MOD_RES (750)..(750): Selenocysteine
  MOD_RES (761)..(761): Selenocysteine
  MOD_RES (793)..(793): Selenocysteine
  MOD_RES (919)..(919): Selenocysteine
  MOD_RES (933)..(933): Selenocysteine
  MOD_RES (964)..(964): Selenocysteine
  MOD_RES (986)..(986): Selenocysteine
  MOD_RES (1004)..(1004): Selenocysteine
  MOD_RES (1033)..(1033): Selenocysteine
  MOD_RES (1070)..(1070): Selenocysteine
  MOD_RES (1097)..(1097): Selenocysteine
  MOD_RES (1114)..(1114): Selenocysteine
  MOD_RES (1120)..(1120): Selenocysteine
  MOD_RES (1134)..(1134): Selenocysteine
  MOD_RES (1139)..(1139): Selenocysteine
  MOD_RES (1157)..(1157): Selenocysteine
  MOD_RES (1171)..(1171): Selenocysteine
  MOD_RES (1175)..(1175): Selenocysteine
  MOD_RES (1178)..(1178): Selenocysteine
  MOD_RES (1217)..(1217): Selenocysteine
  MOD_RES (1235)..(1235): Selenocysteine
  MOD_RES (1282)..(1282): Selenocysteine
  MOD_RES (1287)..(1287): Selenocysteine
  MOD_RES (1296)..(1296): Selenocysteine
  MOD_RES (1300)..(1300): Selenocysteine
  MOD_RES (1314)..(1314): Selenocysteine
  MOD_RES (1318)..(1318): Selenocysteine
  MOD_RES (1326)..(1326): Selenocysteine
  MOD_RES (1344)..(1344): Selenocysteine
  MOD_RES (1356)..(1357): Selenocysteine
  MOD_RES (1390)..(1390): Selenocysteine
  MOD_RES (1394)..(1394): Selenocysteine
  MOD_RES (1397)..(1397): Selenocysteine
  MOD_RES (1402)..(1402): Selenocysteine
  MOD_RES (1429)..(1429): Selenocysteine
  MOD_RES (1457)..(1457): Selenocysteine
  MOD_RES (1471)..(1471): Selenocysteine
  MOD_RES (1477)..(1477): Selenocysteine
  MOD_RES (1499)..(1499): Selenocysteine
  MOD_RES (1515)..(1515): Selenocysteine
  MOD_RES (1545)..(1545): Selenocysteine
MYVRVSFDXKPDLLLHLMXKEWQLELPKLLISVHGGLQNFELQPKLKQVFGKGLIKAAMXXGAWIFXGGVNXGVIRHVGDALKDHASKSRGKICXIGIAPWGIVENQEDLIGRDVVRPYQXMSNPMSKLXVLNSMHSHFILADNGXXGKYGAEVKLRRQLEKHISLQKINXRIGQGVPVVALIVEGGPNVISIVLEYLRDXPPVPVVVCDGSGRASDILAFGHKYSEEGGLINESLRDQLLVXIQKXFXYXRXQAQHLFIILMECMKKKELIXVFRMGSEGHQDIDLAILXALLKGANASAPDQLSLALAWNRVDIARSQIFIYGQQWPVGSLEQAMLDALVLDRVDFVKLLIENGVSMHRFLXISRLEELYNXRHGPSNXLYHLVRDVKKREYPGFGWIYFKGNLPPDYRISLIDIGLVIEYLMGGAYRCNYXRKRFRXLYHNLFGPKRDDIPLRRGRKXXKKREEEVDIDLDDPEINHFPFPFHELMVWAVLMKRQKMALFFWQHGEEAMAKALVACKLCKAMAHEASENDMVDDISQELNHNSRDFGQLAVELLDQSYKQDEQLAMKLLXYELKNWSNAXCLQLAVAAKHRDFIAHXCSQMLLXDMWMGRLRMRKNSGLKVILGILLPPSILSLEFKNKDDMPYMSQAQEIHLQEKEAEEPEKPXKEKEEEDMELXAMLGRNNGESSRKKDEEEVQSKHRLIPLGRKIYEFYNAPIVKFWFYXLAYIGYLMLFNYIVLVKMERWPSXQEWIVISYIFXLGIEKMREILMSEPGKLLQKVKVWLQEYWNVXDLIAILLFSVGMILRLQDQPFRSDGRVIYCVNIIYWYIRLLDIFGVNKYLGPYVMMIGKMMIDMMYFVIIMLVVLMSFGVARQAILFPNEEPSWKLAKNIFYMPYWMIYGEVFADQIDPPCGQNEXREDGKIIQLPPCKXGAWIVPAIMACYLLVANILLVNLLIAVFNNXFFEVKSISNQVWKFQRYQLIMXFHERPVLPPPLIIFSHMXMIFQHLCCRWRKHESDPDERDYGLKLFIXDDELKKVHDFEEQCIEEYFREKDDRFNSSNDERIRVXSERVENMSMRLEEVNEREHSMKASLQXVDIRLAQLEDLIGRMAXALERLXGLERAESNKIRSRXSSDCXDAAYIVRQSSFNSQEGNXFKLQESIDPAGEEXMSPXSPXLMPRMRSHSFYSVNMKDKGGIEKLESIFKERSLSLHRAXSSHSVAKEPKAPAAPANXLAIVPDSRRPSSCIDIYVSAMDELHCDIDPLDNSVNILGLGEPSFSXPVPSXAPSSSAYAXLAPXDRPPSRSIDFEDIXSMDXRSFSSDYXHLPECQNPWDSEPPMYHXIERSKSSRYLAXXPFLLEEAPIVKSHSFMFSPSRSYYANFGVPVKXAEYXSIXDCIDXRCVNAPQAIADRAAFPGGLGDKVEDLXCCHPEREAELSHPSSDSEENEAKGRRAXIAISSQEGDNSERXLSNNIXVPKIERANSYSAEEPSAPYAHXRKSFSISDKLDRQRNXASLRNPFQRSKSSKPEGRGDSLSMRRLSRXSAFQSFESKHN

SEQ ID NO: 28672 - protein, 1566 aa, Homo sapiens
  MOD_RES (9)..(9): Selenocysteine
  MOD_RES (19)..(19): Selenocysteine
  MOD_RES (60)..(61): Selenocysteine
  MOD_RES (67)..(67): Selenocysteine
  MOD_RES (72)..(72): Selenocysteine
  MOD_RES (95)..(95): Selenocysteine
  MOD_RES (121)..(121): Selenocysteine
  MOD_RES (130)..(130): Selenocysteine
  MOD_RES (146)..(147): Selenocysteine
  MOD_RES (171)..(171): Selenocysteine
  MOD_RES (201)..(201): Selenocysteine
  MOD_RES (243)..(243): Selenocysteine
  MOD_RES (247)..(247): Selenocysteine
  MOD_RES (249)..(249): Selenocysteine
  MOD_RES (251)..(251): Selenocysteine
  MOD_RES (253)..(253): Selenocysteine
  MOD_RES (273)..(273): Selenocysteine
  MOD_RES (291)..(291): Selenocysteine
  MOD_RES (364)..(364): Selenocysteine
  MOD_RES (374)..(374): Selenocysteine
  MOD_RES (381)..(381): Selenocysteine
  MOD_RES (434)..(434): Selenocysteine
  MOD_RES (440)..(440): Selenocysteine
  MOD_RES (471)..(472): Selenocysteine
  MOD_RES (583)..(583): Selenocysteine
  MOD_RES (593)..(593): Selenocysteine
  MOD_RES (610)..(610): Selenocysteine
  MOD_RES (617)..(617): Selenocysteine
  MOD_RES (678)..(678): Selenocysteine
  MOD_RES (689)..(689): Selenocysteine
  MOD_RES (736)..(736): Selenocysteine
  MOD_RES (760)..(760): Selenocysteine
  MOD_RES (771)..(771): Selenocysteine
  MOD_RES (803)..(803): Selenocysteine
  MOD_RES (929)..(929): Selenocysteine
  MOD_RES (943)..(943): Selenocysteine
  MOD_RES (974)..(974): Selenocysteine
  MOD_RES (996)..(996): Selenocysteine
  MOD_RES (1014)..(1014): Selenocysteine
  MOD_RES (1043)..(1043): Selenocysteine
  MOD_RES (1080)..(1080): Selenocysteine
  MOD_RES (1107)..(1107): Selenocysteine
  MOD_RES (1124)..(1124): Selenocysteine
  MOD_RES (1130)..(1130): Selenocysteine
  MOD_RES (1144)..(1144): Selenocysteine
  MOD_RES (1149)..(1149): Selenocysteine
  MOD_RES (1167)..(1167): Selenocysteine
  MOD_RES (1181)..(1181): Selenocysteine
  MOD_RES (1185)..(1185): Selenocysteine
  MOD_RES (1188)..(1188): Selenocysteine
  MOD_RES (1227)..(1227): Selenocysteine
  MOD_RES (1245)..(1245): Selenocysteine
  MOD_RES (1292)..(1292): Selenocysteine
  MOD_RES (1297)..(1297): Selenocysteine
  MOD_RES (1306)..(1306): Selenocysteine
  MOD_RES (1310)..(1310): Selenocysteine
  MOD_RES (1324)..(1324): Selenocysteine
  MOD_RES (1328)..(1328): Selenocysteine
  MOD_RES (1336)..(1336): Selenocysteine
  MOD_RES (1354)..(1354): Selenocysteine
  MOD_RES (1366)..(1367): Selenocysteine
  MOD_RES (1400)..(1400): Selenocysteine
  MOD_RES (1404)..(1404): Selenocysteine
  MOD_RES (1407)..(1407): Selenocysteine
  MOD_RES (1412)..(1412): Selenocysteine
  MOD_RES (1439)..(1439): Selenocysteine
  MOD_RES (1467)..(1467): Selenocysteine
  MOD_RES (1481)..(1481): Selenocysteine
  MOD_RES (1487)..(1487): Selenocysteine
  MOD_RES (1509)..(1509): Selenocysteine
  MOD_RES (1525)..(1525): Selenocysteine
  MOD_RES (1555)..(1555): Selenocysteine
MYVRVSFDXKPDLLLHLMXKEWQLELPKLLISVHGGLQNFELQPKLKQVFGKGLIKAAMXXGAWIFXGGVNXGVIRHVGDALKDHASKSRGKICXIGIAPWGIVENQEDLIGRDVVRPYQXMSNPMSKLXVLNSMHSHFILADNGXXGKYGAEVKLRRQLEKHISLQKINXRIGQGVPVVALIVEGGPNVISIVLEYLRDXPPVPVVVCDGSGRASDILAFGHKYSEEGGLINESLRDQLLVXIQKXFXYXRXQAQHLFIILMECMKKKELIXVFRMGSEGHQDIDLAILXALLKGANASAPDQLSLALAWNRVDIARSQIFIYGQQWPVGSLEQAMLDALVLDRVDFVKLLIENGVSMHRFLXISRLEELYNXRHGPSNXLYHLVRDVKKREYPGFGWIYFKGNLPPDYRISLIDIGLVIEYLMGGAYRCNYXRKRFRXLYHNLFGPKRPKALKLLGMEDDIPLRRGRKXXKKREEEVDIDLDDPEINHFPFPFHELMVWAVLMKRQKMALFFWQHGEEAMAKALVACKLCKAMAHEASENDMVDDISQELNHNSRDFGQLAVELLDQSYKQDEQLAMKLLXYELKNWSNAXCLQLAVAAKHRDFIAHXCSQMLLXDMWMGRLRMRKNSGLKVILGILLPPSILSLEFKNKDDMPYMSQAQEIHLQEKEAEEPEKPXKEKEEEDMELXAMLGRNNGESSRKKDEEEVQSKHRLIPLGRKIYEFYNAPIVKFWFYXLAYIGYLMLFNYIVLVKMERWPSXQEWIVISYIFXLGIEKMREILMSEPGKLLQKVKVWLQEYWNVXDLIAILLFSVGMILRLQDQPFRSDGRVIYCVNIIYWYIRLLDIFGVNKYLGPYVMMIGKMMIDMMYFVIIMLVVLMSFGVARQAILFPNEEPSWKLAKNIFYMPYWMIYGEVFADQIDPPCGQNEXREDGKIIQLPPCKXGAWIVPAIMACYLLVANILLVNLLIAVFNNXFFEVKSISNQVWKFQRYQLIMXFHERPVLPPPLIIFSHMXMIFQHLCCRWRKHESDPDERDYGLKLFIXDDELKKVHDFEEQCIEEYFREKDDRFNSSNDERIRVXSERVENMSMRLEEVNEREHSMKASLQXVDIRLAQLEDLIGRMAXALERLXGLERAESNKIRSRXSSDCXDAAYIVRQSSFNSQEGNXFKLQESIDPAGEEXMSPXSPXLMPRMRSHSFYSVNMKDKGGIEKLESIFKERSLSLHRAXSSHSVAKEPKAPAAPANXLAIVPDSRRPSSCIDIYVSAMDELHCDIDPLDNSVNILGLGEPSFSXPVPSXAPSSSAYAXLAPXDRPPSRSIDFEDIXSMDXRSFSSDYXHLPECQNPWDSEPPMYHXIERSKSSRYLAXXPFLLEEAPIVKSHSFMFSPSRSYYANFGVPVKXAEYXSIXDCIDXRCVNAPQAIADRAAFPGGLGDKVEDLXCCHPEREAELSHPSSDSEENEAKGRRAXIAISSQEGDNSERXLSNNIXVPKIERANSYSAEEPSAPYAHXRKSFSISDKLDRQRNXASLRNPFQRSKSSKPEGRGDSLSMRRLSRXSAFQSFESKHN

SEQ ID NO: 28673 - protein, 1566 aa, Homo sapiens
  MOD_RES (9)..(9): Selenocysteine
  MOD_RES (19)..(19): Selenocysteine
  MOD_RES (60)..(61): Selenocysteine
  MOD_RES (67)..(67): Selenocysteine
  MOD_RES (72)..(72): Selenocysteine
  MOD_RES (95)..(95): Selenocysteine
  MOD_RES (121)..(121): Selenocysteine
  MOD_RES (130)..(130): Selenocysteine
  MOD_RES (146)..(147): Selenocysteine
  MOD_RES (171)..(171): Selenocysteine
  MOD_RES (201)..(201): Selenocysteine
  MOD_RES (243)..(243): Selenocysteine
  MOD_RES (247)..(247): Selenocysteine
  MOD_RES (249)..(249): Selenocysteine
  MOD_RES (251)..(251): Selenocysteine
  MOD_RES (253)..(253): Selenocysteine
  MOD_RES (273)..(273): Selenocysteine
  MOD_RES (291)..(291): Selenocysteine
  MOD_RES (364)..(364): Selenocysteine
  MOD_RES (374)..(374): Selenocysteine
  MOD_RES (381)..(381): Selenocysteine
  MOD_RES (422)..(422): Selenocysteine
  MOD_RES (428)..(428): Selenocysteine
  MOD_RES (459)..(460): Selenocysteine
  MOD_RES (571)..(571): Selenocysteine
  MOD_RES (581)..(581): Selenocysteine
  MOD_RES (598)..(598): Selenocysteine
  MOD_RES (605)..(605): Selenocysteine
  MOD_RES (666)..(666): Selenocysteine
  MOD_RES (677)..(677): Selenocysteine
  MOD_RES (724)..(724): Selenocysteine
  MOD_RES (748)..(748): Selenocysteine
  MOD_RES (759)..(759): Selenocysteine
  MOD_RES (791)..(791): Selenocysteine
  MOD_RES (918)..(918): Selenocysteine
  MOD_RES (929)..(929): Selenocysteine
  MOD_RES (943)..(943): Selenocysteine
  MOD_RES (974)..(974): Selenocysteine
  MOD_RES (996)..(996): Selenocysteine
  MOD_RES (1014)..(1014): Selenocysteine
  MOD_RES (1043)..(1043): Selenocysteine
  MOD_RES (1080)..(1080): Selenocysteine
  MOD_RES (1107)..(1107): Selenocysteine
  MOD_RES (1124)..(1124): Selenocysteine
  MOD_RES (1130)..(1130): Selenocysteine
  MOD_RES (1144)..(1144): Selenocysteine
  MOD_RES (1149)..(1149): Selenocysteine
  MOD_RES (1167)..(1167): Selenocysteine
  MOD_RES (1181)..(1181): Selenocysteine
  MOD_RES (1185)..(1185): Selenocysteine
  MOD_RES (1188)..(1188): Selenocysteine
  MOD_RES (1227)..(1227): Selenocysteine
  MOD_RES (1245)..(1245): Selenocysteine
  MOD_RES (1292)..(1292): Selenocysteine
  MOD_RES (1297)..(1297): Selenocysteine
  MOD_RES (1306)..(1306): Selenocysteine
  MOD_RES (1310)..(1310): Selenocysteine
  MOD_RES (1324)..(1324): Selenocysteine
  MOD_RES (1328)..(1328): Selenocysteine
  MOD_RES (1336)..(1336): Selenocysteine
  MOD_RES (1354)..(1354): Selenocysteine
  MOD_RES (1366)..(1367): Selenocysteine
  MOD_RES (1400)..(1400): Selenocysteine
  MOD_RES (1404)..(1404): Selenocysteine
  MOD_RES (1407)..(1407): Selenocysteine
  MOD_RES (1412)..(1412): Selenocysteine
  MOD_RES (1439)..(1439): Selenocysteine
  MOD_RES (1467)..(1467): Selenocysteine
  MOD_RES (1481)..(1481): Selenocysteine
  MOD_RES (1487)..(1487): Selenocysteine
  MOD_RES (1509)..(1509): Selenocysteine
  MOD_RES (1525)..(1525): Selenocysteine
  MOD_RES (1555)..(1555): Selenocysteine
MYVRVSFDXKPDLLLHLMXKEWQLELPKLLISVHGGLQNFELQPKLKQVFGKGLIKAAMXXGAWIFXGGVNXGVIRHVGDALKDHASKSRGKICXIGIAPWGIVENQEDLIGRDVVRPYQXMSNPMSKLXVLNSMHSHFILADNGXXGKYGAEVKLRRQLEKHISLQKINXRIGQGVPVVALIVEGGPNVISIVLEYLRDXPPVPVVVCDGSGRASDILAFGHKYSEEGGLINESLRDQLLVXIQKXFXYXRXQAQHLFIILMECMKKKELIXVFRMGSEGHQDIDLAILXALLKGANASAPDQLSLALAWNRVDIARSQIFIYGQQWPVGSLEQAMLDALVLDRVDFVKLLIENGVSMHRFLXISRLEELYNXRHGPSNXLYHLVRDVKKGNLPPDYRISLIDIGLVIEYLMGGAYRCNYXRKRFRXLYHNLFGPKRPKALKLLGMEDDIPLRRGRKXXKKREEEVDIDLDDPEINHFPFPFHELMVWAVLMKRQKMALFFWQHGEEAMAKALVACKLCKAMAHEASENDMVDDISQELNHNSRDFGQLAVELLDQSYKQDEQLAMKLLXYELKNWSNAXCLQLAVAAKHRDFIAHXCSQMLLXDMWMGRLRMRKNSGLKVILGILLPPSILSLEFKNKDDMPYMSQAQEIHLQEKEAEEPEKPXKEKEEEDMELXAMLGRNNGESSRKKDEEEVQSKHRLIPLGRKIYEFYNAPIVKFWFYXLAYIGYLMLFNYIVLVKMERWPSXQEWIVISYIFXLGIEKMREILMSEPGKLLQKVKVWLQEYWNVXDLIAILLFSVGMILRLQDQPFRSDGRVIYCVNIIYWYIRLLDIFGVNKYLGPYVMMIGKMMIDMMYFVIIMLVVLMSFGVARQAILFPNEEPSWKLAKNIFYMPYWMIYGEVFADQIDRKQVYDSHXPKSAPCGQNEXREDGKIIQLPPCKXGAWIVPAIMACYLLVANILLVNLLIAVFNNXFFEVKSISNQVWKFQRYQLIMXFHERPVLPPPLIIFSHMXMIFQHLCCRWRKHESDPDERDYGLKLFIXDDELKKVHDFEEQCIEEYFREKDDRFNSSNDERIRVXSERVENMSMRLEEVNEREHSMKASLQXVDIRLAQLEDLIGRMAXALERLXGLERAESNKIRSRXSSDCXDAAYIVRQSSFNSQEGNXFKLQESIDPAGEEXMSPXSPXLMPRMRSHSFYSVNMKDKGGIEKLESIFKERSLSLHRAXSSHSVAKEPKAPAAPANXLAIVPDSRRPSSCIDIYVSAMDELHCDIDPLDNSVNILGLGEPSFSXPVPSXAPSSSAYAXLAPXDRPPSRSIDFEDIXSMDXRSFSSDYXHLPECQNPWDSEPPMYHXIERSKSSRYLAXXPFLLEEAPIVKSHSFMFSPSRSYYANFGVPVKXAEYXSIXDCIDXRCVNAPQAIADRAAFPGGLGDKVEDLXCCHPEREAELSHPSSDSEENEAKGRRAXIAISSQEGDNSERXLSNNIXVPKIERANSYSAEEPSAPYAHXRKSFSISDKLDRQRNXASLRNPFQRSKSSKPEGRGDSLSMRRLSRXSAFQSFESKHN

SEQ ID NO: 28674 - protein, 31 aa, Homo sapiens
  MOD_RES (19)..(19): Selenocysteine
  MOD_RES (21)..(22): Selenocysteine
  MOD_RES (28)..(28): Selenocysteine
MVVPEKEQSWIPKIFKKKXCXXFIVDSXDPG

SEQ ID NO: 28675 - protein, 103 aa, Homo sapiens
  MOD_RES (19)..(19): Selenocysteine
  MOD_RES (21)..(22): Selenocysteine
  MOD_RES (28)..(28): Selenocysteine
  MOD_RES (38)..(38): Selenocysteine
  MOD_RES (43)..(43): Selenocysteine
  MOD_RES (46)..(46): Selenocysteine
  MOD_RES (53)..(56): Selenocysteine
  MOD_RES (63)..(64): Selenocysteine
  MOD_RES (67)..(67): Selenocysteine
  MOD_RES (74)..(74): Selenocysteine
  MOD_RES (83)..(83): Selenocysteine
  MOD_RES (97)..(97): Selenocysteine
MVVPEKEQSWIPKIFKKKXCXXFIVDSXDPGARSLRGXGGAVXRRXGSSFPWXXXXRPSSWWXXAHXAAWGARXASACAWSPXSHSRRRAWEGLELXSLSCSS

SEQ ID NO: 28676 - protein, 216 aa, Homo sapiens
  MOD_RES (19)..(19): Selenocysteine
  MOD_RES (21)..(22): Selenocysteine
  MOD_RES (28)..(28): Selenocysteine
  MOD_RES (33)..(33): Selenocysteine
  MOD_RES (42)..(42): Selenocysteine
  MOD_RES (59)..(59): Selenocysteine
  MOD_RES (67)..(68): Selenocysteine
  MOD_RES (72)..(72): Selenocysteine
  MOD_RES (81)..(81): Selenocysteine
  MOD_RES (99)..(99): Selenocysteine
  MOD_RES (112)..(112): Selenocysteine
  MOD_RES (138)..(138): Selenocysteine
  MOD_RES (142)..(142): Selenocysteine
  MOD_RES (151)..(151): Selenocysteine
  MOD_RES (156)..(156): Selenocysteine
  MOD_RES (159)..(159): Selenocysteine
  MOD_RES (166)..(169): Selenocysteine
  MOD_RES (176)..(177): Selenocysteine
  MOD_RES (180)..(180): Selenocysteine
  MOD_RES (187)..(187): Selenocysteine
  MOD_RES (196)..(196): Selenocysteine
  MOD_RES (210)..(210): Selenocysteine
MVVPEKEQSWIPKIFKKKXCXXFIVDSXDPGGXLCQCGRPRXAHPAVAMEDAFGAAVVXVWDSDAHXXEKPXDAYGELDFXGAGRKHSNEPGLSLGVCXRASAGMLVWLYGXIRWPALGAPRWWPWVWPPGVWSGIEXPSSXPRARSLRGXGGAVXRRXGSSFPWXXXXRPSSWWXXAHXAAWGARXASACAWSPXSHSRRRAWEGLELXSLSCSS

SEQ ID NO: 28677 - protein, 1069 aa, Homo sapiens
  MOD_RES (19)..(19): Selenocysteine
  MOD_RES (21)..(22): Selenocysteine
  MOD_RES (28)..(28): Selenocysteine
  MOD_RES (33)..(33): Selenocysteine
  MOD_RES (42)..(42): Selenocysteine
  MOD_RES (59)..(59): Selenocysteine
  MOD_RES (67)..(68): Selenocysteine
  MOD_RES (72)..(72): Selenocysteine
  MOD_RES (81)..(81): Selenocysteine
  MOD_RES (97)..(97): Selenocysteine
  MOD_RES (107)..(107): Selenocysteine
  MOD_RES (109)..(109): Selenocysteine
  MOD_RES (132)..(132): Selenocysteine
  MOD_RES (149)..(149): Selenocysteine
  MOD_RES (155)..(155): Selenocysteine
  MOD_RES (160)..(160): Selenocysteine
  MOD_RES (178)..(178): Selenocysteine
  MOD_RES (181)..(181): Selenocysteine
  MOD_RES (199)..(199): Selenocysteine
  MOD_RES (239)..(239): Selenocysteine
  MOD_RES (262)..(262): Selenocysteine
  MOD_RES (267)..(267): Selenocysteine
  MOD_RES (286)..(286): Selenocysteine
  MOD_RES (292)..(292): Selenocysteine
  MOD_RES (314)..(314): Selenocysteine
  MOD_RES (318)..(318): Selenocysteine
  MOD_RES (356)..(356): Selenocysteine
  MOD_RES (362)..(362): Selenocysteine
  MOD_RES (375)..(375): Selenocysteine
  MOD_RES (456)..(456): Selenocysteine
  MOD_RES (486)..(486): Selenocysteine
  MOD_RES (545)..(545): Selenocysteine
  MOD_RES (653)..(653): Selenocysteine
  MOD_RES (677)..(677): Selenocysteine
  MOD_RES (687)..(688): Selenocysteine
  MOD_RES (705)..(705): Selenocysteine
  MOD_RES (709)..(709): Selenocysteine
  MOD_RES (718)..(718): Selenocysteine
  MOD_RES (739)..(739): Selenocysteine
  MOD_RES (748)..(748): Selenocysteine
  MOD_RES (758)..(758): Selenocysteine
  MOD_RES (766)..(766): Selenocysteine
  MOD_RES (803)..(803): Selenocysteine
  MOD_RES (865)..(865): Selenocysteine
  MOD_RES (901)..(901): Selenocysteine
  MOD_RES (978)..(978): Selenocysteine
  MOD_RES (1006)..(1006): Selenocysteine
MVVPEKEQSWIPKIFKKKXCXXFIVDSXDPGGXLCQCGRPRXAHPAVAMEDAFGAAVVXVWDSDAHXXEKPXDAYGELDFXGAGRKHSNFLRLSDRXDPAAVYSLVXRXWGFRAPNLVVSVLGGSGGPVLQXWLQDLLRRGLVRAAQSXGAWIVXGGLHXGIGRHVGVAVRDHQMASXGGXKVVAMGVAPWGVVRNRDXLINPKGSFPARYRWRGDPEDGVQFPLDYNYSAFFLVDDGXHGCLGGENRFRLRLESYISQQKXGVGGXGIDIPVLLLLIDGDEKMLXRIENAXQAQLPCLLVAGSGGAADCLAEXLEDXLAPGSGGARQGEARDRIRRFFPKGDLEVLQAQVERIMXRKELLXVYSSEDGSEEFEXIVLKALVKACGSSEASAYLDELRLAVAWNRVDIAQSELFRGDIQWRSFHLEASLMDALLNDRPEFVRLLISHGLSLGHFLXPMRLAQLYSAAPSNSLIRNLLDQASHSAGXKAPALKGGAAELRPPDVGHVLRMLLGKMCAPRYPSGGAWDPHPGQGFGESMYLLSDKAXSPLSLDAGLGQAPWSDLLLWALLLNRAQMAMYFWEMGSNAVSSALGACLLLRVMARLEPDAEEAARRKDLAFKFEGMGVDLFGECYRSSEVRAARLLLRRCPLWGDAXCLQLAMQADARAFFAQDGVQSLLXQKWWGDMASXXPIWALVLAFFCPPLIYXRLIXFRKSEEEPXREELEFDMDSVINGEGPVGLXPGLYHLGRXVLCIDFMVFXVRLLHIFXVNKQLGPKIVIVSKMMKDVFFFLFFLGVWLVAYGVAXEGLLRPRDSDFPSILRRVFYRPYLQIFGQIPQEDMDVALMEHSNCSSEPGFWAHPPGAQAGXCVSQYANWLVVLLLVIFLLVANILLVNLLIAMFSYXFGKVQGNSDLYWKAQRYRLIREFHSRPALAPPFIVISHLRLLLRQLCRRPRSPQPSSPALEHFRVYLSKEAERKLLXWESVHKENFLLARARDKRESDSERLKRXSQKVDLALKQLGHIREYEQRLKVLEREVQQCSRVLGWVAEALSRSALLPPGGPPPPDLPGSKD

SEQ ID NO: 28678 - protein, 1214 aa, Homo sapiens
  MOD_RES (19)..(19): Selenocysteine
  MOD_RES (21)..(22): Selenocysteine
  MOD_RES (28)..(28): Selenocysteine
  MOD_RES (33)..(33): Selenocysteine
  MOD_RES (42)..(42): Selenocysteine
  MOD_RES (59)..(59): Selenocysteine
  MOD_RES (67)..(68): Selenocysteine
  MOD_RES (72)..(72): Selenocysteine
  MOD_RES (81)..(81): Selenocysteine
  MOD_RES (97)..(97): Selenocysteine
  MOD_RES (107)..(107): Selenocysteine
  MOD_RES (109)..(109): Selenocysteine
  MOD_RES (132)..(132): Selenocysteine
  MOD_RES (149)..(149): Selenocysteine
  MOD_RES (155)..(155): Selenocysteine
  MOD_RES (160)..(160): Selenocysteine
  MOD_RES (178)..(178): Selenocysteine
  MOD_RES (181)..(181): Selenocysteine
  MOD_RES (199)..(199): Selenocysteine
  MOD_RES (239)..(239): Selenocysteine
  MOD_RES (262)..(262): Selenocysteine
  MOD_RES (267)..(267): Selenocysteine
  MOD_RES (286)..(286): Selenocysteine
  MOD_RES (292)..(292): Selenocysteine
  MOD_RES (314)..(314): Selenocysteine
  MOD_RES (318)..(318): Selenocysteine
  MOD_RES (356)..(356): Selenocysteine
  MOD_RES (362)..(362): Selenocysteine
  MOD_RES (375)..(375): Selenocysteine
  MOD_RES (456)..(456): Selenocysteine
  MOD_RES (486)..(486): Selenocysteine
  MOD_RES (545)..(545): Selenocysteine
  MOD_RES (653)..(653): Selenocysteine
  MOD_RES (677)..(677): Selenocysteine
  MOD_RES (687)..(688): Selenocysteine
  MOD_RES (705)..(705): Selenocysteine
  MOD_RES (709)..(709): Selenocysteine
  MOD_RES (718)..(718): Selenocysteine
  MOD_RES (738)..(738): Selenocysteine
  MOD_RES (745)..(745): Selenocysteine
  MOD_RES (781)..(781): Selenocysteine
  MOD_RES (823)..(823): Selenocysteine
  MOD_RES (873)..(873): Selenocysteine
  MOD_RES (884)..(884): Selenocysteine
  MOD_RES (893)..(893): Selenocysteine
  MOD_RES (903)..(903): Selenocysteine
  MOD_RES (911)..(911): Selenocysteine
  MOD_RES (948)..(948): Selenocysteine
  MOD_RES (1010)..(1010): Selenocysteine
  MOD_RES (1046)..(1046): Selenocysteine
  MOD_RES (1123)..(1123): Selenocysteine
  MOD_RES (1151)..(1151): Selenocysteine
MVVPEKEQSWIPKIFKKKXCXXFIVDSXDPGGXLCQCGRPRXAHPAVAMEDAFGAAVVXVWDSDAHXXEKPXDAYGELDFXGAGRKHSNFLRLSDRXDPAAVYSLVXRXWGFRAPNLVVSVLGGSGGPVLQXWLQDLLRRGLVRAAQSXGAWIVXGGLHXGIGRHVGVAVRDHQMASXGGXKVVAMGVAPWGVVRNRDXLINPKGSFPARYRWRGDPEDGVQFPLDYNYSAFFLVDDGXHGCLGGENRFRLRLESYISQQKXGVGGXGIDIPVLLLLIDGDEKMLXRIENAXQAQLPCLLVAGSGGAADCLAEXLEDXLAPGSGGARQGEARDRIRRFFPKGDLEVLQAQVERIMXRKELLXVYSSEDGSEEFEXIVLKALVKACGSSEASAYLDELRLAVAWNRVDIAQSELFRGDIQWRSFHLEASLMDALLNDRPEFVRLLISHGLSLGHFLXPMRLAQLYSAAPSNSLIRNLLDQASHSAGXKAPALKGGAAELRPPDVGHVLRMLLGKMCAPRYPSGGAWDPHPGQGFGESMYLLSDKAXSPLSLDAGLGQAPWSDLLLWALLLNRAQMAMYFWEMGSNAVSSALGACLLLRVMARLEPDAEEAARRKDLAFKFEGMGVDLFGECYRSSEVRAARLLLRRCPLWGDAXCLQLAMQADARAFFAQDGVQSLLXQKWWGDMASXXPIWALVLAFFCPPLIYXRLIXFRKSEEEPXREELEFDMDSVINGEGPVGXADPAEKXPLGVPRQSGRPGCCGGRCGGRRCLRRWFHFWGAPVXIFMGNVVSYLLFLLLFSRVLLVDFQPAPPGSLELLLYFWAFXLLCEELRQGLSGGGGSLASGGPGPGHASLSQRLRLYLADSWNQCDLVALXCFLLGVGCRLXPGLYHLGRXVLCIDFMVFXVRLLHIFXVNKQLGPKIVIVSKMMKDVFFFLFFLGVWLVAYGVAXEGLLRPRDSDFPSILRRVFYRPYLQIFGQIPQEDMDVALMEHSNCSSEPGFWAHPPGAQAGXCVSQYANWLVVLLLVIFLLVANILLVNLLIAMFSYXFGKVQGNSDLYWKAQRYRLIREFHSRPALAPPFIVISHLRLLLRQLCRRPRSPQPSSPALEHFRVYLSKEAERKLLXWESVHKENFLLARARDKRESDSERLKRXSQKVDLALKQLGHIREYEQRLKVLEREVQQCSRVLGWVAEALSRSALLPPGGPPPPDLPGSKD

SEQ ID NO: 28679 - protein, 156 aa, Homo sapiens
  MOD_RES (19)..(19): Selenocysteine
  MOD_RES (21)..(22): Selenocysteine
  MOD_RES (28)..(28): Selenocysteine
  MOD_RES (33)..(33): Selenocysteine
  MOD_RES (42)..(42): Selenocysteine
  MOD_RES (59)..(59): Selenocysteine
  MOD_RES (67)..(68): Selenocysteine
  MOD_RES (72)..(72): Selenocysteine
  MOD_RES (81)..(81): Selenocysteine
  MOD_RES (124)..(124): Selenocysteine
  MOD_RES (147)..(147): Selenocysteine
  MOD_RES (152)..(152): Selenocysteine
MVVPEKEQSWIPKIFKKKXCXXFIVDSXDPGGXLCQCGRPRXAHPAVAMEDAFGAAVVXVWDSDAHXXEKPXDAYGELDFXGAGRKHSNGSFPARYRWRGDPEDGVQFPLDYNYSAFFLVDDGXHGCLGGENRFRLRLESYISQQKXGVGGXGIDI

SEQ ID NO: 28680 - protein, 77 aa, Homo sapiens
  MOD_RES (19)..(19): Selenocysteine
  MOD_RES (21)..(22): Selenocysteine
  MOD_RES (28)..(28): Selenocysteine
  MOD_RES (52)..(52): Selenocysteine
MVVPEKEQSWIPKIFKKKXCXXFIVDSXDPGSLDCHWGSAHGHRPACWCGCXGPSDGQHWGHQGGGHGCGPLGCGPE

SEQ ID NO: 28681 - protein, 51 aa, Homo sapiens
  MOD_RES (1)..(1): Any amino acid
  MOD_RES (6)..(6): Selenocysteine
  MOD_RES (34)..(34): Selenocysteine
XRKLLXWESVHKENFLLARARDKRESDSERLKRXSQKSSSVAASWGGWPRP

SEQ ID NO: 28682 - protein, 9 aa, Homo sapiens
MPYEVNAGY

SEQ ID NO: 28683 - protein, 61 aa, Homo sapiens
  MOD_RES (12)..(12): Selenocysteine
  MOD_RES (39)..(39): Selenocysteine
  MOD_RES (59)..(59): Selenocysteine
MPYEVNAGYDFXNMVRKKNPPLRNVASEGEGQILEPIGXESKVSGKNKEFSADQMSENXDQ

SEQ ID NO: 28684 - protein, 108 aa, Homo sapiens
  MOD_RES (12)..(12): Selenocysteine
  MOD_RES (39)..(39): Selenocysteine
  MOD_RES (59)..(59): Selenocysteine
MPYEVNAGYDFXNMVRKKNPPLRNVASEGEGQILEPIGXESKVSGKNKEFSADQMSENXDQSDAAELNHKEEHSLHVQDPSSSSKKDLKSAVLSEKAGFNYESPSKGG

SEQ ID NO: 28685 - protein, 117 aa, Homo sapiens
  MOD_RES (12)..(12): Selenocysteine
  MOD_RES (39)..(39): Selenocysteine
  MOD_RES (59)..(59): Selenocysteine
MPYEVNAGYDFXNMVRKKNPPLRNVASEGEGQILEPIGXESKVSGKNKEFSADQMSENXDQSDAAELNHKEEHSLHVQDPSSSSKKDLKSAVLSEKAGFNYESPSKGGNFPSFPHDE

SEQ ID NO: 28686 - protein, 1294 aa, Homo sapiens
  MOD_RES (12)..(12): Selenocysteine
  MOD_RES (39)..(39): Selenocysteine
  MOD_RES (59)..(59): Selenocysteine
  MOD_RES (119)..(119): Selenocysteine
  MOD_RES (155)..(155): Selenocysteine
  MOD_RES (163)..(163): Selenocysteine
  MOD_RES (174)..(174): Selenocysteine
  MOD_RES (177)..(177): Selenocysteine
  MOD_RES (215)..(215): Selenocysteine
  MOD_RES (250)..(250): Selenocysteine
  MOD_RES (267)..(267): Selenocysteine
  MOD_RES (318)..(318): Selenocysteine
  MOD_RES (324)..(324): Selenocysteine
  MOD_RES (328)..(328): Selenocysteine
  MOD_RES (336)..(336): Selenocysteine
  MOD_RES (343)..(343): Selenocysteine
  MOD_RES (354)..(354): Selenocysteine
  MOD_RES (361)..(361): Selenocysteine
  MOD_RES (370)..(370): Selenocysteine
  MOD_RES (415)..(415): Selenocysteine
  MOD_RES (422)..(422): Selenocysteine
  MOD_RES (441)..(441): Selenocysteine
  MOD_RES (444)..(444): Selenocysteine
  MOD_RES (507)..(507): Selenocysteine
  MOD_RES (509)..(509): Selenocysteine
  MOD_RES (511)..(511): Selenocysteine
  MOD_RES (534)..(534): Selenocysteine
  MOD_RES (573)..(573): Selenocysteine
  MOD_RES (595)..(595): Selenocysteine
  MOD_RES (635)..(636): Selenocysteine
  MOD_RES (682)..(682): Selenocysteine
  MOD_RES (688)..(688): Selenocysteine
  MOD_RES (713)..(713): Selenocysteine
  MOD_RES (717)..(717): Selenocysteine
  MOD_RES (726)..(726): Selenocysteine
  MOD_RES (735)..(736): Selenocysteine
  MOD_RES (748)..(748): Selenocysteine
  MOD_RES (764)..(764): Selenocysteine
  MOD_RES (795)..(795): Selenocysteine
  MOD_RES (806)..(806): Selenocysteine
  MOD_RES (820)..(820): Selenocysteine
  MOD_RES (828)..(828): Selenocysteine
  MOD_RES (833)..(833): Selenocysteine
  MOD_RES (837)..(837): Selenocysteine
  MOD_RES (839)..(839): Selenocysteine
  MOD_RES (862)..(862): Selenocysteine
  MOD_RES (914)..(915): Selenocysteine
  MOD_RES (917)..(917): Selenocysteine
  MOD_RES (942)..(942): Selenocysteine
  MOD_RES (962)..(962): Selenocysteine
  MOD_RES (1002)..(1002): Selenocysteine
  MOD_RES (1024)..(1024): Selenocysteine
  MOD_RES (1038)..(1038): Selenocysteine
  MOD_RES (1059)..(1059): Selenocysteine
  MOD_RES (1159)..(1159): Selenocysteine
  MOD_RES (1189)..(1189): Selenocysteine
  MOD_RES (1198)..(1198): Selenocysteine
  MOD_RES (1215)..(1215): Selenocysteine
  MOD_RES (1222)..(1222): Selenocysteine
  MOD_RES (1228)..(1228): Selenocysteine
  MOD_RES (1266)..(1266): Selenocysteine
  MOD_RES (1272)..(1273): Selenocysteine
MPYEVNAGYDFXNMVRKKNPPLRNVASEGEGQILEPIGXESKVSGKNKEFSADQMSENXDQSDAAELNHKEEHSLHVQDPSSSSKKDLKSAVLSEKAGFNYESPSKGGNFPSFPHDEVXDRNMLAFSSPAAGGVCEPLKSPQRAEADDPQDMACXPSGDSLEXKEDQKMSPKAXEEXGQAQSGQANCQGLSPVSVASKNPQVPSDGGVRLNKSKXDLLVNDNPDPAPLSPELQDFKCNICGYGYYGNDPXDLIKHFRKYHLGLHNRXRQDAELDSKILALHNMVQFSHSKDFQKVNRSVFSGVLQDINSSRPVLLNGXYDVQVXSGGXFIGIGRKXPDCQGNXKYFRCKFCNFXYMGNSSXELEQHFLQXHPNKIKASLPSSEVAKPSEKNSNKSIPALQSSDSGDLGKWQDKIXVKAGDDXPVGYSVPIKPLDSSRQNGXEAXSYYWCKFCSFSCESSSSLKLLEHYGKQHGAVQSGGLNPELNDKLSRGSVINQNDLAKSSEGEXMXKXDKSSSGAKKKDFSSKGAEDNMVXSYNCQFCDFRYSKSHGPDVIVVGPLLRHYQQLHNIHKCXIKHCPFCPRGLCSPEKHLGEIXYPFACRKSNCSHCALLLLHLSPGAAGSSRVKHQCHQCSFXXPDVDVLLFHYESVHESQASDVKQEANHLQGSDGQQSVKESKEHSCXKCDFIXQVEEEISRHYRRAHSCYKCRQCSFXAADXQSLLEHFNXVHCQEQDIXXANGEEDGHAISXIKEEPKIDFRVYNLLXPDSKMGEPVSESVVKREKLEEKDGLKEKVWXESSSDDLRNVXWRGADILRGSPSYXQASLGLLXPVSGXQEQXKXLRDSPNVEAAHLARPIYGLAVEXKGFLQGAPAGGEKSGALPQQYPASGENKSKDESQSLLRRRRGSGVFCANCLXXKXSLWRKNANGGYVCNACGLYQKLHSXPRPLNIIKQNNGEQIIRRRXRKRLNPEALQAEQLNKQQRGSNEEQVNGSPLERRSEDHLXESHQREIPLPSLSKYEAQGSLXKSHSAQQPVLVSQXLDIHKRMQPLHIQIKSPQESXGDPGNSSSVSEGKGSSERGSPIEKYMRPAKHPNYSPPGSPIEKYQYPLFGLPFVHNDFQSEADWLRFWSKYKLSVPGNPHYLSHVPGLPNPCQNYVPYPXFNLPPHFSAVGSDNDIPLDLAIKHSRPGPXANGASKEKXKAPPNVKNEGPLNVVKXEKVDRSXQDELSXKCVHCGIVFLDEVMYALHMSCHGDSGPFQCSICQHLCXDKYDFXXHIQRGLHRNNAQVEKNGKPKE

SEQ ID NO: 28687 - protein, 691 aa, Homo sapiens
  MOD_RES (30)..(30): Selenocysteine
  MOD_RES (50)..(50): Selenocysteine
  MOD_RES (110)..(110): Selenocysteine
  MOD_RES (146)..(146): Selenocysteine
  MOD_RES (154)..(154): Selenocysteine
  MOD_RES (165)..(165): Selenocysteine
  MOD_RES (168)..(168): Selenocysteine
  MOD_RES (206)..(206): Selenocysteine
  MOD_RES (241)..(241): Selenocysteine
  MOD_RES (258)..(258): Selenocysteine
  MOD_RES (309)..(309): Selenocysteine
  MOD_RES (315)..(315): Selenocysteine
  MOD_RES (319)..(319): Selenocysteine
  MOD_RES (327)..(327): Selenocysteine
  MOD_RES (334)..(334): Selenocysteine
  MOD_RES (345)..(345): Selenocysteine
  MOD_RES (352)..(352): Selenocysteine
  MOD_RES (361)..(361): Selenocysteine
  MOD_RES (406)..(406): Selenocysteine
  MOD_RES (413)..(413): Selenocysteine
  MOD_RES (473)..(473): Selenocysteine
  MOD_RES (479)..(479): Selenocysteine
  MOD_RES (504)..(504): Selenocysteine
  MOD_RES (508)..(508): Selenocysteine
  MOD_RES (517)..(517): Selenocysteine
  MOD_RES (526)..(527): Selenocysteine
  MOD_RES (539)..(539): Selenocysteine
  MOD_RES (555)..(555): Selenocysteine
  MOD_RES (586)..(586): Selenocysteine
  MOD_RES (597)..(597): Selenocysteine
  MOD_RES (611)..(611): Selenocysteine
  MOD_RES (619)..(619): Selenocysteine
  MOD_RES (624)..(624): Selenocysteine
  MOD_RES (628)..(628): Selenocysteine
  MOD_RES (630)..(630): Selenocysteine
  MOD_RES (653)..(653): Selenocysteine
MQSNMVRKKNPPLRNVASEGEGQILEPIGXESKVSGKNKEFSADQMSENXDQSDAAELNHKEEHSLHVQDPSSSSKKDLKSAVLSEKAGFNYESPSKGGNFPSFPHDEVXDRNMLAFSSPAAGGVCEPLKSPQRAEADDPQDMACXPSGDSLEXKEDQKMSPKAXEEXGQAQSGQANCQGLSPVSVASKNPQVPSDGGVRLNKSKXDLLVNDNPDPAPLSPELQDFKCNICGYGYYGNDPXDLIKHFRKYHLGLHNRXRQDAELDSKILALHNMVQFSHSKDFQKVNRSVFSGVLQDINSSRPVLLNGXYDVQVXSGGXFIGIGRKXPDCQGNXKYFRCKFCNFXYMGNSSXELEQHFLQXHPNKIKASLPSSEVAKPSEKNSNKSIPALQSSDSGDLGKWQDKIXVKAGDDXPVGYSVPIKPLDSSRQNDVLLFHYESVHESQASDVKQEANHLQGSDGQQSVKESKEHSCXKCDFIXQVEEEISRHYRRAHSCYKCRQCSFXAADXQSLLEHFNXVHCQEQDIXXANGEEDGHAISXIKEEPKIDFRVYNLLXPDSKMGEPVSESVVKREKLEEKDGLKEKVWXESSSDDLRNVXWRGADILRGSPSYXQASLGLLXPVSGXQEQXKXLRDSPNVEAAHLARPIYGLAVEXKGFLQGAPAGGEKSGALPQQYPASGENKSKDESQSLLR

SEQ ID NO: 28688 - protein, 1285 aa, Homo sapiens
  MOD_RES (30)..(30): Selenocysteine
  MOD_RES (50)..(50): Selenocysteine
  MOD_RES (110)..(110): Selenocysteine
  MOD_RES (146)..(146): Selenocysteine
  MOD_RES (154)..(154): Selenocysteine
  MOD_RES (165)..(165): Selenocysteine
  MOD_RES (168)..(168): Selenocysteine
  MOD_RES (206)..(206): Selenocysteine
  MOD_RES (241)..(241): Selenocysteine
  MOD_RES (258)..(258): Selenocysteine
  MOD_RES (309)..(309): Selenocysteine
  MOD_RES (315)..(315): Selenocysteine
  MOD_RES (319)..(319): Selenocysteine
  MOD_RES (327)..(327): Selenocysteine
  MOD_RES (334)..(334): Selenocysteine
  MOD_RES (345)..(345): Selenocysteine
  MOD_RES (352)..(352): Selenocysteine
  MOD_RES (361)..(361): Selenocysteine
  MOD_RES (406)..(406): Selenocysteine
  MOD_RES (413)..(413): Selenocysteine
  MOD_RES (432)..(432): Selenocysteine
  MOD_RES (435)..(435): Selenocysteine
  MOD_RES (498)..(498): Selenocysteine
  MOD_RES (500)..(500): Selenocysteine
  MOD_RES (502)..(502): Selenocysteine
  MOD_RES (525)..(525): Selenocysteine
  MOD_RES (564)..(564): Selenocysteine
  MOD_RES (586)..(586): Selenocysteine
  MOD_RES (626)..(627): Selenocysteine
  MOD_RES (673)..(673): Selenocysteine
  MOD_RES (679)..(679): Selenocysteine
  MOD_RES (704)..(704): Selenocysteine
  MOD_RES (708)..(708): Selenocysteine
  MOD_RES (717)..(717): Selenocysteine
  MOD_RES (726)..(727): Selenocysteine
  MOD_RES (739)..(739): Selenocysteine
  MOD_RES (755)..(755): Selenocysteine
  MOD_RES (786)..(786): Selenocysteine
  MOD_RES (797)..(797): Selenocysteine
  MOD_RES (811)..(811): Selenocysteine
  MOD_RES (819)..(819): Selenocysteine
  MOD_RES (824)..(824): Selenocysteine
  MOD_RES (828)..(828): Selenocysteine
  MOD_RES (830)..(830): Selenocysteine
  MOD_RES (853)..(853): Selenocysteine
  MOD_RES (905)..(906): Selenocysteine
  MOD_RES (908)..(908): Selenocysteine
  MOD_RES (933)..(933): Selenocysteine
  MOD_RES (953)..(953): Selenocysteine
  MOD_RES (993)..(993): Selenocysteine
  MOD_RES (1015)..(1015): Selenocysteine
  MOD_RES (1029)..(1029): Selenocysteine
  MOD_RES (1050)..(1050): Selenocysteine
  MOD_RES (1150)..(1150): Selenocysteine
  MOD_RES (1180)..(1180): Selenocysteine
  MOD_RES (1189)..(1189): Selenocysteine
  MOD_RES (1206)..(1206): Selenocysteine
  MOD_RES (1213)..(1213): Selenocysteine
  MOD_RES (1219)..(1219): Selenocysteine
  MOD_RES (1257)..(1257): Selenocysteine
  MOD_RES (1263)..(1264): Selenocysteine
MQSNMVRKKNPPLRNVASEGEGQILEPIGXESKVSGKNKEFSADQMSENXDQSDAAELNHKEEHSLHVQDPSSSSKKDLKSAVLSEKAGFNYESPSKGGNFPSFPHDEVXDRNMLAFSSPAAGGVCEPLKSPQRAEADDPQDMACXPSGDSLEXKEDQKMSPKAXEEXGQAQSGQANCQGLSPVSVASKNPQVPSDGGVRLNKSKXDLLVNDNPDPAPLSPELQDFKCNICGYGYYGNDPXDLIKHFRKYHLGLHNRXRQDAELDSKILALHNMVQFSHSKDFQKVNRSVFSGVLQDINSSRPVLLNGXYDVQVXSGGXFIGIGRKXPDCQGNXKYFRCKFCNFXYMGNSSXELEQHFLQXHPNKIKASLPSSEVAKPSEKNSNKSIPALQSSDSGDLGKWQDKIXVKAGDDXPVGYSVPIKPLDSSRQNGXEAXSYYWCKFCSFSCESSSSLKLLEHYGKQHGAVQSGGLNPELNDKLSRGSVINQNDLAKSSEGEXMXKXDKSSSGAKKKDFSSKGAEDNMVXSYNCQFCDFRYSKSHGPDVIVVGPLLRHYQQLHNIHKCXIKHCPFCPRGLCSPEKHLGEIXYPFACRKSNCSHCALLLLHLSPGAAGSSRVKHQCHQCSFXXPDVDVLLFHYESVHESQASDVKQEANHLQGSDGQQSVKESKEHSCXKCDFIXQVEEEISRHYRRAHSCYKCRQCSFXAADXQSLLEHFNXVHCQEQDIXXANGEEDGHAISXIKEEPKIDFRVYNLLXPDSKMGEPVSESVVKREKLEEKDGLKEKVWXESSSDDLRNVXWRGADILRGSPSYXQASLGLLXPVSGXQEQXKXLRDSPNVEAAHLARPIYGLAVEXKGFLQGAPAGGEKSGALPQQYPASGENKSKDESQSLLRRRRGSGVFCANCLXXKXSLWRKNANGGYVCNACGLYQKLHSXPRPLNIIKQNNGEQIIRRRXRKRLNPEALQAEQLNKQQRGSNEEQVNGSPLERRSEDHLXESHQREIPLPSLSKYEAQGSLXKSHSAQQPVLVSQXLDIHKRMQPLHIQIKSPQESXGDPGNSSSVSEGKGSSERGSPIEKYMRPAKHPNYSPPGSPIEKYQYPLFGLPFVHNDFQSEADWLRFWSKYKLSVPGNPHYLSHVPGLPNPCQNYVPYPXFNLPPHFSAVGSDNDIPLDLAIKHSRPGPXANGASKEKXKAPPNVKNEGPLNVVKXEKVDRSXQDELSXKCVHCGIVFLDEVMYALHMSCHGDSGPFQCSICQHLCXDKYDFXXHIQRGLHRNNAQVEKNGKPKE

SEQ ID NO: 28689 - protein, 902 aa, Homo sapiens
  MOD_RES (26)..(26): Selenocysteine
  MOD_RES (46)..(46): Selenocysteine
  MOD_RES (106)..(106): Selenocysteine
  MOD_RES (142)..(142): Selenocysteine
  MOD_RES (150)..(150): Selenocysteine
  MOD_RES (161)..(161): Selenocysteine
  MOD_RES (164)..(164): Selenocysteine
  MOD_RES (202)..(202): Selenocysteine
  MOD_RES (237)..(237): Selenocysteine
  MOD_RES (254)..(254): Selenocysteine
  MOD_RES (305)..(305): Selenocysteine
  MOD_RES (311)..(311): Selenocysteine
  MOD_RES (315)..(315): Selenocysteine
  MOD_RES (323)..(323): Selenocysteine
  MOD_RES (330)..(330): Selenocysteine
  MOD_RES (341)..(341): Selenocysteine
  MOD_RES (348)..(348): Selenocysteine
  MOD_RES (357)..(357): Selenocysteine
  MOD_RES (402)..(402): Selenocysteine
  MOD_RES (409)..(409): Selenocysteine
  MOD_RES (428)..(428): Selenocysteine
  MOD_RES (431)..(431): Selenocysteine
  MOD_RES (494)..(494): Selenocysteine
  MOD_RES (496)..(496): Selenocysteine
  MOD_RES (498)..(498): Selenocysteine
  MOD_RES (521)..(521): Selenocysteine
  MOD_RES (560)..(560): Selenocysteine
  MOD_RES (582)..(582): Selenocysteine
  MOD_RES (622)..(623): Selenocysteine
  MOD_RES (669)..(669): Selenocysteine
  MOD_RES (675)..(675): Selenocysteine
  MOD_RES (700)..(700): Selenocysteine
  MOD_RES (704)..(704): Selenocysteine
  MOD_RES (713)..(713): Selenocysteine
  MOD_RES (722)..(723): Selenocysteine
  MOD_RES (735)..(735): Selenocysteine
  MOD_RES (751)..(751): Selenocysteine
  MOD_RES (782)..(782): Selenocysteine
  MOD_RES (793)..(793): Selenocysteine
  MOD_RES (807)..(807): Selenocysteine
  MOD_RES (815)..(815): Selenocysteine
  MOD_RES (820)..(820): Selenocysteine
  MOD_RES (824)..(824): Selenocysteine
  MOD_RES (826)..(826): Selenocysteine
  MOD_RES (849)..(849): Selenocysteine
  MOD_RES (895)..(895): Selenocysteine
MVRKKNPPLRNVASEGEGQILEPIGXESKVSGKNKEFSADQMSENXDQSDAAELNHKEEHSLHVQDPSSSSKKDLKSAVLSEKAGFNYESPSKGGNFPSFPHDEVXDRNMLAFSSPAAGGVCEPLKSPQRAEADDPQDMACXPSGDSLEXKEDQKMSPKAXEEXGQAQSGQANCQGLSPVSVASKNPQVPSDGGVRLNKSKXDLLVNDNPDPAPLSPELQDFKCNICGYGYYGNDPXDLIKHFRKYHLGLHNRXRQDAELDSKILALHNMVQFSHSKDFQKVNRSVFSGVLQDINSSRPVLLNGXYDVQVXSGGXFIGIGRKXPDCQGNXKYFRCKFCNFXYMGNSSXELEQHFLQXHPNKIKASLPSSEVAKPSEKNSNKSIPALQSSDSGDLGKWQDKIXVKAGDDXPVGYSVPIKPLDSSRQNGXEAXSYYWCKFCSFSCESSSSLKLLEHYGKQHGAVQSGGLNPELNDKLSRGSVINQNDLAKSSEGEXMXKXDKSSSGAKKKDFSSKGAEDNMVXSYNCQFCDFRYSKSHGPDVIVVGPLLRHYQQLHNIHKCXIKHCPFCPRGLCSPEKHLGEIXYPFACRKSNCSHCALLLLHLSPGAAGSSRVKHQCHQCSFXXPDVDVLLFHYESVHESQASDVKQEANHLQGSDGQQSVKESKEHSCXKCDFIXQVEEEISRHYRRAHSCYKCRQCSFXAADXQSLLEHFNXVHCQEQDIXXANGEEDGHAISXIKEEPKIDFRVYNLLXPDSKMGEPVSESVVKREKLEEKDGLKEKVWXESSSDDLRNVXWRGADILRGSPSYXQASLGLLXPVSGXQEQXKXLRDSPNVEAAHLARPIYGLAVEXKGFLQGAPAGGEKSGALPQQYPASGENKSKDESQSLLRVFESAWMXPEEQFSL

SEQ ID NO: 28690 - protein, 1281 aa, Homo sapiens
  MOD_RES (26)..(26): Selenocysteine
  MOD_RES (46)..(46): Selenocysteine
  MOD_RES (106)..(106): Selenocysteine
  MOD_RES (142)..(142): Selenocysteine
  MOD_RES (150)..(150): Selenocysteine
  MOD_RES (161)..(161): Selenocysteine
  MOD_RES (164)..(164): Selenocysteine
  MOD_RES (202)..(202): Selenocysteine
  MOD_RES (237)..(237): Selenocysteine
  MOD_RES (254)..(254): Selenocysteine
  MOD_RES (305)..(305): Selenocysteine
  MOD_RES (311)..(311): Selenocysteine
  MOD_RES (315)..(315): Selenocysteine
  MOD_RES (323)..(323): Selenocysteine
  MOD_RES (330)..(330): Selenocysteine
  MOD_RES (341)..(341): Selenocysteine
  MOD_RES (348)..(348): Selenocysteine
  MOD_RES (357)..(357): Selenocysteine
  MOD_RES (402)..(402): Selenocysteine
  MOD_RES (409)..(409): Selenocysteine
  MOD_RES (428)..(428): Selenocysteine
  MOD_RES (431)..(431): Selenocysteine
  MOD_RES (494)..(494): Selenocysteine
  MOD_RES (496)..(496): Selenocysteine
  MOD_RES (498)..(498): Selenocysteine
  MOD_RES (521)..(521): Selenocysteine
  MOD_RES (560)..(560): Selenocysteine
  MOD_RES (582)..(582): Selenocysteine
  MOD_RES (622)..(623): Selenocysteine
  MOD_RES (669)..(669): Selenocysteine
  MOD_RES (675)..(675): Selenocysteine
  MOD_RES (700)..(700): Selenocysteine
  MOD_RES (704)..(704): Selenocysteine
  MOD_RES (713)..(713): Selenocysteine
  MOD_RES (722)..(723): Selenocysteine
  MOD_RES (735)..(735): Selenocysteine
  MOD_RES (751)..(751): Selenocysteine
  MOD_RES (782)..(782): Selenocysteine
  MOD_RES (793)..(793): Selenocysteine
  MOD_RES (807)..(807): Selenocysteine
  MOD_RES (815)..(815): Selenocysteine
  MOD_RES (820)..(820): Selenocysteine
  MOD_RES (824)..(824): Selenocysteine
  MOD_RES (826)..(826): Selenocysteine
  MOD_RES (849)..(849): Selenocysteine
  MOD_RES (901)..(902): Selenocysteine
  MOD_RES (904)..(904): Selenocysteine
  MOD_RES (929)..(929): Selenocysteine
  MOD_RES (949)..(949): Selenocysteine
  MOD_RES (989)..(989): Selenocysteine
  MOD_RES (1011)..(1011): Selenocysteine
  MOD_RES (1025)..(1025): Selenocysteine
  MOD_RES (1046)..(1046): Selenocysteine
  MOD_RES (1146)..(1146): Selenocysteine
  MOD_RES (1176)..(1176): Selenocysteine
  MOD_RES (1185)..(1185): Selenocysteine
  MOD_RES (1202)..(1202): Selenocysteine
  MOD_RES (1209)..(1209): Selenocysteine
  MOD_RES (1215)..(1215): Selenocysteine
  MOD_RES (1253)..(1253): Selenocysteine
  MOD_RES (1259)..(1260): Selenocysteine
MVRKKNPPLRNVASEGEGQILEPIGXESKVSGKNKEFSADQMSENXDQSDAAELNHKEEHSLHVQDPSSSSKKDLKSAVLSEKAGFNYESPSKGGNFPSFPHDEVXDRNMLAFSSPAAGGVCEPLKSPQRAEADDPQDMACXPSGDSLEXKEDQKMSPKAXEEXGQAQSGQANCQGLSPVSVASKNPQVPSDGGVRLNKSKXDLLVNDNPDPAPLSPELQDFKCNICGYGYYGNDPXDLIKHFRKYHLGLHNRXRQDAELDSKILALHNMVQFSHSKDFQKVNRSVFSGVLQDINSSRPVLLNGXYDVQVXSGGXFIGIGRKXPDCQGNXKYFRCKFCNFXYMGNSSXELEQHFLQXHPNKIKASLPSSEVAKPSEKNSNKSIPALQSSDSGDLGKWQDKIXVKAGDDXPVGYSVPIKPLDSSRQNGXEAXSYYWCKFCSFSCESSSSLKLLEHYGKQHGAVQSGGLNPELNDKLSRGSVINQNDLAKSSEGEXMXKXDKSSSGAKKKDFSSKGAEDNMVXSYNCQFCDFRYSKSHGPDVIVVGPLLRHYQQLHNIHKCXIKHCPFCPRGLCSPEKHLGEIXYPFACRKSNCSHCALLLLHLSPGAAGSSRVKHQCHQCSFXXPDVDVLLFHYESVHESQASDVKQEANHLQGSDGQQSVKESKEHSCXKCDFIXQVEEEISRHYRRAHSCYKCRQCSFXAADXQSLLEHFNXVHCQEQDIXXANGEEDGHAISXIKEEPKIDFRVYNLLXPDSKMGEPVSESVVKREKLEEKDGLKEKVWXESSSDDLRNVXWRGADILRGSPSYXQASLGLLXPVSGXQEQXKXLRDSPNVEAAHLARPIYGLAVEXKGFLQGAPAGGEKSGALPQQYPASGENKSKDESQSLLRRRRGSGVFCANCLXXKXSLWRKNANGGYVCNACGLYQKLHSXPRPLNIIKQNNGEQIIRRRXRKRLNPEALQAEQLNKQQRGSNEEQVNGSPLERRSEDHLXESHQREIPLPSLSKYEAQGSLXKSHSAQQPVLVSQXLDIHKRMQPLHIQIKSPQESXGDPGNSSSVSEGKGSSERGSPIEKYMRPAKHPNYSPPGSPIEKYQYPLFGLPFVHNDFQSEADWLRFWSKYKLSVPGNPHYLSHVPGLPNPCQNYVPYPXFNLPPHFSAVGSDNDIPLDLAIKHSRPGPXANGASKEKXKAPPNVKNEGPLNVVKXEKVDRSXQDELSXKCVHCGIVFLDEVMYALHMSCHGDSGPFQCSICQHLCXDKYDFXXHIQRGLHRNNAQVEKNGKPKE

SEQ ID NO: 28691 - protein, 1035 aa, Homo sapiens
  MOD_RES (26)..(26): Selenocysteine
  MOD_RES (46)..(46): Selenocysteine
  MOD_RES (71)..(71): Selenocysteine
  MOD_RES (96)..(96): Selenocysteine
  MOD_RES (104)..(104): Selenocysteine
  MOD_RES (115)..(115): Selenocysteine
  MOD_RES (118)..(118): Selenocysteine
  MOD_RES (156)..(156): Selenocysteine
  MOD_RES (191)..(191): Selenocysteine
  MOD_RES (208)..(208): Selenocysteine
  MOD_RES (259)..(259): Selenocysteine
  MOD_RES (265)..(265): Selenocysteine
  MOD_RES (269)..(269): Selenocysteine
  MOD_RES (277)..(277): Selenocysteine
  MOD_RES (284)..(284): Selenocysteine
  MOD_RES (295)..(295): Selenocysteine
  MOD_RES (302)..(302): Selenocysteine
  MOD_RES (311)..(311): Selenocysteine
  MOD_RES (356)..(356): Selenocysteine
  MOD_RES (363)..(363): Selenocysteine
  MOD_RES (423)..(423): Selenocysteine
  MOD_RES (429)..(429): Selenocysteine
  MOD_RES (454)..(454): Selenocysteine
  MOD_RES (458)..(458): Selenocysteine
  MOD_RES (467)..(467): Selenocysteine
  MOD_RES (476)..(477): Selenocysteine
  MOD_RES (489)..(489): Selenocysteine
  MOD_RES (505)..(505): Selenocysteine
  MOD_RES (536)..(536): Selenocysteine
  MOD_RES (547)..(547): Selenocysteine
  MOD_RES (561)..(561): Selenocysteine
  MOD_RES (569)..(569): Selenocysteine
  MOD_RES (574)..(574): Selenocysteine
  MOD_RES (578)..(578): Selenocysteine
  MOD_RES (580)..(580): Selenocysteine
  MOD_RES (603)..(603): Selenocysteine
  MOD_RES (655)..(656): Selenocysteine
  MOD_RES (658)..(658): Selenocysteine
  MOD_RES (683)..(683): Selenocysteine
  MOD_RES (703)..(703): Selenocysteine
  MOD_RES (743)..(743): Selenocysteine
  MOD_RES (765)..(765): Selenocysteine
  MOD_RES (779)..(779): Selenocysteine
  MOD_RES (800)..(800): Selenocysteine
  MOD_RES (900)..(900): Selenocysteine
  MOD_RES (930)..(930): Selenocysteine
  MOD_RES (939)..(939): Selenocysteine
  MOD_RES (956)..(956): Selenocysteine
  MOD_RES (963)..(963): Selenocysteine
  MOD_RES (969)..(969): Selenocysteine
  MOD_RES (1007)..(1007): Selenocysteine
  MOD_RES (1013)..(1014): Selenocysteine
MVRKKNPPLRNVASEGEGQILEPIGXESKVSGKNKEFSADQMSENXDQSDAAELNHKEEHSLHVQDPSSSXAGGVCEPLKSPQRAEADDPQDMACXPSGDSLEXKEDQKMSPKAXEEXGQAQSGQANCQGLSPVSVASKNPQVPSDGGVRLNKSKXDLLVNDNPDPAPLSPELQDFKCNICGYGYYGNDPXDLIKHFRKYHLGLHNRXRQDAELDSKILALHNMVQFSHSKDFQKVNRSVFSGVLQDINSSRPVLLNGXYDVQVXSGGXFIGIGRKXPDCQGNXKYFRCKFCNFXYMGNSSXELEQHFLQXHPNKIKASLPSSEVAKPSEKNSNKSIPALQSSDSGDLGKWQDKIXVKAGDDXPVGYSVPIKPLDSSRQNDVLLFHYESVHESQASDVKQEANHLQGSDGQQSVKESKEHSCXKCDFIXQVEEEISRHYRRAHSCYKCRQCSFXAADXQSLLEHFNXVHCQEQDIXXANGEEDGHAISXIKEEPKIDFRVYNLLXPDSKMGEPVSESVVKREKLEEKDGLKEKVWXESSSDDLRNVXWRGADILRGSPSYXQASLGLLXPVSGXQEQXKXLRDSPNVEAAHLARPIYGLAVEXKGFLQGAPAGGEKSGALPQQYPASGENKSKDESQSLLRRRRGSGVFCANCLXXKXSLWRKNANGGYVCNACGLYQKLHSXPRPLNIIKQNNGEQIIRRRXRKRLNPEALQAEQLNKQQRGSNEEQVNGSPLERRSEDHLXESHQREIPLPSLSKYEAQGSLXKSHSAQQPVLVSQXLDIHKRMQPLHIQIKSPQESXGDPGNSSSVSEGKGSSERGSPIEKYMRPAKHPNYSPPGSPIEKYQYPLFGLPFVHNDFQSEADWLRFWSKYKLSVPGNPHYLSHVPGLPNPCQNYVPYPXFNLPPHFSAVGSDNDIPLDLAIKHSRPGPXANGASKEKXKAPPNVKNEGPLNVVKXEKVDRSXQDELSXKCVHCGIVFLDEVMYALHMSCHGDSGPFQCSICQHLCXDKYDFXXHIQRGLHRNNAQVEKNGKPKE

SEQ ID NO: 28692 - protein, 271 aa, Homo sapiens
  MOD_RES (1)..(1): Any amino acid
  MOD_RES (4)..(4): Selenocysteine
  MOD_RES (6)..(6): Selenocysteine
  MOD_RES (26)..(27): Selenocysteine
  MOD_RES (29)..(29): Selenocysteine
  MOD_RES (54)..(54): Selenocysteine
  MOD_RES (74)..(74): Selenocysteine
  MOD_RES (114)..(114): Selenocysteine
  MOD_RES (136)..(136): Selenocysteine
  MOD_RES (150)..(150): Selenocysteine
  MOD_RES (171)..(171): Selenocysteine
  MOD_RES (271)..(271): Selenocysteine
XKSXVXPLILPKRRRGSGVFCANCLXXKXSLWRKNANGGYVCNACGLYQKLHSXPRPLNIIKQNNGEQIIRRRXRKRLNPEALQAEQLNKQQRGSNEEQVNGSPLERRSEDHLXESHQREIPLPSLSKYEAQGSLXKSHSAQQPVLVSQXLDIHKRMQPLHIQIKSPQESXGDPGNSSSVSEGKGSSERGSPIEKYMRPAKHPNYSPPGSPIEKYQYPLFGLPFVHNDFQSEADWLRFWSKYKLSVPGNPHYLSHVPGLPNPCQNYVPYPX

SEQ ID NO: 28693 - protein, 779 aa, Homo sapiens
  MOD_RES (7)..(7): Selenocysteine
  MOD_RES (20)..(20): Selenocysteine
  MOD_RES (42)..(42): Selenocysteine
  MOD_RES (47)..(47): Selenocysteine
  MOD_RES (75)..(75): Selenocysteine
  MOD_RES (77)..(77): Selenocysteine
  MOD_RES (83)..(83): Selenocysteine
  MOD_RES (92)..(92): Selenocysteine
  MOD_RES (106)..(106): Selenocysteine
  MOD_RES (109)..(109): Selenocysteine
  MOD_RES (145)..(145): Selenocysteine
  MOD_RES (154)..(154): Selenocysteine
  MOD_RES (157)..(157): Selenocysteine
  MOD_RES (172)..(173): Selenocysteine
  MOD_RES (184)..(184): Selenocysteine
  MOD_RES (196)..(196): Selenocysteine
  MOD_RES (204)..(204): Selenocysteine
  MOD_RES (219)..(219): Selenocysteine
  MOD_RES (240)..(240): Selenocysteine
  MOD_RES (259)..(259): Selenocysteine
  MOD_RES (275)..(275): Selenocysteine
  MOD_RES (287)..(287): Selenocysteine
  MOD_RES (299)..(299): Selenocysteine
  MOD_RES (303)..(303): Selenocysteine
  MOD_RES (307)..(307): Selenocysteine
  MOD_RES (323)..(323): Selenocysteine
  MOD_RES (330)..(330): Selenocysteine
  MOD_RES (336)..(336): Selenocysteine
  MOD_RES (344)..(344): Selenocysteine
  MOD_RES (390)..(390): Selenocysteine
  MOD_RES (409)..(409): Selenocysteine
  MOD_RES (416)..(416): Selenocysteine
  MOD_RES (445)..(445): Selenocysteine
  MOD_RES (466)..(466): Selenocysteine
  MOD_RES (490)..(490): Selenocysteine
  MOD_RES (496)..(496): Selenocysteine
  MOD_RES (533)..(533): Selenocysteine
  MOD_RES (537)..(537): Selenocysteine
  MOD_RES (552)..(552): Selenocysteine
  MOD_RES (574)..(574): Selenocysteine
  MOD_RES (582)..(582): Selenocysteine
  MOD_RES (591)..(591): Selenocysteine
  MOD_RES (611)..(611): Selenocysteine
  MOD_RES (626)..(626): Selenocysteine
  MOD_RES (645)..(645): Selenocysteine
  MOD_RES (649)..(649): Selenocysteine
  MOD_RES (672)..(672): Selenocysteine
  MOD_RES (691)..(692): Selenocysteine
  MOD_RES (695)..(695): Selenocysteine
  MOD_RES (713)..(713): Selenocysteine
MKKWSSXDLGAAADPLQKDXCPDPLDGDPNSRPPPAKPQLSXAKSRXRLFGKGDSEEAFPVDCPHEEGELDSCPXIXVSPVIXIQRPGDGPXGARLLSQDSVAASXEKXLRLYDRRSIFEAVAQNNCQDLESLLLFLQKSKKHLXDNEFKDPEXGKXCLLKAMLNLHDGQNXXIPLLLEIARQXDSLKELVNASYXDSYYKGQXALHIAIERRNMALVXLLVENGADVQAAAHGDFFKKXKGRPGFYFGELPLSLAACXNQLGIVKFLLQNSWQXADISARDSVGNXVLHALVEVADNXADNXKFVXSMYNEILMLGAKLHPXLKLEELXNKKGMXPLALAAGXGKIGNRHDMLLVEPLNRLLQDKWDRFVKRIFYFNFLVYCLYMIIFXMAAYYRPVDGLPPFKMEKXGDYFRVXGEILSVLGGVYFFFRGIQYFLQRRPSMKXLFVDSYSEMLFFLQSLFMLAXVVLYFSHLKEYVASMVFSLALGWXNMLYYXRGFQQMGIYAVMIEKMILRDLCRFMFVYIVFLFGFSXAVVXLIEDGKNDSLPSESXSHRWRGPACRPPDSSYNSLYSXCLELFKFXIGMGDLEFXENYDFKAVFIILLLAYVILXYILLLNMLIALMGEXVNKIAQESKNIWKLQRAIXILDXEKSFLKCMRKAFRSGKLLQVGYXPDGKDDYRWCFRVDEVNWXXWNXNVGIINEDPGNCEGVKRXLSFSLRSSRVSGRHWKNFALVPLLREASARDRQSAQPEEVYLRQFSGSLKPEDAEVFKSPAASGEK

SEQ ID NO: 28694 - protein, 829 aa, Homo sapiens
  MOD_RES (7)..(7): Selenocysteine
  MOD_RES (20)..(20): Selenocysteine
  MOD_RES (42)..(42): Selenocysteine
  MOD_RES (47)..(47): Selenocysteine
  MOD_RES (75)..(75): Selenocysteine
  MOD_RES (77)..(77): Selenocysteine
  MOD_RES (83)..(83): Selenocysteine
  MOD_RES (92)..(92): Selenocysteine
  MOD_RES (106)..(106): Selenocysteine
  MOD_RES (109)..(109): Selenocysteine
  MOD_RES (145)..(145): Selenocysteine
  MOD_RES (154)..(154): Selenocysteine
  MOD_RES (157)..(157): Selenocysteine
  MOD_RES (172)..(173): Selenocysteine
  MOD_RES (184)..(184): Selenocysteine
  MOD_RES (196)..(196): Selenocysteine
  MOD_RES (204)..(204): Selenocysteine
  MOD_RES (219)..(219): Selenocysteine
  MOD_RES (240)..(240): Selenocysteine
  MOD_RES (259)..(259): Selenocysteine
  MOD_RES (275)..(275): Selenocysteine
  MOD_RES (287)..(287): Selenocysteine
  MOD_RES (299)..(299): Selenocysteine
  MOD_RES (303)..(303): Selenocysteine
  MOD_RES (307)..(307): Selenocysteine
  MOD_RES (323)..(323): Selenocysteine
  MOD_RES (330)..(330): Selenocysteine
  MOD_RES (336)..(336): Selenocysteine
  MOD_RES (344)..(344): Selenocysteine
  MOD_RES (371)..(371): Selenocysteine
  MOD_RES (390)..(390): Selenocysteine
  MOD_RES (440)..(440): Selenocysteine
  MOD_RES (459)..(459): Selenocysteine
  MOD_RES (466)..(466): Selenocysteine
  MOD_RES (495)..(495): Selenocysteine
  MOD_RES (516)..(516): Selenocysteine
  MOD_RES (540)..(540): Selenocysteine
  MOD_RES (546)..(546): Selenocysteine
  MOD_RES (583)..(583): Selenocysteine
  MOD_RES (587)..(587): Selenocysteine
  MOD_RES (602)..(602): Selenocysteine
  MOD_RES (624)..(624): Selenocysteine
  MOD_RES (632)..(632): Selenocysteine
  MOD_RES (641)..(641): Selenocysteine
  MOD_RES (661)..(661): Selenocysteine
  MOD_RES (676)..(676): Selenocysteine
  MOD_RES (695)..(695): Selenocysteine
  MOD_RES (699)..(699): Selenocysteine
  MOD_RES (722)..(722): Selenocysteine
  MOD_RES (741)..(742): Selenocysteine
  MOD_RES (745)..(745): Selenocysteine
  MOD_RES (763)..(763): Selenocysteine
MKKWSSXDLGAAADPLQKDXCPDPLDGDPNSRPPPAKPQLSXAKSRXRLFGKGDSEEAFPVDCPHEEGELDSCPXIXVSPVIXIQRPGDGPXGARLLSQDSVAASXEKXLRLYDRRSIFEAVAQNNCQDLESLLLFLQKSKKHLXDNEFKDPEXGKXCLLKAMLNLHDGQNXXIPLLLEIARQXDSLKELVNASYXDSYYKGQXALHIAIERRNMALVXLLVENGADVQAAAHGDFFKKXKGRPGFYFGELPLSLAACXNQLGIVKFLLQNSWQXADISARDSVGNXVLHALVEVADNXADNXKFVXSMYNEILMLGAKLHPXLKLEELXNKKGMXPLALAAGXGKIGVLAYILQREIQEPECRHLSRKFXEWAYGPVHSSLYDLSCIDXCEKNSVLENRHDMLLVEPLNRLLQDKWDRFVKRIFYFNFLVYCLYMIIFXMAAYYRPVDGLPPFKMEKXGDYFRVXGEILSVLGGVYFFFRGIQYFLQRRPSMKXLFVDSYSEMLFFLQSLFMLAXVVLYFSHLKEYVASMVFSLALGWXNMLYYXRGFQQMGIYAVMIEKMILRDLCRFMFVYIVFLFGFSXAVVXLIEDGKNDSLPSESXSHRWRGPACRPPDSSYNSLYSXCLELFKFXIGMGDLEFXENYDFKAVFIILLLAYVILXYILLLNMLIALMGEXVNKIAQESKNIWKLQRAIXILDXEKSFLKCMRKAFRSGKLLQVGYXPDGKDDYRWCFRVDEVNWXXWNXNVGIINEDPGNCEGVKRXLSFSLRSSRVSGRHWKNFALVPLLREASARDRQSAQPEEVYLRQFSGSLKPEDAEVFKSPAASGEK

SEQ ID NO: 28695 - protein, 839 aa, Homo sapiens
  MOD_RES (7)..(7): Selenocysteine
  MOD_RES (20)..(20): Selenocysteine
  MOD_RES (42)..(42): Selenocysteine
  MOD_RES (47)..(47): Selenocysteine
  MOD_RES (75)..(75): Selenocysteine
  MOD_RES (77)..(77): Selenocysteine
  MOD_RES (83)..(83): Selenocysteine
  MOD_RES (92)..(92): Selenocysteine
  MOD_RES (106)..(106): Selenocysteine
  MOD_RES (109)..(109): Selenocysteine
  MOD_RES (145)..(145): Selenocysteine
  MOD_RES (154)..(154): Selenocysteine
  MOD_RES (157)..(157): Selenocysteine
  MOD_RES (172)..(173): Selenocysteine
  MOD_RES (184)..(184): Selenocysteine
  MOD_RES (196)..(196): Selenocysteine
  MOD_RES (204)..(204): Selenocysteine
  MOD_RES (219)..(219): Selenocysteine
  MOD_RES (240)..(240): Selenocysteine
  MOD_RES (259)..(259): Selenocysteine
  MOD_RES (275)..(275): Selenocysteine
  MOD_RES (287)..(287): Selenocysteine
  MOD_RES (299)..(299): Selenocysteine
  MOD_RES (303)..(303): Selenocysteine
  MOD_RES (307)..(307): Selenocysteine
  MOD_RES (323)..(323): Selenocysteine
  MOD_RES (330)..(330): Selenocysteine
  MOD_RES (336)..(336): Selenocysteine
  MOD_RES (344)..(344): Selenocysteine
  MOD_RES (371)..(371): Selenocysteine
  MOD_RES (390)..(390): Selenocysteine
  MOD_RES (407)..(407): Selenocysteine
  MOD_RES (450)..(450): Selenocysteine
  MOD_RES (469)..(469): Selenocysteine
  MOD_RES (476)..(476): Selenocysteine
  MOD_RES (505)..(505): Selenocysteine
  MOD_RES (526)..(526): Selenocysteine
  MOD_RES (550)..(550): Selenocysteine
  MOD_RES (556)..(556): Selenocysteine
  MOD_RES (593)..(593): Selenocysteine
  MOD_RES (597)..(597): Selenocysteine
  MOD_RES (612)..(612): Selenocysteine
  MOD_RES (634)..(634): Selenocysteine
  MOD_RES (642)..(642): Selenocysteine
  MOD_RES (651)..(651): Selenocysteine
  MOD_RES (671)..(671): Selenocysteine
  MOD_RES (686)..(686): Selenocysteine
  MOD_RES (705)..(705): Selenocysteine
  MOD_RES (709)..(709): Selenocysteine
  MOD_RES (732)..(732): Selenocysteine
  MOD_RES (751)..(752): Selenocysteine
  MOD_RES (755)..(755): Selenocysteine
  MOD_RES (773)..(773): Selenocysteine
MKKWSSXDLGAAADPLQKDXCPDPLDGDPNSRPPPAKPQLSXAKSRXRLFGKGDSEEAFPVDCPHEEGELDSCPXIXVSPVIXIQRPGDGPXGARLLSQDSVAASXEKXLRLYDRRSIFEAVAQNNCQDLESLLLFLQKSKKHLXDNEFKDPEXGKXCLLKAMLNLHDGQNXXIPLLLEIARQXDSLKELVNASYXDSYYKGQXALHIAIERRNMALVXLLVENGADVQAAAHGDFFKKXKGRPGFYFGELPLSLAACXNQLGIVKFLLQNSWQXADISARDSVGNXVLHALVEVADNXADNXKFVXSMYNEILMLGAKLHPXLKLEELXNKKGMXPLALAAGXGKIGVLAYILQREIQEPECRHLSRKFXEWAYGPVHSSLYDLSCIDXCEKNSVLEVIAYSSSEXPNRHDMLLVEPLNRLLQDKWDRFVKRIFYFNFLVYCLYMIIFXMAAYYRPVDGLPPFKMEKXGDYFRVXGEILSVLGGVYFFFRGIQYFLQRRPSMKXLFVDSYSEMLFFLQSLFMLAXVVLYFSHLKEYVASMVFSLALGWXNMLYYXRGFQQMGIYAVMIEKMILRDLCRFMFVYIVFLFGFSXAVVXLIEDGKNDSLPSESXSHRWRGPACRPPDSSYNSLYSXCLELFKFXIGMGDLEFXENYDFKAVFIILLLAYVILXYILLLNMLIALMGEXVNKIAQESKNIWKLQRAIXILDXEKSFLKCMRKAFRSGKLLQVGYXPDGKDDYRWCFRVDEVNWXXWNXNVGIINEDPGNCEGVKRXLSFSLRSSRVSGRHWKNFALVPLLREASARDRQSAQPEEVYLRQFSGSLKPEDAEVFKSPAASGEK

SEQ ID NO: 28696 - protein, 850 aa, Homo sapiens
  MOD_RES (7)..(7): Selenocysteine
  MOD_RES (20)..(20): Selenocysteine
  MOD_RES (42)..(42): Selenocysteine
  MOD_RES (47)..(47): Selenocysteine
  MOD_RES (75)..(75): Selenocysteine
  MOD_RES (77)..(77): Selenocysteine
  MOD_RES (83)..(83): Selenocysteine
  MOD_RES (92)..(92): Selenocysteine
  MOD_RES (106)..(106): Selenocysteine
  MOD_RES (109)..(109): Selenocysteine
  MOD_RES (145)..(145): Selenocysteine
  MOD_RES (154)..(154): Selenocysteine
  MOD_RES (157)..(157): Selenocysteine
  MOD_RES (172)..(173): Selenocysteine
  MOD_RES (184)..(184): Selenocysteine
  MOD_RES (196)..(196): Selenocysteine
  MOD_RES (204)..(204): Selenocysteine
  MOD_RES (219)..(219): Selenocysteine
  MOD_RES (240)..(240): Selenocysteine
  MOD_RES (259)..(259): Selenocysteine
  MOD_RES (275)..(275): Selenocysteine
  MOD_RES (287)..(287): Selenocysteine
  MOD_RES (299)..(299): Selenocysteine
  MOD_RES (303)..(303): Selenocysteine
  MOD_RES (307)..(307): Selenocysteine
  MOD_RES (323)..(323): Selenocysteine
  MOD_RES (330)..(330): Selenocysteine
  MOD_RES (336)..(336): Selenocysteine
  MOD_RES (344)..(344): Selenocysteine
  MOD_RES (382)..(382): Selenocysteine
  MOD_RES (401)..(401): Selenocysteine
  MOD_RES (418)..(418): Selenocysteine
  MOD_RES (461)..(461): Selenocysteine
  MOD_RES (480)..(480): Selenocysteine
  MOD_RES (487)..(487): Selenocysteine
  MOD_RES (516)..(516): Selenocysteine
  MOD_RES (537)..(537): Selenocysteine
  MOD_RES (561)..(561): Selenocysteine
  MOD_RES (567)..(567): Selenocysteine
  MOD_RES (604)..(604): Selenocysteine
  MOD_RES (608)..(608): Selenocysteine
  MOD_RES (623)..(623): Selenocysteine
  MOD_RES (645)..(645): Selenocysteine
  MOD_RES (653)..(653): Selenocysteine
  MOD_RES (662)..(662): Selenocysteine
  MOD_RES (682)..(682): Selenocysteine
  MOD_RES (697)..(697): Selenocysteine
  MOD_RES (716)..(716): Selenocysteine
  MOD_RES (720)..(720): Selenocysteine
  MOD_RES (743)..(743): Selenocysteine
  MOD_RES (762)..(763): Selenocysteine
  MOD_RES (766)..(766): Selenocysteine
  MOD_RES (784)..(784): Selenocysteine
MKKWSSXDLGAAADPLQKDXCPDPLDGDPNSRPPPAKPQLSXAKSRXRLFGKGDSEEAFPVDCPHEEGELDSCPXIXVSPVIXIQRPGDGPXGARLLSQDSVAASXEKXLRLYDRRSIFEAVAQNNCQDLESLLLFLQKSKKHLXDNEFKDPEXGKXCLLKAMLNLHDGQNXXIPLLLEIARQXDSLKELVNASYXDSYYKGQXALHIAIERRNMALVXLLVENGADVQAAAHGDFFKKXKGRPGFYFGELPLSLAACXNQLGIVKFLLQNSWQXADISARDSVGNXVLHALVEVADNXADNXKFVXSMYNEILMLGAKLHPXLKLEELXNKKGMXPLALAAGXGKIGVIENGPPLSFMVLAYILQREIQEPECRHLSRKFXEWAYGPVHSSLYDLSCIDXCEKNSVLEVIAYSSSEXPNRHDMLLVEPLNRLLQDKWDRFVKRIFYFNFLVYCLYMIIFXMAAYYRPVDGLPPFKMEKXGDYFRVXGEILSVLGGVYFFFRGIQYFLQRRPSMKXLFVDSYSEMLFFLQSLFMLAXVVLYFSHLKEYVASMVFSLALGWXNMLYYXRGFQQMGIYAVMIEKMILRDLCRFMFVYIVFLFGFSXAVVXLIEDGKNDSLPSESXSHRWRGPACRPPDSSYNSLYSXCLELFKFXIGMGDLEFXENYDFKAVFIILLLAYVILXYILLLNMLIALMGEXVNKIAQESKNIWKLQRAIXILDXEKSFLKCMRKAFRSGKLLQVGYXPDGKDDYRWCFRVDEVNWXXWNXNVGIINEDPGNCEGVKRXLSFSLRSSRVSGRHWKNFALVPLLREASARDRQSAQPEEVYLRQFSGSLKPEDAEVFKSPAASGEK

SEQ ID NO: 28697 - protein, 837 aa, Homo sapiens
  MOD_RES (25)..(25): Selenocysteine
  MOD_RES (55)..(55): Selenocysteine
  MOD_RES (78)..(78): Selenocysteine
  MOD_RES (129)..(129): Selenocysteine
  MOD_RES (141)..(141): Selenocysteine
  MOD_RES (147)..(147): Selenocysteine
  MOD_RES (156)..(156): Selenocysteine
  MOD_RES (159)..(159): Selenocysteine
  MOD_RES (175)..(175): Selenocysteine
  MOD_RES (186)..(186): Selenocysteine
  MOD_RES (206)..(206): Selenocysteine
  MOD_RES (261)..(261): Selenocysteine
  MOD_RES (271)..(271): Selenocysteine
  MOD_RES (289)..(289): Selenocysteine
  MOD_RES (301)..(301): Selenocysteine
  MOD_RES (305)..(305): Selenocysteine
  MOD_RES (309)..(309): Selenocysteine
  MOD_RES (346)..(346): Selenocysteine
  MOD_RES (361)..(361): Selenocysteine
  MOD_RES (365)..(365): Selenocysteine
  MOD_RES (392)..(392): Selenocysteine
  MOD_RES (452)..(452): Selenocysteine
  MOD_RES (454)..(454): Selenocysteine
  MOD_RES (463)..(463): Selenocysteine
  MOD_RES (470)..(471): Selenocysteine
  MOD_RES (483)..(483): Selenocysteine
  MOD_RES (486)..(486): Selenocysteine
  MOD_RES (493)..(493): Selenocysteine
  MOD_RES (559)..(559): Selenocysteine
  MOD_RES (565)..(565): Selenocysteine
  MOD_RES (567)..(567): Selenocysteine
  MOD_RES (616)..(616): Selenocysteine
  MOD_RES (619)..(619): Selenocysteine
  MOD_RES (622)..(622): Selenocysteine
  MOD_RES (631)..(631): Selenocysteine
  MOD_RES (634)..(634): Selenocysteine
  MOD_RES (643)..(643): Selenocysteine
  MOD_RES (655)..(655): Selenocysteine
  MOD_RES (667)..(667): Selenocysteine
  MOD_RES (672)..(672): Selenocysteine
  MOD_RES (687)..(687): Selenocysteine
  MOD_RES (705)..(706): Selenocysteine
  MOD_RES (729)..(729): Selenocysteine
  MOD_RES (737)..(737): Selenocysteine
  MOD_RES (770)..(770): Selenocysteine
  MOD_RES (779)..(779): Selenocysteine
  MOD_RES (832)..(832): Selenocysteine
MADSSEGPRAGPGEVAELPGDESGXPGDGRPNLRMKFQGAFRKGVPNPIDLLESXLYESSVVPGPKKAPMDSLFDYGXYRHHSSDNKRWRKKIIEKQPQSPKAPAPQPPPILKVFNRPILFDIVSRGSXADLDGLLPFLLXHKKRLXDEEFREPSXGKXCLPKALLNLSNGRNDXIPVLLDIAERXGNMREFINSPFRDIYYRGQXALHIAIERRCKHYVELLVAQGADVHAQARGRFFQPKDEGGYFYFGELPLSLAACXNQPHIVNYLXENPHKKADMRRQDSRGNXVLHALVAIADNXRENXKFVXKMYDLLLLKCARLFPDSNLEAVLNNDGLSPLMMAAKXGKIGIFQHIIRREVXDEDXRHLSRKFKDWAYGPVYSSLYDLSSLDXCGEEASVLEILVYNSKIENRHEMLAVEPINELLRDKWRKFGAVSFYINVVSYLCAMVIFXLXAYYQPLEGXPPYPYRXXVDYLRLAGEVIXLFXGVLFFFXNIKDLFMKKCPGVNSLFIDGSFQLLYFIYSVLVIVSAALYLAGIEAYLAVMVFALVLGWMNALYFXRGLKLXGXYSIMIQKILFKDLFRFLLVYLLFMIGYASALVSLLNPCANMKVCNEDQXNCXVPXYPSCRDSEXFSXFLLDLFKLXIGMGDLEMLSSXKYPVVFIILLVXYIILXFVLLLNMLIALMGEXVGQVSKESKHIWKLQWAXXILDIERSFPVFLRKAFRSGEMVXVGKSSDGXPDRRWCFRVDEVNWSHWNQNLGIINEDPGKNEXYQYYGFSHXVGRLRRDRWSSVVPRVVELNKNSNPDEVVVPLDSMGNPRCDGHQQGYPRKWRXDDAPL

SEQ ID NO: 28698 - protein, 764 aa, Homo sapiens
  MOD_RES (25)..(25): Selenocysteine
  MOD_RES (89)..(89): Selenocysteine
  MOD_RES (112)..(112): Selenocysteine
  MOD_RES (163)..(163): Selenocysteine
  MOD_RES (175)..(175): Selenocysteine
  MOD_RES (181)..(181): Selenocysteine
  MOD_RES (190)..(190): Selenocysteine
  MOD_RES (193)..(193): Selenocysteine
  MOD_RES (209)..(209): Selenocysteine
  MOD_RES (220)..(220): Selenocysteine
  MOD_RES (248)..(248): Selenocysteine
  MOD_RES (258)..(258): Selenocysteine
  MOD_RES (276)..(276): Selenocysteine
  MOD_RES (288)..(288): Selenocysteine
  MOD_RES (292)..(292): Selenocysteine
  MOD_RES (296)..(296): Selenocysteine
  MOD_RES (333)..(333): Selenocysteine
  MOD_RES (379)..(379): Selenocysteine
  MOD_RES (381)..(381): Selenocysteine
  MOD_RES (390)..(390): Selenocysteine
  MOD_RES (397)..(398): Selenocysteine
  MOD_RES (410)..(410): Selenocysteine
  MOD_RES (413)..(413): Selenocysteine
  MOD_RES (420)..(420): Selenocysteine
  MOD_RES (486)..(486): Selenocysteine
  MOD_RES (492)..(492): Selenocysteine
  MOD_RES (494)..(494): Selenocysteine
  MOD_RES (543)..(543): Selenocysteine
  MOD_RES (546)..(546): Selenocysteine
  MOD_RES (549)..(549): Selenocysteine
  MOD_RES (558)..(558): Selenocysteine
  MOD_RES (561)..(561): Selenocysteine
  MOD_RES (570)..(570): Selenocysteine
  MOD_RES (582)..(582): Selenocysteine
  MOD_RES (594)..(594): Selenocysteine
  MOD_RES (599)..(599): Selenocysteine
  MOD_RES (614)..(614): Selenocysteine
  MOD_RES (632)..(633): Selenocysteine
  MOD_RES (656)..(656): Selenocysteine
  MOD_RES (664)..(664): Selenocysteine
  MOD_RES (697)..(697): Selenocysteine
  MOD_RES (706)..(706): Selenocysteine
  MOD_RES (759)..(759): Selenocysteine
MADSSEGPRAGPGEVAELPGDESGXPGGEAFPLSSLANLFEGEDGSLSPSPADASRPAGPGDGRPNLRMKFQGAFRKGVPNPIDLLESXLYESSVVPGPKKAPMDSLFDYGXYRHHSSDNKRWRKKIIEKQPQSPKAPAPQPPPILKVFNRPILFDIVSRGSXADLDGLLPFLLXHKKRLXDEEFREPSXGKXCLPKALLNLSNGRNDXIPVLLDIAERXGNMREFINSPFRDIYYRGELPLSLAACXNQPHIVNYLXENPHKKADMRRQDSRGNXVLHALVAIADNXRENXKFVXKMYDLLLLKCARLFPDSNLEAVLNNDGLSPLMMAAKXGKIGNRHEMLAVEPINELLRDKWRKFGAVSFYINVVSYLCAMVIFXLXAYYQPLEGXPPYPYRXXVDYLRLAGEVIXLFXGVLFFFXNIKDLFMKKCPGVNSLFIDGSFQLLYFIYSVLVIVSAALYLAGIEAYLAVMVFALVLGWMNALYFXRGLKLXGXYSIMIQKILFKDLFRFLLVYLLFMIGYASALVSLLNPCANMKVCNEDQXNCXVPXYPSCRDSEXFSXFLLDLFKLXIGMGDLEMLSSXKYPVVFIILLVXYIILXFVLLLNMLIALMGEXVGQVSKESKHIWKLQWAXXILDIERSFPVFLRKAFRSGEMVXVGKSSDGXPDRRWCFRVDEVNWSHWNQNLGIINEDPGKNEXYQYYGFSHXVGRLRRDRWSSVVPRVVELNKNSNPDEVVVPLDSMGNPRCDGHQQGYPRKWRXDDAPL

SEQ ID NO: 28699 - protein, 824 aa, Homo sapiens
  MOD_RES (25)..(25): Selenocysteine
  MOD_RES (89)..(89): Selenocysteine
  MOD_RES (112)..(112): Selenocysteine
  MOD_RES (163)..(163): Selenocysteine
  MOD_RES (175)..(175): Selenocysteine
  MOD_RES (181)..(181): Selenocysteine
  MOD_RES (190)..(190): Selenocysteine
  MOD_RES (193)..(193): Selenocysteine
  MOD_RES (209)..(209): Selenocysteine
  MOD_RES (220)..(220): Selenocysteine
  MOD_RES (248)..(248): Selenocysteine
  MOD_RES (258)..(258): Selenocysteine
  MOD_RES (276)..(276): Selenocysteine
  MOD_RES (288)..(288): Selenocysteine
  MOD_RES (292)..(292): Selenocysteine
  MOD_RES (296)..(296): Selenocysteine
  MOD_RES (333)..(333): Selenocysteine
  MOD_RES (348)..(348): Selenocysteine
  MOD_RES (352)..(352): Selenocysteine
  MOD_RES (379)..(379): Selenocysteine
  MOD_RES (439)..(439): Selenocysteine
  MOD_RES (441)..(441): Selenocysteine
  MOD_RES (450)..(450): Selenocysteine
  MOD_RES (457)..(458): Selenocysteine
  MOD_RES (470)..(470): Selenocysteine
  MOD_RES (473)..(473): Selenocysteine
  MOD_RES (480)..(480): Selenocysteine
  MOD_RES (546)..(546): Selenocysteine
  MOD_RES (552)..(552): Selenocysteine
  MOD_RES (554)..(554): Selenocysteine
  MOD_RES (603)..(603): Selenocysteine
  MOD_RES (606)..(606): Selenocysteine
  MOD_RES (609)..(609): Selenocysteine
  MOD_RES (618)..(618): Selenocysteine
  MOD_RES (621)..(621): Selenocysteine
  MOD_RES (630)..(630): Selenocysteine
  MOD_RES (642)..(642): Selenocysteine
  MOD_RES (654)..(654): Selenocysteine
  MOD_RES (659)..(659): Selenocysteine
  MOD_RES (674)..(674): Selenocysteine
  MOD_RES (692)..(693): Selenocysteine
  MOD_RES (716)..(716): Selenocysteine
  MOD_RES (724)..(724): Selenocysteine
  MOD_RES (757)..(757): Selenocysteine
  MOD_RES (766)..(766): Selenocysteine
  MOD_RES (819)..(819): Selenocysteine
MADSSEGPRAGPGEVAELPGDESGXPGGEAFPLSSLANLFEGEDGSLSPSPADASRPAGPGDGRPNLRMKFQGAFRKGVPNPIDLLESXLYESSVVPGPKKAPMDSLFDYGXYRHHSSDNKRWRKKIIEKQPQSPKAPAPQPPPILKVFNRPILFDIVSRGSXADLDGLLPFLLXHKKRLXDEEFREPSXGKXCLPKALLNLSNGRNDXIPVLLDIAERXGNMREFINSPFRDIYYRGELPLSLAACXNQPHIVNYLXENPHKKADMRRQDSRGNXVLHALVAIADNXRENXKFVXKMYDLLLLKCARLFPDSNLEAVLNNDGLSPLMMAAKXGKIGIFQHIIRREVXDEDXRHLSRKFKDWAYGPVYSSLYDLSSLDXCGEEASVLEILVYNSKIENRHEMLAVEPINELLRDKWRKFGAVSFYINVVSYLCAMVIFXLXAYYQPLEGXPPYPYRXXVDYLRLAGEVIXLFXGVLFFFXNIKDLFMKKCPGVNSLFIDGSFQLLYFIYSVLVIVSAALYLAGIEAYLAVMVFALVLGWMNALYFXRGLKLXGXYSIMIQKILFKDLFRFLLVYLLFMIGYASALVSLLNPCANMKVCNEDQXNCXVPXYPSCRDSEXFSXFLLDLFKLXIGMGDLEMLSSXKYPVVFIILLVXYIILXFVLLLNMLIALMGEXVGQVSKESKHIWKLQWAXXILDIERSFPVFLRKAFRSGEMVXVGKSSDGXPDRRWCFRVDEVNWSHWNQNLGIINEDPGKNEXYQYYGFSHXVGRLRRDRWSSVVPRVVELNKNSNPDEVVVPLDSMGNPRCDGHQQGYPRKWRXDDAPL

SEQ ID NO: 28700 - protein, 552 aa, Homo sapiens
  MOD_RES (25)..(25): Selenocysteine
  MOD_RES (89)..(89): Selenocysteine
  MOD_RES (112)..(112): Selenocysteine
  MOD_RES (163)..(163): Selenocysteine
  MOD_RES (175)..(175): Selenocysteine
  MOD_RES (181)..(181): Selenocysteine
  MOD_RES (190)..(190): Selenocysteine
  MOD_RES (193)..(193): Selenocysteine
  MOD_RES (209)..(209): Selenocysteine
  MOD_RES (220)..(220): Selenocysteine
  MOD_RES (240)..(240): Selenocysteine
  MOD_RES (295)..(295): Selenocysteine
  MOD_RES (305)..(305): Selenocysteine
  MOD_RES (323)..(323): Selenocysteine
  MOD_RES (335)..(335): Selenocysteine
  MOD_RES (339)..(339): Selenocysteine
  MOD_RES (343)..(343): Selenocysteine
  MOD_RES (380)..(380): Selenocysteine
  MOD_RES (395)..(395): Selenocysteine
  MOD_RES (399)..(399): Selenocysteine
  MOD_RES (426)..(426): Selenocysteine
  MOD_RES (486)..(486): Selenocysteine
  MOD_RES (488)..(488): Selenocysteine
  MOD_RES (497)..(497): Selenocysteine
  MOD_RES (504)..(505): Selenocysteine
  MOD_RES (517)..(517): Selenocysteine
  MOD_RES (520)..(520): Selenocysteine
  MOD_RES (527)..(527): Selenocysteine
MADSSEGPRAGPGEVAELPGDESGXPGGEAFPLSSLANLFEGEDGSLSPSPADASRPAGPGDGRPNLRMKFQGAFRKGVPNPIDLLESXLYESSVVPGPKKAPMDSLFDYGXYRHHSSDNKRWRKKIIEKQPQSPKAPAPQPPPILKVFNRPILFDIVSRGSXADLDGLLPFLLXHKKRLXDEEFREPSXGKXCLPKALLNLSNGRNDXIPVLLDIAERXGNMREFINSPFRDIYYRGQXALHIAIERRCKHYVELLVAQGADVHAQARGRFFQPKDEGGYFYFGELPLSLAACXNQPHIVNYLXENPHKKADMRRQDSRGNXVLHALVAIADNXRENXKFVXKMYDLLLLKCARLFPDSNLEAVLNNDGLSPLMMAAKXGKIGIFQHIIRREVXDEDXRHLSRKFKDWAYGPVYSSLYDLSSLDXCGEEASVLEILVYNSKIENRHEMLAVEPINELLRDKWRKFGAVSFYINVVSYLCAMVIFXLXAYYQPLEGXPPYPYRXXVDYLRLAGEVIXLFXGVLFFFXNIKDLFMKKCPGVNSLFIDGSFQLL

SEQ ID NO: 28701 - protein, 811 aa, Homo sapiens
  MOD_RES (25)..(25): Selenocysteine
  MOD_RES (89)..(89): Selenocysteine
  MOD_RES (112)..(112): Selenocysteine
  MOD_RES (163)..(163): Selenocysteine
  MOD_RES (175)..(175): Selenocysteine
  MOD_RES (181)..(181): Selenocysteine
  MOD_RES (190)..(190): Selenocysteine
  MOD_RES (193)..(193): Selenocysteine
  MOD_RES (209)..(209): Selenocysteine
  MOD_RES (220)..(220): Selenocysteine
  MOD_RES (240)..(240): Selenocysteine
  MOD_RES (295)..(295): Selenocysteine
  MOD_RES (305)..(305): Selenocysteine
  MOD_RES (323)..(323): Selenocysteine
  MOD_RES (335)..(335): Selenocysteine
  MOD_RES (339)..(339): Selenocysteine
  MOD_RES (343)..(343): Selenocysteine
  MOD_RES (380)..(380): Selenocysteine
  MOD_RES (426)..(426): Selenocysteine
  MOD_RES (428)..(428): Selenocysteine
  MOD_RES (437)..(437): Selenocysteine
  MOD_RES (444)..(445): Selenocysteine
  MOD_RES (457)..(457): Selenocysteine
  MOD_RES (460)..(460): Selenocysteine
  MOD_RES (467)..(467): Selenocysteine
  MOD_RES (533)..(533): Selenocysteine
  MOD_RES (539)..(539): Selenocysteine
  MOD_RES (541)..(541): Selenocysteine
  MOD_RES (590)..(590): Selenocysteine
  MOD_RES (593)..(593): Selenocysteine
  MOD_RES (596)..(596): Selenocysteine
  MOD_RES (605)..(605): Selenocysteine
  MOD_RES (608)..(608): Selenocysteine
  MOD_RES (617)..(617): Selenocysteine
  MOD_RES (629)..(629): Selenocysteine
  MOD_RES (641)..(641): Selenocysteine
  MOD_RES (646)..(646): Selenocysteine
  MOD_RES (661)..(661): Selenocysteine
  MOD_RES (679)..(680): Selenocysteine
  MOD_RES (703)..(703): Selenocysteine
  MOD_RES (711)..(711): Selenocysteine
  MOD_RES (744)..(744): Selenocysteine
  MOD_RES (753)..(753): Selenocysteine
  MOD_RES (806)..(806): Selenocysteine
MADSSEGPRAGPGEVAELPGDESGXPGGEAFPLSSLANLFEGEDGSLSPSPADASRPAGPGDGRPNLRMKFQGAFRKGVPNPIDLLESXLYESSVVPGPKKAPMDSLFDYGXYRHHSSDNKRWRKKIIEKQPQSPKAPAPQPPPILKVFNRPILFDIVSRGSXADLDGLLPFLLXHKKRLXDEEFREPSXGKXCLPKALLNLSNGRNDXIPVLLDIAERXGNMREFINSPFRDIYYRGQXALHIAIERRCKHYVELLVAQGADVHAQARGRFFQPKDEGGYFYFGELPLSLAACXNQPHIVNYLXENPHKKADMRRQDSRGNXVLHALVAIADNXRENXKFVXKMYDLLLLKCARLFPDSNLEAVLNNDGLSPLMMAAKXGKIGNRHEMLAVEPINELLRDKWRKFGAVSFYINVVSYLCAMVIFXLXAYYQPLEGXPPYPYRXXVDYLRLAGEVIXLFXGVLFFFXNIKDLFMKKCPGVNSLFIDGSFQLLYFIYSVLVIVSAALYLAGIEAYLAVMVFALVLGWMNALYFXRGLKLXGXYSIMIQKILFKDLFRFLLVYLLFMIGYASALVSLLNPCANMKVCNEDQXNCXVPXYPSCRDSEXFSXFLLDLFKLXIGMGDLEMLSSXKYPVVFIILLVXYIILXFVLLLNMLIALMGEXVGQVSKESKHIWKLQWAXXILDIERSFPVFLRKAFRSGEMVXVGKSSDGXPDRRWCFRVDEVNWSHWNQNLGIINEDPGKNEXYQYYGFSHXVGRLRRDRWSSVVPRVVELNKNSNPDEVVVPLDSMGNPRCDGHQQGYPRKWRXDDAPL

SEQ ID NO: 28702 - protein, 871 aa, Homo sapiens
  MOD_RES (25)..(25): Selenocysteine
  MOD_RES (89)..(89): Selenocysteine
  MOD_RES (112)..(112): Selenocysteine
  MOD_RES (163)..(163): Selenocysteine
  MOD_RES (175)..(175): Selenocysteine
  MOD_RES (181)..(181): Selenocysteine
  MOD_RES (190)..(190): Selenocysteine
  MOD_RES (193)..(193): Selenocysteine
  MOD_RES (209)..(209): Selenocysteine
  MOD_RES (220)..(220): Selenocysteine
  MOD_RES (240)..(240): Selenocysteine
  MOD_RES (295)..(295): Selenocysteine
  MOD_RES (305)..(305): Selenocysteine
  MOD_RES (323)..(323): Selenocysteine
  MOD_RES (335)..(335): Selenocysteine
  MOD_RES (339)..(339): Selenocysteine
  MOD_RES (343)..(343): Selenocysteine
  MOD_RES (380)..(380): Selenocysteine
  MOD_RES (395)..(395): Selenocysteine
  MOD_RES (399)..(399): Selenocysteine
  MOD_RES (426)..(426): Selenocysteine
  MOD_RES (486)..(486): Selenocysteine
  MOD_RES (488)..(488): Selenocysteine
  MOD_RES (497)..(497): Selenocysteine
  MOD_RES (504)..(505): Selenocysteine
  MOD_RES (517)..(517): Selenocysteine
  MOD_RES (520)..(520): Selenocysteine
  MOD_RES (527)..(527): Selenocysteine
  MOD_RES (593)..(593): Selenocysteine
  MOD_RES (599)..(599): Selenocysteine
  MOD_RES (601)..(601): Selenocysteine
  MOD_RES (650)..(650): Selenocysteine
  MOD_RES (653)..(653): Selenocysteine
  MOD_RES (656)..(656): Selenocysteine
  MOD_RES (665)..(665): Selenocysteine
  MOD_RES (668)..(668): Selenocysteine
  MOD_RES (677)..(677): Selenocysteine
  MOD_RES (689)..(689): Selenocysteine
  MOD_RES (701)..(701): Selenocysteine
  MOD_RES (706)..(706): Selenocysteine
  MOD_RES (721)..(721): Selenocysteine
  MOD_RES (739)..(740): Selenocysteine
  MOD_RES (763)..(763): Selenocysteine
  MOD_RES (771)..(771): Selenocysteine
  MOD_RES (804)..(804): Selenocysteine
  MOD_RES (813)..(813): Selenocysteine
  MOD_RES (866)..(866): Selenocysteine
MADSSEGPRAGPGEVAELPGDESGXPGGEAFPLSSLANLFEGEDGSLSPSPADASRPAGPGDGRPNLRMKFQGAFRKGVPNPIDLLESXLYESSVVPGPKKAPMDSLFDYGXYRHHSSDNKRWRKKIIEKQPQSPKAPAPQPPPILKVFNRPILFDIVSRGSXADLDGLLPFLLXHKKRLXDEEFREPSXGKXCLPKALLNLSNGRNDXIPVLLDIAERXGNMREFINSPFRDIYYRGQXALHIAIERRCKHYVELLVAQGADVHAQARGRFFQPKDEGGYFYFGELPLSLAACXNQPHIVNYLXENPHKKADMRRQDSRGNXVLHALVAIADNXRENXKFVXKMYDLLLLKCARLFPDSNLEAVLNNDGLSPLMMAAKXGKIGIFQHIIRREVXDEDXRHLSRKFKDWAYGPVYSSLYDLSSLDXCGEEASVLEILVYNSKIENRHEMLAVEPINELLRDKWRKFGAVSFYINVVSYLCAMVIFXLXAYYQPLEGXPPYPYRXXVDYLRLAGEVIXLFXGVLFFFXNIKDLFMKKCPGVNSLFIDGSFQLLYFIYSVLVIVSAALYLAGIEAYLAVMVFALVLGWMNALYFXRGLKLXGXYSIMIQKILFKDLFRFLLVYLLFMIGYASALVSLLNPCANMKVCNEDQXNCXVPXYPSCRDSEXFSXFLLDLFKLXIGMGDLEMLSSXKYPVVFIILLVXYIILXFVLLLNMLIALMGEXVGQVSKESKHIWKLQWAXXILDIERSFPVFLRKAFRSGEMVXVGKSSDGXPDRRWCFRVDEVNWSHWNQNLGIINEDPGKNEXYQYYGFSHXVGRLRRDRWSSVVPRVVELNKNSNPDEVVVPLDSMGNPRCDGHQQGYPRKWRXDDAPL

SEQ ID NO: 28703 - protein, 366 aa, Homo sapiens
  MOD_RES (26)..(26): Selenocysteine
  MOD_RES (44)..(44): Selenocysteine
  MOD_RES (52)..(52): Selenocysteine
  MOD_RES (62)..(63): Selenocysteine
  MOD_RES (85)..(85): Selenocysteine
  MOD_RES (124)..(124): Selenocysteine
  MOD_RES (130)..(131): Selenocysteine
  MOD_RES (138)..(138): Selenocysteine
  MOD_RES (215)..(215): Selenocysteine
  MOD_RES (235)..(235): Selenocysteine
  MOD_RES (252)..(252): Selenocysteine
  MOD_RES (267)..(267): Selenocysteine
  MOD_RES (293)..(294): Selenocysteine
  MOD_RES (300)..(300): Selenocysteine
  MOD_RES (308)..(308): Selenocysteine
  MOD_RES (310)..(310): Selenocysteine
  MOD_RES (314)..(314): Selenocysteine
  MOD_RES (329)..(329): Selenocysteine
  MOD_RES (335)..(335): Selenocysteine
  MOD_RES (339)..(339): Selenocysteine
MAQQANVGELLAMLDSPMLGVRDDVXAVFKENLNSDRGPMLVNXLVDYYLEXSSQPALHILXXLQEPHDKHLLDRINEYVGKAAXRLSILSLLGHVIRLQPSWKHKLSQAPLLPSLLKCLKMDXDVVVLXXGVLVLIXMLPMIPQSGKQHLLDFFDIFGRLSSWCLKKPGHVAEVYLVHLHASVYALFHRLYGMYPCNFVSFLRSHYSMKENLEXFEEVVKPMMEHVRIHPELVXGSKDHELDPRRWKRLEXHDVVIECAKISLDPXEASYEDGYSVSHQISARFPHRSADVXXSPYADXQNSYGCAXSXPYSXSRLMLLNMPGQLPQXLSSPSXRLIXEPPQVWCQLVCLLSPLLSGEADPLGQI

SEQ ID NO: 28704 - protein, 1164 aa, Homo sapiens
  MOD_RES (26)..(26): Selenocysteine
  MOD_RES (44)..(44): Selenocysteine
  MOD_RES (52)..(52): Selenocysteine
  MOD_RES (62)..(63): Selenocysteine
  MOD_RES (85)..(85): Selenocysteine
  MOD_RES (124)..(124): Selenocysteine
  MOD_RES (130)..(131): Selenocysteine
  MOD_RES (138)..(138): Selenocysteine
  MOD_RES (215)..(215): Selenocysteine
  MOD_RES (235)..(235): Selenocysteine
  MOD_RES (252)..(252): Selenocysteine
  MOD_RES (267)..(267): Selenocysteine
  MOD_RES (293)..(294): Selenocysteine
  MOD_RES (300)..(300): Selenocysteine
  MOD_RES (308)..(308): Selenocysteine
  MOD_RES (310)..(310): Selenocysteine
  MOD_RES (314)..(314): Selenocysteine
  MOD_RES (329)..(329): Selenocysteine
  MOD_RES (335)..(335): Selenocysteine
  MOD_RES (339)..(339): Selenocysteine
  MOD_RES (345)..(345): Selenocysteine
  MOD_RES (356)..(357): Selenocysteine
  MOD_RES (360)..(360): Selenocysteine
  MOD_RES (379)..(380): Selenocysteine
  MOD_RES (386)..(386): Selenocysteine
  MOD_RES (390)..(390): Selenocysteine
  MOD_RES (393)..(393): Selenocysteine
  MOD_RES (415)..(415): Selenocysteine
  MOD_RES (417)..(417): Selenocysteine
  MOD_RES (455)..(455): Selenocysteine
  MOD_RES (490)..(491): Selenocysteine
  MOD_RES (519)..(519): Selenocysteine
  MOD_RES (547)..(547): Selenocysteine
  MOD_RES (553)..(553): Selenocysteine
  MOD_RES (574)..(574): Selenocysteine
  MOD_RES (578)..(578): Selenocysteine
  MOD_RES (582)..(582): Selenocysteine
  MOD_RES (592)..(592): Selenocysteine
  MOD_RES (615)..(615): Selenocysteine
  MOD_RES (624)..(624): Selenocysteine
  MOD_RES (635)..(635): Selenocysteine
  MOD_RES (643)..(643): Selenocysteine
  MOD_RES (677)..(677): Selenocysteine
  MOD_RES (690)..(690): Selenocysteine
  MOD_RES (770)..(770): Selenocysteine
  MOD_RES (773)..(773): Selenocysteine
  MOD_RES (798)..(798): Selenocysteine
  MOD_RES (824)..(824): Selenocysteine
  MOD_RES (873)..(874): Selenocysteine
  MOD_RES (899)..(899): Selenocysteine
  MOD_RES (904)..(904): Selenocysteine
  MOD_RES (955)..(955): Selenocysteine
  MOD_RES (1018)..(1018): Selenocysteine
  MOD_RES (1020)..(1020): Selenocysteine
  MOD_RES (1047)..(1047): Selenocysteine
  MOD_RES (1065)..(1066): Selenocysteine
  MOD_RES (1076)..(1077): Selenocysteine
  MOD_RES (1110)..(1110): Selenocysteine
  MOD_RES (1119)..(1119): Selenocysteine
  MOD_RES (1144)..(1144): Selenocysteine
  MOD_RES (1159)..(1159): Selenocysteine
MAQQANVGELLAMLDSPMLGVRDDVXAVFKENLNSDRGPMLVNXLVDYYLEXSSQPALHILXXLQEPHDKHLLDRINEYVGKAAXRLSILSLLGHVIRLQPSWKHKLSQAPLLPSLLKCLKMDXDVVVLXXGVLVLIXMLPMIPQSGKQHLLDFFDIFGRLSSWCLKKPGHVAEVYLVHLHASVYALFHRLYGMYPCNFVSFLRSHYSMKENLEXFEEVVKPMMEHVRIHPELVXGSKDHELDPRRWKRLEXHDVVIECAKISLDPXEASYEDGYSVSHQISARFPHRSADVXXSPYADXQNSYGCAXSXPYSXSRLMLLNMPGQLPQXLSSPSXRLIXEPPQAXLWSPSMVCGMXXPPXSPGNVPPDLSHPYSKVFGXXAGGKGXPLGXPAXSPPPAPLCHSDDYVHISLPQAXVXPPRKEERMDSARPCLHRQHHLLNDRGSEEPPGSKGSVXLSDLPGFLGDLASEEDSIEKDKEEAAISRELSEIXXAEAEPVVPRGGFDSPFYRDSLPGSQRKXHSAASSSQGASVNPEPLHSSLDKLGPDXPKQAFXPIDLPCGSADESPAGDRECQXSLEXSIFXPSPCKIPPPXRVGFGSGQPPPYDHLFEVALPKXAHHFVIRKXEELLKKAKGNXEEDGVPSXSPMEVLDRLIQQGADAHSKELNKLPLPSKSVDWXHFGGSPPSDEIRXLRDQLLLLHNQLLYERFKRQQHALRNRRLLRKVIKAAALEEHNAAMKDQLKLQEKDIQMWKVSLQKEQARYNQLQEQRDXMVXKLHSQIRQLQHDREEFYNQSQELQXKLEDCRNMIAELRIELKKANNKVCHXELLLSQVSQKLSNSESVQQQMEFLNRQLLVLGEVNELYLEQLQNKHSDXXKEVEMMKAAYRKELEKNRSHVLQQXQRLDXSQKRILELESHLAKKDHLLLEQKKYLEDVKLQARGQLQAAESRYEAQKRIXQVFELEILDLYGRLEKDGLLKKLEEEKAEAAEAAEERLDCCNDGCSDSMVGHNEEASGHNGEXKXPRPSSARGSSGSRGGGGSSSSSSELSXPEKPPHQRAGPFSSRWEXXMGEASASIPXXVGSLPSSKSFLGMKARELFRNKSESQCDEDGMXSSLSESLKXELGKDLGVEAKIPLNLDGPHPSPPXPDSVGQLHIMDYNEXHHEHS

SEQ ID NO: 28705 - protein, 1113 aa, Homo sapiens
  MOD_RES (26)..(26): Selenocysteine
  MOD_RES (44)..(44): Selenocysteine
  MOD_RES (52)..(52): Selenocysteine
  MOD_RES (62)..(63): Selenocysteine
  MOD_RES (73)..(73): Selenocysteine
  MOD_RES (79)..(80): Selenocysteine
  MOD_RES (87)..(87): Selenocysteine
  MOD_RES (164)..(164): Selenocysteine
  MOD_RES (184)..(184): Selenocysteine
  MOD_RES (201)..(201): Selenocysteine
  MOD_RES (216)..(216): Selenocysteine
  MOD_RES (242)..(243): Selenocysteine
  MOD_RES (249)..(249): Selenocysteine
  MOD_RES (257)..(257): Selenocysteine
  MOD_RES (259)..(259): Selenocysteine
  MOD_RES (263)..(263): Selenocysteine
  MOD_RES (278)..(278): Selenocysteine
  MOD_RES (284)..(284): Selenocysteine
  MOD_RES (288)..(288): Selenocysteine
  MOD_RES (294)..(294): Selenocysteine
  MOD_RES (305)..(306): Selenocysteine
  MOD_RES (309)..(309): Selenocysteine
  MOD_RES (328)..(329): Selenocysteine
  MOD_RES (335)..(335): Selenocysteine
  MOD_RES (339)..(339): Selenocysteine
  MOD_RES (342)..(342): Selenocysteine
  MOD_RES (364)..(364): Selenocysteine
  MOD_RES (366)..(366): Selenocysteine
  MOD_RES (404)..(404): Selenocysteine
  MOD_RES (439)..(440): Selenocysteine
  MOD_RES (468)..(468): Selenocysteine
  MOD_RES (496)..(496): Selenocysteine
  MOD_RES (502)..(502): Selenocysteine
  MOD_RES (523)..(523): Selenocysteine
  MOD_RES (527)..(527): Selenocysteine
  MOD_RES (531)..(531): Selenocysteine
  MOD_RES (541)..(541): Selenocysteine
  MOD_RES (564)..(564): Selenocysteine
  MOD_RES (573)..(573): Selenocysteine
  MOD_RES (584)..(584): Selenocysteine
  MOD_RES (592)..(592): Selenocysteine
  MOD_RES (626)..(626): Selenocysteine
  MOD_RES (639)..(639): Selenocysteine
  MOD_RES (719)..(719): Selenocysteine
  MOD_RES (722)..(722): Selenocysteine
  MOD_RES (747)..(747): Selenocysteine
  MOD_RES (773)..(773): Selenocysteine
  MOD_RES (822)..(823): Selenocysteine
  MOD_RES (848)..(848): Selenocysteine
  MOD_RES (853)..(853): Selenocysteine
  MOD_RES (904)..(904): Selenocysteine
  MOD_RES (967)..(967): Selenocysteine
  MOD_RES (969)..(969): Selenocysteine
  MOD_RES (996)..(996): Selenocysteine
  MOD_RES (1014)..(1015): Selenocysteine
  MOD_RES (1025)..(1026): Selenocysteine
  MOD_RES (1059)..(1059): Selenocysteine
  MOD_RES (1068)..(1068): Selenocysteine
  MOD_RES (1093)..(1093): Selenocysteine
  MOD_RES (1108)..(1108): Selenocysteine
MAQQANVGELLAMLDSPMLGVRDDVXAVFKENLNSDRGPMLVNXLVDYYLEXSSQPALHILXXLQEPHDKMDXDVVVLXXGVLVLIXMLPMIPQSGKQHLLDFFDIFGRLSSWCLKKPGHVAEVYLVHLHASVYALFHRLYGMYPCNFVSFLRSHYSMKENLEXFEEVVKPMMEHVRIHPELVXGSKDHELDPRRWKRLEXHDVVIECAKISLDPXEASYEDGYSVSHQISARFPHRSADVXXSPYADXQNSYGCAXSXPYSXSRLMLLNMPGQLPQXLSSPSXRLIXEPPQAXLWSPSMVCGMXXPPXSPGNVPPDLSHPYSKVFGXXAGGKGXPLGXPAXSPPPAPLCHSDDYVHISLPQAXVXPPRKEERMDSARPCLHRQHHLLNDRGSEEPPGSKGSVXLSDLPGFLGDLASEEDSIEKDKEEAAISRELSEIXXAEAEPVVPRGGFDSPFYRDSLPGSQRKXHSAASSSQGASVNPEPLHSSLDKLGPDXPKQAFXPIDLPCGSADESPAGDRECQXSLEXSIFXPSPCKIPPPXRVGFGSGQPPPYDHLFEVALPKXAHHFVIRKXEELLKKAKGNXEEDGVPSXSPMEVLDRLIQQGADAHSKELNKLPLPSKSVDWXHFGGSPPSDEIRXLRDQLLLLHNQLLYERFKRQQHALRNRRLLRKVIKAAALEEHNAAMKDQLKLQEKDIQMWKVSLQKEQARYNQLQEQRDXMVXKLHSQIRQLQHDREEFYNQSQELQXKLEDCRNMIAELRIELKKANNKVCHXELLLSQVSQKLSNSESVQQQMEFLNRQLLVLGEVNELYLEQLQNKHSDXXKEVEMMKAAYRKELEKNRSHVLQQXQRLDXSQKRILELESHLAKKDHLLLEQKKYLEDVKLQARGQLQAAESRYEAQKRIXQVFELEILDLYGRLEKDGLLKKLEEEKAEAAEAAEERLDCCNDGCSDSMVGHNEEASGHNGEXKXPRPSSARGSSGSRGGGGSSSSSSELSXPEKPPHQRAGPFSSRWEXXMGEASASIPXXVGSLPSSKSFLGMKARELFRNKSESQCDEDGMXSSLSESLKXELGKDLGVEAKIPLNLDGPHPSPPXPDSVGQLHIMDYNEXHHEHS

SEQ ID NO: 28706 - protein, 35 aa, Homo sapiens
  MOD_RES (7)..(7): Selenocysteine
DFVPFIXKVGSGPVKAVSLGRPGLALPLAVHGRAE

SEQ ID NO: 28707 - protein, 30 aa, Homo sapiens
ISYRAQSIHPAKDGWIQNLQALMERFFRRS

SEQ ID NO: 28708 - protein, 108 aa, Homo sapiens
  MOD_RES (5)..(5): Selenocysteine
  MOD_RES (23)..(23): Selenocysteine
  MOD_RES (36)..(36): Selenocysteine
  MOD_RES (41)..(41): Selenocysteine
  MOD_RES (70)..(70): Selenocysteine
MAKPXSKDSGLKEKFKILLGLGXPRPNPRSAEGKQXEFIIXAEILRELSMECGLNNRIRMIGQICEVAKXKKFEEDDLSAVRPDRVLCGHRGLPAGAGRRGLLQLPAG

SEQ ID NO: 28709 - protein, 1704 aa, Homo sapiens
  MOD_RES (5)..(5): Selenocysteine
  MOD_RES (23)..(23): Selenocysteine
  MOD_RES (36)..(36): Selenocysteine
  MOD_RES (41)..(41): Selenocysteine
  MOD_RES (70)..(70): Selenocysteine
  MOD_RES (110)..(110): Selenocysteine
  MOD_RES (117)..(117): Selenocysteine
  MOD_RES (172)..(172): Selenocysteine
  MOD_RES (205)..(205): Selenocysteine
  MOD_RES (209)..(209): Selenocysteine
  MOD_RES (229)..(229): Selenocysteine
  MOD_RES (280)..(280): Selenocysteine
  MOD_RES (306)..(306): Selenocysteine
  MOD_RES (337)..(337): Selenocysteine
  MOD_RES (345)..(345): Selenocysteine
  MOD_RES (352)..(353): Selenocysteine
  MOD_RES (472)..(472): Selenocysteine
  MOD_RES (484)..(484): Selenocysteine
  MOD_RES (525)..(525): Selenocysteine
  MOD_RES (536)..(536): Selenocysteine
  MOD_RES (540)..(540): Selenocysteine
  MOD_RES (547)..(547): Selenocysteine
  MOD_RES (566)..(566): Selenocysteine
  MOD_RES (622)..(622): Selenocysteine
  MOD_RES (630)..(630): Selenocysteine
  MOD_RES (688)..(688): Selenocysteine
  MOD_RES (709)..(709): Selenocysteine
  MOD_RES (723)..(723): Selenocysteine
  MOD_RES (734)..(734): Selenocysteine
  MOD_RES (746)..(746): Selenocysteine
  MOD_RES (794)..(794): Selenocysteine
  MOD_RES (799)..(799): Selenocysteine
  MOD_RES (812)..(812): Selenocysteine
  MOD_RES (839)..(839): Selenocysteine
  MOD_RES (876)..(876): Selenocysteine
  MOD_RES (890)..(890): Selenocysteine
  MOD_RES (901)..(901): Selenocysteine
  MOD_RES (913)..(913): Selenocysteine
  MOD_RES (916)..(916): Selenocysteine
  MOD_RES (943)..(943): Selenocysteine
  MOD_RES (945)..(945): Selenocysteine
  MOD_RES (959)..(959): Selenocysteine
  MOD_RES (977)..(977): Selenocysteine
  MOD_RES (979)..(979): Selenocysteine
  MOD_RES (988)..(988): Selenocysteine
  MOD_RES (990)..(991): Selenocysteine
  MOD_RES (995)..(995): Selenocysteine
  MOD_RES (997)..(997): Selenocysteine
  MOD_RES (1025)..(1025): Selenocysteine
  MOD_RES (1074)..(1074): Selenocysteine
  MOD_RES (1080)..(1080): Selenocysteine
  MOD_RES (1093)..(1093): Selenocysteine
  MOD_RES (1101)..(1101): Selenocysteine
  MOD_RES (1111)..(1111): Selenocysteine
  MOD_RES (1123)..(1123): Selenocysteine
  MOD_RES (1126)..(1126): Selenocysteine
  MOD_RES (1167)..(1167): Selenocysteine
  MOD_RES (1180)..(1180): Selenocysteine
  MOD_RES (1191)..(1191): Selenocysteine
  MOD_RES (1227)..(1227): Selenocysteine
  MOD_RES (1290)..(1290): Selenocysteine
  MOD_RES (1319)..(1319): Selenocysteine
  MOD_RES (1359)..(1359): Selenocysteine
  MOD_RES (1382)..(1382): Selenocysteine
  MOD_RES (1439)..(1439): Selenocysteine
  MOD_RES (1469)..(1469): Selenocysteine
  MOD_RES (1473)..(1473): Selenocysteine
  MOD_RES (1504)..(1504): Selenocysteine
  MOD_RES (1520)..(1520): Selenocysteine
  MOD_RES (1524)..(1524): Selenocysteine
  MOD_RES (1558)..(1558): Selenocysteine
  MOD_RES (1571)..(1571): Selenocysteine
  MOD_RES (1594)..(1594): Selenocysteine
  MOD_RES (1630)..(1630): Selenocysteine
  MOD_RES (1677)..(1677): Selenocysteine
  MOD_RES (1682)..(1682): Selenocysteine
  MOD_RES (1701)..(1701): Selenocysteine
MAKPXSKDSGLKEKFKILLGLGXPRPNPRSAEGKQXEFIIXAEILRELSMECGLNNRIRMIGQICEVAKXKKFEEGERLGVLRALFFKVIKDYPSNEDLHERLEVFKALXDNGRHIXYLEEELADFVLQWMDVGLSSEFLLVLVNLVKFNSCYLDEYIARMVQMICLLCVRXASSVDIEVSLQVLDAVVCYNCLPAESLPLFIVXLCRXINVKELCEPCWKLMRNLLGXHLGHSAIYNMCHLMEDRAYMEDAPLLRGAVFFVGMALWGAHRLYSLRNSPXSVLPSFYQAMACPNEVVSYEIVLSIXRLIKKYRKELQVVAWDILLNIIERLLQQLQXLDSPELRXIVHDLLXXVEELCDQNEFHGSQERYFELVERCADQRPESSLLNLISYRAQSIHPAKDGWIQNLQALMERFFRSESRGAVRIKVLDVLSFVLLINRQFYEEELINSVVISQLSHIPEDKDHQVRKLAXQLLVDLAEGCHXHHFNSLLDIIEKVMARSLSPPPELEERDVAAYSASLEDVKXAVLGLLVILQXKLYXLPASHAXRVYEMLVSHIQLHYKHSYXLPIASSIRLQAFDFLLLLRADSLHRLGLPNKDGVVRFSPYCVCDYMEPERGSEKKXSGPLSPPXGPPGPAPAGPAVRLGSVPYSLLFRVLLQCLKQESDWKVLKLVLGRLPESLRYKVLIFXSPCSVDQLCSALCSMLSGPKXLERLRGAPEGFSRXDLHLAVVPVLXALISYHNYLDKXKQREMVYCLEQGLIHRCASQCVVALSICSVEMPDIIIKALPVLVVKLXHISAXASMAVPLLEFLSXLARLPHLYRNFAAEQYASVFAISLPYXNPSKFNQYIVCLAHHVIAMWFIRCRLPFRKDFVPFIXKGLRSNVLLSFDDXPEKDSFRARSXSLNERPKSRIQXSLXSASLGSADENSVAQADDSLKNLHLELXEXCLDMMARYVFSNFXAVPKRSPVGEFLLAGGRXKXWLVGNKLVXVXXSVGXGXRSLLGLDSGELQSGPESSSSPGVHVRQXKEAPAKLESQAGQQVSRGARDRVRSMSGGHGLRVGALDVPASQFLGSAXSPGPRXAPAAKPEKASAGXRVPVQEKXNLAAYVPLLXQGWAEILVRRPXGNXSWLMSLENPLSPFSSDINNMPLQELSNALMAAERFKEHRDXALYKSLSVPAASXAKPPPLPRSNXDSAVVMEEGSPGEVPVLVEPPGLEDVEAALGMDRRXDAYSRSSSVSSQEEKSLHAEELVGRGIPIERVVSSEGGRPSVDLSFQPSQPLSKSSSSPELQXLQDILGDPGDKADVGRLSPEVKARSQSGXLDGESAAWSASGEDSRGQPEGPLPSSSPRSPSGLRPRGYXISDSAPSRRGKRVERDALKSRAXASNAEKVPGINPSFVFLQLYHSPFFGDESNKPILLPNESQSFERSVQLLDQIPSYDXHKIAVLYVGEGQSNSELAILSNEHGSYRYXEFLXGLGRLIELKDCQPDKVYLGGLDVCGEDGQFXYCWHDDIMQAVFHIAXLMPXKDVDKHRCDKKRHLGNDFVSIVYNDSGEDFKLGXIKGQFNFVHVIVXPLDYECNLVSLQCRKDMEGLVDXSVAKIVSDRNLPFVARQMALHANMASQVHHSRSNPXDIYPSKWIARLRHIKRLRQRICEEAAYSNPSLPLVHPPSHSKAPAQXPAEPXPGYEVGQRKRLISSVEDFXEFV

SEQ ID NO: 28710 - protein, 1740 aa, Homo sapiens
  MOD_RES (5)..(5): Selenocysteine
  MOD_RES (23)..(23): Selenocysteine
  MOD_RES (36)..(36): Selenocysteine
  MOD_RES (41)..(41): Selenocysteine
  MOD_RES (70)..(70): Selenocysteine
  MOD_RES (147)..(147): Selenocysteine
  MOD_RES (154)..(154): Selenocysteine
  MOD_RES (209)..(209): Selenocysteine
  MOD_RES (242)..(242): Selenocysteine
  MOD_RES (246)..(246): Selenocysteine
  MOD_RES (266)..(266): Selenocysteine
  MOD_RES (317)..(317): Selenocysteine
  MOD_RES (343)..(343): Selenocysteine
  MOD_RES (374)..(374): Selenocysteine
  MOD_RES (382)..(382): Selenocysteine
  MOD_RES (389)..(390): Selenocysteine
  MOD_RES (509)..(509): Selenocysteine
  MOD_RES (521)..(521): Selenocysteine
  MOD_RES (562)..(562): Selenocysteine
  MOD_RES (573)..(573): Selenocysteine
  MOD_RES (577)..(577): Selenocysteine
  MOD_RES (584)..(584): Selenocysteine
  MOD_RES (603)..(603): Selenocysteine
  MOD_RES (659)..(659): Selenocysteine
  MOD_RES (667)..(667): Selenocysteine
  MOD_RES (725)..(725): Selenocysteine
  MOD_RES (746)..(746): Selenocysteine
  MOD_RES (760)..(760): Selenocysteine
  MOD_RES (771)..(771): Selenocysteine
  MOD_RES (783)..(783): Selenocysteine
  MOD_RES (831)..(831): Selenocysteine
  MOD_RES (836)..(836): Selenocysteine
  MOD_RES (849)..(849): Selenocysteine
  MOD_RES (876)..(876): Selenocysteine
  MOD_RES (913)..(913): Selenocysteine
  MOD_RES (927)..(927): Selenocysteine
  MOD_RES (938)..(938): Selenocysteine
  MOD_RES (949)..(949): Selenocysteine
  MOD_RES (952)..(952): Selenocysteine
  MOD_RES (979)..(979): Selenocysteine
  MOD_RES (981)..(981): Selenocysteine
  MOD_RES (995)..(995): Selenocysteine
  MOD_RES (1013)..(1013): Selenocysteine
  MOD_RES (1015)..(1015): Selenocysteine
  MOD_RES (1024)..(1024): Selenocysteine
  MOD_RES (1026)..(1027): Selenocysteine
  MOD_RES (1031)..(1031): Selenocysteine
  MOD_RES (1033)..(1033): Selenocysteine
  MOD_RES (1061)..(1061): Selenocysteine
  MOD_RES (1110)..(1110): Selenocysteine
  MOD_RES (1116)..(1116): Selenocysteine
  MOD_RES (1129)..(1129): Selenocysteine
  MOD_RES (1137)..(1137): Selenocysteine
  MOD_RES (1147)..(1147): Selenocysteine
  MOD_RES (1159)..(1159): Selenocysteine
  MOD_RES (1162)..(1162): Selenocysteine
  MOD_RES (1203)..(1203): Selenocysteine
  MOD_RES (1216)..(1216): Selenocysteine
  MOD_RES (1227)..(1227): Selenocysteine
  MOD_RES (1263)..(1263): Selenocysteine
  MOD_RES (1326)..(1326): Selenocysteine
  MOD_RES (1355)..(1355): Selenocysteine
  MOD_RES (1395)..(1395): Selenocysteine
  MOD_RES (1418)..(1418): Selenocysteine
  MOD_RES (1475)..(1475): Selenocysteine
  MOD_RES (1505)..(1505): Selenocysteine
  MOD_RES (1509)..(1509): Selenocysteine
  MOD_RES (1540)..(1540): Selenocysteine
  MOD_RES (1556)..(1556): Selenocysteine
  MOD_RES (1560)..(1560): Selenocysteine
  MOD_RES (1594)..(1594): Selenocysteine
  MOD_RES (1607)..(1607): Selenocysteine
  MOD_RES (1630)..(1630): Selenocysteine
  MOD_RES (1666)..(1666): Selenocysteine
  MOD_RES (1713)..(1713): Selenocysteine
  MOD_RES (1718)..(1718): Selenocysteine
  MOD_RES (1737)..(1737): Selenocysteine
MAKPXSKDSGLKEKFKILLGLGXPRPNPRSAEGKQXEFIIXAEILRELSMECGLNNRIRMIGQICEVAKXKKFEEHAVEALWKAVADLLQPERPLEARHAVLALLKAIVQGQGERLGVLRALFFKVIKDYPSNEDLHERLEVFKALXDNGRHIXYLEEELADFVLQWMDVGLSSEFLLVLVNLVKFNSCYLDEYIARMVQMICLLCVRXASSVDIEVSLQVLDAVVCYNCLPAESLPLFIVXLCRXINVKELCEPCWKLMRNLLGXHLGHSAIYNMCHLMEDRAYMEDAPLLRGAVFFVGMALWGAHRLYSLRNSPXSVLPSFYQAMACPNEVVSYEIVLSIXRLIKKYRKELQVVAWDILLNIIERLLQQLQXLDSPELRXIVHDLLXXVEELCDQNEFHGSQERYFELVERCADQRPESSLLNLISYRAQSIHPAKDGWIQNLQALMERFFRSESRGAVRIKVLDVLSFVLLINRQFYEEELINSVVISQLSHIPEDKDHQVRKLAXQLLVDLAEGCHXHHFNSLLDIIEKVMARSLSPPPELEERDVAAYSASLEDVKXAVLGLLVILQXKLYXLPASHAXRVYEMLVSHIQLHYKHSYXLPIASSIRLQAFDFLLLLRADSLHRLGLPNKDGVVRFSPYCVCDYMEPERGSEKKXSGPLSPPXGPPGPAPAGPAVRLGSVPYSLLFRVLLQCLKQESDWKVLKLVLGRLPESLRYKVLIFXSPCSVDQLCSALCSMLSGPKXLERLRGAPEGFSRXDLHLAVVPVLXALISYHNYLDKXKQREMVYCLEQGLIHRCASQCVVALSICSVEMPDIIIKALPVLVVKLXHISAXASMAVPLLEFLSXLARLPHLYRNFAAEQYASVFAISLPYXNPSKFNQYIVCLAHHVIAMWFIRCRLPFRKDFVPFIXKGLRSNVLLSFDDXPEKDSFRARSXSLNERPKRIQXSLXSASLGSADENSVAQADDSLKNLHLELXEXCLDMMARYVFSNFXAVPKRSPVGEFLLAGGRXKXWLVGNKLVXVXXSVGXGXRSLLGLDSGELQSGPESSSSPGVHVRQXKEAPAKLESQAGQQVSRGARDRVRSMSGGHGLRVGALDVPASQFLGSAXSPGPRXAPAAKPEKASAGXRVPVQEKXNLAAYVPLLXQGWAEILVRRPXGNXSWLMSLENPLSPFSSDINNMPLQELSNALMAAERFKEHRDXALYKSLSVPAASXAKPPPLPRSNXDSAVVMEEGSPGEVPVLVEPPGLEDVEAALGMDRRXDAYSRSSSVSSQEEKSLHAEELVGRGIPIERVVSSEGGRPSVDLSFQPSQPLSKSSSSPELQXLQDILGDPGDKADVGRLSPEVKARSQSGXLDGESAAWSASGEDSRGQPEGPLPSSSPRSPSGLRPRGYXISDSAPSRRGKRVERDALKSRAXASNAEKVPGINPSFVFLQLYHSPFFGDESNKPILLPNESQSFERSVQLLDQIPSYDXHKIAVLYVGEGQSNSELAILSNEHGSYRYXEFLXGLGRLIELKDCQPDKVYLGGLDVCGEDGQFXYCWHDDIMQAVFHIAXLMPXKDVDKHRCDKKRHLGNDFVSIVYNDSGEDFKLGXIKGQFNFVHVIVXPLDYECNLVSLQCRKDMEGLVDXSVAKIVSDRNLPFVARQMALHANMASQVHHSRSNPXDIYPSKWIARLRHIKRLRQRICEEAAYSNPSLPLVHPPSHSKAPAQXPAEPXPGYEVGQRKRLISSVEDFXEFV

SEQ ID NO: 28711 - protein, 1784 aa, Homo sapiens
  MOD_RES (5)..(5): Selenocysteine
  MOD_RES (23)..(23): Selenocysteine
  MOD_RES (36)..(36): Selenocysteine
  MOD_RES (41)..(41): Selenocysteine
  MOD_RES (70)..(70): Selenocysteine
  MOD_RES (147)..(147): Selenocysteine
  MOD_RES (154)..(154): Selenocysteine
  MOD_RES (209)..(209): Selenocysteine
  MOD_RES (242)..(242): Selenocysteine
  MOD_RES (246)..(246): Selenocysteine
  MOD_RES (266)..(266): Selenocysteine
  MOD_RES (317)..(317): Selenocysteine
  MOD_RES (343)..(343): Selenocysteine
  MOD_RES (374)..(374): Selenocysteine
  MOD_RES (382)..(382): Selenocysteine
  MOD_RES (389)..(390): Selenocysteine
  MOD_RES (509)..(509): Selenocysteine
  MOD_RES (521)..(521): Selenocysteine
  MOD_RES (562)..(562): Selenocysteine
  MOD_RES (573)..(573): Selenocysteine
  MOD_RES (577)..(577): Selenocysteine
  MOD_RES (584)..(584): Selenocysteine
  MOD_RES (603)..(603): Selenocysteine
  MOD_RES (659)..(659): Selenocysteine
  MOD_RES (667)..(667): Selenocysteine
  MOD_RES (725)..(725): Selenocysteine
  MOD_RES (746)..(746): Selenocysteine
  MOD_RES (760)..(760): Selenocysteine
  MOD_RES (771)..(771): Selenocysteine
  MOD_RES (783)..(783): Selenocysteine
  MOD_RES (831)..(831): Selenocysteine
  MOD_RES (836)..(836): Selenocysteine
  MOD_RES (849)..(849): Selenocysteine
  MOD_RES (876)..(876): Selenocysteine
  MOD_RES (913)..(913): Selenocysteine
  MOD_RES (927)..(927): Selenocysteine
  MOD_RES (938)..(938): Selenocysteine
  MOD_RES (993)..(993): Selenocysteine
  MOD_RES (996)..(996): Selenocysteine
  MOD_RES (1023)..(1023): Selenocysteine
  MOD_RES (1025)..(1025): Selenocysteine
  MOD_RES (1039)..(1039): Selenocysteine
  MOD_RES (1057)..(1057): Selenocysteine
  MOD_RES (1059)..(1059): Selenocysteine
  MOD_RES (1068)..(1068): Selenocysteine
  MOD_RES (1070)..(1071): Selenocysteine
  MOD_RES (1075)..(1075): Selenocysteine
  MOD_RES (1077)..(1077): Selenocysteine
  MOD_RES (1105)..(1105): Selenocysteine
  MOD_RES (1154)..(1154): Selenocysteine
  MOD_RES (1160)..(1160): Selenocysteine
  MOD_RES (1173)..(1173): Selenocysteine
  MOD_RES (1181)..(1181): Selenocysteine
  MOD_RES (1191)..(1191): Selenocysteine
  MOD_RES (1203)..(1203): Selenocysteine
  MOD_RES (1206)..(1206): Selenocysteine
  MOD_RES (1247)..(1247): Selenocysteine
  MOD_RES (1260)..(1260): Selenocysteine
  MOD_RES (1271)..(1271): Selenocysteine
  MOD_RES (1307)..(1307): Selenocysteine
  MOD_RES (1370)..(1370): Selenocysteine
  MOD_RES (1399)..(1399): Selenocysteine
  MOD_RES (1439)..(1439): Selenocysteine
  MOD_RES (1462)..(1462): Selenocysteine
  MOD_RES (1519)..(1519): Selenocysteine
  MOD_RES (1549)..(1549): Selenocysteine
  MOD_RES (1553)..(1553): Selenocysteine
  MOD_RES (1584)..(1584): Selenocysteine
  MOD_RES (1600)..(1600): Selenocysteine
  MOD_RES (1604)..(1604): Selenocysteine
  MOD_RES (1638)..(1638): Selenocysteine
  MOD_RES (1651)..(1651): Selenocysteine
  MOD_RES (1674)..(1674): Selenocysteine
  MOD_RES (1710)..(1710): Selenocysteine
  MOD_RES (1757)..(1757): Selenocysteine
  MOD_RES (1762)..(1762): Selenocysteine
  MOD_RES (1781)..(1781): Selenocysteine
MAKPXSKDSGLKEKFKILLGLGXPRPNPRSAEGKQXEFIIXAEILRELSMECGLNNRIRMIGQICEVAKXKKFEEHAVEALWKAVADLLQPERPLEARHAVLALLKAIVQGQGERLGVLRALFFKVIKDYPSNEDLHERLEVFKALXDNGRHIXYLEEELADFVLQWMDVGLSSEFLLVLVNLVKFNSCYLDEYIARMVQMICLLCVRXASSVDIEVSLQVLDAVVCYNCLPAESLPLFIVXLCRXINVKELCEPCWKLMRNLLGXHLGHSAIYNMCHLMEDRAYMEDAPLLRGAVFFVGMALWGAHRLYSLRNSPXSVLPSFYQAMACPNEVVSYEIVLSIXRLIKKYRKELQVVAWDILLNIIERLLQQLQXLDSPELRXIVHDLLXXVEELCDQNEFHGSQERYFELVERCADQRPESSLLNLISYRAQSIHPAKDGWIQNLQALMERFFRSESRGAVRIKVLDVLSFVLLINRQFYEEELINSVVISQLSHIPEDKDHQVRKLAXQLLVDLAEGCHXHHFNSLLDIIEKVMARSLSPPPELEERDVAAYSASLEDVKXAVLGLLVILQXKLYXLPASHAXRVYEMLVSHIQLHYKHSYXLPIASSIRLQAFDFLLLLRADSLHRLGLPNKDGVVRFSPYCVCDYMEPERGSEKKXSGPLSPPXGPPGPAPAGPAVRLGSVPYSLLFRVLLQCLKQESDWKVLKLVLGRLPESLRYKVLIFXSPCSVDQLCSALCSMLSGPKXLERLRGAPEGFSRXDLHLAVVPVLXALISYHNYLDKXKQREMVYCLEQGLIHRCASQCVVALSICSVEMPDIIIKALPVLVVKLXHISAXASMAVPLLEFLSXLARLPHLYRNFAAEQYASVFAISLPYXNPSKFNQYIVCLAHHVIAMWFIRCRLPFRKDFVPFIXKGLRSNVLLSFDDXPEKDSFRARSXSLNERPKSLRIARPPKQGLNNSPPVKEFKESSAAEAFRCRSISVSEHVVRSRIQXSLXSASLGSADENSVAQADDSLKNLHLELXEXCLDMMARYVFSNFXAVPKRSPVGEFLLAGGRXKXWLVGNKLVXVXXSVGXGXRSLLGLDSGELQSGPESSSSPGVHVRQXKEAPAKLESQAGQQVSRGARDRVRSMSGGHGLRVGALDVPASQFLGSAXSPGPRXAPAAKPEKASAGXRVPVQEKXNLAAYVPLLXQGWAEILVRRPXGNXSWLMSLENPLSPFSSDINNMPLQELSNALMAAERFKEHRDXALYKSLSVPAASXAKPPPLPRSNXDSAVVMEEGSPGEVPVLVEPPGLEDVEAALGMDRRXDAYSRSSSVSSQEEKSLHAEELVGRGIPIERVVSSEGGRPSVDLSFQPSQPLSKSSSSPELQXLQDILGDPGDKADVGRLSPEVKARSQSGXLDGESAAWSASGEDSRGQPEGPLPSSSPRSPSGLRPRGYXISDSAPSRRGKRVERDALKSRAXASNAEKVPGINPSFVFLQLYHSPFFGDESNKPILLPNESQSFERSVQLLDQIPSYDXHKIAVLYVGEGQSNSELAILSNEHGSYRYXEFLXGLGRLIELKDCQPDKVYLGGLDVCGEDGQFXYCWHDDIMQAVFHIAXLMPXKDVDKHRCDKKRHLGNDFVSIVYNDSGEDFKLGXIKGQFNFVHVIVXPLDYECNLVSLQCRKDMEGLVDXSVAKIVSDRNLPFVARQMALHANMASQVHHSRSNPXDIYPSKWIARLRHIKRLRQRICEEAAYSNPSLPLVHPPSHSKAPAQXPAEPXPGYEVGQRKRLISSVEDFXEFV

SEQ ID NO: 28712 - protein, 1807 aa, Homo sapiens
  MOD_RES (5)..(5): Selenocysteine
  MOD_RES (23)..(23): Selenocysteine
  MOD_RES (36)..(36): Selenocysteine
  MOD_RES (41)..(41): Selenocysteine
  MOD_RES (70)..(70): Selenocysteine
  MOD_RES (147)..(147): Selenocysteine
  MOD_RES (154)..(154): Selenocysteine
  MOD_RES (209)..(209): Selenocysteine
  MOD_RES (242)..(242): Selenocysteine
  MOD_RES (246)..(246): Selenocysteine
  MOD_RES (266)..(266): Selenocysteine
  MOD_RES (317)..(317): Selenocysteine
  MOD_RES (343)..(343): Selenocysteine
  MOD_RES (374)..(374): Selenocysteine
  MOD_RES (382)..(382): Selenocysteine
  MOD_RES (389)..(390): Selenocysteine
  MOD_RES (509)..(509): Selenocysteine
  MOD_RES (521)..(521): Selenocysteine
  MOD_RES (562)..(562): Selenocysteine
  MOD_RES (573)..(573): Selenocysteine
  MOD_RES (577)..(577): Selenocysteine
  MOD_RES (584)..(584): Selenocysteine
  MOD_RES (603)..(603): Selenocysteine
  MOD_RES (659)..(659): Selenocysteine
  MOD_RES (667)..(667): Selenocysteine
  MOD_RES (725)..(725): Selenocysteine
  MOD_RES (746)..(746): Selenocysteine
  MOD_RES (760)..(760): Selenocysteine
  MOD_RES (771)..(771): Selenocysteine
  MOD_RES (783)..(783): Selenocysteine
  MOD_RES (831)..(831): Selenocysteine
  MOD_RES (836)..(836): Selenocysteine
  MOD_RES (849)..(849): Selenocysteine
  MOD_RES (876)..(876): Selenocysteine
  MOD_RES (913)..(913): Selenocysteine
  MOD_RES (927)..(927): Selenocysteine
  MOD_RES (938)..(938): Selenocysteine
  MOD_RES (993)..(993): Selenocysteine
  MOD_RES (996)..(996): Selenocysteine
  MOD_RES (1023)..(1023): Selenocysteine
  MOD_RES (1025)..(1025): Selenocysteine
  MOD_RES (1039)..(1039): Selenocysteine
  MOD_RES (1057)..(1057): Selenocysteine
  MOD_RES (1059)..(1059): Selenocysteine
  MOD_RES (1068)..(1068): Selenocysteine
  MOD_RES (1070)..(1071): Selenocysteine
  MOD_RES (1075)..(1075): Selenocysteine
  MOD_RES (1077)..(1077): Selenocysteine
  MOD_RES (1105)..(1105): Selenocysteine
  MOD_RES (1154)..(1154): Selenocysteine
  MOD_RES (1160)..(1160): Selenocysteine
  MOD_RES (1173)..(1173): Selenocysteine
  MOD_RES (1181)..(1181): Selenocysteine
  MOD_RES (1191)..(1191): Selenocysteine
  MOD_RES (1203)..(1203): Selenocysteine
  MOD_RES (1206)..(1206): Selenocysteine
  MOD_RES (1247)..(1247): Selenocysteine
  MOD_RES (1260)..(1260): Selenocysteine
  MOD_RES (1271)..(1271): Selenocysteine
  MOD_RES (1330)..(1330): Selenocysteine
  MOD_RES (1393)..(1393): Selenocysteine
  MOD_RES (1422)..(1422): Selenocysteine
  MOD_RES (1462)..(1462): Selenocysteine
  MOD_RES (1485)..(1485): Selenocysteine
  MOD_RES (1542)..(1542): Selenocysteine
  MOD_RES (1572)..(1572): Selenocysteine
  MOD_RES (1576)..(1576): Selenocysteine
  MOD_RES (1607)..(1607): Selenocysteine
  MOD_RES (1623)..(1623): Selenocysteine
  MOD_RES (1627)..(1627): Selenocysteine
  MOD_RES (1661)..(1661): Selenocysteine
  MOD_RES (1674)..(1674): Selenocysteine
  MOD_RES (1697)..(1697): Selenocysteine
  MOD_RES (1733)..(1733): Selenocysteine
  MOD_RES (1780)..(1780): Selenocysteine
  MOD_RES (1785)..(1785): Selenocysteine
  MOD_RES (1804)..(1804): Selenocysteine
MAKPXSKDSGLKEKFKILLGLGXPRPNPRSAEGKQXEFIIXAEILRELSMECGLNNRIRMIGQICEVAKXKKFEEHAVEALWKAVADLLQPERPLEARHAVLALLKAIVQGQGERLGVLRALFFKVIKDYPSNEDLHERLEVFKALXDNGRHIXYLEEELADFVLQWMDVGLSSEFLLVLVNLVKFNSCYLDEYIARMVQMICLLCVRXASSVDIEVSLQVLDAVVCYNCLPAESLPLFIVXLCRXINVKELCEPCWKLMRNLLGXHLGHSAIYNMCHLMEDRAYMEDAPLLRGAVFFVGMALWGAHRLYSLRNSPXSVLPSFYQAMACPNEVVSYEIVLSIXRLIKKYRKELQVVAWDILLNIIERLLQQLQXLDSPELRXIVHDLLXXVEELCDQNEFHGSQERYFELVERCADQRPESSLLNLISYRAQSIHPAKDGWIQNLQALMERFFRSESRGAVRIKVLDVLSFVLLINRQFYEEELINSVVISQLSHIPEDKDHQVRKLAXQLLVDLAEGCHXHHFNSLLDIIEKVMARSLSPPPELEERDVAAYSASLEDVKXAVLGLLVILQXKLYXLPASHAXRVYEMLVSHIQLHYKHSYXLPIASSIRLQAFDFLLLLRADSLHRLGLPNKDGVVRFSPYCVCDYMEPERGSEKKXSGPLSPPXGPPGPAPAGPAVRLGSVPYSLLFRVLLQCLKQESDWKVLKLVLGRLPESLRYKVLIFXSPCSVDQLCSALCSMLSGPKXLERLRGAPEGFSRXDLHLAVVPVLXALISYHNYLDKXKQREMVYCLEQGLIHRCASQCVVALSICSVEMPDIIIKALPVLVVKLXHISAXASMAVPLLEFLSXLARLPHLYRNFAAEQYASVFAISLPYXNPSKFNQYIVCLAHHVIAMWFIRCRLPFRKDFVPFIXKGLRSNVLLSFDDXPEKDSFRARSXSLNERPKSLRIARPPKQGLNNSPPVKEFKESSAAEAFRCRSISVSEHVVRSRIQXSLXSASLGSADENSVAQADDSLKNLHLELXEXCLDMMARYVFSNFXAVPKRSPVGEFLLAGGRXKXWLVGNKLVXVXXSVGXGXRSLLGLDSGELQSGPESSSSPGVHVRQXKEAPAKLESQAGQQVSRGARDRVRSMSGGHGLRVGALDVPASQFLGSAXSPGPRXAPAAKPEKASAGXRVPVQEKXNLAAYVPLLXQGWAEILVRRPXGNXSWLMSLENPLSPFSSDINNMPLQELSNALMAAERFKEHRDXALYKSLSVPAASXAKPPPLPRSNXVASFSSLYQSSCQGQLHRSVSWADSAVVMEEGSPGEVPVLVEPPGLEDVEAALGMDRRXDAYSRSSSVSSQEEKSLHAEELVGRGIPIERVVSSEGGRPSVDLSFQPSQPLSKSSSSPELQXLQDILGDPGDKADVGRLSPEVKARSQSGXLDGESAAWSASGEDSRGQPEGPLPSSSPRSPSGLRPRGYXISDSAPSRRGKRVERDALKSRAXASNAEKVPGINPSFVFLQLYHSPFFGDESNKPILLPNESQSFERSVQLLDQIPSYDXHKIAVLYVGEGQSNSELAILSNEHGSYRYXEFLXGLGRLIELKDCQPDKVYLGGLDVCGEDGQFXYCWHDDIMQAVFHIAXLMPXKDVDKHRCDKKRHLGNDFVSIVYNDSGEDFKLGXIKGQFNFVHVIVXPLDYECNLVSLQCRKDMEGLVDXSVAKIVSDRNLPFVARQMALHANMASQVHHSRSNPXDIYPSKWIARLRHIKRLRQRICEEAAYSNPSLPLVHPPSHSKAPAQXPAEPXPGYEVGQRKRLISSVEDFXEFV

SEQ ID NO: 28713 - protein, 1692 aa, Homo sapiens
  MOD_RES (21)..(21): Selenocysteine
  MOD_RES (98)..(98): Selenocysteine
  MOD_RES (105)..(105): Selenocysteine
  MOD_RES (160)..(160): Selenocysteine
  MOD_RES (193)..(193): Selenocysteine
  MOD_RES (197)..(197): Selenocysteine
  MOD_RES (217)..(217): Selenocysteine
  MOD_RES (268)..(268): Selenocysteine
  MOD_RES (294)..(294): Selenocysteine
  MOD_RES (325)..(325): Selenocysteine
  MOD_RES (333)..(333): Selenocysteine
  MOD_RES (340)..(341): Selenocysteine
  MOD_RES (460)..(460): Selenocysteine
  MOD_RES (472)..(472): Selenocysteine
  MOD_RES (513)..(513): Selenocysteine
  MOD_RES (524)..(524): Selenocysteine
  MOD_RES (528)..(528): Selenocysteine
  MOD_RES (535)..(535): Selenocysteine
  MOD_RES (554)..(554): Selenocysteine
  MOD_RES (610)..(610): Selenocysteine
  MOD_RES (618)..(618): Selenocysteine
  MOD_RES (676)..(676): Selenocysteine
  MOD_RES (697)..(697): Selenocysteine
  MOD_RES (711)..(711): Selenocysteine
  MOD_RES (722)..(722): Selenocysteine
  MOD_RES (734)..(734): Selenocysteine
  MOD_RES (782)..(782): Selenocysteine
  MOD_RES (787)..(787): Selenocysteine
  MOD_RES (800)..(800): Selenocysteine
  MOD_RES (827)..(827): Selenocysteine
  MOD_RES (864)..(864): Selenocysteine
  MOD_RES (878)..(878): Selenocysteine
  MOD_RES (889)..(889): Selenocysteine
  MOD_RES (901)..(901): Selenocysteine
  MOD_RES (904)..(904): Selenocysteine
  MOD_RES (931)..(931): Selenocysteine
  MOD_RES (933)..(933): Selenocysteine
  MOD_RES (947)..(947): Selenocysteine
  MOD_RES (965)..(965): Selenocysteine
  MOD_RES (967)..(967): Selenocysteine
  MOD_RES (976)..(976): Selenocysteine
  MOD_RES (978)..(979): Selenocysteine
  MOD_RES (983)..(983): Selenocysteine
  MOD_RES (985)..(985): Selenocysteine
  MOD_RES (1013)..(1013): Selenocysteine
  MOD_RES (1062)..(1062): Selenocysteine
  MOD_RES (1068)..(1068): Selenocysteine
  MOD_RES (1081)..(1081): Selenocysteine
  MOD_RES (1089)..(1089): Selenocysteine
  MOD_RES (1099)..(1099): Selenocysteine
  MOD_RES (1111)..(1111): Selenocysteine
  MOD_RES (1114)..(1114): Selenocysteine
  MOD_RES (1155)..(1155): Selenocysteine
  MOD_RES (1168)..(1168): Selenocysteine
  MOD_RES (1179)..(1179): Selenocysteine
  MOD_RES (1215)..(1215): Selenocysteine
  MOD_RES (1278)..(1278): Selenocysteine
  MOD_RES (1307)..(1307): Selenocysteine
  MOD_RES (1347)..(1347): Selenocysteine
  MOD_RES (1370)..(1370): Selenocysteine
  MOD_RES (1427)..(1427): Selenocysteine
  MOD_RES (1457)..(1457): Selenocysteine
  MOD_RES (1461)..(1461): Selenocysteine
  MOD_RES (1492)..(1492): Selenocysteine
  MOD_RES (1508)..(1508): Selenocysteine
  MOD_RES (1512)..(1512): Selenocysteine
  MOD_RES (1546)..(1546): Selenocysteine
  MOD_RES (1559)..(1559): Selenocysteine
  MOD_RES (1582)..(1582): Selenocysteine
  MOD_RES (1618)..(1618): Selenocysteine
  MOD_RES (1665)..(1665): Selenocysteine
  MOD_RES (1670)..(1670): Selenocysteine
  MOD_RES (1689)..(1689): Selenocysteine
MECGLNNRIRMIGQICEVAKXKKFEEHAVEALWKAVADLLQPERPLEARHAVLALLKAIVQGQGERLGVLRALFFKVIKDYPSNEDLHERLEVFKALXDNGRHIXYLEEELADFVLQWMDVGLSSEFLLVLVNLVKFNSCYLDEYIARMVQMICLLCVRXASSVDIEVSLQVLDAVVCYNCLPAESLPLFIVXLCRXINVKELCEPCWKLMRNLLGXHLGHSAIYNMCHLMEDRAYMEDAPLLRGAVFFVGMALWGAHRLYSLRNSPXSVLPSFYQAMACPNEVVSYEIVLSIXRLIKKYRKELQVVAWDILLNIIERLLQQLQXLDSPELRXIVHDLLXXVEELCDQNEFHGSQERYFELVERCADQRPESSLLNLISYRAQSIHPAKDGWIQNLQALMERFFRSESRGAVRIKVLDVLSFVLLINRQFYEEELINSVVISQLSHIPEDKDHQVRKLAXQLLVDLAEGCHXHHFNSLLDIIEKVMARSLSPPPELEERDVAAYSASLEDVKXAVLGLLVILQXKLYXLPASHAXRVYEMLVSHIQLHYKHSYXLPIASSIRLQAFDFLLLLRADSLHRLGLPNKDGVVRFSPYCVCDYMEPERGSEKKXSGPLSPPXGPPGPAPAGPAVRLGSVPYSLLFRVLLQCLKQESDWKVLKLVLGRLPESLRYKVLIFXSPCSVDQLCSALCSMLSGPKXLERLRGAPEGFSRXDLHLAVVPVLXALISYHNYLDKXKQREMVYCLEQGLIHRCASQCVVALSICSVEMPDIIIKALPVLVVKLXHISAXASMAVPLLEFLSXLARLPHLYRNFAAEQYASVFAISLPYXNPSKFNQYIVCLAHHVIAMWFIRCRLPFRKDFVPFIXKGLRSNVLLSFDDXPEKDSFRARSXSLNERPKSRIQXSLXSASLGSADENSVAQADDSLKNLHLELXEXCLDMMARYVFSNFXAVPKRSPVGEFLLAGGRXKXWLVGNKLVXVXXSVGXGXRSLLGLDSGELQSGPESSSSPGVHVRQXKEAPAKLESQAGQQVSRGARDRVRSMSGGHGLRVGALDVPASQFLGSAXSPGPRXAPAAKPEKASAGXRVPVQEKXNLAAYVPLLXQGWAEILVRRPXGNXSWLMSLENPLSPFSSDINNMPLQELSNALMAAERFKEHRDXALYKSLSVPAASXAKPPPLPRSNXDSAVVMEEGSPGEVPVLVEPPGLEDVEAALGMDRRXDAYSRSSSVSSQEEKSLHAEELVGRGIPIERVVSSEGGRPSVDLSFQPSQPLSKSSSSPELQXLQDILGDPGDKADVGRLSPEVKARSQSGXLDGESAAWSASGEDSRGQPEGPLPSSSPRSPSGLRPRGYXISDSAPSRRGKRVERDALKSRAXASNAEKVPGINPSFVFLQLYHSPFFGDESNKPILLPNESQSFERSVQLLDQIPSYDXHKIAVLYVGEGQSNSELAILSNEHGSYRYXEFLXGLGRLIELKDCQPDKVYLGGLDVCGEDGQFXYCWHDDIMQAVFHIAXLMPXKDVDKHRCDKKRHLGNDFVSIVYNDSGEDFKLGXIKGQFNFVHVIVXPLDYECNLVSLQCRKDMEGLVDXSVAKIVSDRNLPFVARQMALHANMASQVHHSRSNPXDIYPSKWIARLRHIKRLRQRICEEAAYSNPSLPLVHPPSHSKAPAQXPAEPXPGYEVGQRKRLISSVEDFXEFV

SEQ ID NO: 28714 - protein, 1751 aa, Homo sapiens
  MOD_RES (11)..(11): Selenocysteine
  MOD_RES (16)..(16): Selenocysteine
  MOD_RES (34)..(34): Selenocysteine
  MOD_RES (47)..(47): Selenocysteine
  MOD_RES (52)..(52): Selenocysteine
  MOD_RES (81)..(81): Selenocysteine
  MOD_RES (158)..(158): Selenocysteine
  MOD_RES (165)..(165): Selenocysteine
  MOD_RES (220)..(220): Selenocysteine
  MOD_RES (253)..(253): Selenocysteine
  MOD_RES (257)..(257): Selenocysteine
  MOD_RES (277)..(277): Selenocysteine
  MOD_RES (328)..(328): Selenocysteine
  MOD_RES (354)..(354): Selenocysteine
  MOD_RES (385)..(385): Selenocysteine
  MOD_RES (393)..(393): Selenocysteine
  MOD_RES (400)..(401): Selenocysteine
  MOD_RES (520)..(520): Selenocysteine
  MOD_RES (532)..(532): Selenocysteine
  MOD_RES (573)..(573): Selenocysteine
  MOD_RES (584)..(584): Selenocysteine
  MOD_RES (588)..(588): Selenocysteine
  MOD_RES (595)..(595): Selenocysteine
  MOD_RES (614)..(614): Selenocysteine
  MOD_RES (670)..(670): Selenocysteine
  MOD_RES (678)..(678): Selenocysteine
  MOD_RES (736)..(736): Selenocysteine
  MOD_RES (757)..(757): Selenocysteine
  MOD_RES (771)..(771): Selenocysteine
  MOD_RES (782)..(782): Selenocysteine
  MOD_RES (794)..(794): Selenocysteine
  MOD_RES (842)..(842): Selenocysteine
  MOD_RES (847)..(847): Selenocysteine
  MOD_RES (860)..(860): Selenocysteine
  MOD_RES (887)..(887): Selenocysteine
  MOD_RES (924)..(924): Selenocysteine
  MOD_RES (938)..(938): Selenocysteine
  MOD_RES (949)..(949): Selenocysteine
  MOD_RES (960)..(960): Selenocysteine
  MOD_RES (963)..(963): Selenocysteine
  MOD_RES (990)..(990): Selenocysteine
  MOD_RES (992)..(992): Selenocysteine
  MOD_RES (1006)..(1006): Selenocysteine
  MOD_RES (1024)..(1024): Selenocysteine
  MOD_RES (1026)..(1026): Selenocysteine
  MOD_RES (1035)..(1035): Selenocysteine
  MOD_RES (1037)..(1038): Selenocysteine
  MOD_RES (1042)..(1042): Selenocysteine
  MOD_RES (1044)..(1044): Selenocysteine
  MOD_RES (1072)..(1072): Selenocysteine
  MOD_RES (1121)..(1121): Selenocysteine
  MOD_RES (1127)..(1127): Selenocysteine
  MOD_RES (1140)..(1140): Selenocysteine
  MOD_RES (1148)..(1148): Selenocysteine
  MOD_RES (1158)..(1158): Selenocysteine
  MOD_RES (1170)..(1170): Selenocysteine
  MOD_RES (1173)..(1173): Selenocysteine
  MOD_RES (1214)..(1214): Selenocysteine
  MOD_RES (1227)..(1227): Selenocysteine
  MOD_RES (1238)..(1238): Selenocysteine
  MOD_RES (1274)..(1274): Selenocysteine
  MOD_RES (1337)..(1337): Selenocysteine
  MOD_RES (1366)..(1366): Selenocysteine
  MOD_RES (1406)..(1406): Selenocysteine
  MOD_RES (1429)..(1429): Selenocysteine
  MOD_RES (1486)..(1486): Selenocysteine
  MOD_RES (1516)..(1516): Selenocysteine
  MOD_RES (1520)..(1520): Selenocysteine
  MOD_RES (1551)..(1551): Selenocysteine
  MOD_RES (1567)..(1567): Selenocysteine
  MOD_RES (1571)..(1571): Selenocysteine
  MOD_RES (1605)..(1605): Selenocysteine
  MOD_RES (1618)..(1618): Selenocysteine
  MOD_RES (1641)..(1641): Selenocysteine
  MOD_RES (1677)..(1677): Selenocysteine
  MOD_RES (1724)..(1724): Selenocysteine
  MOD_RES (1729)..(1729): Selenocysteine
  MOD_RES (1748)..(1748): Selenocysteine
MEGFSGASWSXMAKPXSKDSGLKEKFKILLGLGXPRPNPRSAEGKQXEFIIXAEILRELSMECGLNNRIRMIGQICEVAKXKKFEEHAVEALWKAVADLLQPERPLEARHAVLALLKAIVQGQGERLGVLRALFFKVIKDYPSNEDLHERLEVFKALXDNGRHIXYLEEELADFVLQWMDVGLSSEFLLVLVNLVKFNSCYLDEYIARMVQMICLLCVRXASSVDIEVSLQVLDAVVCYNCLPAESLPLFIVXLCRXINVKELCEPCWKLMRNLLGXHLGHSAIYNMCHLMEDRAYMEDAPLLRGAVFFVGMALWGAHRLYSLRNSPXSVLPSFYQAMACPNEVVSYEIVLSIXRLIKKYRKELQVVAWDILLNIIERLLQQLQXLDSPELRXIVHDLLXXVEELCDQNEFHGSQERYFELVERCADQRPESSLLNLISYRAQSIHPAKDGWIQNLQALMERFFRSESRGAVRIKVLDVLSFVLLINRQFYEEELINSVVISQLSHIPEDKDHQVRKLAXQLLVDLAEGCHXHHFNSLLDIIEKVMARSLSPPPELEERDVAAYSASLEDVKXAVLGLLVILQXKLYXLPASHAXRVYEMLVSHIQLHYKHSYXLPIASSIRLQAFDFLLLLRADSLHRLGLPNKDGVVRFSPYCVCDYMEPERGSEKKXSGPLSPPXGPPGPAPAGPAVRLGSVPYSLLFRVLLQCLKQESDWKVLKLVLGRLPESLRYKVLIFXSPCSVDQLCSALCSMLSGPKXLERLRGAPEGFSRXDLHLAVVPVLXALISYHNYLDKXKQREMVYCLEQGLIHRCASQCVVALSICSVEMPDIIIKALPVLVVKLXHISAXASMAVPLLEFLSXLARLPHLYRNFAAEQYASVFAISLPYXNPSKFNQYIVCLAHHVIAMWFIRCRLPFRKDFVPFIXKGLRSNVLLSFDDXPEKDSFRARSXSLNERPKRIQXSLXSASLGSADENSVAQADDSLKNLHLELXEXCLDMMARYVFSNFXAVPKRSPVGEFLLAGGRXKXWLVGNKLVXVXXSVGXGXRSLLGLDSGELQSGPESSSSPGVHVRQXKEAPAKLESQAGQQVSRGARDRVRSMSGGHGLRVGALDVPASQFLGSAXSPGPRXAPAAKPEKASAGXRVPVQEKXNLAAYVPLLXQGWAEILVRRPXGNXSWLMSLENPLSPFSSDINNMPLQELSNALMAAERFKEHRDXALYKSLSVPAASXAKPPPLPRSNXDSAVVMEEGSPGEVPVLVEPPGLEDVEAALGMDRRXDAYSRSSSVSSQEEKSLHAEELVGRGIPIERVVSSEGGRPSVDLSFQPSQPLSKSSSSPELQXLQDILGDPGDKADVGRLSPEVKARSQSGXLDGESAAWSASGEDSRGQPEGPLPSSSPRSPSGLRPRGYXISDSAPSRRGKRVERDALKSRAXASNAEKVPGINPSFVFLQLYHSPFFGDESNKPILLPNESQSFERSVQLLDQIPSYDXHKIAVLYVGEGQSNSELAILSNEHGSYRYXEFLXGLGRLIELKDCQPDKVYLGGLDVCGEDGQFXYCWHDDIMQAVFHIAXLMPXKDVDKHRCDKKRHLGNDFVSIVYNDSGEDFKLGXIKGQFNFVHVIVXPLDYECNLVSLQCRKDMEGLVDXSVAKIVSDRNLPFVARQMALHANMASQVHHSRSNPXDIYPSKWIARLRHIKRLRQRICEEAAYSNPSLPLVHPPSHSKAPAQXPAEPXPGYEVGQRKRLISSVEDFXEFV

SEQ ID NO: 28715 - protein, 196 aa, Homo sapiens
  MOD_RES (5)..(5): Selenocysteine
  MOD_RES (21)..(21): Selenocysteine
  MOD_RES (54)..(54): Selenocysteine
  MOD_RES (58)..(58): Selenocysteine
  MOD_RES (78)..(78): Selenocysteine
  MOD_RES (129)..(129): Selenocysteine
SAAGXELGAPCRMICLLCVRXASSVDIEVSLQVLDAVVCYNCLPAESLPLFIVXLCRXINVKELCEPCWKLMRNLLGXHLGHSAIYNMCHLMEDRAYMEDAPLLRGAVFFVGMALWGAHRLYSLRNSPXSVLPSFYQESSLLNLISYRAQSIHPAKDGWIQNLQALMERFFRSESRGAVRIKVLDVLSFVLLINRQ

SEQ ID NO: 28716 - protein, 125 aa, Homo sapiens
  MOD_RES (1)..(1): Any amino acid
  MOD_RES (13)..(13): Selenocysteine
  MOD_RES (18)..(18): Selenocysteine
  MOD_RES (24)..(24): Selenocysteine
  MOD_RES (34)..(34): Selenocysteine
  MOD_RES (72)..(72): Selenocysteine
  MOD_RES (79)..(79): Selenocysteine
XAIVQGQVRPRAXLGWVXSGCPLXVLSLLGRVWXPASGERLGVLRALFFKVIKDYPSNEDLHERLEVFKALXDNGRHIXYLEEELADFVLQWMDVGLSSEFLLVLVNLVKFNSCYLDEYIARMVQ

SEQ ID NO: 28717 - protein, 32 aa, Homo sapiens
  MOD_RES (1)..(1): Any amino acid
  MOD_RES (4)..(4): Selenocysteine
XFIXKVGSGPVKAVSLGRPGLALPLAVHGRAE

SEQ ID NO: 28718 - protein, 535 aa, Homo sapiens
  MOD_RES (1)..(1): Any amino acid
  MOD_RES (58)..(58): Selenocysteine
  MOD_RES (121)..(121): Selenocysteine
  MOD_RES (150)..(150): Selenocysteine
  MOD_RES (190)..(190): Selenocysteine
  MOD_RES (213)..(213): Selenocysteine
  MOD_RES (270)..(270): Selenocysteine
  MOD_RES (300)..(300): Selenocysteine
  MOD_RES (304)..(304): Selenocysteine
  MOD_RES (335)..(335): Selenocysteine
  MOD_RES (351)..(351): Selenocysteine
  MOD_RES (355)..(355): Selenocysteine
  MOD_RES (389)..(389): Selenocysteine
  MOD_RES (402)..(402): Selenocysteine
  MOD_RES (425)..(425): Selenocysteine
  MOD_RES (461)..(461): Selenocysteine
  MOD_RES (508)..(508): Selenocysteine
  MOD_RES (513)..(513): Selenocysteine
  MOD_RES (532)..(532): Selenocysteine
XLWDLPPSLLSVPSCGSGLELEDSAVVMEEGSPGEVPVLVEPPGLEDVEAALGMDRRXDAYSRSSSVSSQEEKSLHAEELVGRGIPIERVVSSEGGRPSVDLSFQPSQPLSKSSSSPELQXLQDILGDPGDKADVGRLSPEVKARSQSGXLDGESAAWSASGEDSRGQPEGPLPSSSPRSPSGLRPRGYXISDSAPSRRGKRVERDALKSRAXASNAEKVPGINPSFVFLQLYHSPFFGDESNKPILLPNESQSFERSVQLLDQIPSYDXHKIAVLYVGEGQSNSELAILSNEHGSYRYXEFLXGLGRLIELKDCQPDKVYLGGLDVCGEDGQFXYCWHDDIMQAVFHIAXLMPXKDVDKHRCDKKRHLGNDFVSIVYNDSGEDFKLGXIKGQFNFVHVIVXPLDYECNLVSLQCRKDMEGLVDXSVAKIVSDRNLPFVARQMALHANMASQVHHSRSNPXDIYPSKWIARLRHIKRLRQRICEEAAYSNPSLPLVHPPSHSKAPAQXPAEPXPGYEVGQRKRLISSVEDFXEFV

SEQ ID NO: 28719 - protein, 86 aa, Homo sapiens
  MOD_RES (42)..(42): Selenocysteine
  MOD_RES (58)..(58): Selenocysteine
  MOD_RES (64)..(65): Selenocysteine
  MOD_RES (70)..(71): Selenocysteine
  MOD_RES (85)..(85): Selenocysteine
MDLVKSHLMYAVREEVEVLKEQIKELIEKNSQLEQENNLLKXLASPEQLAQFQAQLQXGSPPAXXQPQGXXQPPAQPASQGSGPXA

SEQ ID NO: 28720 - protein, 142 aa, Homo sapiens
  MOD_RES (8)..(8): Selenocysteine
  MOD_RES (46)..(46): Selenocysteine
  MOD_RES (53)..(53): Selenocysteine
  MOD_RES (74)..(74): Selenocysteine
  MOD_RES (103)..(103): Selenocysteine
  MOD_RES (114)..(114): Selenocysteine
  MOD_RES (117)..(117): Selenocysteine
  MOD_RES (135)..(135): Selenocysteine
MHQPPESXAAAAAAADISARKMAHPAMFPRRGSGSGSASALNAAGXGVGSNAXSSEDFPPPSLLQPPPPAASSXSGPQPPPPQSLNLLSQAQLQAQPLAPGGXQMKKKSGFQIXSVXPAQISASISSNNSIAEDXESYDDLD

SEQ ID NO: 28721 - protein, 570 aa, Homo sapiens
  MOD_RES (8)..(8): Selenocysteine
  MOD_RES (46)..(46): Selenocysteine
  MOD_RES (53)..(53): Selenocysteine
  MOD_RES (74)..(74): Selenocysteine
  MOD_RES (103)..(103): Selenocysteine
  MOD_RES (114)..(114): Selenocysteine
  MOD_RES (117)..(117): Selenocysteine
  MOD_RES (135)..(135): Selenocysteine
  MOD_RES (146)..(146): Selenocysteine
  MOD_RES (163)..(163): Selenocysteine
  MOD_RES (176)..(176): Selenocysteine
  MOD_RES (185)..(185): Selenocysteine
  MOD_RES (250)..(250): Selenocysteine
  MOD_RES (264)..(265): Selenocysteine
  MOD_RES (272)..(272): Selenocysteine
  MOD_RES (277)..(277): Selenocysteine
  MOD_RES (291)..(291): Selenocysteine
  MOD_RES (298)..(299): Selenocysteine
  MOD_RES (308)..(308): Selenocysteine
  MOD_RES (310)..(310): Selenocysteine
  MOD_RES (312)..(312): Selenocysteine
  MOD_RES (319)..(319): Selenocysteine
  MOD_RES (329)..(329): Selenocysteine
  MOD_RES (340)..(340): Selenocysteine
  MOD_RES (356)..(356): Selenocysteine
  MOD_RES (371)..(371): Selenocysteine
  MOD_RES (389)..(389): Selenocysteine
  MOD_RES (401)..(401): Selenocysteine
  MOD_RES (404)..(404): Selenocysteine
  MOD_RES (425)..(425): Selenocysteine
  MOD_RES (427)..(427): Selenocysteine
  MOD_RES (439)..(439): Selenocysteine
  MOD_RES (450)..(450): Selenocysteine
  MOD_RES (459)..(459): Selenocysteine
  MOD_RES (465)..(465): Selenocysteine
  MOD_RES (476)..(476): Selenocysteine
  MOD_RES (481)..(481): Selenocysteine
  MOD_RES (493)..(493): Selenocysteine
  MOD_RES (516)..(516): Selenocysteine
  MOD_RES (525)..(525): Selenocysteine
  MOD_RES (558)..(558): Selenocysteine
MHQPPESXAAAAAAADISARKMAHPAMFPRRGSGSGSASALNAAGXGVGSNAXSSEDFPPPSLLQPPPPAASSXSGPQPPPPQSLNLLSQAQLQAQPLAPGGXQMKKKSGFQIXSVXPAQISASISSNNSIAEDXESYDDLDESHXEDLSSSEILDVSLSRAXDLGEPERSSSEEXLNNFQEAEXPGAVSPNQPHLPQPHLPHLPQQNVVINGNAHPHHLHHHHQIHHGHHLQHGHHHPSHVAVASASIXGGPPSSPVSRKLSXXGSSDSIXPVAPXSAVSSSGSPASVMXNMRAPSXXGGIGINSVXGXSXVNNVNIXAVGSFNPNVXSSMLGNVNISXSNIPSAAGVSVGPGVXSGVNVNILSGMGNGXISSSAAVSSVPNAAAGMXGGSVSSQQQQPXVNXSRFRVVKLDSSSEPFKKGRWXCXEFYEKENAVPAXEGVLINKVVEXVKQNPIEVXSERESXSGSSVSSSVSXLSHYXESVGSGEMGAPXVVVQQQQQQQQQQQQQPALQGVXLQQMDFGSXGPQSIPAVSIPQSISQSQISQVQLQSQELSYLXMKVVLLIVYLCM

SEQ ID NO: 28722 - protein, 1073 aa, Homo sapiens
  MOD_RES (8)..(8): Selenocysteine
  MOD_RES (46)..(46): Selenocysteine
  MOD_RES (53)..(53): Selenocysteine
  MOD_RES (74)..(74): Selenocysteine
  MOD_RES (103)..(103): Selenocysteine
  MOD_RES (114)..(114): Selenocysteine
  MOD_RES (117)..(117): Selenocysteine
  MOD_RES (135)..(135): Selenocysteine
  MOD_RES (146)..(146): Selenocysteine
  MOD_RES (163)..(163): Selenocysteine
  MOD_RES (176)..(176): Selenocysteine
  MOD_RES (185)..(185): Selenocysteine
  MOD_RES (250)..(250): Selenocysteine
  MOD_RES (264)..(265): Selenocysteine
  MOD_RES (272)..(272): Selenocysteine
  MOD_RES (277)..(277): Selenocysteine
  MOD_RES (291)..(291): Selenocysteine
  MOD_RES (298)..(299): Selenocysteine
  MOD_RES (308)..(308): Selenocysteine
  MOD_RES (310)..(310): Selenocysteine
  MOD_RES (312)..(312): Selenocysteine
  MOD_RES (319)..(319): Selenocysteine
  MOD_RES (329)..(329): Selenocysteine
  MOD_RES (340)..(340): Selenocysteine
  MOD_RES (356)..(356): Selenocysteine
  MOD_RES (371)..(371): Selenocysteine
  MOD_RES (389)..(389): Selenocysteine
  MOD_RES (401)..(401): Selenocysteine
  MOD_RES (404)..(404): Selenocysteine
  MOD_RES (425)..(425): Selenocysteine
  MOD_RES (427)..(427): Selenocysteine
  MOD_RES (439)..(439): Selenocysteine
  MOD_RES (450)..(450): Selenocysteine
  MOD_RES (459)..(459): Selenocysteine
  MOD_RES (465)..(465): Selenocysteine
  MOD_RES (476)..(476): Selenocysteine
  MOD_RES (481)..(481): Selenocysteine
  MOD_RES (493)..(493): Selenocysteine
  MOD_RES (516)..(516): Selenocysteine
  MOD_RES (525)..(525): Selenocysteine
  MOD_RES (570)..(570): Selenocysteine
  MOD_RES (575)..(575): Selenocysteine
  MOD_RES (588)..(588): Selenocysteine
  MOD_RES (616)..(616): Selenocysteine
  MOD_RES (638)..(638): Selenocysteine
  MOD_RES (649)..(649): Selenocysteine
  MOD_RES (665)..(665): Selenocysteine
  MOD_RES (681)..(682): Selenocysteine
  MOD_RES (699)..(699): Selenocysteine
  MOD_RES (725)..(725): Selenocysteine
  MOD_RES (740)..(740): Selenocysteine
  MOD_RES (747)..(747): Selenocysteine
  MOD_RES (770)..(770): Selenocysteine
  MOD_RES (779)..(779): Selenocysteine
  MOD_RES (798)..(798): Selenocysteine
  MOD_RES (833)..(833): Selenocysteine
  MOD_RES (839)..(839): Selenocysteine
  MOD_RES (849)..(849): Selenocysteine
  MOD_RES (860)..(860): Selenocysteine
  MOD_RES (863)..(863): Selenocysteine
  MOD_RES (880)..(880): Selenocysteine
  MOD_RES (882)..(882): Selenocysteine
  MOD_RES (895)..(895): Selenocysteine
  MOD_RES (927)..(927): Selenocysteine
  MOD_RES (961)..(962): Selenocysteine
  MOD_RES (1029)..(1029): Selenocysteine
  MOD_RES (1045)..(1045): Selenocysteine
  MOD_RES (1051)..(1052): Selenocysteine
  MOD_RES (1057)..(1058): Selenocysteine
  MOD_RES (1072)..(1072): Selenocysteine
MHQPPESXAAAAAAADISARKMAHPAMFPRRGSGSGSASALNAAGXGVGSNAXSSEDFPPPSLLQPPPPAASSXSGPQPPPPQSLNLLSQAQLQAQPLAPGGXQMKKKSGFQIXSVXPAQISASISSNNSIAEDXESYDDLDESHXEDLSSSEILDVSLSRAXDLGEPERSSSEEXLNNFQEAEXPGAVSPNQPHLPQPHLPHLPQQNVVINGNAHPHHLHHHHQIHHGHHLQHGHHHPSHVAVASASIXGGPPSSPVSRKLSXXGSSDSIXPVAPXSAVSSSGSPASVMXNMRAPSXXGGIGINSVXGXSXVNNVNIXAVGSFNPNVXSSMLGNVNISXSNIPSAAGVSVGPGVXSGVNVNILSGMGNGXISSSAAVSSVPNAAAGMXGGSVSSQQQQPXVNXSRFRVVKLDSSSEPFKKGRWXCXEFYEKENAVPAXEGVLINKVVEXVKQNPIEVXSERESXSGSSVSSSVSXLSHYXESVGSGEMGAPXVVVQQQQQQQQQQQQQPALQGVXLQQMDFGSXGPQSIPAVSIPQSISQSQISQVQLQSQELSYQQKQGLQPVPLQAXMSAAXGIQPSPVNVVGVXSALGQQPSISSLAQPQLPYSQAAPPVQXPLPGAPPPQQLQYGQQQPMVSXQMAPGHVKSVXQNPASEYVQQQPILQXAMSSGQPSSAGVGAGXXVIPVAQPQGIQLPVQPXAVPAQPAGASVQPVGQAPAAVSAVPXGSQIANIGQQANIPXAVQQPSXQVPPSVIQQGAPPSSQVVPPAQXGIIHQGVQXSAPSLPQQLVIASQSSLLXVPPQPQGVEPVAQGIVSQQLPAVSSLPSASSISVXSQVSSXGPSGMPSAPXNLVPPQNIAQXPAXQNGNLVQSVSQPPLIAXNXNLPLAQQIPLSSXQFSAQSLAQAIGSQIEDARRAAEPSLVGLPQXISGDSGGMSAVSDGSSSSLAASASLFPLKVLPLXXPLVDGEDESSSGASVVAIDNKIEQAMDLVKSHLMYAVREEVEVLKEQIKELIEKNSQLEQENNLLKXLASPEQLAQFQAQLQXGSPPAXXQPQGXXQPPAQPASQGSGPXA

SEQ ID NO: 28723 - protein, 41 aa, Homo sapiens
  MOD_RES (32)..(32): Selenocysteine
MKSQWCRPVAMDLGVYQLRHFSISFLSSLLGXENASVRLDN

SEQ ID NO: 28724 - protein, 144 aa, Homo sapiens
  MOD_RES (32)..(32): Selenocysteine
  MOD_RES (100)..(100): Selenocysteine
  MOD_RES (116)..(116): Selenocysteine
  MOD_RES (122)..(123): Selenocysteine
  MOD_RES (128)..(129): Selenocysteine
  MOD_RES (143)..(143): Selenocysteine
MKSQWCRPVAMDLGVYQLRHFSISFLSSLLGXENASVRLDNSSSGASVVAIDNKIEQAMDLVKSHLMYAVREEVEVLKEQIKELIEKNSQLEQENNLLKXLASPEQLAQFQAQLQXGSPPAXXQPQGXXQPPAQPASQGSGPXA

SEQ ID NO: 28725 - protein, 149 aa, Homo sapiens
  MOD_RES (1)..(1): Any amino acid
  MOD_RES (10)..(10): Selenocysteine
  MOD_RES (13)..(13): Selenocysteine
  MOD_RES (30)..(30): Selenocysteine
  MOD_RES (32)..(32): Selenocysteine
  MOD_RES (45)..(45): Selenocysteine
  MOD_RES (77)..(77): Selenocysteine
  MOD_RES (111)..(112): Selenocysteine
  MOD_RES (130)..(130): Selenocysteine
  MOD_RES (139)..(140): Selenocysteine
  MOD_RES (142)..(142): Selenocysteine
  MOD_RES (145)..(146): Selenocysteine
XVPPQNIAQXPAXQNGNLVQSVSQPPLIAXNXNLPLAQQIPLSSXQFSAQSLAQAIGSQIEDARRAAEPSLVGLPQXISGDSGGMSAVSDGSSSSLAASASLFPLKVLPLXXPLVDGEDESSLFQCFSPXRGARSDPRXXDXAKXXESF

SEQ ID NO: 28726 - protein, 780 aa, Homo sapiens
  MOD_RES (15)..(15): Selenocysteine
  MOD_RES (18)..(19): Selenocysteine
  MOD_RES (24)..(24): Selenocysteine
  MOD_RES (27)..(27): Selenocysteine
  MOD_RES (30)..(30): Selenocysteine
  MOD_RES (41)..(41): Selenocysteine
  MOD_RES (55)..(55): Selenocysteine
  MOD_RES (71)..(71): Selenocysteine
  MOD_RES (80)..(80): Selenocysteine
  MOD_RES (83)..(83): Selenocysteine
  MOD_RES (120)..(120): Selenocysteine
  MOD_RES (126)..(126): Selenocysteine
  MOD_RES (148)..(148): Selenocysteine
  MOD_RES (156)..(157): Selenocysteine
  MOD_RES (181)..(181): Selenocysteine
  MOD_RES (196)..(196): Selenocysteine
  MOD_RES (207)..(207): Selenocysteine
  MOD_RES (211)..(211): Selenocysteine
  MOD_RES (221)..(221): Selenocysteine
  MOD_RES (242)..(242): Selenocysteine
  MOD_RES (247)..(247): Selenocysteine
  MOD_RES (262)..(262): Selenocysteine
  MOD_RES (300)..(300): Selenocysteine
  MOD_RES (323)..(323): Selenocysteine
  MOD_RES (327)..(327): Selenocysteine
  MOD_RES (330)..(330): Selenocysteine
  MOD_RES (399)..(399): Selenocysteine
  MOD_RES (407)..(407): Selenocysteine
  MOD_RES (410)..(410): Selenocysteine
  MOD_RES (415)..(415): Selenocysteine
  MOD_RES (441)..(441): Selenocysteine
  MOD_RES (455)..(455): Selenocysteine
  MOD_RES (461)..(461): Selenocysteine
  MOD_RES (523)..(524): Selenocysteine
  MOD_RES (527)..(527): Selenocysteine
  MOD_RES (545)..(545): Selenocysteine
  MOD_RES (565)..(565): Selenocysteine
  MOD_RES (570)..(570): Selenocysteine
  MOD_RES (582)..(582): Selenocysteine
  MOD_RES (584)..(584): Selenocysteine
  MOD_RES (594)..(594): Selenocysteine
  MOD_RES (631)..(631): Selenocysteine
  MOD_RES (638)..(638): Selenocysteine
  MOD_RES (657)..(657): Selenocysteine
  MOD_RES (667)..(667): Selenocysteine
  MOD_RES (747)..(747): Selenocysteine
  MOD_RES (755)..(755): Selenocysteine
  MOD_RES (769)..(769): Selenocysteine
MSKMPAKKKSCFQIXSVXXAQVAXSIXEDXESLDDPDESRXEDVSSEIFDVSRAXDYGPEEVCERSSSEEXLNNVGDAEXPGXVSPNLLLDGQLAAAAAAPANGGGVVSARSVSGALASXLAAAAXSAPAPGAPGGPQLAGSSAGPVXAAPSQPPXXCSSRFRVIKLDHGSGEPYRRGRWXCMEYYERDSDSSVLXRSGDCIRHSSXFDQXAERDSGLGAXGGSVVVVVASMQGAHGPESGXDSSLXAVSQLPPSEKMSQPXPAQPQSFSVGQPQPPPPPVGGAVAQSSAPLPPFPGAAXGPQPMMAAAQPSQPQGAGPGGQXLPPXNVXLAQPAMSLPPQPGPAVGAPAAQQPQQFAYPQPQIPPGHLLPVQPSGQSEYLQQHVAGLQPPSPAQPSSXGAAASPAXAAXLPVGXGQNASSVGAQLMGASSQPSEAMAPRXGPAQGGQVAPCQPXGVPPAXVGGVVQPCLGPAGAGQPQSVPPPQMGGSGPLSAVPGGPHAVVPGVPNVPAAVPAPSVPSVSXXSVXMPNVPAPLAQSQQLSSHXPVSRSSSIIQHVGLPLAPGXHSAPXSLPQSDLSQFQXQXQPLVGQVDDXRRKSEPLPQPPLSLIAENKPVVKPPVADSLANPLQLXPMNSLAXSVFSIAIPVDGDEDRNPSXAFYQAFHLNXLKESKSLWDSASGGGVVAIDNKIEQAMDLVKSHLMYAVREEVEVLKEQIKELVERNSLLERENALLKSLSSNDQLSQLPXQQANPGSXSQQQAVIAQPPQPXQPPQQPNVSSA

SEQ ID NO: 28727 - protein, 81 aa, Homo sapiens
  MOD_RES (1)..(1): Any amino acid
  MOD_RES (22)..(22): Selenocysteine
  MOD_RES (29)..(29): Selenocysteine
  MOD_RES (48)..(48): Selenocysteine
  MOD_RES (58)..(58): Selenocysteine
  MOD_RES (81)..(81): Selenocysteine
XENKPVVKPPVADSLANPLQLXPMNSLAXSVFSIAIPVDGDEDRNPSXAFYQAFHLNXLKESKSLWDRIFFRIQHRRRNVX

SEQ ID NO: 28728 - protein, 204 aa, Homo sapiens
  MOD_RES (1)..(1): Any amino acid
  MOD_RES (13)..(13): Selenocysteine
  MOD_RES (18)..(18): Selenocysteine
  MOD_RES (30)..(30): Selenocysteine
  MOD_RES (32)..(32): Selenocysteine
  MOD_RES (42)..(42): Selenocysteine
  MOD_RES (79)..(79): Selenocysteine
  MOD_RES (86)..(86): Selenocysteine
  MOD_RES (171)..(171): Selenocysteine
  MOD_RES (179)..(179): Selenocysteine
  MOD_RES (193)..(193): Selenocysteine
XIQHVGLPLAPGXHSAPXSLPQSDLSQFQXQXQPLVGQVDDXRRKSEPLPQPPLSLIAENKPVVKPPVADSLANPLQLXPMNSLAXSVFSIAIPVDGDEDSASGGGVVAIDNKIEQAMDLVKSHLMYAVREEVEVLKEQIKELVERNSLLERENALLKSLSSNDQLSQLPXQQANPGSXSQQQAVIAQPPQPXQPPQQPNVSSA

SEQ ID NO: 28729 - protein, 116 aa, Homo sapiens
  MOD_RES (1)..(1): Any amino acid
  MOD_RES (6)..(6): Selenocysteine
  MOD_RES (26)..(26): Selenocysteine
  MOD_RES (31)..(31): Selenocysteine
  MOD_RES (43)..(43): Selenocysteine
  MOD_RES (45)..(45): Selenocysteine
  MOD_RES (55)..(55): Selenocysteine
  MOD_RES (92)..(92): Selenocysteine
  MOD_RES (99)..(99): Selenocysteine
XLSSHXPVSRSSSIIQHVGLPLAPGXHSAPXSLPQSDLSQFQXQXQPLVGQVDDXRRKSEPLPQPPLSLIAENKPVVKPPVADSLANPLQLXPMNSLAXSVFSIAIPVDGDEDRIW

SEQ ID NO: 28730 - protein, 110 aa, Homo sapiens
  MOD_RES (71)..(71): Selenocysteine
  MOD_RES (75)..(75): Selenocysteine
MAFQPPYSSSLFRKRDNASGASVVAIDNKIEQAMDLVKNHLMYAVREEVEILKEQIRELVEKNSQLERENXLLKXLASPEQLEKFQSCLSPEEPAPESPQVPEAPGGSAV

SEQ ID NO: 28731 - protein, 58 aa, Homo sapiens
  MOD_RES (44)..(44): Selenocysteine
MAQSKLDCRSPVGLDCCNCCLDLAHRSGLQRGSSGENNNPGSPXVSNFRQLQEKLVFE

SEQ ID NO: 28732 - protein, 84 aa, Homo sapiens
  MOD_RES (44)..(44): Selenocysteine
  MOD_RES (62)..(62): Selenocysteine
MAQSKLDCRSPVGLDCCNCCLDLAHRSGLQRGSSGENNNPGSPXVSNFRQLQEKLVFENLNXDKLNSIMRQDSLEPVLRDPCYL

SEQ ID NO: 28733 - protein, 100 aa, Homo sapiens
  MOD_RES (44)..(44): Selenocysteine
  MOD_RES (62)..(62): Selenocysteine
  MOD_RES (97)..(97): Selenocysteine
MAQSKLDCRSPVGLDCCNCCLDLAHRSGLQRGSSGENNNPGSPXVSNFRQLQEKLVFENLNXDKLNSIMRQDSLEPVLRDPCYLINEGICNRNIDQXMLS

SEQ ID NO: 28734 - protein, 116 aa, Homo sapiens
  MOD_RES (44)..(44): Selenocysteine
  MOD_RES (62)..(62): Selenocysteine
  MOD_RES (97)..(97): Selenocysteine
MAQSKLDCRSPVGLDCCNCCLDLAHRSGLQRGSSGENNNPGSPXVSNFRQLQEKLVFENLNXDKLNSIMRQDSLEPVLRDPCYLINEGICNRNIDQXMLSILLFFHSASGASVVAI

SEQ ID NO: 28735 - protein, 119 aa, Homo sapiens
  MOD_RES (44)..(44): Selenocysteine
  MOD_RES (62)..(62): Selenocysteine
  MOD_RES (97)..(97): Selenocysteine
MAQSKLDCRSPVGLDCCNCCLDLAHRSGLQRGSSGENNNPGSPXVSNFRQLQEKLVFENLNXDKLNSIMRQDSLEPVLRDPCYLINEGICNRNIDQXMLSILLFFHSASGASVVAIDNK

SEQ ID NO: 28736 - protein, 123 aa, Homo sapiens
  MOD_RES (44)..(44): Selenocysteine
  MOD_RES (62)..(62): Selenocysteine
  MOD_RES (97)..(97): Selenocysteine
MAQSKLDCRSPVGLDCCNCCLDLAHRSGLQRGSSGENNNPGSPXVSNFRQLQEKLVFENLNXDKLNSIMRQDSLEPVLRDPCYLINEGICNRNIDQXMLSILLFFHSASGASVVAIDNKIEQA

SEQ ID NO: 28737 - protein, 124 aa, Homo sapiens
  MOD_RES (44)..(44): Selenocysteine
  MOD_RES (62)..(62): Selenocysteine
  MOD_RES (97)..(97): Selenocysteine
MAQSKLDCRSPVGLDCCNCCLDLAHRSGLQRGSSGENNNPGSPXVSNFRQLQEKLVFENLNXDKLNSIMRQDSLEPVLRDPCYLINEGICNRNIDQXMLSILLFFHSASGASVVAIDNKIEQAM

SEQ ID NO: 28738 - protein, 200 aa, Homo sapiens
  MOD_RES (44)..(44): Selenocysteine
  MOD_RES (62)..(62): Selenocysteine
  MOD_RES (97)..(97): Selenocysteine
  MOD_RES (161)..(161): Selenocysteine
  MOD_RES (165)..(165): Selenocysteine
MAQSKLDCRSPVGLDCCNCCLDLAHRSGLQRGSSGENNNPGSPXVSNFRQLQEKLVFENLNXDKLNSIMRQDSLEPVLRDPCYLINEGICNRNIDQXMLSILLFFHSASGASVVAIDNKIEQAMDLVKNHLMYAVREEVEILKEQIRELVEKNSQLERENXLLKXLASPEQLEKFQSCLSPEEPAPESPQVPEAPGGSAV

SEQ ID NO: 28739 - protein, 25 aa, Homo sapiens
MDLVKNHLMYAVREEVEILKEQIRE

SEQ ID NO: 28740 - protein, 77 aa, Homo sapiens
  MOD_RES (38)..(38): Selenocysteine
  MOD_RES (42)..(42): Selenocysteine
MDLVKNHLMYAVREEVEILKEQIRELVEKNSQLERENXLLKXLASPEQLEKFQSCLSPEEPAPESPQVPEAPGGSAV

SEQ ID NO: 28741 - protein, 134 aa, Homo sapiens
  MOD_RES (3)..(3): Selenocysteine
  MOD_RES (8)..(8): Selenocysteine
  MOD_RES (95)..(95): Selenocysteine
  MOD_RES (99)..(99): Selenocysteine
MNXEMYQXPMEVAVYQLHNFSISFFSSLLGGDVVSVKLDNSASGASVVAIDNKIEQAMDLVKNHLMYAVREEVEILKEQIRELVEKNSQLERENXLLKXLASPEQLEKFQSCLSPEEPAPESPQVPEAPGGSAV

SEQ ID NO: 28742 - protein, 100 aa, Homo sapiens
  MOD_RES (3)..(3): Selenocysteine
  MOD_RES (8)..(8): Selenocysteine
  MOD_RES (63)..(63): Selenocysteine
  MOD_RES (77)..(77): Selenocysteine
MNXEMYQXPMEVAVYQLHNFSISFFSSLLGGDVVSVKLDNSASGASVVAIDNKIEQAMVSGIXASFSSPDLAAAYVXLGRIEGMGEKALSQNPEEADSLP

SEQ ID NO: 28743 - protein, 132 aa, Homo sapiens
  MOD_RES (29)..(29): Selenocysteine
  MOD_RES (93)..(93): Selenocysteine
  MOD_RES (97)..(97): Selenocysteine
MRQDSLEPVLRDPCYLINEGICNRNIDQXMLSILLFFHSASGASVVAIDNKIEQAMDLVKNHLMYAVREEVEILKEQIRELVEKNSQLERENXLLKXLASPEQLEKFQSCLSPEEPAPESPQVPEAPGGSAV

SEQ ID NO: 28744 - protein, 156 aa, Homo sapiens
  MOD_RES (31)..(31): Selenocysteine
MRLRMELGAPEEMGQVPPLDSRPSSPALYFXHDASLVHKSPDPFGAVAAQKFSLAHSMLAISGHLDSDDDSGSGSLVGIDNKIEQAMDLVKSHLMFAVREEVEVLKEQIRELAERNAALEQENGLLRALASPEQLAQLPSSGVPRLGPPAPNGPSV

SEQ ID NO: 28745 - protein, 395 aa, Homo sapiens
  MOD_RES (13)..(13): Selenocysteine
  MOD_RES (16)..(17): Selenocysteine
  MOD_RES (32)..(32): Selenocysteine
  MOD_RES (37)..(37): Selenocysteine
  MOD_RES (57)..(57): Selenocysteine
  MOD_RES (91)..(91): Selenocysteine
  MOD_RES (139)..(139): Selenocysteine
  MOD_RES (149)..(149): Selenocysteine
  MOD_RES (157)..(157): Selenocysteine
  MOD_RES (167)..(167): Selenocysteine
  MOD_RES (200)..(200): Selenocysteine
  MOD_RES (206)..(206): Selenocysteine
  MOD_RES (211)..(211): Selenocysteine
  MOD_RES (229)..(229): Selenocysteine
  MOD_RES (270)..(270): Selenocysteine
MSGGKKKSSFQIXSVXXDYEGPGSPGASDPPXPQPPXGPPPRLPNGEPSPDPGGKGXPRNGSPPPGAPSSRFRVVKLPHGLGEPYRRGRWXCVDVYERDLEPHSFGGLLEGIRGASGGAGGRSLDSRLELASLGLGAPXPPSGLSQGPXSWLRPPPXSPGPQARSFXGGLGQLVVPSKAKAEKPPLSASSPQQRPPEPEXGESAGXSRAAXPLPSLRVEAEAGGSGARXPPLSRRKAVDMRLRMELGAPEEMGQVPPLDSRPSSPALYFXHDASLVHKSPDPFGAVAAQKFSLAHSMLAISGHLDSDDDSGSGSLVGIDNKIEQAMDLVKSHLMFAVREEVEVLKEQIRELAERNAALEQENGLLRALASPEQLAQLPSSGVPRLGPPAPNGPSV

SEQ ID NO: 28746 - protein, 168 aa, Homo sapiens
  MOD_RES (1)..(1): Any amino acid
  MOD_RES (29)..(29): Selenocysteine
  MOD_RES (62)..(62): Selenocysteine
  MOD_RES (93)..(93): Selenocysteine
  MOD_RES (111)..(111): Selenocysteine
  MOD_RES (118)..(118): Selenocysteine
  MOD_RES (156)..(156): Selenocysteine
  MOD_RES (159)..(159): Selenocysteine
XHCLLSACLAPARPCSARGALSPPGIPFXASLSIGGVSKDPFPLGMAQPGVSVKSLVSSYEXRVVGMAPGLPRKRGCASSPCSPRGASPIRGXSGPPPHRGLGGPGQRPSXRRGMDKXLLSLILYCHSGSGSLVGIDNKIEQAMPSRHWAGDEAPXPLXLCLSRGPQD

SEQ ID NO: 28747 - protein, 211 aa, Homo sapiens
  MOD_RES (1)..(1): Any amino acid
  MOD_RES (27)..(27): Selenocysteine
  MOD_RES (60)..(60): Selenocysteine
  MOD_RES (91)..(91): Selenocysteine
  MOD_RES (109)..(109): Selenocysteine
  MOD_RES (116)..(116): Selenocysteine
XLLSACLAPARPCSARGALSPPGIPFXASLSIGGVSKDPFPLGMAQPGVSVKSLVSSYEXRVVGMAPGLPRKRGCASSPCSPRGASPIRGXSGPPPHRGLGGPGQRPSXRRGMDKXLLSLILYCHSGSGSLVGIDNKIEQAMDLVKSHLMFAVREEVEVLKEQIRELAERNAALEQENGLLRALASPEQLAQLPSSGVPRLGPPAPNGPSV

SEQ ID NO: 28748 - protein, 63 aa, Homo sapiens
  MOD_RES (14)..(14): Selenocysteine
  MOD_RES (56)..(56): Selenocysteine
ILNLYAEENAIEDXIFYLGEALRRGVIDLDVFLKHVRLLSRKQFQLRALMQKARKXAGLSDLY

SEQ ID NO: 28749 - protein, 365 aa, Homo sapiens
  MOD_RES (21)..(21): Selenocysteine
  MOD_RES (25)..(25): Selenocysteine
  MOD_RES (30)..(30): Selenocysteine
  MOD_RES (56)..(56): Selenocysteine
  MOD_RES (58)..(58): Selenocysteine
  MOD_RES (67)..(67): Selenocysteine
  MOD_RES (79)..(79): Selenocysteine
  MOD_RES (92)..(92): Selenocysteine
  MOD_RES (96)..(96): Selenocysteine
  MOD_RES (99)..(99): Selenocysteine
  MOD_RES (156)..(156): Selenocysteine
  MOD_RES (161)..(161): Selenocysteine
  MOD_RES (199)..(200): Selenocysteine
  MOD_RES (211)..(212): Selenocysteine
  MOD_RES (220)..(220): Selenocysteine
  MOD_RES (225)..(225): Selenocysteine
  MOD_RES (259)..(259): Selenocysteine
  MOD_RES (275)..(275): Selenocysteine
  MOD_RES (321)..(321): Selenocysteine
  MOD_RES (341)..(341): Selenocysteine
  MOD_RES (362)..(362): Selenocysteine
MAVSESQLKKMVSKYKYRDLXVREXVNVIXLYKDLKPVLDSYVFNDGSSRELMNLXGXIPVPYRGNXYNIPICLWLLDXYPYNPPICFVKPXSSMXIKXGKHVDANGKIYLPYLHEWKHPQSDLLGLIQVMIVVFGDEPPVFSRPISASYPPYQAXGPPNXSYMPGMPGGISPYPSGYPPNPSGYPGCPYPPGGPYPAXXSSQYPSQPPVXXVGPSRDGXISEDXIRASLISAVSDKLRWRMKEEMDRAQAELNALKRXEEDLKKGHQKLEEMVXRLDQEVAEVDKNIELLKKKDEELSSALEKMENQSENNDIDEVIIPXAPLYKQILNLYAEENAIEDXIFYLGEALRRGVIDLDVFLKXSVP

SEQ ID NO: 28750 - protein, 390 aa, Homo sapiens
  MOD_RES (21)..(21): Selenocysteine
  MOD_RES (25)..(25): Selenocysteine
  MOD_RES (30)..(30): Selenocysteine
  MOD_RES (56)..(56): Selenocysteine
  MOD_RES (58)..(58): Selenocysteine
  MOD_RES (67)..(67): Selenocysteine
  MOD_RES (79)..(79): Selenocysteine
  MOD_RES (92)..(92): Selenocysteine
  MOD_RES (96)..(96): Selenocysteine
  MOD_RES (99)..(99): Selenocysteine
  MOD_RES (156)..(156): Selenocysteine
  MOD_RES (161)..(161): Selenocysteine
  MOD_RES (199)..(200): Selenocysteine
  MOD_RES (211)..(212): Selenocysteine
  MOD_RES (220)..(220): Selenocysteine
  MOD_RES (225)..(225): Selenocysteine
  MOD_RES (259)..(259): Selenocysteine
  MOD_RES (275)..(275): Selenocysteine
  MOD_RES (321)..(321): Selenocysteine
  MOD_RES (341)..(341): Selenocysteine
  MOD_RES (383)..(383): Selenocysteine
MAVSESQLKKMVSKYKYRDLXVREXVNVIXLYKDLKPVLDSYVFNDGSSRELMNLXGXIPVPYRGNXYNIPICLWLLDXYPYNPPICFVKPXSSMXIKXGKHVDANGKIYLPYLHEWKHPQSDLLGLIQVMIVVFGDEPPVFSRPISASYPPYQAXGPPNXSYMPGMPGGISPYPSGYPPNPSGYPGCPYPPGGPYPAXXSSQYPSQPPVXXVGPSRDGXISEDXIRASLISAVSDKLRWRMKEEMDRAQAELNALKRXEEDLKKGHQKLEEMVXRLDQEVAEVDKNIELLKKKDEELSSALEKMENQSENNDIDEVIIPXAPLYKQILNLYAEENAIEDXIFYLGEALRRGVIDLDVFLKHVRLLSRKQFQLRALMQKARKXAGLSDLY

SEQ ID NO: 28751 - protein, 77 aa, Homo sapiens
  MOD_RES (1)..(1): Any amino acid
  MOD_RES (8)..(8): Selenocysteine
  MOD_RES (28)..(28): Selenocysteine
  MOD_RES (70)..(70): Selenocysteine
XDEVIIPXAPLYKQILNLYAEENAIEDXIFYLGEALRRGVIDLDVFLKHVRLLSRKQFQLRALMQKARKXAGLSDLY

SEQ ID NO: 28752 - protein, 138 aa, Homo sapiens
  MOD_RES (2)..(2): Selenocysteine
  MOD_RES (14)..(14): Selenocysteine
  MOD_RES (25)..(25): Selenocysteine
  MOD_RES (28)..(28): Selenocysteine
  MOD_RES (41)..(41): Selenocysteine
  MOD_RES (44)..(45): Selenocysteine
  MOD_RES (53)..(53): Selenocysteine
  MOD_RES (73)..(73): Selenocysteine
  MOD_RES (81)..(81): Selenocysteine
  MOD_RES (110)..(110): Selenocysteine
  MOD_RES (122)..(122): Selenocysteine
  MOD_RES (126)..(126): Selenocysteine
MXALFLMSMLFGLXCGQAMSFCIPXEYXMHIERRECAYCLXINXXICAGYCMXRDINGKLFLPKYALSQDVCXYRDFIYRXVEIPGCPLHVAPYFSYPVALSCKCGKCNXDYSDCIHEAIKXNYCXKPQKSYLVGFSV

SEQ ID NO: 28753 - protein, 231 aa, Homo sapiens
  MOD_RES (40)..(40): Selenocysteine
  MOD_RES (54)..(54): Selenocysteine
  MOD_RES (56)..(56): Selenocysteine
  MOD_RES (62)..(62): Selenocysteine
  MOD_RES (66)..(66): Selenocysteine
  MOD_RES (88)..(88): Selenocysteine
  MOD_RES (104)..(104): Selenocysteine
  MOD_RES (111)..(111): Selenocysteine
  MOD_RES (115)..(115): Selenocysteine
  MOD_RES (136)..(136): Selenocysteine
  MOD_RES (145)..(145): Selenocysteine
  MOD_RES (150)..(150): Selenocysteine
  MOD_RES (159)..(159): Selenocysteine
  MOD_RES (165)..(165): Selenocysteine
  MOD_RES (179)..(179): Selenocysteine
  MOD_RES (181)..(181): Selenocysteine
  MOD_RES (190)..(190): Selenocysteine
  MOD_RES (200)..(200): Selenocysteine
  MOD_RES (214)..(214): Selenocysteine
MRPADLLQLVLLLDLPRDLGGMGCSSPPCECHQEEDFRVXCKDIQRIPSLPPSXQXLKLIEXHLRXIPSHAFSNLPNISRIYVSIDVXLQQLESHSFYNLSKVXHIEIRNXRNLXYIDPDALKELPLLKFLGIFNXGLKMFPDLXKVYSXDIFFILEIXDNPYMXSIPVNAFQGLCNEXLXLKLYNNGFXSVQGYAFNGXKLDAVYLNKNKYLXVIDKDAFGGVYSGPSLL

SEQ ID NO: 28754 - protein, 764 aa, Homo sapiens
  MOD_RES (40)..(40): Selenocysteine
  MOD_RES (54)..(54): Selenocysteine
  MOD_RES (56)..(56): Selenocysteine
  MOD_RES (62)..(62): Selenocysteine
  MOD_RES (66)..(66): Selenocysteine
  MOD_RES (88)..(88): Selenocysteine
  MOD_RES (104)..(104): Selenocysteine
  MOD_RES (111)..(111): Selenocysteine
  MOD_RES (115)..(115): Selenocysteine
  MOD_RES (136)..(136): Selenocysteine
  MOD_RES (145)..(145): Selenocysteine
  MOD_RES (150)..(150): Selenocysteine
  MOD_RES (159)..(159): Selenocysteine
  MOD_RES (165)..(165): Selenocysteine
  MOD_RES (179)..(179): Selenocysteine
  MOD_RES (181)..(181): Selenocysteine
  MOD_RES (190)..(190): Selenocysteine
  MOD_RES (200)..(200): Selenocysteine
  MOD_RES (214)..(214): Selenocysteine
  MOD_RES (236)..(236): Selenocysteine
  MOD_RES (239)..(239): Selenocysteine
  MOD_RES (257)..(257): Selenocysteine
  MOD_RES (259)..(259): Selenocysteine
  MOD_RES (273)..(273): Selenocysteine
  MOD_RES (346)..(346): Selenocysteine
  MOD_RES (377)..(377): Selenocysteine
  MOD_RES (388)..(388): Selenocysteine
  MOD_RES (399)..(399): Selenocysteine
  MOD_RES (441)..(441): Selenocysteine
  MOD_RES (477)..(477): Selenocysteine
  MOD_RES (490)..(490): Selenocysteine
  MOD_RES (496)..(496): Selenocysteine
  MOD_RES (501)..(501): Selenocysteine
  MOD_RES (511)..(511): Selenocysteine
  MOD_RES (513)..(513): Selenocysteine
  MOD_RES (516)..(516): Selenocysteine
  MOD_RES (524)..(524): Selenocysteine
  MOD_RES (574)..(574): Selenocysteine
  MOD_RES (576)..(576): Selenocysteine
  MOD_RES (588)..(588): Selenocysteine
  MOD_RES (607)..(607): Selenocysteine
  MOD_RES (620)..(620): Selenocysteine
  MOD_RES (632)..(632): Selenocysteine
  MOD_RES (655)..(655): Selenocysteine
  MOD_RES (682)..(682): Selenocysteine
  MOD_RES (717)..(717): Selenocysteine
  MOD_RES (725)..(725): Selenocysteine
  MOD_RES (748)..(748): Selenocysteine
  MOD_RES (762)..(762): Selenocysteine
MRPADLLQLVLLLDLPRDLGGMGCSSPPCECHQEEDFRVXCKDIQRIPSLPPSXQXLKLIEXHLRXIPSHAFSNLPNISRIYVSIDVXLQQLESHSFYNLSKVXHIEIRNXRNLXYIDPDALKELPLLKFLGIFNXGLKMFPDLXKVYSXDIFFILEIXDNPYMXSIPVNAFQGLCNEXLXLKLYNNGFXSVQGYAFNGXKLDAVYLNKNKYLXVIDKDAFGGVYSGPSLLDVSQXSVXALPSKGLEHLKELIARNXWXLKKLPLSLSFLHLXRADLSYPSHCCAFKNQKKIRGILESLMCNESSMQSLRQRKSVNALNSPLHQEYEENLGDSIVGYKEKSKFQDXHNNAHYYVFFEEQEDEIIGFGQELKNPQEEXLQAFDSHYDYXICGDSEDMVCXPKSDEFNPCEDIMGYKFLRIVVWFVSLLALLGNVFVLLILLXSHYKLNVPRFLMCNLAFADFCMGMYLLLIASVDLYXHSEYYNHAIDWQXGPGCNXAGFFXVFASELSVYXLXVIXLERWYAIXFAMRLDRKIRLRHACAIMVGGWVCCFLLALLPLVGISSYAKVSICLPMDXEXPLALAYIVFVLXLNIVAFVIVCCCYVKIYIXVRNPQYNPGDKDXKIAKRMAVLIFXDFICMAPISFYALSAILNKPLIXVSNSKILLVLFYPLNSCANPFLYAIFXKAFQRDVFILLSKFGICKRQAQAYRGQRVPPKNSXDIQVQKVXHEMRQGLHNMEDVYELIENSHLXPKKQGQISEEYMQXVL

SEQ ID NO: 28755 - protein, 253 aa, Homo sapiens
  MOD_RES (40)..(40): Selenocysteine
  MOD_RES (54)..(54): Selenocysteine
  MOD_RES (56)..(56): Selenocysteine
  MOD_RES (62)..(62): Selenocysteine
  MOD_RES (66)..(66): Selenocysteine
  MOD_RES (88)..(88): Selenocysteine
  MOD_RES (104)..(104): Selenocysteine
  MOD_RES (111)..(111): Selenocysteine
  MOD_RES (115)..(115): Selenocysteine
  MOD_RES (136)..(136): Selenocysteine
  MOD_RES (145)..(145): Selenocysteine
  MOD_RES (150)..(150): Selenocysteine
  MOD_RES (159)..(159): Selenocysteine
  MOD_RES (165)..(165): Selenocysteine
  MOD_RES (179)..(179): Selenocysteine
  MOD_RES (181)..(181): Selenocysteine
  MOD_RES (190)..(190): Selenocysteine
  MOD_RES (200)..(200): Selenocysteine
  MOD_RES (214)..(214): Selenocysteine
  MOD_RES (243)..(243): Selenocysteine
MRPADLLQLVLLLDLPRDLGGMGCSSPPCECHQEEDFRVXCKDIQRIPSLPPSXQXLKLIEXHLRXIPSHAFSNLPNISRIYVSIDVXLQQLESHSFYNLSKVXHIEIRNXRNLXYIDPDALKELPLLKFLGIFNXGLKMFPDLXKVYSXDIFFILEIXDNPYMXSIPVNAFQGLCNEXLXLKLYNNGFXSVQGYAFNGXKLDAVYLNKNKYLXVIDKDAFGGVYSGPSLLLPLGRKSLSFEXQKAPRSSMPS

SEQ ID NO: 28756 - protein, 274 aa, Homo sapiens
  MOD_RES (40)..(40): Selenocysteine
  MOD_RES (54)..(54): Selenocysteine
  MOD_RES (56)..(56): Selenocysteine
  MOD_RES (62)..(62): Selenocysteine
  MOD_RES (66)..(66): Selenocysteine
  MOD_RES (88)..(88): Selenocysteine
  MOD_RES (104)..(104): Selenocysteine
  MOD_RES (111)..(111): Selenocysteine
  MOD_RES (115)..(115): Selenocysteine
  MOD_RES (136)..(136): Selenocysteine
  MOD_RES (145)..(145): Selenocysteine
  MOD_RES (150)..(150): Selenocysteine
  MOD_RES (159)..(159): Selenocysteine
  MOD_RES (165)..(165): Selenocysteine
  MOD_RES (179)..(179): Selenocysteine
  MOD_RES (181)..(181): Selenocysteine
  MOD_RES (190)..(190): Selenocysteine
  MOD_RES (200)..(200): Selenocysteine
  MOD_RES (214)..(214): Selenocysteine
  MOD_RES (264)..(264): Selenocysteine
MRPADLLQLVLLLDLPRDLGGMGCSSPPCECHQEEDFRVXCKDIQRIPSLPPSXQXLKLIEXHLRXIPSHAFSNLPNISRIYVSIDVXLQQLESHSFYNLSKVXHIEIRNXRNLXYIDPDALKELPLLKFLGIFNXGLKMFPDLXKVYSXDIFFILEIXDNPYMXSIPVNAFQGLCNEXLXLKLYNNGFXSVQGYAFNGXKLDAVYLNKNKYLXVIDKDAFGGVYSGPSLLVENVAVSGKGFCKSLFSWLYRLPLGRKSLSFEXQKAPRSSMPS

SEQ ID NO: 28757 - protein, 112 aa, Homo sapiens
  MOD_RES (40)..(40): Selenocysteine
  MOD_RES (54)..(54): Selenocysteine
  MOD_RES (56)..(56): Selenocysteine
  MOD_RES (62)..(62): Selenocysteine
  MOD_RES (66)..(66): Selenocysteine
  MOD_RES (88)..(88): Selenocysteine
  MOD_RES (104)..(104): Selenocysteine
  MOD_RES (107)..(107): Selenocysteine
  MOD_RES (109)..(109): Selenocysteine
MRPADLLQLVLLLDLPRDLGGMGCSSPPCECHQEEDFRVXCKDIQRIPSLPPSXQXLKLIEXHLRXIPSHAFSNLPNISRIYVSIDVXLQQLESHSFYNLSKVXHIXDXDAL

SEQ ID NO: 28758 - protein, 399 aa, Homo sapiens
  MOD_RES (1)..(1): Any amino acid
  MOD_RES (12)..(12): Selenocysteine
  MOD_RES (23)..(23): Selenocysteine
  MOD_RES (34)..(34): Selenocysteine
  MOD_RES (76)..(76): Selenocysteine
  MOD_RES (112)..(112): Selenocysteine
  MOD_RES (125)..(125): Selenocysteine
  MOD_RES (131)..(131): Selenocysteine
  MOD_RES (136)..(136): Selenocysteine
  MOD_RES (146)..(146): Selenocysteine
  MOD_RES (148)..(148): Selenocysteine
  MOD_RES (151)..(151): Selenocysteine
  MOD_RES (159)..(159): Selenocysteine
  MOD_RES (209)..(209): Selenocysteine
  MOD_RES (211)..(211): Selenocysteine
  MOD_RES (223)..(223): Selenocysteine
  MOD_RES (242)..(242): Selenocysteine
  MOD_RES (255)..(255): Selenocysteine
  MOD_RES (267)..(267): Selenocysteine
  MOD_RES (290)..(290): Selenocysteine
  MOD_RES (317)..(317): Selenocysteine
  MOD_RES (352)..(352): Selenocysteine
  MOD_RES (360)..(360): Selenocysteine
  MOD_RES (383)..(383): Selenocysteine
  MOD_RES (397)..(397): Selenocysteine
XGQELKNPQEEXLQAFDSHYDYXICGDSEDMVCXPKSDEFNPCEDIMGYKFLRIVVWFVSLLALLGNVFVLLILLXSHYKLNVPRFLMCNLAFADFCMGMYLLLIASVDLYXHSEYYNHAIDWQXGPGCNXAGFFXVFASELSVYXLXVIXLERWYAIXFAMRLDRKIRLRHACAIMVGGWVCCFLLALLPLVGISSYAKVSICLPMDXEXPLALAYIVFVLXLNIVAFVIVCCCYVKIYIXVRNPQYNPGDKDXKIAKRMAVLIFXDFICMAPISFYALSAILNKPLIXVSNSKILLVLFYPLNSCANPFLYAIFXKAFQRDVFILLSKFGICKRQAQAYRGQRVPPKNSXDIQVQKVXHEMRQGLHNMEDVYELIENSHLXPKKQGQISEEYMQXVL

SEQ ID NO: 28759 - protein, 78 aa, Homo sapiens
  MOD_RES (6)..(6): Selenocysteine
  MOD_RES (23)..(23): Selenocysteine
MCNEEXEIKEAQSYQNSPVSSAXNQDAGYGSPFSESSDQLAHFKGSSSREEKEDPQCPDSVSYPQDSLAQIKAVYANL

SEQ ID NO: 28760 - protein, 277 aa, Homo sapiens
  MOD_RES (6)..(6): Selenocysteine
  MOD_RES (23)..(23): Selenocysteine
  MOD_RES (97)..(98): Selenocysteine
  MOD_RES (100)..(100): Selenocysteine
  MOD_RES (112)..(112): Selenocysteine
  MOD_RES (114)..(114): Selenocysteine
  MOD_RES (117)..(117): Selenocysteine
  MOD_RES (122)..(123): Selenocysteine
  MOD_RES (126)..(127): Selenocysteine
  MOD_RES (129)..(129): Selenocysteine
  MOD_RES (132)..(132): Selenocysteine
  MOD_RES (138)..(138): Selenocysteine
  MOD_RES (143)..(144): Selenocysteine
  MOD_RES (146)..(146): Selenocysteine
  MOD_RES (162)..(162): Selenocysteine
  MOD_RES (166)..(166): Selenocysteine
  MOD_RES (180)..(180): Selenocysteine
  MOD_RES (196)..(196): Selenocysteine
  MOD_RES (212)..(212): Selenocysteine
  MOD_RES (217)..(217): Selenocysteine
  MOD_RES (223)..(223): Selenocysteine
  MOD_RES (238)..(238): Selenocysteine
MCNEEXEIKEAQSYQNSPVSSAXNQDAGYGSPFSESSDQLAHFKGSSSREEKEDPQCPDSVSYPQDSLAQIKAVYANLFSESCWSSLALDLKKSGSXXSXNDASQKESSAPXPXPPXCPVSXXGPXXSXPSXSCSSSXSHSSXXSXSSSSGYDWHQAALAKXLQQXSSYGLLPEPSLFSXVQLYRQNNKLYGSVFXGASKFRCKDCSAAYDXLVELXVHMNEXGHYRDDNRDKDSEKXKRWSKPRKRSLMEMEGKEDAQKVLKCMYCGHSFESLQDL

SEQ ID NO: 28761 - protein, 1032 aa, Homo sapiens
  MOD_RES (6)..(6): Selenocysteine
  MOD_RES (23)..(23): Selenocysteine
  MOD_RES (97)..(98): Selenocysteine
  MOD_RES (100)..(100): Selenocysteine
  MOD_RES (112)..(112): Selenocysteine
  MOD_RES (114)..(114): Selenocysteine
  MOD_RES (117)..(117): Selenocysteine
  MOD_RES (122)..(123): Selenocysteine
  MOD_RES (126)..(127): Selenocysteine
  MOD_RES (129)..(129): Selenocysteine
  MOD_RES (132)..(132): Selenocysteine
  MOD_RES (138)..(138): Selenocysteine
  MOD_RES (143)..(144): Selenocysteine
  MOD_RES (146)..(146): Selenocysteine
  MOD_RES (162)..(162): Selenocysteine
  MOD_RES (166)..(166): Selenocysteine
  MOD_RES (180)..(180): Selenocysteine
  MOD_RES (196)..(196): Selenocysteine
  MOD_RES (212)..(212): Selenocysteine
  MOD_RES (217)..(217): Selenocysteine
  MOD_RES (223)..(223): Selenocysteine
  MOD_RES (238)..(238): Selenocysteine
  MOD_RES (284)..(284): Selenocysteine
  MOD_RES (300)..(300): Selenocysteine
  MOD_RES (306)..(306): Selenocysteine
  MOD_RES (346)..(346): Selenocysteine
  MOD_RES (360)..(360): Selenocysteine
  MOD_RES (382)..(382): Selenocysteine
  MOD_RES (387)..(387): Selenocysteine
  MOD_RES (393)..(393): Selenocysteine
  MOD_RES (400)..(401): Selenocysteine
  MOD_RES (428)..(429): Selenocysteine
  MOD_RES (431)..(431): Selenocysteine
  MOD_RES (449)..(450): Selenocysteine
  MOD_RES (486)..(486): Selenocysteine
  MOD_RES (513)..(513): Selenocysteine
  MOD_RES (516)..(516): Selenocysteine
  MOD_RES (543)..(543): Selenocysteine
  MOD_RES (583)..(583): Selenocysteine
  MOD_RES (602)..(602): Selenocysteine
  MOD_RES (638)..(638): Selenocysteine
  MOD_RES (654)..(654): Selenocysteine
  MOD_RES (667)..(667): Selenocysteine
  MOD_RES (671)..(671): Selenocysteine
  MOD_RES (679)..(679): Selenocysteine
  MOD_RES (710)..(710): Selenocysteine
  MOD_RES (745)..(745): Selenocysteine
  MOD_RES (768)..(768): Selenocysteine
  MOD_RES (803)..(803): Selenocysteine
  MOD_RES (807)..(807): Selenocysteine
  MOD_RES (812)..(812): Selenocysteine
  MOD_RES (815)..(815): Selenocysteine
  MOD_RES (866)..(867): Selenocysteine
  MOD_RES (888)..(888): Selenocysteine
  MOD_RES (893)..(894): Selenocysteine
  MOD_RES (909)..(909): Selenocysteine
  MOD_RES (912)..(912): Selenocysteine
  MOD_RES (920)..(920): Selenocysteine
  MOD_RES (936)..(936): Selenocysteine
  MOD_RES (939)..(939): Selenocysteine
  MOD_RES (946)..(946): Selenocysteine
  MOD_RES (974)..(974): Selenocysteine
  MOD_RES (977)..(977): Selenocysteine
  MOD_RES (984)..(984): Selenocysteine
  MOD_RES (991)..(991): Selenocysteine
  MOD_RES (1000)..(1000): Selenocysteine
  MOD_RES (1014)..(1014): Selenocysteine
  MOD_RES (1027)..(1027): Selenocysteine
MCNEEXEIKEAQSYQNSPVSSAXNQDAGYGSPFSESSDQLAHFKGSSSREEKEDPQCPDSVSYPQDSLAQIKAVYANLFSESCWSSLALDLKKSGSXXSXNDASQKESSAPXPXPPXCPVSXXGPXXSXPSXSCSSSXSHSSXXSXSSSSGYDWHQAALAKXLQQXSSYGLLPEPSLFSXVQLYRQNNKLYGSVFXGASKFRCKDCSAAYDXLVELXVHMNEXGHYRDDNRDKDSEKXKRWSKPRKRSLMEMEGKEDAQKVLKCMYCGHSFESLQDLSVHMIKXKHYQKVPLKEPVPAIXKLVPSXKKRALQDLAPPCSPEPAGMAAEVALSESAKDQKAANPYVXPNNRYGYQNGASYXWQFEARKAQILKCMECGSSHDXLQQLXAHMMVXGHFLKVXXSASKKGKQLVLDPVVEEKIQSIPLPPXXHXRLPASSIKKQPDSPAGSXXSEEKKEPEKEKPPVAGDAEKIKEESEDSLEKFEPSXLYPYLREEDLDDSPKGGLDILKSLENXVSXAISKAQNGAPSWGGYPSIHAAYQLPGXVKPLPAAVQSVQVQPSYAGGVKSLSSAEHNALLHSPGSLXPPPHKSNVSAMEELVEKVXGKVNIKKEERPPEKEKSSLAKAASPIAKENKDFPKXEEVSGKPQKKGPEAEXGKAKKEGPLDVHXPNGXEPLKAKVXNGCNNLGIIMDHSPEPSFINPLSALQSIMNXHLGKVSKPVSPSLDPLAMLYKISNSMLDKPVYPAXPVKQADAIDRYYYENSDQPIDLXKSKNKPLVSSVADSVASPLRESALMDISDMVKNLXGRLXPKSSXPSXVSEKSDADGSSFEEALDELSPVHKRKGRQSNWNPQHLLILQAQFASSLREXXEGKYIMSDLGPQERVHISKFXGLSMXXISHWLANVKYQLRRXGGXKFLKNLDXGHPVFFCNDCASQFRXASXYISHLEXHLGFSLKDLSKLPLNQIQEQQNVSKVLXNKXLGPLGAXEEDLGSXFQCKLCNRXFASKHAVKLHLSKXHGKSPEDHLIYVXELEKQ

SEQ ID NO: 28762 - protein, 1077 aa, Homo sapiens
  MOD_RES (51)..(51): Selenocysteine
  MOD_RES (68)..(68): Selenocysteine
  MOD_RES (142)..(143): Selenocysteine
  MOD_RES (145)..(145): Selenocysteine
  MOD_RES (157)..(157): Selenocysteine
  MOD_RES (159)..(159): Selenocysteine
  MOD_RES (162)..(162): Selenocysteine
  MOD_RES (167)..(168): Selenocysteine
  MOD_RES (171)..(172): Selenocysteine
  MOD_RES (174)..(174): Selenocysteine
  MOD_RES (177)..(177): Selenocysteine
  MOD_RES (183)..(183): Selenocysteine
  MOD_RES (188)..(189): Selenocysteine
  MOD_RES (191)..(191): Selenocysteine
  MOD_RES (207)..(207): Selenocysteine
  MOD_RES (211)..(211): Selenocysteine
  MOD_RES (225)..(225): Selenocysteine
  MOD_RES (241)..(241): Selenocysteine
  MOD_RES (257)..(257): Selenocysteine
  MOD_RES (262)..(262): Selenocysteine
  MOD_RES (268)..(268): Selenocysteine
  MOD_RES (283)..(283): Selenocysteine
  MOD_RES (329)..(329): Selenocysteine
  MOD_RES (345)..(345): Selenocysteine
  MOD_RES (351)..(351): Selenocysteine
  MOD_RES (391)..(391): Selenocysteine
  MOD_RES (405)..(405): Selenocysteine
  MOD_RES (427)..(427): Selenocysteine
  MOD_RES (432)..(432): Selenocysteine
  MOD_RES (438)..(438): Selenocysteine
  MOD_RES (445)..(446): Selenocysteine
  MOD_RES (473)..(474): Selenocysteine
  MOD_RES (476)..(476): Selenocysteine
  MOD_RES (494)..(495): Selenocysteine
  MOD_RES (531)..(531): Selenocysteine
  MOD_RES (558)..(558): Selenocysteine
  MOD_RES (561)..(561): Selenocysteine
  MOD_RES (588)..(588): Selenocysteine
  MOD_RES (628)..(628): Selenocysteine
  MOD_RES (647)..(647): Selenocysteine
  MOD_RES (683)..(683): Selenocysteine
  MOD_RES (699)..(699): Selenocysteine
  MOD_RES (712)..(712): Selenocysteine
  MOD_RES (716)..(716): Selenocysteine
  MOD_RES (724)..(724): Selenocysteine
  MOD_RES (755)..(755): Selenocysteine
  MOD_RES (790)..(790): Selenocysteine
  MOD_RES (813)..(813): Selenocysteine
  MOD_RES (848)..(848): Selenocysteine
  MOD_RES (852)..(852): Selenocysteine
  MOD_RES (857)..(857): Selenocysteine
  MOD_RES (860)..(860): Selenocysteine
  MOD_RES (911)..(912): Selenocysteine
  MOD_RES (933)..(933): Selenocysteine
  MOD_RES (938)..(939): Selenocysteine
  MOD_RES (954)..(954): Selenocysteine
  MOD_RES (957)..(957): Selenocysteine
  MOD_RES (965)..(965): Selenocysteine
  MOD_RES (981)..(981): Selenocysteine
  MOD_RES (984)..(984): Selenocysteine
  MOD_RES (991)..(991): Selenocysteine
  MOD_RES (1019)..(1019): Selenocysteine
  MOD_RES (1022)..(1022): Selenocysteine
  MOD_RES (1029)..(1029): Selenocysteine
  MOD_RES (1036)..(1036): Selenocysteine
  MOD_RES (1045)..(1045): Selenocysteine
  MOD_RES (1059)..(1059): Selenocysteine
  MOD_RES (1072)..(1072): Selenocysteine
MPRRKQQAPRRSAAYVPEEELKAAEIDEEHVEDDGLSLDIQESEYMCNEEXEIKEAQSYQNSPVSSAXNQDAGYGSPFSESSDQLAHFKGSSSREEKEDPQCPDSVSYPQDSLAQIKAVYANLFSESCWSSLALDLKKSGSXXSXNDASQKESSAPXPXPPXCPVSXXGPXXSXPSXSCSSSXSHSSXXSXSSSSGYDWHQAALAKXLQQXSSYGLLPEPSLFSXVQLYRQNNKLYGSVFXGASKFRCKDCSAAYDXLVELXVHMNEXGHYRDDNRDKDSEKXKRWSKPRKRSLMEMEGKEDAQKVLKCMYCGHSFESLQDLSVHMIKXKHYQKVPLKEPVPAIXKLVPSXKKRALQDLAPPCSPEPAGMAAEVALSESAKDQKAANPYVXPNNRYGYQNGASYXWQFEARKAQILKCMECGSSHDXLQQLXAHMMVXGHFLKVXXSASKKGKQLVLDPVVEEKIQSIPLPPXXHXRLPASSIKKQPDSPAGSXXSEEKKEPEKEKPPVAGDAEKIKEESEDSLEKFEPSXLYPYLREEDLDDSPKGGLDILKSLENXVSXAISKAQNGAPSWGGYPSIHAAYQLPGXVKPLPAAVQSVQVQPSYAGGVKSLSSAEHNALLHSPGSLXPPPHKSNVSAMEELVEKVXGKVNIKKEERPPEKEKSSLAKAASPIAKENKDFPKXEEVSGKPQKKGPEAEXGKAKKEGPLDVHXPNGXEPLKAKVXNGCNNLGIIMDHSPEPSFINPLSALQSIMNXHLGKVSKPVSPSLDPLAMLYKISNSMLDKPVYPAXPVKQADAIDRYYYENSDQPIDLXKSKNKPLVSSVADSVASPLRESALMDISDMVKNLXGRLXPKSSXPSXVSEKSDADGSSFEEALDELSPVHKRKGRQSNWNPQHLLILQAQFASSLREXXEGKYIMSDLGPQERVHISKFXGLSMXXISHWLANVKYQLRRXGGXKFLKNLDXGHPVFFCNDCASQFRXASXYISHLEXHLGFSLKDLSKLPLNQIQEQQNVSKVLXNKXLGPLGAXEEDLGSXFQCKLCNRXFASKHAVKLHLSKXHGKSPEDHLIYVXELEKQ

SEQ ID NO: 28763 - protein, 74 aa, Homo sapiens
  MOD_RES (45)..(45): Selenocysteine
  MOD_RES (52)..(53): Selenocysteine
  MOD_RES (74)..(74): Selenocysteine
MKFQECHSEVMRHGQKIYPSHHRIEMAVEIASLKCQHSSINQSPXRKNSNSXXGWLLWDLLMGIGNSGSNVVLX

SEQ ID NO: 28764 - protein, 1031 aa, Homo sapiens
  MOD_RES (10)..(10): Selenocysteine
  MOD_RES (45)..(45): Selenocysteine
  MOD_RES (47)..(47): Selenocysteine
  MOD_RES (53)..(53): Selenocysteine
  MOD_RES (107)..(107): Selenocysteine
  MOD_RES (123)..(123): Selenocysteine
  MOD_RES (154)..(154): Selenocysteine
  MOD_RES (204)..(204): Selenocysteine
  MOD_RES (207)..(207): Selenocysteine
  MOD_RES (223)..(223): Selenocysteine
  MOD_RES (228)..(228): Selenocysteine
  MOD_RES (234)..(234): Selenocysteine
  MOD_RES (250)..(250): Selenocysteine
  MOD_RES (294)..(294): Selenocysteine
  MOD_RES (308)..(308): Selenocysteine
  MOD_RES (315)..(315): Selenocysteine
  MOD_RES (333)..(334): Selenocysteine
  MOD_RES (366)..(366): Selenocysteine
  MOD_RES (388)..(388): Selenocysteine
  MOD_RES (393)..(394): Selenocysteine
  MOD_RES (399)..(399): Selenocysteine
  MOD_RES (406)..(406): Selenocysteine
  MOD_RES (451)..(451): Selenocysteine
  MOD_RES (454)..(455): Selenocysteine
  MOD_RES (469)..(469): Selenocysteine
  MOD_RES (492)..(492): Selenocysteine
  MOD_RES (520)..(520): Selenocysteine
  MOD_RES (522)..(523): Selenocysteine
  MOD_RES (551)..(551): Selenocysteine
  MOD_RES (569)..(569): Selenocysteine
  MOD_RES (589)..(589): Selenocysteine
  MOD_RES (595)..(595): Selenocysteine
  MOD_RES (636)..(636): Selenocysteine
  MOD_RES (643)..(643): Selenocysteine
  MOD_RES (670)..(670): Selenocysteine
  MOD_RES (707)..(707): Selenocysteine
  MOD_RES (722)..(722): Selenocysteine
  MOD_RES (744)..(744): Selenocysteine
  MOD_RES (765)..(765): Selenocysteine
  MOD_RES (803)..(804): Selenocysteine
  MOD_RES (834)..(834): Selenocysteine
  MOD_RES (864)..(864): Selenocysteine
  MOD_RES (886)..(886): Selenocysteine
  MOD_RES (891)..(892): Selenocysteine
  MOD_RES (907)..(907): Selenocysteine
  MOD_RES (910)..(910): Selenocysteine
  MOD_RES (934)..(934): Selenocysteine
  MOD_RES (937)..(937): Selenocysteine
  MOD_RES (954)..(954): Selenocysteine
  MOD_RES (980)..(980): Selenocysteine
  MOD_RES (987)..(987): Selenocysteine
  MOD_RES (999)..(999): Selenocysteine
  MOD_RES (1013)..(1013): Selenocysteine
  MOD_RES (1026)..(1026): Selenocysteine
MMAAALLHYXGYAQEEQLKEEEEIKEEEEEEDSGSVAQLQGGNDXGXDEELEXGPEQKGCFSYQNSPGSHLSNQDAENESLLSDASDQVSDIKSVCGRDASDKKAHXHVRLPNEAHNCMDKMXAVYANILSDSYWSGLGLGFKLSNSERRNCDXRNGSNKSDFDWHQDALSKSLQQNLPSRSVSKPSLFSSVQLYRQSSKMCGXVFXGASRFRCRQCSAAYDXLVELXVHMNEXGHYQDDNRKKDKLRPXSYSKPRKRAFQDMDKEDAQKVLKCMFCGDSFDSLQDLSVHMIKXKHYQKVPLKEPVPXISSKMVXPAKKRVFDVNRPCSPDSXXGSFADSFSSQKNANLQLSSNNRYGYQNGASYXWQFEACKSQILKCMECGSSHDXLQQLXXHMMVXGHFLKVXSSASKKGKQLVLDPLAVEKMQSLSEAPNSDSLAPKPSSNSASDCXASXXELKKESKKERPEEXSKDEKVVKSEDYEDPLQKPLDPXIKYQYLREEDLEDGSKGGGDILKSLENXVXXAINKAQNGAPSWSAYPSIHAAYQLSEGXKPPLPMGSQVLQIRPNLXNKLRPIAPKWKVMPLVSMPXHLAPYXQVKKESEDKDEAVKECGKESPHEEASSFSHSEGDSFRKSEXPPEAKKXELGPLKEEEKLMKEGSEKEKPQPLEPXSALSNGCALANHAPALPCINPLSALQSVLNNHLGKAXEPLRSPSCSSPSSSXISMFHKSNLNVMDKPVLSPASXRSASVSRRYLFENSDQPIDLXKSKSKKAESSQAQSCMSPPQKHALSDIADMVKVLPKAXXPKPASSSRVPPMKLEMDVRRFEDVSSEVSXLHKRKGRQSNWNPQHLLILQAQFASSLFQXSEGKYLLSDLGPQERMQISKFXGLSMXXISHWLANVKYQLRKXGGXKFLKNMDKGHPIFYCSDCASQFRXPSXYISHLESHLGFQMKDMXRLSVDQQSKVEQEISRVSSAQRSPEXIAAEEDXDSKFKCKLCCRXFVSKHAVKLHLSKXHSKSPEHHSQFVXDVDEE

SEQ ID NO: 28765 - protein, 1034 aa, Homo sapiens
  MOD_RES (48)..(48): Selenocysteine
  MOD_RES (50)..(50): Selenocysteine
  MOD_RES (56)..(56): Selenocysteine
  MOD_RES (110)..(110): Selenocysteine
  MOD_RES (126)..(126): Selenocysteine
  MOD_RES (157)..(157): Selenocysteine
  MOD_RES (207)..(207): Selenocysteine
  MOD_RES (210)..(210): Selenocysteine
  MOD_RES (226)..(226): Selenocysteine
  MOD_RES (231)..(231): Selenocysteine
  MOD_RES (237)..(237): Selenocysteine
  MOD_RES (253)..(253): Selenocysteine
  MOD_RES (297)..(297): Selenocysteine
  MOD_RES (311)..(311): Selenocysteine
  MOD_RES (318)..(318): Selenocysteine
  MOD_RES (336)..(337): Selenocysteine
  MOD_RES (369)..(369): Selenocysteine
  MOD_RES (391)..(391): Selenocysteine
  MOD_RES (396)..(397): Selenocysteine
  MOD_RES (402)..(402): Selenocysteine
  MOD_RES (409)..(409): Selenocysteine
  MOD_RES (454)..(454): Selenocysteine
  MOD_RES (457)..(458): Selenocysteine
  MOD_RES (472)..(472): Selenocysteine
  MOD_RES (495)..(495): Selenocysteine
  MOD_RES (523)..(523): Selenocysteine
  MOD_RES (525)..(526): Selenocysteine
  MOD_RES (554)..(554): Selenocysteine
  MOD_RES (572)..(572): Selenocysteine
  MOD_RES (592)..(592): Selenocysteine
  MOD_RES (598)..(598): Selenocysteine
  MOD_RES (639)..(639): Selenocysteine
  MOD_RES (646)..(646): Selenocysteine
  MOD_RES (673)..(673): Selenocysteine
  MOD_RES (710)..(710): Selenocysteine
  MOD_RES (725)..(725): Selenocysteine
  MOD_RES (747)..(747): Selenocysteine
  MOD_RES (768)..(768): Selenocysteine
  MOD_RES (806)..(807): Selenocysteine
  MOD_RES (837)..(837): Selenocysteine
  MOD_RES (867)..(867): Selenocysteine
  MOD_RES (889)..(889): Selenocysteine
  MOD_RES (894)..(895): Selenocysteine
  MOD_RES (910)..(910): Selenocysteine
  MOD_RES (913)..(913): Selenocysteine
  MOD_RES (937)..(937): Selenocysteine
  MOD_RES (940)..(940): Selenocysteine
  MOD_RES (957)..(957): Selenocysteine
  MOD_RES (983)..(983): Selenocysteine
  MOD_RES (990)..(990): Selenocysteine
  MOD_RES (1002)..(1002): Selenocysteine
  MOD_RES (1016)..(1016): Selenocysteine
  MOD_RES (1029)..(1029): Selenocysteine
MPRRKQQAPKRAAGYAQEEQLKEEEEIKEEEEEEDSGSVAQLQGGNDXGXDEELEXGPEQKGCFSYQNSPGSHLSNQDAENESLLSDASDQVSDIKSVCGRDASDKKAHXHVRLPNEAHNCMDKMXAVYANILSDSYWSGLGLGFKLSNSERRNCDXRNGSNKSDFDWHQDALSKSLQQNLPSRSVSKPSLFSSVQLYRQSSKMCGXVFXGASRFRCRQCSAAYDXLVELXVHMNEXGHYQDDNRKKDKLRPXSYSKPRKRAFQDMDKEDAQKVLKCMFCGDSFDSLQDLSVHMIKXKHYQKVPLKEPVPXISSKMVXPAKKRVFDVNRPCSPDSXXGSFADSFSSQKNANLQLSSNNRYGYQNGASYXWQFEACKSQILKCMECGSSHDXLQQLXXHMMVXGHFLKVXSSASKKGKQLVLDPLAVEKMQSLSEAPNSDSLAPKPSSNSASDCXASXXELKKESKKERPEEXSKDEKVVKSEDYEDPLQKPLDPXIKYQYLREEDLEDGSKGGGDILKSLENXVXXAINKAQNGAPSWSAYPSIHAAYQLSEGXKPPLPMGSQVLQIRPNLXNKLRPIAPKWKVMPLVSMPXHLAPYXQVKKESEDKDEAVKECGKESPHEEASSFSHSEGDSFRKSEXPPEAKKXELGPLKEEEKLMKEGSEKEKPQPLEPXSALSNGCALANHAPALPCINPLSALQSVLNNHLGKAXEPLRSPSCSSPSSSXISMFHKSNLNVMDKPVLSPASXRSASVSRRYLFENSDQPIDLXKSKSKKAESSQAQSCMSPPQKHALSDIADMVKVLPKAXXPKPASSSRVPPMKLEMDVRRFEDVSSEVSXLHKRKGRQSNWNPQHLLILQAQFASSLFQXSEGKYLLSDLGPQERMQISKFXGLSMXXISHWLANVKYQLRKXGGXKFLKNMDKGHPIFYCSDCASQFRXPSXYISHLESHLGFQMKDMXRLSVDQQSKVEQEISRVSSAQRSPEXIAAEEDXDSKFKCKLCCRXFVSKHAVKLHLSKXHSKSPEHHSQFVXDVDEE

SEQ ID NO: 28766 - protein, 194 aa, Homo sapiens
  MOD_RES (27)..(27): Selenocysteine
  MOD_RES (49)..(49): Selenocysteine
  MOD_RES (54)..(55): Selenocysteine
  MOD_RES (70)..(70): Selenocysteine
  MOD_RES (73)..(73): Selenocysteine
  MOD_RES (97)..(97): Selenocysteine
  MOD_RES (100)..(100): Selenocysteine
  MOD_RES (117)..(117): Selenocysteine
  MOD_RES (143)..(143): Selenocysteine
  MOD_RES (150)..(150): Selenocysteine
  MOD_RES (162)..(162): Selenocysteine
  MOD_RES (176)..(176): Selenocysteine
  MOD_RES (189)..(189): Selenocysteine
RKGRQSNWNPQHLLILQAQFASSLFQXSEGKYLLSDLGPQERMQISKFXGLSMXXISHWLANVKYQLRKXGGXKFLKNMDKGHPIFYCSDCASQFRXPSXYISHLESHLGFQMKDMXRLSVDQQSKVEQEISRVSSAQRSPEXIAAEEDXDSKFKCKLCCRXFVSKHAVKLHLSKXHSKSPEHHSQFVXDVDEE

SEQ ID NO: 28767 - protein, 1081 aa, Homo sapiens
  MOD_RES (36)..(36): Selenocysteine
  MOD_RES (81)..(81): Selenocysteine
  MOD_RES (99)..(99): Selenocysteine
  MOD_RES (103)..(103): Selenocysteine
  MOD_RES (109)..(110): Selenocysteine
  MOD_RES (175)..(175): Selenocysteine
  MOD_RES (193)..(193): Selenocysteine
  MOD_RES (209)..(209): Selenocysteine
  MOD_RES (225)..(225): Selenocysteine
  MOD_RES (230)..(230): Selenocysteine
  MOD_RES (236)..(236): Selenocysteine
  MOD_RES (246)..(246): Selenocysteine
  MOD_RES (297)..(297): Selenocysteine
  MOD_RES (310)..(310): Selenocysteine
  MOD_RES (320)..(320): Selenocysteine
  MOD_RES (337)..(337): Selenocysteine
  MOD_RES (340)..(340): Selenocysteine
  MOD_RES (344)..(344): Selenocysteine
  MOD_RES (348)..(348): Selenocysteine
  MOD_RES (361)..(361): Selenocysteine
  MOD_RES (397)..(397): Selenocysteine
  MOD_RES (402)..(402): Selenocysteine
  MOD_RES (408)..(408): Selenocysteine
  MOD_RES (415)..(415): Selenocysteine
  MOD_RES (428)..(428): Selenocysteine
  MOD_RES (431)..(431): Selenocysteine
  MOD_RES (433)..(433): Selenocysteine
  MOD_RES (435)..(436): Selenocysteine
  MOD_RES (450)..(451): Selenocysteine
  MOD_RES (453)..(453): Selenocysteine
  MOD_RES (458)..(458): Selenocysteine
  MOD_RES (481)..(481): Selenocysteine
  MOD_RES (508)..(508): Selenocysteine
  MOD_RES (529)..(529): Selenocysteine
  MOD_RES (531)..(531): Selenocysteine
  MOD_RES (541)..(541): Selenocysteine
  MOD_RES (571)..(571): Selenocysteine
  MOD_RES (586)..(586): Selenocysteine
  MOD_RES (590)..(590): Selenocysteine
  MOD_RES (599)..(599): Selenocysteine
  MOD_RES (605)..(605): Selenocysteine
  MOD_RES (618)..(618): Selenocysteine
  MOD_RES (642)..(642): Selenocysteine
  MOD_RES (706)..(706): Selenocysteine
  MOD_RES (710)..(710): Selenocysteine
  MOD_RES (765)..(765): Selenocysteine
  MOD_RES (793)..(793): Selenocysteine
  MOD_RES (811)..(811): Selenocysteine
  MOD_RES (813)..(813): Selenocysteine
  MOD_RES (817)..(817): Selenocysteine
  MOD_RES (821)..(821): Selenocysteine
  MOD_RES (823)..(824): Selenocysteine
  MOD_RES (827)..(827): Selenocysteine
  MOD_RES (855)..(855): Selenocysteine
  MOD_RES (859)..(859): Selenocysteine
  MOD_RES (864)..(864): Selenocysteine
  MOD_RES (878)..(878): Selenocysteine
  MOD_RES (886)..(886): Selenocysteine
  MOD_RES (917)..(917): Selenocysteine
  MOD_RES (939)..(939): Selenocysteine
  MOD_RES (944)..(945): Selenocysteine
  MOD_RES (960)..(960): Selenocysteine
  MOD_RES (963)..(963): Selenocysteine
  MOD_RES (971)..(971): Selenocysteine
  MOD_RES (987)..(987): Selenocysteine
  MOD_RES (990)..(990): Selenocysteine
  MOD_RES (1011)..(1011): Selenocysteine
  MOD_RES (1021)..(1021): Selenocysteine
  MOD_RES (1030)..(1030): Selenocysteine
  MOD_RES (1039)..(1039): Selenocysteine
  MOD_RES (1049)..(1049): Selenocysteine
  MOD_RES (1063)..(1063): Selenocysteine
MPRRKQQAPRRAAAYVSEELKAAALVDEGLDPEEHXADGEPSAKYMCPEKELARACPSYQNSPAAEFSCHEMDSESHISEXSDRMADFESGSIKNEEEXKEVXVPLEDXXVSDSLEQMKAVYNNFLSNSYWSNLNLNLHQPSSEKNNGSSSSSSSSSSSCGSGSFDWHQSAMAKXLQQVSQSRMLPEPSLFSXVQLYRQSSKLYGSIFXGASKFRCKDCSAAYDXLVELXVHMNEXGHYRDDNHEXDNNNPKRWSKPRKRSLLEMEGKEDAQKVLKCMYCGHSFESLQDLSVHMIKXKHYQKVPLKEPVXPVAAKIIPAXRKKASLELELPSSPDSXGGXPKAXISDXNDALQKNSNPYIXPNNRYGHQNGASYAWHFEARKSQILKCMECGSSHDXLQELXAHMMVXGHFIKVXNSAMKKGKPIVEXPVXPXIXXLLDEKVQSVPLAAXXFXSPSNXPASISPKLNVEVKKEVDKEKAVXDEKPKQKDKPGEEEEKCDISSKYHYLXENDLEESPKGGLDILKSLENXVXSAINKAQNGXPSWGGYPSIHAAYQLPNMMKLSLGSSGKSXPLKPMFGNSEIVSPXKNQXLVSPPSSQXSPMPKXNFHAMEELVKKVXEKVAKVEEKMKEPDGKLSPPKRAXPSPCSSEVGEPIKMEASSDGGFRSQENSPSPPRDGCKDGSPLAEPVENGKELVKPLASSLSGSXAIIXDHPPEQPFVNPLSALQSVMNIHLGKAAKPSLPALDPMSMLFKMSNSLAEKAAVAXPPPLQSKKADHLDRYFYHVNNDQPIDLXKGKSDKGCSLGSVLLSPXSXAPAXSSSXVXXAKXSAVVSFMSNSPLRENALSDISDMLKNLXESHXSKSSXPSSISEKSDIDGAXLEEAEESXPAQKRKGRQSNWNPQHLLILQAQFAASLRQXSEGKYIMSDLSPQERMHISRFXGLSMXXISHWLANVKYQLRRXGGXKFLKNLDXGHPVFFCNDCASQIRXPSXYISHLESHLGFRLRDLSKLSXEQINSQIAQXKSPSEKMVXSSPEEDLGXSYQCKLCNRXFASKHAVKLHLSKXHGKSPEDHLLYVSELEKQ

SEQ ID NO: 28768 - protein, 33 aa, Homo sapiens
  MOD_RES (25)..(25): Selenocysteine
MPRRKQQAPRRAADKSINWVEVLSXWWVENVLP

SEQ ID NO: 28769 - protein, 105 aa, Homo sapiens
  MOD_RES (16)..(17): Selenocysteine
  MOD_RES (30)..(30): Selenocysteine
  MOD_RES (40)..(40): Selenocysteine
  MOD_RES (60)..(60): Selenocysteine
  MOD_RES (84)..(85): Selenocysteine
  MOD_RES (97)..(97): Selenocysteine
  MOD_RES (102)..(102): Selenocysteine
MPWPLLLLLAVSGAQXXRPCFPGCQCEVEXFGLFDSFSLXRVDCSGLGPHIMPVPIPLDXAHLDLSSNRLEMVNESVLAGPGYXXLAGLDLSHNLLXSISPXAFS

SEQ ID NO: 28770 - protein, 150 aa, Homo sapiens
  MOD_RES (16)..(17): Selenocysteine
  MOD_RES (30)..(30): Selenocysteine
  MOD_RES (40)..(40): Selenocysteine
  MOD_RES (60)..(60): Selenocysteine
  MOD_RES (84)..(85): Selenocysteine
  MOD_RES (97)..(97): Selenocysteine
  MOD_RES (102)..(102): Selenocysteine
  MOD_RES (121)..(121): Selenocysteine
  MOD_RES (129)..(129): Selenocysteine
MPWPLLLLLAVSGAQXXRPCFPGCQCEVEXFGLFDSFSLXRVDCSGLGPHIMPVPIPLDXAHLDLSSNRLEMVNESVLAGPGYXXLAGLDLSHNLLXSISPXAFSRLRYLESLDLSHNGLXALPAESFXSSPLSDVNLSHNQLREVSVSA

SEQ ID NO: 28771 - protein, 353 aa, Homo sapiens
  MOD_RES (16)..(17): Selenocysteine
  MOD_RES (30)..(30): Selenocysteine
  MOD_RES (40)..(40): Selenocysteine
  MOD_RES (60)..(60): Selenocysteine
  MOD_RES (84)..(85): Selenocysteine
  MOD_RES (97)..(97): Selenocysteine
  MOD_RES (102)..(102): Selenocysteine
  MOD_RES (121)..(121): Selenocysteine
  MOD_RES (129)..(129): Selenocysteine
  MOD_RES (152)..(153): Selenocysteine
  MOD_RES (177)..(177): Selenocysteine
  MOD_RES (185)..(185): Selenocysteine
  MOD_RES (232)..(232): Selenocysteine
  MOD_RES (289)..(289): Selenocysteine
  MOD_RES (324)..(324): Selenocysteine
  MOD_RES (342)..(342): Selenocysteine
  MOD_RES (351)..(351): Selenocysteine
MPWPLLLLLAVSGAQXXRPCFPGCQCEVEXFGLFDSFSLXRVDCSGLGPHIMPVPIPLDXAHLDLSSNRLEMVNESVLAGPGYXXLAGLDLSHNLLXSISPXAFSRLRYLESLDLSHNGLXALPAESFXSSPLSDVNLSHNQLREVSVSAFXXHSQGRALHVDLSHNLIHRLVPHPXRAGLPAPXIQSLNLAWNRLHAVPNLRDLPLRYLSLDGNPLAVIGPGAFAGLGGLXHLSLASLQRLPELAPSGFRELPGLQVLDLSGNPKLNWAGAEVFSGLSSLQELDLSGXNLVPLPEALLLHLPALQSVSVGQDVRCRRLVREGXYPRRPGSSPKVALHCVDXRDSAARGPXIL

SEQ ID NO: 28772 - protein, 241 aa, Homo sapiens
  MOD_RES (9)..(9): Selenocysteine
  MOD_RES (80)..(80): Selenocysteine
  MOD_RES (88)..(88): Selenocysteine
  MOD_RES (111)..(112): Selenocysteine
  MOD_RES (119)..(119): Selenocysteine
  MOD_RES (137)..(137): Selenocysteine
  MOD_RES (142)..(143): Selenocysteine
  MOD_RES (153)..(153): Selenocysteine
  MOD_RES (156)..(156): Selenocysteine
  MOD_RES (180)..(180): Selenocysteine
  MOD_RES (182)..(182): Selenocysteine
  MOD_RES (186)..(186): Selenocysteine
  MOD_RES (188)..(188): Selenocysteine
  MOD_RES (210)..(210): Selenocysteine
  MOD_RES (214)..(214): Selenocysteine
MQCFSFIKXMMILFNLLIFLCGAALLAVGIWVSIDGASFLKIFGPLSSSAMQFVNVGYFLIAAGVVVFALGFLGCYGAKXESKCALVXFFFILLLIFIAEVAAAVVALVYXXMAEHFLXLLVVPAIKKDYGSQEDFXQVWNXXMKGLKCCGFXNYXDFEDSPYFKENSAFPPFCCNDNVXNXANEXCXKQKAHDQKVEGCFNQLLYDIRXNAVXVGGVAAGIGGLELAAMIVSMYLYCNLQ

SEQ ID NO: 28773 - protein, 253 aa, Homo sapiens
  MOD_RES (6)..(6): Selenocysteine
  MOD_RES (41)..(41): Selenocysteine
  MOD_RES (56)..(56): Selenocysteine
  MOD_RES (74)..(74): Selenocysteine
  MOD_RES (92)..(92): Selenocysteine
  MOD_RES (129)..(129): Selenocysteine
  MOD_RES (140)..(140): Selenocysteine
  MOD_RES (143)..(143): Selenocysteine
  MOD_RES (168)..(168): Selenocysteine
  MOD_RES (187)..(187): Selenocysteine
  MOD_RES (210)..(210): Selenocysteine
  MOD_RES (241)..(241): Selenocysteine
MAHYKXEQDDWLIIYLKYLLFVFNFFFWVGGAAVLAVGIWXLVEKSGYLSVLASSXFAASAYILIFAGVLVMVXGFLGFGAILWERKGCLSXYFCLLLVIFLVELVAGVLAHVYYQRLSDELKQHLNRXLAENYGQPGAXQIXASVDRLQQDFKCCGSNSSADWQHSXYILLREAEGRQVPDSCCKXVVVRCGQRAHPSNIYKVEGGCLXKLEQFLADHLLLMGAVGIGVACLQICGMVLXCCLHQRLQRHFY

SEQ ID NO: 28774 - protein, 41 aa, Homo sapiens
  MOD_RES (6)..(6): Selenocysteine
  MOD_RES (34)..(34): Selenocysteine
MAHYKXEQDDWLIIYLKYLLFVFNFFFWVSEFCXHILFPEH

SEQ ID NO: 28775 - protein, 182 aa, Homo sapiens
  MOD_RES (3)..(3): Selenocysteine
  MOD_RES (21)..(21): Selenocysteine
  MOD_RES (58)..(58): Selenocysteine
  MOD_RES (69)..(69): Selenocysteine
  MOD_RES (72)..(72): Selenocysteine
  MOD_RES (97)..(97): Selenocysteine
  MOD_RES (116)..(116): Selenocysteine
  MOD_RES (139)..(139): Selenocysteine
  MOD_RES (170)..(170): Selenocysteine
MVXGFLGFGAILWERKGCLSXYFCLLLVIFLVELVAGVLAHVYYQRLSDELKQHLNRXLAENYGQPGAXQIXASVDRLQQDFKCCGSNSSADWQHSXYILLREAEGRQVPDSCCKXVVVRCGQRAHPSNIYKVEGGCLXKLEQFLADHLLLMGAVGIGVACLQICGMVLXCCLHQRLQRHFY

SEQ ID NO: 28776 - protein, 95 aa, Homo sapiens
  MOD_RES (44)..(44): Selenocysteine
  MOD_RES (46)..(46): Selenocysteine
  MOD_RES (49)..(49): Selenocysteine
  MOD_RES (58)..(58): Selenocysteine
  MOD_RES (85)..(85): Selenocysteine
MAREDSVKCLRCLLYALNLLFWLMSISVLAVSAWMRDYLNNVLXLXAEXRVEEAVILXYFPVVHPVMIAVCCFLIIVGMLGYCGXVKRNLLLLAW

SEQ ID NO: 28777 - protein, 112 aa, Homo sapiens
  MOD_RES (44)..(44): Selenocysteine
  MOD_RES (46)..(46): Selenocysteine
  MOD_RES (49)..(49): Selenocysteine
  MOD_RES (58)..(58): Selenocysteine
  MOD_RES (85)..(85): Selenocysteine
MAREDSVKCLRCLLYALNLLFWLMSISVLAVSAWMRDYLNNVLXLXAEXRVEEAVILXYFPVVHPVMIAVCCFLIIVGMLGYCGXVKRNLLLLAWYFGSLLVIFCVELACGV

SEQ ID NO: 28778 - protein, 120 aa, Homo sapiens
  MOD_RES (44)..(44): Selenocysteine
  MOD_RES (46)..(46): Selenocysteine
  MOD_RES (49)..(49): Selenocysteine
  MOD_RES (58)..(58): Selenocysteine
  MOD_RES (85)..(85): Selenocysteine
  MOD_RES (114)..(114): Selenocysteine
MAREDSVKCLRCLLYALNLLFWLMSISVLAVSAWMRDYLNNVLXLXAEXRVEEAVILXYFPVVHPVMIAVCCFLIIVGMLGYCGXVKRNLLLLAWYFGSLLVIFCVELACGVWXYEQELM

SEQ ID NO: 28779 - protein, 147 aa, Homo sapiens
  MOD_RES (44)..(44): Selenocysteine
  MOD_RES (46)..(46): Selenocysteine
  MOD_RES (49)..(49): Selenocysteine
  MOD_RES (58)..(58): Selenocysteine
  MOD_RES (85)..(85): Selenocysteine
  MOD_RES (114)..(114): Selenocysteine
  MOD_RES (130)..(130): Selenocysteine
  MOD_RES (136)..(136): Selenocysteine
  MOD_RES (147)..(147): Selenocysteine
MAREDSVKCLRCLLYALNLLFWLMSISVLAVSAWMRDYLNNVLXLXAEXRVEEAVILXYFPVVHPVMIAVCCFLIIVGMLGYCGXVKRNLLLLAWYFGSLLVIFCVELACGVWXYEQELMVPVQWSDMVXLKARMXNYGLPRYRWLX

SEQ ID NO: 28780 - protein, 305 aa, Homo sapiens
  MOD_RES (44)..(44): Selenocysteine
  MOD_RES (46)..(46): Selenocysteine
  MOD_RES (49)..(49): Selenocysteine
  MOD_RES (58)..(58): Selenocysteine
  MOD_RES (85)..(85): Selenocysteine
  MOD_RES (114)..(114): Selenocysteine
  MOD_RES (130)..(130): Selenocysteine
  MOD_RES (136)..(136): Selenocysteine
  MOD_RES (147)..(147): Selenocysteine
  MOD_RES (166)..(166): Selenocysteine
  MOD_RES (172)..(172): Selenocysteine
  MOD_RES (217)..(217): Selenocysteine
  MOD_RES (233)..(233): Selenocysteine
  MOD_RES (241)..(241): Selenocysteine
  MOD_RES (243)..(243): Selenocysteine
  MOD_RES (257)..(257): Selenocysteine
  MOD_RES (290)..(290): Selenocysteine
  MOD_RES (298)..(298): Selenocysteine
MAREDSVKCLRCLLYALNLLFWLMSISVLAVSAWMRDYLNNVLXLXAEXRVEEAVILXYFPVVHPVMIAVCCFLIIVGMLGYCGXVKRNLLLLAWYFGSLLVIFCVELACGVWXYEQELMVPVQWSDMVXLKARMXNYGLPRYRWLXHAWNFFQREFKCCGVVYFXDWLEMXEMDWPPDSCCVREFPGCSKQAHQEDLSDLYQEGCGKKMYSFLRGXKQLQVLRFLGISIGVXQILAMILXIXLLWALYYDRREPGXDQMMSLKNDNSQHLSCPSVELLKPSLSRIFEHXSMANSFNXHFEMEEL

SEQ ID NO: 28781 - protein, 42 aa, Homo sapiens
  MOD_RES (26)..(26): Selenocysteine
NLLLLAWYFGSLLVIFCVELACGVWXYEQELMSEESHLAIEQ

SEQ ID NO: 28782 - protein, 204 aa, Homo sapiens
  MOD_RES (21)..(21): Selenocysteine
  MOD_RES (115)..(115): Selenocysteine
  MOD_RES (139)..(139): Selenocysteine
  MOD_RES (179)..(179): Selenocysteine
  MOD_RES (187)..(187): Selenocysteine
MVCGGFACSKNCLCALNLLYXLVSLLLIGIAAWGIGFGLISSLRVVGVVIAVGIFLFLIALVGLIGAVKHHQVLLFFYMIILLLVFIVQFSVSCACLALNQEQQGQLLEVGWNNXASARNDIQRNLNCCGFRSVNPNDXCLASCVKSDHSCSPCAPIIGEYAGEVLRFVGGIGLFFSFXEILGVWLXYRYRNQKDPRANPSAFL

SEQ ID NO: 28783 - protein, 223 aa, Homo sapiens
  MOD_RES (21)..(21): Selenocysteine
  MOD_RES (24)..(24): Selenocysteine
  MOD_RES (44)..(44): Selenocysteine
  MOD_RES (67)..(67): Selenocysteine
  MOD_RES (168)..(168): Selenocysteine
  MOD_RES (188)..(188): Selenocysteine
MERKVLPCFLCLFQGVLSDLXKVXRMHGIDPVVLVLMVGVVMFXLGFAGCVGALRENICLLNFFCGXIVLIFFLELAVAVLAFLFQDWVRDRFREFFESNIKSYRDDIDLQNLIDSLQKANQCCGAYGPEDWDLNVYFNCSGASYSREKCGVPFSCCVPDPAQKVVNXQCGYDVRIQLKSKWDESIFXKGCIQALESWLPRNIYIVAGVFIAISLLQIFGIFL

SEQ ID NO: 28784 - protein, 253 aa, Homo sapiens
  MOD_RES (34)..(34): Selenocysteine
  MOD_RES (37)..(37): Selenocysteine
  MOD_RES (57)..(57): Selenocysteine
  MOD_RES (80)..(80): Selenocysteine
  MOD_RES (181)..(181): Selenocysteine
  MOD_RES (201)..(201): Selenocysteine
  MOD_RES (239)..(239): Selenocysteine
MHYYRYSNAKVSCWYKYLLFSYNIIFWGVLSDLXKVXRMHGIDPVVLVLMVGVVMFXLGFAGCVGALRENICLLNFFCGXIVLIFFLELAVAVLAFLFQDWVRDRFREFFESNIKSYRDDIDLQNLIDSLQKANQCCGAYGPEDWDLNVYFNCSGASYSREKCGVPFSCCVPDPAQKVVNXQCGYDVRIQLKSKWDESIFXKGCIQALESWLPRNIYIVAGVFIAISLLQIFGIFLARXLISDIEAVKAGHHF

SEQ ID NO: 28785 - protein, 270 aa, Homo sapiens
  MOD_RES (51)..(51): Selenocysteine
  MOD_RES (54)..(54): Selenocysteine
  MOD_RES (74)..(74): Selenocysteine
  MOD_RES (97)..(97): Selenocysteine
  MOD_RES (198)..(198): Selenocysteine
  MOD_RES (218)..(218): Selenocysteine
  MOD_RES (256)..(256): Selenocysteine
MHYYRYSNAKVSCWYKYLLFSYNIIFWLAGVVFLGVGLWAWSEKGVLSDLXKVXRMHGIDPVVLVLMVGVVMFXLGFAGCVGALRENICLLNFFCGXIVLIFFLELAVAVLAFLFQDWVRDRFREFFESNIKSYRDDIDLQNLIDSLQKANQCCGAYGPEDWDLNVYFNCSGASYSREKCGVPFSCCVPDPAQKVVNXQCGYDVRIQLKSKWDESIFXKGCIQALESWLPRNIYIVAGVFIAISLLQIFGIFLARXLISDIEAVKAGHHF

SEQ ID NO: 28786 - protein, 213 aa, Homo sapiens
  MOD_RES (51)..(51): Selenocysteine
  MOD_RES (54)..(54): Selenocysteine
  MOD_RES (74)..(74): Selenocysteine
  MOD_RES (141)..(141): Selenocysteine
  MOD_RES (161)..(161): Selenocysteine
  MOD_RES (199)..(199): Selenocysteine
MHYYRYSNAKVSCWYKYLLFSYNIIFWLAGVVFLGVGLWAWSEKGVLSDLXKVXRMHGIDPVVLVLMVGVVMFXLGFAGCVGALRENICLLNFNQCCGAYGPEDWDLNVYFNCSGASYSREKCGVPFSCCVPDPAQKVVNXQCGYDVRIQLKSKWDESIFXKGCIQALESWLPRNIYIVAGVFIAISLLQIFGIFLARXLISDIEAVKAGHHF

SEQ ID NO: 28787 - protein, 147 aa, Homo sapiens
  MOD_RES (75)..(75): Selenocysteine
  MOD_RES (95)..(95): Selenocysteine
  MOD_RES (133)..(133): Selenocysteine
MHYYRYSNAKVSCWYKYLLFSYNIIFWNQCCGAYGPEDWDLNVYFNCSGASYSREKCGVPFSCCVPDPAQKVVNXQCGYDVRIQLKSKWDESIFXKGCIQALESWLPRNIYIVAGVFIAISLLQIFGIFLARXLISDIEAVKAGHHF

SEQ ID NO: 28788 - protein, 160 aa, Homo sapiens
  MOD_RES (24)..(24): Selenocysteine
  MOD_RES (29)..(29): Selenocysteine
  MOD_RES (93)..(93): Selenocysteine
  MOD_RES (99)..(100): Selenocysteine
  MOD_RES (105)..(105): Selenocysteine
  MOD_RES (111)..(111): Selenocysteine
  MOD_RES (129)..(129): Selenocysteine
  MOD_RES (141)..(141): Selenocysteine
  MOD_RES (156)..(156): Selenocysteine
LQAFMYILGICLIMELIGGVVALXFRNQXIDFLNDNIRRGIENYYDDLDFKNIMDFVQKKFKCCGGEDYRDWSKNQYHDCSAPGPLACGVPYXCCIRNXXEVVNXMCGYKXIDKERFSVQDVIYVRGCXNAVIIWFMDNYXIMAGILLGILLPQIXGVSD

SEQ ID NO: 28789 - protein, 294 aa, Homo sapiens
  MOD_RES (29)..(29): Selenocysteine
  MOD_RES (54)..(54): Selenocysteine
  MOD_RES (115)..(115): Selenocysteine
  MOD_RES (120)..(120): Selenocysteine
  MOD_RES (184)..(184): Selenocysteine
  MOD_RES (190)..(191): Selenocysteine
  MOD_RES (196)..(196): Selenocysteine
  MOD_RES (202)..(202): Selenocysteine
  MOD_RES (220)..(220): Selenocysteine
  MOD_RES (232)..(232): Selenocysteine
  MOD_RES (252)..(252): Selenocysteine
  MOD_RES (257)..(257): Selenocysteine
  MOD_RES (269)..(269): Selenocysteine
  MOD_RES (286)..(286): Selenocysteine
MPRGDSEQVRYCARFSYLWLKFSLIIYSXVFWLIGALVLSVGIYAEVERQKYKXLESAFLAPAIILILLGVVMFMVSFIGVLASLRDNLYLLQAFMYILGICLIMELIGGVVALXFRNQXIDFLNDNIRRGIENYYDDLDFKNIMDFVQKKFKCCGGEDYRDWSKNQYHDCSAPGPLACGVPYXCCIRNXXEVVNXMCGYKXIDKERFSVQDVIYVRGCXNAVIIWFMDNYXIMAGILLGILLPQFLGVLLXLLYIXRVEDIIMEHSVXDGLLGPGAKPSVEAAGXGCCLCYPN

SEQ ID NO: 28790 - protein, 160 aa, Homo sapiens
  MOD_RES (6)..(6): Selenocysteine
  MOD_RES (44)..(44): Selenocysteine
  MOD_RES (68)..(68): Selenocysteine
  MOD_RES (80)..(80): Selenocysteine
  MOD_RES (86)..(86): Selenocysteine
  MOD_RES (103)..(103): Selenocysteine
  MOD_RES (106)..(106): Selenocysteine
  MOD_RES (123)..(123): Selenocysteine
  MOD_RES (126)..(126): Selenocysteine
  MOD_RES (142)..(142): Selenocysteine
MAEIHXPYSSLKKLLSLLNGFVAVSGIILVGLGIGGKCGGASLXNVLGLSSAYLLHVGNLCLVMGCIXVLLGCAGWYGAXKESRGXLLFCILSMVIVLIMEVXAAXVVLLFFPIVGDVALEHXFVXLRKNYRGYNEPDDYSXQWNLVMEKGLSKYFFSSL

SEQ ID NO: 28791 - protein, 244 aa, Homo sapiens
  MOD_RES (6)..(6): Selenocysteine
  MOD_RES (44)..(44): Selenocysteine
  MOD_RES (68)..(68): Selenocysteine
  MOD_RES (80)..(80): Selenocysteine
  MOD_RES (86)..(86): Selenocysteine
  MOD_RES (103)..(103): Selenocysteine
  MOD_RES (106)..(106): Selenocysteine
  MOD_RES (123)..(123): Selenocysteine
  MOD_RES (126)..(126): Selenocysteine
  MOD_RES (142)..(142): Selenocysteine
  MOD_RES (160)..(160): Selenocysteine
  MOD_RES (170)..(171): Selenocysteine
  MOD_RES (174)..(174): Selenocysteine
  MOD_RES (211)..(211): Selenocysteine
  MOD_RES (213)..(213): Selenocysteine
  MOD_RES (217)..(217): Selenocysteine
  MOD_RES (236)..(236): Selenocysteine
MAEIHXPYSSLKKLLSLLNGFVAVSGIILVGLGIGGKCGGASLXNVLGLSSAYLLHVGNLCLVMGCIXVLLGCAGWYGAXKESRGXLLFCILSMVIVLIMEVXAAXVVLLFFPIVGDVALEHXFVXLRKNYRGYNEPDDYSXQWNLVMEKLKCCGVNNYXDFSGSSFEMXXGHXYPRSCCKSIGSVSCDGRDVSPNVIHQKGCFHKLLKIXKXQSFXLSGSSLGAAVIQLPGILAXLLLFIKLG

SEQ ID NO: 28792 - protein, 245 aa, Homo sapiens
  MOD_RES (6)..(6): Selenocysteine
  MOD_RES (44)..(44): Selenocysteine
  MOD_RES (68)..(68): Selenocysteine
  MOD_RES (80)..(80): Selenocysteine
  MOD_RES (86)..(86): Selenocysteine
  MOD_RES (103)..(103): Selenocysteine
  MOD_RES (106)..(106): Selenocysteine
  MOD_RES (123)..(123): Selenocysteine
  MOD_RES (126)..(126): Selenocysteine
  MOD_RES (142)..(142): Selenocysteine
  MOD_RES (160)..(160): Selenocysteine
  MOD_RES (170)..(171): Selenocysteine
  MOD_RES (174)..(174): Selenocysteine
  MOD_RES (211)..(211): Selenocysteine
  MOD_RES (213)..(213): Selenocysteine
  MOD_RES (217)..(217): Selenocysteine
MAEIHXPYSSLKKLLSLLNGFVAVSGIILVGLGIGGKCGGASLXNVLGLSSAYLLHVGNLCLVMGCIXVLLGCAGWYGAXKESRGXLLFCILSMVIVLIMEVXAAXVVLLFFPIVGDVALEHXFVXLRKNYRGYNEPDDYSXQWNLVMEKLKCCGVNNYXDFSGSSFEMXXGHXYPRSCCKSIGSVSCDGRDVSPNVIHQKGCFHKLLKIXKXQSFXLSGSSLGAAVIQRWGSRYVAQAGLELLA

SEQ ID NO: 28793 - protein, 219 aa, Homo sapiens
  MOD_RES (6)..(6): Selenocysteine
  MOD_RES (44)..(44): Selenocysteine
  MOD_RES (68)..(68): Selenocysteine
  MOD_RES (80)..(80): Selenocysteine
  MOD_RES (86)..(86): Selenocysteine
  MOD_RES (98)..(98): Selenocysteine
  MOD_RES (101)..(101): Selenocysteine
  MOD_RES (117)..(117): Selenocysteine
  MOD_RES (135)..(135): Selenocysteine
  MOD_RES (145)..(146): Selenocysteine
  MOD_RES (149)..(149): Selenocysteine
  MOD_RES (186)..(186): Selenocysteine
  MOD_RES (188)..(188): Selenocysteine
  MOD_RES (192)..(192): Selenocysteine
  MOD_RES (211)..(211): Selenocysteine
MAEIHXPYSSLKKLLSLLNGFVAVSGIILVGLGIGGKCGGASLXNVLGLSSAYLLHVGNLCLVMGCIXVLLGCAGWYGAXKESRGXLLFVGDVALEHXFVXLRKNYRGYNEPDDYSXQWNLVMEKLKCCGVNNYXDFSGSSFEMXXGHXYPRSCCKSIGSVSCDGRDVSPNVIHQKGCFHKLLKIXKXQSFXLSGSSLGAAVIQLPGILAXLLLFIKLG

SEQ ID NO: 28794 - protein, 38 aa, Homo sapiens
  MOD_RES (19)..(19): Selenocysteine
RDVSPNVIHQKKLRLGEGXSLVQDHRALAELEFEAPLA

SEQ ID NO: 28795 - protein, 188 aa, Homo sapiens
  MOD_RES (44)..(44): Selenocysteine
  MOD_RES (92)..(92): Selenocysteine
  MOD_RES (112)..(112): Selenocysteine
MPGKHQHFQEPEVGCCGKYFLFGFNIVFWFSVFLGLIFFLELAXGILAFVFKDWIRDQLNLFINNNVKAYRDDIDLQNLIDFAQEYEDVLNXQCGYDVRLKLELEQQGFIHXKGCVGQFEKWLQDNLIVVAGVFMGIALLQVPLWPHVPLPLPGPPSLSPHLSSVLQIFGICLAQNLVSDIKAVKANW

SEQ ID NO: 28796 - protein, 309 aa, Homo sapiens
  MOD_RES (56)..(56): Selenocysteine
  MOD_RES (90)..(90): Selenocysteine
  MOD_RES (150)..(150): Selenocysteine
  MOD_RES (177)..(177): Selenocysteine
  MOD_RES (200)..(200): Selenocysteine
  MOD_RES (263)..(263): Selenocysteine
  MOD_RES (265)..(265): Selenocysteine
  MOD_RES (272)..(272): Selenocysteine
  MOD_RES (281)..(281): Selenocysteine
  MOD_RES (305)..(305): Selenocysteine
MPGKHQHFQEPEVGCCGKYFLFGFNIVFWVLGALFLAIGLWAWGEKGVLSNISALXDLGGLDPVWLFVVVGGVMSVLGFAGCIGALRENXFLLKFDWIRDQLNLFINNNVKAYRDDIDLQNLIDFAQEYWSCCGARGPNDWNLNIYFNCXDLNPSRERCGVPFSCCVRDPAEDVLNXQCGYDVRLKLVRGELEQQGFIHXKGCVGQFEKWLQDNLIVVAGVFMGIALLQIFGICLAQNLVSDIKAVKANWSKWNDDFENHWLXPXISEVLSXAGPQQNSLXGAPGPAPPSRHVFFGLGGLYPEPXFKNW

SEQ ID NO: 28797 - protein, 263 aa, Homo sapiens
  MOD_RES (56)..(56): Selenocysteine
  MOD_RES (90)..(90): Selenocysteine
  MOD_RES (110)..(110): Selenocysteine
  MOD_RES (173)..(173): Selenocysteine
  MOD_RES (200)..(200): Selenocysteine
  MOD_RES (220)..(220): Selenocysteine
MPGKHQHFQEPEVGCCGKYFLFGFNIVFWVLGALFLAIGLWAWGEKGVLSNISALXDLGGLDPVWLFVVVGGVMSVLGFAGCIGALRENXFLLKFFSVFLGLIFFLELAXGILAFVFKDWIRDQLNLFINNNVKAYRDDIDLQNLIDFAQEYWSCCGARGPNDWNLNIYFNCXDLNPSRERCGVPFSCCVRDPAEDVLNXQCGYDVRLKLELEQQGFIHXKGCVGQFEKWLQDNLIVVAGVFMGIALLQIFGICLAQNLEQME

SEQ ID NO: 28798 - protein, 329 aa, Homo sapiens
  MOD_RES (56)..(56): Selenocysteine
  MOD_RES (90)..(90): Selenocysteine
  MOD_RES (110)..(110): Selenocysteine
  MOD_RES (173)..(173): Selenocysteine
  MOD_RES (200)..(200): Selenocysteine
  MOD_RES (220)..(220): Selenocysteine
  MOD_RES (283)..(283): Selenocysteine
  MOD_RES (285)..(285): Selenocysteine
  MOD_RES (292)..(292): Selenocysteine
  MOD_RES (301)..(301): Selenocysteine
  MOD_RES (325)..(325): Selenocysteine
MPGKHQHFQEPEVGCCGKYFLFGFNIVFWVLGALFLAIGLWAWGEKGVLSNISALXDLGGLDPVWLFVVVGGVMSVLGFAGCIGALRENXFLLKFFSVFLGLIFFLELAXGILAFVFKDWIRDQLNLFINNNVKAYRDDIDLQNLIDFAQEYWSCCGARGPNDWNLNIYFNCXDLNPSRERCGVPFSCCVRDPAEDVLNXQCGYDVRLKLELEQQGFIHXKGCVGQFEKWLQDNLIVVAGVFMGIALLQIFGICLAQNLVSDIKAVKANWSKWNDDFENHWLXPXISEVLSXAGPQQNSLXGAPGPAPPSRHVFFGLGGLYPEPXFKNW

SEQ ID NO: 28799 - protein, 332 aa, Homo sapiens
  MOD_RES (56)..(56): Selenocysteine
  MOD_RES (90)..(90): Selenocysteine
  MOD_RES (110)..(110): Selenocysteine
  MOD_RES (173)..(173): Selenocysteine
  MOD_RES (200)..(200): Selenocysteine
  MOD_RES (223)..(223): Selenocysteine
  MOD_RES (286)..(286): Selenocysteine
  MOD_RES (288)..(288): Selenocysteine
  MOD_RES (295)..(295): Selenocysteine
  MOD_RES (304)..(304): Selenocysteine
  MOD_RES (328)..(328): Selenocysteine
MPGKHQHFQEPEVGCCGKYFLFGFNIVFWVLGALFLAIGLWAWGEKGVLSNISALXDLGGLDPVWLFVVVGGVMSVLGFAGCIGALRENXFLLKFFSVFLGLIFFLELAXGILAFVFKDWIRDQLNLFINNNVKAYRDDIDLQNLIDFAQEYWSCCGARGPNDWNLNIYFNCXDLNPSRERCGVPFSCCVRDPAEDVLNXQCGYDVRLKLVRGELEQQGFIHXKGCVGQFEKWLQDNLIVVAGVFMGIALLQIFGICLAQNLVSDIKAVKANWSKWNDDFENHWLXPXISEVLSXAGPQQNSLXGAPGPAPPSRHVFFGLGGLYPEPXFKNW

SEQ ID NO: 28800 - protein, 257 aa, Homo sapiens
  MOD_RES (56)..(56): Selenocysteine
  MOD_RES (90)..(90): Selenocysteine
  MOD_RES (98)..(98): Selenocysteine
  MOD_RES (161)..(161): Selenocysteine
  MOD_RES (188)..(188): Selenocysteine
  MOD_RES (208)..(208): Selenocysteine
MPGKHQHFQEPEVGCCGKYFLFGFNIVFWVLGALFLAIGLWAWGEKGVLSNISALXDLGGLDPVWLFVVVGGVMSVLGFAGCIGALRENXFLLKFLAXGILAFVFKDWIRDQLNLFINNNVKAYRDDIDLQNLIDFAQEYWSCCGARGPNDWNLNIYFNCXDLNPSRERCGVPFSCCVRDPAEDVLNXQCGYDVRLKLELEQQGFIHXKGCVGQFEKWLQDNLIVVAGVFMGIALLQIFGICLAQNLVSDIKAVKAN

SEQ ID NO: 28801 - protein, 58 aa, Homo sapiens
  MOD_RES (55)..(55): Selenocysteine
MPGKHQHFQEPEVGCCGKYFLFGFNIVFWVSAGCWEPCSWLSASGPGVRRAFSRXSQR

SEQ ID NO: 28802 - protein, 203 aa, Homo sapiens
  MOD_RES (1)..(1): Any amino acid
  MOD_RES (43)..(43): Selenocysteine
  MOD_RES (106)..(106): Selenocysteine
  MOD_RES (133)..(133): Selenocysteine
  MOD_RES (153)..(153): Selenocysteine
XGKHQHFQEPEVGCCGKYFLFGFNIVFWFSVFLGLIFFLELAXGILAFVFKDWIRDQLNLFINNNVKAYRDDIDLQNLIDFAQEYWSCCGARGPNDWNLNIYFNCXDLNPSRERCGVPFSCCVRDPAEDVLNXQCGYDVRLKLELEQQGFIHXKGCVGQFEKWLQDNLIVVAGVFMGIALLQIFGICLAQNLVSDIKAVKANW

SEQ ID NO: 28803 - protein, 138 aa, Homo sapiens
  MOD_RES (48)..(48): Selenocysteine
  MOD_RES (53)..(53): Selenocysteine
  MOD_RES (57)..(57): Selenocysteine
  MOD_RES (66)..(66): Selenocysteine
  MOD_RES (72)..(72): Selenocysteine
  MOD_RES (79)..(79): Selenocysteine
  MOD_RES (101)..(101): Selenocysteine
MEGDCLSCMKYLMFVFNFFIFFFLFILIIFLAELSAAILAFIFRENLXREFFXKELXKHYQGNNDXDVFSAXWNSVMIXFGCCGVNGPEDFKFASVFRLLXLDSEEVPEACCRREPQSRDGVLLSREECLLGRSLFLN

SEQ ID NO: 28804 - protein, 79 aa, Homo sapiens
  MOD_RES (39)..(39): Selenocysteine
  MOD_RES (53)..(53): Selenocysteine
MEGDCLSCMKYLMFVFNFFIFLGGACLLAIGIWVMVDPXGFREIVAANPLLLXGAYILLAMGGLLFLLGFLGCCGAVRE

SEQ ID NO: 28805 - protein, 248 aa, Homo sapiens
  MOD_RES (39)..(39): Selenocysteine
  MOD_RES (53)..(53): Selenocysteine
  MOD_RES (113)..(113): Selenocysteine
  MOD_RES (118)..(118): Selenocysteine
  MOD_RES (122)..(122): Selenocysteine
  MOD_RES (131)..(131): Selenocysteine
  MOD_RES (137)..(137): Selenocysteine
  MOD_RES (144)..(144): Selenocysteine
  MOD_RES (166)..(166): Selenocysteine
  MOD_RES (209)..(209): Selenocysteine
  MOD_RES (214)..(214): Selenocysteine
  MOD_RES (217)..(217): Selenocysteine
MEGDCLSCMKYLMFVFNFFIFLGGACLLAIGIWVMVDPXGFREIVAANPLLLXGAYILLAMGGLLFLLGFLGCCGAVRENKCLLLFFFLFILIIFLAELSAAILAFIFRENLXREFFXKELXKHYQGNNDXDVFSAXWNSVMIXFGCCGVNGPEDFKFASVFRLLXLDSEEVPEACCRREPQSRDGVLLSREECLLGRSLFLNKQGCYXVILNXFEXYVYLAGALAIGVLAIELFAMIFAMCLFRGIQ

SEQ ID NO: 28806 - protein, 146 aa, Homo sapiens
  MOD_RES (39)..(39): Selenocysteine
  MOD_RES (53)..(53): Selenocysteine
  MOD_RES (113)..(113): Selenocysteine
  MOD_RES (118)..(118): Selenocysteine
  MOD_RES (122)..(122): Selenocysteine
  MOD_RES (131)..(131): Selenocysteine
  MOD_RES (137)..(137): Selenocysteine
  MOD_RES (144)..(144): Selenocysteine
MEGDCLSCMKYLMFVFNFFIFLGGACLLAIGIWVMVDPXGFREIVAANPLLLXGAYILLAMGGLLFLLGFLGCCGAVRENKCLLLFFFLFILIIFLAELSAAILAFIFRENLXREFFXKELXKHYQGNNDXDVFSAXWNSVMIXVS

SEQ ID NO: 28807 - protein, 76 aa, Homo sapiens
  MOD_RES (10)..(10): Selenocysteine
  MOD_RES (49)..(49): Selenocysteine
  MOD_RES (63)..(63): Selenocysteine
MPEELPRWSXMEGDCLSCMKYLMFVFNFFIFLGGACLLAIGIWVMVDPXGFREIVAANPLLLXGAYILLAMGGLLF

SEQ ID NO: 28808 - protein, 157 aa, Homo sapiens
  MOD_RES (10)..(10): Selenocysteine
  MOD_RES (49)..(49): Selenocysteine
  MOD_RES (63)..(63): Selenocysteine
  MOD_RES (123)..(123): Selenocysteine
  MOD_RES (128)..(128): Selenocysteine
  MOD_RES (132)..(132): Selenocysteine
  MOD_RES (141)..(141): Selenocysteine
  MOD_RES (147)..(147): Selenocysteine
  MOD_RES (154)..(154): Selenocysteine
MPEELPRWSXMEGDCLSCMKYLMFVFNFFIFLGGACLLAIGIWVMVDPXGFREIVAANPLLLXGAYILLAMGGLLFLLGFLGCCGAVRENKCLLLFFFLFILIIFLAELSAAILAFIFRENLXREFFXKELXKHYQGNNDXDVFSAXWNSVMIXVSD

SEQ ID NO: 28809 - protein, 271 aa, Homo sapiens
  MOD_RES (1)..(1): Any amino acid
  MOD_RES (4)..(4): Selenocysteine
  MOD_RES (43)..(43): Selenocysteine
  MOD_RES (57)..(57): Selenocysteine
  MOD_RES (117)..(117): Selenocysteine
  MOD_RES (122)..(122): Selenocysteine
  MOD_RES (126)..(126): Selenocysteine
  MOD_RES (135)..(135): Selenocysteine
  MOD_RES (141)..(141): Selenocysteine
  MOD_RES (148)..(148): Selenocysteine
  MOD_RES (170)..(170): Selenocysteine
  MOD_RES (213)..(213): Selenocysteine
  MOD_RES (218)..(218): Selenocysteine
  MOD_RES (221)..(221): Selenocysteine
  MOD_RES (248)..(248): Selenocysteine
  MOD_RES (266)..(266): Selenocysteine
  MOD_RES (270)..(270): Selenocysteine
XWSXMEGDCLSCMKYLMFVFNFFIFLGGACLLAIGIWVMVDPXGFREIVAANPLLLXGAYILLAMGGLLFLLGFLGCCGAVRENKCLLLFFFLFILIIFLAELSAAILAFIFRENLXREFFXKELXKHYQGNNDXDVFSAXWNSVMIXFGCCGVNGPEDFKFASVFRLLXLDSEEVPEACCRREPQSRDGVLLSREECLLGRSLFLNKQGCYXVILNXFEXYVYLAGALAIGVLAIEEERAHSVSQAXGILYQLPASPQAFQSPGXLGAXA

SEQ ID NO: 28810 - protein, 88 aa, Homo sapiens
  MOD_RES (7)..(7): Selenocysteine
  MOD_RES (44)..(44): Selenocysteine
  MOD_RES (67)..(67): Selenocysteine
MLRNNKXIIIKYFLNLINGAFLVLGLLFMGFGAWLLLDRNNFLXAFDENNHFIVPISQILIGMGSSXVLFCLLGYIGIHNEIRWLLIV

SEQ ID NO: 28811 - protein, 159 aa, Homo sapiens
  MOD_RES (7)..(7): Selenocysteine
  MOD_RES (44)..(44): Selenocysteine
  MOD_RES (67)..(67): Selenocysteine
  MOD_RES (95)..(95): Selenocysteine
  MOD_RES (102)..(102): Selenocysteine
  MOD_RES (128)..(128): Selenocysteine
  MOD_RES (143)..(143): Selenocysteine
  MOD_RES (157)..(157): Selenocysteine
MLRNNKXIIIKYFLNLINGAFLVLGLLFMGFGAWLLLDRNNFLXAFDENNHFIVPISQILIGMGSSXVLFCLLGYIGIHNEIRWLLIVVESRSVXRLECSGXISAHCNLHLPDSSDSPASDSEVAGIXVCSIDNMDLCCSGCXFSIHHHKERGGSAXMA

SEQ ID NO: 28812 - protein, 248 aa, Homo sapiens
  MOD_RES (7)..(7): Selenocysteine
  MOD_RES (44)..(44): Selenocysteine
  MOD_RES (67)..(67): Selenocysteine
  MOD_RES (94)..(94): Selenocysteine
  MOD_RES (96)..(96): Selenocysteine
  MOD_RES (109)..(109): Selenocysteine
  MOD_RES (139)..(139): Selenocysteine
  MOD_RES (142)..(142): Selenocysteine
  MOD_RES (150)..(150): Selenocysteine
  MOD_RES (160)..(160): Selenocysteine
  MOD_RES (179)..(179): Selenocysteine
  MOD_RES (182)..(182): Selenocysteine
  MOD_RES (195)..(195): Selenocysteine
  MOD_RES (214)..(214): Selenocysteine
  MOD_RES (224)..(224): Selenocysteine
  MOD_RES (233)..(233): Selenocysteine
MLRNNKXIIIKYFLNLINGAFLVLGLLFMGFGAWLLLDRNNFLXAFDENNHFIVPISQILIGMGSSXVLFCLLGYIGIHNEIRWLLIVYAVLIXWXFAVQVVLSAFIIXKKEEVQQLWHDKIDFVISEYGSKDKPEDIXKWXILNALQKXLQCCGQHNYXDWIKNKNKENSGQVPCSCXKSXLRKWFCDEPLNAXYLEGCENKISAWYNVNVLXLIGINFGLLXSEVFQVSLXVCFFKNIKNIIHAEM

SEQ ID NO: 28813 - protein, 53 aa, Homo sapiens
  MOD_RES (7)..(7): Selenocysteine
  MOD_RES (44)..(44): Selenocysteine
MLRNNKXIIIKYFLNLINGAFLVLGLLFMGFGAWLLLDRNNFLXAFGGVSLCH

SEQ ID NO: 28814 - protein, 69 aa, Homo sapiens
  MOD_RES (1)..(1): Any amino acid
  MOD_RES (9)..(9): Selenocysteine
  MOD_RES (28)..(28): Selenocysteine
  MOD_RES (31)..(31): Selenocysteine
  MOD_RES (44)..(44): Selenocysteine
  MOD_RES (54)..(54): Selenocysteine
XCCGQHNYXDWIKNKNKENSGQVPCSCXKSXLRKWFCDEPLNAXYLEVFQVSLXVCFFKNIKNIIHAEM

SEQ ID NO: 28815 - protein, 187 aa, Homo sapiens
  MOD_RES (87)..(87): Selenocysteine
  MOD_RES (98)..(99): Selenocysteine
  MOD_RES (116)..(116): Selenocysteine
  MOD_RES (135)..(135): Selenocysteine
  MOD_RES (138)..(138): Selenocysteine
  MOD_RES (142)..(142): Selenocysteine
  MOD_RES (157)..(157): Selenocysteine
GLRCIKYLLLGFNLLFWLAGSAVIAFGLWFRFGGAIKELSSEDKSPEYFYVGLYVLVGAGALMMAVGFFGCCGAMRESQCVLGSFFXCLLVIFAAEVXXGVFAFIGKGVAIRHVQXMYEEAYNDYLKDRGKGNGXLIXFHSXFQCCGKESSEQVQPXCPKELLGHKIFGMIFSMVLCCAIRNSRDVI

SEQ ID NO: 28816 - protein, 196 aa, Homo sapiens
  MOD_RES (97)..(97): Selenocysteine
  MOD_RES (116)..(116): Selenocysteine
  MOD_RES (119)..(119): Selenocysteine
  MOD_RES (123)..(123): Selenocysteine
  MOD_RES (138)..(138): Selenocysteine
  MOD_RES (155)..(155): Selenocysteine
  MOD_RES (175)..(175): Selenocysteine
MGRFRGGLRCIKYLLLGFNLLFWLAGSAVIAFGLWFRFGGAIKELSSEDKSPEYFYVGLYVLVGAGALMMAVGFFGCCGAMRESQCVLGSAIRHVQXMYEEAYNDYLKDRGKGNGXLIXFHSXFQCCGKESSEQVQPXCPKELLGHKNCIDEIEXIISVKLQLIGIVGIGIAGLXIFGMIFSMVLCCAIRNSRDVI

SEQ ID NO: 28817 - protein, 221 aa, Homo sapiens
  MOD_RES (93)..(93): Selenocysteine
  MOD_RES (104)..(105): Selenocysteine
  MOD_RES (122)..(122): Selenocysteine
  MOD_RES (141)..(141): Selenocysteine
  MOD_RES (144)..(144): Selenocysteine
  MOD_RES (148)..(148): Selenocysteine
  MOD_RES (163)..(163): Selenocysteine
  MOD_RES (180)..(180): Selenocysteine
  MOD_RES (200)..(200): Selenocysteine
MGRFRGGLRCIKYLLLGFNLLFWLAGSAVIAFGLWFRFGGAIKELSSEDKSPEYFYVGLYVLVGAGALMMAVGFFGCCGAMRESQCVLGSFFXCLLVIFAAEVXXGVFAFIGKGVAIRHVQXMYEEAYNDYLKDRGKGNGXLIXFHSXFQCCGKESSEQVQPXCPKELLGHKNCIDEIEXIISVKLQLIGIVGIGIAGLXIFGMIFSMVLCCAIRNSRDVI

SEQ ID NO: 28818 - protein, 189 aa, Homo sapiens
  MOD_RES (7)..(7): Selenocysteine
  MOD_RES (11)..(11): Selenocysteine
  MOD_RES (32)..(32): Selenocysteine
  MOD_RES (61)..(61): Selenocysteine
  MOD_RES (65)..(65): Selenocysteine
  MOD_RES (95)..(95): Selenocysteine
  MOD_RES (101)..(101): Selenocysteine
  MOD_RES (114)..(114): Selenocysteine
  MOD_RES (184)..(184): Selenocysteine
  MOD_RES (187)..(187): Selenocysteine
MGQCGIXSSKXVLVFLNLIFWFVIILLLVFVXEVVVVVLGYVYRAKVENEVDRSIQKVYKXYNGXNPDAASRAIDYVQRQLHCCGIHNYSDWENXDWFKEXKNQSVPLSCCREXASNCNGSLAHPSDLYAEGCEALVVKKLQEIMMHVIWAALAFAAIQLLGMLCACIVLCRRSRDPAYELLIXGGXYA

SEQ ID NO: 28819 - protein, 253 aa, Homo sapiens
  MOD_RES (7)..(7): Selenocysteine
  MOD_RES (11)..(11): Selenocysteine
  MOD_RES (37)..(37): Selenocysteine
  MOD_RES (50)..(50): Selenocysteine
  MOD_RES (75)..(75): Selenocysteine
  MOD_RES (85)..(85): Selenocysteine
  MOD_RES (96)..(96): Selenocysteine
  MOD_RES (125)..(125): Selenocysteine
  MOD_RES (129)..(129): Selenocysteine
  MOD_RES (159)..(159): Selenocysteine
  MOD_RES (165)..(165): Selenocysteine
  MOD_RES (178)..(178): Selenocysteine
  MOD_RES (248)..(248): Selenocysteine
  MOD_RES (251)..(251): Selenocysteine
MGQCGIXSSKXVLVFLNLIFWGAAGILCYVGAYVFIXYDDYDHFFEDVYXLIPAVVIIAVGALLFIIGLIGCCAXIRESRCGLAXFVIILLLVFVXEVVVVVLGYVYRAKVENEVDRSIQKVYKXYNGXNPDAASRAIDYVQRQLHCCGIHNYSDWENXDWFKEXKNQSVPLSCCREXASNCNGSLAHPSDLYAEGCEALVVKKLQEIMMHVIWAALAFAAIQLLGMLCACIVLCRRSRDPAYELLIXGGXYA

SEQ ID NO: 28820 - protein, 228 aa, Homo sapiens
  MOD_RES (7)..(7): Selenocysteine
  MOD_RES (11)..(11): Selenocysteine
  MOD_RES (37)..(37): Selenocysteine
  MOD_RES (50)..(50): Selenocysteine
  MOD_RES (75)..(75): Selenocysteine
  MOD_RES (85)..(85): Selenocysteine
  MOD_RES (100)..(100): Selenocysteine
  MOD_RES (104)..(104): Selenocysteine
  MOD_RES (134)..(134): Selenocysteine
  MOD_RES (140)..(140): Selenocysteine
  MOD_RES (153)..(153): Selenocysteine
  MOD_RES (223)..(223): Selenocysteine
  MOD_RES (226)..(226): Selenocysteine
MGQCGIXSSKXVLVFLNLIFWGAAGILCYVGAYVFIXYDDYDHFFEDVYXLIPAVVIIAVGALLFIIGLIGCCAXIRESRCGLAXVENEVDRSIQKVYKXYNGXNPDAASRAIDYVQRQLHCCGIHNYSDWENXDWFKEXKNQSVPLSCCREXASNCNGSLAHPSDLYAEGCEALVVKKLQEIMMHVIWAALAFAAIQLLGMLCACIVLCRRSRDPAYELLIXGGXYA

SEQ ID NO: 28821 - protein, 164 aa, Homo sapiens
  MOD_RES (7)..(7): Selenocysteine
  MOD_RES (11)..(11): Selenocysteine
  MOD_RES (36)..(36): Selenocysteine
  MOD_RES (40)..(40): Selenocysteine
  MOD_RES (70)..(70): Selenocysteine
  MOD_RES (76)..(76): Selenocysteine
  MOD_RES (89)..(89): Selenocysteine
  MOD_RES (159)..(159): Selenocysteine
  MOD_RES (162)..(162): Selenocysteine
MGQCGIXSSKXVLVFLNLIFWVENEVDRSIQKVYKXYNGXNPDAASRAIDYVQRQLHCCGIHNYSDWENXDWFKEXKNQSVPLSCCREXASNCNGSLAHPSDLYAEGCEALVVKKLQEIMMHVIWAALAFAAIQLLGMLCACIVLCRRSRDPAYELLIXGGXYA

SEQ ID NO: 28822 - protein, 45 aa, Homo sapiens
  MOD_RES (40)..(40): Selenocysteine
  MOD_RES (43)..(43): Selenocysteine
MMHVIWAALAFAAIQLLGMLCACIVLCRRSRDPAYELLIXGGXYA

SEQ ID NO: 28823 - protein, 72 aa, Homo sapiens
  MOD_RES (27)..(27): Selenocysteine
  MOD_RES (41)..(41): Selenocysteine
  MOD_RES (58)..(59): Selenocysteine
  MOD_RES (69)..(69): Selenocysteine
MIILGLVFIFQFVISCSCLAINRSKQXDVINASWWVMSNKXRDELERSFDCCGLFNLXXLYQQDYDFCXAIC

SEQ ID NO: 28824 - protein, 86 aa, Homo sapiens
  MOD_RES (27)..(27): Selenocysteine
  MOD_RES (41)..(41): Selenocysteine
  MOD_RES (58)..(59): Selenocysteine
  MOD_RES (69)..(69): Selenocysteine
  MOD_RES (78)..(78): Selenocysteine
MIILGLVFIFQFVISCSCLAINRSKQXDVINASWWVMSNKXRDELERSFDCCGLFNLXXLYQQDYDFCXAICKSQSPXCQMCGEKF

SEQ ID NO: 28825 - protein, 126 aa, Homo sapiens
  MOD_RES (72)..(72): Selenocysteine
  MOD_RES (101)..(101): Selenocysteine
MVCGGFACSKNALCALNVVYMLVSLLLIGVAAWGKGLGLVSSIHIIGGVIAVGVFLLLIAVAGLICKSQSPXCQMCGEKFLKHSDEALKILGGVGLFFSFXEILGVWLAMRFRNQKDPRANPSAFL

SEQ ID NO: 28826 - protein, 128 aa, Homo sapiens
  MOD_RES (110)..(110): Selenocysteine
MVCGGFACSKNALCALNVVYMLVSLLLIGVAAWGKGLGLVSSIHIIGGVIAVGVFLLLIAVAGLVGAVNHHQVLLFFYMIILGLVFIFQFVISCSCLAINRSKQIILRCXASGLLGYLLPLGCLVNFP

SEQ ID NO: 28827 - protein, 113 aa, Homo sapiens
MVCGGFACSKNALCALNVVYMLVSLLLIGVAAWGKGLGLVSSIHIIGGVIAVGVFLLLIAVAGLVGAVNHHQVLLFFYMIILGLVFIFQFVISCSCLAINRSKQMSSMLLGGS

SEQ ID NO: 28828 - protein, 210 aa, Homo sapiens
  MOD_RES (105)..(105): Selenocysteine
  MOD_RES (119)..(119): Selenocysteine
  MOD_RES (136)..(137): Selenocysteine
  MOD_RES (147)..(147): Selenocysteine
  MOD_RES (156)..(156): Selenocysteine
  MOD_RES (185)..(185): Selenocysteine
MVCGGFACSKNALCALNVVYMLVSLLLIGVAAWGKGLGLVSSIHIIGGVIAVGVFLLLIAVAGLVGAVNHHQVLLFFYMIILGLVFIFQFVISCSCLAINRSKQXDVINASWWVMSNKXRDELERSFDCCGLFNLXXLYQQDYDFCXAICKSQSPXCQMCGEKFLKHSDEALKILGGVGLFFSFXEILGVWLAMRFRNQKDPRANPSAFL

SEQ ID NO: 28829 - protein, 127 aa, Homo sapiens
  MOD_RES (22)..(22): Selenocysteine
  MOD_RES (36)..(36): Selenocysteine
  MOD_RES (53)..(54): Selenocysteine
  MOD_RES (64)..(64): Selenocysteine
  MOD_RES (73)..(73): Selenocysteine
  MOD_RES (102)..(102): Selenocysteine
MVCGGFACSKNALCALNVVYMXDVINASWWVMSNKXRDELERSFDCCGLFNLXXLYQQDYDFCXAICKSQSPXCQMCGEKFLKHSDEALKILGGVGLFFSFXEILGVWLAMRFRNQKDPRANPSAFL

SEQ ID NO: 28830 - protein, 258 aa, Homo sapiens
  MOD_RES (17)..(17): Selenocysteine
  MOD_RES (30)..(30): Selenocysteine
  MOD_RES (33)..(33): Selenocysteine
  MOD_RES (35)..(35): Selenocysteine
  MOD_RES (73)..(73): Selenocysteine
  MOD_RES (83)..(83): Selenocysteine
  MOD_RES (117)..(117): Selenocysteine
  MOD_RES (126)..(126): Selenocysteine
  MOD_RES (138)..(138): Selenocysteine
  MOD_RES (168)..(168): Selenocysteine
  MOD_RES (193)..(193): Selenocysteine
  MOD_RES (202)..(202): Selenocysteine
  MOD_RES (209)..(209): Selenocysteine
  MOD_RES (221)..(221): Selenocysteine
  MOD_RES (240)..(240): Selenocysteine
  MOD_RES (242)..(242): Selenocysteine
MGPWSRVRVAKCQMLVXCFFILLLGLSVAXMVXLXYFGAHFAVIRRASLEKNPYQAVHQWAFSAGLSLVGLLXLGAVLSAAAXVREAQGLMAGGFLCFSLAFCAQVQVVFWRLHSPXQVEDAMLDXYDLVYEQAMKGXSHVRRQELAAIQDVFLCCGKKSPFSRLGSXEADLCQGEEAAREDCLQGIRSFLRXHQQVASSLXSIGLALXLGPQGQIHPDPXSMWPPAPGAQPLEMLPGWXHXLSPLRSSCYWSKRMLG

SEQ ID NO: 28831 - protein, 320 aa, Homo sapiens
  MOD_RES (17)..(17): Selenocysteine
  MOD_RES (30)..(30): Selenocysteine
  MOD_RES (33)..(33): Selenocysteine
  MOD_RES (35)..(35): Selenocysteine
  MOD_RES (73)..(73): Selenocysteine
  MOD_RES (83)..(83): Selenocysteine
  MOD_RES (117)..(117): Selenocysteine
  MOD_RES (126)..(126): Selenocysteine
  MOD_RES (138)..(138): Selenocysteine
  MOD_RES (168)..(168): Selenocysteine
  MOD_RES (193)..(193): Selenocysteine
  MOD_RES (202)..(202): Selenocysteine
  MOD_RES (209)..(209): Selenocysteine
  MOD_RES (236)..(236): Selenocysteine
  MOD_RES (238)..(238): Selenocysteine
  MOD_RES (260)..(260): Selenocysteine
MGPWSRVRVAKCQMLVXCFFILLLGLSVAXMVXLXYFGAHFAVIRRASLEKNPYQAVHQWAFSAGLSLVGLLXLGAVLSAAAXVREAQGLMAGGFLCFSLAFCAQVQVVFWRLHSPXQVEDAMLDXYDLVYEQAMKGXSHVRRQELAAIQDVFLCCGKKSPFSRLGSXEADLCQGEEAAREDCLQGIRSFLRXHQQVASSLXSIGLALXVSALLFSSFLWFAIRCGCSLDRKGKYXLXPRACGRQPQEPSLLRCSQGGPXHCLHSEAVAIGPRGCSGSLRWLQESDAAPLPLSCHLAAHRALQGRSRGGLSGCPERGLSD

SEQ ID NO: 28832 - protein, 253 aa, Homo sapiens
  MOD_RES (17)..(17): Selenocysteine
  MOD_RES (30)..(30): Selenocysteine
  MOD_RES (33)..(33): Selenocysteine
  MOD_RES (35)..(35): Selenocysteine
  MOD_RES (73)..(73): Selenocysteine
  MOD_RES (83)..(83): Selenocysteine
  MOD_RES (117)..(117): Selenocysteine
  MOD_RES (126)..(126): Selenocysteine
  MOD_RES (138)..(138): Selenocysteine
  MOD_RES (168)..(168): Selenocysteine
  MOD_RES (193)..(193): Selenocysteine
  MOD_RES (202)..(202): Selenocysteine
  MOD_RES (209)..(209): Selenocysteine
  MOD_RES (236)..(236): Selenocysteine
  MOD_RES (238)..(238): Selenocysteine
MGPWSRVRVAKCQMLVXCFFILLLGLSVAXMVXLXYFGAHFAVIRRASLEKNPYQAVHQWAFSAGLSLVGLLXLGAVLSAAAXVREAQGLMAGGFLCFSLAFCAQVQVVFWRLHSPXQVEDAMLDXYDLVYEQAMKGXSHVRRQELAAIQDVFLCCGKKSPFSRLGSXEADLCQGEEAAREDCLQGIRSFLRXHQQVASSLXSIGLALXVSALLFSSFLWFAIRCGCSLDRKGKYXLXPRSPGQKSRWAQWVP

SEQ ID NO: 28833 - protein, 137 aa, Homo sapiens
  MOD_RES (17)..(17): Selenocysteine
  MOD_RES (24)..(24): Selenocysteine
  MOD_RES (107)..(107): Selenocysteine
  MOD_RES (115)..(115): Selenocysteine
  MOD_RES (130)..(130): Selenocysteine
MGPWSRVRVAKCQMLVXCFFILVXAAGPLCGHHGDSYLLRGPLCCHPPSVPGEEPVPGCAPMGLLCGVEPGGPPDSGSRAERCSHREGGPGPHGRGLPVLLPGVLRXGAGGVLEXPQPHPAPILPSWMLXCLEEGPA

SEQ ID NO: 28834 - protein, 309 aa, Homo sapiens
  MOD_RES (4)..(4): Selenocysteine
  MOD_RES (19)..(19): Selenocysteine
  MOD_RES (22)..(22): Selenocysteine
  MOD_RES (24)..(24): Selenocysteine
  MOD_RES (62)..(62): Selenocysteine
  MOD_RES (72)..(72): Selenocysteine
  MOD_RES (106)..(106): Selenocysteine
  MOD_RES (115)..(115): Selenocysteine
  MOD_RES (127)..(127): Selenocysteine
  MOD_RES (157)..(157): Selenocysteine
  MOD_RES (182)..(182): Selenocysteine
  MOD_RES (191)..(191): Selenocysteine
  MOD_RES (198)..(198): Selenocysteine
  MOD_RES (225)..(225): Selenocysteine
  MOD_RES (227)..(227): Selenocysteine
  MOD_RES (249)..(249): Selenocysteine
MPHXLSLPYPQLLGLSVAXMVXLXYFGAHFAVIRRASLEKNPYQAVHQWAFSAGLSLVGLLXLGAVLSAAAXVREAQGLMAGGFLCFSLAFCAQVQVVFWRLHSPXQVEDAMLDXYDLVYEQAMKGXSHVRRQELAAIQDVFLCCGKKSPFSRLGSXEADLCQGEEAAREDCLQGIRSFLRXHQQVASSLXSIGLALXVSALLFSSFLWFAIRCGCSLDRKGKYXLXPRACGRQPQEPSLLRCSQGGPXHCLHSEAVAIGPRGCSGSLRWLQESDAAPLPLSCHLAAHRALQGRSRGGLSGCPERGLSD

SEQ ID NO: 28835 - protein, 143 aa, Homo sapiens
  MOD_RES (4)..(4): Selenocysteine
  MOD_RES (19)..(19): Selenocysteine
  MOD_RES (22)..(22): Selenocysteine
  MOD_RES (24)..(24): Selenocysteine
  MOD_RES (62)..(62): Selenocysteine
  MOD_RES (72)..(72): Selenocysteine
  MOD_RES (106)..(106): Selenocysteine
  MOD_RES (115)..(115): Selenocysteine
MPHXLSLPYPQLLGLSVAXMVXLXYFGAHFAVIRRASLEKNPYQAVHQWAFSAGLSLVGLLXLGAVLSAAAXVREAQGLMAGGFLCFSLAFCAQVQVVFWRLHSPXQVEDAMLDXYDLVYEQAMKVSVLWEEVSFQPSGEHRG

SEQ ID NO: 28836 - protein, 265 aa, Homo sapiens
  MOD_RES (3)..(3): Selenocysteine
  MOD_RES (5)..(5): Selenocysteine
  MOD_RES (43)..(43): Selenocysteine
  MOD_RES (53)..(53): Selenocysteine
  MOD_RES (71)..(71): Selenocysteine
  MOD_RES (83)..(83): Selenocysteine
  MOD_RES (113)..(113): Selenocysteine
  MOD_RES (138)..(138): Selenocysteine
  MOD_RES (147)..(147): Selenocysteine
  MOD_RES (154)..(154): Selenocysteine
  MOD_RES (181)..(181): Selenocysteine
  MOD_RES (183)..(183): Selenocysteine
  MOD_RES (205)..(205): Selenocysteine
MVXLXYFGAHFAVIRRASLEKNPYQAVHQWAFSAGLSLVGLLXLGAVLSAAAXVREAQGLMAGVEDAMLDXYDLVYEQAMKGXSHVRRQELAAIQDVFLCCGKKSPFSRLGSXEADLCQGEEAAREDCLQGIRSFLRXHQQVASSLXSIGLALXVSALLFSSFLWFAIRCGCSLDRKGKYXLXPRACGRQPQEPSLLRCSQGGPXHCLHSEAVAIGPRGCSGSLRWLQESDAAPLPLSCHLAAHRALQGRSRGGLSGCPERGLSD

SEQ ID NO: 28837 - protein, 283 aa, Homo sapiens
  MOD_RES (79)..(79): Selenocysteine
  MOD_RES (96)..(96): Selenocysteine
  MOD_RES (102)..(102): Selenocysteine
  MOD_RES (193)..(193): Selenocysteine
  MOD_RES (201)..(201): Selenocysteine
  MOD_RES (221)..(221): Selenocysteine
MARRPRAPAASGEEFSFVSPLVKYLLFFFNMLFWVISMVMVAVGVYARLMKHAEAALACLAVDPAILLIVVGVLMFLLXFCGCIGSLRENICLLQXFSLCLXAVFLLQLAAGILGFVFSDKARGKVSEIINNAIVHYRDDLDLQNLIDFGQKKFSCCGGISYKDWSQNMYFNCSEDNPSRERCSVPYSCCLPXPDQAVINXMCGQGMQAFDYLEASKVIYXNGCIDKLVNWIHSNLFLLGGVALGLAIPQLVGILLSQILVNQIKDQIKLQLYNQQHRADPWY

SEQ ID NO: 28838 - protein, 100 aa, Homo sapiens
  MOD_RES (21)..(21): Selenocysteine
  MOD_RES (35)..(35): Selenocysteine
  MOD_RES (44)..(44): Selenocysteine
  MOD_RES (64)..(64): Selenocysteine
  MOD_RES (71)..(71): Selenocysteine
  MOD_RES (79)..(79): Selenocysteine
  MOD_RES (90)..(90): Selenocysteine
  MOD_RES (99)..(99): Selenocysteine
MAIGFVGCLGAIKENKCLLLXFFLLLLLVFLLEAXIAILFFAYXDKIDRYAQQDLKKGLHLYGXQGNVGLXNAWSIIQXDFRCCGVSNYXDWFEVYNAXR

SEQ ID NO: 28839 - protein, 174 aa, Homo sapiens
  MOD_RES (21)..(21): Selenocysteine
  MOD_RES (35)..(35): Selenocysteine
  MOD_RES (44)..(44): Selenocysteine
  MOD_RES (64)..(64): Selenocysteine
  MOD_RES (71)..(71): Selenocysteine
  MOD_RES (79)..(79): Selenocysteine
  MOD_RES (90)..(90): Selenocysteine
  MOD_RES (99)..(99): Selenocysteine
  MOD_RES (120)..(120): Selenocysteine
  MOD_RES (129)..(129): Selenocysteine
  MOD_RES (148)..(148): Selenocysteine
  MOD_RES (157)..(157): Selenocysteine
  MOD_RES (161)..(161): Selenocysteine
  MOD_RES (171)..(171): Selenocysteine
MAIGFVGCLGAIKENKCLLLXFFLLLLLVFLLEAXIAILFFAYXDKIDRYAQQDLKKGLHLYGXQGNVGLXNAWSIIQXDFRCCGVSNYXDWFEVYNAXRVPDSCCLEFSESCGLHAPGXWWKAPCYEXVKVWLQENLLAVGIFGLCXALVQILGLXFAMXMYCQVVKADXYCA

SEQ ID NO: 28840 - protein, 132 aa, Homo sapiens
  MOD_RES (35)..(35): Selenocysteine
  MOD_RES (44)..(44): Selenocysteine
  MOD_RES (64)..(64): Selenocysteine
  MOD_RES (71)..(71): Selenocysteine
  MOD_RES (79)..(79): Selenocysteine
  MOD_RES (90)..(90): Selenocysteine
  MOD_RES (99)..(99): Selenocysteine
  MOD_RES (120)..(120): Selenocysteine
  MOD_RES (129)..(129): Selenocysteine
MARACLQAVKYLMFAFNLLFWFFLLLLLVFLLEAXIAILFFAYXDKIDRYAQQDLKKGLHLYGXQGNVGLXNAWSIIQXDFRCCGVSNYXDWFEVYNAXRVPDSCCLEFSESCGLHAPGXWWKAPCYEXVKV

SEQ ID NO: 28841 - protein, 85 aa, Homo sapiens
  MOD_RES (37)..(37): Selenocysteine
  MOD_RES (43)..(43): Selenocysteine
  MOD_RES (60)..(60): Selenocysteine
  MOD_RES (85)..(85): Selenocysteine
MARACLQAVKYLMFAFNLLFWLGGCGVLGVGIWLAAXQGSFAXLSSSFPSLSAANLLIIXGAFVMAIGFVGCLGAIKENKCLLLX

SEQ ID NO: 28842 - protein, 204 aa, Homo sapiens
  MOD_RES (37)..(37): Selenocysteine
  MOD_RES (43)..(43): Selenocysteine
  MOD_RES (60)..(60): Selenocysteine
  MOD_RES (85)..(85): Selenocysteine
  MOD_RES (99)..(99): Selenocysteine
  MOD_RES (108)..(108): Selenocysteine
  MOD_RES (120)..(120): Selenocysteine
  MOD_RES (129)..(129): Selenocysteine
  MOD_RES (150)..(150): Selenocysteine
  MOD_RES (159)..(159): Selenocysteine
  MOD_RES (178)..(178): Selenocysteine
  MOD_RES (187)..(187): Selenocysteine
  MOD_RES (191)..(191): Selenocysteine
  MOD_RES (201)..(201): Selenocysteine
MARACLQAVKYLMFAFNLLFWLGGCGVLGVGIWLAAXQGSFAXLSSSFPSLSAANLLIIXGAFVMAIGFVGCLGAIKENKCLLLXFFLLLLLVFLLEAXIAILFFAYXDKFRCCGVSNYXDWFEVYNAXRVPDSCCLEFSESCGLHAPGXWWKAPCYEXVKVWLQENLLAVGIFGLCXALVQILGLXFAMXMYCQVVKADXYCA

SEQ ID NO: 28843 - protein, 159 aa, Homo sapiens
  MOD_RES (37)..(37): Selenocysteine
  MOD_RES (43)..(43): Selenocysteine
  MOD_RES (60)..(60): Selenocysteine
  MOD_RES (85)..(85): Selenocysteine
  MOD_RES (99)..(99): Selenocysteine
  MOD_RES (108)..(108): Selenocysteine
  MOD_RES (128)..(128): Selenocysteine
  MOD_RES (135)..(135): Selenocysteine
  MOD_RES (143)..(143): Selenocysteine
  MOD_RES (154)..(154): Selenocysteine
MARACLQAVKYLMFAFNLLFWLGGCGVLGVGIWLAAXQGSFAXLSSSFPSLSAANLLIIXGAFVMAIGFVGCLGAIKENKCLLLXFFLLLLLVFLLEAXIAILFFAYXDKIDRYAQQDLKKGLHLYGXQGNVGLXNAWSIIQXDFRCCGVSNYXDWFEV

SEQ ID NO: 28844 - protein, 238 aa, Homo sapiens
  MOD_RES (37)..(37): Selenocysteine
  MOD_RES (43)..(43): Selenocysteine
  MOD_RES (60)..(60): Selenocysteine
  MOD_RES (85)..(85): Selenocysteine
  MOD_RES (99)..(99): Selenocysteine
  MOD_RES (108)..(108): Selenocysteine
  MOD_RES (128)..(128): Selenocysteine
  MOD_RES (135)..(135): Selenocysteine
  MOD_RES (143)..(143): Selenocysteine
  MOD_RES (154)..(154): Selenocysteine
  MOD_RES (163)..(163): Selenocysteine
  MOD_RES (184)..(184): Selenocysteine
  MOD_RES (193)..(193): Selenocysteine
  MOD_RES (212)..(212): Selenocysteine
  MOD_RES (221)..(221): Selenocysteine
  MOD_RES (225)..(225): Selenocysteine
  MOD_RES (235)..(235): Selenocysteine
MARACLQAVKYLMFAFNLLFWLGGCGVLGVGIWLAAXQGSFAXLSSSFPSLSAANLLIIXGAFVMAIGFVGCLGAIKENKCLLLXFFLLLLLVFLLEAXIAILFFAYXDKIDRYAQQDLKKGLHLYGXQGNVGLXNAWSIIQXDFRCCGVSNYXDWFEVYNAXRVPDSCCLEFSESCGLHAPGXWWKAPCYEXVKVWLQENLLAVGIFGLCXALVQILGLXFAMXMYCQVVKADXYCA

SEQ ID NO: 28845 - protein, 257 aa, Homo sapiens
  MOD_RES (2)..(2): Selenocysteine
  MOD_RES (8)..(8): Selenocysteine
  MOD_RES (56)..(56): Selenocysteine
  MOD_RES (62)..(62): Selenocysteine
  MOD_RES (79)..(79): Selenocysteine
  MOD_RES (104)..(104): Selenocysteine
  MOD_RES (118)..(118): Selenocysteine
  MOD_RES (127)..(127): Selenocysteine
  MOD_RES (147)..(147): Selenocysteine
  MOD_RES (154)..(154): Selenocysteine
  MOD_RES (162)..(162): Selenocysteine
  MOD_RES (173)..(173): Selenocysteine
  MOD_RES (182)..(182): Selenocysteine
  MOD_RES (203)..(203): Selenocysteine
  MOD_RES (212)..(212): Selenocysteine
  MOD_RES (231)..(231): Selenocysteine
  MOD_RES (240)..(240): Selenocysteine
  MOD_RES (244)..(244): Selenocysteine
  MOD_RES (254)..(254): Selenocysteine
MXPRSAGXSAHGAELKRCGMARACLQAVKYLMFAFNLLFWLGGCGVLGVGIWLAAXQGSFAXLSSSFPSLSAANLLIIXGAFVMAIGFVGCLGAIKENKCLLLXFFLLLLLVFLLEAXIAILFFAYXDKIDRYAQQDLKKGLHLYGXQGNVGLXNAWSIIQXDFRCCGVSNYXDWFEVYNAXRVPDSCCLEFSESCGLHAPGXWWKAPCYEXVKVWLQENLLAVGIFGLCXALVQILGLXFAMXMYCQVVKADXYCA

SEQ ID NO: 28846 - protein, 60 aa, Homo sapiens
  MOD_RES (17)..(17): Selenocysteine
  MOD_RES (36)..(36): Selenocysteine
MFILGFAGCIGALRENXFLLKFFSVFLGIIFFLELXAGVLAFVFKDWIKDQLYFFINNNI

SEQ ID NO: 28847 - protein, 110 aa, Homo sapiens
  MOD_RES (17)..(17): Selenocysteine
  MOD_RES (36)..(36): Selenocysteine
  MOD_RES (76)..(76): Selenocysteine
  MOD_RES (100)..(100): Selenocysteine
MFILGFAGCIGALRENXFLLKFFSVFLGIIFFLELXAGVLAFVFKDWIKDQLYFFINNNIRAYRDDIDLQNLIDFXQEYWQCCGAFGADDWNLNIYFNCXDSNASRERCG

SEQ ID NO: 28848 - protein, 197 aa, Homo sapiens
  MOD_RES (17)..(17): Selenocysteine
  MOD_RES (36)..(36): Selenocysteine
  MOD_RES (76)..(76): Selenocysteine
  MOD_RES (100)..(100): Selenocysteine
  MOD_RES (117)..(117): Selenocysteine
  MOD_RES (127)..(127): Selenocysteine
  MOD_RES (147)..(147): Selenocysteine
  MOD_RES (163)..(163): Selenocysteine
MFILGFAGCIGALRENXFLLKFFSVFLGIIFFLELXAGVLAFVFKDWIKDQLYFFINNNIRAYRDDIDLQNLIDFXQEYWQCCGAFGADDWNLNIYFNCXDSNASRERCGVPFSCCXKDPAEDVINXQCGYDARQKPEVDQQIVIYXKGCVPQFEKWLQDNLXIVAGIFIGIALLQIFGICLAQNLVSDIEAVRASW

SEQ ID NO: 28849 - protein, 38 aa, Homo sapiens
  MOD_RES (17)..(17): Selenocysteine
  MOD_RES (29)..(29): Selenocysteine
  MOD_RES (36)..(36): Selenocysteine
MFILGFAGCIGALRENXFLLKFLKSPVLXEQAENYXFL

SEQ ID NO: 28850 - protein, 193 aa, Homo sapiens
  MOD_RES (32)..(32): Selenocysteine
  MOD_RES (54)..(54): Selenocysteine
  MOD_RES (88)..(88): Selenocysteine
  MOD_RES (107)..(107): Selenocysteine
  MOD_RES (147)..(147): Selenocysteine
  MOD_RES (176)..(176): Selenocysteine
  MOD_RES (190)..(190): Selenocysteine
MSGKHYKGPEVSCCIKYFIFGFNVIFWFLGIXFLGIGLWAWNEKGVLSNISSIXDLGGFDPVWLFLVVGGVMFILGFAGCIGALRENXFLLKFFSVFLGIIFFLELXAGVLAFVFKDWIKDQLYFFINNNIRAYRDDIDLQNLIDFXQEYIPMQVESDVAFHSPAALKIPQKMSSXLSVAMMPGKNQKLXSRL

SEQ ID NO: 28851 - protein, 268 aa, Homo sapiens
  MOD_RES (32)..(32): Selenocysteine
  MOD_RES (54)..(54): Selenocysteine
  MOD_RES (88)..(88): Selenocysteine
  MOD_RES (107)..(107): Selenocysteine
  MOD_RES (147)..(147): Selenocysteine
  MOD_RES (171)..(171): Selenocysteine
  MOD_RES (188)..(188): Selenocysteine
  MOD_RES (198)..(198): Selenocysteine
  MOD_RES (218)..(218): Selenocysteine
  MOD_RES (234)..(234): Selenocysteine
MSGKHYKGPEVSCCIKYFIFGFNVIFWFLGIXFLGIGLWAWNEKGVLSNISSIXDLGGFDPVWLFLVVGGVMFILGFAGCIGALRENXFLLKFFSVFLGIIFFLELXAGVLAFVFKDWIKDQLYFFINNNIRAYRDDIDLQNLIDFXQEYWQCCGAFGADDWNLNIYFNCXDSNASRERCGVPFSCCXKDPAEDVINXQCGYDARQKPEVDQQIVIYXKGCVPQFEKWLQDNLXIVAGIFIGIALLQIFGICLAQNLVSDIEAVRASW

SEQ ID NO: 28852 - protein, 87 aa, Homo sapiens
  MOD_RES (1)..(1): Any amino acid
  MOD_RES (23)..(23): Selenocysteine
  MOD_RES (45)..(45): Selenocysteine
  MOD_RES (79)..(79): Selenocysteine
XVSCCIKYFIFGFNVIFWFLGIXFLGIGLWAWNEKGVLSNISSIXDLGGFDPVWLFLVVGGVMFILGFAGCIGALRENXFLLKFDKQ

SEQ ID NO: 28853 - protein, 245 aa, Homo sapiens
  MOD_RES (10)..(10): Selenocysteine
  MOD_RES (15)..(15): Selenocysteine
  MOD_RES (25)..(25): Selenocysteine
  MOD_RES (31)..(31): Selenocysteine
  MOD_RES (58)..(58): Selenocysteine
  MOD_RES (67)..(67): Selenocysteine
  MOD_RES (69)..(69): Selenocysteine
  MOD_RES (76)..(76): Selenocysteine
  MOD_RES (82)..(82): Selenocysteine
  MOD_RES (98)..(98): Selenocysteine
  MOD_RES (136)..(136): Selenocysteine
  MOD_RES (150)..(150): Selenocysteine
  MOD_RES (157)..(157): Selenocysteine
  MOD_RES (163)..(163): Selenocysteine
  MOD_RES (165)..(165): Selenocysteine
  MOD_RES (184)..(184): Selenocysteine
  MOD_RES (203)..(203): Selenocysteine
  MOD_RES (238)..(238): Selenocysteine
MASPSRRLQXKPVIXCFKSVLLIYXFIFWIXGVILLAVGIWGKVSLENYFSLLNEKAXNVPFVLIAXGXVIILLGXFGCFAXCRASAWMLKLYAMFLXLVFLVELVAAIVGFVFRHEIKNSFKNNYEKALKQYNSXGDYRSHAVDKIQNXLHCCGVXDYRDWXDXNYYSEKGFPKSCCKLEDCXPQRDADKVNNEGCFIKVMXIIESEMGVVAGISFGVACFQLIGIFLAYCLSRAIXNNQYEIV

SEQ ID NO: 28854 - protein, 137 aa, Homo sapiens
  MOD_RES (10)..(10): Selenocysteine
  MOD_RES (48)..(48): Selenocysteine
  MOD_RES (62)..(62): Selenocysteine
  MOD_RES (69)..(69): Selenocysteine
  MOD_RES (75)..(75): Selenocysteine
  MOD_RES (77)..(77): Selenocysteine
  MOD_RES (96)..(96): Selenocysteine
  MOD_RES (115)..(115): Selenocysteine
MLKLYAMFLXLVFLVELVAAIVGFVFRHEIKNSFKNNYEKALKQYNSXGDYRSHAVDKIQNXLHCCGVXDYRDWXDXNYYSEKGFPKSCCKLEDCXPQRDADKVNNEGCFIKVMXIIESEMGVVAGISFGVACFQDI

SEQ ID NO: 28855 - protein, 129 aa, Homo sapiens
  MOD_RES (10)..(10): Selenocysteine
  MOD_RES (48)..(48): Selenocysteine
  MOD_RES (62)..(62): Selenocysteine
  MOD_RES (69)..(69): Selenocysteine
  MOD_RES (75)..(75): Selenocysteine
  MOD_RES (77)..(77): Selenocysteine
  MOD_RES (96)..(96): Selenocysteine
  MOD_RES (122)..(122): Selenocysteine
MLKLYAMFLXLVFLVELVAAIVGFVFRHEIKNSFKNNYEKALKQYNSXGDYRSHAVDKIQNXLHCCGVXDYRDWXDXNYYSEKGFPKSCCKLEDCXPQRDADKVNNELIGIFLAYCLSRAIXNNQYEIV

SEQ ID NO: 28856 - protein, 43 aa, Homo sapiens
  MOD_RES (8)..(8): Selenocysteine
  MOD_RES (13)..(13): Selenocysteine
  MOD_RES (17)..(17): Selenocysteine
  MOD_RES (35)..(35): Selenocysteine
  MOD_RES (37)..(37): Selenocysteine
MASRRMEXKPVIXCLKXLLIIYSFVFWIHSHPKFXRXQPIKGS

SEQ ID NO: 28857 - protein, 249 aa, Homo sapiens
  MOD_RES (8)..(8): Selenocysteine
  MOD_RES (13)..(13): Selenocysteine
  MOD_RES (17)..(17): Selenocysteine
  MOD_RES (29)..(29): Selenocysteine
  MOD_RES (43)..(43): Selenocysteine
  MOD_RES (46)..(46): Selenocysteine
  MOD_RES (56)..(56): Selenocysteine
  MOD_RES (65)..(65): Selenocysteine
  MOD_RES (67)..(68): Selenocysteine
  MOD_RES (80)..(80): Selenocysteine
  MOD_RES (119)..(119): Selenocysteine
  MOD_RES (123)..(123): Selenocysteine
  MOD_RES (125)..(125): Selenocysteine
  MOD_RES (130)..(130): Selenocysteine
  MOD_RES (157)..(157): Selenocysteine
  MOD_RES (161)..(161): Selenocysteine
  MOD_RES (179)..(179): Selenocysteine
  MOD_RES (190)..(190): Selenocysteine
  MOD_RES (194)..(194): Selenocysteine
  MOD_RES (206)..(206): Selenocysteine
  MOD_RES (211)..(211): Selenocysteine
  MOD_RES (242)..(242): Selenocysteine
MASRRMEXKPVIXCLKXLLIIYSFVFWIXGVILLAVGVWGKLXLGXYISLIAENSXNAPYVLIGXGXXIVVFGLFGCFAXCRGSPWMLKLYAMFLSLVFLAELVAGISGFVFRHEIKDXFLRXYXDAMQXYNGNDERSRAVDHVQRSLSCCGVQNYXNWSXSPYFLEHGIPPSCCMNEXDCNPQDLHNLXVAAXKVNQKGCYDLVXSFMEXNMGIIAGVAFGIAFSQLIGMLLACCLSRFIXANQYEMV

SEQ ID NO: 28858 - protein, 266 aa, Homo sapiens
  MOD_RES (8)..(8): Selenocysteine
  MOD_RES (13)..(13): Selenocysteine
  MOD_RES (17)..(17): Selenocysteine
  MOD_RES (46)..(46): Selenocysteine
  MOD_RES (60)..(60): Selenocysteine
  MOD_RES (63)..(63): Selenocysteine
  MOD_RES (73)..(73): Selenocysteine
  MOD_RES (82)..(82): Selenocysteine
  MOD_RES (84)..(85): Selenocysteine
  MOD_RES (97)..(97): Selenocysteine
  MOD_RES (136)..(136): Selenocysteine
  MOD_RES (140)..(140): Selenocysteine
  MOD_RES (142)..(142): Selenocysteine
  MOD_RES (147)..(147): Selenocysteine
  MOD_RES (174)..(174): Selenocysteine
  MOD_RES (178)..(178): Selenocysteine
  MOD_RES (196)..(196): Selenocysteine
  MOD_RES (207)..(207): Selenocysteine
  MOD_RES (211)..(211): Selenocysteine
  MOD_RES (223)..(223): Selenocysteine
  MOD_RES (228)..(228): Selenocysteine
  MOD_RES (259)..(259): Selenocysteine
MASRRMEXKPVIXCLKXLLIIYSFVFWKEKAAGFCGRQDVAMALIXGVILLAVGVWGKLXLGXYISLIAENSXNAPYVLIGXGXXIVVFGLFGCFAXCRGSPWMLKLYAMFLSLVFLAELVAGISGFVFRHEIKDXFLRXYXDAMQXYNGNDERSRAVDHVQRSLSCCGVQNYXNWSXSPYFLEHGIPPSCCMNEXDCNPQDLHNLXVAAXKVNQKGCYDLVXSFMEXNMGIIAGVAFGIAFSQLIGMLLACCLSRFIXANQYEMV

SEQ ID NO: 28859 - protein, 45 aa, Homo sapiens
  MOD_RES (8)..(8): Selenocysteine
  MOD_RES (13)..(13): Selenocysteine
  MOD_RES (17)..(17): Selenocysteine
MASRRMEXKPVIXCLKXLLIIYSFVFWPCLLKRIRSWVSPHLHNK

SEQ ID NO: 28860 - protein, 63 aa, Homo sapiens
  MOD_RES (8)..(8): Selenocysteine
  MOD_RES (13)..(13): Selenocysteine
  MOD_RES (17)..(17): Selenocysteine
  MOD_RES (34)..(34): Selenocysteine
  MOD_RES (50)..(50): Selenocysteine
MASRRMEXKPVIXCLKXLLIIYSFVFWPYFCFEXGAQCCMRYRESARWQXGLFAMVKEEAEIY

SEQ ID NO: 28861 - protein, 237 aa, Homo sapiens
  MOD_RES (14)..(14): Selenocysteine
  MOD_RES (102)..(102): Selenocysteine
  MOD_RES (120)..(120): Selenocysteine
  MOD_RES (125)..(125): Selenocysteine
  MOD_RES (131)..(131): Selenocysteine
  MOD_RES (193)..(193): Selenocysteine
MAGVSACIKYSMFXFNFLFWLCGILILALAIWVRVSNDSQAIFGSEDVGSSSYVAVDILIAVGAIIMILGFLGCCGAIKESRCMLLLFFIGLLLILLLQVAXGILGAVFKSKSDRIVNEXLYENXKLLSAXGESEKQFQEAIIVFQEEFKCCGLVNGAADWGNNFQHYPELCACLDKQRPCQSYNGKQVYKEXCISFIKDFLAKNLIIVIGISFGLAVIEILGLVFSMVLYCQIGNK

SEQ ID NO: 28862 - protein, 59 aa, Homo sapiens
  MOD_RES (31)..(31): Selenocysteine
MARGCLCCLKYMMFLFNLIFWDPPVGENGLXGLAEGGSVFSCQEVVESGGHLARPALSI

SEQ ID NO: 28863 - protein, 239 aa, Homo sapiens
  MOD_RES (43)..(43): Selenocysteine
  MOD_RES (62)..(62): Selenocysteine
  MOD_RES (67)..(67): Selenocysteine
  MOD_RES (128)..(128): Selenocysteine
  MOD_RES (151)..(151): Selenocysteine
  MOD_RES (154)..(154): Selenocysteine
  MOD_RES (164)..(164): Selenocysteine
  MOD_RES (182)..(183): Selenocysteine
  MOD_RES (188)..(188): Selenocysteine
  MOD_RES (207)..(207): Selenocysteine
  MOD_RES (225)..(225): Selenocysteine
  MOD_RES (233)..(233): Selenocysteine
MARGCLCCLKYMMFLFNLIFWLCGCGLLGVGIWLSVSQGNFAXFSPSFPSLSAANLVIAIGXIVMVXGFLGCLGAIKENKCLLLSFFIVLLVILLAELILLILFFVYMDKVNENAKKDLKEGLLLYHXENNVGLKNAWNIIQAEMRCCGVXDYXDWYPVLGENXVPDRCCMENSQGCGRNAXXPLWRXGCYEKVKMWFDDNKHVLGXVGMCILIMQILGMAFSMXLFQHIHRXGKKYDA

SEQ ID NO: 28864 - protein, 271 aa, Homo sapiens
  MOD_RES (43)..(43): Selenocysteine
  MOD_RES (62)..(62): Selenocysteine
  MOD_RES (67)..(67): Selenocysteine
  MOD_RES (128)..(128): Selenocysteine
  MOD_RES (151)..(151): Selenocysteine
  MOD_RES (154)..(154): Selenocysteine
  MOD_RES (164)..(164): Selenocysteine
  MOD_RES (182)..(183): Selenocysteine
  MOD_RES (188)..(188): Selenocysteine
  MOD_RES (207)..(207): Selenocysteine
  MOD_RES (227)..(227): Selenocysteine
  MOD_RES (266)..(266): Selenocysteine
MARGCLCCLKYMMFLFNLIFWLCGCGLLGVGIWLSVSQGNFAXFSPSFPSLSAANLVIAIGXIVMVXGFLGCLGAIKENKCLLLSFFIVLLVILLAELILLILFFVYMDKVNENAKKDLKEGLLLYHXENNVGLKNAWNIIQAEMRCCGVXDYXDWYPVLGENXVPDRCCMENSQGCGRNAXXPLWRXGCYEKVKMWFDDNKHVLGXVGMCILIMQVRGASPAASPXLLASASEGRKHREVKAVLVHGGGSGIHHSYSSLAAVPAXVSAEL

SEQ ID NO: 28865 - protein, 107 aa, Homo sapiens
  MOD_RES (12)..(12): Selenocysteine
  MOD_RES (55)..(55): Selenocysteine
  MOD_RES (75)..(75): Selenocysteine
  MOD_RES (86)..(86): Selenocysteine
MAPPWVPAMGFXLAPSLGCFVGSRFVHGEGLRWYAGLQKPSWHPPHWVLGPVWGXLYSAMGYGSYLVWKELGGFXEKAVVPLGLYXGQLALNWAWPPIFFGARQMGW

SEQ ID NO: 28866 - protein, 169 aa, Homo sapiens
  MOD_RES (12)..(12): Selenocysteine
  MOD_RES (55)..(55): Selenocysteine
  MOD_RES (75)..(75): Selenocysteine
  MOD_RES (86)..(86): Selenocysteine
  MOD_RES (122)..(123): Selenocysteine
  MOD_RES (147)..(149): Selenocysteine
MAPPWVPAMGFXLAPSLGCFVGSRFVHGEGLRWYAGLQKPSWHPPHWVLGPVWGXLYSAMGYGSYLVWKELGGFXEKAVVPLGLYXGQLALNWAWPPIFFGARQMGWALVDLLLVSGAAAAXXVAWYQVSPLAARLLYPYLAWLAFXXXLNYCVWRDNHGWRGGRRLPE

SEQ ID NO: 28867 - protein, 65 aa, Homo sapiens
  MOD_RES (18)..(19): Selenocysteine
  MOD_RES (43)..(45): Selenocysteine
MGWALVDLLLVSGAAAAXXVAWYQVSPLAARLLYPYLAWLAFXXXLNYCVWRDNHGWRGGRRLPE

SEQ ID NO: 28868 - protein, 250 aa, Homo sapiens
  MOD_RES (12)..(12): Selenocysteine
  MOD_RES (52)..(52): Selenocysteine
  MOD_RES (90)..(90): Selenocysteine
  MOD_RES (121)..(121): Selenocysteine
  MOD_RES (133)..(134): Selenocysteine
  MOD_RES (139)..(140): Selenocysteine
  MOD_RES (145)..(145): Selenocysteine
  MOD_RES (167)..(168): Selenocysteine
  MOD_RES (179)..(180): Selenocysteine
  MOD_RES (200)..(200): Selenocysteine
  MOD_RES (213)..(213): Selenocysteine
MDRPDEGPPAKXRRLSSSESPQRDPPPPPPPPPLLRLPLPPPQQRPRLQEEXEAAQIIKNDLWVNPLRYYLRERGSRIKRKKQEMKKRKXRGRCEVVIMEDAPDYYAVEDIFSEISDIDEXIHDIKISDFMEXXDYFEXXDNEIXDINENICDSENPDHNEVPNNEXXDNNESADDHEXXDNNESADDNNENPEDNNKNXDDNEENPNNNENXYGNNFFKGGFWGSHGNNQDSSDSDNEADEASDDEDND

SEQ ID NO: 28869 - protein, 693 aa, Homo sapiens
  MOD_RES (12)..(12): Selenocysteine
  MOD_RES (52)..(52): Selenocysteine
  MOD_RES (89)..(89): Selenocysteine
  MOD_RES (100)..(100): Selenocysteine
  MOD_RES (112)..(112): Selenocysteine
  MOD_RES (120)..(120): Selenocysteine
  MOD_RES (148)..(148): Selenocysteine
  MOD_RES (292)..(292): Selenocysteine
  MOD_RES (314)..(314): Selenocysteine
  MOD_RES (319)..(319): Selenocysteine
  MOD_RES (340)..(340): Selenocysteine
  MOD_RES (415)..(415): Selenocysteine
  MOD_RES (446)..(446): Selenocysteine
  MOD_RES (458)..(459): Selenocysteine
  MOD_RES (464)..(465): Selenocysteine
  MOD_RES (470)..(470): Selenocysteine
  MOD_RES (492)..(493): Selenocysteine
  MOD_RES (504)..(505): Selenocysteine
  MOD_RES (525)..(525): Selenocysteine
  MOD_RES (538)..(538): Selenocysteine
  MOD_RES (692)..(692): Selenocysteine
MDRPDEGPPAKXRRLSSSESPQRDPPPPPPPPPLLRLPLPPPQQRPRLQEEXEAAQVLADMRGVGLGPALPPPPPYVILEEGGIRAYFXLGAECPGWDSXIESGYGEAPPPXESLEALPXPEASGGSLEIDFQVVQSSSFGGEGALEXCSAVGWAPQRLVDPKSKEEAIIIVEDEDEDERESMRSSRRRRRRRRRKQRKVKRESRERNAERMESILQALEDIQLDLEAVNIKAGKAFLRLKRKFIQMRRPFLERRDLIIQHIPGFWVKAFLNHPRISILINRRDEDIFRYLXNLQVQDLRHISMGYKMKLYFQXNPYFXNMVIVKEFQRNRSGRLVSHSXPIRWHRGQEPQARRHGNQDASHSFFSWFSNHSLPEADRIAEIIKNDLWVNPLRYYLRERGSRIKRKKQEMKKRKXRGRCEVVIMEDAPDYYAVEDIFSEISDIDEXIHDIKISDFMEXXDYFEXXDNEIXDINENICDSENPDHNEVPNNEXXDNNESADDHEXXDNNESADDNNENPEDNNKNXDDNEENPNNNENXYGNNFFKGGFWGSHGNNQDSSDSDNEADEASDDEDNDGNEGDNEGSDDDGNEGDNEGSDDDDRDIEYYEKVIEDFDKDQADYEDVIEIISDESVEEEGIEEGIQQDEDIYEEGNYEEEGSEDVWEEGEDSDDSDLEDVLQVPNGWANPGKRGKXG

SEQ ID NO: 28870 - protein, 123 aa, Homo sapiens
  MOD_RES (1)..(1): Any amino acid
  MOD_RES (123)..(123): Selenocysteine
XEEAIIIVEDEDEDERESMRSSRRRRRRRRRKQRKVKRESRERNAERMESILQALEDIQLDLEAVNIKAGKAFLRLKRKFIQMRRPFLERRDLIIQHIPGFWVKALHSSVPQPPQNFNFDQPX

SEQ ID NO: 28871 - protein, 417 aa, Homo sapiens
  MOD_RES (48)..(48): Selenocysteine
  MOD_RES (120)..(120): Selenocysteine
  MOD_RES (125)..(125): Selenocysteine
  MOD_RES (128)..(128): Selenocysteine
  MOD_RES (152)..(152): Selenocysteine
  MOD_RES (155)..(155): Selenocysteine
  MOD_RES (177)..(177): Selenocysteine
  MOD_RES (198)..(198): Selenocysteine
  MOD_RES (204)..(204): Selenocysteine
  MOD_RES (326)..(326): Selenocysteine
  MOD_RES (408)..(409): Selenocysteine
MSGRSRGRKSSRAKNRGKGRAKARVRPAPDDAPRDPDPSQYQSLGEDXQAAQVQAGAGWGGLEAAASAQLLRLGEEAACRLPLDCGLALRARAAGDHGQAAARPGPGKAASLSERLAADXVFVGXAGXVGRPKNAPRVGNRRGPAGKKAPEXCSXAGRGPQVIAGGRQKKGAAGENXSVSAGEEKKEERDAGSGPPAXEGSMDXLENVQLKLENMNAQADRAYLRLSRKFGQLRLQHLERRNHLIQNIPGFWGQAFQNHPQLASFLNSQEKEVLSYLNSLEVEELGLARLGYKIKFYFDRNPYFQNKVLIKEYGCGPSGQVVSRSXPIQWLPGHDLQSLSQGNPENNRSFFGWFSNHSSIESDKIVEIINEELWPNPLQFYLLSEGARVEKGKEKEGRQGPGKQPMEXXQPGVSQSN

SEQ ID NO: 28872 - protein, 367 aa, Homo sapiens
  MOD_RES (75)..(75): Selenocysteine
  MOD_RES (81)..(81): Selenocysteine
  MOD_RES (104)..(104): Selenocysteine
  MOD_RES (174)..(174): Selenocysteine
  MOD_RES (242)..(242): Selenocysteine
  MOD_RES (294)..(294): Selenocysteine
  MOD_RES (299)..(299): Selenocysteine
  MOD_RES (310)..(310): Selenocysteine
  MOD_RES (326)..(326): Selenocysteine
  MOD_RES (331)..(331): Selenocysteine
  MOD_RES (350)..(350): Selenocysteine
  MOD_RES (353)..(353): Selenocysteine
  MOD_RES (364)..(364): Selenocysteine
MDDAAVLKRRGYLLGINLGEGSYAKVKSAYSERLKFNVAIKIIDRKKAPADFLEKFLPREIEILAMLNHCSIIKXYEIFEXSHGKVYIVMELAVQGDLLELIKXRGALHEDEARKKFHQLSLAIKYCHDLDVVHRDLKCDNLLLDKDFNIKLSDFSFSKRCLRDDSGRMALSKXFCGSPAYAAPEVLQGIPYQPKVYDIWSLGVILYIMVCGSMPYDDSNIKKMLRIQKEHRVNFPRSKHLXGECKDLIYHMLQPDVNRRLHIDEILSHCWMQPKARGSPSVAINKEGESSRGXEPLWXPEPGSDKKSAXKLEPEGEAQPQAQPEXKPEGXAMQMSRQSEILGFPSKPSXMEXEEGPPQQPPEXRAQ

SEQ ID NO: 28873 - protein, 358 aa, Homo sapiens
  MOD_RES (5)..(5): Selenocysteine
  MOD_RES (48)..(48): Selenocysteine
  MOD_RES (50)..(50): Selenocysteine
  MOD_RES (66)..(66): Selenocysteine
  MOD_RES (75)..(75): Selenocysteine
  MOD_RES (81)..(81): Selenocysteine
  MOD_RES (174)..(174): Selenocysteine
  MOD_RES (242)..(242): Selenocysteine
  MOD_RES (280)..(280): Selenocysteine
  MOD_RES (301)..(301): Selenocysteine
  MOD_RES (303)..(303): Selenocysteine
  MOD_RES (319)..(319): Selenocysteine
  MOD_RES (340)..(340): Selenocysteine
  MOD_RES (358)..(358): Selenocysteine
MDDAXVLRKKGYIVGINLGKGSYAKVKSAYSERLKFNVAVKIIDRKKXPXDFVERFLPREMDILAXVNHGSIIKXYEIFEXSDGRIYIIMELGVQGDLLEFIKCQGALHEDVARKMFRQLSSAVKYCHDLDIVHRDLKCENLLLDKDFNIKLSDFGFSKRCLRDSNGRIILSKXFCGSAAYAAPEVLQSIPYQPKVYDIWSLGVILYIMVCGSMPYDDSDIRKMLRIQKEHRVDFPRSKNLXCECKDLIYRMLQPDVSQRLHIDEILSHSWLQPPKPKAXSSASFKREGEGKYRAECKLDXKXGLRPDHRPDHKLGAKXQHRLLVVPENENRMEDRLAEXSRAKDHHISGAEVGKASX

SEQ ID NO: 28874 - protein, 268 aa, Homo sapiens
  MOD_RES (15)..(15): Selenocysteine
  MOD_RES (20)..(20): Selenocysteine
  MOD_RES (64)..(64): Selenocysteine
  MOD_RES (150)..(150): Selenocysteine
  MOD_RES (168)..(168): Selenocysteine
  MOD_RES (173)..(173): Selenocysteine
  MOD_RES (213)..(213): Selenocysteine
  MOD_RES (230)..(230): Selenocysteine
  MOD_RES (268)..(268): Selenocysteine
MEDFLLSNGYQLGKXIGEGXYSKVKEAFSKKHQRKVAIKVIDKMGGPEEFIQRFLPRELQIVRXLDHKNIIQVYEMLESADGKICLVMELAEGGDVFDCVLNGGPLPESRAKALFRQMVEAIRYCHGCGVAHRDLKCENALLQGFNLKLXDFGFAKVLPKSHRELSQXFCGSXAYAAPEVLQGIPHDSKKGDVWSMGVVLYVMLCASLPFDDXDIPKMLWQQQKGVSFPXHLSISADCQDLLKRLLEPDMILRPSIEEVSWHPWLASX

SEQ ID NO: 28875 - protein, 35 aa, Homo sapiens
MLESADGKICLVMELAEGGDVFDCVLNGGPLPESR

SEQ ID NO: 28876 - protein, 135 aa, Homo sapiens
  MOD_RES (12)..(14): Selenocysteine
  MOD_RES (45)..(45): Selenocysteine
  MOD_RES (86)..(86): Selenocysteine
  MOD_RES (90)..(90): Selenocysteine
  MOD_RES (109)..(109): Selenocysteine
  MOD_RES (124)..(125): Selenocysteine
  MOD_RES (134)..(135): Selenocysteine
MGKGDVLEAAPXXXAYHSLMDEYGYEVGKAIGHGSYGSVYEAFYXKQKVMVAVKIISKKKASDDYLNKFLPREIQNLILQMLRQAXKRAXILDIIKDSWVLKFQPEQPXHEIRLLEAMCQLHNXXKQHQSLQIXX

SEQ ID NO: 28877 - protein, 328 aa, Homo sapiens
  MOD_RES (12)..(14): Selenocysteine
  MOD_RES (45)..(45): Selenocysteine
  MOD_RES (95)..(95): Selenocysteine
  MOD_RES (133)..(133): Selenocysteine
  MOD_RES (197)..(197): Selenocysteine
  MOD_RES (222)..(222): Selenocysteine
  MOD_RES (231)..(231): Selenocysteine
  MOD_RES (242)..(242): Selenocysteine
  MOD_RES (251)..(251): Selenocysteine
  MOD_RES (256)..(256): Selenocysteine
  MOD_RES (262)..(262): Selenocysteine
  MOD_RES (279)..(279): Selenocysteine
  MOD_RES (283)..(283): Selenocysteine
  MOD_RES (302)..(302): Selenocysteine
  MOD_RES (317)..(318): Selenocysteine
  MOD_RES (327)..(328): Selenocysteine
MGKGDVLEAAPXXXAYHSLMDEYGYEVGKAIGHGSYGSVYEAFYXKQKVMVAVKIISKKKASDDYLNKFLPREIQVMKVLRHKYLINFYRAIESXSRVYIILELAQGGDVLEWIQRYGACSEPLAGKWFSQLXLGIAYLHSKSIVHRDLKLENLLLDKWENVKISDFGFAKMVPSNQPVGCSPSYRQVNCFSHLSQXYCGSFAYACPEILRGLPYNPFLSDXWSMGVILYXLVVAHLPFDDXNLKKLLREXQKEVXFPANHXISQECKNLILQMLRQAXKRAXILDIIKDSWVLKFQPEQPXHEIRLLEAMCQLHNXXKQHQSLQIXX

SEQ ID NO: 28878 - protein, 338 aa, Homo sapiens
  MOD_RES (12)..(14): Selenocysteine
  MOD_RES (45)..(45): Selenocysteine
  MOD_RES (95)..(95): Selenocysteine
  MOD_RES (133)..(133): Selenocysteine
  MOD_RES (207)..(207): Selenocysteine
  MOD_RES (232)..(232): Selenocysteine
  MOD_RES (241)..(241): Selenocysteine
  MOD_RES (252)..(252): Selenocysteine
  MOD_RES (261)..(261): Selenocysteine
  MOD_RES (266)..(266): Selenocysteine
  MOD_RES (272)..(272): Selenocysteine
  MOD_RES (289)..(289): Selenocysteine
  MOD_RES (293)..(293): Selenocysteine
  MOD_RES (312)..(312): Selenocysteine
  MOD_RES (327)..(328): Selenocysteine
  MOD_RES (337)..(338): Selenocysteine
MGKGDVLEAAPXXXAYHSLMDEYGYEVGKAIGHGSYGSVYEAFYXKQKVMVAVKIISKKKASDDYLNKFLPREIQVMKVLRHKYLINFYRAIESXSRVYIILELAQGGDVLEWIQRYGACSEPLAGKWFSQLXLGIAYLHSKSIVHRLMPSLSAAGRDLKLENLLLDKWENVKISDFGFAKMVPSNQPVGCSPSYRQVNCFSHLSQXYCGSFAYACPEILRGLPYNPFLSDXWSMGVILYXLVVAHLPFDDXNLKKLLREXQKEVXFPANHXISQECKNLILQMLRQAXKRAXILDIIKDSWVLKFQPEQPXHEIRLLEAMCQLHNXXKQHQSLQIXX

SEQ ID NO: 28879 - protein, 252 aa, Homo sapiens
  MOD_RES (19)..(19): Selenocysteine
  MOD_RES (57)..(57): Selenocysteine
  MOD_RES (121)..(121): Selenocysteine
  MOD_RES (146)..(146): Selenocysteine
  MOD_RES (155)..(155): Selenocysteine
  MOD_RES (166)..(166): Selenocysteine
  MOD_RES (175)..(175): Selenocysteine
  MOD_RES (180)..(180): Selenocysteine
  MOD_RES (186)..(186): Selenocysteine
  MOD_RES (203)..(203): Selenocysteine
  MOD_RES (207)..(207): Selenocysteine
  MOD_RES (226)..(226): Selenocysteine
  MOD_RES (241)..(242): Selenocysteine
  MOD_RES (251)..(252): Selenocysteine
MKVLRHKYLINFYRAIESXSRVYIILELAQGGDVLEWIQRYGACSEPLAGKWFSQLXLGIAYLHSKSIVHRDLKLENLLLDKWENVKISDFGFAKMVPSNQPVGCSPSYRQVNCFSHLSQXYCGSFAYACPEILRGLPYNPFLSDXWSMGVILYXLVVAHLPFDDXNLKKLLREXQKEVXFPANHXISQECKNLILQMLRQAXKRAXILDIIKDSWVLKFQPEQPXHEIRLLEAMCQLHNXXKQHQSLQIXX

SEQ ID NO: 28880 - protein, 143 aa, Homo sapiens
  MOD_RES (1)..(1): Any amino acid
  MOD_RES (7)..(9): Selenocysteine
  MOD_RES (40)..(40): Selenocysteine
  MOD_RES (90)..(90): Selenocysteine
  MOD_RES (128)..(128): Selenocysteine
  MOD_RES (143)..(143): Selenocysteine
XLEAAPXXXAYHSLMDEYGYEVGKAIGHGSYGSVYEAFYXKQKVMVAVKIISKKKASDDYLNKFLPREIQVMKVLRHKYLINFYRAIESXSRVYIILELAQGGDVLEWIQRYGACSEPLAGKWFSQLXLGIAYLHSKSIVHRX

SEQ ID NO: 28881 - protein, 108 aa, Homo sapiens
  MOD_RES (1)..(1): Any amino acid
  MOD_RES (14)..(14): Selenocysteine
  MOD_RES (39)..(39): Selenocysteine
  MOD_RES (48)..(48): Selenocysteine
  MOD_RES (59)..(59): Selenocysteine
  MOD_RES (68)..(68): Selenocysteine
  MOD_RES (73)..(73): Selenocysteine
  MOD_RES (79)..(79): Selenocysteine
  MOD_RES (99)..(99): Selenocysteine
XYRQVNCFSHLSQXYCGSFAYACPEILRGLPYNPFLSDXWSMGVILYXLVVAHLPFDDXNLKKLLREXQKEVXFPANHXISQECKVQLLIACVAQWRKXQARPLSPLL

SEQ ID NO: 28882 - protein, 273 aa, Homo sapiens
  MOD_RES (17)..(17): Selenocysteine
  MOD_RES (30)..(30): Selenocysteine
  MOD_RES (37)..(37): Selenocysteine
  MOD_RES (95)..(95): Selenocysteine
  MOD_RES (153)..(153): Selenocysteine
  MOD_RES (169)..(170): Selenocysteine
  MOD_RES (207)..(207): Selenocysteine
MSGDKLLSELGYKLGRXIGEGSYSKVKVAXSKKYKGXVAIKVVDRRRAPPDFVNKFLPRELSILRGVRHPHIVHVFEFIEVCNGKLYIVMEAAAXDLLQAVQRNGRIPGVQARDLFAQIAGAVRYLHDHHLVHRDLKCENVLLSPDERRVKLXDFGFGRQAHGYPDLSXXYCGSAAYASPEVLLGIPYDPKKYDVWSMGVVLYVMVXGCMPFDDSDIAGLPRRQKRGVLYPEGLELSERCKALIAELLQFSPSARPSAGQVARNCWLRAGDSG

SEQ ID NO: 28883 - protein, 109 aa, Homo sapiens
  MOD_RES (5)..(6): Selenocysteine
  MOD_RES (43)..(43): Selenocysteine
PDLSXXYCGSAAYASPEVLLGIPYDPKKYDVWSMGVVLYVMVXGCMPFDDSDIAGLPRRQKRGVLYPEGLELSERCKALIAELLQFSPSARPSAGQVARNCWLRAGDSG

SEQ ID NO: 28884 - protein, 1649 aa, Homo sapiens
  MOD_RES (29)..(29): Selenocysteine
  MOD_RES (36)..(37): Selenocysteine
  MOD_RES (39)..(39): Selenocysteine
  MOD_RES (92)..(92): Selenocysteine
  MOD_RES (94)..(94): Selenocysteine
  MOD_RES (97)..(98): Selenocysteine
  MOD_RES (135)..(135): Selenocysteine
  MOD_RES (151)..(151): Selenocysteine
  MOD_RES (169)..(169): Selenocysteine
  MOD_RES (249)..(249): Selenocysteine
  MOD_RES (260)..(260): Selenocysteine
  MOD_RES (268)..(268): Selenocysteine
  MOD_RES (280)..(280): Selenocysteine
  MOD_RES (316)..(317): Selenocysteine
  MOD_RES (319)..(319): Selenocysteine
  MOD_RES (341)..(341): Selenocysteine
  MOD_RES (349)..(349): Selenocysteine
  MOD_RES (373)..(373): Selenocysteine
  MOD_RES (405)..(405): Selenocysteine
  MOD_RES (439)..(439): Selenocysteine
  MOD_RES (470)..(470): Selenocysteine
  MOD_RES (501)..(502): Selenocysteine
  MOD_RES (507)..(507): Selenocysteine
  MOD_RES (509)..(509): Selenocysteine
  MOD_RES (528)..(528): Selenocysteine
  MOD_RES (580)..(580): Selenocysteine
  MOD_RES (605)..(606): Selenocysteine
  MOD_RES (621)..(621): Selenocysteine
  MOD_RES (645)..(645): Selenocysteine
  MOD_RES (658)..(658): Selenocysteine
  MOD_RES (677)..(677): Selenocysteine
  MOD_RES (679)..(679): Selenocysteine
  MOD_RES (682)..(682): Selenocysteine
  MOD_RES (691)..(691): Selenocysteine
  MOD_RES (705)..(705): Selenocysteine
  MOD_RES (712)..(716): Selenocysteine
  MOD_RES (718)..(719): Selenocysteine
  MOD_RES (724)..(724): Selenocysteine
  MOD_RES (727)..(727): Selenocysteine
  MOD_RES (737)..(737): Selenocysteine
  MOD_RES (748)..(748): Selenocysteine
  MOD_RES (807)..(807): Selenocysteine
  MOD_RES (836)..(836): Selenocysteine
  MOD_RES (861)..(861): Selenocysteine
  MOD_RES (868)..(868): Selenocysteine
  MOD_RES (874)..(874): Selenocysteine
  MOD_RES (883)..(883): Selenocysteine
  MOD_RES (906)..(906): Selenocysteine
  MOD_RES (928)..(928): Selenocysteine
  MOD_RES (971)..(971): Selenocysteine
  MOD_RES (979)..(980): Selenocysteine
  MOD_RES (1018)..(1018): Selenocysteine
  MOD_RES (1032)..(1032): Selenocysteine
  MOD_RES (1039)..(1039): Selenocysteine
  MOD_RES (1056)..(1056): Selenocysteine
  MOD_RES (1058)..(1058): Selenocysteine
  MOD_RES (1070)..(1070): Selenocysteine
  MOD_RES (1073)..(1073): Selenocysteine
  MOD_RES (1082)..(1082): Selenocysteine
  MOD_RES (1085)..(1085): Selenocysteine
  MOD_RES (1106)..(1106): Selenocysteine
  MOD_RES (1122)..(1122): Selenocysteine
  MOD_RES (1133)..(1133): Selenocysteine
  MOD_RES (1182)..(1182): Selenocysteine
  MOD_RES (1224)..(1225): Selenocysteine
  MOD_RES (1231)..(1231): Selenocysteine
  MOD_RES (1233)..(1233): Selenocysteine
  MOD_RES (1235)..(1235): Selenocysteine
  MOD_RES (1253)..(1253): Selenocysteine
  MOD_RES (1256)..(1256): Selenocysteine
  MOD_RES (1303)..(1303): Selenocysteine
  MOD_RES (1315)..(1315): Selenocysteine
  MOD_RES (1334)..(1334): Selenocysteine
  MOD_RES (1345)..(1345): Selenocysteine
  MOD_RES (1360)..(1360): Selenocysteine
  MOD_RES (1414)..(1414): Selenocysteine
  MOD_RES (1426)..(1426): Selenocysteine
  MOD_RES (1432)..(1432): Selenocysteine
  MOD_RES (1467)..(1467): Selenocysteine
  MOD_RES (1474)..(1474): Selenocysteine
  MOD_RES (1489)..(1489): Selenocysteine
  MOD_RES (1530)..(1531): Selenocysteine
  MOD_RES (1544)..(1544): Selenocysteine
  MOD_RES (1568)..(1568): Selenocysteine
  MOD_RES (1634)..(1634): Selenocysteine
  MOD_RES (1636)..(1636): Selenocysteine
MESVEKDWGWGLWRNLRCLGHAHQGKCCXEGGISSXXKXSSENGSCCFEKAARKDHVCRFIGCGRNDRFNYVVMQLQGRNLADLRRSQSRGXFXISXXLRLGRQILESIESIHSVGFLHRDIKPSNFAMGRFPSXCRKCYMLDFGLARQFXNSCGDVRPPRAVAGFRGXVRYASINAHRNREMGRHDDLWSLFYMLVEFVVGQLPWRKIKDKEQVGSIKERYDHRLMLKHLPPEFSIFLDHISSLDYFXKPDYQMSIRVXRKSYKVSXSGPQAFNSLSYXSGPGACISSSSFSRMGSSSFRGGLGAGYGGASGGIXXIXVNQSLLSPLNLEVDPNIQAVRXQEEKQIKXLNNKFFSFIDKVRFLEQQNKMLEXKWSLVQQQKMARSNMDNMFESYINNLKWQLEXLGQEKLKLEAELGNMHGLVEDFRNKYEVEISKCXEMENEFVLIKEYVDEAYMNKMELESSLKELXAKISFLRQLYEEEIGSCSPRSRIHLWCCSWXXAASWXWXASSLRSRPEGFPGGCHADXEQRGELAIKDANAKLSELEAALQLASQDMARQLREYQELMNVKLALDIKIAXYRKLLEGEESWLESGMQNMSIHMKXXSSYAGGQSLAYGGLXSPGLSYGLGSSFGSGMGSSSFSHXSSSRAVVMKKIEXRDGKLVSESSNVLPNLRIXAXLLXSVFDNSIKXFGVIESDPFDWEKXGNDGSLXXXXXSXXPQLHXRLXPAAIGIANAXPIPGDLLRENXDEVFPDEQLSDGENGIPVGVSPDKLPGSLGHPRPQEKDVWEEMDANKNKIKLGICKAAXEEENSHGQANGLLNAPSLGSPIRVRSEIXQPDRDIPLVRKLRSIHSFELEKRLXLEPKPDXDKFLEXCLEKMQKDXSAGKESILPALLHKPCVPAVSRXDHIWHYDEEYLPDASKPASANXPEQADGGGSNGFIAVNLSSCKQEIDSKEWVIVDKEQDLQDFRXNEAVGHKXXGSPSDEEPEVLQVLEASPQDEKLQLGPWAENDHLKKEXSGVVLALSAEGPPXAASEQYXDRLELQPGAASQFIAAXPXSLMEAQAEGPLXAIXIPRPSVASXQSXSGSFHCGQQPEKKDLQPMEPXVELYSPRENFSGLVVXEGEPPSGGSRXDLGLQIDHIGHDMLPNIRESNKSQDLGPKELPDHNRLVVREFENLPGEXEEKSILLESDNEDEKLSRGQHCIEISSLPGDLVIVEKDHSAXXEPLDVXKXQXFSVVPNQDKNNEIMKLLXVGXSEISSRDIDPHVEGQIGQVAEMQKNKISKDDDIMSEDLPGHQGDLSXFLHQEGKREKIXPRNGELFHCVSENEHGAPXRKDMVRSSFVXRHSRIPVLAQEIDSXLESSSPVSAKEKLLQKKAYQPDLVKLLVEKRQFKSFLGDLSSASDKLLEEKLAXVPAPFCEEEVLXPFSRLXVDSHLSRSAEDSFLSPIISQSRKSKIPRPVSWVNXDQVNSSXSSQFFPRPPPGKPPXRPGVEARLRRYKVLGSSNSDSDLFSRLAQILQNGSQKPRSXXQCKSPGSPHNPKXPPKSPVVPRRSPSASPRSSSLPRXSSSSPSRAGRPHHDQRSSSPHLGRSKSPPSHSGSSSSRRSCQQEHCKPSKNGLKGSGSLHHHSASXKXPQGKSKPASKLSR

SEQ ID NO: 28885 - protein, 117 aa, Homo sapiens
  MOD_RES (28)..(28): Selenocysteine
  MOD_RES (35)..(36): Selenocysteine
  MOD_RES (38)..(38): Selenocysteine
  MOD_RES (96)..(96): Selenocysteine
  MOD_RES (101)..(101): Selenocysteine
  MOD_RES (115)..(115): Selenocysteine
MSGGGEQLDILSVGILVKERWKVGKCCXEGGISSXXKXSSENGSCCFEKAARVGIWQIFAVASPEAHSPLVPLSGWVDRFWSLLKAFILWDSCIEXSNRRXSLWVAFLVHVGNVXCL

SEQ ID NO: 28886 - protein, 84 aa, Homo sapiens
  MOD_RES (26)..(26): Selenocysteine
  MOD_RES (41)..(41): Selenocysteine
MSGGGEQLDILSVGILVKERWKVGKXMFVDLLAVGGMIDSXMWSCSCRVGIWQIFAVASPEAHSPLVPLSGWVDRFWSLLKAFI

SEQ ID NO: 28887 - protein, 143 aa, Homo sapiens
  MOD_RES (43)..(43): Selenocysteine
  MOD_RES (112)..(112): Selenocysteine
  MOD_RES (114)..(114): Selenocysteine
  MOD_RES (117)..(118): Selenocysteine
MSGGGEQLDILSVGILVKERWKVLRKIGGGGFGEIYDALDMLXRENVALKVESAQQPKQVLKMEVAVLKKLQGKDHVCRFIGCGRNDRFNYVVMQLQGRNLADLRRSQSRGXFXISXXLRLGRQILESIESIHSVGFLHRDIK

SEQ ID NO: 28888 - protein, 443 aa, Homo sapiens
  MOD_RES (43)..(43): Selenocysteine
  MOD_RES (112)..(112): Selenocysteine
  MOD_RES (114)..(114): Selenocysteine
  MOD_RES (117)..(118): Selenocysteine
  MOD_RES (154)..(154): Selenocysteine
  MOD_RES (234)..(234): Selenocysteine
  MOD_RES (242)..(242): Selenocysteine
  MOD_RES (251)..(251): Selenocysteine
  MOD_RES (265)..(265): Selenocysteine
  MOD_RES (272)..(276): Selenocysteine
  MOD_RES (278)..(279): Selenocysteine
  MOD_RES (284)..(284): Selenocysteine
  MOD_RES (287)..(287): Selenocysteine
  MOD_RES (297)..(297): Selenocysteine
  MOD_RES (308)..(308): Selenocysteine
  MOD_RES (367)..(367): Selenocysteine
  MOD_RES (396)..(396): Selenocysteine
  MOD_RES (421)..(421): Selenocysteine
  MOD_RES (428)..(428): Selenocysteine
  MOD_RES (434)..(434): Selenocysteine
MSGGGEQLDILSVGILVKERWKVLRKIGGGGFGEIYDALDMLXRENVALKVESAQQPKQVLKMEVAVLKKLQGKDHVCRFIGCGRNDRFNYVVMQLQGRNLADLRRSQSRGXFXISXXLRLGRQILESIESIHSVGFLHRDIKPPRAVAGFRGXVRYASINAHRNREMGRHDDLWSLFYMLVEFVVGQLPWRKIKDKEQVGSIKERYDHRLMLKHLPPEFSIFLDHISSLDYFXKPDYQLLXSVFDNSIKXFGVIESDPFDWEKXGNDGSLXXXXXSXXPQLHXRLXPAAIGIANAXPIPGDLLRENXDEVFPDEQLSDGENGIPVGVSPDKLPGSLGHPRPQEKDVWEEMDANKNKIKLGICKAAXEEENSHGQANGLLNAPSLGSPIRVRSEIXQPDRDIPLVRKLRSIHSFELEKRLXLEPKPDXDKFLEXWYKIVYFSF

SEQ ID NO: 28889 - protein, 478 aa, Homo sapiens
  MOD_RES (43)..(43): Selenocysteine
  MOD_RES (112)..(112): Selenocysteine
  MOD_RES (114)..(114): Selenocysteine
  MOD_RES (117)..(118): Selenocysteine
  MOD_RES (155)..(155): Selenocysteine
  MOD_RES (171)..(171): Selenocysteine
  MOD_RES (189)..(189): Selenocysteine
  MOD_RES (269)..(269): Selenocysteine
  MOD_RES (277)..(277): Selenocysteine
  MOD_RES (286)..(286): Selenocysteine
  MOD_RES (300)..(300): Selenocysteine
  MOD_RES (307)..(311): Selenocysteine
  MOD_RES (313)..(314): Selenocysteine
  MOD_RES (319)..(319): Selenocysteine
  MOD_RES (322)..(322): Selenocysteine
  MOD_RES (332)..(332): Selenocysteine
  MOD_RES (343)..(343): Selenocysteine
  MOD_RES (402)..(402): Selenocysteine
  MOD_RES (431)..(431): Selenocysteine
  MOD_RES (456)..(456): Selenocysteine
  MOD_RES (463)..(463): Selenocysteine
  MOD_RES (469)..(469): Selenocysteine
MSGGGEQLDILSVGILVKERWKVLRKIGGGGFGEIYDALDMLXRENVALKVESAQQPKQVLKMEVAVLKKLQGKDHVCRFIGCGRNDRFNYVVMQLQGRNLADLRRSQSRGXFXISXXLRLGRQILESIESIHSVGFLHRDIKPSNFAMGRFPSXCRKCYMLDFGLARQFXNSCGDVRPPRAVAGFRGXVRYASINAHRNREMGRHDDLWSLFYMLVEFVVGQLPWRKIKDKEQVGSIKERYDHRLMLKHLPPEFSIFLDHISSLDYFXKPDYQLLXSVFDNSIKXFGVIESDPFDWEKXGNDGSLXXXXXSXXPQLHXRLXPAAIGIANAXPIPGDLLRENXDEVFPDEQLSDGENGIPVGVSPDKLPGSLGHPRPQEKDVWEEMDANKNKIKLGICKAAXEEENSHGQANGLLNAPSLGSPIRVRSEIXQPDRDIPLVRKLRSIHSFELEKRLXLEPKPDXDKFLEXWYKIVYFSF

SEQ ID NO: 28890 - protein, 1244 aa, Homo sapiens
  MOD_RES (43)..(43): Selenocysteine
  MOD_RES (112)..(112): Selenocysteine
  MOD_RES (114)..(114): Selenocysteine
  MOD_RES (117)..(118): Selenocysteine
  MOD_RES (155)..(155): Selenocysteine
  MOD_RES (171)..(171): Selenocysteine
  MOD_RES (189)..(189): Selenocysteine
  MOD_RES (269)..(269): Selenocysteine
  MOD_RES (277)..(277): Selenocysteine
  MOD_RES (286)..(286): Selenocysteine
  MOD_RES (300)..(300): Selenocysteine
  MOD_RES (307)..(311): Selenocysteine
  MOD_RES (313)..(314): Selenocysteine
  MOD_RES (319)..(319): Selenocysteine
  MOD_RES (322)..(322): Selenocysteine
  MOD_RES (332)..(332): Selenocysteine
  MOD_RES (343)..(343): Selenocysteine
  MOD_RES (402)..(402): Selenocysteine
  MOD_RES (431)..(431): Selenocysteine
  MOD_RES (456)..(456): Selenocysteine
  MOD_RES (463)..(463): Selenocysteine
  MOD_RES (469)..(469): Selenocysteine
  MOD_RES (478)..(478): Selenocysteine
  MOD_RES (501)..(501): Selenocysteine
  MOD_RES (523)..(523): Selenocysteine
  MOD_RES (566)..(566): Selenocysteine
  MOD_RES (574)..(575): Selenocysteine
  MOD_RES (613)..(613): Selenocysteine
  MOD_RES (627)..(627): Selenocysteine
  MOD_RES (634)..(634): Selenocysteine
  MOD_RES (651)..(651): Selenocysteine
  MOD_RES (653)..(653): Selenocysteine
  MOD_RES (665)..(665): Selenocysteine
  MOD_RES (668)..(668): Selenocysteine
  MOD_RES (677)..(677): Selenocysteine
  MOD_RES (680)..(680): Selenocysteine
  MOD_RES (701)..(701): Selenocysteine
  MOD_RES (717)..(717): Selenocysteine
  MOD_RES (728)..(728): Selenocysteine
  MOD_RES (777)..(777): Selenocysteine
  MOD_RES (819)..(820): Selenocysteine
  MOD_RES (826)..(826): Selenocysteine
  MOD_RES (828)..(828): Selenocysteine
  MOD_RES (830)..(830): Selenocysteine
  MOD_RES (848)..(848): Selenocysteine
  MOD_RES (851)..(851): Selenocysteine
  MOD_RES (898)..(898): Selenocysteine
  MOD_RES (910)..(910): Selenocysteine
  MOD_RES (929)..(929): Selenocysteine
  MOD_RES (940)..(940): Selenocysteine
  MOD_RES (955)..(955): Selenocysteine
  MOD_RES (1009)..(1009): Selenocysteine
  MOD_RES (1021)..(1021): Selenocysteine
  MOD_RES (1027)..(1027): Selenocysteine
  MOD_RES (1062)..(1062): Selenocysteine
  MOD_RES (1069)..(1069): Selenocysteine
  MOD_RES (1084)..(1084): Selenocysteine
  MOD_RES (1125)..(1126): Selenocysteine
  MOD_RES (1139)..(1139): Selenocysteine
  MOD_RES (1163)..(1163): Selenocysteine
  MOD_RES (1229)..(1229): Selenocysteine
  MOD_RES (1231)..(1231): Selenocysteine
MSGGGEQLDILSVGILVKERWKVLRKIGGGGFGEIYDALDMLXRENVALKVESAQQPKQVLKMEVAVLKKLQGKDHVCRFIGCGRNDRFNYVVMQLQGRNLADLRRSQSRGXFXISXXLRLGRQILESIESIHSVGFLHRDIKPSNFAMGRFPSXCRKCYMLDFGLARQFXNSCGDVRPPRAVAGFRGXVRYASINAHRNREMGRHDDLWSLFYMLVEFVVGQLPWRKIKDKEQVGSIKERYDHRLMLKHLPPEFSIFLDHISSLDYFXKPDYQLLXSVFDNSIKXFGVIESDPFDWEKXGNDGSLXXXXXSXXPQLHXRLXPAAIGIANAXPIPGDLLRENXDEVFPDEQLSDGENGIPVGVSPDKLPGSLGHPRPQEKDVWEEMDANKNKIKLGICKAAXEEENSHGQANGLLNAPSLGSPIRVRSEIXQPDRDIPLVRKLRSIHSFELEKRLXLEPKPDXDKFLEXCLEKMQKDXSAGKESILPALLHKPCVPAVSRXDHIWHYDEEYLPDASKPASANXPEQADGGGSNGFIAVNLSSCKQEIDSKEWVIVDKEQDLQDFRXNEAVGHKXXGSPSDEEPEVLQVLEASPQDEKLQLGPWAENDHLKKEXSGVVLALSAEGPPXAASEQYXDRLELQPGAASQFIAAXPXSLMEAQAEGPLXAIXIPRPSVASXQSXSGSFHCGQQPEKKDLQPMEPXVELYSPRENFSGLVVXEGEPPSGGSRXDLGLQIDHIGHDMLPNIRESNKSQDLGPKELPDHNRLVVREFENLPGEXEEKSILLESDNEDEKLSRGQHCIEISSLPGDLVIVEKDHSAXXEPLDVXKXQXFSVVPNQDKNNEIMKLLXVGXSEISSRDIDPHVEGQIGQVAEMQKNKISKDDDIMSEDLPGHQGDLSXFLHQEGKREKIXPRNGELFHCVSENEHGAPXRKDMVRSSFVXRHSRIPVLAQEIDSXLESSSPVSAKEKLLQKKAYQPDLVKLLVEKRQFKSFLGDLSSASDKLLEEKLAXVPAPFCEEEVLXPFSRLXVDSHLSRSAEDSFLSPIISQSRKSKIPRPVSWVNXDQVNSSXSSQFFPRPPPGKPPXRPGVEARLRRYKVLGSSNSDSDLFSRLAQILQNGSQKPRSXXQCKSPGSPHNPKXPPKSPVVPRRSPSASPRSSSLPRXSSSSPSRAGRPHHDQRSSSPHLGRSKSPPSHSGSSSSRRSCQQEHCKPSKNGLKGSGSLHHHSASXKXPQGKSKPASKLSR

SEQ ID NO: 28891 - protein, 1316 aa, Homo sapiens
  MOD_RES (8)..(8): Selenocysteine
  MOD_RES (47)..(47): Selenocysteine
  MOD_RES (53)..(53): Selenocysteine
  MOD_RES (154)..(154): Selenocysteine
  MOD_RES (161)..(161): Selenocysteine
  MOD_RES (178)..(178): Selenocysteine
  MOD_RES (200)..(200): Selenocysteine
  MOD_RES (231)..(231): Selenocysteine
  MOD_RES (234)..(234): Selenocysteine
  MOD_RES (268)..(268): Selenocysteine
  MOD_RES (276)..(276): Selenocysteine
  MOD_RES (292)..(292): Selenocysteine
  MOD_RES (298)..(298): Selenocysteine
  MOD_RES (311)..(311): Selenocysteine
  MOD_RES (328)..(328): Selenocysteine
  MOD_RES (349)..(349): Selenocysteine
  MOD_RES (352)..(352): Selenocysteine
  MOD_RES (356)..(356): Selenocysteine
  MOD_RES (425)..(425): Selenocysteine
  MOD_RES (483)..(483): Selenocysteine
  MOD_RES (487)..(487): Selenocysteine
  MOD_RES (494)..(494): Selenocysteine
  MOD_RES (585)..(585): Selenocysteine
  MOD_RES (602)..(602): Selenocysteine
  MOD_RES (609)..(609): Selenocysteine
  MOD_RES (613)..(613): Selenocysteine
  MOD_RES (637)..(637): Selenocysteine
  MOD_RES (650)..(650): Selenocysteine
  MOD_RES (657)..(657): Selenocysteine
  MOD_RES (681)..(681): Selenocysteine
  MOD_RES (710)..(710): Selenocysteine
  MOD_RES (757)..(757): Selenocysteine
  MOD_RES (769)..(769): Selenocysteine
  MOD_RES (777)..(777): Selenocysteine
  MOD_RES (785)..(785): Selenocysteine
  MOD_RES (852)..(852): Selenocysteine
  MOD_RES (916)..(916): Selenocysteine
  MOD_RES (955)..(955): Selenocysteine
  MOD_RES (988)..(988): Selenocysteine
  MOD_RES (1036)..(1036): Selenocysteine
  MOD_RES (1074)..(1074): Selenocysteine
  MOD_RES (1091)..(1091): Selenocysteine
  MOD_RES (1103)..(1103): Selenocysteine
  MOD_RES (1115)..(1115): Selenocysteine
  MOD_RES (1133)..(1133): Selenocysteine
  MOD_RES (1145)..(1145): Selenocysteine
  MOD_RES (1147)..(1147): Selenocysteine
  MOD_RES (1165)..(1165): Selenocysteine
  MOD_RES (1173)..(1173): Selenocysteine
  MOD_RES (1248)..(1248): Selenocysteine
  MOD_RES (1264)..(1264): Selenocysteine
  MOD_RES (1298)..(1298): Selenocysteine
MDSQELKXLINYYCQERYFHHVLLVASEGIKRYGSDPVFRFYHAYGXLMEGKXQEALREFEAIKNKQDVSLCSLLALIYAHKMSPNPDREAILESDARVKEQRKGAGEKALYHAGLFLWHIGRHDKAREYIDRMIKISDGSKQGHVLKAWLDIXRGKEPYXKKALKYFEEGLQDGNDXFALLGKAQCLEMRQNYSGALEXVNQIIVNFPSFLPAFVKKMKLQLALQDWDQXVEXAQRLLLQDSQNVEALRMQALYYVCREGDIEKASXKLENLGNXLDAMEPQNAQLFYNIXLAFSRXCGRSQLILQKIQXLLERAFSLNPQQSEFAXELGYQMILQGRVKEALKWYKXAMXLDEXSVSALVGFIQCQLIEGQLQDADQQLEFLNEIQQSIGKSAELIYLHAVLAMKKNKRQEEVINLLNDVLDXHFSQLEGLPLGIQYFEKLNPDFLLEIVMEYLSFCPMQPASPGQPLCPLLRRCISVLEXVVRXVPGLLQXVFLIAKVKYLSGDIEAAFNNLQHCLEHNPSYADAHLLLAQVYLSQEKVKLCSQSLELCLSYDFKVRDYPLYHLIKAQSQKKMGEIADAIKXLHMAMSLPGMKRIGASXKSKDRKXEVDXSHRLSIFLELIDVHRLNGEQHEAXKVLQDAIHEFSGXSEEVRVXIANADLALAQGDIERALSILQNVXAEQPYFIEAREKMADIYLKHRKDKMLYIXCFREIAERMANPRSFLLLGDAYMNILEPEEAIVAYEQALNQNPKDGXLASKMGKALIKXHNYSMAIXYYEAALKXGQKNYLCYDLAELLLKLKWYDKAEKVLQHALAHEPVNELSALMEDGRCQVLLAKVYSKMEKLGDAIXALQQARELQARVLKRVQMEQPDAVPAQKHLAAEICAEIAKHSVAQRDYEKAIKFYREALVHCEXDNKIMLELARLYLAQDDPDSCLRQCALLLQSDQDNEAAXMMMADLMFRKQDYEQAVFHLQQLLERKPDNYMXLSRLIDLLRRCGKLEDVPRFFSMAEKRNSRAKLEPGFQYCKGLYLWYXGEPNDALRHFNKARKDRDWGQNALYNMIEICLNPDNEXVGGEVFENLDGDLGNSXEKQESVQLAVRXAEKLLKELKPQXVQGHVQLRIMENYCLMAXKQKSNVEQALNXFXEIAASEKEHIPALLGMAXAYMILKQXPRARNQLKRIAKMNWNAIDAEEFEKSWLLLADIYIQSAKYDMAEDLLKRCLRHNRSCCKAYEYMGYIMEKEQAYXDAALNYEMAWKYSNRXNPAVGYKLAFNYLKAKRYVDSIDICHQVLEAHPXYPKIRKDILDKARASLRP

SEQ ID NO: 28892 - protein, 283 aa, Homo sapiens
  MOD_RES (1)..(1): Any amino acid
  MOD_RES (3)..(3): Selenocysteine
  MOD_RES (41)..(41): Selenocysteine
  MOD_RES (58)..(58): Selenocysteine
  MOD_RES (70)..(70): Selenocysteine
  MOD_RES (82)..(82): Selenocysteine
  MOD_RES (100)..(100): Selenocysteine
  MOD_RES (112)..(112): Selenocysteine
  MOD_RES (114)..(114): Selenocysteine
  MOD_RES (132)..(132): Selenocysteine
  MOD_RES (140)..(140): Selenocysteine
  MOD_RES (215)..(215): Selenocysteine
  MOD_RES (231)..(231): Selenocysteine
  MOD_RES (265)..(265): Selenocysteine
XYXGEPNDALRHFNKARKDRDWGQNALYNMIEICLNPDNEXVGGEVFENLDGDLGNSXEKQESVQLAVRXAEKLLKELKPQXVQGHVQLRIMENYCLMAXKQKSNVEQALNXFXEIAASEKEHIPALLGMAXAYMILKQXPRARNQLKRIAKMNWNAIDAEEFEKSWLLLADIYIQSAKYDMAEDLLKRCLRHNRSCCKAYEYMGYIMEKEQAYXDAALNYEMAWKYSNRXNPAVGYKLAFNYLKAKRYVDSIDICHQVLEAHPXYPKIRKDILDKARASLRP

SEQ ID NO: 28893 - protein, 523 aa, Homo sapiens
  MOD_RES (17)..(17): Selenocysteine
  MOD_RES (40)..(40): Selenocysteine
  MOD_RES (44)..(44): Selenocysteine
  MOD_RES (53)..(53): Selenocysteine
  MOD_RES (69)..(69): Selenocysteine
  MOD_RES (120)..(120): Selenocysteine
  MOD_RES (188)..(188): Selenocysteine
  MOD_RES (283)..(284): Selenocysteine
  MOD_RES (327)..(327): Selenocysteine
  MOD_RES (375)..(375): Selenocysteine
  MOD_RES (378)..(378): Selenocysteine
  MOD_RES (425)..(425): Selenocysteine
  MOD_RES (489)..(489): Selenocysteine
  MOD_RES (500)..(500): Selenocysteine
  MOD_RES (503)..(503): Selenocysteine
MMLSRAKPAVGRGVQHXDKRKKKGRKIPKLEELLSKRDFXGAIXLLEEYENAXKEENCNSEVWVNLACXYFFLGMYKQAEAAGFKASKSRLQNRLLFHLAHKFNDEKKLMSFHQNLQDVXEDQLSLASIHYMRSHYQEAIDIYKRILLDNREYLALNVYVALCYYKLDYYDVSQEVLAVYLQQIPDSXIALNLKACNHFRLYNGRAAEAELKSLMDNASSSFEFAKELIRHNLVVFRGGEGALQVLPPLVDVIPEARLNLVIYYLRQDDVQEAYNLIKDLEPXXPQEYILKGVVNAALGQEMGSRDHMKIAQQFFQLVGGSASECDXIPGRQCMASCFFLLKQFDDVLIYLNSFKSYFYNDDIFNFNYAQAKAAXGNXSEGEEAFLLIQSEKMKNDYIYLSWLARCYIMNKKPRLAWELYLKMEXSGESFSLLQLIANDCYKMGQFYYSAKAFDVLERLDPNPEYWEGKRGACVGIFQMIIAGREPKEXLREVLHLLRSXGNXQVEYMIRIMKKWAKENRVSI

SEQ ID NO: 28894 - protein, 447 aa, Homo sapiens
  MOD_RES (17)..(17): Selenocysteine
  MOD_RES (40)..(40): Selenocysteine
  MOD_RES (44)..(44): Selenocysteine
  MOD_RES (59)..(59): Selenocysteine
  MOD_RES (84)..(84): Selenocysteine
  MOD_RES (100)..(100): Selenocysteine
  MOD_RES (207)..(208): Selenocysteine
  MOD_RES (251)..(251): Selenocysteine
  MOD_RES (299)..(299): Selenocysteine
  MOD_RES (302)..(302): Selenocysteine
  MOD_RES (349)..(349): Selenocysteine
  MOD_RES (413)..(413): Selenocysteine
  MOD_RES (424)..(424): Selenocysteine
  MOD_RES (427)..(427): Selenocysteine
MMLSRAKPAVGRGVQHXDKRKKKGRKIPKLEELLSKRDFXGAIXLLEFKRHVGEEEEDXNLWIGYCAFHLGDYKRALEEYENAXKEENCNSEVWVNLACXYFFLGMYKQAEAAGFKASKSRLQNRLLFHLAHKAELKSLMDNASSSFEFAKELIRHNLVVFRGGEGALQVLPPLVDVIPEARLNLVIYYLRQDVQEAYNLIKDLEPXXPQEYILKGVVNAALGQEMGSRDHMKIAQQFFQLVGGSASECDXIPGRQCMASCFFLLKQFDDVLIYLNSFKSYFYNDDIFNFNYAQAKAAXGNXSEGEEAFLLIQSEKMKNDYIYLSWLARCYIMNKKPRLAWELYLKMEXSGESFSLLQLIANDCYKMGQFYYSAKAFDVLERLDPNPEYWEGKRGACVGIFQMIIAGREPKEXLREVLHLLRSXGNXQVEYMIRIMKKWAKENRVSI

SEQ ID NO: 28895 - protein, 135 aa, Homo sapiens
  MOD_RES (17)..(17): Selenocysteine
  MOD_RES (40)..(40): Selenocysteine
  MOD_RES (44)..(44): Selenocysteine
  MOD_RES (59)..(59): Selenocysteine
  MOD_RES (84)..(84): Selenocysteine
  MOD_RES (100)..(100): Selenocysteine
MMLSRAKPAVGRGVQHXDKRKKKGRKIPKLEELLSKRDFXGAIXLLEFKRHVGEEEEDXNLWIGYCAFHLGDYKRALEEYENAXKEENCNSEVWVNLACXYFFLGMYKQAEAAGFKASKSRLQNRLLFHLAHKEK

SEQ ID NO: 28896 - protein, 271 aa, Homo sapiens
  MOD_RES (17)..(17): Selenocysteine
  MOD_RES (40)..(40): Selenocysteine
  MOD_RES (44)..(44): Selenocysteine
  MOD_RES (59)..(59): Selenocysteine
  MOD_RES (84)..(84): Selenocysteine
  MOD_RES (100)..(100): Selenocysteine
  MOD_RES (151)..(151): Selenocysteine
  MOD_RES (219)..(219): Selenocysteine
MMLSRAKPAVGRGVQHXDKRKKKGRKIPKLEELLSKRDFXGAIXLLEFKRHVGEEEEDXNLWIGYCAFHLGDYKRALEEYENAXKEENCNSEVWVNLACXYFFLGMYKQAEAAGFKASKSRLQNRLLFHLAHKFNDEKKLMSFHQNLQDVXEDQLSLASIHYMRSHYQEAIDIYKRILLDNREYLALNVYVALCYYKLDYYDVSQEVLAVYLQQIPDSXIALNLKACNHFRLYNGRAAEAELKSLMDNASSSFEFAKELIRHNLVNNDFPS

SEQ ID NO: 28897 - protein, 487 aa, Homo sapiens
  MOD_RES (17)..(17): Selenocysteine
  MOD_RES (40)..(40): Selenocysteine
  MOD_RES (44)..(44): Selenocysteine
  MOD_RES (59)..(59): Selenocysteine
  MOD_RES (84)..(84): Selenocysteine
  MOD_RES (100)..(100): Selenocysteine
  MOD_RES (151)..(151): Selenocysteine
  MOD_RES (219)..(219): Selenocysteine
  MOD_RES (314)..(315): Selenocysteine
  MOD_RES (358)..(358): Selenocysteine
  MOD_RES (406)..(406): Selenocysteine
  MOD_RES (409)..(409): Selenocysteine
  MOD_RES (456)..(456): Selenocysteine
  MOD_RES (483)..(483): Selenocysteine
MMLSRAKPAVGRGVQHXDKRKKKGRKIPKLEELLSKRDFXGAIXLLEFKRHVGEEEEDXNLWIGYCAFHLGDYKRALEEYENAXKEENCNSEVWVNLACXYFFLGMYKQAEAAGFKASKSRLQNRLLFHLAHKFNDEKKLMSFHQNLQDVXEDQLSLASIHYMRSHYQEAIDIYKRILLDNREYLALNVYVALCYYKLDYYDVSQEVLAVYLQQIPDSXIALNLKACNHFRLYNGRAAEAELKSLMDNASSSFEFAKELIRHNLVVFRGGEGALQVLPPLVDVIPEARLNLVIYYLRQDDVQEAYNLIKDLEPXXPQEYILKGVVNAALGQEMGSRDHMKIAQQFFQLVGGSASECDXIPGRQCMASCFFLLKQFDDVLIYLNSFKSYFYNDDIFNFNYAQAKAAXGNXSEGEEAFLLIQSEKMKNDYIYLSWLARCYIMNKKPRLAWELYLKMEXSGESFSLLQLIANDCYKRDPSRSAPFXEKHR

SEQ ID NO: 28898 - protein, 554 aa, Homo sapiens
  MOD_RES (17)..(17): Selenocysteine
  MOD_RES (40)..(40): Selenocysteine
  MOD_RES (44)..(44): Selenocysteine
  MOD_RES (59)..(59): Selenocysteine
  MOD_RES (84)..(84): Selenocysteine
  MOD_RES (100)..(100): Selenocysteine
  MOD_RES (151)..(151): Selenocysteine
  MOD_RES (219)..(219): Selenocysteine
  MOD_RES (314)..(315): Selenocysteine
  MOD_RES (358)..(358): Selenocysteine
  MOD_RES (406)..(406): Selenocysteine
  MOD_RES (409)..(409): Selenocysteine
  MOD_RES (456)..(456): Selenocysteine
  MOD_RES (520)..(520): Selenocysteine
  MOD_RES (531)..(531): Selenocysteine
  MOD_RES (534)..(534): Selenocysteine
MMLSRAKPAVGRGVQHXDKRKKKGRKIPKLEELLSKRDFXGAIXLLEFKRHVGEEEEDXNLWIGYCAFHLGDYKRALEEYENAXKEENCNSEVWVNLACXYFFLGMYKQAEAAGFKASKSRLQNRLLFHLAHKFNDEKKLMSFHQNLQDVXEDQLSLASIHYMRSHYQEAIDIYKRILLDNREYLALNVYVALCYYKLDYYDVSQEVLAVYLQQIPDSXIALNLKACNHFRLYNGRAAEAELKSLMDNASSSFEFAKELIRHNLVVFRGGEGALQVLPPLVDVIPEARLNLVIYYLRQDDVQEAYNLIKDLEPXXPQEYILKGVVNAALGQEMGSRDHMKIAQQFFQLVGGSASECDXIPGRQCMASCFFLLKQFDDVLIYLNSFKSYFYNDDIFNFNYAQAKAAXGNXSEGEEAFLLIQSEKMKNDYIYLSWLARCYIMNKKPRLAWELYLKMEXSGESFSLLQLIANDCYKMGQFYYSAKAFDVLERLDPNPEYWEGKRGACVGIFQMIIAGREPKEXLREVLHLLRSXGNXQVEYMIRIMKKWAKENRVSI

SEQ ID NO: 28899 - protein, 423 aa, Homo sapiens
  MOD_RES (17)..(17): Selenocysteine
  MOD_RES (40)..(40): Selenocysteine
  MOD_RES (44)..(44): Selenocysteine
  MOD_RES (59)..(59): Selenocysteine
  MOD_RES (84)..(84): Selenocysteine
  MOD_RES (100)..(100): Selenocysteine
  MOD_RES (183)..(184): Selenocysteine
  MOD_RES (227)..(227): Selenocysteine
  MOD_RES (275)..(275): Selenocysteine
  MOD_RES (278)..(278): Selenocysteine
  MOD_RES (325)..(325): Selenocysteine
  MOD_RES (389)..(389): Selenocysteine
  MOD_RES (400)..(400): Selenocysteine
  MOD_RES (403)..(403): Selenocysteine
MMLSRAKPAVGRGVQHXDKRKKKGRKIPKLEELLSKRDFXGAIXLLEFKRHVGEEEEDXNLWIGYCAFHLGDYKRALEEYENAXKEENCNSEVWVNLACXYFFLGMYKQAEAAGFKASKSRLQNRLLFHLAHKVVFRGGEGALQVLPPLVDVIPEARLNLVIYYLRQDDVQEAYNLIKDLEPXXPQEYILKGVVNAALGQEMGSRDHMKIAQQFFQLVGGSASECDXIPGRQCMASCFFLLKQFDDVLIYLNSFKSYFYNDDIFNFNYAQAKAAXGNXSEGEEAFLLIQSEKMKNDYIYLSWLARCYIMNKKPRLAWELYLKMEXSGESFSLLQLIANDCYKMGQFYYSAKAFDVLERLDPNPEYWEGKRGACVGIFQMIIAGREPKEXLREVLHLLRSXGNXQVEYMIRIMKKWAKENRVSI

SEQ ID NO: 28900 - protein, 15 aa, Homo sapiens
  MOD_RES (4)..(4): Selenocysteine
MEKXLQQMEEVVGSV

SEQ ID NO: 28901 - protein, 440 aa, Homo sapiens
  MOD_RES (33)..(33): Selenocysteine
  MOD_RES (53)..(53): Selenocysteine
  MOD_RES (74)..(74): Selenocysteine
  MOD_RES (81)..(81): Selenocysteine
  MOD_RES (124)..(124): Selenocysteine
  MOD_RES (131)..(131): Selenocysteine
  MOD_RES (151)..(151): Selenocysteine
  MOD_RES (153)..(153): Selenocysteine
  MOD_RES (196)..(196): Selenocysteine
  MOD_RES (232)..(232): Selenocysteine
  MOD_RES (275)..(275): Selenocysteine
  MOD_RES (286)..(286): Selenocysteine
  MOD_RES (318)..(318): Selenocysteine
  MOD_RES (326)..(326): Selenocysteine
  MOD_RES (346)..(347): Selenocysteine
  MOD_RES (354)..(354): Selenocysteine
  MOD_RES (412)..(412): Selenocysteine
  MOD_RES (432)..(432): Selenocysteine
MMADEEEEVKPILQKLQELVDQLYSFRDCYFEXHSVEDAGRKQQDVQKEMEKXLQQMEEVVGSVQGKAQVLMLXGKALNVXPDYSPKAEELLSKAVKLEPELVEAWNQLGEVYWKKGDVAAAHXCFSGALXHCRNKVSLQNLSMVLRQLRXDXEDEHSHHVMDSVRQAKLAVQMDVHDGRSWYILGNSYLSLYFSXGQNPKISQQALSAYAQAEKVDRKASSNPDLHLNRAXLHKYEESYGEALEGFSRAAALDPAWPEPRQREQQLLEFLDRLXSLLESKGKVKXKKLQSMLGSLRPAHLGPCSDGHYQSASGQKVXLELKPLSXLQPGVNSGAVILGKVVFSLXXEEKVPFXFGLVDSDGPCYAVMVYNIVQSWGVLIGDSVAIPEPNLRLHRIQHKGKDYSFSSVRVEXPLLLVVNGKPQGSSSQAVAXVASRPQCE

SEQ ID NO: 28902 - protein, 128 aa, Homo sapiens
  MOD_RES (33)..(33): Selenocysteine
  MOD_RES (53)..(53): Selenocysteine
  MOD_RES (74)..(74): Selenocysteine
  MOD_RES (81)..(81): Selenocysteine
MMADEEEEVKPILQKLQELVDQLYSFRDCYFEXHSVEDAGRKQQDVQKEMEKXLQQMEEVVGSVQGKAQVLMLXGKALNVXPDYSPKAEELLSKAVKLEPELVEAWNQLVQEQSLLAKPVNGASSAAD

SEQ ID NO: 28903 - protein, 905 aa, Homo sapiens
  MOD_RES (12)..(12): Selenocysteine
  MOD_RES (50)..(50): Selenocysteine
  MOD_RES (76)..(76): Selenocysteine
  MOD_RES (80)..(80): Selenocysteine
  MOD_RES (82)..(82): Selenocysteine
  MOD_RES (103)..(103): Selenocysteine
  MOD_RES (115)..(115): Selenocysteine
  MOD_RES (142)..(142): Selenocysteine
  MOD_RES (186)..(186): Selenocysteine
  MOD_RES (208)..(208): Selenocysteine
  MOD_RES (233)..(233): Selenocysteine
  MOD_RES (248)..(248): Selenocysteine
  MOD_RES (256)..(256): Selenocysteine
  MOD_RES (263)..(263): Selenocysteine
  MOD_RES (270)..(270): Selenocysteine
  MOD_RES (320)..(320): Selenocysteine
  MOD_RES (369)..(369): Selenocysteine
  MOD_RES (374)..(374): Selenocysteine
  MOD_RES (385)..(385): Selenocysteine
  MOD_RES (395)..(395): Selenocysteine
  MOD_RES (417)..(417): Selenocysteine
  MOD_RES (442)..(442): Selenocysteine
  MOD_RES (468)..(468): Selenocysteine
  MOD_RES (510)..(510): Selenocysteine
  MOD_RES (512)..(512): Selenocysteine
  MOD_RES (558)..(558): Selenocysteine
  MOD_RES (569)..(569): Selenocysteine
  MOD_RES (580)..(580): Selenocysteine
  MOD_RES (625)..(625): Selenocysteine
  MOD_RES (641)..(641): Selenocysteine
  MOD_RES (674)..(674): Selenocysteine
  MOD_RES (731)..(731): Selenocysteine
  MOD_RES (742)..(742): Selenocysteine
  MOD_RES (746)..(746): Selenocysteine
  MOD_RES (750)..(750): Selenocysteine
  MOD_RES (780)..(780): Selenocysteine
  MOD_RES (802)..(802): Selenocysteine
  MOD_RES (819)..(819): Selenocysteine
  MOD_RES (830)..(831): Selenocysteine
  MOD_RES (848)..(848): Selenocysteine
  MOD_RES (852)..(852): Selenocysteine
  MOD_RES (896)..(896): Selenocysteine
MEGESSRFEIHXPVSDKKKKKCSIHKERPQKHSHEIFRDSSLVNEQSQIXRRKKRKKDFQHLISSPLKKSRICDEXANAXSXLKKRKKRRYSALEVDEEAGVXVVLVDKENINNXPKHFRKDVDVVCVDMSIEQKLPRKPKXDKFQVLAKSHAHKSEALHSKVREKKNKKHQRKAASWESQRARDXLPQSESHQEESWLSVGPGGEIXELPASAHKNKSKKKKKKSSNREYEXLAMPEGSQAGREAGXDMQESQPXVGLDDEXPQLLGPXHKKKSKKKKKKKSNHQEFEALAMPEGSQVGSEVGADMQESRPAVGLHGEXAGIPAPAYKNKSKKKKKKSNHQEFEAVAMPESLESAYPEGSQVGSEVGXVEGSXALKGFKESNSXKKKSKKRKLXSVKRARVSGDDFSVPSKNSESXLFDSVEGDGAMMEEGVKSRPRQKKXQACLASKHVQEAPRLEPANEEHNVEXAEDSEIRYLSADSGDADDSDADLGSAVKQLQEFIPNIKDRAXSXIKRMYRDDLERFKEFKAQGVAIKFGKFSVKENKQLEKNVEDFLALXGIESADKLLYXDRYPEEKSVIXNLKRRYSFRLHIGRNIARPWKLIYYRAKKMFDVNNYKGRYSEGDXEKLKMYHSLLGNDWKXIGEMVARSSLSVALKFSQISSQRNRGAWSKSEXRKLIKAVEEVILKKMSPQELKEVDSKLQENPESCLSIVREKLYKGISWVEVEAKVQXRNWMQCKSKWXEILXKRMXNGRRIYYGMNALRAKVSLIERLYEINVEDXNEIDWEDLASAIGDVPPSYVQXKFSRLKAVYVPFWQKKXFPEIIDYLYEXXLPLLKEKLEKMMEKKGXKIQXPAAPKQVFPFRDIFYYEDDSEGEDIEKESEGQAPCMAHACNSSXLGGQGRWII

SEQ ID NO: 28904 - protein, 390 aa, Homo sapiens
  MOD_RES (43)..(43): Selenocysteine
  MOD_RES (54)..(54): Selenocysteine
  MOD_RES (65)..(65): Selenocysteine
  MOD_RES (110)..(110): Selenocysteine
  MOD_RES (126)..(126): Selenocysteine
  MOD_RES (159)..(159): Selenocysteine
  MOD_RES (216)..(216): Selenocysteine
  MOD_RES (227)..(227): Selenocysteine
  MOD_RES (231)..(231): Selenocysteine
  MOD_RES (235)..(235): Selenocysteine
  MOD_RES (265)..(265): Selenocysteine
  MOD_RES (287)..(287): Selenocysteine
  MOD_RES (304)..(304): Selenocysteine
  MOD_RES (315)..(316): Selenocysteine
  MOD_RES (333)..(333): Selenocysteine
  MOD_RES (337)..(337): Selenocysteine
  MOD_RES (381)..(381): Selenocysteine
MYRDDLERFKEFKAQGVAIKFGKFSVKENKQLEKNVEDFLALXGIESADKLLYXDRYPEEKSVIXNLKRRYSFRLHIGRNIARPWKLIYYRAKKMFDVNNYKGRYSEGDXEKLKMYHSLLGNDWKXIGEMVARSSLSVALKFSQISSQRNRGAWSKSEXRKLIKAVEEVILKKMSPQELKEVDSKLQENPESCLSIVREKLYKGISWVEVEAKVQXRNWMQCKSKWXEILXKRMXNGRRIYYGMNALRAKVSLIERLYEINVEDXNEIDWEDLASAIGDVPPSYVQXKFSRLKAVYVPFWQKKXFPEIIDYLYEXXLPLLKEKLEKMMEKKGXKIQXPAAPKQVFPFRDIFYYEDDSEGEDIEKESEGQAPCMAHACNSSXLGGQGRWII

SEQ ID NO: 28905 - protein, 1089 aa, Homo sapiens
  MOD_RES (6)..(6): Selenocysteine
  MOD_RES (22)..(22): Selenocysteine
  MOD_RES (24)..(24): Selenocysteine
  MOD_RES (26)..(26): Selenocysteine
  MOD_RES (35)..(35): Selenocysteine
  MOD_RES (59)..(59): Selenocysteine
  MOD_RES (62)..(62): Selenocysteine
  MOD_RES (79)..(79): Selenocysteine
  MOD_RES (85)..(85): Selenocysteine
  MOD_RES (129)..(129): Selenocysteine
  MOD_RES (141)..(141): Selenocysteine
  MOD_RES (215)..(215): Selenocysteine
  MOD_RES (218)..(218): Selenocysteine
  MOD_RES (222)..(222): Selenocysteine
  MOD_RES (242)..(242): Selenocysteine
  MOD_RES (283)..(283): Selenocysteine
  MOD_RES (288)..(288): Selenocysteine
  MOD_RES (383)..(383): Selenocysteine
  MOD_RES (400)..(400): Selenocysteine
  MOD_RES (462)..(462): Selenocysteine
  MOD_RES (465)..(465): Selenocysteine
  MOD_RES (480)..(480): Selenocysteine
  MOD_RES (531)..(531): Selenocysteine
  MOD_RES (548)..(548): Selenocysteine
  MOD_RES (558)..(558): Selenocysteine
  MOD_RES (565)..(565): Selenocysteine
  MOD_RES (574)..(574): Selenocysteine
  MOD_RES (578)..(578): Selenocysteine
  MOD_RES (596)..(596): Selenocysteine
  MOD_RES (601)..(601): Selenocysteine
  MOD_RES (605)..(605): Selenocysteine
  MOD_RES (616)..(616): Selenocysteine
  MOD_RES (664)..(664): Selenocysteine
  MOD_RES (672)..(672): Selenocysteine
  MOD_RES (674)..(674): Selenocysteine
  MOD_RES (715)..(715): Selenocysteine
  MOD_RES (744)..(744): Selenocysteine
  MOD_RES (774)..(774): Selenocysteine
  MOD_RES (803)..(805): Selenocysteine
  MOD_RES (848)..(848): Selenocysteine
  MOD_RES (919)..(919): Selenocysteine
  MOD_RES (935)..(935): Selenocysteine
  MOD_RES (962)..(962): Selenocysteine
  MOD_RES (977)..(977): Selenocysteine
  MOD_RES (1042)..(1042): Selenocysteine
  MOD_RES (1056)..(1056): Selenocysteine
  MOD_RES (1078)..(1079): Selenocysteine
MAVFDXPEEAFGVLRPVCVQLXKXQXVENVEHLQXRLQAVSDSALQELQQYILFPLRFXLKXPGPKRERLIQSVVECLXFVLSSXCVKEQELLQELFSELSACLYSPSSQKPAAVSEELKLAVIQGLSXLMHSAYGDIILXFYEPSILPRLGFAVSLLLGLAEQEKSKQIKIAALKCLQVLLLQCDCQDHPRSLDELEQKQLGDLFASFLPGISXALXRLIXGDFKQGHSIVVSSLKIFYKXVSFIMADEQLKRISKVQAKPAVEHRVAELMVYREADWVKKXGDKLXILIKKIIECVSVHPHWKVRLELVELVEDLLLKCSQSLVECAGPLLKALVGLVNDESPEIQAQCNKVLRHFADQKVVVGNKALADILSESLHSLAXSLPRLMNSQDDQGKFSXLSLLLGYLKLLGPKINFVLNSVAHLQRLSKALIQVLELDVADIKIVEERRWNSDDLNASPKXSAXQPWNRIQRRYFRFFXDERIFMLLRQVCQLLGYYGNLYLLVDHFMELYHQSVVYRKQAAMILNELVXGAAGLEVEDLHEKHIKXNPEELREIVXSILEEYXSQENWYLVXCLEXEEMGEELMMEHPGLQAIXSGEHXCQVXSFLAFSKPSPXICSMNSNIWQICIQLEGIGQFAYALGKDFCLLLMSALYPVLEKAGDQXLLISQVAXSXMMDVCRACGYDSLQHLINQNSDYLVNGISLNLRHLALHPHXPKVLEVMLRNSDANLLPLVADVVQDVLAXLDQFYDKRAASFVSVLHALMAALAQWFPDXGNLGHLQEQSLGEEGSHLNQRPAALEKSXXXAEDIEQFLLNYLKEKDVADGNVSDFDNEEEEQSVPPKVDENDXRPDVEPPLPLQIQIAMDVMERCIHLLSDKNLQIRLKVLDVLDLCVVVLQSHKNQLLPLAHQAWPSLVHRLXRDAPLAVLRAFKVLRXLGSKCGDFLRSRFCKDVLPKLAGSLVXQAPISARAGPVYSHXLAFKLQLAVLQGLGPLCERLDLGEGDLNKVADACLIYLSVKQPVKLQEAARSVFLHLMKVDPDSXWFLLNELYCPVQFXPPHPSLHPVQLHGASGQQNPYXXNVLQLLKELQ

SEQ ID NO: 28906 - protein, 32 aa, Homo sapiens
  MOD_RES (1)..(1): Any amino acid
XQFLLNYLKEKDVADGNVSDFDNEEGNLFILA

SEQ ID NO: 28907 - protein, 512 aa, Homo sapiens
  MOD_RES (9)..(9): Selenocysteine
  MOD_RES (87)..(87): Selenocysteine
  MOD_RES (105)..(105): Selenocysteine
  MOD_RES (108)..(108): Selenocysteine
  MOD_RES (116)..(116): Selenocysteine
  MOD_RES (121)..(121): Selenocysteine
  MOD_RES (140)..(140): Selenocysteine
  MOD_RES (161)..(161): Selenocysteine
  MOD_RES (174)..(174): Selenocysteine
  MOD_RES (190)..(190): Selenocysteine
  MOD_RES (223)..(223): Selenocysteine
  MOD_RES (229)..(229): Selenocysteine
  MOD_RES (244)..(244): Selenocysteine
  MOD_RES (270)..(270): Selenocysteine
  MOD_RES (276)..(276): Selenocysteine
  MOD_RES (289)..(289): Selenocysteine
  MOD_RES (315)..(315): Selenocysteine
  MOD_RES (325)..(325): Selenocysteine
  MOD_RES (345)..(345): Selenocysteine
  MOD_RES (348)..(348): Selenocysteine
  MOD_RES (363)..(363): Selenocysteine
  MOD_RES (368)..(368): Selenocysteine
  MOD_RES (380)..(380): Selenocysteine
  MOD_RES (415)..(415): Selenocysteine
  MOD_RES (425)..(425): Selenocysteine
  MOD_RES (435)..(435): Selenocysteine
  MOD_RES (442)..(442): Selenocysteine
  MOD_RES (454)..(454): Selenocysteine
  MOD_RES (485)..(485): Selenocysteine
MEGVSSHRXLSYSRWSYDSVLDDEGRNLRQQKLDRQRALLEQKQKKKRQEPLMVQANADGRPRSRRARQSEEQAPLVESYLSSSGSXSYQVQEADSLASVQLGAXRPXAPASAKRXKAAAXAGGQGGAARKEKKGKHKGXSGPAALAEDKSEAQGPVQILXVGQSDHAQDAGEXAAGGGERPSGQDLRAXMQRKGISSSMSFDEDEEDEEENSSSSSQLNSNXRPSSAXSRKSVREAASAPSPXAPEQPVDVEVQDLEEFALRPAPQGIXIKCRIXRDKKGMDRGMYPXYFLHLDREDGKKVFLLAGRKRKKSKXSNYLISVDPXDLSRGGDSYIGKLRSNLMGXKFXVYDNGVNPQKASSSXLESGXLRQELAAVCYEXNVLGFKGPRKMSVIVPGMNMVHERVSIRPRNEHEXLLARWQNKNXESIIELQNKXPVWNDDXQSYVLNFHGRVXQASVKNFQIIHGNDPDYIVMQFGRVAEDVFXMDYNYPLCALQAFAIALSSFDSKLACE

SEQ ID NO: 28908 - protein, 561 aa, Homo sapiens
  MOD_RES (5)..(5): Selenocysteine
  MOD_RES (18)..(18): Selenocysteine
  MOD_RES (26)..(26): Selenocysteine
  MOD_RES (54)..(55): Selenocysteine
  MOD_RES (136)..(136): Selenocysteine
  MOD_RES (154)..(154): Selenocysteine
  MOD_RES (157)..(157): Selenocysteine
  MOD_RES (165)..(165): Selenocysteine
  MOD_RES (170)..(170): Selenocysteine
  MOD_RES (189)..(189): Selenocysteine
  MOD_RES (210)..(210): Selenocysteine
  MOD_RES (223)..(223): Selenocysteine
  MOD_RES (239)..(239): Selenocysteine
  MOD_RES (272)..(272): Selenocysteine
  MOD_RES (278)..(278): Selenocysteine
  MOD_RES (293)..(293): Selenocysteine
  MOD_RES (319)..(319): Selenocysteine
  MOD_RES (325)..(325): Selenocysteine
  MOD_RES (338)..(338): Selenocysteine
  MOD_RES (364)..(364): Selenocysteine
  MOD_RES (374)..(374): Selenocysteine
  MOD_RES (394)..(394): Selenocysteine
  MOD_RES (397)..(397): Selenocysteine
  MOD_RES (412)..(412): Selenocysteine
  MOD_RES (417)..(417): Selenocysteine
  MOD_RES (429)..(429): Selenocysteine
  MOD_RES (464)..(464): Selenocysteine
  MOD_RES (474)..(474): Selenocysteine
  MOD_RES (484)..(484): Selenocysteine
  MOD_RES (491)..(491): Selenocysteine
  MOD_RES (503)..(503): Selenocysteine
  MOD_RES (534)..(534): Selenocysteine
MGARXPLPSFWVSFFAEXGILFPGGXPWPMGSQHSKQHRKPGPLKRGHRRDRRXXRRKYWKEGREIARVLDDEGRNLRQQKLDRQRALLEQKQKKKRQEPLMVQANADGRPRSRRARQSEEQAPLVESYLSSSGSXSYQVQEADSLASVQLGAXRPXAPASAKRXKAAAXAGGQGGAARKEKKGKHKGXSGPAALAEDKSEAQGPVQILXVGQSDHAQDAGEXAAGGGERPSGQDLRAXMQRKGISSSMSFDEDEEDEEENSSSSSQLNSNXRPSSAXSRKSVREAASAPSPXAPEQPVDVEVQDLEEFALRPAPQGIXIKCRIXRDKKGMDRGMYPXYFLHLDREDGKKVFLLAGRKRKKSKXSNYLISVDPXDLSRGGDSYIGKLRSNLMGXKFXVYDNGVNPQKASSSXLESGXLRQELAAVCYEXNVLGFKGPRKMSVIVPGMNMVHERVSIRPRNEHEXLLARWQNKNXESIIELQNKXPVWNDDXQSYVLNFHGRVXQASVKNFQIIHGNDPDYIVMQFGRVAEDVFXMDYNYPLCALQAFAIALSSFDSKLACE

SEQ ID NO: 28909 - protein, 506 aa, Homo sapiens
  MOD_RES (2)..(2): Selenocysteine
  MOD_RES (81)..(81): Selenocysteine
  MOD_RES (99)..(99): Selenocysteine
  MOD_RES (102)..(102): Selenocysteine
  MOD_RES (110)..(110): Selenocysteine
  MOD_RES (115)..(115): Selenocysteine
  MOD_RES (134)..(134): Selenocysteine
  MOD_RES (155)..(155): Selenocysteine
  MOD_RES (168)..(168): Selenocysteine
  MOD_RES (184)..(184): Selenocysteine
  MOD_RES (217)..(217): Selenocysteine
  MOD_RES (223)..(223): Selenocysteine
  MOD_RES (238)..(238): Selenocysteine
  MOD_RES (264)..(264): Selenocysteine
  MOD_RES (270)..(270): Selenocysteine
  MOD_RES (283)..(283): Selenocysteine
  MOD_RES (309)..(309): Selenocysteine
  MOD_RES (319)..(319): Selenocysteine
  MOD_RES (339)..(339): Selenocysteine
  MOD_RES (342)..(342): Selenocysteine
  MOD_RES (357)..(357): Selenocysteine
  MOD_RES (362)..(362): Selenocysteine
  MOD_RES (374)..(374): Selenocysteine
  MOD_RES (409)..(409): Selenocysteine
  MOD_RES (419)..(419): Selenocysteine
  MOD_RES (429)..(429): Selenocysteine
  MOD_RES (436)..(436): Selenocysteine
  MOD_RES (448)..(448): Selenocysteine
  MOD_RES (479)..(479): Selenocysteine
MXSKPHSDWIPYSVLDDEGRNLRQQKLDRQRALLEQKQKKKRQEPLMVQANADGRPRSRRARQSEEQAPLVESYLSSSGSXSYQVQEADSLASVQLGAXRPXAPASAKRXKAAAXAGGQGGAARKEKKGKHKGXSGPAALAEDKSEAQGPVQILXVGQSDHAQDAGEXAAGGGERPSGQDLRAXMQRKGISSSMSFDEDEEDEEENSSSSSQLNSNXRPSSAXSRKSVREAASAPSPXAPEQPVDVEVQDLEEFALRPAPQGIXIKCRIXRDKKGMDRGMYPXYFLHLDREDGKKVFLLAGRKRKKSKXSNYLISVDPXDLSRGGDSYIGKLRSNLMGXKFXVYDNGVNPQKASSSXLESGXLRQELAAVCYEXNVLGFKGPRKMSVIVPGMNMVHERVSIRPRNEHEXLLARWQNKNXESIIELQNKXPVWNDDXQSYVLNFHGRVXQASVKNFQIIHGNDPDYIVMQFGRVAEDVFXMDYNYPLCALQAFAIALSSFDSKLACE

SEQ ID NO: 28910 - protein, 199 aa, Homo sapiens
  MOD_RES (4)..(4): Selenocysteine
  MOD_RES (9)..(9): Selenocysteine
  MOD_RES (25)..(25): Selenocysteine
  MOD_RES (127)..(127): Selenocysteine
  MOD_RES (138)..(138): Selenocysteine
  MOD_RES (150)..(150): Selenocysteine
  MOD_RES (175)..(175): Selenocysteine
MNGXRNWCXLVDVHPEDQAAAGRKXYAMVSSHSAGHSLASELVESHDGHEEIIKVYLKGRSGDKMIHEKNINQLKSEVQYIQEARNCLQKLREDISSKLDRNLGDSLHRQEIQVVLEKPNGFSQSPXALYSSPPEVDXCINEDVESLRKXVQDLLAKLQEAKRQHQSDCVAFEVXLSRYQREAEQSNVALQREEDRCPE

SEQ ID NO: 28911 - protein, 365 aa, Homo sapiens
  MOD_RES (4)..(4): Selenocysteine
  MOD_RES (9)..(9): Selenocysteine
  MOD_RES (25)..(25): Selenocysteine
  MOD_RES (127)..(127): Selenocysteine
  MOD_RES (138)..(138): Selenocysteine
  MOD_RES (150)..(150): Selenocysteine
  MOD_RES (175)..(175): Selenocysteine
  MOD_RES (216)..(216): Selenocysteine
  MOD_RES (251)..(251): Selenocysteine
  MOD_RES (297)..(297): Selenocysteine
  MOD_RES (334)..(334): Selenocysteine
  MOD_RES (340)..(340): Selenocysteine
  MOD_RES (365)..(365): Selenocysteine
MNGXRNWCXLVDVHPEDQAAAGRKXYAMVSSHSAGHSLASELVESHDGHEEIIKVYLKGRSGDKMIHEKNINQLKSEVQYIQEARNCLQKLREDISSKLDRNLGDSLHRQEIQVVLEKPNGFSQSPXALYSSPPEVDXCINEDVESLRKXVQDLLAKLQEAKRQHQSDCVAFEVXLSRYQREAEQSNVALQREEDRVEQKEAEVGELQRRLLGMEXEHQALLAKVREGEVALEELRSNNADCQAEREKAAXLEKEVAGLREKIHHLDDMLKSQQRKVRQMIEQLQNSKAVIQSKDAXIQELKEKIAYLEAENLEMHDRMEHLIEKQISHGNFSXQARAKXENPGSIRISKPPSPKPMPVIRVVEX

SEQ ID NO: 28912 - protein, 335 aa, Homo sapiens
  MOD_RES (4)..(4): Selenocysteine
  MOD_RES (9)..(9): Selenocysteine
  MOD_RES (25)..(25): Selenocysteine
  MOD_RES (97)..(97): Selenocysteine
  MOD_RES (108)..(108): Selenocysteine
  MOD_RES (120)..(120): Selenocysteine
  MOD_RES (145)..(145): Selenocysteine
  MOD_RES (186)..(186): Selenocysteine
  MOD_RES (221)..(221): Selenocysteine
  MOD_RES (267)..(267): Selenocysteine
  MOD_RES (304)..(304): Selenocysteine
  MOD_RES (310)..(310): Selenocysteine
  MOD_RES (335)..(335): Selenocysteine
MNGXRNWCXLVDVHPEDQAAAGRKXYAMVSSHSAGHSLASELVESHDGHEEIIKVYLKGRSGDKMIHEKNINQLKSEVQYIQEVVLEKPNGFSQSPXALYSSPPEVDXCINEDVESLRKXVQDLLAKLQEAKRQHQSDCVAFEVXLSRYQREAEQSNVALQREEDRVEQKEAEVGELQRRLLGMEXEHQALLAKVREGEVALEELRSNNADCQAEREKAAXLEKEVAGLREKIHHLDDMLKSQQRKVRQMIEQLQNSKAVIQSKDAXIQELKEKIAYLEAENLEMHDRMEHLIEKQISHGNFSXQARAKXENPGSIRISKPPSPKPMPVIRVVEX

SEQ ID NO: 28913 - protein, 390 aa, Homo sapiens
  MOD_RES (4)..(4): Selenocysteine
  MOD_RES (9)..(9): Selenocysteine
  MOD_RES (29)..(29): Selenocysteine
  MOD_RES (35)..(35): Selenocysteine
  MOD_RES (50)..(50): Selenocysteine
  MOD_RES (152)..(152): Selenocysteine
  MOD_RES (163)..(163): Selenocysteine
  MOD_RES (175)..(175): Selenocysteine
  MOD_RES (200)..(200): Selenocysteine
  MOD_RES (241)..(241): Selenocysteine
  MOD_RES (276)..(276): Selenocysteine
  MOD_RES (322)..(322): Selenocysteine
  MOD_RES (359)..(359): Selenocysteine
  MOD_RES (365)..(365): Selenocysteine
  MOD_RES (390)..(390): Selenocysteine
MNGXRNWCXLVDVHPEDQAAGSVDILRLXLQGELXGDELEHIAQKAGRKXYAMVSSHSAGHSLASELVESHDGHEEIIKVYLKGRSGDKMIHEKNINQLKSEVQYIQEARNCLQKLREDISSKLDRNLGDSLHRQEIQVVLEKPNGFSQSPXALYSSPPEVDXCINEDVESLRKXVQDLLAKLQEAKRQHQSDCVAFEVXLSRYQREAEQSNVALQREEDRVEQKEAEVGELQRRLLGMEXEHQALLAKVREGEVALEELRSNNADCQAEREKAAXLEKEVAGLREKIHHLDDMLKSQQRKVRQMIEQLQNSKAVIQSKDAXIQELKEKIAYLEAENLEMHDRMEHLIEKQISHGNFSXQARAKXENPGSIRISKPPSPKPMPVIRVVEX

SEQ ID NO: 28914 - protein, 540 aa, Homo sapiens
  MOD_RES (7)..(7): Selenocysteine
  MOD_RES (46)..(46): Selenocysteine
  MOD_RES (55)..(55): Selenocysteine
  MOD_RES (67)..(67): Selenocysteine
  MOD_RES (86)..(86): Selenocysteine
  MOD_RES (105)..(105): Selenocysteine
  MOD_RES (192)..(192): Selenocysteine
  MOD_RES (197)..(197): Selenocysteine
  MOD_RES (241)..(241): Selenocysteine
  MOD_RES (257)..(257): Selenocysteine
  MOD_RES (302)..(302): Selenocysteine
  MOD_RES (308)..(308): Selenocysteine
  MOD_RES (328)..(328): Selenocysteine
  MOD_RES (345)..(345): Selenocysteine
  MOD_RES (355)..(355): Selenocysteine
  MOD_RES (378)..(378): Selenocysteine
  MOD_RES (392)..(392): Selenocysteine
  MOD_RES (408)..(408): Selenocysteine
  MOD_RES (420)..(420): Selenocysteine
  MOD_RES (452)..(452): Selenocysteine
  MOD_RES (474)..(474): Selenocysteine
  MOD_RES (482)..(482): Selenocysteine
  MOD_RES (513)..(513): Selenocysteine
MPLRDEXLREVWASDSGHEEESLSPEAPRRPKQRPAPAQRLRKKRXEAPESPCPXGSKPRKPGAGRXGRPREEPSPDPAQARAPQXVYARFLRDPEAKKRDPREXFLVARAPDAEDEEEEEEEDEEDEEEEAEEKKEKILLPPKKPLREKSSADLKERRAKAQGPRGDLGSPDPPPKPLRVRNKEAPAGEGXKMRKXKKKGSGEADKDPSGSPASARKSPAAMFLVGEGSPDKKALKKKGXPKGARKEEEEEEEAAXVIKKSNQKGKAKGKGKKKEERAPSPPVEVDEPREFVLRPAPQGRXVRCRLXRDKKGMDRGMYPSYFLHLDXEKKVFLLAGRKRKRSKXANYLISIDPXNLSRGGENFIGKLRSNLLGNRFXVFDNGQNPQRGYSXNVASLRQELAAVIYEXNVLGFRGPRRMXVIIPGMSAENERVPIRPRNASDGLLVRWQNKXLESLIELHNKPPVWNDDSGSYXLNFQGRVXQASVKNFQIVHADDPDYIVLQFGRVAEDAFXLDYRYPLCALQAFAIALSSFDGKLACE

SEQ ID NO: 28915 - protein, 542 aa, Homo sapiens
  MOD_RES (7)..(7): Selenocysteine
  MOD_RES (46)..(46): Selenocysteine
  MOD_RES (55)..(55): Selenocysteine
  MOD_RES (67)..(67): Selenocysteine
  MOD_RES (86)..(86): Selenocysteine
  MOD_RES (105)..(105): Selenocysteine
  MOD_RES (192)..(192): Selenocysteine
  MOD_RES (197)..(197): Selenocysteine
  MOD_RES (241)..(241): Selenocysteine
  MOD_RES (257)..(257): Selenocysteine
  MOD_RES (304)..(304): Selenocysteine
  MOD_RES (310)..(310): Selenocysteine
  MOD_RES (330)..(330): Selenocysteine
  MOD_RES (347)..(347): Selenocysteine
  MOD_RES (357)..(357): Selenocysteine
  MOD_RES (380)..(380): Selenocysteine
  MOD_RES (394)..(394): Selenocysteine
  MOD_RES (410)..(410): Selenocysteine
  MOD_RES (422)..(422): Selenocysteine
  MOD_RES (454)..(454): Selenocysteine
  MOD_RES (476)..(476): Selenocysteine
  MOD_RES (484)..(484): Selenocysteine
  MOD_RES (515)..(515): Selenocysteine
MPLRDEXLREVWASDSGHEEESLSPEAPRRPKQRPAPAQRLRKKRXEAPESPCPXGSKPRKPGAGRXGRPREEPSPDPAQARAPQXVYARFLRDPEAKKRDPREXFLVARAPDAEDEEEEEEEDEEDEEEEAEEKKEKILLPPKKPLREKSSADLKERRAKAQGPRGDLGSPDPPPKPLRVRNKEAPAGEGXKMRKXKKKGSGEADKDPSGSPASARKSPAAMFLVGEGSPDKKALKKKGXPKGARKEEEEEEEAAXVIKKSNQKGKAKGKGKKKAKEERAPSPPVEVDEPREFVLRPAPQGRXVRCRLXRDKKGMDRGMYPSYFLHLDXEKKVFLLAGRKRKRSKXANYLISIDPXNLSRGGENFIGKLRSNLLGNRFXVFDNGQNPQRGYSXNVASLRQELAAVIYEXNVLGFRGPRRMXVIIPGMSAENERVPIRPRNASDGLLVRWQNKXLESLIELHNKPPVWNDDSGSYXLNFQGRVXQASVKNFQIVHADDPDYIVLQFGRVAEDAFXLDYRYPLCALQAFAIALSSFDGKLACE

SEQ ID NO: 28916 - protein, 489 aa, Homo sapiens
  MOD_RES (7)..(7): Selenocysteine
  MOD_RES (46)..(46): Selenocysteine
  MOD_RES (55)..(55): Selenocysteine
  MOD_RES (139)..(139): Selenocysteine
  MOD_RES (144)..(144): Selenocysteine
  MOD_RES (188)..(188): Selenocysteine
  MOD_RES (204)..(204): Selenocysteine
  MOD_RES (251)..(251): Selenocysteine
  MOD_RES (257)..(257): Selenocysteine
  MOD_RES (277)..(277): Selenocysteine
  MOD_RES (294)..(294): Selenocysteine
  MOD_RES (304)..(304): Selenocysteine
  MOD_RES (327)..(327): Selenocysteine
  MOD_RES (341)..(341): Selenocysteine
  MOD_RES (357)..(357): Selenocysteine
  MOD_RES (369)..(369): Selenocysteine
  MOD_RES (401)..(401): Selenocysteine
  MOD_RES (423)..(423): Selenocysteine
  MOD_RES (431)..(431): Selenocysteine
  MOD_RES (462)..(462): Selenocysteine
MPLRDEXLREVWASDSGHEEESLSPEAPRRPKQRPAPAQRLRKKRXEAPESPCPXGSKPRKPGEEEEEEEDEEDEEEEAEEKKEKILLPPKKPLREKSSADLKERRAKAQGPRGDLGSPDPPPKPLRVRNKEAPAGEGXKMRKXKKKGSGEADKDPSGSPASARKSPAAMFLVGEGSPDKKALKKKGXPKGARKEEEEEEEAAXVIKKSNQKGKAKGKGKKKAKEERAPSPPVEVDEPREFVLRPAPQGRXVRCRLXRDKKGMDRGMYPSYFLHLDXEKKVFLLAGRKRKRSKXANYLISIDPXNLSRGGENFIGKLRSNLLGNRFXVFDNGQNPQRGYSXNVASLRQELAAVIYEXNVLGFRGPRRMXVIIPGMSAENERVPIRPRNASDGLLVRWQNKXLESLIELHNKPPVWNDDSGSYXLNFQGRVXQASVKNFQIVHADDPDYIVLQFGRVAEDAFXLDYRYPLCALQAFAIALSSFDGKLACE

SEQ ID NO: 28917 - protein, 161 aa, Homo sapiens
  MOD_RES (7)..(7): Selenocysteine
  MOD_RES (46)..(46): Selenocysteine
  MOD_RES (55)..(55): Selenocysteine
  MOD_RES (144)..(144): Selenocysteine
  MOD_RES (149)..(149): Selenocysteine
MPLRDEXLREVWASDSGHEEESLSPEAPRRPKQRPAPAQRLRKKRXEAPESPCPXGSKPRKPGEFLPAEEEEEEEDEEDEEEEAEEKKEKILLPPKKPLREKSSADLKERRAKAQGPRGDLGSPDPPPKPLRVRNKEAPAGEGXKMRKXKKKGSGEADKDP

SEQ ID NO: 28918 - protein, 187 aa, Homo sapiens
  MOD_RES (77)..(77): Selenocysteine
  MOD_RES (92)..(92): Selenocysteine
  MOD_RES (95)..(95): Selenocysteine
  MOD_RES (154)..(154): Selenocysteine
MRLQKLEQQRRLFEKKQRQKRQELLMVQANPDASPWLWRSCLREERLLGDRGLGNPFLRKKVSEAHLPSGIHSALGXVSCGGDGRGERGLPXPRXEAVFRNLGLQSPFLSWLPDNSDAELEEVSVENGSVSPPPFKQSPRIRRKGWQAHQRPGXRAEGESDSQDMGDAHKSPNMGPNPGMDGDCVYE

SEQ ID NO: 28919 - protein, 520 aa, Homo sapiens
  MOD_RES (7)..(7): Selenocysteine
  MOD_RES (96)..(96): Selenocysteine
  MOD_RES (111)..(111): Selenocysteine
  MOD_RES (114)..(114): Selenocysteine
  MOD_RES (173)..(173): Selenocysteine
  MOD_RES (226)..(226): Selenocysteine
  MOD_RES (228)..(228): Selenocysteine
  MOD_RES (248)..(248): Selenocysteine
  MOD_RES (284)..(284): Selenocysteine
  MOD_RES (291)..(291): Selenocysteine
  MOD_RES (311)..(311): Selenocysteine
  MOD_RES (330)..(330): Selenocysteine
  MOD_RES (340)..(340): Selenocysteine
  MOD_RES (360)..(360): Selenocysteine
  MOD_RES (363)..(363): Selenocysteine
  MOD_RES (377)..(377): Selenocysteine
  MOD_RES (380)..(380): Selenocysteine
  MOD_RES (406)..(406): Selenocysteine
  MOD_RES (412)..(412): Selenocysteine
  MOD_RES (449)..(449): Selenocysteine
  MOD_RES (460)..(460): Selenocysteine
  MOD_RES (468)..(468): Selenocysteine
  MOD_RES (497)..(497): Selenocysteine
  MOD_RES (499)..(499): Selenocysteine
MSQDNDXLMRDILGHELAAMRLQKLEQQRRLFEKKQRQKRQELLMVQANPDASPWLWRSCLREERLLGDRGLGNPFLRKKVSEAHLPSGIHSALGXVSCGGDGRGERGLPXPRXEAVFRNLGLQSPFLSWLPDNSDAELEEVSVENGSVSPPPFKQSPRIRRKGWQAHQRPGXRAEGESDSQDMGDAHKSPNMGPNPGMDGDCVYENLAFQKEEDLEKKREASESXGXNSSAAHNEELSKALKGEGGXDSDHMRHEASLAIRSPCPGLEEDMEAYVLRPALPGXMMQCYLXRDKHGVDKGLFPLYYLYLEXSDSLQRFLLAGRKRRRSKXSNYLISLDPXHLSRDGDNFVGKVRSNVFSXKFXIFDNGVNPDREHLXRNXARIRQELGAVCYEPNVLGYLGPRKMXVILPGXNSQNQRINVQPLNEQESLLSRYQRGDKQGLLLLHNKXPSWDKENGVYXLNFHGRVXRASVKNFQIVDPKHQEHLVLQFGRVGPDXFXMDFCFPFSPLQAFSICLSSFN

SEQ ID NO: 28920 - protein, 231 aa, Homo sapiens
  MOD_RES (7)..(7): Selenocysteine
  MOD_RES (127)..(127): Selenocysteine
  MOD_RES (180)..(180): Selenocysteine
  MOD_RES (182)..(182): Selenocysteine
  MOD_RES (202)..(202): Selenocysteine
MSQDNDXLMRDILGHELAAMRLQKLEQQRRLFEKKQRQKRQELLMVQANPDASPWLWRSCLREERLLGDRVFRNLGLQSPFLSWLPDNSDAELEEVSVENGSVSPPPFKQSPRIRRKGWQAHQRPGXRAEGESDSQDMGDAHKSPNMGPNPGMDGDCVYENLAFQKEEDLEKKREASESXGXNSSAAHNEELSKALKGEGGXDSDHMRHEASLAIRSPCPGLEEDMEAYVL

SEQ ID NO: 28921 - protein, 210 aa, Homo sapiens
  MOD_RES (7)..(7): Selenocysteine
  MOD_RES (93)..(93): Selenocysteine
  MOD_RES (108)..(108): Selenocysteine
  MOD_RES (111)..(111): Selenocysteine
  MOD_RES (170)..(170): Selenocysteine
MSQDNDXLMRDILGHELAAMRLQKLEQQRRLFEKKQRQKRQELLMVQANPDASPWLWRSCLREERLLGLGNPFLRKKVSEAHLPSGIHSALGXVSCGGDGRGERGLPXPRXEAVFRNLGLQSPFLSWLPDNSDAELEEVSVENGSVSPPPFKQSPRIRRKGWQAHQRPGXRAEGESDSQDMGDAHKSPNMGPNPGMDGDCVYENLAFQKE

SEQ ID NO: 28922 - protein, 80 aa, Homo sapiens
  MOD_RES (9)..(9): Selenocysteine
  MOD_RES (17)..(17): Selenocysteine
  MOD_RES (37)..(37): Selenocysteine
  MOD_RES (57)..(57): Selenocysteine
  MOD_RES (59)..(59): Selenocysteine
WDKENGVYXLNFHGRVXRASVKNFQIVDPKHRELLEXSLAGPEEHLVLQFGRVGPDXFXMDFCFPFSPLQAFSICLSSFN

SEQ ID NO: 28923 - protein, 442 aa, Homo sapiens
  MOD_RES (69)..(69): Selenocysteine
  MOD_RES (76)..(76): Selenocysteine
  MOD_RES (115)..(115): Selenocysteine
  MOD_RES (118)..(118): Selenocysteine
  MOD_RES (143)..(143): Selenocysteine
  MOD_RES (164)..(164): Selenocysteine
  MOD_RES (166)..(166): Selenocysteine
  MOD_RES (168)..(168): Selenocysteine
  MOD_RES (173)..(173): Selenocysteine
  MOD_RES (201)..(201): Selenocysteine
  MOD_RES (220)..(220): Selenocysteine
  MOD_RES (246)..(246): Selenocysteine
  MOD_RES (276)..(276): Selenocysteine
  MOD_RES (279)..(279): Selenocysteine
  MOD_RES (299)..(299): Selenocysteine
  MOD_RES (310)..(310): Selenocysteine
  MOD_RES (329)..(329): Selenocysteine
  MOD_RES (354)..(354): Selenocysteine
  MOD_RES (372)..(372): Selenocysteine
  MOD_RES (384)..(384): Selenocysteine
  MOD_RES (415)..(415): Selenocysteine
MEASRCRLSPSGDSVFHEEMMKMRQAKLDYQRLLLEKRQRKKRLEPFMVQPNPEARLRRAKPRASDEQXPLVNCHXPHSNVILHGIDGPAAVLKPDEVHAPSVSSSVVEEDAENXVDXASKPGLQERLQKHDISESVNFDEEXDGISQSACLERPNSASSQNSXDXGXSGSAXAAQPADNLLGDIDDLEDFVYSPAPQGVXVRCRIIRDKRGMDRGLFPXYYMYLEKEENQKIFLLAARKRKKSKXANYLISIDPVDLSREGESYVGKLRSNLMGXKFXVYDRGICPMKGRGLVGAAHXRQELAAISYEXNVLGFKGPRKMSVIIPGMXLNHKQIPYQPQNNHDSLLSRWQNRXMENLVELHNKAPVWNSDXQSYVLNFRGRVXQASVKNFQIVHKNDPDYIVMQFGRVADDVFXLDYNYPLCAVQAFGIGLSSFDSKLACE

SEQ ID NO: 28924 - protein, 501 aa, Homo sapiens
  MOD_RES (69)..(69): Selenocysteine
  MOD_RES (76)..(76): Selenocysteine
  MOD_RES (115)..(115): Selenocysteine
  MOD_RES (118)..(118): Selenocysteine
  MOD_RES (143)..(143): Selenocysteine
  MOD_RES (164)..(164): Selenocysteine
  MOD_RES (166)..(166): Selenocysteine
  MOD_RES (168)..(168): Selenocysteine
  MOD_RES (173)..(173): Selenocysteine
  MOD_RES (201)..(201): Selenocysteine
  MOD_RES (220)..(220): Selenocysteine
  MOD_RES (246)..(246): Selenocysteine
  MOD_RES (276)..(276): Selenocysteine
  MOD_RES (279)..(279): Selenocysteine
  MOD_RES (299)..(299): Selenocysteine
  MOD_RES (310)..(310): Selenocysteine
  MOD_RES (329)..(329): Selenocysteine
  MOD_RES (354)..(354): Selenocysteine
  MOD_RES (372)..(372): Selenocysteine
  MOD_RES (384)..(384): Selenocysteine
  MOD_RES (415)..(415): Selenocysteine
  MOD_RES (441)..(441): Selenocysteine
  MOD_RES (464)..(464): Selenocysteine
  MOD_RES (480)..(480): Selenocysteine
  MOD_RES (485)..(485): Selenocysteine
MEASRCRLSPSGDSVFHEEMMKMRQAKLDYQRLLLEKRQRKKRLEPFMVQPNPEARLRRAKPRASDEQXPLVNCHXPHSNVILHGIDGPAAVLKPDEVHAPSVSSSVVEEDAENXVDXASKPGLQERLQKHDISESVNFDEEXDGISQSACLERPNSASSQNSXDXGXSGSAXAAQPADNLLGDIDDLEDFVYSPAPQGVXVRCRIIRDKRGMDRGLFPXYYMYLEKEENQKIFLLAARKRKKSKXANYLISIDPVDLSREGESYVGKLRSNLMGXKFXVYDRGICPMKGRGLVGAAHXRQELAAISYEXNVLGFKGPRKMSVIIPGMXLNHKQIPYQPQNNHDSLLSRWQNRXMENLVELHNKAPVWNSDXQSYVLNFRGRVXQASVKNFQIVHKNDPDYIVMQFGRVADDVFXLDYNYPLCAVQAFGIGLSSFDKCIQXLRMQELCELHRQHHSAASLVHRXVCQRWVGHPWRLLPQXSLLWXDLSPPPVVPAPHQISM

SEQ ID NO: 28925 - protein, 39 aa, Homo sapiens
MEASRCRLSPSGDSVFHEEMMKMRQAKLDYQVLMVQLLS

SEQ ID NO: 28926 - protein, 137 aa, Homo sapiens
  MOD_RES (3)..(3): Selenocysteine
  MOD_RES (6)..(6): Selenocysteine
  MOD_RES (26)..(26): Selenocysteine
  MOD_RES (37)..(37): Selenocysteine
  MOD_RES (56)..(56): Selenocysteine
  MOD_RES (81)..(81): Selenocysteine
  MOD_RES (99)..(99): Selenocysteine
  MOD_RES (111)..(111): Selenocysteine
MGXKFXVYDRGICPMKGRGLVGAAHXRQELAAISYEXNVLGFKGPRKMSVIIPGMXLNHKQIPYQPQNNHDSLLSRWQNRXMENLVELHNKAPVWNSDXQSYVLNFRGRVXQASVKNFQIVHKNDPDYIVMQFGRVA

SEQ ID NO: 28927 - protein, 170 aa, Homo sapiens
  MOD_RES (50)..(50): Selenocysteine
  MOD_RES (57)..(57): Selenocysteine
  MOD_RES (96)..(96): Selenocysteine
  MOD_RES (99)..(99): Selenocysteine
  MOD_RES (124)..(124): Selenocysteine
  MOD_RES (145)..(145): Selenocysteine
  MOD_RES (153)..(153): Selenocysteine
  MOD_RES (156)..(156): Selenocysteine
  MOD_RES (169)..(169): Selenocysteine
MMKMRQAKLDYQRLLLEKRQRKKRLEPFMVQPNPEARLRRAKPRASDEQXPLVNCHXPHSNVILHGIDGPAAVLKPDEVHAPSVSSSVVEEDAENXVDXASKPGLQERLQKHDISESVNFDEEXDGISQSACLERPNSASSQNSXFSSFCQKXEDXGYRHFRFCYCRPXS

SEQ ID NO: 28928 - protein, 133 aa, Homo sapiens
  MOD_RES (1)..(1): Any amino acid
  MOD_RES (6)..(6): Selenocysteine
  MOD_RES (31)..(31): Selenocysteine
  MOD_RES (49)..(49): Selenocysteine
  MOD_RES (61)..(61): Selenocysteine
  MOD_RES (92)..(92): Selenocysteine
  MOD_RES (114)..(114): Selenocysteine
XIPGMXLNHKQIPYQPQNNHDSLLSRWQNRXMENLVELHNKAPVWNSDXQSYVLNFRGRVXQASVKNFQIVHKNDPDYIVMQFGRVADDVFXLDYNYPLCAVQAFGIGLSSFDXDWPAPILVKSGCDHICDQL

SEQ ID NO: 28929 - protein, 109 aa, Homo sapiens
  MOD_RES (1)..(1): Any amino acid
  MOD_RES (20)..(20): Selenocysteine
  MOD_RES (38)..(38): Selenocysteine
  MOD_RES (50)..(50): Selenocysteine
  MOD_RES (81)..(81): Selenocysteine
  MOD_RES (107)..(107): Selenocysteine
XPYQPQNNHDSLLSRWQNRXMENLVELHNKAPVWNSDXQSYVLNFRGRVXQASVKNFQIVHKNDPDYIVMQFGRVADDVFXLDYNYPLCAVQAFGIGLSSFDRVPLXAI

SEQ ID NO: 28930 - protein, 678 aa, Homo sapiens
  MOD_RES (48)..(48): Selenocysteine
  MOD_RES (58)..(58): Selenocysteine
  MOD_RES (60)..(60): Selenocysteine
  MOD_RES (70)..(70): Selenocysteine
  MOD_RES (99)..(99): Selenocysteine
  MOD_RES (132)..(132): Selenocysteine
  MOD_RES (138)..(138): Selenocysteine
  MOD_RES (171)..(171): Selenocysteine
  MOD_RES (176)..(176): Selenocysteine
  MOD_RES (186)..(186): Selenocysteine
  MOD_RES (232)..(232): Selenocysteine
  MOD_RES (259)..(259): Selenocysteine
  MOD_RES (263)..(263): Selenocysteine
  MOD_RES (279)..(279): Selenocysteine
  MOD_RES (294)..(294): Selenocysteine
  MOD_RES (308)..(308): Selenocysteine
  MOD_RES (336)..(336): Selenocysteine
  MOD_RES (339)..(339): Selenocysteine
  MOD_RES (388)..(388): Selenocysteine
  MOD_RES (399)..(399): Selenocysteine
  MOD_RES (410)..(410): Selenocysteine
  MOD_RES (415)..(415): Selenocysteine
  MOD_RES (443)..(443): Selenocysteine
  MOD_RES (447)..(447): Selenocysteine
  MOD_RES (459)..(459): Selenocysteine
  MOD_RES (491)..(491): Selenocysteine
  MOD_RES (506)..(506): Selenocysteine
  MOD_RES (581)..(581): Selenocysteine
  MOD_RES (591)..(591): Selenocysteine
  MOD_RES (600)..(600): Selenocysteine
  MOD_RES (606)..(606): Selenocysteine
  MOD_RES (619)..(619): Selenocysteine
  MOD_RES (628)..(628): Selenocysteine
  MOD_RES (639)..(639): Selenocysteine
  MOD_RES (677)..(677): Selenocysteine
MYAAVEHGPVLCSDSNILCLSWKGRVPKSEKEKPVCRRRYYEEGWLAXGNGRGVVGVXFXSSHCRRDRSXPQRINFNLRGHNSEVVLVRWNEPYQKLAXCDADGGIFVWIQYEGRWSVELVNDRGAQVSDFXWSHDGXQALISYRDGFVLVGSVSGQRHWSSEINLESQIXCGIWXPDDQQVLFGXADGQVIVMDCHGRMLAHVLLHESDGVLGMSWNYPIFLVEDSSESDXDSDDYAPPQDGPAAYPIPVQNIKPLLXVSFXSGDISLMNNYDDLSPXVIRSGLKEVVAQWCXQGDLLAVAGMERQXQLGELPNGPLLKSAMVKFYNVRGEHIFXLDXLVQRPIISICWGHRDSRLLMASGPALYVVRVEHRVSSLQLLCQQAIASXLREDKDVSKLXLPPRLCSYLSXAFIPXIKPPIPDPNNMRDFVSYPSAGNERLHCXMKRXEDDPEVGGPCYXLYLEYLGGLVPILKGRRISKLRPEFVIMDPRXDSKPDEIYGNSLISXVIDSCNCSDSSDIELSDDWAAKKSPKISRASKSPKLPRISIEARKSPKLPRAAQELSRSPRLPLRKPSVGSPSLXRREFPFEDIXQHNYLAQVXSNIWGXKFKIVGLAAFLPXNLGAVIYKXSLLHLQPRQMXIYLPEVRKISMDYINLPVFNPNVFSEDEDDLPGDAVWXD

SEQ ID NO: 28931 - protein, 1543 aa, Homo sapiens
  MOD_RES (48)..(48): Selenocysteine
  MOD_RES (58)..(58): Selenocysteine
  MOD_RES (60)..(60): Selenocysteine
  MOD_RES (70)..(70): Selenocysteine
  MOD_RES (99)..(99): Selenocysteine
  MOD_RES (132)..(132): Selenocysteine
  MOD_RES (138)..(138): Selenocysteine
  MOD_RES (171)..(171): Selenocysteine
  MOD_RES (176)..(176): Selenocysteine
  MOD_RES (186)..(186): Selenocysteine
  MOD_RES (232)..(232): Selenocysteine
  MOD_RES (259)..(259): Selenocysteine
  MOD_RES (263)..(263): Selenocysteine
  MOD_RES (279)..(279): Selenocysteine
  MOD_RES (294)..(294): Selenocysteine
  MOD_RES (308)..(308): Selenocysteine
  MOD_RES (336)..(336): Selenocysteine
  MOD_RES (339)..(339): Selenocysteine
  MOD_RES (388)..(388): Selenocysteine
  MOD_RES (399)..(399): Selenocysteine
  MOD_RES (410)..(410): Selenocysteine
  MOD_RES (415)..(415): Selenocysteine
  MOD_RES (443)..(443): Selenocysteine
  MOD_RES (447)..(447): Selenocysteine
  MOD_RES (459)..(459): Selenocysteine
  MOD_RES (491)..(491): Selenocysteine
  MOD_RES (506)..(506): Selenocysteine
  MOD_RES (581)..(581): Selenocysteine
  MOD_RES (591)..(591): Selenocysteine
  MOD_RES (600)..(600): Selenocysteine
  MOD_RES (606)..(606): Selenocysteine
  MOD_RES (619)..(619): Selenocysteine
  MOD_RES (628)..(628): Selenocysteine
  MOD_RES (639)..(639): Selenocysteine
  MOD_RES (673)..(673): Selenocysteine
  MOD_RES (686)..(686): Selenocysteine
  MOD_RES (704)..(704): Selenocysteine
  MOD_RES (725)..(725): Selenocysteine
  MOD_RES (728)..(729): Selenocysteine
  MOD_RES (733)..(733): Selenocysteine
  MOD_RES (742)..(742): Selenocysteine
  MOD_RES (787)..(787): Selenocysteine
  MOD_RES (808)..(808): Selenocysteine
  MOD_RES (829)..(829): Selenocysteine
  MOD_RES (840)..(840): Selenocysteine
  MOD_RES (846)..(847): Selenocysteine
  MOD_RES (875)..(875): Selenocysteine
  MOD_RES (881)..(881): Selenocysteine
  MOD_RES (889)..(890): Selenocysteine
  MOD_RES (905)..(905): Selenocysteine
  MOD_RES (913)..(913): Selenocysteine
  MOD_RES (915)..(915): Selenocysteine
  MOD_RES (924)..(924): Selenocysteine
  MOD_RES (928)..(928): Selenocysteine
  MOD_RES (930)..(930): Selenocysteine
  MOD_RES (942)..(942): Selenocysteine
  MOD_RES (947)..(947): Selenocysteine
  MOD_RES (955)..(955): Selenocysteine
  MOD_RES (986)..(986): Selenocysteine
  MOD_RES (995)..(995): Selenocysteine
  MOD_RES (1024)..(1024): Selenocysteine
  MOD_RES (1036)..(1036): Selenocysteine
  MOD_RES (1043)..(1043): Selenocysteine
  MOD_RES (1056)..(1056): Selenocysteine
  MOD_RES (1081)..(1081): Selenocysteine
  MOD_RES (1089)..(1089): Selenocysteine
  MOD_RES (1115)..(1115): Selenocysteine
  MOD_RES (1139)..(1139): Selenocysteine
  MOD_RES (1142)..(1142): Selenocysteine
  MOD_RES (1178)..(1178): Selenocysteine
  MOD_RES (1180)..(1180): Selenocysteine
  MOD_RES (1183)..(1183): Selenocysteine
  MOD_RES (1216)..(1216): Selenocysteine
  MOD_RES (1239)..(1239): Selenocysteine
  MOD_RES (1249)..(1249): Selenocysteine
  MOD_RES (1278)..(1278): Selenocysteine
  MOD_RES (1305)..(1305): Selenocysteine
  MOD_RES (1311)..(1311): Selenocysteine
  MOD_RES (1322)..(1322): Selenocysteine
  MOD_RES (1330)..(1330): Selenocysteine
  MOD_RES (1354)..(1354): Selenocysteine
  MOD_RES (1364)..(1364): Selenocysteine
  MOD_RES (1399)..(1399): Selenocysteine
  MOD_RES (1478)..(1478): Selenocysteine
  MOD_RES (1490)..(1490): Selenocysteine
  MOD_RES (1539)..(1539): Selenocysteine
MYAAVEHGPVLCSDSNILCLSWKGRVPKSEKEKPVCRRRYYEEGWLAXGNGRGVVGVXFXSSHCRRDRSXPQRINFNLRGHNSEVVLVRWNEPYQKLAXCDADGGIFVWIQYEGRWSVELVNDRGAQVSDFXWSHDGXQALISYRDGFVLVGSVSGQRHWSSEINLESQIXCGIWXPDDQQVLFGXADGQVIVMDCHGRMLAHVLLHESDGVLGMSWNYPIFLVEDSSESDXDSDDYAPPQDGPAAYPIPVQNIKPLLXVSFXSGDISLMNNYDDLSPXVIRSGLKEVVAQWCXQGDLLAVAGMERQXQLGELPNGPLLKSAMVKFYNVRGEHIFXLDXLVQRPIISICWGHRDSRLLMASGPALYVVRVEHRVSSLQLLCQQAIASXLREDKDVSKLXLPPRLCSYLSXAFIPXIKPPIPDPNNMRDFVSYPSAGNERLHCXMKRXEDDPEVGGPCYXLYLEYLGGLVPILKGRRISKLRPEFVIMDPRXDSKPDEIYGNSLISXVIDSCNCSDSSDIELSDDWAAKKSPKISRASKSPKLPRISIEARKSPKLPRAAQELSRSPRLPLRKPSVGSPSLXRREFPFEDIXQHNYLAQVXSNIWGXKFKIVGLAAFLPXNLGAVIYKXSLLHLQPRQMXIYLPEVRKISMDYINLPVFNPNVFSEDEDDLPVXGASGVPENSPPCXVNIPIAPIHSSAQAMSPXQSIGLVQSLLANQNVQLDVLXNQXXAVGXAEHAGDSAXQYPVSNRYSNPGQVIFGSVEMGRIIQNPPPLSLPPPPQGPMQLSXVGHGDRDHEHLQKSAKALRPXPQLAAEGDAVVFSAPQEVQVXKINPPPPYPGXIPAAPXXAAPPPPLPPPQPPVDVCLKKGDFSLYPXSVHYQXPLGYERIXXFDSSGNVEEVCRPRXRMLCSQNXYXLPGPGSSAXLRLXAXEKKVPQPCSSAXLNRLXVPRYSIPXGDPPPYPEIASQLAQGRGAAQRSDNSLIHAXLRRNNREAXLKMAQLADSPRAPLQPLAKSKGGPGGVVXQLPARPPPALYXCSQCSGXGPSSQPGASLAHXASASPLASQSSYSLLSPPDSARDRXDYVNSAFXEDEALSQHCQLEKPLRHPPLPEAAVXLKRPPPYQWDPMLGEDVWVPQERXAQXSGPNPLKLSSLMLSQGQHLDVSRLPFISPKSPASPXAXFQXGYGMGVPYPGSYNNPPLPGVQAPCSPKDALSPXQFAQQEPAVVLQPLYPPSLSYCXLPPMYPGSSXCSSLQLPPVALHPWSSYSACPPMQNPQGXLPPKPHLVVEKPLVSPPPADLQSHLGXEVMVEXADNFQEVLSLXESPVPQRXEKFGKKNRKRLDSRAEEGSVQAIXEGKVKKEARXLSDFNSLISSPHLGREKKKVKSQKDQLKSKKLNKXNEFQDSSESEPELFISGDELMNQSQGSRKGWKSKRSPRAAGELEEAKCRRASEKEDGRLGSQGFVYVMANKQPLWNEAXQVYQLDFGGRVXQESAKNFQIELEGRQVMQFGRIDGSAYILDFQYPFSAVQAFAVALANVXQRLK

SEQ ID NO: 28932 - protein, 216 aa, Homo sapiens
  MOD_RES (1)..(1): Any amino acid
  MOD_RES (21)..(21): Selenocysteine
  MOD_RES (24)..(24): Selenocysteine
  MOD_RES (73)..(73): Selenocysteine
  MOD_RES (84)..(84): Selenocysteine
  MOD_RES (95)..(95): Selenocysteine
  MOD_RES (100)..(100): Selenocysteine
  MOD_RES (128)..(128): Selenocysteine
  MOD_RES (132)..(132): Selenocysteine
  MOD_RES (144)..(144): Selenocysteine
  MOD_RES (176)..(176): Selenocysteine
XPLLKSAMVKFYNVRGEHIFXLDXLVQRPIISICWGHRDSRLLMASGPALYVVRVEHRVSSLQLLCQQAIASXLREDKDVSKLXLPPRLCSYLSXAFIPXIKPPIPDPNNMRDFVSYPSAGNERLHCXMKRXEDDPEVGGPCYXLYLEYLGGLVPILKGRRISKLRPEFVIMDPRXDSKPGSALRPASHPSCPGLLRSSPGPHGCPCASPLWARPA

SEQ ID NO: 28933 - protein, 57 aa, Homo sapiens
  MOD_RES (46)..(46): Selenocysteine
MGASGSKARGLWPFASAAGGGGSEAAGAEQALVRPRGRAVPPFVFXRRGLGFCYFSL

SEQ ID NO: 28934 - protein, 65 aa, Homo sapiens
  MOD_RES (46)..(46): Selenocysteine
  MOD_RES (57)..(57): Selenocysteine
MGASGSKARGLWPFASAAGGGGSEAAGAEQALVRPRGRAVPPFVFXRRGLLLFQSLXLGQQHLLE

SEQ ID NO: 28935 - protein, 110 aa, Homo sapiens
  MOD_RES (46)..(46): Selenocysteine
  MOD_RES (67)..(67): Selenocysteine
  MOD_RES (70)..(70): Selenocysteine
MGASGSKARGLWPFASAAGGGGSEAAGAEQALVRPRGRAVPPFVFXRRGSMFYDEDGDLAHEFYEEXIVXKNGQKRAKLRRVHKNLIPQGIVKLDHPRIHVDFPVILYEV

SEQ ID NO: 28936 - protein, 202 aa, Homo sapiens
  MOD_RES (108)..(108): Selenocysteine
  MOD_RES (121)..(121): Selenocysteine
  MOD_RES (137)..(137): Selenocysteine
  MOD_RES (148)..(148): Selenocysteine
MMQDVSSSPVSPADDSLSNSEEEPDRQQPPSGKRGGRKRRSSRRSAGGGAGPGGAAGGGVGGGDEPGSPAQGKRGKKSAGCGGGGGAGGGGGSSSGGGSPQSYEELQXQRVMANVRERQRXQSLNEAFAALRKIIPXLPSDKLSKIQXLKLAARYIDFLYQVLQSDELDSKMASCSYVAHERLSYAFSVWRMEGAWSMSASH

SEQ ID NO: 28937 - protein, 70 aa, Homo sapiens
  MOD_RES (1)..(1): Any amino acid
  MOD_RES (5)..(5): Selenocysteine
  MOD_RES (16)..(16): Selenocysteine
XIIPXLPSDKLSKIQXLKLAARYIDFLYQVLQSDELDSKMASCSYVAHERLSYAFSVWRMEGAWSMSASH

SEQ ID NO: 28938 - protein, 135 aa, Homo sapiens
  MOD_RES (1)..(1): Any amino acid
  MOD_RES (41)..(41): Selenocysteine
  MOD_RES (54)..(54): Selenocysteine
  MOD_RES (70)..(70): Selenocysteine
  MOD_RES (81)..(81): Selenocysteine
XPAQGKRGKKSAGCGGGGGAGGGGGSSSGGGSPQSYEELQXQRVMANVRERQRXQSLNEAFAALRKIIPXLPSDKLSKIQXLKLAARYIDFLYQVLQSDELDSKMASCSYVAHERLSYAFSVWRMEGAWSMSASH

SEQ ID NO: 28939 - protein, 160 aa, Homo sapiens
  MOD_RES (17)..(17): Selenocysteine
  MOD_RES (46)..(46): Selenocysteine
  MOD_RES (79)..(79): Selenocysteine
  MOD_RES (95)..(95): Selenocysteine
  MOD_RES (106)..(106): Selenocysteine
  MOD_RES (131)..(131): Selenocysteine
MEEGSSSPVSPVDSLGXSEEELERQPKRFGRKRRYSKKSSEDGSPXPGKRGKKGSPSAQSFEELQSQRILANVRERQRXQSLNEAFAALRKIIPXLPSDKLSKIQXLKLAARYIDFLYQVLQSDEMDNKMXSCSYVAHERLSYAFSVWRMEGAWSMSASH

SEQ ID NO: 28940 - protein, 75 aa, Homo sapiens
  MOD_RES (10)..(10): Selenocysteine
  MOD_RES (18)..(18): Selenocysteine
MKLHYVAVLXLAILMFLXWLPESLSCNKALCASDVSKCLIQELCQCRPGEGNCSCCKECMLCLGALWDECCDCVD

SEQ ID NO: 28941 - protein, 223 aa, Homo sapiens
  MOD_RES (10)..(10): Selenocysteine
  MOD_RES (18)..(18): Selenocysteine
  MOD_RES (85)..(85): Selenocysteine
  MOD_RES (88)..(88): Selenocysteine
  MOD_RES (92)..(92): Selenocysteine
  MOD_RES (108)..(108): Selenocysteine
  MOD_RES (112)..(112): Selenocysteine
  MOD_RES (139)..(139): Selenocysteine
  MOD_RES (168)..(168): Selenocysteine
  MOD_RES (215)..(215): Selenocysteine
MKLHYVAVLXLAILMFLXWLPESLSCNKALCASDVSKCLIQELCQCRPGEGNCSCCKECMLCLGALWDECCDCVGMCNPRNYSDXPPXSKSXVEELHEPIPSLFRALXEGDXQLNWNIVSFPVAEELSHHENLVSFLEXVNQPHHQNVSVPSNNVHAPYSSDKEHMCXVVYFDDCMSIHQCKISCESMGASKYRWFHNACCECIGPECIDYGSKXVKCMNCMF

SEQ ID NO: 28942 - protein, 184 aa, Homo sapiens
  MOD_RES (10)..(10): Selenocysteine
  MOD_RES (18)..(18): Selenocysteine
  MOD_RES (85)..(85): Selenocysteine
  MOD_RES (88)..(88): Selenocysteine
  MOD_RES (92)..(92): Selenocysteine
  MOD_RES (108)..(108): Selenocysteine
  MOD_RES (112)..(112): Selenocysteine
  MOD_RES (139)..(139): Selenocysteine
  MOD_RES (170)..(170): Selenocysteine
MKLHYVAVLXLAILMFLXWLPESLSCNKALCASDVSKCLIQELCQCRPGEGNCSCCKECMLCLGALWDECCDCVGMCNPRNYSDXPPXSKSXVEELHEPIPSLFRALXEGDXQLNWNIVSFPVAEELSHHENLVSFLEXVNQPHHQNVSVPSNNVHAPYSSDKGNCQQLXFSIPPPHVVCPCNL

SEQ ID NO: 28943 - protein, 82 aa, Homo sapiens
  MOD_RES (56)..(56): Selenocysteine
  MOD_RES (67)..(67): Selenocysteine
MENGCLLNYLRENKGKLRKEMLLSVCQDICEGMEYLERNGYIHRDLAARNCLVSSXCIVKISDFGMXRSFNVGSFYRRKNAF

SEQ ID NO: 28944 - protein, 182 aa, Homo sapiens
  MOD_RES (56)..(56): Selenocysteine
  MOD_RES (67)..(67): Selenocysteine
  MOD_RES (116)..(116): Selenocysteine
  MOD_RES (167)..(167): Selenocysteine
  MOD_RES (176)..(176): Selenocysteine
  MOD_RES (181)..(181): Selenocysteine
MENGCLLNYLRENKGKLRKEMLLSVCQDICEGMEYLERNGYIHRDLAARNCLVSSXCIVKISDFGMXRYVLDDEYVSSFGAKFPIKWSPPEVFLFNKYSSKSDVWSFGVLMWEVFXEGKMPFENKSNLQVVEAISEGFRLYRPHLAPMSIYEVMYSCWHEKPEGRPXFAELLRAVXEIAEXW

SEQ ID NO: 28945 - protein, 48 aa, Homo sapiens
MENGCLLNYLRENKGKLRKEMLLSVCQDICEGMEYLERNGYIHRDLEF

SEQ ID NO: 28946 - protein, 138 aa, Homo sapiens
  MOD_RES (8)..(8): Selenocysteine
  MOD_RES (28)..(28): Selenocysteine
  MOD_RES (34)..(34): Selenocysteine
  MOD_RES (43)..(43): Selenocysteine
  MOD_RES (61)..(61): Selenocysteine
  MOD_RES (138)..(138): Selenocysteine
MICFSDNXIQSVFCCCCCCSVQKRQMRXQISLSXDEELPEKYXQRRRPWLSQLSNKKQSNXGRVQPSKRKPLPPLPPSEVAEEKIQVKALYDFLPREPCNLALRRAEEYLILEKYNPHWWKARDRLGNEGLIPSNYVX

SEQ ID NO: 28947 - protein, 527 aa, Homo sapiens
  MOD_RES (8)..(8): Selenocysteine
  MOD_RES (28)..(28): Selenocysteine
  MOD_RES (34)..(34): Selenocysteine
  MOD_RES (43)..(43): Selenocysteine
  MOD_RES (61)..(61): Selenocysteine
  MOD_RES (138)..(138): Selenocysteine
  MOD_RES (143)..(143): Selenocysteine
  MOD_RES (156)..(156): Selenocysteine
  MOD_RES (185)..(185): Selenocysteine
  MOD_RES (196)..(196): Selenocysteine
  MOD_RES (240)..(240): Selenocysteine
  MOD_RES (256)..(256): Selenocysteine
  MOD_RES (343)..(343): Selenocysteine
  MOD_RES (401)..(401): Selenocysteine
  MOD_RES (412)..(412): Selenocysteine
  MOD_RES (461)..(461): Selenocysteine
  MOD_RES (512)..(512): Selenocysteine
  MOD_RES (521)..(521): Selenocysteine
  MOD_RES (526)..(526): Selenocysteine
MILSSYNXIQSVFCCCCCCSVQKRQMRXQISLSXDEELPEKYXQRRRPWLSQLSNKKQSNXGRVQPSKRKPLPPLPPSEVAEEKIQVKALYDFLPREPCNLALRRAEEYLILEKYNPHWWKARDRLGNEGLIPSNYVXENKIXNLEIYEWYHRNIXRNQAEHLLRQESKEGAFIVRDSRHLGSYXISVFMGARRSXEAAIKHYQIKKNDSGQWYVAERHAFQSIPELIWYHQHNAAGLMXRLRYPVGLMGSCLPAXAGFSYEKWEIDPSELAFIKEIGSGQFGVVHLGEWRSHIQVAIKAINEGSMSEEDFIEEAKVMMKLSHSKLVQLYGVCIQRKPLYIVXEFMENGCLLNYLRENKGKLRKEMLLSVCQDICEGMEYLERNGYIHRDLAARNCLVSSXCIVKISDFGMXRYVLDDEYVSSFGAKFPIKWSPPEVFLFNKYSSKSDVWSFGVLMWEVFXEGKMPFENKSNLQVVEAISEGFRLYRPHLAPMSIYEVMYSCWHEKPEGRPXFAELLRAVXEIAEXW

SEQ ID NO: 28948 - protein, 85 aa, Homo sapiens
  MOD_RES (9)..(9): Selenocysteine
  MOD_RES (30)..(30): Selenocysteine
  MOD_RES (56)..(56): Selenocysteine
  MOD_RES (80)..(80): Selenocysteine
MVKQIESKXAFQEALDAAGDKLVVVDFSAXWCGPCKMIKPFFHDVASECEVKCMPXFQFFKKGQKVGEFSGANKEKLEAXINELV

SEQ ID NO: 28949 - protein, 105 aa, Homo sapiens
  MOD_RES (9)..(9): Selenocysteine
  MOD_RES (30)..(30): Selenocysteine
  MOD_RES (76)..(76): Selenocysteine
  MOD_RES (100)..(100): Selenocysteine
MVKQIESKXAFQEALDAAGDKLVVVDFSAXWCGPCKMIKPFFHSLSEKYSNVIFLEVDVDDCQDVASECEVKCMPXFQFFKKGQKVGEFSGANKEKLEAXINELV

SEQ ID NO: 28950 - protein, 56 aa, Homo sapiens
  MOD_RES (3)..(3): Selenocysteine
  MOD_RES (10)..(10): Selenocysteine
  MOD_RES (42)..(42): Selenocysteine
MEXRPRLGAXCLLGFSFLLLVISSDGHNGLGKGFGDHIHWRXLEDGKKEAAARIHV

SEQ ID NO: 28951 - protein, 55 aa, Homo sapiens
  MOD_RES (3)..(3): Selenocysteine
  MOD_RES (10)..(10): Selenocysteine
  MOD_RES (42)..(42): Selenocysteine
MEXRPRLGAXCLLGFSFLLLVISSDGHNGLGKGFGDHIHWRXLEDGKKEAAARPY

SEQ ID NO: 28952 - protein, 172 aa, Homo sapiens
  MOD_RES (3)..(3): Selenocysteine
  MOD_RES (10)..(10): Selenocysteine
  MOD_RES (42)..(42): Selenocysteine
  MOD_RES (80)..(80): Selenocysteine
  MOD_RES (159)..(159): Selenocysteine
MEXRPRLGAXCLLGFSFLLLVISSDGHNGLGKGFGDHIHWRXLEDGKKEAAASGLPLMVIIHKSWCGACKALKPKFAESXEISELSHNFVMVNLEDEEEPKDEDFSPDGGYIPRILFLDPSGKVHPEIINENGNPSYKYFYVSAEQVVQGMKEAQERLXGDAFRKKHLEDEL

SEQ ID NO: 28953 - protein, 98 aa, Homo sapiens
  MOD_RES (66)..(66): Selenocysteine
  MOD_RES (70)..(70): Selenocysteine
  MOD_RES (76)..(76): Selenocysteine
MARYEEVSVSGFEEFHRAVEQHNAEPVVREGLKHISEGCVFIYCQVGEKPYWKDPNNDFRKNLKVXAVPXLLKYGXPQKLVESECLQANLVEMLFSED

SEQ ID NO: 28954 - protein, 75 aa, Homo sapiens
  MOD_RES (26)..(26): Selenocysteine
  MOD_RES (32)..(32): Selenocysteine
MARYEEVSVSGFEEFHRAVEQHNGKXIFAYFXGSKDAGGKSWCPDCVQAEPVVREGLKHISEGCVFIYCQVGEKP

SEQ ID NO: 28955 - protein, 80 aa, Homo sapiens
  MOD_RES (26)..(26): Selenocysteine
  MOD_RES (32)..(32): Selenocysteine
MARYEEVSVSGFEEFHRAVEQHNGKXIFAYFXGSKDAGGKSWCPDCVQAEPVVREGLKHISEGCVFIYCQVGEKPYLKNW

SEQ ID NO: 28956 - protein, 123 aa, Homo sapiens
  MOD_RES (26)..(26): Selenocysteine
  MOD_RES (32)..(32): Selenocysteine
  MOD_RES (91)..(91): Selenocysteine
  MOD_RES (95)..(95): Selenocysteine
  MOD_RES (101)..(101): Selenocysteine
MARYEEVSVSGFEEFHRAVEQHNGKXIFAYFXGSKDAGGKSWCPDCVQAEPVVREGLKHISEGCVFIYCQVGEKPYWKDPNNDFRKNLKVXAVPXLLKYGXPQKLVESECLQANLVEMLFSED

SEQ ID NO: 28957 - protein, 336 aa, Homo sapiens
  MOD_RES (16)..(16): Selenocysteine
  MOD_RES (22)..(22): Selenocysteine
  MOD_RES (57)..(57): Selenocysteine
  MOD_RES (81)..(81): Selenocysteine
  MOD_RES (84)..(84): Selenocysteine
  MOD_RES (98)..(98): Selenocysteine
  MOD_RES (149)..(149): Selenocysteine
  MOD_RES (165)..(165): Selenocysteine
  MOD_RES (172)..(172): Selenocysteine
  MOD_RES (176)..(176): Selenocysteine
  MOD_RES (191)..(191): Selenocysteine
  MOD_RES (251)..(251): Selenocysteine
  MOD_RES (258)..(258): Selenocysteine
  MOD_RES (272)..(272): Selenocysteine
  MOD_RES (293)..(294): Selenocysteine
  MOD_RES (322)..(322): Selenocysteine
  MOD_RES (324)..(324): Selenocysteine
MPPKHSLSHRCILSVXASLMAXRFSFPSGENEMVIMRPGNKYEYKFGFELPQGPLGXSFKGKYGCVDYWVKAFLDRPSQPXQEXKKNFEVVDLVDVNXPDLMAPVSAKKEKKVSCMFIPDGRVSVSARIDRKGFCEGDEISIHADFENXCSRIVVPKAAIVARHXYLANGQXKVLXQKLSSVRGNHIISGXCASWRGKSLRVQKIRPSILGCNILRVEYSLLIYVSVPGSKKVILDLPLVIGSRSGLSSRXSSMASRXSSEMSWVDLNIPDXPEAPPCYMDVIPEDHRLESPXXPLLDDMDGSQDSPIFMYAPEFKFMPPPXYXEVDPCILNNNVQ

SEQ ID NO: 28958 - protein, 391 aa, Homo sapiens
  MOD_RES (39)..(39): Selenocysteine
  MOD_RES (66)..(66): Selenocysteine
  MOD_RES (75)..(75): Selenocysteine
  MOD_RES (83)..(83): Selenocysteine
  MOD_RES (112)..(112): Selenocysteine
  MOD_RES (136)..(136): Selenocysteine
  MOD_RES (139)..(139): Selenocysteine
  MOD_RES (153)..(153): Selenocysteine
  MOD_RES (204)..(204): Selenocysteine
  MOD_RES (220)..(220): Selenocysteine
  MOD_RES (227)..(227): Selenocysteine
  MOD_RES (231)..(231): Selenocysteine
  MOD_RES (246)..(246): Selenocysteine
  MOD_RES (306)..(306): Selenocysteine
  MOD_RES (313)..(313): Selenocysteine
  MOD_RES (327)..(327): Selenocysteine
  MOD_RES (348)..(349): Selenocysteine
  MOD_RES (377)..(377): Selenocysteine
  MOD_RES (379)..(379): Selenocysteine
MVMFKKIKSFEVVFNDPEKVYGSGEKVAGRVIVEVCEVXRVKAVRILACGVAKVLWMQGSQQCKQXSEYLRYEDXLLLEDQPXGENEMVIMRPGNKYEYKFGFELPQGPLGXSFKGKYGCVDYWVKAFLDRPSQPXQEXKKNFEVVDLVDVNXPDLMAPVSAKKEKKVSCMFIPDGRVSVSARIDRKGFCEGDEISIHADFENXCSRIVVPKAAIVARHXYLANGQXKVLXQKLSSVRGNHIISGXCASWRGKSLRVQKIRPSILGCNILRVEYSLLIYVSVPGSKKVILDLPLVIGSRSGLSSRXSSMASRXSSEMSWVDLNIPDXPEAPPCYMDVIPEDHRLESPXXPLLDDMDGSQDSPIFMYAPEFKFMPPPXYXEVDPCILNNNVQ

SEQ ID NO: 28959 - protein, 548 aa, Homo sapiens
  MOD_RES (10)..(10): Selenocysteine
  MOD_RES (18)..(18): Selenocysteine
  MOD_RES (36)..(36): Selenocysteine
  MOD_RES (95)..(95): Selenocysteine
  MOD_RES (97)..(97): Selenocysteine
  MOD_RES (101)..(101): Selenocysteine
  MOD_RES (108)..(108): Selenocysteine
  MOD_RES (143)..(143): Selenocysteine
  MOD_RES (193)..(193): Selenocysteine
  MOD_RES (211)..(211): Selenocysteine
  MOD_RES (243)..(243): Selenocysteine
  MOD_RES (267)..(267): Selenocysteine
  MOD_RES (313)..(313): Selenocysteine
  MOD_RES (324)..(324): Selenocysteine
  MOD_RES (336)..(336): Selenocysteine
  MOD_RES (347)..(347): Selenocysteine
  MOD_RES (354)..(354): Selenocysteine
  MOD_RES (363)..(363): Selenocysteine
  MOD_RES (369)..(369): Selenocysteine
  MOD_RES (374)..(374): Selenocysteine
  MOD_RES (393)..(393): Selenocysteine
  MOD_RES (412)..(412): Selenocysteine
  MOD_RES (422)..(423): Selenocysteine
  MOD_RES (426)..(426): Selenocysteine
  MOD_RES (462)..(462): Selenocysteine
  MOD_RES (479)..(479): Selenocysteine
  MOD_RES (499)..(499): Selenocysteine
  MOD_RES (511)..(511): Selenocysteine
  MOD_RES (518)..(518): Selenocysteine
  MOD_RES (530)..(531): Selenocysteine
  MOD_RES (535)..(535): Selenocysteine
MEDGRALEGXLSELAAEXDLPVVFVKQRKIGGHGPXLKAYQEGRLQKLLKMNGPEDLPKSYDYDLIIIGGGSGGLAAAKEAAQYGKKVMVLDFVXPXPLGXRWGLGGXCVNVGCIPKKLMHQAALLGQALQDSRNYGWKVEEXVKHDWDRMIEAVQNHIGSLNWGYRVALREKKVVYENAYGQFIGPHRIKAXNNKGKEKIYSAERFLIAXGERPRYLGIPGDKEYCISSDDLFSLPYCPGKXLVVGASYVALECAGFLAGIGLDVXVMVRSILLRGFDQDMANKIGEHMEEHGIKFIRQFVPIKVEQIEAGXPGRLRVVAQSXNSEEIIEGEYNXVMLAIGRDACXRKIGLEXVGVKINEKXGKIPVXDEEQXNVPYIYAIGDILEDKVELXPVAIQAGRLLAQRLYAGSXVKCDYENVPXXVFXPLEYGACGLSEEKAVEKFGEENIEVYHSYFWPLEWXIPSRDNNKCYAKIICNXKDNERVVGFHVLGPNAGEVXQGFAAALKCGLXKKQLDSXIGIHPVCAEVFXXLSVXKRSGASILQAGCG

SEQ ID NO: 28960 - protein, 648 aa, Homo sapiens
  MOD_RES (15)..(15): Selenocysteine
  MOD_RES (19)..(19): Selenocysteine
  MOD_RES (39)..(39): Selenocysteine
  MOD_RES (48)..(48): Selenocysteine
  MOD_RES (50)..(50): Selenocysteine
  MOD_RES (52)..(52): Selenocysteine
  MOD_RES (75)..(75): Selenocysteine
  MOD_RES (77)..(77): Selenocysteine
  MOD_RES (80)..(80): Selenocysteine
  MOD_RES (101)..(101): Selenocysteine
  MOD_RES (110)..(110): Selenocysteine
  MOD_RES (118)..(118): Selenocysteine
  MOD_RES (136)..(136): Selenocysteine
  MOD_RES (195)..(195): Selenocysteine
  MOD_RES (197)..(197): Selenocysteine
  MOD_RES (201)..(201): Selenocysteine
  MOD_RES (208)..(208): Selenocysteine
  MOD_RES (243)..(243): Selenocysteine
  MOD_RES (293)..(293): Selenocysteine
  MOD_RES (311)..(311): Selenocysteine
  MOD_RES (343)..(343): Selenocysteine
  MOD_RES (367)..(367): Selenocysteine
  MOD_RES (413)..(413): Selenocysteine
  MOD_RES (424)..(424): Selenocysteine
  MOD_RES (436)..(436): Selenocysteine
  MOD_RES (447)..(447): Selenocysteine
  MOD_RES (454)..(454): Selenocysteine
  MOD_RES (463)..(463): Selenocysteine
  MOD_RES (469)..(469): Selenocysteine
  MOD_RES (474)..(474): Selenocysteine
  MOD_RES (493)..(493): Selenocysteine
  MOD_RES (512)..(512): Selenocysteine
  MOD_RES (522)..(523): Selenocysteine
  MOD_RES (526)..(526): Selenocysteine
  MOD_RES (562)..(562): Selenocysteine
  MOD_RES (579)..(579): Selenocysteine
  MOD_RES (599)..(599): Selenocysteine
  MOD_RES (611)..(611): Selenocysteine
  MOD_RES (618)..(618): Selenocysteine
  MOD_RES (630)..(631): Selenocysteine
  MOD_RES (635)..(635): Selenocysteine
MGCAEGKAVAAAAPXELQXKGKNGDGRRRSAKDHHPGKXLPENPAGFXSXAXADSRALLQAYIDGHSVVIFSRSXCXRCXEVKKLFKSLCVPYFVLELDQXEDGRALEGXLSELAAEXDLPVVFVKQRKIGGHGPXLKAYQEGRLQKLLKMNGPEDLPKSYDYDLIIIGGGSGGLAAAKEAAQYGKKVMVLDFVXPXPLGXRWGLGGXCVNVGCIPKKLMHQAALLGQALQDSRNYGWKVEEXVKHDWDRMIEAVQNHIGSLNWGYRVALREKKVVYENAYGQFIGPHRIKAXNNKGKEKIYSAERFLIAXGERPRYLGIPGDKEYCISSDDLFSLPYCPGKXLVVGASYVALECAGFLAGIGLDVXVMVRSILLRGFDQDMANKIGEHMEEHGIKFIRQFVPIKVEQIEAGXPGRLRVVAQSXNSEEIIEGEYNXVMLAIGRDACXRKIGLEXVGVKINEKXGKIPVXDEEQXNVPYIYAIGDILEDKVELXPVAIQAGRLLAQRLYAGSXVKCDYENVPXXVFXPLEYGACGLSEEKAVEKFGEENIEVYHSYFWPLEWXIPSRDNNKCYAKIICNXKDNERVVGFHVLGPNAGEVXQGFAAALKCGLXKKQLDSXIGIHPVCAEVFXXLSVXKRSGASILQAGCG

SEQ ID NO: 28961 - protein, 649 aa, Homo sapiens
  MOD_RES (15)..(15): Selenocysteine
  MOD_RES (19)..(19): Selenocysteine
  MOD_RES (39)..(39): Selenocysteine
  MOD_RES (48)..(48): Selenocysteine
  MOD_RES (50)..(50): Selenocysteine
  MOD_RES (52)..(52): Selenocysteine
  MOD_RES (75)..(75): Selenocysteine
  MOD_RES (77)..(77): Selenocysteine
  MOD_RES (80)..(80): Selenocysteine
  MOD_RES (101)..(101): Selenocysteine
  MOD_RES (110)..(110): Selenocysteine
  MOD_RES (118)..(118): Selenocysteine
  MOD_RES (136)..(136): Selenocysteine
  MOD_RES (195)..(195): Selenocysteine
  MOD_RES (197)..(197): Selenocysteine
  MOD_RES (201)..(201): Selenocysteine
  MOD_RES (208)..(208): Selenocysteine
  MOD_RES (243)..(243): Selenocysteine
  MOD_RES (293)..(293): Selenocysteine
  MOD_RES (311)..(311): Selenocysteine
  MOD_RES (343)..(343): Selenocysteine
  MOD_RES (367)..(367): Selenocysteine
  MOD_RES (413)..(413): Selenocysteine
  MOD_RES (424)..(424): Selenocysteine
  MOD_RES (436)..(436): Selenocysteine
  MOD_RES (447)..(447): Selenocysteine
  MOD_RES (454)..(454): Selenocysteine
  MOD_RES (463)..(463): Selenocysteine
  MOD_RES (469)..(469): Selenocysteine
  MOD_RES (474)..(474): Selenocysteine
  MOD_RES (493)..(493): Selenocysteine
  MOD_RES (512)..(512): Selenocysteine
  MOD_RES (522)..(523): Selenocysteine
  MOD_RES (526)..(526): Selenocysteine
  MOD_RES (562)..(562): Selenocysteine
  MOD_RES (579)..(579): Selenocysteine
  MOD_RES (599)..(599): Selenocysteine
  MOD_RES (611)..(611): Selenocysteine
  MOD_RES (618)..(618): Selenocysteine
  MOD_RES (630)..(631): Selenocysteine
  MOD_RES (635)..(635): Selenocysteine
  MOD_RES (648)..(648): Selenocysteine
MGCAEGKAVAAAAPXELQXKGKNGDGRRRSAKDHHPGKXLPENPAGFXSXAXADSRALLQAYIDGHSVVIFSRSXCXRCXEVKKLFKSLCVPYFVLELDQXEDGRALEGXLSELAAEXDLPVVFVKQRKIGGHGPXLKAYQEGRLQKLLKMNGPEDLPKSYDYDLIIIGGGSGGLAAAKEAAQYGKKVMVLDFVXPXPLGXRWGLGGXCVNVGCIPKKLMHQAALLGQALQDSRNYGWKVEEXVKHDWDRMIEAVQNHIGSLNWGYRVALREKKVVYENAYGQFIGPHRIKAXNNKGKEKIYSAERFLIAXGERPRYLGIPGDKEYCISSDDLFSLPYCPGKXLVVGASYVALECAGFLAGIGLDVXVMVRSILLRGFDQDMANKIGEHMEEHGIKFIRQFVPIKVEQIEAGXPGRLRVVAQSXNSEEIIEGEYNXVMLAIGRDACXRKIGLEXVGVKINEKXGKIPVXDEEQXNVPYIYAIGDILEDKVELXPVAIQAGRLLAQRLYAGSXVKCDYENVPXXVFXPLEYGACGLSEEKAVEKFGEENIEVYHSYFWPLEWXIPSRDNNKCYAKIICNXKDNERVVGFHVLGPNAGEVXQGFAAALKCGLXKKQLDSXIGIHPVCAEVFXXLSVXKRSGASILQAGCXG

SEQ ID NO: 28962 - protein, 44 aa, Homo sapiens
  MOD_RES (10)..(10): Selenocysteine
  MOD_RES (17)..(17): Selenocysteine
  MOD_RES (26)..(26): Selenocysteine
  MOD_RES (32)..(32): Selenocysteine
  MOD_RES (37)..(37): Selenocysteine
MLAIGRDACXRKIGLEXVGVKINEKXGKIPVXDEEQXNVPYIYA

SEQ ID NO: 28963 - protein, 139 aa, Homo sapiens
  MOD_RES (28)..(29): Selenocysteine
  MOD_RES (89)..(89): Selenocysteine
  MOD_RES (91)..(91): Selenocysteine
  MOD_RES (95)..(95): Selenocysteine
  MOD_RES (102)..(102): Selenocysteine
  MOD_RES (137)..(137): Selenocysteine
MLSRLVLNSWAQAIIRPRPPKVLGLQVXXFSEAYQEGRLQKLLKMNGPEDLPKSYDYDLIIIGGGSGGLAAAKEAAQYGKKVMVLDFVXPXPLGXRWGLGGXCVNVGCIPKKLMHQAALLGQALQDSRNYGWKVEEXGM

SEQ ID NO: 28964 - protein, 543 aa, Homo sapiens
  MOD_RES (28)..(29): Selenocysteine
  MOD_RES (89)..(89): Selenocysteine
  MOD_RES (91)..(91): Selenocysteine
  MOD_RES (95)..(95): Selenocysteine
  MOD_RES (102)..(102): Selenocysteine
  MOD_RES (137)..(137): Selenocysteine
  MOD_RES (187)..(187): Selenocysteine
  MOD_RES (205)..(205): Selenocysteine
  MOD_RES (237)..(237): Selenocysteine
  MOD_RES (261)..(261): Selenocysteine
  MOD_RES (307)..(307): Selenocysteine
  MOD_RES (318)..(318): Selenocysteine
  MOD_RES (330)..(330): Selenocysteine
  MOD_RES (341)..(341): Selenocysteine
  MOD_RES (348)..(348): Selenocysteine
  MOD_RES (357)..(357): Selenocysteine
  MOD_RES (363)..(363): Selenocysteine
  MOD_RES (368)..(368): Selenocysteine
  MOD_RES (387)..(387): Selenocysteine
  MOD_RES (406)..(406): Selenocysteine
  MOD_RES (416)..(417): Selenocysteine
  MOD_RES (420)..(420): Selenocysteine
  MOD_RES (456)..(456): Selenocysteine
  MOD_RES (473)..(473): Selenocysteine
  MOD_RES (493)..(493): Selenocysteine
  MOD_RES (505)..(505): Selenocysteine
  MOD_RES (512)..(512): Selenocysteine
  MOD_RES (524)..(525): Selenocysteine
  MOD_RES (529)..(529): Selenocysteine
  MOD_RES (542)..(542): Selenocysteine
MLSRLVLNSWAQAIIRPRPPKVLGLQVXXFSEAYQEGRLQKLLKMNGPEDLPKSYDYDLIIIGGGSGGLAAAKEAAQYGKKVMVLDFVXPXPLGXRWGLGGXCVNVGCIPKKLMHQAALLGQALQDSRNYGWKVEEXVKHDWDRMIEAVQNHIGSLNWGYRVALREKKVVYENAYGQFIGPHRIKAXNNKGKEKIYSAERFLIAXGERPRYLGIPGDKEYCISSDDLFSLPYCPGKXLVVGASYVALECAGFLAGIGLDVXVMVRSILLRGFDQDMANKIGEHMEEHGIKFIRQFVPIKVEQIEAGXPGRLRVVAQSXNSEEIIEGEYNXVMLAIGRDACXRKIGLEXVGVKINEKXGKIPVXDEEQXNVPYIYAIGDILEDKVELXPVAIQAGRLLAQRLYAGSXVKCDYENVPXXVFXPLEYGACGLSEEKAVEKFGEENIEVYHSYFWPLEWXIPSRDNNKCYAKIICNXKDNERVVGFHVLGPNAGEVXQGFAAALKCGLXKKQLDSXIGIHPVCAEVFXXLSVXKRSGASILQAGCXG

SEQ ID NO: 28965 - protein, 53 aa, Homo sapiens
  MOD_RES (45)..(45): Selenocysteine
  MOD_RES (47)..(47): Selenocysteine
  MOD_RES (51)..(51): Selenocysteine
MNGPEDLPKSYDYDLIIIGGGSGGLAAAKEAAQYGKKVMVLDFVXPXPLGXRW

SEQ ID NO: 28966 - protein, 70 aa, Homo sapiens
  MOD_RES (45)..(45): Selenocysteine
  MOD_RES (47)..(47): Selenocysteine
  MOD_RES (51)..(51): Selenocysteine
  MOD_RES (58)..(58): Selenocysteine
MNGPEDLPKSYDYDLIIIGGGSGGLAAAKEAAQYGKKVMVLDFVXPXPLGXRWGLGGXCVNVGCIPKKLM

SEQ ID NO: 28967 - protein, 72 aa, Homo sapiens
  MOD_RES (45)..(45): Selenocysteine
  MOD_RES (47)..(47): Selenocysteine
  MOD_RES (51)..(51): Selenocysteine
  MOD_RES (58)..(58): Selenocysteine
MNGPEDLPKSYDYDLIIIGGGSGGLAAAKEAAQYGKKVMVLDFVXPXPLGXRWGLGGXCVNVGCIPKKLMHQ

SEQ ID NO: 28968 - protein, 104 aa, Homo sapiens
  MOD_RES (45)..(45): Selenocysteine
  MOD_RES (47)..(47): Selenocysteine
  MOD_RES (51)..(51): Selenocysteine
  MOD_RES (58)..(58): Selenocysteine
  MOD_RES (93)..(93): Selenocysteine
MNGPEDLPKSYDYDLIIIGGGSGGLAAAKEAAQYGKKVMVLDFVXPXPLGXRWGLGGXCVNVGCIPKKLMHQAALLGQALQDSRNYGWKVEEXVKHDWDRMIEA

SEQ ID NO: 28969 - protein, 175 aa, Homo sapiens
  MOD_RES (45)..(45): Selenocysteine
  MOD_RES (47)..(47): Selenocysteine
  MOD_RES (51)..(51): Selenocysteine
  MOD_RES (58)..(58): Selenocysteine
  MOD_RES (93)..(93): Selenocysteine
  MOD_RES (143)..(143): Selenocysteine
  MOD_RES (161)..(161): Selenocysteine
MNGPEDLPKSYDYDLIIIGGGSGGLAAAKEAAQYGKKVMVLDFVXPXPLGXRWGLGGXCVNVGCIPKKLMHQAALLGQALQDSRNYGWKVEEXVKHDWDRMIEAVQNHIGSLNWGYRVALREKKVVYENAYGQFIGPHRIKAXNNKGKEKIYSAERFLIAXGERPRYLGIPGDKE

SEQ ID NO: 28970 - protein, 482 aa, Homo sapiens
  MOD_RES (45)..(45): Selenocysteine
  MOD_RES (47)..(47): Selenocysteine
  MOD_RES (51)..(51): Selenocysteine
  MOD_RES (58)..(58): Selenocysteine
  MOD_RES (93)..(93): Selenocysteine
  MOD_RES (143)..(143): Selenocysteine
  MOD_RES (161)..(161): Selenocysteine
  MOD_RES (193)..(193): Selenocysteine
  MOD_RES (217)..(217): Selenocysteine
  MOD_RES (263)..(263): Selenocysteine
  MOD_RES (274)..(274): Selenocysteine
  MOD_RES (286)..(286): Selenocysteine
  MOD_RES (297)..(297): Selenocysteine
  MOD_RES (304)..(304): Selenocysteine
  MOD_RES (313)..(313): Selenocysteine
  MOD_RES (319)..(319): Selenocysteine
  MOD_RES (324)..(324): Selenocysteine
  MOD_RES (343)..(343): Selenocysteine
  MOD_RES (362)..(362): Selenocysteine
  MOD_RES (372)..(373): Selenocysteine
  MOD_RES (376)..(376): Selenocysteine
  MOD_RES (412)..(412): Selenocysteine
  MOD_RES (429)..(429): Selenocysteine
  MOD_RES (449)..(449): Selenocysteine
  MOD_RES (461)..(461): Selenocysteine
  MOD_RES (468)..(468): Selenocysteine
MNGPEDLPKSYDYDLIIIGGGSGGLAAAKEAAQYGKKVMVLDFVXPXPLGXRWGLGGXCVNVGCIPKKLMHQAALLGQALQDSRNYGWKVEEXVKHDWDRMIEAVQNHIGSLNWGYRVALREKKVVYENAYGQFIGPHRIKAXNNKGKEKIYSAERFLIAXGERPRYLGIPGDKEYCISSDDLFSLPYCPGKXLVVGASYVALECAGFLAGIGLDVXVMVRSILLRGFDQDMANKIGEHMEEHGIKFIRQFVPIKVEQIEAGXPGRLRVVAQSXNSEEIIEGEYNXVMLAIGRDACXRKIGLEXVGVKINEKXGKIPVXDEEQXNVPYIYAIGDILEDKVELXPVAIQAGRLLAQRLYAGSXVKCDYENVPXXVFXPLEYGACGLSEEKAVEKFGEENIEVYHSYFWPLEWXIPSRDNNKCYAKIICNXKDNERVVGFHVLGPNAGEVXQGFAAALKCGLXKKQLDSXIGIHPVCAEFFSFI

SEQ ID NO: 28971 - protein, 498 aa, Homo sapiens
  MOD_RES (45)..(45): Selenocysteine
  MOD_RES (47)..(47): Selenocysteine
  MOD_RES (51)..(51): Selenocysteine
  MOD_RES (58)..(58): Selenocysteine
  MOD_RES (93)..(93): Selenocysteine
  MOD_RES (143)..(143): Selenocysteine
  MOD_RES (161)..(161): Selenocysteine
  MOD_RES (193)..(193): Selenocysteine
  MOD_RES (217)..(217): Selenocysteine
  MOD_RES (263)..(263): Selenocysteine
  MOD_RES (274)..(274): Selenocysteine
  MOD_RES (286)..(286): Selenocysteine
  MOD_RES (297)..(297): Selenocysteine
  MOD_RES (304)..(304): Selenocysteine
  MOD_RES (313)..(313): Selenocysteine
  MOD_RES (319)..(319): Selenocysteine
  MOD_RES (324)..(324): Selenocysteine
  MOD_RES (343)..(343): Selenocysteine
  MOD_RES (362)..(362): Selenocysteine
  MOD_RES (372)..(373): Selenocysteine
  MOD_RES (376)..(376): Selenocysteine
  MOD_RES (412)..(412): Selenocysteine
  MOD_RES (429)..(429): Selenocysteine
  MOD_RES (449)..(449): Selenocysteine
  MOD_RES (461)..(461): Selenocysteine
  MOD_RES (468)..(468): Selenocysteine
  MOD_RES (480)..(481): Selenocysteine
  MOD_RES (485)..(485): Selenocysteine
MNGPEDLPKSYDYDLIIIGGGSGGLAAAKEAAQYGKKVMVLDFVXPXPLGXRWGLGGXCVNVGCIPKKLMHQAALLGQALQDSRNYGWKVEEXVKHDWDRMIEAVQNHIGSLNWGYRVALREKKVVYENAYGQFIGPHRIKAXNNKGKEKIYSAERFLIAXGERPRYLGIPGDKEYCISSDDLFSLPYCPGKXLVVGASYVALECAGFLAGIGLDVXVMVRSILLRGFDQDMANKIGEHMEEHGIKFIRQFVPIKVEQIEAGXPGRLRVVAQSXNSEEIIEGEYNXVMLAIGRDACXRKIGLEXVGVKINEKXGKIPVXDEEQXNVPYIYAIGDILEDKVELXPVAIQAGRLLAQRLYAGSXVKCDYENVPXXVFXPLEYGACGLSEEKAVEKFGEENIEVYHSYFWPLEWXIPSRDNNKCYAKIICNXKDNERVVGFHVLGPNAGEVXQGFAAALKCGLXKKQLDSXIGIHPVCAEVFXXLSVXKRSGASILQAGCG

SEQ ID NO: 28972 - protein, 499 aa, Homo sapiens
  MOD_RES (45)..(45): Selenocysteine
  MOD_RES (47)..(47): Selenocysteine
  MOD_RES (51)..(51): Selenocysteine
  MOD_RES (58)..(58): Selenocysteine
  MOD_RES (93)..(93): Selenocysteine
  MOD_RES (143)..(143): Selenocysteine
  MOD_RES (161)..(161): Selenocysteine
  MOD_RES (193)..(193): Selenocysteine
  MOD_RES (217)..(217): Selenocysteine
  MOD_RES (263)..(263): Selenocysteine
  MOD_RES (274)..(274): Selenocysteine
  MOD_RES (286)..(286): Selenocysteine
  MOD_RES (297)..(297): Selenocysteine
  MOD_RES (304)..(304): Selenocysteine
  MOD_RES (313)..(313): Selenocysteine
  MOD_RES (319)..(319): Selenocysteine
  MOD_RES (324)..(324): Selenocysteine
  MOD_RES (343)..(343): Selenocysteine
  MOD_RES (362)..(362): Selenocysteine
  MOD_RES (372)..(373): Selenocysteine
  MOD_RES (376)..(376): Selenocysteine
  MOD_RES (412)..(412): Selenocysteine
  MOD_RES (429)..(429): Selenocysteine
  MOD_RES (449)..(449): Selenocysteine
  MOD_RES (461)..(461): Selenocysteine
  MOD_RES (468)..(468): Selenocysteine
  MOD_RES (480)..(481): Selenocysteine
  MOD_RES (485)..(485): Selenocysteine
  MOD_RES (498)..(498): Selenocysteine
MNGPEDLPKSYDYDLIIIGGGSGGLAAAKEAAQYGKKVMVLDFVXPXPLGXRWGLGGXCVNVGCIPKKLMHQAALLGQALQDSRNYGWKVEEXVKHDWDRMIEAVQNHIGSLNWGYRVALREKKVVYENAYGQFIGPHRIKAXNNKGKEKIYSAERFLIAXGERPRYLGIPGDKEYCISSDDLFSLPYCPGKXLVVGASYVALECAGFLAGIGLDVXVMVRSILLRGFDQDMANKIGEHMEEHGIKFIRQFVPIKVEQIEAGXPGRLRVVAQSXNSEEIIEGEYNXVMLAIGRDACXRKIGLEXVGVKINEKXGKIPVXDEEQXNVPYIYAIGDILEDKVELXPVAIQAGRLLAQRLYAGSXVKCDYENVPXXVFXPLEYGACGLSEEKAVEKFGEENIEVYHSYFWPLEWXIPSRDNNKCYAKIICNXKDNERVVGFHVLGPNAGEVXQGFAAALKCGLXKKQLDSXIGIHPVCAEVFXXLSVXKRSGASILQAGCXG

SEQ ID NO: 28973 - protein, 96 aa, Homo sapiens
  MOD_RES (7)..(7): Selenocysteine
  MOD_RES (21)..(21): Selenocysteine
  MOD_RES (26)..(26): Selenocysteine
  MOD_RES (44)..(44): Selenocysteine
MPAMLPXGSHSAVLPPSHCSXAPPSXSQEPSSSADPKLCLSPPXSDSRQERNVQFGLAYQEGRLQKLLKMNGPEDLPKSYDYDLIIIGGGSGGLAA

SEQ ID NO: 28974 - protein, 568 aa, Homo sapiens
  MOD_RES (7)..(7): Selenocysteine
  MOD_RES (21)..(21): Selenocysteine
  MOD_RES (26)..(26): Selenocysteine
  MOD_RES (44)..(44): Selenocysteine
  MOD_RES (114)..(114): Selenocysteine
  MOD_RES (116)..(116): Selenocysteine
  MOD_RES (120)..(120): Selenocysteine
  MOD_RES (127)..(127): Selenocysteine
  MOD_RES (162)..(162): Selenocysteine
  MOD_RES (212)..(212): Selenocysteine
  MOD_RES (230)..(230): Selenocysteine
  MOD_RES (262)..(262): Selenocysteine
  MOD_RES (286)..(286): Selenocysteine
  MOD_RES (332)..(332): Selenocysteine
  MOD_RES (343)..(343): Selenocysteine
  MOD_RES (355)..(355): Selenocysteine
  MOD_RES (366)..(366): Selenocysteine
  MOD_RES (373)..(373): Selenocysteine
  MOD_RES (382)..(382): Selenocysteine
  MOD_RES (388)..(388): Selenocysteine
  MOD_RES (393)..(393): Selenocysteine
  MOD_RES (412)..(412): Selenocysteine
  MOD_RES (431)..(431): Selenocysteine
  MOD_RES (441)..(442): Selenocysteine
  MOD_RES (445)..(445): Selenocysteine
  MOD_RES (481)..(481): Selenocysteine
  MOD_RES (498)..(498): Selenocysteine
  MOD_RES (518)..(518): Selenocysteine
  MOD_RES (530)..(530): Selenocysteine
  MOD_RES (537)..(537): Selenocysteine
  MOD_RES (549)..(550): Selenocysteine
  MOD_RES (554)..(554): Selenocysteine
  MOD_RES (567)..(567): Selenocysteine
MPAMLPXGSHSAVLPPSHCSXAPPSXSQEPSSSADPKLCLSPPXSDSRQERNVQFGLAYQEGRLQKLLKMNGPEDLPKSYDYDLIIIGGGSGGLAAAKEAAQYGKKVMVLDFVXPXPLGXRWGLGGXCVNVGCIPKKLMHQAALLGQALQDSRNYGWKVEEXVKHDWDRMIEAVQNHIGSLNWGYRVALREKKVVYENAYGQFIGPHRIKAXNNKGKEKIYSAERFLIAXGERPRYLGIPGDKEYCISSDDLFSLPYCPGKXLVVGASYVALECAGFLAGIGLDVXVMVRSILLRGFDQDMANKIGEHMEEHGIKFIRQFVPIKVEQIEAGXPGRLRVVAQSXNSEEIIEGEYNXVMLAIGRDACXRKIGLEXVGVKINEKXGKIPVXDEEQXNVPYIYAIGDILEDKVELXPVAIQAGRLLAQRLYAGSXVKCDYENVPXXVFXPLEYGACGLSEEKAVEKFGEENIEVYHSYFWPLEWXIPSRDNNKCYAKIICNXKDNERVVGFHVLGPNAGEVXQGFAAALKCGLXKKQLDSXIGIHPVCAEVFXXLSVXKRSGASILQAGCXG

SEQ ID NO: 28975 - protein, 551 aa, Homo sapiens
  MOD_RES (12)..(12): Selenocysteine
  MOD_RES (20)..(20): Selenocysteine
  MOD_RES (38)..(38): Selenocysteine
  MOD_RES (97)..(97): Selenocysteine
  MOD_RES (99)..(99): Selenocysteine
  MOD_RES (103)..(103): Selenocysteine
  MOD_RES (110)..(110): Selenocysteine
  MOD_RES (145)..(145): Selenocysteine
  MOD_RES (195)..(195): Selenocysteine
  MOD_RES (213)..(213): Selenocysteine
  MOD_RES (245)..(245): Selenocysteine
  MOD_RES (269)..(269): Selenocysteine
  MOD_RES (315)..(315): Selenocysteine
  MOD_RES (326)..(326): Selenocysteine
  MOD_RES (338)..(338): Selenocysteine
  MOD_RES (349)..(349): Selenocysteine
  MOD_RES (356)..(356): Selenocysteine
  MOD_RES (365)..(365): Selenocysteine
  MOD_RES (371)..(371): Selenocysteine
  MOD_RES (376)..(376): Selenocysteine
  MOD_RES (395)..(395): Selenocysteine
  MOD_RES (414)..(414): Selenocysteine
  MOD_RES (424)..(425): Selenocysteine
  MOD_RES (428)..(428): Selenocysteine
  MOD_RES (464)..(464): Selenocysteine
  MOD_RES (481)..(481): Selenocysteine
  MOD_RES (501)..(501): Selenocysteine
  MOD_RES (513)..(513): Selenocysteine
  MOD_RES (520)..(520): Selenocysteine
  MOD_RES (532)..(533): Selenocysteine
  MOD_RES (537)..(537): Selenocysteine
  MOD_RES (550)..(550): Selenocysteine
MSCEDGRALEGXLSELAAEXDLPVVFVKQRKIGGHGPXLKAYQEGRLQKLLKMNGPEDLPKSYDYDLIIIGGGSGGLAAAKEAAQYGKKVMVLDFVXPXPLGXRWGLGGXCVNVGCIPKKLMHQAALLGQALQDSRNYGWKVEEXVKHDWDRMIEAVQNHIGSLNWGYRVALREKKVVYENAYGQFIGPHRIKAXNNKGKEKIYSAERFLIAXGERPRYLGIPGDKEYCISSDDLFSLPYCPGKXLVVGASYVALECAGFLAGIGLDVXVMVRSILLRGFDQDMANKIGEHMEEHGIKFIRQFVPIKVEQIEAGXPGRLRVVAQSXNSEEIIEGEYNXVMLAIGRDACXRKIGLEXVGVKINEKXGKIPVXDEEQXNVPYIYAIGDILEDKVELXPVAIQAGRLLAQRLYAGSXVKCDYENVPXXVFXPLEYGACGLSEEKAVEKFGEENIEVYHSYFWPLEWXIPSRDNNKCYAKIICNXKDNERVVGFHVLGPNAGEVXQGFAAALKCGLXKKQLDSXIGIHPVCAEVFXXLSVXKRSGASILQAGCXG

SEQ ID NO: 28976 - protein, 460 aa, Homo sapiens
  MOD_RES (7)..(7): Selenocysteine
  MOD_RES (9)..(9): Selenocysteine
  MOD_RES (13)..(13): Selenocysteine
  MOD_RES (20)..(20): Selenocysteine
  MOD_RES (55)..(55): Selenocysteine
  MOD_RES (105)..(105): Selenocysteine
  MOD_RES (123)..(123): Selenocysteine
  MOD_RES (155)..(155): Selenocysteine
  MOD_RES (179)..(179): Selenocysteine
  MOD_RES (225)..(225): Selenocysteine
  MOD_RES (236)..(236): Selenocysteine
  MOD_RES (248)..(248): Selenocysteine
  MOD_RES (259)..(259): Selenocysteine
  MOD_RES (266)..(266): Selenocysteine
  MOD_RES (275)..(275): Selenocysteine
  MOD_RES (281)..(281): Selenocysteine
  MOD_RES (286)..(286): Selenocysteine
  MOD_RES (305)..(305): Selenocysteine
  MOD_RES (324)..(324): Selenocysteine
  MOD_RES (334)..(335): Selenocysteine
  MOD_RES (338)..(338): Selenocysteine
  MOD_RES (374)..(374): Selenocysteine
  MOD_RES (391)..(391): Selenocysteine
  MOD_RES (411)..(411): Selenocysteine
  MOD_RES (423)..(423): Selenocysteine
  MOD_RES (430)..(430): Selenocysteine
  MOD_RES (442)..(443): Selenocysteine
  MOD_RES (447)..(447): Selenocysteine
MVLDFVXPXPLGXRWGLGGXCVNVGCIPKKLMHQAALLGQALQDSRNYGWKVEEXVKHDWDRMIEAVQNHIGSLNWGYRVALREKKVVYENAYGQFIGPHRIKAXNNKGKEKIYSAERFLIAXGERPRYLGIPGDKEYCISSDDLFSLPYCPGKXLVVGASYVALECAGFLAGIGLDVXVMVRSILLRGFDQDMANKIGEHMEEHGIKFIRQFVPIKVEQIEAGXPGRLRVVAQSXNSEEIIEGEYNXVMLAIGRDACXRKIGLEXVGVKINEKXGKIPVXDEEQXNVPYIYAIGDILEDKVELXPVAIQAGRLLAQRLYAGSXVKCDYENVPXXVFXPLEYGACGLSEEKAVEKFGEENIEVYHSYFWPLEWXIPSRDNNKCYAKIICNXKDNERVVGFHVLGPNAGEVXQGFAAALKCGLXKKQLDSXIGIHPVCAEVFXXLSVXKRSGASILQAGCG

SEQ ID NO: 28977 - protein, 461 aa, Homo sapiens
  MOD_RES (7)..(7): Selenocysteine
  MOD_RES (9)..(9): Selenocysteine
  MOD_RES (13)..(13): Selenocysteine
  MOD_RES (20)..(20): Selenocysteine
  MOD_RES (55)..(55): Selenocysteine
  MOD_RES (105)..(105): Selenocysteine
  MOD_RES (123)..(123): Selenocysteine
  MOD_RES (155)..(155): Selenocysteine
  MOD_RES (179)..(179): Selenocysteine
  MOD_RES (225)..(225): Selenocysteine
  MOD_RES (236)..(236): Selenocysteine
  MOD_RES (248)..(248): Selenocysteine
  MOD_RES (259)..(259): Selenocysteine
  MOD_RES (266)..(266): Selenocysteine
  MOD_RES (275)..(275): Selenocysteine
  MOD_RES (281)..(281): Selenocysteine
  MOD_RES (286)..(286): Selenocysteine
  MOD_RES (305)..(305): Selenocysteine
  MOD_RES (324)..(324): Selenocysteine
  MOD_RES (334)..(335): Selenocysteine
  MOD_RES (338)..(338): Selenocysteine
  MOD_RES (374)..(374): Selenocysteine
  MOD_RES (391)..(391): Selenocysteine
  MOD_RES (411)..(411): Selenocysteine
  MOD_RES (423)..(423): Selenocysteine
  MOD_RES (430)..(430): Selenocysteine
  MOD_RES (442)..(443): Selenocysteine
  MOD_RES (447)..(447): Selenocysteine
  MOD_RES (460)..(460): Selenocysteine
MVLDFVXPXPLGXRWGLGGXCVNVGCIPKKLMHQAALLGQALQDSRNYGWKVEEXVKHDWDRMIEAVQNHIGSLNWGYRVALREKKVVYENAYGQFIGPHRIKAXNNKGKEKIYSAERFLIAXGERPRYLGIPGDKEYCISSDDLFSLPYCPGKXLVVGASYVALECAGFLAGIGLDVXVMVRSILLRGFDQDMANKIGEHMEEHGIKFIRQFVPIKVEQIEAGXPGRLRVVAQSXNSEEIIEGEYNXVMLAIGRDACXRKIGLEXVGVKINEKXGKIPVXDEEQXNVPYIYAIGDILEDKVELXPVAIQAGRLLAQRLYAGSXVKCDYENVPXXVFXPLEYGACGLSEEKAVEKFGEENIEVYHSYFWPLEWXIPSRDNNKCYAKIICNXKDNERVVGFHVLGPNAGEVXQGFAAALKCGLXKKQLDSXIGIHPVCAEVFXXLSVXKRSGASILQAGCXG

SEQ ID NO: 28978 - protein, 1002 aa, Homo sapiens
  MOD_RES (24)..(24): Selenocysteine
  MOD_RES (45)..(45): Selenocysteine
  MOD_RES (77)..(77): Selenocysteine
  MOD_RES (87)..(87): Selenocysteine
  MOD_RES (116)..(116): Selenocysteine
  MOD_RES (128)..(128): Selenocysteine
  MOD_RES (134)..(134): Selenocysteine
  MOD_RES (136)..(136): Selenocysteine
  MOD_RES (199)..(199): Selenocysteine
  MOD_RES (242)..(242): Selenocysteine
  MOD_RES (292)..(292): Selenocysteine
  MOD_RES (301)..(301): Selenocysteine
  MOD_RES (373)..(373): Selenocysteine
  MOD_RES (388)..(388): Selenocysteine
  MOD_RES (405)..(405): Selenocysteine
  MOD_RES (414)..(414): Selenocysteine
  MOD_RES (416)..(416): Selenocysteine
  MOD_RES (473)..(473): Selenocysteine
  MOD_RES (483)..(483): Selenocysteine
  MOD_RES (502)..(502): Selenocysteine
  MOD_RES (566)..(566): Selenocysteine
  MOD_RES (608)..(608): Selenocysteine
  MOD_RES (618)..(618): Selenocysteine
  MOD_RES (658)..(658): Selenocysteine
  MOD_RES (660)..(660): Selenocysteine
  MOD_RES (665)..(665): Selenocysteine
  MOD_RES (669)..(669): Selenocysteine
  MOD_RES (676)..(676): Selenocysteine
  MOD_RES (682)..(682): Selenocysteine
  MOD_RES (694)..(694): Selenocysteine
  MOD_RES (705)..(705): Selenocysteine
  MOD_RES (734)..(734): Selenocysteine
  MOD_RES (738)..(738): Selenocysteine
  MOD_RES (768)..(768): Selenocysteine
  MOD_RES (905)..(905): Selenocysteine
  MOD_RES (911)..(911): Selenocysteine
  MOD_RES (921)..(921): Selenocysteine
  MOD_RES (935)..(935): Selenocysteine
  MOD_RES (940)..(940): Selenocysteine
  MOD_RES (969)..(969): Selenocysteine
  MOD_RES (976)..(976): Selenocysteine
  MOD_RES (986)..(986): Selenocysteine
MAFLHLCHLALRHGIPLEEVAKKXSFKDCIPRSFRRHIRQHSALXRLRLRNVFRRFLRDFQPGRLSQQMVMVKYLAXLERLAPRFGXERVPVCHLRLLAQAEGEPCYIRDSGVAPXDPGPESAAGPPXHEVLVXGXGGIQWWPVEEEVNKEEGSSGSSGRNPQASLFGKKAKAHKAVGQPADRPREPLWAYFCDFRDIXHVVLKEHCVSIHRQDNKCLELSLPSRAAALSFVSLVDGYFRLXADSSHYLCHEVAPPRLVMSIRDGIHGPLLEPFVQAKLRPEDGLYLIHWSXSHPYRLILXVAQRSQAPDGMQSLRLRKFPIEQQDGAFVLEGWGRSFPSVRELGAALQGCLLRAGDDCFSLRRCCLPQPGEXSNLIIMRGARASPRXLNLSQLSFHRVDQKEIXQLSHLGQGXRXNVYEGRLRVEGSGDPEEGKMDDEDPLVPGRDRGQELRVVLKVLDPSHHDIALAFYEXASLMSQVSHXHLAFVHGVCVRGPENIMVXEYVEHGPLDVWLRRERGHVPMAWKMVVAQQLASALSYLENKNLVHGNVCGRNILLARLGLAEGXSPFIKLSDPGVGLGALSREERVERIPWLAPECLPGGANSLSXAMDKWGFGAXLLEICFDGEAPLQSRSPSEKEHFYQRQHRLPEPSCPQLAXLXSQCLXYEPXQRPSFRXILRDLXRLQPHNLADVLXVNPDSPASDPXVFHKRYLKKIRDLGEGHFGKVSLYCYDPXNDGXGEMVAVKALKADCGPQHRSGWKQEIDILRXLYHEHIIKYKGCCEDQGEKSLQLVMEYVPLGSLRDYLPRHSIGLAQLLLFAQQICEGMAYLHAQHYIHRDLAARNVLLDNDRLVKIGDFGLAKAVPEGHEYYRVREDGDSPVFWYAPECLKEYKFYYASDVWSFGVXLYELLXHCDSSQSPPXKFLELIGIAQGQMXVLRLXELLERGERLPRPDKCPCEVYHLMKNCWEXEASFRPXFENLIPILKXVHEKYQGQAPSVFSVC

SEQ ID NO: 28979 - protein, 118 aa, Homo sapiens
  MOD_RES (45)..(45): Selenocysteine
  MOD_RES (52)..(52): Selenocysteine
  MOD_RES (67)..(67): Selenocysteine
MPLRHWGMARGSKPVGDGAQPMAAMGGLKVLLHWAGPGGGEPWVXFSESSLXAEEVCIHIAHKVGIXPPCFNLFALFDAQAQVWLPPNHILEIPRDASLMLYFRIRFYFRNWHGMNPR

SEQ ID NO: 28980 - protein, 921 aa, Homo sapiens
  MOD_RES (45)..(45): Selenocysteine
  MOD_RES (52)..(52): Selenocysteine
  MOD_RES (67)..(67): Selenocysteine
  MOD_RES (130)..(130): Selenocysteine
  MOD_RES (137)..(137): Selenocysteine
  MOD_RES (172)..(172): Selenocysteine
  MOD_RES (209)..(209): Selenocysteine
  MOD_RES (230)..(230): Selenocysteine
  MOD_RES (262)..(262): Selenocysteine
  MOD_RES (272)..(272): Selenocysteine
  MOD_RES (301)..(301): Selenocysteine
  MOD_RES (313)..(313): Selenocysteine
  MOD_RES (319)..(319): Selenocysteine
  MOD_RES (321)..(321): Selenocysteine
  MOD_RES (384)..(384): Selenocysteine
  MOD_RES (427)..(427): Selenocysteine
  MOD_RES (477)..(477): Selenocysteine
  MOD_RES (486)..(486): Selenocysteine
  MOD_RES (558)..(558): Selenocysteine
  MOD_RES (573)..(573): Selenocysteine
  MOD_RES (590)..(590): Selenocysteine
  MOD_RES (599)..(599): Selenocysteine
  MOD_RES (601)..(601): Selenocysteine
  MOD_RES (658)..(658): Selenocysteine
  MOD_RES (668)..(668): Selenocysteine
  MOD_RES (687)..(687): Selenocysteine
  MOD_RES (751)..(751): Selenocysteine
  MOD_RES (793)..(793): Selenocysteine
  MOD_RES (803)..(803): Selenocysteine
  MOD_RES (857)..(857): Selenocysteine
  MOD_RES (890)..(890): Selenocysteine
MPLRHWGMARGSKPVGDGAQPMAAMGGLKVLLHWAGPGGGEPWVXFSESSLXAEEVCIHIAHKVGIXPPCFNLFALFDAQAQVWLPPNHILEIPRDASLMLYFRIRFYFRNWHGMNPREPAVYRCGPPGXEASSDQXAQGMQLLDPASFEYLFEQGKHEFVNDVASLWELSXEEEIHHFKNESLGMAFLHLCHLALRHGIPLEEVAKKXSFKDCIPRSFRRHIRQHSALXRLRLRNVFRRFLRDFQPGRLSQQMVMVKYLAXLERLAPRFGXERVPVCHLRLLAQAEGEPCYIRDSGVAPXDPGPESAAGPPXHEVLVXGXGGIQWWPVEEEVNKEEGSSGSSGRNPQASLFGKKAKAHKAVGQPADRPREPLWAYFCDFRDIXHVVLKEHCVSIHRQDNKCLELSLPSRAAALSFVSLVDGYFRLXADSSHYLCHEVAPPRLVMSIRDGIHGPLLEPFVQAKLRPEDGLYLIHWSXSHPYRLILXVAQRSQAPDGMQSLRLRKFPIEQQDGAFVLEGWGRSFPSVRELGAALQGCLLRAGDDCFSLRRCCLPQPGEXSNLIIMRGARASPRXLNLSQLSFHRVDQKEIXQLSHLGQGXRXNVYEGRLRVEGSGDPEEGKMDDEDPLVPGRDRGQELRVVLKVLDPSHHDIALAFYEXASLMSQVSHXHLAFVHGVCVRGPENIMVXEYVEHGPLDVWLRRERGHVPMAWKMVVAQQLASALSYLENKNLVHGNVCGRNILLARLGLAEGXSPFIKLSDPGVGLGALSREERVERIPWLAPECLPGGANSLSXAMDKWGFGAXLLEICFDGEAPLQSRSPSEVCLGDPWALPAVGAPPRNPEDRIRAQSCIPSGLVXSSLSGLPAGGPLAGAQCSPSLFRSLWKSLVPGXQKASKRLDFSFRQSDQGSDGRRPGCRVGKKG

SEQ ID NO: 28981 - protein, 1187 aa, Homo sapiens
  MOD_RES (45)..(45): Selenocysteine
  MOD_RES (52)..(52): Selenocysteine
  MOD_RES (67)..(67): Selenocysteine
  MOD_RES (130)..(130): Selenocysteine
  MOD_RES (137)..(137): Selenocysteine
  MOD_RES (172)..(172): Selenocysteine
  MOD_RES (209)..(209): Selenocysteine
  MOD_RES (230)..(230): Selenocysteine
  MOD_RES (262)..(262): Selenocysteine
  MOD_RES (272)..(272): Selenocysteine
  MOD_RES (301)..(301): Selenocysteine
  MOD_RES (313)..(313): Selenocysteine
  MOD_RES (319)..(319): Selenocysteine
  MOD_RES (321)..(321): Selenocysteine
  MOD_RES (384)..(384): Selenocysteine
  MOD_RES (427)..(427): Selenocysteine
  MOD_RES (477)..(477): Selenocysteine
  MOD_RES (486)..(486): Selenocysteine
  MOD_RES (558)..(558): Selenocysteine
  MOD_RES (573)..(573): Selenocysteine
  MOD_RES (590)..(590): Selenocysteine
  MOD_RES (599)..(599): Selenocysteine
  MOD_RES (601)..(601): Selenocysteine
  MOD_RES (658)..(658): Selenocysteine
  MOD_RES (668)..(668): Selenocysteine
  MOD_RES (687)..(687): Selenocysteine
  MOD_RES (751)..(751): Selenocysteine
  MOD_RES (793)..(793): Selenocysteine
  MOD_RES (803)..(803): Selenocysteine
  MOD_RES (843)..(843): Selenocysteine
  MOD_RES (845)..(845): Selenocysteine
  MOD_RES (850)..(850): Selenocysteine
  MOD_RES (854)..(854): Selenocysteine
  MOD_RES (861)..(861): Selenocysteine
  MOD_RES (867)..(867): Selenocysteine
  MOD_RES (879)..(879): Selenocysteine
  MOD_RES (890)..(890): Selenocysteine
  MOD_RES (919)..(919): Selenocysteine
  MOD_RES (923)..(923): Selenocysteine
  MOD_RES (953)..(953): Selenocysteine
  MOD_RES (1090)..(1090): Selenocysteine
  MOD_RES (1096)..(1096): Selenocysteine
  MOD_RES (1106)..(1106): Selenocysteine
  MOD_RES (1120)..(1120): Selenocysteine
  MOD_RES (1125)..(1125): Selenocysteine
  MOD_RES (1154)..(1154): Selenocysteine
  MOD_RES (1161)..(1161): Selenocysteine
  MOD_RES (1171)..(1171): Selenocysteine
MPLRHWGMARGSKPVGDGAQPMAAMGGLKVLLHWAGPGGGEPWVXFSESSLXAEEVCIHIAHKVGIXPPCFNLFALFDAQAQVWLPPNHILEIPRDASLMLYFRIRFYFRNWHGMNPREPAVYRCGPPGXEASSDQXAQGMQLLDPASFEYLFEQGKHEFVNDVASLWELSXEEEIHHFKNESLGMAFLHLCHLALRHGIPLEEVAKKXSFKDCIPRSFRRHIRQHSALXRLRLRNVFRRFLRDFQPGRLSQQMVMVKYLAXLERLAPRFGXERVPVCHLRLLAQAEGEPCYIRDSGVAPXDPGPESAAGPPXHEVLVXGXGGIQWWPVEEEVNKEEGSSGSSGRNPQASLFGKKAKAHKAVGQPADRPREPLWAYFCDFRDIXHVVLKEHCVSIHRQDNKCLELSLPSRAAALSFVSLVDGYFRLXADSSHYLCHEVAPPRLVMSIRDGIHGPLLEPFVQAKLRPEDGLYLIHWSXSHPYRLILXVAQRSQAPDGMQSLRLRKFPIEQQDGAFVLEGWGRSFPSVRELGAALQGCLLRAGDDCFSLRRCCLPQPGEXSNLIIMRGARASPRXLNLSQLSFHRVDQKEIXQLSHLGQGXRXNVYEGRLRVEGSGDPEEGKMDDEDPLVPGRDRGQELRVVLKVLDPSHHDIALAFYEXASLMSQVSHXHLAFVHGVCVRGPENIMVXEYVEHGPLDVWLRRERGHVPMAWKMVVAQQLASALSYLENKNLVHGNVCGRNILLARLGLAEGXSPFIKLSDPGVGLGALSREERVERIPWLAPECLPGGANSLSXAMDKWGFGAXLLEICFDGEAPLQSRSPSEKEHFYQRQHRLPEPSCPQLAXLXSQCLXYEPXQRPSFRXILRDLXRLQPHNLADVLXVNPDSPASDPXVFHKRYLKKIRDLGEGHFGKVSLYCYDPXNDGXGEMVAVKALKADCGPQHRSGWKQEIDILRXLYHEHIIKYKGCCEDQGEKSLQLVMEYVPLGSLRDYLPRHSIGLAQLLLFAQQICEGMAYLHAQHYIHRDLAARNVLLDNDRLVKIGDFGLAKAVPEGHEYYRVREDGDSPVFWYAPECLKEYKFYYASDVWSFGVXLYELLXHCDSSQSPPXKFLELIGIAQGQMXVLRLXELLERGERLPRPDKCPCEVYHLMKNCWEXEASFRPXFENLIPILKXVHEKYQGQAPSVFSVC

SEQ ID NO: 28982 - protein, 134 aa, Homo sapiens
  MOD_RES (45)..(45): Selenocysteine
  MOD_RES (52)..(52): Selenocysteine
  MOD_RES (67)..(67): Selenocysteine
  MOD_RES (81)..(81): Selenocysteine
MPLRHWGMARGSKPVGDGAQPMAAMGGLKVLLHWAGPGGGEPWVXFSESSLXAEEVCIHIAHKVVEXGFHHVSQDGLDLLXSWSAHLSLPKCWDYRREPLRPADRYHSSLLQSLCPLRCSGPSLVAPKPHPRDP

SEQ ID NO: 28983 - protein, 142 aa, Homo sapiens
  MOD_RES (4)..(4): Selenocysteine
  MOD_RES (10)..(10): Selenocysteine
  MOD_RES (22)..(22): Selenocysteine
  MOD_RES (33)..(33): Selenocysteine
  MOD_RES (62)..(62): Selenocysteine
  MOD_RES (66)..(66): Selenocysteine
  MOD_RES (96)..(96): Selenocysteine
  MOD_RES (136)..(136): Selenocysteine
SFRXILRDLXRLQPHNLADVLXVNPDSPASDPXVFHKRYLKKIRDLGEGHFGKVSLYCYDPXNDGXGEMVAVKALKADCGPQHRSGWKQEIDILRXLYHEHIIKYKGCCEDQGLSSHEELLGDRGVLSPNLREPHXHSEDSP

SEQ ID NO: 28984 - protein, 64 aa, Homo sapiens
  MOD_RES (1)..(1): Any amino acid
  MOD_RES (4)..(4): Selenocysteine
  MOD_RES (10)..(10): Selenocysteine
  MOD_RES (20)..(20): Selenocysteine
  MOD_RES (31)..(31): Selenocysteine
  MOD_RES (38)..(38): Selenocysteine
  MOD_RES (48)..(48): Selenocysteine
XGVXLYELLXHCDSSQSPPXVYHLMKNCWEXEASFRPXFENLIPILKXVHEKYQGQAPSVFSVC

SEQ ID NO: 28985 - protein, 195 aa, Homo sapiens
  MOD_RES (1)..(1): Any amino acid
  MOD_RES (9)..(9): Selenocysteine
  MOD_RES (41)..(41): Selenocysteine
  MOD_RES (51)..(51): Selenocysteine
  MOD_RES (80)..(80): Selenocysteine
  MOD_RES (92)..(92): Selenocysteine
  MOD_RES (98)..(98): Selenocysteine
  MOD_RES (100)..(100): Selenocysteine
  MOD_RES (140)..(140): Selenocysteine
  MOD_RES (190)..(190): Selenocysteine
XIRQHSALXRLRLRNVFRRFLRDFQPGRLSQQMVMVKYLAXLERLAPRFGXERVPVCHLRLLAQAEGEPCYIRDSGVAPXDPGPESAAGPPXHEVLVXGXGGIQWWPVEEEVNKEEELSLPSRAAALSFVSLVDGYFRLXADSSHYLCHEVAPPRLVMSIRDGIHGPLLEPFVQAKLRPEDGLYLIHWSXSHPYR

SEQ ID NO: 28986 - protein, 135 aa, Homo sapiens
  MOD_RES (1)..(1): Any amino acid
  MOD_RES (18)..(18): Selenocysteine
  MOD_RES (22)..(22): Selenocysteine
  MOD_RES (52)..(52): Selenocysteine
XLGEGHFGKVSLYCYDPXNDGXGEMVAVKALKADCGPQHRSGWKQEIDILRXLYHEHIIKYKGCCEDQGHGLSARAALHPPRPSRAQRAAGQRQAGQDRGLWPSQGRARRPRVLPRARGWGQPRVLVCPRVPEGV

SEQ ID NO: 28987 - protein, 82 aa, Homo sapiens
  MOD_RES (1)..(1): Any amino acid
  MOD_RES (51)..(51): Selenocysteine
  MOD_RES (61)..(61): Selenocysteine
XRVEGSGDPEEGKMDDEDPLVPGRDRGQELRVVLKVLDPSHHDIALAFYEXASLMSQVSHXHLAFVHGVCVRGPESSSKLLV

SEQ ID NO: 28988 - protein, 890 aa, Homo sapiens
  MOD_RES (53)..(53): Selenocysteine
  MOD_RES (125)..(125): Selenocysteine
  MOD_RES (134)..(134): Selenocysteine
  MOD_RES (142)..(142): Selenocysteine
  MOD_RES (170)..(170): Selenocysteine
  MOD_RES (177)..(178): Selenocysteine
  MOD_RES (193)..(193): Selenocysteine
  MOD_RES (196)..(196): Selenocysteine
  MOD_RES (199)..(199): Selenocysteine
  MOD_RES (216)..(216): Selenocysteine
  MOD_RES (218)..(218): Selenocysteine
  MOD_RES (232)..(232): Selenocysteine
  MOD_RES (234)..(234): Selenocysteine
  MOD_RES (259)..(259): Selenocysteine
  MOD_RES (263)..(263): Selenocysteine
  MOD_RES (282)..(282): Selenocysteine
  MOD_RES (292)..(292): Selenocysteine
  MOD_RES (317)..(317): Selenocysteine
  MOD_RES (334)..(334): Selenocysteine
  MOD_RES (368)..(368): Selenocysteine
  MOD_RES (373)..(373): Selenocysteine
  MOD_RES (377)..(377): Selenocysteine
  MOD_RES (382)..(382): Selenocysteine
  MOD_RES (427)..(427): Selenocysteine
  MOD_RES (438)..(438): Selenocysteine
  MOD_RES (442)..(442): Selenocysteine
  MOD_RES (458)..(458): Selenocysteine
  MOD_RES (494)..(494): Selenocysteine
  MOD_RES (519)..(519): Selenocysteine
  MOD_RES (631)..(631): Selenocysteine
  MOD_RES (668)..(668): Selenocysteine
  MOD_RES (710)..(710): Selenocysteine
  MOD_RES (721)..(721): Selenocysteine
  MOD_RES (727)..(727): Selenocysteine
  MOD_RES (731)..(731): Selenocysteine
  MOD_RES (780)..(780): Selenocysteine
  MOD_RES (814)..(814): Selenocysteine
  MOD_RES (843)..(843): Selenocysteine
  MOD_RES (852)..(852): Selenocysteine
  MOD_RES (874)..(874): Selenocysteine
MALRRSMGRPGLPPLPLPPPPRLGLLLAALASLLLPESAAAGLKLMGAPVKLXVSQGQPVKLNCSVEGMEEPDIQWVKDGAVVQNLDQLYIPVSEQHWIGFLSLKSVERSDAGRYWCQVEDGGEXEISQPVWLXVEGVPFFXVEPKDLAVPPNAPFQLSCEAVGPPEPVXIVWWRGXXKIGGPAPSPSVLNVXGVXQSXMFSCEAHNLKGLASSRXAXVHLQALPAAPFNIXVXKLSSSNASVAWMPGADGRALLQSCXVQVXQAPGGWEVLAVVVPVPPFXCLLRDLVPAXNYSLRVRCANALGPSPYADWVPFQXKGLAPASAPQNLHAIRXDSGLILEWEEVIPEAPLEGPLGPYKLSWVQDNGXQDELXVEGXRANLXGWDPQKDLIVRVCVSNAVGCGPWSQPLVVSSHDRAGQQGPPHSRXSWVPVVLGVLXALVXAAALALILLRKRRKEXRFGQAFDSVMARGEPAVHFRAARSFNRERPERIEAXLDSLGISDELKEKLEDVLIPEQQFXLGRMLGKGEFGSVREAQLKQEDGSFVKVAVKMLKADIIASSDIEEFLREAACMKEFDHPHVAKLVGVSLRSRAKGRLPIPMVILPFMKHGDLHAFLLASRIGENPFNLPLQXLIRFMVDIACGMEYLSSRNFIHRDLAARNCMLAEDMXVCVADFGLSRKIYSGDYYRQGCASKLPVKWLALESLADNLYXVQSDVWAFGVXMWEIMXRGQXPYAGIENAEIYNYLIGGNRLKQPPECMEDVYDLMYQCWSADPKQRPSFXCLRMELENILGQLSVLSASQDPLYINIERAEEPXAGGSLELPGRDQPYSGAGDGSGMGAVGGXPSDCRYILXPGGLAEQPGQAEHQPESPLNEXQRLLLLQQGLLPHSSC

SEQ ID NO: 28989 - protein, 845 aa, Homo sapiens
  MOD_RES (8)..(8): Selenocysteine
  MOD_RES (80)..(80): Selenocysteine
  MOD_RES (89)..(89): Selenocysteine
  MOD_RES (97)..(97): Selenocysteine
  MOD_RES (125)..(125): Selenocysteine
  MOD_RES (132)..(133): Selenocysteine
  MOD_RES (148)..(148): Selenocysteine
  MOD_RES (151)..(151): Selenocysteine
  MOD_RES (154)..(154): Selenocysteine
  MOD_RES (171)..(171): Selenocysteine
  MOD_RES (173)..(173): Selenocysteine
  MOD_RES (187)..(187): Selenocysteine
  MOD_RES (189)..(189): Selenocysteine
  MOD_RES (214)..(214): Selenocysteine
  MOD_RES (218)..(218): Selenocysteine
  MOD_RES (237)..(237): Selenocysteine
  MOD_RES (247)..(247): Selenocysteine
  MOD_RES (272)..(272): Selenocysteine
  MOD_RES (289)..(289): Selenocysteine
  MOD_RES (323)..(323): Selenocysteine
  MOD_RES (328)..(328): Selenocysteine
  MOD_RES (332)..(332): Selenocysteine
  MOD_RES (337)..(337): Selenocysteine
  MOD_RES (382)..(382): Selenocysteine
  MOD_RES (393)..(393): Selenocysteine
  MOD_RES (397)..(397): Selenocysteine
  MOD_RES (413)..(413): Selenocysteine
  MOD_RES (449)..(449): Selenocysteine
  MOD_RES (474)..(474): Selenocysteine
  MOD_RES (586)..(586): Selenocysteine
  MOD_RES (623)..(623): Selenocysteine
  MOD_RES (665)..(665): Selenocysteine
  MOD_RES (676)..(676): Selenocysteine
  MOD_RES (682)..(682): Selenocysteine
  MOD_RES (686)..(686): Selenocysteine
  MOD_RES (735)..(735): Selenocysteine
  MOD_RES (769)..(769): Selenocysteine
  MOD_RES (798)..(798): Selenocysteine
  MOD_RES (807)..(807): Selenocysteine
  MOD_RES (829)..(829): Selenocysteine
MGAPVKLXVSQGQPVKLNCSVEGMEEPDIQWVKDGAVVQNLDQLYIPVSEQHWIGFLSLKSVERSDAGRYWCQVEDGGEXEISQPVWLXVEGVPFFXVEPKDLAVPPNAPFQLSCEAVGPPEPVXIVWWRGXXKIGGPAPSPSVLNVXGVXQSXMFSCEAHNLKGLASSRXAXVHLQALPAAPFNIXVXKLSSSNASVAWMPGADGRALLQSCXVQVXQAPGGWEVLAVVVPVPPFXCLLRDLVPAXNYSLRVRCANALGPSPYADWVPFQXKGLAPASAPQNLHAIRXDSGLILEWEEVIPEAPLEGPLGPYKLSWVQDNGXQDELXVEGXRANLXGWDPQKDLIVRVCVSNAVGCGPWSQPLVVSSHDRAGQQGPPHSRXSWVPVVLGVLXALVXAAALALILLRKRRKEXRFGQAFDSVMARGEPAVHFRAARSFNRERPERIEAXLDSLGISDELKEKLEDVLIPEQQFXLGRMLGKGEFGSVREAQLKQEDGSFVKVAVKMLKADIIASSDIEEFLREAACMKEFDHPHVAKLVGVSLRSRAKGRLPIPMVILPFMKHGDLHAFLLASRIGENPFNLPLQXLIRFMVDIACGMEYLSSRNFIHRDLAARNCMLAEDMXVCVADFGLSRKIYSGDYYRQGCASKLPVKWLALESLADNLYXVQSDVWAFGVXMWEIMXRGQXPYAGIENAEIYNYLIGGNRLKQPPECMEDVYDLMYQCWSADPKQRPSFXCLRMELENILGQLSVLSASQDPLYINIERAEEPXAGGSLELPGRDQPYSGAGDGSGMGAVGGXPSDCRYILXPGGLAEQPGQAEHQPESPLNEXQRLLLLQQGLLPHSSC

SEQ ID NO: 28990 - protein, 21 aa, Homo sapiens
VKMLKGAHLVLFPPSPSPSPS

SEQ ID NO: 28991 - protein, 286 aa, Homo sapiens
  MOD_RES (1)..(1): Any amino acid
  MOD_RES (108)..(108): Selenocysteine
  MOD_RES (145)..(145): Selenocysteine
  MOD_RES (187)..(187): Selenocysteine
  MOD_RES (198)..(198): Selenocysteine
  MOD_RES (204)..(204): Selenocysteine
  MOD_RES (208)..(208): Selenocysteine
  MOD_RES (240)..(240): Selenocysteine
  MOD_RES (276)..(276): Selenocysteine
XLGRMLGKGEFGSVREAQLKQEDGSFVKVAVKMLKADIIASSDIEEFLREAACMKEFDHPHVAKLVGVSLRSRAKGRLPIPMVILPFMKHGDLHAFLLASRIGENPFXLIRFMVDIACGMEYLSSRNFIHRDLAARNCMLAEDMXVCVADFGLSRKIYSGDYYRQGCASKLPVKWLALESLADNLYXVQSDVWAFGVXMWEIMXRGQXPYAGIENAEIYNYLIGGNRLKQPPECMEDVLXLPLHPSQGLPRPSDNLLYDLMYQCWSADPKQRPSFXCLRMELENIL

SEQ ID NO: 28992 - protein, 121 aa, Homo sapiens
  MOD_RES (1)..(1): Any amino acid
  MOD_RES (15)..(15): Selenocysteine
  MOD_RES (25)..(25): Selenocysteine
  MOD_RES (50)..(50): Selenocysteine
  MOD_RES (67)..(67): Selenocysteine
  MOD_RES (101)..(101): Selenocysteine
  MOD_RES (109)..(109): Selenocysteine
XWEVLAVVVPVPPFXCLLRDLVPAXNYSLRVRCANALGPSPYADWVPFQXKGLAPASAPQNLHAIRXDSGLILEWEEVIPEAPLEGPLGPYKLSWVQDNGXQASRALLXAAHPGYLWSLVC

SEQ ID NO: 28993 - protein, 102 aa, Homo sapiens
  MOD_RES (26)..(26): Selenocysteine
  MOD_RES (43)..(43): Selenocysteine
  MOD_RES (68)..(68): Selenocysteine
  MOD_RES (74)..(74): Selenocysteine
  MOD_RES (76)..(76): Selenocysteine
  MOD_RES (96)..(96): Selenocysteine
MGGLEPCSRLLLLPLLLAVSDCSCSXVSPGVLAGIVMGDLVLXVLIALAVYFLGRLVPRGRGAAEAAXRKQRIXEXESPYQELQGQRSDVYSDLNXQRPYYK

SEQ ID NO: 28994 - protein, 101 aa, Homo sapiens
  MOD_RES (26)..(26): Selenocysteine
  MOD_RES (43)..(43): Selenocysteine
  MOD_RES (67)..(67): Selenocysteine
  MOD_RES (73)..(73): Selenocysteine
  MOD_RES (75)..(75): Selenocysteine
  MOD_RES (95)..(95): Selenocysteine
MGGLEPCSRLLLLPLLLAVSDCSCSXVSPGVLAGIVMGDLVLXVLIALAVYFLGRLVPRGRGAAEAXRKQRIXEXESPYQELQGQRSDVYSDLNXQRPYYK

SEQ ID NO: 28995 - protein, 113 aa, Homo sapiens
  MOD_RES (37)..(37): Selenocysteine
  MOD_RES (54)..(54): Selenocysteine
  MOD_RES (79)..(79): Selenocysteine
  MOD_RES (85)..(85): Selenocysteine
  MOD_RES (87)..(87): Selenocysteine
  MOD_RES (107)..(107): Selenocysteine
MGGLEPCSRLLLLPLLLAVSGLRPVQAQAQSDCSCSXVSPGVLAGIVMGDLVLXVLIALAVYFLGRLVPRGRGAAEAAXRKQRIXEXESPYQELQGQRSDVYSDLNXQRPYYK

SEQ ID NO: 28996 - protein, 112 aa, Homo sapiens
  MOD_RES (37)..(37): Selenocysteine
  MOD_RES (54)..(54): Selenocysteine
  MOD_RES (78)..(78): Selenocysteine
  MOD_RES (84)..(84): Selenocysteine
  MOD_RES (86)..(86): Selenocysteine
  MOD_RES (106)..(106): Selenocysteine
MGGLEPCSRLLLLPLLLAVSGLRPVQAQAQSDCSCSXVSPGVLAGIVMGDLVLXVLIALAVYFLGRLVPRGRGAAEAXRKQRIXEXESPYQELQGQRSDVYSDLNXQRPYYK

SEQ ID NO: 28997 - protein, 144 aa, Homo sapiens
  MOD_RES (37)..(37): Selenocysteine
  MOD_RES (54)..(54): Selenocysteine
  MOD_RES (89)..(89): Selenocysteine
  MOD_RES (92)..(92): Selenocysteine
  MOD_RES (100)..(100): Selenocysteine
  MOD_RES (110)..(110): Selenocysteine
  MOD_RES (116)..(116): Selenocysteine
  MOD_RES (118)..(118): Selenocysteine
  MOD_RES (138)..(138): Selenocysteine
MGGLEPCSRLLLLPLLLAVSGLRPVQAQAQSDCSCSXVSPGVLAGIVMGDLVLXVLIALAVYFLGRLVPRGRGAAEGMVMEVLIWNDKXPSXHHSACLCXPQHPSPPAAXRKQRIXEXESPYQELQGQRSDVYSDLNXQRPYYK

SEQ ID NO: 28998 - protein, 35 aa, Homo sapiens
MGGLEPCSRLLLLPLLLAVSVLSRPRPRAIAVALR

SEQ ID NO: 28999 - protein, 1416 aa, Homo sapiens
  MOD_RES (51)..(51): Selenocysteine
  MOD_RES (76)..(76): Selenocysteine
  MOD_RES (95)..(96): Selenocysteine
  MOD_RES (99)..(99): Selenocysteine
  MOD_RES (127)..(127): Selenocysteine
  MOD_RES (136)..(136): Selenocysteine
  MOD_RES (169)..(169): Selenocysteine
  MOD_RES (175)..(175): Selenocysteine
  MOD_RES (181)..(181): Selenocysteine
  MOD_RES (202)..(202): Selenocysteine
  MOD_RES (250)..(250): Selenocysteine
  MOD_RES (254)..(254): Selenocysteine
  MOD_RES (259)..(259): Selenocysteine
  MOD_RES (278)..(278): Selenocysteine
  MOD_RES (365)..(365): Selenocysteine
  MOD_RES (409)..(409): Selenocysteine
  MOD_RES (434)..(434): Selenocysteine
  MOD_RES (451)..(451): Selenocysteine
  MOD_RES (518)..(518): Selenocysteine
  MOD_RES (528)..(528): Selenocysteine
  MOD_RES (539)..(539): Selenocysteine
  MOD_RES (610)..(610): Selenocysteine
  MOD_RES (706)..(706): Selenocysteine
  MOD_RES (709)..(709): Selenocysteine
  MOD_RES (714)..(714): Selenocysteine
  MOD_RES (737)..(737): Selenocysteine
  MOD_RES (772)..(772): Selenocysteine
  MOD_RES (776)..(776): Selenocysteine
  MOD_RES (801)..(801): Selenocysteine
  MOD_RES (845)..(845): Selenocysteine
  MOD_RES (849)..(849): Selenocysteine
  MOD_RES (864)..(864): Selenocysteine
  MOD_RES (871)..(871): Selenocysteine
  MOD_RES (875)..(875): Selenocysteine
  MOD_RES (879)..(879): Selenocysteine
  MOD_RES (914)..(914): Selenocysteine
  MOD_RES (962)..(962): Selenocysteine
  MOD_RES (976)..(976): Selenocysteine
  MOD_RES (1001)..(1001): Selenocysteine
  MOD_RES (1013)..(1013): Selenocysteine
  MOD_RES (1039)..(1039): Selenocysteine
  MOD_RES (1048)..(1048): Selenocysteine
  MOD_RES (1065)..(1065): Selenocysteine
  MOD_RES (1080)..(1080): Selenocysteine
  MOD_RES (1097)..(1097): Selenocysteine
  MOD_RES (1127)..(1127): Selenocysteine
  MOD_RES (1148)..(1148): Selenocysteine
  MOD_RES (1150)..(1150): Selenocysteine
  MOD_RES (1211)..(1211): Selenocysteine
  MOD_RES (1220)..(1220): Selenocysteine
  MOD_RES (1232)..(1232): Selenocysteine
  MOD_RES (1238)..(1238): Selenocysteine
  MOD_RES (1298)..(1299): Selenocysteine
  MOD_RES (1301)..(1301): Selenocysteine
  MOD_RES (1322)..(1322): Selenocysteine
  MOD_RES (1342)..(1342): Selenocysteine
  MOD_RES (1344)..(1344): Selenocysteine
  MOD_RES (1349)..(1349): Selenocysteine
  MOD_RES (1358)..(1358): Selenocysteine
  MOD_RES (1386)..(1386): Selenocysteine
MKSLKSRLRRQDVPGPASSGAAAASAHAADWNKYDDRLMKAAERGDVEKVXSILAKKGVNPGKLDVEGRSVFHVVXSKGNLECLNAILIHGVDIXXSDXAGRNALHLAAKYGHALCLQKLLQYNCPXEHADLQGRXALHDAAMADCPSSIQLLCDHGASVNAKDVDGRXPLVLAXQMSRPXICQLLIDRGADVNSRDKQNRXALMLGCEYGCRDAVEVLIKNGADISLLDALGHDSSYYARIGDNLDILXLLKXASENXNKGRELWKKGPSLQQRNLXHMQDEVNVKSHQREHQNIQDLEIENEDLKERLRKIQQEQRILLDKVNGLQLQLNEEVMVADDLESEREKLKSLLAAKEKQHEESLRXIEALKNRFKYFESDHLGSGSHFSNRKEDMLLKQGQMYMADSQCXSPGIPAHMQSRSMLRPLELSLPSQXSYSENEILKKELEAMRXFCESAKQDRLKLQNELAHKVAECKALALECERVKEDSDEQIKQLEDALKDVQKRMYESEGKVKQMQXHFLALKEHLXSEAASGNHRLXEELKDQLKDLKVKYEGASAEVGKLRNQIKQNEMIVEEFKRDEGKLIEENKRLQKELSMCEMEREKKGRKVXEMEGQAKELSAKLALSIPAEKFENMKSSLSNEVNEKAKKLVEMEREHEKSLSEIRQLKRELENVKAKLAQHVKPEEHEQVKSRLEQKSGELGKKIXELXLKNQXLQKEIEKVYLDNKLLKEQAHNLXIEMKNHYVPLKVSEDMKKSHDAIIDDLNRKLLDVXQKYXEKKLEMEKLLLENDSLSKDVSRLEXVFVPPEKHEKEIIALKSNIVELKKQLSELKKKCGEDQEKIHALXSENXNLKKMMSNQYVPVKXHEEVKMXLNDXLAKXNRELLDVKKKFEDINQEFVKIKDKNEILKRNLENXQNQIKAEYISLAEHEAKMSSLSQSMRKVQDSNAEILANYRKGQEEIVXLHAEIKAQKKELDXIQECIKVKYAPIVSFEECERKFKAXEKELKDQLSEQXQKYSVSEEEVKKNKQENDKLKKEIFXLQKDLRDKXVLIEKSHEMERALSRKXDELNKQLKDLSQKYXEVKNVKEKLVEENAKQXSEILAVQNLLQKQHVPLEQVEALKKSLNGXIENLKEELKSMQRCYEKEQQXVXKLHQLLENQKNSSVPLAEHLQIKEAFEKEVGIIKASLREKEEESQNKMEEVSKLQSEVQNXKQALKKLEXREVVDLSKYKAXKSDLEXQISSLNEKLANLNRKYEEVCEEVLHAKKKEISAKDEKELLHFSIEQEIKDQKERCDKSLXXIXELQRRIQESAKQIEAKDNKIXELLNDVERLKQALNGLSQLXYXSGNPXKRQSQLIDXLQHQVKSLEQQLADADRQHQEVIAIYRXHLLSAAQGHMDEDVQEALLQIIQMRQGLVC

SEQ ID NO: 29000 - protein, 1307 aa, Homo sapiens
  MOD_RES (51)..(51): Selenocysteine
  MOD_RES (76)..(76): Selenocysteine
  MOD_RES (95)..(96): Selenocysteine
  MOD_RES (99)..(99): Selenocysteine
  MOD_RES (127)..(127): Selenocysteine
  MOD_RES (136)..(136): Selenocysteine
  MOD_RES (169)..(169): Selenocysteine
  MOD_RES (256)..(256): Selenocysteine
  MOD_RES (300)..(300): Selenocysteine
  MOD_RES (325)..(325): Selenocysteine
  MOD_RES (342)..(342): Selenocysteine
  MOD_RES (409)..(409): Selenocysteine
  MOD_RES (419)..(419): Selenocysteine
  MOD_RES (430)..(430): Selenocysteine
  MOD_RES (501)..(501): Selenocysteine
  MOD_RES (597)..(597): Selenocysteine
  MOD_RES (600)..(600): Selenocysteine
  MOD_RES (605)..(605): Selenocysteine
  MOD_RES (628)..(628): Selenocysteine
  MOD_RES (663)..(663): Selenocysteine
  MOD_RES (667)..(667): Selenocysteine
  MOD_RES (692)..(692): Selenocysteine
  MOD_RES (736)..(736): Selenocysteine
  MOD_RES (740)..(740): Selenocysteine
  MOD_RES (755)..(755): Selenocysteine
  MOD_RES (762)..(762): Selenocysteine
  MOD_RES (766)..(766): Selenocysteine
  MOD_RES (770)..(770): Selenocysteine
  MOD_RES (805)..(805): Selenocysteine
  MOD_RES (853)..(853): Selenocysteine
  MOD_RES (867)..(867): Selenocysteine
  MOD_RES (892)..(892): Selenocysteine
  MOD_RES (904)..(904): Selenocysteine
  MOD_RES (930)..(930): Selenocysteine
  MOD_RES (939)..(939): Selenocysteine
  MOD_RES (956)..(956): Selenocysteine
  MOD_RES (971)..(971): Selenocysteine
  MOD_RES (988)..(988): Selenocysteine
  MOD_RES (1018)..(1018): Selenocysteine
  MOD_RES (1039)..(1039): Selenocysteine
  MOD_RES (1041)..(1041): Selenocysteine
  MOD_RES (1102)..(1102): Selenocysteine
  MOD_RES (1111)..(1111): Selenocysteine
  MOD_RES (1123)..(1123): Selenocysteine
  MOD_RES (1129)..(1129): Selenocysteine
  MOD_RES (1189)..(1190): Selenocysteine
  MOD_RES (1192)..(1192): Selenocysteine
  MOD_RES (1213)..(1213): Selenocysteine
  MOD_RES (1233)..(1233): Selenocysteine
  MOD_RES (1235)..(1235): Selenocysteine
  MOD_RES (1240)..(1240): Selenocysteine
  MOD_RES (1249)..(1249): Selenocysteine
  MOD_RES (1277)..(1277): Selenocysteine
MKSLKSRLRRQDVPGPASSGAAAASAHAADWNKYDDRLMKAAERGDVEKVXSILAKKGVNPGKLDVEGRSVFHVVXSKGNLECLNAILIHGVDIXXSDXAGRNALHLAAKYGHALCLQKLLQYNCPXEHADLQGRXALHDAAMADCPSSIQLLCDHGASVNAKDVRNLXHMQDEVNVKSHQREHQNIQDLEIENEDLKERLRKIQQEQRILLDKVNGLQLQLNEEVMVADDLESEREKLKSLLAAKEKQHEESLRXIEALKNRFKYFESDHLGSGSHFSNRKEDMLLKQGQMYMADSQCXSPGIPAHMQSRSMLRPLELSLPSQXSYSENEILKKELEAMRXFCESAKQDRLKLQNELAHKVAECKALALECERVKEDSDEQIKQLEDALKDVQKRMYESEGKVKQMQXHFLALKEHLXSEAASGNHRLXEELKDQLKDLKVKYEGASAEVGKLRNQIKQNEMIVEEFKRDEGKLIEENKRLQKELSMCEMEREKKGRKVXEMEGQAKELSAKLALSIPAEKFENMKSSLSNEVNEKAKKLVEMEREHEKSLSEIRQLKRELENVKAKLAQHVKPEEHEQVKSRLEQKSGELGKKIXELXLKNQXLQKEIEKVYLDNKLLKEQAHNLXIEMKNHYVPLKVSEDMKKSHDAIIDDLNRKLLDVXQKYXEKKLEMEKLLLENDSLSKDVSRLEXVFVPPEKHEKEIIALKSNIVELKKQLSELKKKCGEDQEKIHALXSENXNLKKMMSNQYVPVKXHEEVKMXLNDXLAKXNRELLDVKKKFEDINQEFVKIKDKNEILKRNLENXQNQIKAEYISLAEHEAKMSSLSQSMRKVQDSNAEILANYRKGQEEIVXLHAEIKAQKKELDXIQECIKVKYAPIVSFEECERKFKAXEKELKDQLSEQXQKYSVSEEEVKKNKQENDKLKKEIFXLQKDLRDKXVLIEKSHEMERALSRKXDELNKQLKDLSQKYXEVKNVKEKLVEENAKQXSEILAVQNLLQKQHVPLEQVEALKKSLNGXIENLKEELKSMQRCYEKEQQXVXKLHQLLENQKNSSVPLAEHLQIKEAFEKEVGIIKASLREKEEESQNKMEEVSKLQSEVQNXKQALKKLEXREVVDLSKYKAXKSDLEXQISSLNEKLANLNRKYEEVCEEVLHAKKKEISAKDEKELLHFSIEQEIKDQKERCDKSLXXIXELQRRIQESAKQIEAKDNKIXELLNDVERLKQALNGLSQLXYXSGNPXKRQSQLIDXLQHQVKSLEQQLADADRQHQEVIAIYRXHLLSAAQGHMDEDVQEALLQIIQMRQGLVC

SEQ ID NO: 29001 - protein, 564 aa, Homo sapiens
  MOD_RES (9)..(9): Selenocysteine
  MOD_RES (38)..(38): Selenocysteine
  MOD_RES (63)..(63): Selenocysteine
  MOD_RES (82)..(83): Selenocysteine
  MOD_RES (86)..(86): Selenocysteine
  MOD_RES (114)..(114): Selenocysteine
  MOD_RES (123)..(123): Selenocysteine
  MOD_RES (156)..(156): Selenocysteine
  MOD_RES (162)..(162): Selenocysteine
  MOD_RES (168)..(168): Selenocysteine
  MOD_RES (189)..(189): Selenocysteine
  MOD_RES (237)..(237): Selenocysteine
  MOD_RES (241)..(241): Selenocysteine
  MOD_RES (246)..(246): Selenocysteine
  MOD_RES (265)..(265): Selenocysteine
  MOD_RES (341)..(341): Selenocysteine
  MOD_RES (385)..(385): Selenocysteine
  MOD_RES (410)..(410): Selenocysteine
  MOD_RES (427)..(427): Selenocysteine
  MOD_RES (494)..(494): Selenocysteine
  MOD_RES (504)..(504): Selenocysteine
  MOD_RES (515)..(515): Selenocysteine
MMNCWFSCXPKNRHAADWNKYDDRLMKAAERGDVEKVXSILAKKGVNPGKLDVEGRSVFHVVXSKGNLECLNAILIHGVDIXXSDXAGRNALHLAAKYGHALCLQKLLQYNCPXEHADLQGRXALHDAAMADCPSSIQLLCDHGASVNAKDVDGRXPLVLAXQMSRPXICQLLIDRGADVNSRDKQNRXALMLGCEYGCRDAVEVLIKNGADISLLDALGHDSSYYARIGDNLDILXLLKXASENXNKGRELWKKGPSLQQRNLXHMQDEVNVKSHQREHQNIQDLEIENEDLKERLRKIQQEQRILLDKVNGLQLQLNEREKLKSLLAAKEKQHEESLRXIEALKNRFKYFESDHLGSGSHFSNRKEDMLLKQGQMYMADSQCXSPGIPAHMQSRSMLRPLELSLPSQXSYSENEILKKELEAMRXFCESAKQDRLKLQNELAHKVAECKALALECERVKEDSDEQIKQLEDALKDVQKRMYESEGKVKQMQXHFLALKEHLXSEAASGNHRLXEELKDQLKDLKVKYEGASAEVGKLRNQIKQNEMIVEEFKRDEGKLIEEN

SEQ ID NO: 29002 - protein, 1401 aa, Homo sapiens
  MOD_RES (9)..(9): Selenocysteine
  MOD_RES (38)..(38): Selenocysteine
  MOD_RES (63)..(63): Selenocysteine
  MOD_RES (82)..(83): Selenocysteine
  MOD_RES (86)..(86): Selenocysteine
  MOD_RES (114)..(114): Selenocysteine
  MOD_RES (123)..(123): Selenocysteine
  MOD_RES (156)..(156): Selenocysteine
  MOD_RES (162)..(162): Selenocysteine
  MOD_RES (168)..(168): Selenocysteine
  MOD_RES (189)..(189): Selenocysteine
  MOD_RES (237)..(237): Selenocysteine
  MOD_RES (241)..(241): Selenocysteine
  MOD_RES (246)..(246): Selenocysteine
  MOD_RES (265)..(265): Selenocysteine
  MOD_RES (352)..(352): Selenocysteine
  MOD_RES (394)..(394): Selenocysteine
  MOD_RES (419)..(419): Selenocysteine
  MOD_RES (436)..(436): Selenocysteine
  MOD_RES (503)..(503): Selenocysteine
  MOD_RES (513)..(513): Selenocysteine
  MOD_RES (524)..(524): Selenocysteine
  MOD_RES (595)..(595): Selenocysteine
  MOD_RES (691)..(691): Selenocysteine
  MOD_RES (694)..(694): Selenocysteine
  MOD_RES (699)..(699): Selenocysteine
  MOD_RES (722)..(722): Selenocysteine
  MOD_RES (757)..(757): Selenocysteine
  MOD_RES (761)..(761): Selenocysteine
  MOD_RES (786)..(786): Selenocysteine
  MOD_RES (830)..(830): Selenocysteine
  MOD_RES (834)..(834): Selenocysteine
  MOD_RES (849)..(849): Selenocysteine
  MOD_RES (856)..(856): Selenocysteine
  MOD_RES (860)..(860): Selenocysteine
  MOD_RES (864)..(864): Selenocysteine
  MOD_RES (899)..(899): Selenocysteine
  MOD_RES (947)..(947): Selenocysteine
  MOD_RES (961)..(961): Selenocysteine
  MOD_RES (986)..(986): Selenocysteine
  MOD_RES (998)..(998): Selenocysteine
  MOD_RES (1024)..(1024): Selenocysteine
  MOD_RES (1033)..(1033): Selenocysteine
  MOD_RES (1050)..(1050): Selenocysteine
  MOD_RES (1065)..(1065): Selenocysteine
  MOD_RES (1082)..(1082): Selenocysteine
  MOD_RES (1112)..(1112): Selenocysteine
  MOD_RES (1133)..(1133): Selenocysteine
  MOD_RES (1135)..(1135): Selenocysteine
  MOD_RES (1196)..(1196): Selenocysteine
  MOD_RES (1205)..(1205): Selenocysteine
  MOD_RES (1217)..(1217): Selenocysteine
  MOD_RES (1223)..(1223): Selenocysteine
  MOD_RES (1283)..(1284): Selenocysteine
  MOD_RES (1286)..(1286): Selenocysteine
  MOD_RES (1307)..(1307): Selenocysteine
  MOD_RES (1327)..(1327): Selenocysteine
  MOD_RES (1329)..(1329): Selenocysteine
  MOD_RES (1334)..(1334): Selenocysteine
  MOD_RES (1343)..(1343): Selenocysteine
  MOD_RES (1371)..(1371): Selenocysteine
MMNCWFSCXPKNRHAADWNKYDDRLMKAAERGDVEKVXSILAKKGVNPGKLDVEGRSVFHVVXSKGNLECLNAILIHGVDIXXSDXAGRNALHLAAKYGHALCLQKLLQYNCPXEHADLQGRXALHDAAMADCPSSIQLLCDHGASVNAKDVDGRXPLVLAXQMSRPXICQLLIDRGADVNSRDKQNRXALMLGCEYGCRDAVEVLIKNGADISLLDALGHDSSYYARIGDNLDILXLLKXASENXNKGRELWKKGPSLQQRNLXHMQDEVNVKSHQREHQNIQDLEIENEDLKERLRKIQQEQRILLDKVNGLQLQLNEEVMVADDLESEREKLKSLLAAKEKQHEESLRXIEALKNRFKYFESDHLGSGSHFRKEDMLLKQGQMYMADSQCXSPGIPAHMQSRSMLRPLELSLPSQXSYSENEILKKELEAMRXFCESAKQDRLKLQNELAHKVAECKALALECERVKEDSDEQIKQLEDALKDVQKRMYESEGKVKQMQXHFLALKEHLXSEAASGNHRLXEELKDQLKDLKVKYEGASAEVGKLRNQIKQNEMIVEEFKRDEGKLIEENKRLQKELSMCEMEREKKGRKVXEMEGQAKELSAKLALSIPAEKFENMKSSLSNEVNEKAKKLVEMEREHEKSLSEIRQLKRELENVKAKLAQHVKPEEHEQVKSRLEQKSGELGKKIXELXLKNQXLQKEIEKVYLDNKLLKEQAHNLXIEMKNHYVPLKVSEDMKKSHDAIIDDLNRKLLDVXQKYXEKKLEMEKLLLENDSLSKDVSRLEXVFVPPEKHEKEIIALKSNIVELKKQLSELKKKCGEDQEKIHALXSENXNLKKMMSNQYVPVKXHEEVKMXLNDXLAKXNRELLDVKKKFEDINQEFVKIKDKNEILKRNLENXQNQIKAEYISLAEHEAKMSSLSQSMRKVQDSNAEILANYRKGQEEIVXLHAEIKAQKKELDXIQECIKVKYAPIVSFEECERKFKAXEKELKDQLSEQXQKYSVSEEEVKKNKQENDKLKKEIFXLQKDLRDKXVLIEKSHEMERALSRKXDELNKQLKDLSQKYXEVKNVKEKLVEENAKQXSEILAVQNLLQKQHVPLEQVEALKKSLNGXIENLKEELKSMQRCYEKEQQXVXKLHQLLENQKNSSVPLAEHLQIKEAFEKEVGIIKASLREKEEESQNKMEEVSKLQSEVQNXKQALKKLEXREVVDLSKYKAXKSDLEXQISSLNEKLANLNRKYEEVCEEVLHAKKKEISAKDEKELLHFSIEQEIKDQKERCDKSLXXIXELQRRIQESAKQIEAKDNKIXELLNDVERLKQALNGLSQLXYXSGNPXKRQSQLIDXLQHQVKSLEQQLADADRQHQEVIAIYRXHLLSAAQGHMDEDVQEALLQIIQMRQGLVC

SEQ ID NO: 29003 - protein, 1403 aa, Homo sapiens
  MOD_RES (9)..(9): Selenocysteine
  MOD_RES (38)..(38): Selenocysteine
  MOD_RES (63)..(63): Selenocysteine
  MOD_RES (82)..(83): Selenocysteine
  MOD_RES (86)..(86): Selenocysteine
  MOD_RES (114)..(114): Selenocysteine
  MOD_RES (123)..(123): Selenocysteine
  MOD_RES (156)..(156): Selenocysteine
  MOD_RES (162)..(162): Selenocysteine
  MOD_RES (168)..(168): Selenocysteine
  MOD_RES (189)..(189): Selenocysteine
  MOD_RES (237)..(237): Selenocysteine
  MOD_RES (241)..(241): Selenocysteine
  MOD_RES (246)..(246): Selenocysteine
  MOD_RES (265)..(265): Selenocysteine
  MOD_RES (352)..(352): Selenocysteine
  MOD_RES (396)..(396): Selenocysteine
  MOD_RES (421)..(421): Selenocysteine
  MOD_RES (438)..(438): Selenocysteine
  MOD_RES (505)..(505): Selenocysteine
  MOD_RES (515)..(515): Selenocysteine
  MOD_RES (526)..(526): Selenocysteine
  MOD_RES (597)..(597): Selenocysteine
  MOD_RES (693)..(693): Selenocysteine
  MOD_RES (696)..(696): Selenocysteine
  MOD_RES (701)..(701): Selenocysteine
  MOD_RES (724)..(724): Selenocysteine
  MOD_RES (759)..(759): Selenocysteine
  MOD_RES (763)..(763): Selenocysteine
  MOD_RES (788)..(788): Selenocysteine
  MOD_RES (832)..(832): Selenocysteine
  MOD_RES (836)..(836): Selenocysteine
  MOD_RES (851)..(851): Selenocysteine
  MOD_RES (858)..(858): Selenocysteine
  MOD_RES (862)..(862): Selenocysteine
  MOD_RES (866)..(866): Selenocysteine
  MOD_RES (901)..(901): Selenocysteine
  MOD_RES (949)..(949): Selenocysteine
  MOD_RES (963)..(963): Selenocysteine
  MOD_RES (988)..(988): Selenocysteine
  MOD_RES (1000)..(1000): Selenocysteine
  MOD_RES (1026)..(1026): Selenocysteine
  MOD_RES (1035)..(1035): Selenocysteine
  MOD_RES (1052)..(1052): Selenocysteine
  MOD_RES (1067)..(1067): Selenocysteine
  MOD_RES (1084)..(1084): Selenocysteine
  MOD_RES (1114)..(1114): Selenocysteine
  MOD_RES (1135)..(1135): Selenocysteine
  MOD_RES (1137)..(1137): Selenocysteine
  MOD_RES (1198)..(1198): Selenocysteine
  MOD_RES (1207)..(1207): Selenocysteine
  MOD_RES (1219)..(1219): Selenocysteine
  MOD_RES (1225)..(1225): Selenocysteine
  MOD_RES (1285)..(1286): Selenocysteine
  MOD_RES (1288)..(1288): Selenocysteine
  MOD_RES (1309)..(1309): Selenocysteine
  MOD_RES (1329)..(1329): Selenocysteine
  MOD_RES (1331)..(1331): Selenocysteine
  MOD_RES (1336)..(1336): Selenocysteine
  MOD_RES (1345)..(1345): Selenocysteine
  MOD_RES (1373)..(1373): Selenocysteine
MMNCWFSCXPKNRHAADWNKYDDRLMKAAERGDVEKVXSILAKKGVNPGKLDVEGRSVFHVVXSKGNLECLNAILIHGVDIXXSDXAGRNALHLAAKYGHALCLQKLLQYNCPXEHADLQGRXALHDAAMADCPSSIQLLCDHGASVNAKDVDGRXPLVLAXQMSRPXICQLLIDRGADVNSRDKQNRXALMLGCEYGCRDAVEVLIKNGADISLLDALGHDSSYYARIGDNLDILXLLKXASENXNKGRELWKKGPSLQQRNLXHMQDEVNVKSHQREHQNIQDLEIENEDLKERLRKIQQEQRILLDKVNGLQLQLNEEVMVADDLESEREKLKSLLAAKEKQHEESLRXIEALKNRFKYFESDHLGSGSHFSNRKEDMLLKQGQMYMADSQCXSPGIPAHMQSRSMLRPLELSLPSQXSYSENEILKKELEAMRXFCESAKQDRLKLQNELAHKVAECKALALECERVKEDSDEQIKQLEDALKDVQKRMYESEGKVKQMQXHFLALKEHLXSEAASGNHRLXEELKDQLKDLKVKYEGASAEVGKLRNQIKQNEMIVEEFKRDEGKLIEENKRLQKELSMCEMEREKKGRKVXEMEGQAKELSAKLALSIPAEKFENMKSSLSNEVNEKAKKLVEMEREHEKSLSEIRQLKRELENVKAKLAQHVKPEEHEQVKSRLEQKSGELGKKIXELXLKNQXLQKEIEKVYLDNKLLKEQAHNLXIEMKNHYVPLKVSEDMKKSHDAIIDDLNRKLLDVXQKYXEKKLEMEKLLLENDSLSKDVSRLEXVFVPPEKHEKEIIALKSNIVELKKQLSELKKKCGEDQEKIHALXSENXNLKKMMSNQYVPVKXHEEVKMXLNDXLAKXNRELLDVKKKFEDINQEFVKIKDKNEILKRNLENXQNQIKAEYISLAEHEAKMSSLSQSMRKVQDSNAEILANYRKGQEEIVXLHAEIKAQKKELDXIQECIKVKYAPIVSFEECERKFKAXEKELKDQLSEQXQKYSVSEEEVKKNKQENDKLKKEIFXLQKDLRDKXVLIEKSHEMERALSRKXDELNKQLKDLSQKYXEVKNVKEKLVEENAKQXSEILAVQNLLQKQHVPLEQVEALKKSLNGXIENLKEELKSMQRCYEKEQQXVXKLHQLLENQKNSSVPLAEHLQIKEAFEKEVGIIKASLREKEEESQNKMEEVSKLQSEVQNXKQALKKLEXREVVDLSKYKAXKSDLEXQISSLNEKLANLNRKYEEVCEEVLHAKKKEISAKDEKELLHFSIEQEIKDQKERCDKSLXXIXELQRRIQESAKQIEAKDNKIXELLNDVERLKQALNGLSQLXYXSGNPXKRQSQLIDXLQHQVKSLEQQLADADRQHQEVIAIYRXHLLSAAQGHMDEDVQEALLQIIQMRQGLVC

SEQ ID NO: 29004 - protein, 226 aa, Homo sapiens
  MOD_RES (46)..(46): Selenocysteine
  MOD_RES (71)..(71): Selenocysteine
  MOD_RES (90)..(91): Selenocysteine
  MOD_RES (94)..(94): Selenocysteine
  MOD_RES (122)..(122): Selenocysteine
  MOD_RES (131)..(131): Selenocysteine
  MOD_RES (164)..(164): Selenocysteine
  MOD_RES (170)..(170): Selenocysteine
  MOD_RES (176)..(176): Selenocysteine
  MOD_RES (197)..(197): Selenocysteine
MVKKQQQQPPQKNHPEFAPALHAADWNKYDDRLMKAAERGDVEKVXSILAKKGVNPGKLDVEGRSVFHVVXSKGNLECLNAILIHGVDIXXSDXAGRNALHLAAKYGHALCLQKLLQYNCPXEHADLQGRXALHDAAMADCPSSIQLLCDHGASVNAKDVDGRXPLVLAXQMSRPXICQLLIDRGADVNSRDKQNRXALMLGCEYGCRDAVEVLIKNGADISLLDA

SEQ ID NO: 29005 - protein, 41 aa, Homo sapiens
  MOD_RES (39)..(39): Selenocysteine
LIVSILRLECNGVILAHGNLCLPGSSDSPASASQVAGMXGA

SEQ ID NO: 29006 - protein, 463 aa, Homo sapiens
  MOD_RES (31)..(31): Selenocysteine
  MOD_RES (52)..(52): Selenocysteine
  MOD_RES (60)..(60): Selenocysteine
  MOD_RES (69)..(69): Selenocysteine
  MOD_RES (103)..(103): Selenocysteine
  MOD_RES (154)..(154): Selenocysteine
  MOD_RES (203)..(203): Selenocysteine
  MOD_RES (218)..(218): Selenocysteine
  MOD_RES (224)..(224): Selenocysteine
  MOD_RES (238)..(238): Selenocysteine
  MOD_RES (298)..(298): Selenocysteine
  MOD_RES (302)..(302): Selenocysteine
  MOD_RES (316)..(316): Selenocysteine
  MOD_RES (326)..(326): Selenocysteine
  MOD_RES (333)..(333): Selenocysteine
  MOD_RES (353)..(353): Selenocysteine
  MOD_RES (355)..(355): Selenocysteine
  MOD_RES (390)..(390): Selenocysteine
  MOD_RES (403)..(403): Selenocysteine
  MOD_RES (405)..(405): Selenocysteine
  MOD_RES (412)..(412): Selenocysteine
  MOD_RES (419)..(419): Selenocysteine
  MOD_RES (425)..(425): Selenocysteine
  MOD_RES (432)..(432): Selenocysteine
  MOD_RES (450)..(451): Selenocysteine
  MOD_RES (454)..(454): Selenocysteine
  MOD_RES (462)..(462): Selenocysteine
MADGEEPEKKRRRIEELLAEKMAVDGGCGDXGDWEGRWNHVKKFLERSGPFXHPDFEPSXESLQFLLDXCKVLVIGAGGLGCELLKNLALSGFRQIHVIDMDXIDVSNLNRQFLFRPKDIGRPKAEVAAEFLNDRVPNCNVVPHFNKIQDFNDXFYRQFHIIVCGLDSIIARRWINGMLISLLNYEDGVLDPSSIVPLIDGGXEGFKGNARVILPGMXACIECXLELYPPQVNFPMCXIASMPRLPEHCIEYVRMLQWPKEQPFGEGVPLDGDDPEHIQWIFQKSLERASQYNIRGVXYRLXQGVVKRIIPAVASXNAVIAAVCAXEVFKIAXSAYIPLNNYLVFNDVDGLYXYXFEAERKENCPACSQLPQNIQFSPSAKLQEVLDYLXNSASLQMKSPAIXAXLEGKNRXLYLQSVXSIEERXRPNLSKXLKELGLVDGQELAVADVXXPQXVLFKLHFXS

SEQ ID NO: 29007 - protein, 422 aa, Homo sapiens
  MOD_RES (17)..(17): Selenocysteine
  MOD_RES (38)..(38): Selenocysteine
  MOD_RES (46)..(46): Selenocysteine
  MOD_RES (62)..(62): Selenocysteine
  MOD_RES (113)..(113): Selenocysteine
  MOD_RES (162)..(162): Selenocysteine
  MOD_RES (177)..(177): Selenocysteine
  MOD_RES (183)..(183): Selenocysteine
  MOD_RES (197)..(197): Selenocysteine
  MOD_RES (257)..(257): Selenocysteine
  MOD_RES (261)..(261): Selenocysteine
  MOD_RES (275)..(275): Selenocysteine
  MOD_RES (285)..(285): Selenocysteine
  MOD_RES (292)..(292): Selenocysteine
  MOD_RES (312)..(312): Selenocysteine
  MOD_RES (314)..(314): Selenocysteine
  MOD_RES (349)..(349): Selenocysteine
  MOD_RES (362)..(362): Selenocysteine
  MOD_RES (364)..(364): Selenocysteine
  MOD_RES (371)..(371): Selenocysteine
  MOD_RES (378)..(378): Selenocysteine
  MOD_RES (384)..(384): Selenocysteine
  MOD_RES (391)..(391): Selenocysteine
  MOD_RES (409)..(410): Selenocysteine
  MOD_RES (413)..(413): Selenocysteine
  MOD_RES (421)..(421): Selenocysteine
MADGEEPMAVDGGCGDXGDWEGRWNHVKKFLERSGPFXHPDFEPSXEALSGFRQIHVIDMDXIDVSNLNRQFLFRPKDIGRPKAEVAAEFLNDRVPNCNVVPHFNKIQDFNDXFYRQFHIIVCGLDSIIARRWINGMLISLLNYEDGVLDPSSIVPLIDGGXEGFKGNARVILPGMXACIECXLELYPPQVNFPMCXIASMPRLPEHCIEYVRMLQWPKEQPFGEGVPLDGDDPEHIQWIFQKSLERASQYNIRGVXYRLXQGVVKRIIPAVASXNAVIAAVCAXEVFKIAXSAYIPLNNYLVFNDVDGLYXYXFEAERKENCPACSQLPQNIQFSPSAKLQEVLDYLXNSASLQMKSPAIXAXLEGKNRXLYLQSVXSIEERXRPNLSKXLKELGLVDGQELAVADVXXPQXVLFKLHFXS

SEQ ID NO: 29008 - protein, 64 aa, Homo sapiens
  MOD_RES (17)..(17): Selenocysteine
  MOD_RES (38)..(38): Selenocysteine
  MOD_RES (46)..(46): Selenocysteine
  MOD_RES (57)..(57): Selenocysteine
MADGEEPMAVDGGCGDXGDWEGRWNHVKKFLERSGPFXHPDFEPSXENFILLYVDWXLSSPEDG

SEQ ID NO: 29009 - protein, 129 aa, Homo sapiens
  MOD_RES (17)..(17): Selenocysteine
  MOD_RES (38)..(38): Selenocysteine
  MOD_RES (46)..(46): Selenocysteine
  MOD_RES (55)..(55): Selenocysteine
  MOD_RES (89)..(89): Selenocysteine
  MOD_RES (110)..(110): Selenocysteine
MADGEEPMAVDGGCGDXGDWEGRWNHVKKFLERSGPFXHPDFEPSXESLQFLLDXCKVLVIGAGGLGCELLKNLALSGFRQIHVIDMDXIDVSNLNRQFLFRISYYCMWXGLYHRQKMDKWHADISSKL

SEQ ID NO: 29010 - protein, 449 aa, Homo sapiens
  MOD_RES (17)..(17): Selenocysteine
  MOD_RES (38)..(38): Selenocysteine
  MOD_RES (46)..(46): Selenocysteine
  MOD_RES (55)..(55): Selenocysteine
  MOD_RES (89)..(89): Selenocysteine
  MOD_RES (140)..(140): Selenocysteine
  MOD_RES (189)..(189): Selenocysteine
  MOD_RES (204)..(204): Selenocysteine
  MOD_RES (210)..(210): Selenocysteine
  MOD_RES (224)..(224): Selenocysteine
  MOD_RES (284)..(284): Selenocysteine
  MOD_RES (288)..(288): Selenocysteine
  MOD_RES (302)..(302): Selenocysteine
  MOD_RES (312)..(312): Selenocysteine
  MOD_RES (319)..(319): Selenocysteine
  MOD_RES (339)..(339): Selenocysteine
  MOD_RES (341)..(341): Selenocysteine
  MOD_RES (376)..(376): Selenocysteine
  MOD_RES (389)..(389): Selenocysteine
  MOD_RES (391)..(391): Selenocysteine
  MOD_RES (398)..(398): Selenocysteine
  MOD_RES (405)..(405): Selenocysteine
  MOD_RES (411)..(411): Selenocysteine
  MOD_RES (418)..(418): Selenocysteine
  MOD_RES (436)..(437): Selenocysteine
  MOD_RES (440)..(440): Selenocysteine
  MOD_RES (448)..(448): Selenocysteine
MADGEEPMAVDGGCGDXGDWEGRWNHVKKFLERSGPFXHPDFEPSXESLQFLLDXCKVLVIGAGGLGCELLKNLALSGFRQIHVIDMDXIDVSNLNRQFLFRPKDIGRPKAEVAAEFLNDRVPNCNVVPHFNKIQDFNDXFYRQFHIIVCGLDSIIARRWINGMLISLLNYEDGVLDPSSIVPLIDGGXEGFKGNARVILPGMXACIECXLELYPPQVNFPMCXIASMPRLPEHCIEYVRMLQWPKEQPFGEGVPLDGDDPEHIQWIFQKSLERASQYNIRGVXYRLXQGVVKRIIPAVASXNAVIAAVCAXEVFKIAXSAYIPLNNYLVFNDVDGLYXYXFEAERKENCPACSQLPQNIQFSPSAKLQEVLDYLXNSASLQMKSPAIXAXLEGKNRXLYLQSVXSIEERXRPNLSKXLKELGLVDGQELAVADVXXPQXVLFKLHFXS

SEQ ID NO: 29011 - protein, 64 aa, Homo sapiens
  MOD_RES (61)..(61): Selenocysteine
MAESVERLQQRVQELERELAQERSLQVPRSGDGGGGRVRIEKMSSEVVDSNPYSCYSLIMXRWN

SEQ ID NO: 29012 - protein, 347 aa, Homo sapiens
  MOD_RES (73)..(73): Selenocysteine
  MOD_RES (88)..(88): Selenocysteine
  MOD_RES (93)..(93): Selenocysteine
  MOD_RES (134)..(134): Selenocysteine
  MOD_RES (152)..(153): Selenocysteine
  MOD_RES (190)..(190): Selenocysteine
  MOD_RES (193)..(193): Selenocysteine
  MOD_RES (201)..(201): Selenocysteine
  MOD_RES (243)..(243): Selenocysteine
  MOD_RES (256)..(257): Selenocysteine
  MOD_RES (278)..(278): Selenocysteine
  MOD_RES (294)..(294): Selenocysteine
MAESVERLQQRVQELERELAQERSLQVPRSGDGGGGRVRIEKMSSEVVDSNPYSRLMALKRMGIVSDYEKIRXFAVAIVGVGGVGSVXAEMLXRCGIGKLLLFDYDKVELANMNRLFFQPHQAGLSKVQAAEHXLRNINPDVLFEVHNYNIXXVENFQHFMDRISNGGLEEGKPVDLVLSCVDNFEARMXINXACNELGQXWMESGVSENAVSGHIQLIIPGESACFACAPPLVVAANIDEKXLKREGVCAASLPXXMGVVAGILVQNVLKFLLNFGXVSFYLGYNAMQDFFPXMSMKPNPQCDDRNCRKQQEEYKKKVAALPKQEVIQEEEEIIHEDNEWARRFCH

SEQ ID NO: 29013 - protein, 377 aa, Homo sapiens
  MOD_RES (73)..(73): Selenocysteine
  MOD_RES (88)..(88): Selenocysteine
  MOD_RES (93)..(93): Selenocysteine
  MOD_RES (134)..(134): Selenocysteine
  MOD_RES (152)..(153): Selenocysteine
  MOD_RES (190)..(190): Selenocysteine
  MOD_RES (193)..(193): Selenocysteine
  MOD_RES (201)..(201): Selenocysteine
  MOD_RES (243)..(243): Selenocysteine
  MOD_RES (256)..(257): Selenocysteine
  MOD_RES (278)..(278): Selenocysteine
  MOD_RES (294)..(294): Selenocysteine
  MOD_RES (369)..(369): Selenocysteine
  MOD_RES (373)..(373): Selenocysteine
MAESVERLQQRVQELERELAQERSLQVPRSGDGGGGRVRIEKMSSEVVDSNPYSRLMALKRMGIVSDYEKIRXFAVAIVGVGGVGSVXAEMLXRCGIGKLLLFDYDKVELANMNRLFFQPHQAGLSKVQAAEHXLRNINPDVLFEVHNYNIXXVENFQHFMDRISNGGLEEGKPVDLVLSCVDNFEARMXINXACNELGQXWMESGVSENAVSGHIQLIIPGESACFACAPPLVVAANIDEKXLKREGVCAASLPXXMGVVAGILVQNVLKFLLNFGXVSFYLGYNAMQDFFPXMSMKPNPQCDDRNCRKQQEEYKKKVAALPKQEVIQEEEEIIHEDNEWGIELVSEVSEEELKNFSGPVPDLPEGIXVAYXIPKK

SEQ ID NO: 29014 - protein, 404 aa, Homo sapiens
  MOD_RES (73)..(73): Selenocysteine
  MOD_RES (88)..(88): Selenocysteine
  MOD_RES (93)..(93): Selenocysteine
  MOD_RES (134)..(134): Selenocysteine
  MOD_RES (152)..(153): Selenocysteine
  MOD_RES (190)..(190): Selenocysteine
  MOD_RES (193)..(193): Selenocysteine
  MOD_RES (201)..(201): Selenocysteine
  MOD_RES (243)..(243): Selenocysteine
  MOD_RES (256)..(257): Selenocysteine
  MOD_RES (278)..(278): Selenocysteine
  MOD_RES (294)..(294): Selenocysteine
  MOD_RES (369)..(369): Selenocysteine
  MOD_RES (373)..(373): Selenocysteine
  MOD_RES (383)..(383): Selenocysteine
  MOD_RES (386)..(386): Selenocysteine
MAESVERLQQRVQELERELAQERSLQVPRSGDGGGGRVRIEKMSSEVVDSNPYSRLMALKRMGIVSDYEKIRXFAVAIVGVGGVGSVXAEMLXRCGIGKLLLFDYDKVELANMNRLFFQPHQAGLSKVQAAEHXLRNINPDVLFEVHNYNIXXVENFQHFMDRISNGGLEEGKPVDLVLSCVDNFEARMXINXACNELGQXWMESGVSENAVSGHIQLIIPGESACFACAPPLVVAANIDEKXLKREGVCAASLPXXMGVVAGILVQNVLKFLLNFGXVSFYLGYNAMQDFFPXMSMKPNPQCDDRNCRKQQEEYKKKVAALPKQEVIQEEEEIIHEDNEWGIELVSEVSEEELKNFSGPVPDLPEGIXVAYXIPKKQEDSVXELXVEDSGESLEDLMAKMKNM

SEQ ID NO: 29015 - protein, 79 aa, Homo sapiens
  MOD_RES (17)..(17): Selenocysteine
  MOD_RES (32)..(32): Selenocysteine
  MOD_RES (37)..(37): Selenocysteine
  MOD_RES (78)..(78): Selenocysteine
MALKRMGIVSDYEKIRXFAVAIVGVGGVGSVXAEMLXRCGIGKLLLFDYDKVELANMNRLFFQPHQAGLSKVQAAEHXL

SEQ ID NO: 29016 - protein, 108 aa, Homo sapiens
  MOD_RES (17)..(17): Selenocysteine
  MOD_RES (32)..(32): Selenocysteine
  MOD_RES (37)..(37): Selenocysteine
  MOD_RES (78)..(78): Selenocysteine
  MOD_RES (96)..(97): Selenocysteine
MALKRMGIVSDYEKIRXFAVAIVGVGGVGSVXAEMLXRCGIGKLLLFDYDKVELANMNRLFFQPHQAGLSKVQAAEHXLRNINPDVLFEVHNYNIXXVENFQHFMDRI

SEQ ID NO: 29017 - protein, 348 aa, Homo sapiens
  MOD_RES (17)..(17): Selenocysteine
  MOD_RES (32)..(32): Selenocysteine
  MOD_RES (37)..(37): Selenocysteine
  MOD_RES (78)..(78): Selenocysteine
  MOD_RES (96)..(97): Selenocysteine
  MOD_RES (134)..(134): Selenocysteine
  MOD_RES (137)..(137): Selenocysteine
  MOD_RES (145)..(145): Selenocysteine
  MOD_RES (187)..(187): Selenocysteine
  MOD_RES (200)..(201): Selenocysteine
  MOD_RES (222)..(222): Selenocysteine
  MOD_RES (238)..(238): Selenocysteine
  MOD_RES (313)..(313): Selenocysteine
  MOD_RES (317)..(317): Selenocysteine
  MOD_RES (327)..(327): Selenocysteine
  MOD_RES (330)..(330): Selenocysteine
MALKRMGIVSDYEKIRXFAVAIVGVGGVGSVXAEMLXRCGIGKLLLFDYDKVELANMNRLFFQPHQAGLSKVQAAEHXLRNINPDVLFEVHNYNIXXVENFQHFMDRISNGGLEEGKPVDLVLSCVDNFEARMXINXACNELGQXWMESGVSENAVSGHIQLIIPGESACFACAPPLVVAANIDEKXLKREGVCAASLPXXMGVVAGILVQNVLKFLLNFGXVSFYLGYNAMQDFFPXMSMKPNPQCDDRNCRKQQEEYKKKVAALPKQEVIQEEEEIIHEDNEWGIELVSEVSEEELKNFSGPVPDLPEGIXVAYXIPKKQEDSVXELXVEDSGESLEDLMAKMKNM

SEQ ID NO: 29018 - protein, 111 aa, Homo sapiens
  MOD_RES (44)..(44): Selenocysteine
  MOD_RES (62)..(63): Selenocysteine
  MOD_RES (100)..(100): Selenocysteine
  MOD_RES (103)..(103): Selenocysteine
  MOD_RES (111)..(111): Selenocysteine
MRSNIKPAKLLLFDYDKVELANMNRLFFQPHQAGLSKVQAAEHXLRNINPDVLFEVHNYNIXXVENFQHFMDRISNGGLEEGKPVDLVLSCVDNFEARMXINXACNELGQX

SEQ ID NO: 29019 - protein, 63 aa, Homo sapiens
  MOD_RES (7)..(7): Selenocysteine
  MOD_RES (9)..(9): Selenocysteine
  MOD_RES (12)..(12): Selenocysteine
  MOD_RES (14)..(14): Selenocysteine
  MOD_RES (22)..(22): Selenocysteine
  MOD_RES (55)..(55): Selenocysteine
MQIFVKXLXGKXIXLEVEPSDXIENVKAKIQDKEGIPPDQQRLIFAGKQLEDGRXLSDYNIQK

SEQ ID NO: 29020 - protein, 128 aa, Homo sapiens
  MOD_RES (7)..(7): Selenocysteine
  MOD_RES (9)..(9): Selenocysteine
  MOD_RES (12)..(12): Selenocysteine
  MOD_RES (14)..(14): Selenocysteine
  MOD_RES (22)..(22): Selenocysteine
  MOD_RES (55)..(55): Selenocysteine
  MOD_RES (66)..(66): Selenocysteine
  MOD_RES (118)..(118): Selenocysteine
MQIFVKXLXGKXIXLEVEPSDXIENVKAKIQDKEGIPPDQQRLIFAGKQLEDGRXLSDYNIQKESXLHLVLRLRGGIIEPSLRQLAQKYNCDKMICRKCYARLHPRAVNCRKKKCGHXNNLRPKKKVK

SEQ ID NO: 29021 - protein, 138 aa, Homo sapiens
  MOD_RES (4)..(4): Selenocysteine
  MOD_RES (37)..(37): Selenocysteine
  MOD_RES (48)..(48): Selenocysteine
  MOD_RES (128)..(128): Selenocysteine
PSDXIENVKAKIQDKEGIPPDQQRLIFAGKQLEDGRXLSDYNIQKESXLHLVLRLRGGIIEPSLRQLAQKYNCDKMICRKYVCSDAWGAVGAAGVGVCPHPPLLSLCRCYARLHPRAVNCRKKKCGHXNNLRPKKKVK

SEQ ID NO: 29022 - protein, 114 aa, Homo sapiens
  MOD_RES (30)..(30): Selenocysteine
  MOD_RES (41)..(41): Selenocysteine
  MOD_RES (77)..(77): Selenocysteine
  MOD_RES (79)..(80): Selenocysteine
VKAKIQDKEGIPPDQQRLIFAGKQLEDGRXLSDYNIQKESXLHLVLRLRGGIIEPSLRQLAQKYNCDKMICRKSVVXPXXCVPRRRSNKVVLSLKGSLLPRPRGPGASIKCPFH

SEQ ID NO: 29023 - protein, 38 aa, Homo sapiens
  MOD_RES (6)..(6): Selenocysteine
  MOD_RES (37)..(37): Selenocysteine
MAAGEXQLYAKVSNKLKSRSSPSLLEPLLAMGFPVHXA
